United States Patent Application Publication US 2007/0054278 A1 - sequence listing, part 12

SEQ ID NO: 72247 - DNA, 201 bp, Homo sapiens
gtcgacctaggaaaaaaggacgaaaacttctacaaaagaaggcagcacagataaaacggcgctatactaatccaataggacgtccaaaaaacaggttaaakaaacaaaacacggtatcaaaaggtcccttcagcaaagttcgaactggccctggaaggggtaggaaacgaaaaatcactctttccagccaatcagcatcat

SEQ ID NO: 72248 - DNA, 201 bp, Homo sapiens
ccaacaccattatggaccctcatgccatgccttatagccattctcctgctgtgacttcctatgcaaccagtgtttctctgtccaatacaggactggctcarctggctccatctcatcccttagctgggactcctcaagcacaagccaccatgacgccacccccaaacttggcatccactaccatgaacctcacatctcctc

SEQ ID NO: 72249 - DNA, 201 bp, Homo sapiens
aaactgataaagcgggcagttgagggcttggcagagtctggtggctcaactttgaaaagcattgaacgttttttgaaaggtcagaaggatgtgtctgcatyattcggaggcagtgctgcctctggctttcaccagcagttacgattggctatcaaacgtgccattggccacggcagactccttaaagatggacctctttat

SEQ ID NO: 72250 - DNA, 201 bp, Homo sapiens
ggagccgggaatgaaatattcttgagttcttacaactttatgacgagacccatgtgtggtgctattgagaaattcattgggaagttggaagacatttcaawcaacaggttgttttggtttctatagtacaattggggtggcattctgttttgtgaaaggaggaaggacttaggccagaaaactcatatgctatggttaact

SEQ ID NO: 72251 - DNA, 201 bp, Homo sapiens
tttcattccatctttaaaattttttatctttgttgtagaatattaaaaactattttaagaaagataaattctctttaaagagatctctagcgtgtgtgaayagagctccagatgcctctaaaagccgcatgtacaaaggaagccacgtctatcctgtctgtttatatttgcttttcctgttttgtaacctctttgtacttt

SEQ ID NO: 72252 - DNA, 201 bp, Homo sapiens
tcatatgctatggttaactggttcccagcctccgagaatcttgttttccatggtgtaaaacttactcagcatcaggataagggataacgactctatggatrtacagaatccttcaccatggtaaaactcgcaaacccgctttatactgagtggattttggaggccatcaaaaaagtgaaaaagcagaaacagcgtccttca

SEQ ID NO: 72253 - DNA, 201 bp, Homo sapiens
gattaacagaaggaagtgagaggctgccccgtcgctacagtgagggtgacagggctgtcctcaggggcttcagtgagagcagcgaggaggaggaggagccrgaaagccctcggtcaagctcgccaccaattctcacaaagcccacgctgaagcgaaagaaaccatttctccaccgaaggaggagagtccgaaagcgcaaac

SEQ ID NO: 72254 - DNA, 201 bp, Homo sapiens
ggggccgctgggggaggaagaacagaaaaacccaggaacgttttggtgataaagattctaaactgctcttggaagagacgtcttcagctcctcaggaacartatggagaatgtggggagaaatcagaagccacccaggaacaatacactgaaagtgaagaacagctggtggcttctgaggagcagccaagccaggacggga

SEQ ID NO: 72255 - DNA, 201 bp, Homo sapiens
gtgtgtcagaagggagatcacggtgtgagtttcgtagctatttaagtgatacatacctctagtttttgtatgtcttttgagatcctgagttcatcccctgwgaatcagagtgcacaagcacctctcctgtgagtggctaatgagaagagggacagaccgaccaccagcacagtagggcagatctggacagcagaatgttat

SEQ ID NO: 72256 - DNA, 201 bp, Homo sapiens
aagagttaatcgaattaaaagaggaggaagagattcctcatagtgagctggatctggaaactgtacaggcagtgcagtctttgactcaagaagaaagcagygagcatgagggcgcctaccaggactgtgaggaaactcttgcggcgtgtcagaccctgcagagttacacccaggctgacgaggaccctcagatgtccatgg

SEQ ID NO: 72257 - DNA, 201 bp, Homo sapiens
tcactcagcagatggccagcatgggcagcagctgcagcatgatgcagcagagcagcgtccagcctgctgccaactgcagcatcaagtcacctcagagctgygtggtggagaggcctcccagtaaccagcagcagcagccgccaccaccgcctccacagcagccacagccgccgccgccacaaccacaaccagcaccacagc

SEQ ID NO: 72258 - DNA, 201 bp, Homo sapiens
agagaagactcagtgagggggttgagccctggcgaggacagctcaagaaaagccctgaggctctgaagtgcagattaacagaaggaagtgagaggctgccmcgtcgctacagtgagggtgacagggctgtcctcaggggcttcagtgagagcagcgaggaggaggaggagccggaaagccctcggtcaagctcgccaccaa

SEQ ID NO: 72259 - DNA, 201 bp, Homo sapiens
ggctgtcgtcctccagcagcctcacccagagcagctgtgtggtcactcagcagatggccagcatgggcagcagctgcagcatgatgcagcagagcagcgtscagcctgctgccaactgcagcatcaagtcacctcagagctgcgtggtggagaggcctcccagtaaccagcagcagcagccgccaccaccgcctccacagc

SEQ ID NO: 72260 - DNA, 201 bp, Homo sapiens
tttccagttaaaatattgctgtagatttagaggaatttttctttggtttattttattttttagaaaacctgatcttctctttttttgggttcattttgttstgggttttggttttcttcacaatcttgaacattttacagtagaactcatctaaaaatggatttggggatggggaaacatgcacaaaatcttttcataatt

SEQ ID NO: 72261 - DNA, 201 bp, Homo sapiens
gcagtgtagtcacagaaactatttctgagaccactgaagtgttagatgaaccttttgaagattctgactccgagaggccaatgccaagattagaacccacrtttgagatcgatgaagaagaggaggaagaggatgaaaatgaacttttccctagagaatacttccgtcgtttgtcttcgcaggatgtactcaggtgtcagt

SEQ ID NO: 72262 - DNA, 201 bp, Homo sapiens
accaatccactggaagaaaagacctggtcgaaaaccaggatttaagttgagtcgggaaatcatgccagtttctactcaagcatgcgtcattgagcccatcrtttccattcctaaagctggacgtaaacccaagatccaggagagtgaagaaactgttgagccaaaagaagacatgcccctacccgaggagaggaaggagga

SEQ ID NO: 72263 - DNA, 201 bp, Homo sapiens
cttttttagatgctaatatgcagaagagtagggaaaagataaaggataaagaggaaaccgagctggattccgaagaggagcagccttcccatgacacgtcygtggtgtcagagcagatggctgggtctgaggacgaccacgaagaagactcccacactaaggaagagttaatcgaattaaaagaggaggaagagattcctc

SEQ ID NO: 72264 - DNA, 201 bp, Homo sapiens; identical to SEQ ID NO: 72261

SEQ ID NO: 72265 - DNA, 201 bp, Homo sapiens; identical to SEQ ID NO: 72246

SEQ ID NO: 72266 - DNA, 201 bp, Homo sapiens; identical to SEQ ID NO: 72262

SEQ ID NO: 72267 - DNA, 201 bp, Homo sapiens; identical to SEQ ID NO: 72248

SEQ ID NO: 72268 - DNA, 201 bp, Homo sapiens; identical to SEQ ID NO: 72253

SEQ ID NO: 72269 - DNA, 201 bp, Homo sapiens; identical to SEQ ID NO: 72254

SEQ ID NO: 72270 - DNA, 201 bp, Homo sapiens
gtgtgtcagaagggagatcacggtgtgagtttcgtagctatttaagtgatacatacctctagtttttgtatgtcttttgagatcctgagttcatcccctgwgaatcagagtgcacaagcacctctcctgtgagtggctaatgagaagagggacagacgggcagatctggacagcagaatgttataacgcaagttcatgtgt

SEQ ID NO: 72271 - DNA, 201 bp, Homo sapiens; identical to SEQ ID NO: 72263

SEQ ID NO: 72272 - DNA, 201 bp, Homo sapiens; identical to SEQ ID NO: 72256

SEQ ID NO: 72273 - DNA, 201 bp, Homo sapiens; identical to SEQ ID NO: 72257

SEQ ID NO: 72274 - DNA, 201 bp, Homo sapiens; identical to SEQ ID NO: 72258

SEQ ID NO: 72275 - DNA, 201 bp, Homo sapiens; identical to SEQ ID NO: 72259

SEQ ID NO: 72276 - DNA, 201 bp, Homo sapiens; identical to SEQ ID NO: 72260

SEQ ID NO: 72277 - DNA, 201 bp, Homo sapiens
atgtttttgagaagctttcttgggcaactggcaaaggaagaaattgctacagctatttactctggagataaaattaaaacattccttattgaggggatggrtaagaatgcttttgagaaaaaatataatactgttggagtgaatatttttcgaactcaccagttgttctgtcaagatgtacttaaattacgtcctggagaa

SEQ ID NO: 72278 - DNA, 201 bp, Homo sapiens
aagaagcaagatacaattttgacacatgatgaactctagcactggtgtatatgagaaggaaggcgaaagcatgacaggaaacctgccgcctgctggggaaktctggagcccctgctgagacgatttggaagtctcgttaagatcagtgacatattctttaattttaaaaaattgtaattatttaaaacagttatttaatgt

SEQ ID NO: 72279 - DNA, 201 bp, Homo sapiens
attagatcatcttgaaaacaagaagcaagatacaattttgacacatgatgaactctagcactggtgtatatgagaaggaaggcgaaagcatgacaggaaayctgccgcctgctggggaagtctggagcccctgctgagacgatttggaagtctcgttaagatcagtgacatattctttaattttaaaaaattgtaattatt

SEQ ID NO: 72280 - DNA, 201 bp, Homo sapiens
tgatgctgaccagattgtgagacatgatctaaaagaacttcgagatttcgatctggatggagctccttatgggtataccccattttgtgatagccgcaggraaatggatggatatcgtttctggaaaacaggatactgggcatcacatcttttaagacggaaataccatatcagtgctttatatgtagtggatctcaagaa

SEQ ID NO: 72281 - DNA, 201 bp, Homo sapiens
gcaattgattttctaatggataggaataatgttgtaccccgtataaatactttgattttgcgtactaaccagcagtacctcaatttaatatctacatcagkaactgctgatgttgaagatttctctactttctttttcttggattcacaagataagagtgctgtaattgcaaagaacatgtattatttaacccaagacgat

SEQ ID NO: 72282 - DNA, 199 bp, Homo sapiens
cgcgccggagcgggacacgcatgcgccggtctggacccggcacccagtaacggactcgagctcctcccaccggaagtgggcagccgcgcagcgggaagwgccggccgaagcgtggcggccacagactgtgggtaccgggtccgagggactcgcgcttttctctccgtgccatggcgccagcgaaagccacgaacgtggt

SEQ ID NO: 72283 - DNA, 201 bp, Homo sapiens
gctttgataaagtgacagaacagcctcctcggggtctgcagttcacactaggcacaaaaaataaacctgctgtggttgatacaatagtgatggcacatcargggtattttcaattaaaagcaaacccaggtgcttggatactgaggttacaccaaggaaaatctgaagatatttatcaaatagttgggcatgaaggaactg

SEQ ID NO: 72284 - DNA, 201 bp, Homo sapiens
aatttttaaaattaaattcacacatttgggaatatacttatgtattagatattcgacattcttctataatgtggattaatgacttagaaaatgatgatttrtatattacatggcctacaagttgccagaaacttctgaagccagtatttcctggaagtgtaccttccataaggcgcaattttcataatttggttctgttta

SEQ ID NO: 72285 - DNA, 201 bp, Homo sapiens
atatcgtttctggaaaacaggatactgggcatcacatcttttaagacggaaataccatatcagtgctttatatgtagtggatctcaagaagttcaggagarttggagcaggtgacaggctcaggagccagtatcaagctctcagtcaagatccaaacagtctttcaaacctagatcaggatctccccaataatatgattta

SEQ ID NO: 72286 - DNA, 201 bp, Homo sapiens
agattgtgagacatgatctaaaagaacttcgagatttcgatctggatggagctccttatgggtataccccattttgtgatagccgcagggaaatggatggrtatcgtttctggaaaacaggatactgggcatcacatcttttaagacggaaataccatatcagtgctttatatgtagtggatctcaagaagttcaggagaa

SEQ ID NO: 72287 - DNA, 201 bp, Homo sapiens
cacagctatttctagaggaattttggcagcttttcttacacagaagaacatgtttttgagaagctttcttgggcaactggcaaaggaagaaattgctacarctatttactctggagataaaattaaaacattccttattgaggggatggataagaatgcttttgagaaaaaatataatactgttggagtgaatatttttcg

SEQ ID NO: 72288 - DNA, 201 bp, Homo sapiens
ggcgccagcgaaagccacgaacgtggtgcggctgctactaggctccacagcgctgtggctttcgcagctcggctccgggacggtcgccgcgtccaagtcgktgactgcccacttggccgcgaagtggcccgagaccccgctgctgctggaggcaagtgaatttatggcagaagaaagtaatgaaaaattttggcagttttt

SEQ ID NO: 72289 - DNA, 201 bp, Homo sapiens
taattcctcacatggctaaagagtatggattccgatatgaactagttcaatataggtggccccgttggcttcgtcaacagactgaaagacagaggattatytggggttacaaaattcttttccttgatgttcttttcccactagcagtggacaaaatcatttttgttgatgctgaccagattgtgagacatgatctaaaag

SEQ ID NO: 72290 - DNA, 201 bp, Homo sapiens
agatttttacttgttggaaaagataacatttagtaatttaggagagaaaattaaaggcattgttgaaaatatgggaatcaacgcaaataacatgagtgacwttattatgaaagttgatgcccttatgtcctctgtgcctaagcgtgcatctcgatatgatgtcacatttcttagggagaatcacagtgttataaagacgaa

SEQ ID NO: 72291 - DNA, 194 bp, Homo sapiens
aggaaggcgaaagcatgacaggaaacctgccgcctgctggggaagtctggagcccctgctgagacgatttggaagtctcgttaagatcagtgacatattcyttaattttaaaaaattgtaattatttaaaacagttatttaatgtattgaatgagtttaagttatataataaatgaccattgagtatttaaaac

SEQ ID NO: 72292 - DNA, 201 bp, Homo sapiens
tctgttttgcgtaacaccaaaacaccagtgaaattctggttgctaaaaaattatctctcaccgacatttaaagaagtaattcctcacatggctaaagagtwtggattccgatatgaactagttcaatataggtggccccgttggcttcgtcaacagactgaaagacagaggattatttggggttacaaaattcttttcctt

SEQ ID NO: 72293 - DNA, 201 bp, Homo sapiens
cttattgaggggatggataagaatgcttttgagaaaaaatataatactgttggagtgaatatttttcgaactcaccagttgttctgtcaagatgtacttarattacgtcctggagaaatgggtattgtcagcaatgggagattcttaggacctttagatgaagatttttatgcagaagatttttacttgttggaaaagata

SEQ ID NO: 72294 - DNA, 201 bp, Homo sapiens
gattgagagtaacaaacaaatgatgcctttgaaagtctgggaactacaagatcttagttttcaagcagcttctcaaataatgtccgctccagtttatgatkccattaaattaatgaaagacatttcacagaacttccccataaaagccagatctctaaccagaattgctgtaaatcaacatatgagagaagaaataaagga

SEQ ID NO: 72295 - DNA, 201 bp, Homo sapiens
gaatgatatgttcttcaatgtcattgctattgttgatccattaacaagagaagcacagaaaatggcacagttgttggttgtacttggcaagattatcaacmtgaagataaagttgttcatgaactgtaggggcaggctttcagaagcccctttagaaagcttttaccgttttgttctggaaccagaactgatgtcaggggc

SEQ ID NO: 72296 - DNA, 201 bp, Homo sapiens
cagtggacaaaatcatttttgttgatgctgaccagattgtgagacatgatctaaaagaacttcgagatttcgatctggatggagctccttatgggtatacyccattttgtgatagccgcagggaaatggatggatatcgtttctggaaaacaggatactgggcatcacatcttttaagacggaaataccatatcagtgctt

SEQ ID NO: 72297 - DNA, 201 bp, Homo sapiens
aaaatcaaaaggatcttcaagttagatttaaaattcagccaggcgatgctcgtctatttataaatggccttcgtgttgatatggatgtttatgacgctttyagtattttggatatgctgaaattagaaggaaaaatgatgaatggccttcgcaatcttgggatcaatggggaagatatgagcaaatttttaaaattaaatt

SEQ ID NO: 72298 - DNA, 201 bp, Homo sapiens
gaccctgggcccgttggtggcccagctccacgcctggtggtatttcagaaacaccaagaacttcccttatgagaggaggccgacctcagcagcttgcatcycgtttggacagggagatttctattatggcaacttgatggttggtggcacaccccataatattttagacttcatcaaagaatatctgaacggagttattca

SEQ ID NO: 72299 - DNA, 180 bp, Homo sapiens
ggagttattcatgacatcaaaaatggactcaatagcacttatgaaaagcaccttaacaaatatttttacctcaataaacccacctagctgttatcaccagmatacagctgggatcttgcattttctcctcctccacagatccaatacgtcaaggtcgcacatgattcccagaggaaatta

SEQ ID NO: 72300 - DNA, 201 bp, Homo sapiens
cggggtggagaccctgggcccgttggtggcccagctccacgcctggtggtatttcagaaacaccaagaacttcccttatgagaggaggccgacctcagcarcttgcatcccgtttggacagggagatttctattatggcaacttgatggttggtggcacaccccataatattttagacttcatcaaagaatatctgaacgg

SEQ ID NO: 72301 - DNA, 201 bp, Homo sapiens
gcaacttgatggttggtggcacaccccataatattttagacttcatcaaagaatatctgaacggagttattcatgacatcaaaaatggactcaatagcacytatgaaaagcaccttaacaaatatttttacctcaataaacccacctagctgttatcaccagcatacagctgggatcttgcattttctcctcctccacaga

SEQ ID NO: 72302 - DNA, 201 bp, Homo sapiens
gttatttcaggaatcaccaagtagaagaacttcggctctcagactggtttcatcctagaaaacgccctgatgttataacgaaaacagactggctcgctccygtcctatgggaagggactttcgacaggcgggtcctggaaaaacattacagaaggcggaatatcactgtgggcctggccgtctttgctactggcaggtttg

SEQ ID NO: 72303 - DNA, 201 bp, Homo sapiens
atccaggacgaggtggacttcctcttcagcatggctgccaaccaggtcttccagaatgagttcggggtggagaccctgggcccgttggtggcccagctccrcgcctggtggtatttcagaaacaccaagaacttcccttatgagaggaggccgacctcagcagcttgcatcccgtttggacagggagatttctattatggc

SEQ ID NO: 72304 - DNA, 201 bp, Homo sapiens
atgcacataggcacacagagatacgcgcacacacacacacaaacgcactcagatttcccggaccctggttttcctcctgtgaccctttcggggccgggctstcaccctaaagaagcagccccgccctggggtggccccaccctctcttgggacctgtcataagtcggaccccgggcgcccggctgcgcagtcccagccgcc

SEQ ID NO: 72305 - DNA, 201 bp, Homo sapiens
gcttggatttgatgtcgtctttaactacaagacggtagagtctttggaagaaaccttgaagaaagcgtctcctgatggttatgattgttattttgataatrtaggtggagagttttcaaacactgttatcggccagatgaagaaatttggaaggattgccatatgtggagccatctctacatataacagaaccggcccact

SEQ ID NO: 72306 - DNA, 194 bp, Homo sapiens
cctgtggaagccggggtgagggagggagagcatcaggataaatagctaatgccttcgggggctaatacctaggtgatgggttgacaggtgaagcaaaccaycatggcacacgtttacctatgtaacaaacctgcacattccacacaattatcccggaactgaaaataaaataaaattaaattaaaaaaaaaagt

SEQ ID NO: 72307 - DNA, 201 bp, Homo sapiens
cttcgggctcctgagcttcaggatggttcgtactaagacatggaccctgaagaagcactttgttggctatcctactaatagtgactttgagttgaagacakctgagctcccacccttaaaaaatggagaggtcctgcttgaagctttgttcctcaccgtggatccctacatgagagttgtggaaagtaaaaatgtagccct

SEQ ID NO: 72308 - DNA, 201 bp, Homo sapiens; identical to SEQ ID NO: 72304

SEQ ID NO: 72309 - DNA, 201 bp, Homo sapiens; identical to SEQ ID NO: 72305

SEQ ID NO: 72310 - DNA, 194 bp, Homo sapiens; identical to SEQ ID NO: 72306

SEQ ID NO: 72311 - DNA, 201 bp, Homo sapiens; identical to SEQ ID NO: 72307

SEQ ID NO: 72312 - DNA, 201 bp, Homo sapiens
taccgctggcaaggagatgcccgccaaaaagctctgaaggacttgctgaaatgggtcttagagcttccctactttgtaattgactgacttcaagcaaatamtcttgtctataaatccatgaagagtgctaagccatcactggaatacattagcgaaaaacttgtatcagggtaaaatccagtacaaggaatatatcattga

SEQ ID NO: 72313 - DNA, 201 bp, Homo sapiens; identical to SEQ ID NO: 72304

SEQ ID NO: 72314 - DNA, 201 bp, Homo sapiens; identical to SEQ ID NO: 72305

SEQ ID NO: 72315 - DNA, 194 bp, Homo sapiens; identical to SEQ ID NO: 72306

SEQ ID NO: 72316 - DNA, 201 bp, Homo sapiens
cttcgggctcctgagcttcaggatggttcgtactaagacatggaccctgaagaagcactttgttggctatcctactaatagtgactttgagttgaagacakctgagctcccacccttaaaaaatggagaggtcctgcttgaagctttgttcctcaccgtggatccctacatgagagtggcagccaaaagattgaaggaagg

SEQ ID NO: 72317 - DNA, 201 bp, Homo sapiens
ttttttaagaagggacaaaaggtgggtgaattttctggagccaataaggaaaagcttgaagccaccattaatgaattagtctaatcatgttttctgaaaayataaccagccattggctatttaaaacttgtaatttttttaatttacaaaaatataaaatatgaagacataaacccagttgccatctgcgtgacaataaaa

SEQ ID NO: 72318 - DNA, 201 bp, Homo sapiens
cgcgcgcccccgccacacgcacgccgggcgtgccagtttataaagggagagagcaagcagcgagtcttgaagctctgtttggtgctttggatccatttccrtcggtccttacagccgctcgtcagactccagcagccaagatggtgaagcagatcgagagcaagactgcttttcaggaagccttggacgctgcaggtgata

SEQ ID NO: 72319 - DNA, 130 bp, Homo sapiens
cccggctcgcaggctccaggggcggggcgwggccggggcgcagcgacgggcgcggaggtccggccgggcgcgcgcgcccccgccacacgcacgccgggcgtgccagtttataaagggagagagcaagcag

SEQ ID NO: 72320 - DNA, 148 bp, Homo sapiens
cccggctcgcaggctccaggggcggggcgtggccggggcgcagcgackggcgcggaggtccggccgggcgcgcgcgcccccgccacacgcacgccgggcgtgccagtttataaagggagagagcaagcagcgagtcttgaagctctgt

SEQ ID NO: 72321 - DNA, 201 bp, Homo sapiens
atttttttaatttacaaaaatataaaatatgaagacataaacccagttgccatctgcgtgacaataaaacattaatgctaacactttttaaaaccgtctcrtgtctgaatagctttcaaaataaatgtgaaatggtcatttaatgtattttcctatattctcaatcactttttagtaaccttgtaggccactgattatttt

SEQ ID NO: 72322 - DNA, 201 bp, Homo sapiens; identical to SEQ ID NO: 72317

SEQ ID NO: 72323 - DNA, 201 bp, Homo sapiens; identical to SEQ ID NO: 72318

SEQ ID NO: 72324 - DNA, 130 bp, Homo sapiens; identical to SEQ ID NO: 72319

SEQ ID NO: 72325 - DNA, 148 bp, Homo sapiens; identical to SEQ ID NO: 72320

SEQ ID NO: 72326 - DNA, 201 bp, Homo sapiens; identical to SEQ ID NO: 72321

SEQ ID NO: 72327 - DNA, 201 bp, Homo sapiens
gttcctctgatccatccaatcattagtagattaaatctttgttttaaacccatcacagtccactattcatccctttttaaaataaccatttaaaaattttytaccctgaattgcattttgaaagggatggttcctaggtaacacaaggtagaaaatttacatctcaaaggcagagaacttacatttcaggcctaaatattg

SEQ ID NO: 72328 - DNA, 201 bp, Homo sapiens
ttcttagatgaatacccagaagcagttagcaagaaagtggaatcaactggtgctgttccagaattcaaagaagagaaactgcagctgcaaccaaaaccacrttctggagctgtggaagaaacatttagaattgttaaggactctctcagtgatgatgttgttaaagccactcaagcaatctatctgtttgaactctccggt

SEQ ID NO: 72329 - DNA, 201 bp, Homo sapiens
gaagtaacctgatgttaaccaatctgctgtgtctactatgctgtttccttgttcctgctagtgctgctttacaaatgcagaccattctatcatacctggcrgggcttctgttttattttgtaggctggatgctacccagttcatgaatcgctaataaaagccaattagatctttacataatttgttgagattttattcttt

SEQ ID NO: 72330 - DNA, 201 bp, Homo sapiens
gtcatcctttgcaaccagatttcttcttagatgaatacccagaagcagttagcaagaaagtggaatcaactggtgctgttccagaattcaaagaagagaarctgcagctgcaaccaaaaccacgttctggagctgtggaagaaacatttagaattgttaaggactctctcagtgatgatgttgttaaagccactcaagcaa

SEQ ID NO: 72331 - DNA, 201 bp, Homo sapiens
aaaactttacaatacatttatgttgaatggaactccaagatctcacctctccatccaggaatggagtccatgtaatcaaagtgaacttaaaaataggacastttcaacaagtcaggagattcacagcaactgatcaaagggagtccagtcaacgtgagcaagcgtgattatgatgaggaagccccctctgctttaatccac

SEQ ID NO: 72332 - DNA, 201 bp, Homo sapiens; identical to SEQ ID NO: 72327

SEQ ID NO: 72333 - DNA, 201 bp, Homo sapiens; identical to SEQ ID NO: 72328

SEQ ID NO: 72334 - DNA, 201 bp, Homo sapiens; identical to SEQ ID NO: 72329

SEQ ID NO: 72335 - DNA, 201 bp, Homo sapiens; identical to SEQ ID NO: 72330

SEQ ID NO: 72336 - DNA, 201 bp, Homo sapiens; identical to SEQ ID NO: 72331

SEQ ID NO: 72337 - DNA, 201 bp, Homo sapiens
ttcttagatgaatacccagaagcagttagcaagaaagtggaatcaactggtgctgttccagaattcaaagaagagaaactgcagctgcaaccaaaaccacrttctggagctgtggaagaaacatttagaattgttaaggactctctcagtgatgatgttgttaaagccactcaagcaatctatctgtttgaactctccgtg

SEQ ID NO: 72338 - DNA, 201 bp, Homo sapiens; identical to SEQ ID NO: 72330

SEQ ID NO: 72339 - DNA, 201 bp, Homo sapiens
ttccttcccatttctccatctgggggatcctgaacgtgcacatcctcagagaagccctcctggggtctccaattctagtttattgccccctcctatcgatsccccagcgcgctcatcgggcctgtggacaaggacaggtttgaagagaggattccctggatcgcggaagggctgcaggaatggcacagccccttccgagga

SEQ ID NO: 72340 - DNA, 201 bp, Homo sapiens
aagaggagattcttgcaattaacaagcctttcaagatgatccccggagtggtggatggggtcttcctgcccaggcacccccaggagctgctggcctctgcygactttcagcctgtccctagcattgttggtgtcaacaacaatgaattcggctggctcatccccaaggtcatgaggatctatgatacccagaaggaaatgg

SEQ ID NO: 72341 - DNA, 201 bp, Homo sapiens
taccacacccacctttcccggcccaagccagcgcaccccgctgactccctgcccagtccaaactccaaggctgggcaaggcactgatccactgctggacaracccggggcagcctctgggtgaacagcagcgtgtccgccggcagcgaaccgagaccagcgagccgaccatgcggctgcacagacttcgtgcgcggctgag

SEQ ID NO: 72342 - DNA, 201 bp, Homo sapiens
acttgtaatcccagctattgggaaggatgagatgggaggatggcttgaggccagaggtttgagaccgaccagccagggcaacacagtgagaccccttctcaaaaaaaaaaaaaaaaaagagagagtgtgtgattagaagctaaataggaaagttttgagcttcaagtcagtgaggagtaaaaaagatttttaaaaagcaaa

SEQ ID NO: 72343 - DNA, 201 bp, Homo sapiens
gggaaggatgagatgggaggatggcttgaggccagaggtttgagaccgaccagccagggcaacacagtgagaccccttctcaaaaaaaaaaaaaaaaaagagagagtgtgtgattagaagctaaataggaaagttttgagcttcaagtcagtgaggagtaaaaaagatttttaaaaagcaaagaaaacaaaatataaggga

SEQ ID NO: 72344 - DNA, 201 bp, Homo sapiens
aaaaaaaaaaaaaaaaagagagagtgtgtgattagaagctaaataggaaagttttgagcttcaagtcagtgaggagtaaaaaagatttttaaaaagcaaaraaaacaaaatataagggaaaaatatgagaaaaataaaaataaaaagagaataataggccaggcactgtggctcatgcccctaatcccagcacttttggga

SEQ ID NO: 72345 - DNA, 201 bp, Homo sapiens
aaaaaaaaaaaagagagagtgtgtgattagaagctaaataggaaagttttgagcttcaagtcagtgaggagtaaaaaagatttttaaaaagcaaagaaaamaaaatataagggaaaaatatgagaaaaataaaaataaaaagagaataataggccaggcactgtggctcatgcccctaatcccagcacttttgggaggtca

SEQ ID NO: 72346 - DNA, 201 bp, Homo sapiens
aggagcctgaagagagacacacagagctgtagctccctgtgccggggaggagggggtgggttcgctgacaggcgagggtcagcctgctgtgcccacacacrcccactaaggagaaagaagttgattccttcattcacttcgccattcattcatacttccgtccatccattcagaaagcatttattaagaatttactcaggc

SEQ ID NO: 72347 - DNA, 201 bp, Homo sapiens
aacagcagcgtgtccgccggcagcgaaccgagaccagcgagccgaccatgcggctgcacagacttcgtgcgcggctgagcgcggtggcctgtgggcttctrctgcttcttgtccggggccagggccaggactcagccagtcccatccggaccacacacacggggcaggtgctggggagtcttgtccatgtgaagggcgcca

SEQ ID NO: 72348 - DNA, 201 bp, Homo sapiens
gaacgtgcacatcctcagagaagccctcctggggtctccaattctagtttattgccccctcctatcgatcccccagcgcgctcatcgggcctgtggacaasgacaggtttgaagagaggattccctggatcgcggaagggctgcaggaatggcacagccccttccgaggatgccaaaggagcccgggcaaaggaaagtggc

SEQ ID NO: 72349 - DNA, 201 bp, Homo sapiens
gaaacgtagaggccagaaccaggtctcagggggcactaaaggcggtcggaggtaatccccacaccgcttcctcctggaagtcaggctggccgggagctccygtatccaggacggttggtcgcctctggcctggcagggatcctagtgtctcgggacctcccggtgacgcgcctgcctcccctgctgcaccataggcccggg

SEQ ID NO: 72350 - DNA, 201 bp, Homo sapiens; identical to SEQ ID NO: 72339

SEQ ID NO: 72351 - DNA, 201 bp, Homo sapiens; identical to SEQ ID NO: 72340

SEQ ID NO: 72352 - DNA, 201 bp, Homo sapiens; identical to SEQ ID NO: 72341

SEQ ID NO: 72353 - DNA, 201 bp, Homo sapiens; identical to SEQ ID NO: 72342

SEQ ID NO: 72354 - DNA, 201 bp, Homo sapiens; identical to SEQ ID NO: 72343

SEQ ID NO: 72355 - DNA, 201 bp, Homo sapiens; identical to SEQ ID NO: 72344

SEQ ID NO: 72356 - DNA, 201 bp, Homo sapiens; identical to SEQ ID NO: 72345

SEQ ID NO: 72357 - DNA, 201 bp, Homo sapiens; identical to SEQ ID NO: 72346

SEQ ID NO: 72358 - DNA, 201 bp, Homo sapiens; identical to SEQ ID NO: 72347

SEQ ID NO: 72359 - DNA, 201 bp, Homo sapiens; identical to SEQ ID NO: 72348

SEQ ID NO: 72360 - DNA, 201 bp, Homo sapiens; identical to SEQ ID NO: 72349

SEQ ID NO: 72361 - DNA, 201 bp, Homo sapiens; identical to SEQ ID NO: 72339

SEQ ID NO: 72362 - DNA, 201 bp, Homo sapiens; identical to SEQ ID NO: 72340

SEQ ID NO: 72363 - DNA, 201 bp, Homo sapiens; identical to SEQ ID NO: 72341

SEQ ID NO: 72364 - DNA, 201 bp, Homo sapiens; identical to SEQ ID NO: 72342

SEQ ID NO: 72365 - DNA, 201 bp, Homo sapiens; identical to SEQ ID NO: 72343

SEQ ID NO: 72366 - DNA, 201 bp, Homo sapiens; identical to SEQ ID NO: 72344

SEQ ID NO: 72367 - DNA, 201 bp, Homo sapiens; identical to SEQ ID NO: 72345

SEQ ID NO: 72368 - DNA, 201 bp, Homo sapiens; identical to SEQ ID NO: 72346

SEQ ID NO: 72369 - DNA, 201 bp, Homo sapiens; identical to SEQ ID NO: 72347

SEQ ID NO: 72370 - DNA, 201 bp, Homo sapiens; identical to SEQ ID NO: 72348

SEQ ID NO: 72371 - DNA, 201 bp, Homo sapiens
ttcaggttagcgaccccgagagtacagtggctgtggctttcacaccaaccattccgcactgcagcatggccacccttattggtctgtccatcaaggtcaarcttctgcgctcccttcctcagcgtttcaagatggacgtgcacattactccggggacccatgcctcagagcatgcagtgaacaagcaacttgcagataagg

SEQ ID NO: 72372 - DNA, 201 bp, Homo sapiens
cccgggcctatggtgcagcaggggaggcaggcgcgtcaccgggaggtcccgagacactaggatccctgccaggccagaggcgaccaaccgtcctggatacrggagctcccggccagcctgacttccaggaggaagcggtgtggggattacctccgaccgcctttagtgccccctgagacctggttctggcctctacgtttc

SEQ ID NO: 72373 - DNA, 201 bp, Homo sapiens
tccatctgattcctctggtcatcagtggcagttcatagcaataaacctgcccggtagtgccatcccaccccacttcctggagtcaggctcccataggattrtggggttggtacttgggtgtgaaggaaacatcctcccccttgttttcaacctagtaggccagtttagaaacaagccacagggaaggtgttgtcagtcatt

SEQ ID NO: 72374 - DNA, 201 bp, Homo sapiens
aggaaggctgggctgctcagtcccttcatgggtcttgctaatggaaagtagcatatatgtgctttaaaaatattaatccttttgaaaagaactgagaagaraaatgtataattttatcccatttttaatattttggtctagcaacttgtgatacatagatgacaattttgtgagtttttcaaatgtgtgtacagatttttg

SEQ ID NO: 72375 - DNA, 201 bp, Homo sapiens
gaaacatgcacgacctacagcaagtgggacaacatccaggagctcctgggccaccctgtggagaagcctgttgtcctgcacaggtcttcctccccaaacamcaccaacccatttggttccacattctgctttggtcttcagcgaatgatctttgaggtcatgcagaacaaccacattgcctcggtgaccctgtatggcccc

SEQ ID NO: 72376 - DNA, 201 bp, Homo sapiens
tcagtcattactccctgccaggctggtttatgttagccatttcagatgccagtcaaccatgttattttcttctcccccacccccaacagtgtacaactccrctgagcagctcttccatctcaacttcagaggactgtctttctcttttcagttagactcatggactgaggctccaaagtatgagcccaattttgcccatgg

SEQ ID NO: 72377 - DNA, 201 bp, Homo sapiens; identical to SEQ ID NO: 72374

SEQ ID NO: 72378 - DNA, 201 bp, Homo sapiens; identical to SEQ ID NO: 72375

SEQ ID NO: 72379 - DNA, 201 bp, Homo sapiens
aaaatattgtggcgtgcattttaattctcaggccatagctcctaccattgaacagattgaccagtcttttggcgcaacccatcctggagtgtacaactccrctgagcagctcttccatctcaacttcagaggactgtctttctcttttcagttagactcatggactgaggctccaaagtatgagcccaattttgcccatgg

SEQ ID NO: 72380 - DNA, 201 bp, Homo sapiens; identical to SEQ ID NO: 72374

SEQ ID NO: 72381 - DNA, 201 bp, Homo sapiens; identical to SEQ ID NO: 72375

SEQ ID NO: 72382 - DNA, 201 bp, Homo sapiens; identical to SEQ ID NO: 72379

SEQ ID NO: 72383 - DNA, 201 bp, Homo sapiens; identical to SEQ ID NO: 72374

SEQ ID NO: 72384 - DNA, 201 bp, Homo sapiens; identical to SEQ ID NO: 72375

SEQ ID NO: 72385 - DNA, 201 bp, Homo sapiens; identical to SEQ ID NO: 72379

SEQ ID NO: 72386 - DNA, 201 bp, Homo sapiens
caggctgggtgcttgctcagtcccttcatgggtcttgctaatggaaagtagcatatatgtgctttaaaaatattaatccttttgaaaagaactgagaagaraaatgtataattttatcccatttttaatattttggtctagcaacttgtgatacatagatgacaattttgtgagtttttcaaatgtgtgtacagatttttg

SEQ ID NO: 72387 - DNA, 201 bp, Homo sapiens; identical to SEQ ID NO: 72375

SEQ ID NO: 72388 - DNA, 201 bp, Homo sapiens; identical to SEQ ID NO: 72379

SEQ ID NO: 72389 - DNA, 201 bp, Homo sapiens
catcatctctggcccttctgctgatgcccccatatttgtgatgggcatgaaccataagaaatacaaaaacagcctcaagattgtcagcaatgcctcctacrctaccaactgcttagcctccctggccaaggtcatccatgacaactttggcattatggagggactcatgaccacagtccatggccttcactgccacactgc

SEQ ID NO: 72390 - DNA, 201 bp, Homo sapiens
tgcagtggccctgtttctgggaatgtgtgtggttcataactttaaaggaacgcaaggatctccttccaaacccaagcctgaggatccccgtggagtacccytaatggctttcccaaggatagaaagccctctggaaaccttaagtgcacagaatcactctgcgtccatgaccgaagttacctgagacgactgatgtgtcac

SEQ ID NO: 72391 - DNA, 201 bp, Homo sapiens
tttacagtttgcacagtattattttacagaaaaggaatcagagaatctacaacatagggccccagaacaacagtttcactttgtggcttttaattattctrgaattttaactgcatctcatttttctagcatggtgagaactaatatgtaactcctttgattgaaggagctcttttgtccgtacctatcagaatgttttct

SEQ ID NO: 72392 - DNA, 201 bp, Homo sapiens
ttgctggtttcatcctgggcactgcagtggccctgtttctgggaatgtgtgtggttcataactttaaaggaacgcaaggatctccttccaaacccaagccygaggatccccgtggagtacccctaatggctttcccaaggatagaaagccctctggaaaccttaagtgcacagaatcactctgcgtccatgaccgaagtta

SEQ ID NO: 72393 - DNA, 201 bp, Homo sapiens
tgctactgacatttttgtaaacgccggacaagtggtcactgggcacttaacgccatacttcctgactgtgtgcaagccaaactacaccagtgcagactgcyaagcgcaccaccagtttataaacaatgggaacatttgtactggggacctggaagtgatagaaaaggctcggagatcctttccctccaaacacgctgctct

SEQ ID NO: 72394 - DNA, 201 bp, Homo sapiens
cttgttcaagcgtgcattgaagaaccacatttattcaatggttgacgttgttttgtgatatttgtacacaaattttcttttctcagttttataaacacagdatataacaattcactttaaacttttattaccacagttgctgcctcctccagaatttttgaattttaataaaaggcaaacttttgagctgcaggaaggaca

SEQ ID NO: 72395 - DNA, 201 bp, Homo sapiens; identical to SEQ ID NO: 72390

SEQ ID NO: 72396 - DNA, 148 bp, Homo sapiens
caattctctaggttgcaaattgggaggattaggaacaagtaagagagwtccatgcaggatggacaagaaaaaaaagttttataccaaaaattgtatttcatggcattagggcagtctactggggtaaggcactatgcagtactaggca

SEQ ID NO: 72397 - DNA, 201 bp, Homo sapiens; identical to SEQ ID NO: 72391

SEQ ID NO: 72398 - DNA, 201 bp, Homo sapiens; identical to SEQ ID NO: 72392

SEQ ID NO: 72399 - DNA, 201 bp, Homo sapiens; identical to SEQ ID NO: 72393

SEQ ID NO: 72400 - DNA, 201 bp, Homo sapiens; identical to SEQ ID NO: 72394

SEQ ID NO: 72401 - DNA, 201 bp, Homo sapiens; identical to SEQ ID NO: 72390

SEQ ID NO: 72402 - DNA, 201 bp, Homo sapiens; identical to SEQ ID NO: 72391

SEQ ID NO: 72403 - DNA, 201 bp, Homo sapiens; identical to SEQ ID NO: 72392

SEQ ID NO: 72404 - DNA, 201 bp, Homo sapiens; identical to SEQ ID NO: 72393

SEQ ID NO: 72405 - DNA, 201 bp, Homo sapiens; identical to SEQ ID NO: 72394

SEQ ID NO: 72406 - DNA, 201 bp, Homo sapiens; identical to SEQ ID NO: 72390

SEQ ID NO: 72407 - DNA, 147 bp, Homo sapiens
aattctctaggttgcaaattgggaggattaggaacaagtaagagagwtccatgcaggatggacaagaaaaaaaagttttataccaaaaattgtatttcatggcattagggcagtctactggggtaaggcactatgcagtactaggca

SEQ ID NO: 72408 - DNA, 201 bp, Homo sapiens; identical to SEQ ID NO: 72391

SEQ ID NO: 72409 - DNA, 201 bp, Homo sapiens; identical to SEQ ID NO: 72392

SEQ ID NO: 72410 - DNA, 201 bp, Homo sapiens; identical to SEQ ID NO: 72393

SEQ ID NO: 72411 - DNA, 201 bp, Homo sapiens; identical to SEQ ID NO: 72394

SEQ ID NO: 72412 - DNA, 188 bp, Homo sapiens
gagtggatcacccgtacctgtcgaaagggctaggatgagatcgtgggtcacaggcccgagccgtgaactctgtggctgcctccaccagaggtttccatctrccctactagcattggctgccctgggggacgggctgtagttctagaacctgattttaactcaggaataaagactttctgcggtcagtg

SEQ ID NO: 72413 - DNA, 188 bp, Homo sapiens; identical to SEQ ID NO: 72412

SEQ ID NO: 72414 - DNA, 201 bp, Homo sapiens
aggtgctggccttccaacagcctggctctgtggctgtggggctgagtggcatcatggcggctcagaaagatctctgggacgccattgtgattggggcgggkatccagggctgcttcactgcataccacctggccaaacacaggaagaggatcctcctgctggagcagttctttctaccacactcccgaggaagctcccatg

SEQ ID NO: 72415 - DNA, 201 bp, Homo sapiens
agatgatcagggagaaggctgcaccagtctcattggattcttcacaccagctggtgctgaaggttcaggggttgaagttgaaagaagcctgtggggtcctycataaaggactcaaggtgctggccttccaacagcctggctctgtggctgtggggctgagtggcatcatggcggctcagaaagatctctgggacgccattg

SEQ ID NO: 72416 - DNA, 201 bp, Homo sapiens
agctccagctcagatgatcagggagaaggctgcaccagtctcattggattcttcacaccagctggtgctgaaggttcaggggttgaagttgaaagaagccygtggggtcctccataaaggactcaaggtgctggccttccaacagcctggctctgtggctgtggggctgagtggcatcatggcggctcagaaagatctctg

SEQ ID NO: 72417 - DNA, 201 bp, Homo sapiens
tctttgcttgcctttgcctttgaggctctgtggctgtggggctgagtggcatcatggcggctcagaaagatctctgggacgccattgtgattggggcgggkatccagggctgcttcactgcataccacctggccaaacacaggaagaggatcctcctgctggagcagttctttctaccacactcccgaggaagctcccatg

SEQ ID NO: 72418 - DNA, 201 bp, Homo sapiens
tacaacattcttcaacgtttcgtcttctacactgacatctaaatacagaggtgaatctgagaagttagttcgtctgttgtttgagatggctagattttatkcccctaccacgatcttcattgatgagatagattctatctgcagtcgaagaggaacctctgatgaacatgaggcaagtcgcagggtcaagtctgaactgct

SEQ ID NO: 72419 - DNA, 201 bp, Homo sapiens
tattggctgctactaatttcccgtgggacattgatgaagctttgcgaagaaggttagaaaaaaggatatatatacctctcccaacagcaaaaggaagagcygagcttctgaagatcaaccttcgtgaggtcgaattagatcctgatattcaactggaagatatagccgagaagattgagggctattctggtgctgacatca

SEQ ID NO: 72420 - DNA, 201 bp, Homo sapiens
tgatgcccctgtgcccactggcccacgccatgcagccccagtccgttctgcacagcggctacttccacccactacttcgggcctggcagacagccaccacyaccctcaatgcctccaacctcatctaccccatctttgtcacggatgttcctgatgacatacagcctatcaccagcctcccaggagtggccaggtatggtg

SEQ ID NO: 72421 - DNA, 201 bp, Homo sapiens
cagccaatgccccaggagccctcggttccaaccaactgatgcccctgtgcccactggcccacgccatgcagccccagtccgttctgcacagcggctacttscacccactacttcgggcctggcagacagccaccaccaccctcaatgcctccaacctcatctaccccatctttgtcacggatgttcctgatgacatacagc

SEQ ID NO: 72422 - DNA, 201 bp, Homo sapiens
tcaatgcctccaacctcatctaccccatctttgtcacggatgttcctgatgacatacagcctatcaccagcctcccaggagtggccaggtatggtgtgaascggctggaagagatgctgaggcccttggtggaagagggcctacgctgtgtcttgatctttggcgtccccagcagagttcccaaggacgagcggggttccg

SEQ ID NO: 72423 - DNA, 201 bp, Homo sapiens
cccagctattgaggcaatccatctgttgaggaagaccttccccaacctcctggtggcctgtgatgtctgcctgtgtccctacacctcccatggtcactgcrggctcctgagtgaaaacggagcattccgggctgaggagagccgccagcggctggctgaggtggcattggcgtatgccaaggcaggatgtcaggtggtagc

SEQ ID NO: 72424 - DNA, 201 bp, Homo sapiens
ccctttccgggatgcagctaagtcaagcccagcttttggggaccgccgctgctaccagctgccccctggagcacgaggcctggctctccgagctgtggacygggatgtacgggaaggagctgacatgctcatggtgaagccgggaatgccctacctggacatcgtgcgggaggtaaaggacaagcaccctgacctccctct

SEQ ID NO: 72425 - DNA, 201 bp, Homo sapiens
ctccctctcgccgtgtaccacgtctctggagagtttgccatgctgtggcatggagcccaggccggggcatttgatctcaaggctgccgtactggaggccaygactgccttccgcagagcaggtgctgacatcatcatcacctactacacaccgcagctgctgcagtggctgaaggaggaatgatggagacagtgccaggcc

SEQ ID NO: 72426 - DNA, 201 bp, Homo sapiens
ggatgtacgggaaggagctgacatgctcatggtgaagccgggaatgccctacctggacatcgtgcgggaggtaaaggacaagcaccctgacctccctctcrccgtgtaccacgtctctggagagtttgccatgctgtggcatggagcccaggccggggcatttgatctcaaggctgccgtactggaggccatgactgcctt

SEQ ID NO: 72427 - DNA, 165 bp, Homo sapiens
gcaggtgctgacatcatcatcacctactacacaccgcagctgctgcagtggctgaaggaggaatgatggagacagtgccaggcccaagaactagaactttmaaacgttcccggggcctcagacaactcacatgctagcggggcccagcagccctgggtggttttg

SEQ ID NO: 72428 - DNA, 201 bp, Homo sapiens
tccatctgttgaggaagaccttccccaacctcctggtggcctgtgatgtctgcctgtgtccctacacctcccatggtcactgcgggctcctgagtgaaaayggagcattccgggctgaggagagccgccagcggctggctgaggtggcattggcgtatgccaaggcaggatgtcaggtggtagccccgtcggacatgatgg

SEQ ID NO: 72429 - DNA, 201 bp, Homo sapiens
ccaccaccctcaatgcctccaacctcatctaccccatctttgtcacggatgttcctgatgacatacagcctatcaccagcctcccaggagtggccaggtayggtgtgaagcggctggaagagatgctgaggcccttggtggaagagggcctacgctgtgtcttgatctttggcgtccccagcagagttcccaaggacgagc

SEQ ID NO: 72430 - DNA, 201 bp, Homo sapiens
aggacgagcggggttccgcagctgactccgaggagtccccagctattgaggcaatccatctgttgaggaagaccttccccaacctcctggtggcctgtgaygtctgcctgtgtccctacacctcccatggtcactgcgggctcctgagtgaaaacggagcattccgggctgaggagagccgccagcggctggctgaggtgg

SEQ ID NO: 72431 - DNA, 201 bp, Homo sapiens
gaagccgggaatgccctacctggacatcgtgcgggaggtaaaggacaagcaccctgacctccctctcgccgtgtaccacgtctctggagagtttgccatgytgtggcatggagcccaggccggggcatttgatctcaaggctgccgtactggaggccatgactgccttccgcagagcaggtgctgacatcatcatcaccta

SEQ ID NO: 72432 - DNA, 201 bp, Homo sapiens
ctgcctgtgtccctacacctcccatggtcactgcgggctcctgagtgaaaacggagcattccgggctgaggagagccgccagcggctggctgaggtggcaytggcgtatgccaaggcaggatgtcaggtggtagccccgtcggacatgatggatggacgcgtggaagccatcaaagaggccctgatggcacatggacttgg

SEQ ID NO: 72433 - DNA, 201 bp, Homo sapiens
ggatcttggggcctgagaagccttggaacgcttctggcagcagagctgggtgtgggaatgaggcctagatcgatatccctgggttagagttgaaatttgcygcaattccactggaaggcatttcccacgaggccagaggttgccaggctgcctgaggtctcctattctactctgaaccataaacccagagaagaattactc

SEQ ID NO: 72434 - DNA, 201 bp, Homo sapiens
ctgcttttagaactgtgccctcatgccctcttcctgctcacatgctagcggggcccagcagccctgggtggttttgccagcatgctaactcttgtaactcrcagctgcatcctatgagctctcccaagcttccccgcccctcccctgggtcagccgtgaggcccacctttgccaccctcagctctttcctctggtgtggct

SEQ ID NO: 72435 - DNA, 201 bp, Homo sapiens; identical to SEQ ID NO: 72428

SEQ ID NO: 72436 - DNA, 201 bp, Homo sapiens; identical to SEQ ID NO: 72432

SEQ ID NO: 72437 - DNA, 201 bp, Homo sapiens; identical to SEQ ID NO: 72420

SEQ ID NO: 72438 - DNA, 201 bp, Homo sapiens; identical to SEQ ID NO: 72422

SEQ ID NO: 72439 - DNA, 201 bp, Homo sapiens
ccaggctgcctgaggtctcctattctactctgaaccataaacccagagaagaattactcattaaccagcataaatactgcctgaggatcaaaactcagagrcaaagagggagttcctgactgctagaggtgccaccaccacaaacactttttattcaggagatactttttgagaatctctgctctgttcctaggttcagtg

SEQ ID NO: 72440 - DNA, 201 bp, Homo sapiens; identical to SEQ ID NO: 72424

SEQ ID NO: 72441 - DNA, 139 bp, Homo sapiens
tcatagcttagcctagcctgccttaaacatgctcagaacacttacattagcctacagtgggcaaaactatccaacacaaaatctatattgtaataaagttrtaaagaattttgaataaaaattcaatatttgaagtaca

SEQ ID NO: 72442 - DNA, 201 bp, Homo sapiens
cacaccgcagctgctgcagtggctgaaggaggaatgatggagacagtgccaggcccaagaactagaactttaaaacgttcccggggcctcagacaagtgamaaccaaagtaaatgctgcttttagaactgtgccctcatgccctcttcctgctcacatgctagcggggcccagcagccctgggtggttttgccagcatgct

SEQ ID NO: 72443 - DNA, 201 bp, Homo sapiens; identical to SEQ ID NO: 72426

SEQ ID NO: 72444 - DNA, 201 bp, Homo sapiens
gtagattcgatgtgaaggatgaatctggcttgaccttctgggtggctgatgggccatttactgagatggggcagcctggaagaggaacagaagcagggtckgggtggagggagaatactaaacttagcttgagacattttgcaataaggaagctatatctagagtgcttatgtgactcacctaaggccactcaacaagttt

SEQ ID NO: 72445 - DNA, 201 bp, Homo sapiens
gcaggtgctgacatcatcatcacctactacacaccgcagctgctgcagtggctgaaggaggaatgatggagacagtgccaggcccaagaactagaactttmaaacgttcccggggcctcagacaagtgaaaaccaaagtaaatgctgcttttagaactgtgccctcatgccctcttcctgctcacatgctagcggggccca

SEQ ID NO: 72446 - DNA, 201 bp, Homo sapiens; identical to SEQ ID NO: 72430

SEQ ID NO: 72447 - DNA, 201 bp, Homo sapiens; identical to SEQ ID NO: 72421

SEQ ID NO: 72448 - DNA, 201 bp, Homo sapiens; identical to SEQ ID NO: 72423

SEQ ID NO: 72449 - DNA, 201 bp, Homo sapiens; identical to SEQ ID NO: 72425

SEQ ID NO: 72450 - DNA, 201 bp, Homo sapiens
ccttttcagagtgactcaatcaaatttgtagtttgtaaaagtattttaacagctctgcggcaaagtgcaaatgaaaagtcttgatggcatggactggagcrgggacagtggggatggagaaaggggaatggattgtggatgtgtttagaaggtagattcgatgtgaaggatgaatctggcttgaccttctgggtggctgat

SEQ ID NO: 72451 - DNA, 201 bp, Homo sapiens; identical to SEQ ID NO: 72429

SEQ ID NO: 72452 - DNA, 201 bp, Homo sapiens; identical to SEQ ID NO: 72431

SEQ ID NO: 72453 - DNA, 201 bp, Homo sapiens; identical to SEQ ID NO: 72433

SEQ ID NO: 72454 - DNA, 201 bp, Homo sapiens; identical to SEQ ID NO: 72434

SEQ ID NO: 72455 - DNA, 201 bp, Homo sapiens; identical to SEQ ID NO: 72428

SEQ ID NO: 72456 - DNA, 201 bp, Homo sapiens; identical to SEQ ID NO: 72432

SEQ ID NO: 72457 - DNA, 201 bp, Homo sapiens; identical to SEQ ID NO: 72420

SEQ ID NO: 72458 - DNA, 201 bp, Homo sapiens; identical to SEQ ID NO: 72422

SEQ ID NO: 72459 - DNA, 201 bp, Homo sapiens; identical to SEQ ID NO: 72439

SEQ ID NO: 72460 - DNA, 201 bp, Homo sapiens; identical to SEQ ID NO: 72424

SEQ ID NO: 72461 - DNA, 139 bp, Homo sapiens; identical to SEQ ID NO: 72441

SEQ ID NO: 72462 - DNA, 201 bp, Homo sapiens; identical to SEQ ID NO: 72442

SEQ ID NO: 72463 - DNA, 201 bp, Homo sapiens; identical to SEQ ID NO: 72426

SEQ ID NO: 72464 - DNA, 201 bp, Homo sapiens; identical to SEQ ID NO: 72444

SEQ ID NO: 72465 - DNA, 201 bp, Homo sapiens; identical to SEQ ID NO: 72445

SEQ ID NO: 72466 - DNA, 201 bp, Homo sapiens; identical to SEQ ID NO: 72430

SEQ ID NO: 72467 - DNA, 201 bp, Homo sapiens; identical to SEQ ID NO: 72421

SEQ ID NO: 72468 - DNA, 201 bp, Homo sapiens; identical to SEQ ID NO: 72423

SEQ ID NO: 72469 - DNA, 201 bp, Homo sapiens; identical to SEQ ID NO: 72425

SEQ ID NO: 72470 - DNA, 201 bp, Homo sapiens; identical to SEQ ID NO: 72450

SEQ ID NO: 72471 - DNA, 201 bp, Homo sapiens; identical to SEQ ID NO: 72429

SEQ ID NO: 72472 - DNA, 201 bp, Homo sapiens; identical to SEQ ID NO: 72431

SEQ ID NO: 72473 - DNA, 201 bp, Homo sapiens
acctccctgactgggggtatcggcaactggagatcgtcggggagaagctgtcccggggctaccacgggagcacggtgtggaacgtggaggagcaccgatayggcgcgagccaggagcagagggagcgggaacgggagctgcactcacctgcgcaggtggacgtcagcaggaacctcagcttcatggcgagattctcggagc

SEQ ID NO: 72474 - DNA, 201 bp, Homo sapiens
tgacctgttaccccttcaaagacgtcaataactggtggattgtaaaggatcccaggaggcaccagctggtggtgagcagccctccgagacctgtgaggcayggggacatggtgcagctggtccacggcatgaccacccgctccctgaacacgcatgatgttgcagcccccctgagcccccattcacaggaggtctcctgct

SEQ ID NO: 72475 - DNA, 201 bp, Homo sapiens
cgcatgatgttgcagcccccctgagcccccattcacaggaggtctcctgctacattgactataacatctccatgcccgcccagaacctctggagactggarattgtgaacagaggatctgacacagacgtctggaagaccatcctctcagaggtccgctttgtgcacgtgaacacttccgctgtcttaaagctgagcgggg

SEQ ID NO: 72476 - DNA, 201 bp, Homo sapiens
agttgtcagaacccagccacagggctcagcccccttcccccacgtcacgtctgcatcactactgtgggtgagcctggacggacgggggctggggctgcccrtggcagcggcaagggatgctttccagagacagccaccacgcaggagggaggatcaccccaggcaacccagacacgggtgttcacatgtgaggctgtgagc

SEQ ID NO: 72477 - DNA, 201 bp, Homo sapiens
gcatgtcattgtctatgacagcgtcaagactggcccttggcaccgtgctgtgtggaaaccctcccctctgagactccactgagacgtggctgagtgaaatyttcctcgtcagtggtcaaggtgtgtcatccatacagctccatgcctttgtcttttttaaatgtaattaaaaaaggaaccaactggcgtttgtagttggtg

SEQ ID NO: 72478 - DNA, 201 bp, Homo sapiens
gcagctgtccatgcctggcacctgcttggagaccagactttgtccaatgtaggtgctgatgtccagtgctgcatgaggccggcctgtatggggcagatgcrgatgtcacagggggtctgtgtgttctgtcacttgctcgcccgagcagtggctttgctggtcatcccggtcgtcctgtacttactgttcttctacgtccac

SEQ ID NO: 72479 - DNA, 201 bp, Homo sapiens
gcagggtggagtttgatctggcagacccgatcctccttcatgaacacccagcaacctgagcaagtcccggccctgccctcagcgagcccggcaggcgtccygggacagctcagtgttggagggccacctgaaccacgagccagggctggggcttgcatgtcattgtctatgacagcgtcaagactggcccttggcaccgtg

SEQ ID NO: 72480 - DNA, 201 bp, Homo sapiens
tctacgtccacttgattctagtcttccgctctgggccccacgaccaaatcatgtccagtgccttccaggccagcttagagggaggactagctcggatcacycagggtcagccactggaggtggcctttgggtcccaggtcactctgaggaacgtctttgggaaacctgtgccctgctggcttcattcccaccaggacacct

SEQ ID NO: 72481 - DNA, 201 bp, Homo sapiens
ccacgaccaaatcatgtccagtgccttccaggccagcttagagggaggactagctcggatcacccagggtcagccactggaggtggcctttgggtcccagrtcactctgaggaacgtctttgggaaacctgtgccctgctggcttcattcccaccaggacacctaccccatgatatatgagaacggccgaggcagctccca

SEQ ID NO: 72482 - DNA, 201 bp, Homo sapiens
agcagaccagggcctggtccttgctaattgctgcagggtggagtttgatctggcagacccgatcctccttcatgaacacccagcaacctgagcaagtcccrgccctgccctcagcgagcccggcaggcgtcccgggacagctcagtgttggagggccacctgaaccacgagccagggctggggcttgcatgtcattgtcta

SEQ ID NO: 72483 - DNA, 201 bp, Homo sapiens
aaagttaattttttctcgacaataaagatattccgtgtcttcacccctgaactaagacacagggagtatttcagaggccagcgtaggagtcatcgacaacraaaagccgagaacccagggccagcagtggagcctcagcagaccagggcctggtccttgctaattgctgcagggtggagtttgatctggcagacccgatcc

SEQ ID NO: 72484 - DNA, 201 bp, Homo sapiens
gggtgtgttcacgtacgtgctcgtgctgggtgttgcagctgtccatgcctggcacctgcttggagaccagactttgtccaatgtaggtgctgatgtccagkgctgcatgaggccggcctgtatggggcagatgcggatgtcacagggggtctgtgtgttctgtcacttgctcgcccgagcagtggctttgctggtcatccc

SEQ ID NO: 72485 - DNA, 201 bp, Homo sapiens
cctgctggcttcattcccaccaggacacctaccccatgatatatgagaacggccgaggcagctcccaccagcaacaggtgacctgttaccccttcaaagaygtcaataactggtggattgtaaaggatcccaggaggcaccagctggtggtgagcagccctccgagacctgtgaggcacggggacatggtgcagctggtcc

SEQ ID NO: 72486 - DNA, 201 bp, Homo sapiens
cgtgctgggtgttgcagctgtccatgcctggcacctgcttggagaccagactttgtccaatgtaggtgctgatgtccagtgctgcatgaggccggcctgtrtggggcagatgcggatgtcacagggggtctgtgtgttctgtcacttgctcgcccgagcagtggctttgctggtcatcccggtcgtcctgtacttactgtt

SEQ ID NO: 72487 - DNA, 201 bp, Homo sapiens
tgcagctgtccatgcctggcacctgcttggagaccagactttgtccaatgtaggtgctgatgtccagtgctgcatgaggccggcctgtatggggcagatgyggatgtcacagggggtctgtgtgttctgtcacttgctcgcccgagcagtggctttgctggtcatcccggtcgtcctgtacttactgttcttctacgtcca

SEQ ID NO: 72488 - DNA, 201 bp, Homo sapiens
tgacgaagtatattatgggcagtacatctctttttacatgaaacaaatcttcttcttggatgacagtgggccgccatttggccacatggtgctggccttgrgaggttatttaggaggattcgatggcaattttttgtggaacagaattggagcagaatacagtagcaacgtgcctgtgtggtccctgcgcctgctgccagc

SEQ ID NO: 72489 - DNA, 201 bp, Homo sapiens
gctggtcatcccggtcgtcctgtacttactgttcttctacgtccacttgattctagtcttccgctctgggccccacgaccaaatcatgtccagtgccttcyaggccagcttagagggaggactagctcggatcacccagggtcagccactggaggtggcctttgggtcccaggtcactctgaggaacgtctttgggaaacc

SEQ ID NO: 72490 - DNA, 201 bp, Homo sapiens
atatgagaacggccgaggcagctcccaccagcaacaggtgacctgttaccccttcaaagacgtcaataactggtggattgtaaaggatcccaggaggcacyagctggtggtgagcagccctccgagacctgtgaggcacggggacatggtgcagctggtccacggcatgaccacccgctccctgaacacgcatgatgttgc

SEQ ID NO: 72491 - DNA, 201 bp, Homo sapiens
ccgtcggcccagtcggacggttccgaggcgttgccgggagccgggcgcggctctgtgtggactcggagaaacgcggggcgtctgcctgagcccgcttttckacaagatgtggggatttttgaagcgccctgtagtggtgacggctgacatcaacttgagccttgtggccctgactgggatggggttactgagccggctgtg

SEQ ID NO: 72492 - DNA, 201 bp, Homo sapiens
ctagtggaacacatgggggtctcattgaaaagctctctgatgagcacctccttttgtgcaaagttaattttttctcgacaataaagatattccgtgtcttyacccctgaactaagacacagggagtatttcagaggccagcgtaggagtcatcgacaacgaaaagccgagaacccagggccagcagtggagcctcagcaga

SEQ ID NO: 72493 - DNA, 201 bp, Homo sapiens
tcttcctcgtcagtggtcaaggtgtgtcatccatacagctccatgcctttgtcttttttaaatgtaattaaaaaaggaaccaactggcgtttgtagttggkgtttgttatttattgattctccctccaaaggggcctaagctcgacaaaaccgttacagttgtcagaacccagccacagggctcagcccccttcccccacg

SEQ ID NO: 72494 - DNA, 201 bp, Homo sapiens
catgaactcaaggcccttcgctggaaagacagctgggacatcttgatccgaaaacactagaacaagagtgtggcaaagaacacccgtgctggggtcgggaygaggttgaagggtcttggtcaatgtacgtaatgagcagggtgggccccacgctgggaggacacgggctgggctgagcagggcctctagtggaacacatgg

SEQ ID NO: 72495 - DNA, 201 bp, Homo sapiens
gccatctacgccctgctgtccttgtggtacctgctccgacggcgaagaaatgtccatgacctccctcaggatgcctggctgcgctgggtgctggctggggygctgtgtgccggtggctgggcagtgaactacctcccgttcttcctgatggagaagacactcttcctctaccactacctgcccgcactcaccttccaaatc

SEQ ID NO: 72496 - DNA, 169 bp, Homo sapiens
cacgtcacgtctgcatcactactgtgggtgagcctggacggacgggggctggggctgcccgtggcagcggcaagggatgctttccagagacagccaccackcaggagggaggatcaccccaggcaacccagacacgggtgttcacatgtgaggctgtgagctccacata

SEQ ID NO: 72497 - DNA, 201 bp, Homo sapiens
tggtgcagctggtccacggcatgaccacccgctccctgaacacgcatgatgttgcagcccccctgagcccccattcacaggaggtctcctgctacattgamtataacatctccatgcccgcccagaacctctggagactggaaattgtgaacagaggatctgacacagacgtctggaagaccatcctctcagaggtccgct

SEQ ID NO: 72498 - DNA, 201 bp, Homo sapiens
tgctggcgctgagaagtgatgactcggaacacaagtacagctccagcccactggagtgggtcaccctggacaccaatattgcctactggctgcaccccagraccagcgctcagatccacctacttggaaacatagtgatctgggtttcgggcagcctcgctctggccatctacgccctgctgtccttgtggtacctgctcc

SEQ ID NO: 72499 - DNA, 201 bp, Homo sapiens; identical to SEQ ID NO: 72473

SEQ ID NO: 72500 - DNA, 201 bp, Homo sapiens; identical to SEQ ID NO: 72474

SEQ ID NO: 72501 - DNA, 201 bp, Homo sapiens; identical to SEQ ID NO: 72475

SEQ ID NO: 72502 - DNA, 201 bp, Homo sapiens; identical to SEQ ID NO: 72476

SEQ ID NO: 72503 - DNA, 201 bp, Homo sapiens; identical to SEQ ID NO: 72477

SEQ ID NO: 72504 - DNA, 201 bp, Homo sapiens; identical to SEQ ID NO: 72478

SEQ ID NO: 72505 - DNA, 201 bp, Homo sapiens; identical to SEQ ID NO: 72479

SEQ ID NO: 72506 - DNA, 201 bp, Homo sapiens; identical to SEQ ID NO: 72480

SEQ ID NO: 72507 - DNA, 201 bp, Homo sapiens; identical to SEQ ID NO: 72481

SEQ ID NO: 72508 - DNA, 201 bp, Homo sapiens; identical to SEQ ID NO: 72482

SEQ ID NO: 72509 - DNA, 201 bp, Homo sapiens; identical to SEQ ID NO: 72483

SEQ ID NO: 72510 - DNA, 201 bp, Homo sapiens; identical to SEQ ID NO: 72484

SEQ ID NO: 72511 - DNA, 201 bp, Homo sapiens; identical to SEQ ID NO: 72485

SEQ ID NO: 72512 - DNA, 201 bp, Homo sapiens; identical to SEQ ID NO: 72486

SEQ ID NO: 72513 - DNA, 201 bp, Homo sapiens; identical to SEQ ID NO: 72487

SEQ ID NO: 72514 - DNA, 201 bp, Homo sapiens; identical to SEQ ID NO: 72488

SEQ ID NO: 72515 - DNA, 201 bp, Homo sapiens; identical to SEQ ID NO: 72489

SEQ ID NO: 72516 - DNA, 201 bp, Homo sapiens; identical to SEQ ID NO: 72490

SEQ ID NO: 72517 - DNA, 125 bp, Homo sapiens
ggcgtctgcctgagcccgcttttckacaagatgtggggatttttgaagcgccctgtagtggtgacggctgacatcaacttgagccttgtggccctgactgggatggggttactgagccggctgtg

SEQ ID NO: 72518 - DNA, 201 bp, Homo sapiens; identical to SEQ ID NO: 72492

SEQ ID NO: 72519 - DNA, 201 bp, Homo sapiens; identical to SEQ ID NO: 72493

SEQ ID NO: 72520 - DNA, 201 bp, Homo sapiens; identical to SEQ ID NO: 72494

SEQ ID NO: 72521 - DNA, 201 bp, Homo sapiens; identical to SEQ ID NO: 72495

SEQ ID NO: 72522 - DNA, 169 bp, Homo sapiens; identical to SEQ ID NO: 72496

SEQ ID NO: 72523 - DNA, 201 bp, Homo sapiens; identical to SEQ ID NO: 72497

SEQ ID NO: 72524 - DNA, 201 bp, Homo sapiens; identical to SEQ ID NO: 72498

SEQ ID NO: 72525 - DNA, 201 bp, Homo sapiens; identical to SEQ ID NO: 72473

SEQ ID NO: 72526 - DNA, 201 bp, Homo sapiens; identical to SEQ ID NO: 72474

SEQ ID NO: 72527 - DNA, 201 bp, Homo sapiens; identical to SEQ ID NO: 72475

SEQ ID NO: 72528 - DNA, 201 bp, Homo sapiens; identical to SEQ ID NO: 72476

SEQ ID NO: 72529 - DNA, 201 bp, Homo sapiens; identical to SEQ ID NO: 72477

SEQ ID NO: 72530 - DNA, 201 bp, Homo sapiens; identical to SEQ ID NO: 72478

SEQ ID NO: 72531 - DNA, 201 bp, Homo sapiens; identical to SEQ ID NO: 72479

SEQ ID NO: 72532 - DNA, 201 bp, Homo sapiens; identical to SEQ ID NO: 72480

SEQ ID NO: 72533 - DNA, 201 bp, Homo sapiens; identical to SEQ ID NO: 72481

SEQ ID NO: 72534 - DNA, 201 bp, Homo sapiens; identical to SEQ ID NO: 72482

SEQ ID NO: 72535 - DNA, 141 bp, Homo sapiens
ccctgaacacacatgccgggcgggagacctgccctgaggctcggcagcccctcagtggggtctgctgctggactccaaatgtgaccgtttgccagaggtcrgcatcccagggtggtcccctggctcagaaaaggtccgctt

SEQ ID NO: 72536 - DNA, 201 bp, Homo sapiens; identical to SEQ ID NO: 72483

SEQ ID NO: 72537 - DNA, 201 bp, Homo sapiens; identical to SEQ ID NO: 72484

SEQ ID NO: 72538 - DNA, 201 bp, Homo sapiens; identical to SEQ ID NO: 72485

SEQ ID NO: 72539 - DNA, 201 bp, Homo sapiens; identical to SEQ ID NO: 72486

SEQ ID NO: 72540 - DNA, 201 bp, Homo sapiens; identical to SEQ ID NO: 72487

SEQ ID NO: 72541 - DNA, 201 bp, Homo sapiens; identical to SEQ ID NO: 72488

SEQ ID NO: 72542 - DNA, 201 bp, Homo sapiens; identical to SEQ ID NO: 72489

SEQ ID NO: 72543 - DNA, 201 bp, Homo sapiens; identical to SEQ ID NO: 72490

SEQ ID NO: 72544 - DNA, 199 bp, Homo sapiens
cgagccccgaagtaagaactccgtggcgcgtgcagccctagggaggaagggcgtgctgcgggtgcagtctcaggggcgtctgcctgagcccgcttttckacaagatgtggggatttttgaagcgccctgtagtggtgacggctgacatcaacttgagccttgtggccctgactgggatggggttactgagccggctgtg

SEQ ID NO: 72545 - DNA, 201 bp, Homo sapiens; identical to SEQ ID NO: 72492

SEQ ID NO: 72546 - DNA, 201 bp, Homo sapiens; identical to SEQ ID NO: 72493

SEQ ID NO: 72547 - DNA, 201 bp, Homo sapiens; identical to SEQ ID NO: 72494

SEQ ID NO: 72548 - DNA, 201 bp, Homo sapiens; identical to SEQ ID NO: 72495

SEQ ID NO: 72549 - DNA, 201 bp, Homo sapiens
cacgtcacgtctgcatcactactgtgggtgagcctggacggacgggggctggggctgcccgtggcagcggcaagggatgctttccagagacagccaccackcaggagggaggatcaccccaggcaacccagacacgggtgttcacatgtgaggctgtgagctccacatacagtgggtgtgggtgggcgtccccaggctcag

SEQ ID NO: 72550 - DNA, 201 bp, Homo sapiens; identical to SEQ ID NO: 72497

SEQ ID NO: 72551 - DNA, 201 bp, Homo sapiens; identical to SEQ ID NO: 72498

SEQ ID NO: 72552 - DNA, 201 bp, Homo sapiens; identical to SEQ ID NO: 72473

SEQ ID NO: 72553 - DNA, 201 bp, Homo sapiens; identical to SEQ ID NO: 72474

SEQ ID NO: 72554 - DNA, 201 bp, Homo sapiens; identical to SEQ ID NO: 72475

SEQ ID NO: 72555 - DNA, 201 bp, Homo sapiens; identical to SEQ ID NO: 72476

SEQ ID NO: 72556 - DNA, 201 bp, Homo sapiens; identical to SEQ ID NO: 72477

SEQ ID NO: 72557 - DNA, 201 bp, Homo sapiens; identical to SEQ ID NO: 72479

SEQ ID NO: 72558 - DNA, 201 bp, Homo sapiens; identical to SEQ ID NO: 72480

SEQ ID NO: 72559 - DNA, 201 bp, Homo sapiens; identical to SEQ ID NO: 72481

SEQ ID NO: 72560 - DNA, 201 bp, Homo sapiens; identical to SEQ ID NO: 72482

SEQ ID NO: 72561 - DNA, 141 bp, Homo sapiens; identical to SEQ ID NO: 72535

SEQ ID NO: 72562 - DNA, 201 bp, Homo sapiens; identical to SEQ ID NO: 72483

SEQ ID NO: 72563 - DNA, 201 bp, Homo sapiens; identical to SEQ ID NO: 72485

SEQ ID NO: 72564 - DNA, 201 bp, Homo sapiens; identical to SEQ ID NO: 72488

SEQ ID NO: 72565 - DNA, 201 bp, Homo sapiens; identical to SEQ ID NO: 72489

SEQ ID NO: 72566 - DNA, 201 bp, Homo sapiens; identical to SEQ ID NO: 72492

SEQ ID NO: 72567 - DNA, 201 bp, Homo sapiens; identical to SEQ ID NO: 72490

SEQ ID NO: 72568 - DNA, 199 bp, Homo sapiens; identical to SEQ ID NO: 72544

SEQ ID NO: 72569 - DNA, 201 bp, Homo sapiens; identical to SEQ ID NO: 72493

SEQ ID NO: 72570 - DNA, 201 bp, Homo sapiens; identical to SEQ ID NO: 72494

SEQ ID NO: 72571 - DNA, 201 bp, Homo sapiens; identical to SEQ ID NO: 72495

SEQ ID NO: 72572 - DNA, 201 bp, Homo sapiens; identical to SEQ ID NO: 72549

SEQ ID NO: 72573 - DNA, 201 bp, Homo sapiens; identical to SEQ ID NO: 72498

SEQ ID NO: 72574 - DNA, 201 bp, Homo sapiens; identical to SEQ ID NO: 72497

SEQ ID NO: 72575 - DNA, 201 bp, Homo sapiens; identical to SEQ ID NO: 72473

SEQ ID NO: 72576 - DNA, 201 bp, Homo sapiens; identical to SEQ ID NO: 72474

SEQ ID NO: 72577 - DNA, 201 bp, Homo sapiens; identical to SEQ ID NO: 72475

SEQ ID NO: 72578 - DNA, 201 bp, Homo sapiens; identical to SEQ ID NO: 72476

SEQ ID NO: 72579 - DNA, 201 bp, Homo sapiens; identical to SEQ ID NO: 72477

SEQ ID NO: 72580 - DNA, 201 bp, Homo sapiens
gcagctgtccatgcctggcacctgcttggagaccagactttgtccaatgtaggtgctgatgtccagtgctgcatgaggccggcctgtatggggcagatgcrgatgtcacagggggtacttggtgaaaagactccaatcctcaatgttttagaagcaggcaggcctgggcagcctcgcctcttggcctctgcaggtgcctct

SEQ ID NO: 72581 - DNA, 201 bp, Homo sapiens; identical to SEQ ID NO: 72479

SEQ ID NO: 72582 - DNA, 201 bp, Homo sapiens; identical to SEQ ID NO: 72480

SEQ ID NO: 72583 - DNA, 201 bp, Homo sapiens; identical to SEQ ID NO: 72481

SEQ ID NO: 72584 - DNA, 201 bp, Homo sapiens; identical to SEQ ID NO: 72482

SEQ ID NO: 72585 - DNA, 201 bp, Homo sapiens; identical to SEQ ID NO: 72483

SEQ ID NO: 72586 - DNA, 201 bp, Homo sapiens
gggtgtgttcacgtacgtgctcgtgctgggtgttgcagctgtccatgcctggcacctgcttggagaccagactttgtccaatgtaggtgctgatgtccagkgctgcatgaggccggcctgtatggggcagatgcggatgtcacagggggtacttggtgaaaagactccaatcctcaatgttttagaagcaggcaggcctgg

SEQ ID NO: 72587 - DNA, 201 bp, Homo sapiens
cgtgctgggtgttgcagctgtccatgcctggcacctgcttggagaccagactttgtccaatgtaggtgctgatgtccagtgctgcatgaggccggcctgtrtggggcagatgcggatgtcacagggggtacttggtgaaaagactccaatcctcaatgttttagaagcaggcaggcctgggcagcctcgcctcttggcctc

SEQ ID NO: 72588 - DNA, 201 bp, Homo sapiens; identical to SEQ ID NO: 72485

SEQ ID NO: 72589 - DNA, 201 bp, Homo sapiens
cttggtgaaaagactccaatcctcaatgttttagaagcaggcaggcctgggcagcctcgcctcttggcctctgcaggtgcctctgtatgggaggccagagtttctgtcactaactttttctaagctcacaatgtctagaggtgggtgcgcttttccacgcagtggaacatgacttttctttgaatctctggcaggtctgtg

SEQ ID NO: 72590 - DNA, 201 bp, Homo sapiens
ctgggcagcctcgcctcttggcctctgcaggtgcctctgtatgggaggccagagtttctgtcactaactttttctaagctcacaatgtctagaggtgggtrcgcttttccacgcagtggaacatgacttttctttgaatctctggcaggtctgtgtgttctgtcacttgctcgcccgagcagtggctttgctggtcatccc

SEQ ID NO: 72591 - DNA, 201 bp, Homo sapiens
tgcagctgtccatgcctggcacctgcttggagaccagactttgtccaatgtaggtgctgatgtccagtgctgcatgaggccggcctgtatggggcagatgyggatgtcacagggggtacttggtgaaaagactccaatcctcaatgttttagaagcaggcaggcctgggcagcctcgcctcttggcctctgcaggtgcctc

SEQ ID NO: 72592 - DNA, 201 bp, Homo sapiens; identical to SEQ ID NO: 72488

SEQ ID NO: 72593 - DNA, 201 bp, Homo sapiens; identical to SEQ ID NO: 72489

SEQ ID NO: 72594 - DNA, 201 bp, Homo sapiens; identical to SEQ ID NO: 72491

SEQ ID NO: 72595 - DNA, 201 bp, Homo sapiens; identical to SEQ ID NO: 72490

SEQ ID NO: 72596 - DNA, 201 bp, Homo sapiens; identical to SEQ ID NO: 72492

SEQ ID NO: 72597 - DNA, 201 bp, Homo sapiens; identical to SEQ ID NO: 72493

SEQ ID NO: 72598 - DNA, 201 bp, Homo sapiens; identical to SEQ ID NO: 72494

SEQ ID NO: 72599 - DNA, 201 bp, Homo sapiens; identical to SEQ ID NO: 72495

SEQ ID NO: 72600 - DNA, 169 bp, Homo sapiens; identical to SEQ ID NO: 72496

SEQ ID NO: 72601 - DNA, 201 bp, Homo sapiens; identical to SEQ ID NO: 72498

SEQ ID NO: 72602 - DNA, 201 bp, Homo sapiens; identical to SEQ ID NO: 72497

SEQ ID NO: 72603 - DNA, 201 bp, Homo sapiens; identical to SEQ ID NO: 72473

SEQ ID NO: 72604 - DNA, 201 bp, Homo sapiens; identical to SEQ ID NO: 72474

SEQ ID NO: 72605 - DNA, 201 bp, Homo sapiens; identical to SEQ ID NO: 72475

SEQ ID NO: 72606 - DNA, 201 bp, Homo sapiens; identical to SEQ ID NO: 72476

SEQ ID NO: 72607 - DNA, 201 bp, Homo sapiens; identical to SEQ ID NO: 72477

SEQ ID NO: 72608 - DNA, 201 bp, Homo sapiens; identical to SEQ ID NO: 72478

SEQ ID NO: 72609 - DNA, 201 bp, Homo sapiens; identical to SEQ ID NO: 72479

SEQ ID NO: 72610 - DNA, 201 bp, Homo sapiens; identical to SEQ ID NO: 72480

SEQ ID NO: 72611 - DNA, 201 bp, Homo sapiens; identical to SEQ ID NO: 72481

SEQ ID NO: 72612 - DNA, 201 bp, Homo sapiens; identical to SEQ ID NO: 72482

SEQ ID NO: 72613 - DNA, 201 bp, Homo sapiens; identical to SEQ ID NO: 72483

SEQ ID NO: 72614 - DNA, 201 bp, Homo sapiens; identical to SEQ ID NO: 72484

SEQ ID NO: 72615 - DNA, 201 bp, Homo sapiens; identical to SEQ ID NO: 72485

SEQ ID NO: 72616 - DNA, 201 bp, Homo sapiens; identical to SEQ ID NO: 72486

SEQ ID NO: 72617 - DNA, 201 bp, Homo sapiens; identical to SEQ ID NO: 72487

SEQ ID NO: 72618 - DNA, 201 bp, Homo sapiens; identical to SEQ ID NO: 72488

SEQ ID NO: 72619 - DNA, 201 bp, Homo sapiens; identical to SEQ ID NO: 72489

SEQ ID NO: 72620 - DNA, 201 bp, Homo sapiens; identical to SEQ ID NO: 72490

SEQ ID NO: 72621 - DNA, 199 bp, Homo sapiens; identical to SEQ ID NO: 72544

SEQ ID NO: 72622 - DNA, 201 bp, Homo sapiens; identical to SEQ ID NO: 72492

SEQ ID NO: 72623 - DNA, 201 bp, Homo sapiens; identical to SEQ ID NO: 72493

SEQ ID NO: 72624 - DNA, 201 bp, Homo sapiens; identical to SEQ ID NO: 72494

SEQ ID NO: 72625 - DNA, 201 bp, Homo sapiens; identical to SEQ ID NO: 72495

SEQ ID NO: 72626 - DNA, 169 bp, Homo sapiens; identical to SEQ ID NO: 72496

SEQ ID NO: 72627 - DNA, 201 bp, Homo sapiens; identical to SEQ ID NO: 72497

SEQ ID NO: 72628 - DNA, 201 bp, Homo sapiens; identical to SEQ ID NO: 72498

SEQ ID NO: 72629 - DNA, 201 bp, Homo sapiens; identical to SEQ ID NO: 72473

SEQ ID NO: 72630 - DNA, 201 bp, Homo sapiens; identical to SEQ ID NO: 72474

SEQ ID NO: 72631 - DNA, 201 bp, Homo sapiens; identical to SEQ ID NO: 72475

SEQ ID NO: 72632 - DNA, 201 bp, Homo sapiens; identical to SEQ ID NO: 72476

SEQ ID NO: 72633 - DNA, 201 bp, Homo sapiens; identical to SEQ ID NO: 72477

SEQ ID NO: 72634 - DNA, 201 bp, Homo sapiens; identical to SEQ ID NO: 72478

SEQ ID NO: 72635 - DNA, 201 bp, Homo sapiens; identical to SEQ ID NO: 72479

SEQ ID NO: 72636 - DNA, 201 bp, Homo sapiens; identical to SEQ ID NO: 72480

SEQ ID NO: 72637 - DNA, 201 bp, Homo sapiens; identical to SEQ ID NO: 72481

SEQ ID NO: 72638 - DNA, 201 bp, Homo sapiens; identical to SEQ ID NO: 72482

SEQ ID NO: 72639 - DNA, 201 bp, Homo sapiens; identical to SEQ ID NO: 72483

SEQ ID NO: 72640 - DNA, 201 bp, Homo sapiens; identical to SEQ ID NO: 72484

SEQ ID NO: 72641 - DNA, 201 bp, Homo sapiens; identical to SEQ ID NO: 72485

SEQ ID NO: 72642 - DNA, 201 bp, Homo sapiens; identical to SEQ ID NO: 72486

SEQ ID NO: 72643 - DNA, 201 bp, Homo sapiens; identical to SEQ ID NO: 72487

SEQ ID NO: 72644 - DNA, 201 bp, Homo sapiens; identical to SEQ ID NO: 72488

SEQ ID NO: 72645 - DNA, 201 bp, Homo sapiens; identical to SEQ ID NO: 72489

SEQ ID NO: 72646 - DNA, 201 bp, Homo sapiens; identical to SEQ ID NO: 72490

SEQ ID NO: 72647 - DNA, 201 bp, Homo sapiens; identical to SEQ ID NO: 72492

SEQ ID NO: 72648 - DNA, 201 bp, Homo sapiens; identical to SEQ ID NO: 72493

SEQ ID NO: 72649 - DNA, 201 bp, Homo sapiens; identical to SEQ ID NO: 72494

SEQ ID NO: 72650 - DNA, 201 bp, Homo sapiens; identical to SEQ ID NO: 72495

SEQ ID NO: 72651 - DNA, 169 bp, Homo sapiens; identical to SEQ ID NO: 72496

SEQ ID NO: 72652 - DNA, 201 bp, Homo sapiens; identical to SEQ ID NO: 72497

SEQ ID NO: 72653 - DNA, 201 bp, Homo sapiens; identical to SEQ ID NO: 72498

SEQ ID NO: 72654 - DNA, 201 bp, Homo sapiens; identical to SEQ ID NO: 72473

SEQ ID NO: 72655 - DNA, 201 bp, Homo sapiens; identical to SEQ ID NO: 72475

SEQ ID NO: 72656 - DNA, 201 bp, Homo sapiens; identical to SEQ ID NO: 72474

SEQ ID NO: 72657 - DNA, 201 bp, Homo sapiens; identical to SEQ ID NO: 72476

SEQ ID NO: 72658 - DNA, 201 bp, Homo sapiens; identical to SEQ ID NO: 72477

SEQ ID NO: 72659 - DNA, 201 bp, Homo sapiens; identical to SEQ ID NO: 72580

SEQ ID NO: 72660 - DNA, 201 bp, Homo sapiens; identical to SEQ ID NO: 72479

SEQ ID NO: 72661 - DNA, 201 bp, Homo sapiens; identical to SEQ ID NO: 72480

SEQ ID NO: 72662 - DNA, 201 bp, Homo sapiens
ccacgaccaaatcatgtccagtgccttccaggccagcttagagggaggactagctcggatcacccagggtcagccactggaggtggcctttgggtcccagrtcactctgaggaacgtctttgggaaacctgtgccctgctggcttcattcccaccaggacacctaccccatgatgtaagatatgagaacggccgaggcagc

SEQ ID NO: 72663 - DNA, 201 bp, Homo sapiens; identical to SEQ ID NO: 72482

SEQ ID NO: 72664 - DNA, 201 bp, Homo sapiens; identical to SEQ ID NO: 72483

SEQ ID NO: 72665 - DNA, 201 bp, Homo sapiens; identical to SEQ ID NO: 72586

SEQ ID NO: 72666 - DNA, 201 bp, Homo sapiens; identical to SEQ ID NO: 72587

SEQ ID NO: 72667 - DNA, 201 bp, Homo sapiens
tggcttcattcccaccaggacacctaccccatgatgtaagatatgagaacggccgaggcagctcccaccagcaacaggtgacctgttaccccttcaaagaygtcaataactggtggattgtaaaggatcccaggaggcaccagctggtggtgagcagccctccgagacctgtgaggcacggggacatggtgcagctggtcc

SEQ ID NO: 72668 - DNA, 201 bp, Homo sapiens; identical to SEQ ID NO: 72589

SEQ ID NO: 72669 - DNA, 201 bp, Homo sapiens; identical to SEQ ID NO: 72590

SEQ ID NO: 72670 - DNA, 201 bp, Homo sapiens; identical to SEQ ID NO: 72591

SEQ ID NO: 72671 - DNA, 201 bp, Homo sapiens; identical to SEQ ID NO: 72488

SEQ ID NO: 72672 - DNA, 201 bp, Homo sapiens; identical to SEQ ID NO: 72489

SEQ ID NO: 72673 - DNA, 199 bp, Homo sapiens; identical to SEQ ID NO: 72544

SEQ ID NO: 72674 - DNA, 201 bp, Homo sapiens; identical to SEQ ID NO: 72490

SEQ ID NO: 72675 - DNA, 201 bp, Homo sapiens; identical to SEQ ID NO: 72492

SEQ ID NO: 72676 - DNA, 201 bp, Homo sapiens; identical to SEQ ID NO: 72493

SEQ ID NO: 72677 - DNA, 201 bp, Homo sapiens; identical to SEQ ID NO: 72494

SEQ ID NO: 72678 - DNA, 201 bp, Homo sapiens; identical to SEQ ID NO: 72495

SEQ ID NO: 72679 - DNA, 169 bp, Homo sapiens; identical to SEQ ID NO: 72496

SEQ ID NO: 72680 - DNA, 201 bp, Homo sapiens; identical to SEQ ID NO: 72498

SEQ ID NO: 72681 - DNA, 201 bp, Homo sapiens; identical to SEQ ID NO: 72497

SEQ ID NO: 72682 - DNA, 201 bp, Homo sapiens
ttgaggagacagcctagacactggctggcctgatgttttgttgacagtgaacccacagtgggagagagttttttccagtctgatctggttcttacacactcacacacataactcaaaagttttgtgaacaagtactttccttttttacatgttacatgtcctcatgttttctgttttctgtttcataacacaaggctggtt

SEQ ID NO: 72683 - DNA, 201 bp, Homo sapiens
gctcacagcctcacatgtgaacacccgtgtctgggttgcctggggtgatcctccctcctgcgtggtggctgtctctggaaagcatcccttgccgctgccaygggcagccccagcccccgtccgtccaggctcacccacagtagtgatgcagacgtgacgtgggggaagggggctgagccctgtggctgggttctgacaact

SEQ ID NO: 72684 - DNA, 201 bp, Homo sapiens
attgaggagacagcctagacactggctggcctgatgttttgttgacagtgaacccacagtgggagagagttttttccagtctgatctggttcttacacactcacacacataactcaaaagttttgtgaacaagtactttccttttttacatgttacatgtcctcatgttttctgttttctgtttcataacacaaggctggt

SEQ ID NO: 72685 - DNA, 201 bp, Homo sapiens
tgtctcgaagagttctccgggacgtgcgccgagggagggacctggagcagattctgacgcagtacaccaccttcgtgaagccggccttcgaggagttctgyctgccgacaaagaagtatgccgatgtgatcatcccgcgaggagtggacaatatggttgccatcaacctgatcgtgcagcacatccaggacattctgaatg

SEQ ID NO: 72686 - DNA, 201 bp, Homo sapiens
gaggagacagcctagacactggctggcctgatgttttgttgacagtgaacccacagtgggagagagttttttccagtctgatctggttcttacacactcacacacataactcaaaagttttgtgaacaagtactttccttttttacatgttacatgtcctcatgttttctgttttctgtttcataacacaaggctggttgt

SEQ ID NO: 72687 - DNA, 201 bp, Homo sapiens
tgaggagacagcctagacactggctggcctgatgttttgttgacagtgaacccacagtgggagagagttttttccagtctgatctggttcttacacactcacacacataactcaaaagttttgtgaacaagtactttccttttttacatgttacatgtcctcatgttttctgttttctgtttcataacacaaggctggttg

SEQ ID NO: 72688 - DNA, 117 bp, Homo sapiens
cgtgggggaagggggctgagccctgtggctgggttctgacaactgtaacggttttgtcgagcttaggcccctttggagggagaatcaataaataacaaacmccaactacaaacgcca

SEQ ID NO: 72689 - DNA, 201 bp, Homo sapiens
gacattctgaatggtgacatctgcaaatggcaccgaggagggtccaatgggcggagctacaagcggaccttttctgagccaggggaccaccctgggatgcygacctctggcaaacggtcacatttggagtccagcagcagaccccactgaggggctgccgagcctcagggcaggtctcccgcccggcatgtgtgttcaggg

SEQ ID NO: 72690 - DNA, 201 bp, Homo sapiens
gggacctggagcagattctgacgcagtacaccaccttcgtgaagccggccttcgaggagttctgcctgccgacaaagaagtatgccgatgtgatcatcccrcgaggagtggacaatatggttgccatcaacctgatcgtgcagcacatccaggacattctgaatggtgacatctgcaaatggcaccgaggagggtccaatg

SEQ ID NO: 72691 - DNA, 201 bp, Homo sapiens
gtggctagtggccatatgcagggaatggtgcttctggctgtggcacgcactggatcacccaggtcccagcagacatggccgcccaaagtcagcaagcctcytttgtgctatgtggagctcacagcctcacatgtgaacacccgtgtctgggttgcctggggtgatcctccctcctgcgtggtggctgtctctggaaagcat

SEQ ID NO: 72692 - DNA, 201 bp, Homo sapiens
ggccgcccaaagtcagcaagcctcctttgtgctatgtggagctcacagcctcacatgtgaacacccgtgtctgggttgcctggggtgatcctccctcctgmgtggtggctgtctctggaaagcatcccttgccgctgccacgggcagccccagcccccgtccgtccaggctcacccacagtagtgatgcagacgtgacgtg

SEQ ID NO: 72693 - DNA, 201 bp, Homo sapiens
tgtctcgaagagttctccgggacgtgcgccgagggagggacctggagcagattctgacgcagtacaccaccttcgtgaagccggccttcgaggagttctgyctgccgctgcactttctgcctcacttcttggatcatggcctctcacacctggctgatgactgagtctgtgtcccccatttgccgatgacaccagcacctc

SEQ ID NO: 72694 - DNA, 201 bp, Homo sapiens
gtttctgagcatcttaaaatcacctttgaaggaaaagtcctcacaggaacacccccccttgtgccttacagacaaagaagtatgccgatgtgatcatcccrcgaggagtggacaatatgggtaagaagctggcctgctgggctgtccccccgcccctcccagagcttgaggcagggacagttccaccagtgtgcagttact

SEQ ID NO: 72695 - DNA, 201 bp, Homo sapiens; identical to SEQ ID NO: 72682

SEQ ID NO: 72696 - DNA, 201 bp, Homo sapiens; identical to SEQ ID NO: 72684

SEQ ID NO: 72697 - DNA, 201 bp, Homo sapiens
atggttgccatcaacctgatcgtgcagcacatccaggacattctgaatggtgacatctgcaaatggcaccgaggagggtccaatgggcggagctacaagcygacctctggcaaacggtcacatttggagtccagcagcagaccccactgaggggctgccgagcctcagggcaggtctcccgcccggcatgtgtgttcaggg

SEQ ID NO: 72698 - DNA, 201 bp, Homo sapiens
ggagatccgggacatgttccacctgcgcctcttcgtggacaccgactccgacgtcaggctgtctcgaagagacaaagaagtatgccgatgtgatcatcccrcgaggagtggacaatatggttgccatcaacctgatcgtgcagcacatccaggacattctgaatggtgacatctgcaaatggcaccgaggagggtccaatg

SEQ ID NO: 72699 - DNA, 201 bp, Homo sapiens; identical to SEQ ID NO: 72686

SEQ ID NO: 72700 - DNA, 201 bp, Homo sapiens; identical to SEQ ID NO: 72687

SEQ ID NO: 72701 - DNA, 201 bp, Homo sapiens
catctacttgaccgctgagcccaacactctggaagtgcaggatgacaatgcttctgtgcttgacgtctatttataagtgaaaatggtgatcacctaagcayatggatgagacgtgagcacagttatggcagagaagtttctccgcaccagaattatccacagcaacttggctgagccccactacacacagagaaatcatca

SEQ ID NO: 72702 - DNA, 201 bp, Homo sapiens
tgcttctgtgcttgacgtctatttataagtgaaaatggtgatcacctaagcacatggatgagacgtgagcacagttatggcagagaagtttctccgcaccmgaattatccacagcaacttggctgagccccactacacacagagaaatcatcaacctgacttaagagttttcaagatgtcaacttcaggctgatcagcaga

SEQ ID NO: 72703 - DNA, 201 bp, Homo sapiens
tcaaacagcaaagggttaccttccagttcaacatttaccttggaagaggggaccatctacttgaccgctgagcccaacactctggaagtgcaggatgacartgcttctgtgcttgacgtctatttataagtgaaaatggtgatcacctaagcacatggatgagacgtgagcacagttatggcagagaagtttctccgcacc

SEQ ID NO: 72704 - DNA, 201 bp, Homo sapiens
gtgatcacctaagcacatggatgagacgtgagcacagttatggcagagaagtttctccgcaccagaattatccacagcaacttggctgagccccactacayacagagaaatcatcaacctgacttaagagttttcaagatgtcaacttcaggctgatcagcagatgggatgtgaaaaatactaccctattctatcatttgc

SEQ ID NO: 72705 - DNA, 201 bp, Homo sapiens
aagtttctccgcaccagaattatccacagcaacttggctgagccccactacacacagagaaatcatcaacctgacttaagagttttcaagatgtcaacttmaggctgatcagcagatgggatgtgaaaaatactaccctattctatcatttgctgttgcttgctgaactgtgaagaactgcatgaactatatttaagctgc

SEQ ID NO: 72706 - DNA, 175 bp, Homo sapiens
gccttggagagtactcgggttcgtgaacttcccggaggcgcaatgagctgcattaacctgcccactgtgctgccyggctcccccagcaagacccgggggcagatccaggtgcgggggccagccctgcgcgtggctggggatgaggtggtcgtggtgatagcctgtgtccaggcat

SEQ ID NO: 72707 - DNA, 201 bp, Homo sapiens
ccaactgagggacctgcgagggccgcccgctcccttcctgccactgccgcctactggacgctgccctgcatgctgcccagccactccaggaggaagtcggraggcgtggagggtgaccacaccttggccttctgggaactctcctttgtgtggctgccccacctgccgcatgctccctcctctcctacccactggtctgct

SEQ ID NO: 72708 - DNA, 201 bp, Homo sapiens
gcttccagattgctcagtacaagtgcctggtgatcaagtatgccaaagacactcgctacagcagcagcttctgcacacatgaccggaacaccatggaggcrctgcccgcctgcctgctccgagacgtggcccaggaggccctgggcgtggctgtcataggcatcgacgaggggcagtttttccctgacatcgtggagttct

SEQ ID NO: 72709 - DNA, 201 bp, Homo sapiens
cggcggtgtgcatggagtgcttccgggaagccgcctataccaagaggctcggcacagagaaggaggtcgaggtgattgggggagcagacaagtaccactcygtgtgtcggctctgctacttcaagaaggcctcaggccagcctgccgggccggacaacaaagagaactgcccagtgccaggaaagccaggggaagccgtgg

SEQ ID NO: 72710 - DNA, 201 bp, Homo sapiens
catggaggcactgcccgcctgcctgctccgagacgtggcccaggaggccctgggcgtggctgtcataggcatcgacgaggggcagtttttccctgacatcrtggagttctgcgaggccatggccaacgccgggaagaccgtaattgtggctgcactggatgggaccttccagaggaagccatttggggccatcctgaacct

SEQ ID NO: 72711 - DNA, 201 bp, Homo sapiens
ggctcggcacagagaaggaggtcgaggtgattgggggagcagacaagtaccactccgtgtgtcggctctgctacttcaagaaggcctcaggccagcctgcygggccggacaacaaagagaactgcccagtgccaggaaagccaggggaagccgtggctgccaggaagctctttgccccacagcagattctgcaatgcagcc

SEQ ID NO: 72712 - DNA, 201 bp, Homo sapiens
ctgcccagtgccaggaaagccaggggaagccgtggctgccaggaagctctttgccccacagcagattctgcaatgcagccctgccaactgagggacctgcragggccgcccgctcccttcctgccactgccgcctactggacgctgccctgcatgctgcccagccactccaggaggaagtcgggaggcgtggagggtgacc

SEQ ID NO: 72713 - DNA, 201 bp, Homo sapiens
cctgcgagggccgcccgctcccttcctgccactgccgcctactggacgctgccctgcatgctgcccagccactccaggaggaagtcgggaggcgtggaggrtgaccacaccttggccttctgggaactctcctttgtgtggctgccccacctgccgcatgctccctcctctcctacccactggtctgcttaaagcttccct

SEQ ID NO: 72714 - DNA, 201 bp, Homo sapiens
gtcgcttccagattgctcagtacaagtgcctggtgatcaagtatgccaaagacactcgctacagcagcagcttctgcacacatgaccggaacaccatggargcactgcccgcctgcctgctccgagacgtggcccaggaggccctgggcgtggctgtcataggcatcgacgaggggcagtttttccctgacatcgtggagt

SEQ ID NO: 72715 - DNA, 201 bp, Homo sapiens
gggaaccaggggcttactgcgggacggccttggagagtactcgggttcgtgaacttcccggaggcgcaatgagctgcattaacctgcccactgtgctgccyggctcccccagcaagacccgggggcagatccaggtgattctcgggccgatgttctcaggaaaaagcacagagttgatgagacgcgtccgtcgcttccaga

SEQ ID NO: 72716 - DNA, 201 bp, Homo sapiens
ccagattgctcagtacaagtgcctggtgatcaagtatgccaaagacactcgctacagcagcagcttctgcacacatgaccggtcagaacaccatggaggcrctgcccgcctgcctgctccgagacgtggcccaggaggccctgggcgtggctgtcataggcatcgacgaggggcagtttttccctgacatcgtggagttct

SEQ ID NO: 72717 - DNA, 201 bp, Homo sapiens; identical to SEQ ID NO: 72709

SEQ ID NO: 72718 - DNA, 201 bp, Homo sapiens; identical to SEQ ID NO: 72710

SEQ ID NO: 72719 - DNA, 201 bp, Homo sapiens; identical to SEQ ID NO: 72711

SEQ ID NO: 72720 - DNA, 201 bp, Homo sapiens
ctgcccagtgccaggaaagccaggggaagccgtggctgccaggaagctctttgccccacagcagattctgcaatgcagccctgccaactgagggacctgcragggccgcccgctcccttcctgccactgccgcctactggacgctgccctgcatgctgcccagccagatggcctggattcacgccctcttgtttccttttg

SEQ ID NO: 72721 - DNA, 123 bp, Homo sapiens
gatttccaggccctcccagtccytgggcgcacgtcccggattcctcccacgagggggcgggctgcggccaaatctcccgccaggtcagcggccgggcgctgattggccccatggcggcggggc

SEQ ID NO: 72722 - DNA, 201 bp, Homo sapiens
tgtgaggtcaggttttgtttgtgaaacaaactcttggtaattcaggagtcaagacatctctcagctgtgcctcagagatgggctgttggcagctcacttgsgggcaagcatcgctggggtaaggtgtgtcctgtgcaggcagggtcaccactcccagggcctccccagcctccctctccccttcgctagtgatgtgtccca

SEQ ID NO: 72723 - DNA, 201 bp, Homo sapiens
cttccagattgctcagtacaagtgcctggtgatcaagtatgccaaagacactcgctacagcagcagcttctgcacacatgaccggtcagaacaccatggargcactgcccgcctgcctgctccgagacgtggcccaggaggccctgggcgtggctgtcataggcatcgacgaggggcagtttttccctgacatcgtggagt

SEQ ID NO: 72724 - DNA, 201 bp, Homo sapiens
cctcccaagtagccgatattacaggcgtgtaccaccacacctggctaatttttgtatttttagtagagacgagttttcaccatgttggccaggctggtctygaactcctggcctcaagtgatccacctgcctcggcctcccaaagtgctgggattacaggcgtgaggcactgcacctggcccccagatctttctgtagtaa

SEQ ID NO: 72725 - DNA, 201 bp, Homo sapiens; identical to SEQ ID NO: 72715

SEQ ID NO: 72726 - DNA, 201 bp, Homo sapiens; identical to SEQ ID NO: 72708

SEQ ID NO: 72727 - DNA, 201 bp, Homo sapiens; identical to SEQ ID NO: 72709

SEQ ID NO: 72728 - DNA, 201 bp, Homo sapiens; identical to SEQ ID NO: 72710

SEQ ID NO: 72729 - DNA, 201 bp, Homo sapiens; identical to SEQ ID NO: 72711

SEQ ID NO: 72730 - DNA, 201 bp, Homo sapiens; identical to SEQ ID NO: 72720

SEQ ID NO: 72731 - DNA, 123 bp, Homo sapiens; identical to SEQ ID NO: 72721

SEQ ID NO: 72732 - DNA, 201 bp, Homo sapiens; identical to SEQ ID NO: 72722

SEQ ID NO: 72733 - DNA, 201 bp, Homo sapiens; identical to SEQ ID NO: 72714

SEQ ID NO: 72734 - DNA, 201 bp, Homo sapiens; identical to SEQ ID NO: 72724

SEQ ID NO: 72735 - DNA, 201 bp, Homo sapiens; identical to SEQ ID NO: 72715

SEQ ID NO: 72736 - DNA, 201 bp, Homo sapiens; identical to SEQ ID NO: 72707

SEQ ID NO: 72737 - DNA, 201 bp, Homo sapiens; identical to SEQ ID NO: 72708

SEQ ID NO: 72738 - DNA, 201 bp, Homo sapiens; identical to SEQ ID NO: 72709

SEQ ID NO: 72739 - DNA, 201 bp, Homo sapiens; identical to SEQ ID NO: 72710

SEQ ID NO: 72740 - DNA, 201 bp, Homo sapiens; identical to SEQ ID NO: 72711

SEQ ID NO: 72741 - DNA, 201 bp, Homo sapiens; identical to SEQ ID NO: 72712

SEQ ID NO: 72742 - DNA, 201 bp, Homo sapiens; identical to SEQ ID NO: 72713

SEQ ID NO: 72743 - DNA, 123 bp, Homo sapiens; identical to SEQ ID NO: 72721

SEQ ID NO: 72744 - DNA, 201 bp, Homo sapiens; identical to SEQ ID NO: 72722

SEQ ID NO: 72745 - DNA, 201 bp, Homo sapiens; identical to SEQ ID NO: 72714

SEQ ID NO: 72746 - DNA, 201 bp, Homo sapiens; identical to SEQ ID NO: 72724

SEQ ID NO: 72747 - DNA, 201 bp, Homo sapiens
agcccaggagtgcccgtggccaaggtggtacgggcagtaaccagccggcagagagccagccggcgggtcccacctgccccacccccggaagccccaggccrccagaacctgagtggggcagcagctggggaggcgctggtaggggcagctggcttcccaccacacggagatacagggagcgtggagggcgccccccagccc

SEQ ID NO: 72748 - DNA, 201 bp, Homo sapiens
ggcggggccgtgctgagagcccaggagtgcccgtggccaaggtggtacgggcagtaaccagccggcagagagccagccggcgggtcccacctgccccaccyccggaagccccaggccgccagaacctgagtggggcagcagctggggaggcgctggtaggggcagctggcttcccaccacacggagatacagggagcgtgg

SEQ ID NO: 72749 - DNA, 201 bp, Homo sapiens
tacctgcaccgggaggtggtggagctggcccagggctatgataacgtgcgggtgacgccctggcgcatggttaccatctggggcggggccagcctcctgasgatgtacctgcggagcatgcgggacctgctagaggtgcctggctgggcctgggacttcttcatcaacctcagtgccactgactatccaaccaggaccaat

SEQ ID NO: 72750 - DNA, 201 bp, Homo sapiens
ccccactctgcaggtttgagcccaggggcttgccgtccagcgtgcacctgtatttctatgacgaccatttccagggctacctggtgacgcaggcggtgcarccctcagcccaggggccggcagagacgcttgagatgtggctgatgccccaagggtcgctgaagctgttggggcgcagtgaccaggccagccggctccaga

SEQ ID NO: 72751 - DNA, 201 bp, Homo sapiens
cagcccaggggccggcagagacgcttgagatgtggctgatgccccaagggtcgctgaagctgttggggcgcagtgaccaggccagccggctccagagtctrgaggttggcactgattgggaccccaaagagcgtcttttccggaactttggggggttactggggccgctggacgagcctgtggccgtgcagcgctgggccc

SEQ ID NO: 72752 - DNA, 201 bp, Homo sapiens
atgccccattctgggcctgtggtgctcgtggctgaggctccacagggctgcaagtgccctgccaggctctaaggcccgaagaacaggtgatatcgggggcrctgcagagctgggctctagcaggacagttcttttgtagccaggggaccctagaagtggggtggggcggctccagggctttccagcataccctgcccctgg

SEQ ID NO: 72753 - DNA, 201 bp, Homo sapiens
gtgctcgtggctgaggctccacagggctgcaagtgccctgccaggctctaaggcccgaagaacaggtgatatcgggggcgctgcagagctgggctctagcrggacagttcttttgtagccaggggaccctagaagtggggtggggcggctccagggctttccagcataccctgcccctggatgggaaaggcagggtcaggg

SEQ ID NO: 72754 - DNA, 201 bp, Homo sapiens
ttaaaaaggaaaatgggtggttgggagagaaactagaacagaagatgtgcaatagggctcagagcagccccaggaagtgggccatgtctgtggggagcagkggcttgctgagcccacctgctattgttctgcacgaggctgggcctgcctcactctccagggcctcatgccccattctgggcctgtggtgctcgtggctga

SEQ ID NO: 72755 - DNA, 201 bp, Homo sapiens
tgctgcagggcctggtagtgtggagcttcagcggcctggaggaggacgaggcgggcgagaaaggaaggcagaggaagccacggccactggaccctggcgarggttccaaggacacagacagttcagcagggcgacggggcagcacaggcagaaggcatgggcgctggcggggccgtgctgagagcccaggagtgcccgtgg

SEQ ID NO: 72756 - DNA, 201 bp, Homo sapiens
ccaaagagcgtcttttccggaactttggggggttactggggccgctggacgagcctgtggccgtgcagcgctgggcccggggccccaacctcacagccacrgtggtctggatcgacccaacctatgtggtggccacatcttatgacatcacagtagatacggagactgaggtcacgcaatacaagcccccactgagccggc

SEQ ID NO: 72757 - DNA, 201 bp, Homo sapiens
ccaccccacaacgagtacatggagcagagtttccagggcctgagtagcatcctgaacctgcctcagccggagctcgcggaggaggctgcccagcggcacasacagctcacaggccctgcgctcgaggcctggacagacagggaactgagcagcttctggtccgtggctggactgtgtgccataggcccctctccctgcccc

SEQ ID NO: 72758 - DNA, 201 bp, Homo sapiens
gccggctccagagtctggaggttggcactgattgggaccccaaagagcgtcttttccggaactttggggggttactggggccgctggacgagcctgtggcygtgcagcgctgggcccggggccccaacctcacagccacagtggtctggatcgacccaacctatgtggtggccacatcttatgacatcacagtagatacgg

SEQ ID NO: 72759 - DNA, 201 bp, Homo sapiens
tcctccggctgcagcaagtctccagacccaccttcttcgcccggaagttcgagtcgactgtgaaccaggaggtgctggaaatcctggacttccacctgtayggcagctacccccccggcacgccagccctcaaggcctactgggagaacacctacgacgcggctgatggccccagtgggctcagtgatgtcatgctcactg

SEQ ID NO: 72760 - DNA, 201 bp, Homo sapiens
ggtttgagcccaggggcttgccgtccagcgtgcacctgtatttctatgacgaccatttccagggctacctggtgacgcaggcggtgcagccctcagcccasgggccggcagagacgcttgagatgtggctgatgccccaagggtcgctgaagctgttggggcgcagtgaccaggccagccggctccagagtctggaggttg

SEQ ID NO: 72761 - DNA, 201 bp, Homo sapiens
gccccaagggtcgctgaagctgttggggcgcagtgaccaggccagccggctccagagtctggaggttggcactgattgggaccccaaagagcgtcttttcyggaactttggggggttactggggccgctggacgagcctgtggccgtgcagcgctgggcccggggccccaacctcacagccacagtggtctggatcgaccc

SEQ ID NO: 72762 - DNA, 201 bp, Homo sapiens
cgggaacgcgagaagggcaccagcagcattccacacccagctcttcctcaccttcctgtctagtttgaatttcttttttttctttttttttttttttttttaatttaaaaaggaaaatgggtggttgggagagaaactagaacagaagatgtgcaatagggctcagagcagccccaggaagtgggccatgtctgtggggag

SEQ ID NO: 72763 - DNA, 201 bp, Homo sapiens
ggctacctggtgacgcaggcggtgcagccctcagcccaggggccggcagagacgcttgagatgtggctgatgccccaagggtcgctgaagctgttggggcrcagtgaccaggccagccggctccagagtctggaggttggcactgattgggaccccaaagagcgtcttttccggaactttggggggttactggggccgctg

SEQ ID NO: 72764 - DNA, 201 bp, Homo sapiens
gaaccacagagaacagtcccgtgacattcgcgcacttccctgaggacactgtggagcagaaggcagaaagcgtgggcagaattatgcctcacacggaggcscggatcatgaacatggaggcagggacgctggcaaagctgaacacgcccggggagctgtgcatccgagggtactgcgtcatgctgggctactggggtgagc

SEQ ID NO: 72765 - DNA, 201 bp, Homo sapiens
gcattggcctctgcaaaggtgaccggctgggcatgtggggacctaactcctatgcatgggtgctcatgcagttggccaccgcccaggcgggcatcattctwgtgtctgtgaacccagcctaccaggctatggaactggagtatgtcctcaagaaggtgggctgcaaggcccttgtgttccccaagcaattcaagacccagc

SEQ ID NO: 72766 - DNA, 201 bp, Homo sapiens
tgtgaataaagcagcaggcctgtcctggccggttggcttgactctctcctgtcagaatgcaacctggctttatgcacctagatgtccccagcacccagttytgagccaggcacatcaaatgtcaaggaattgactgaacgaactaagagctcctggatgggtccgggaactcgcctgggcacaaggtgccaaaaggcaggc

SEQ ID NO: 72767 - DNA, 201 bp, Homo sapiens
ctaactcctatgcatgggtgctcatgcagttggccaccgcccaggcgggcatcattctggtgtctgtgaacccagcctaccaggctatggaactggagtaygtcctcaagaaggtgggctgcaaggcccttgtgttccccaagcaattcaagacccagcaatactacaacgtcctgaagcagatctgtccagaagtggaga

SEQ ID NO: 72768 - DNA, 201 bp, Homo sapiens
caactccaacattttaggagagcgcctgaaactgcatgagaagacaccagagcagttgcggatgatcctgcccaaccccctgtaccattgcctgggttccrtggcaggcacaatgatgtgtctgatgtacggtgccaccctcatcctggcctctcccatcttcaatggcaagaaggcactggaggccatcagcagagagag

SEQ ID NO: 72769 - DNA, 147 bp, Homo sapiens
agagctcctggatgggtccgggaactcgcctgggcacaaggtgccaaaaggcaggcagcctgcccaggccctccctcctgtccatcccccacattcccctstctgtccttgtgatttggcataaagagcttctgttttctttggctt

SEQ ID NO: 72770 - DNA, 201 bp, Homo sapiens
aaagcaaattaggactctttctgagcctctttcattgtcagaaatagaatcactttccatcagcttccaggaaattgtgtatctggagtcgaagagatttracatcaagaatccagatttttaaatgtaattgttttttaaatgctaatgtttgtaaagcaccttcagttcttcggatgaaaggtgctatattccctcagt

SEQ ID NO: 72771 - DNA, 201 bp, Homo sapiens
atatgtagctatgtattttactaattgtgaaacactggaaattaatgatgcagacaacttggtgtggtctttgaacagctctctgcagtatttttttttttcctgttaccataaattgtatttaagtgcttgctttccacttaagttgtactaatagaaccggtaactcccagccctccctgtttgacactccttagctta

SEQ ID NO: 72772 - DNA, 201 bp, Homo sapiens
gttagcgtaaagttatcttttcttttttcctaatcagagttcttgaccctttggttattgagtttaaaacttcaattgaaattcaatagtatttatttttkaaaaaaatcactaaactgtgcctaaagaacataactgccatattaatgttttggtttatatcctctatagtaatagaaaaacatttaatacttgtaatgc

SEQ ID NO: 72773 - DNA, 201 bp, Homo sapiens
tttttgacatgctcacagtagcagctttaatagatgagcagattttgtgtgtccatggtggtttatctcctgatatcaaaacactggatcaaattcgaacyatcgaacggaatcaggaaattcctcataaaggagcattttgtgatctggtttggtcagatcctgaagatgtggatacctgggctatcagtccccgaggag

SEQ ID NO: 72774 - DNA, 201 bp, Homo sapiens
tcagggttttcttttattaattgagcacaatactgttttgatttaatttttttccctcaaaccacccagctccttacatagtttttaattatatagctatmtgaaagaggtggctaagacatttgctgcacacacttgaactaatgttgggtcagtagcttcgtgttactgccctgatcccagtgtaattcaggtggaaag

SEQ ID NO: 72775 - DNA, 201 bp, Homo sapiens
atccctttactatgattaatttttgttattccaggaaatacttgtgaagccagccaattaataaagcactttagcatctgttcaggtagttttgaaaaccmacttttccccttcaggataagaacttccaggttacctaaaaatgcaataaaaatctttatagtctaagcttcttggcatataatttttcatcagggtttt

SEQ ID NO: 72776 - DNA, 201 bp, Homo sapiens
cagtatggtctgctcctaattactgctatcgttgtggaaatattgcttcgatcatggtcttcaaagatgtaaatacaagagaaccaaagttattccgggcrgttccagattcagaacgtgttattcctcccagaacgacaacgccatatttcctttgaggccttcgcccatcctgctgacccatttttctgccctcttctt

SEQ ID NO: 72777 - DNA, 201 bp, Homo sapiens
tggaaaatgcctgtactgtgaaagcaaattaggactctttctgagcctctttcattgtcagaaatagaatcactttccatcagcttccaggaaattgtgtrtctggagtcgaagagatttgacatcaagaatccagatttttaaatgtaattgttttttaaatgctaatgtttgtaaagcaccttcagttcttcggatgaa

SEQ ID NO: 72778 - DNA, 201 bp, Homo sapiens
ccaataaataagggctatgtactatatgtactatatagagttatcatgtggtggaagatacttgcaagtcatagatttatgggcaggaggatttgttactscctatatctaggctgaatgtaaaatcccttatgttgtatcaatgggggtaaaaactatttttatttgcctatgatatacttggtttctaataaagtgccc

SEQ ID NO: 72779 - DNA, 118 bp, Homo sapiens
tttttaaatgtaattgttttttaaatgctaatgtttgtaaagcaccttcagttcttcggatgaaaggtgctatattccctcagtgtaaattaataaaaagrttacaggaagtttgtca

SEQ ID NO: 72780 - DNA, 201 bp, Homo sapiens
aaagcaaattaggactctttctgagcctctttcattgtcagaaatagaatcactttccatcagcttccaggaaattgtgtatctggagtcgaagagatttracatcaagaatccagatttttaaatgtaattgttttttaaatgtgctatattccctcagtgtaaattaataaaaagattacaggaagtttgtcaaaaaat

SEQ ID NO: 72781 - DNA, 201 bp, Homo sapiens; identical to SEQ ID NO: 72771

SEQ ID NO: 72782 - DNA, 201 bp, Homo sapiens; identical to SEQ ID NO: 72772

SEQ ID NO: 72783 - DNA, 201 bp, Homo sapiens; identical to SEQ ID NO: 72773

SEQ ID NO: 72784 - DNA, 201 bp, Homo sapiens; identical to SEQ ID NO: 72774

SEQ ID NO: 72785 - DNA, 201 bp, Homo sapiens; identical to SEQ ID NO: 72775

SEQ ID NO: 72786 - DNA, 201 bp, Homo sapiens; identical to SEQ ID NO: 72776

SEQ ID NO: 72787 - DNA, 201 bp, Homo sapiens
tggaaaatgcctgtactgtgaaagcaaattaggactctttctgagcctctttcattgtcagaaatagaatcactttccatcagcttccaggaaattgtgtrtctggagtcgaagagatttgacatcaagaatccagatttttaaatgtaattgttttttaaatgtgctatattccctcagtgtaaattaataaaaagatta

SEQ ID NO: 72788 - DNA, 201 bp, Homo sapiens; identical to SEQ ID NO: 72778

SEQ ID NO: 72789 - DNA, 201 bp, Homo sapiens
tgtatctggagtcgaagagatttgacatcaagaatccagatttttaaatgtaattgttttttaaatgtgctatattccctcagtgtaaattaataaaaagrttacaggaagtttgtcaaaaaattcaatgcatagtctgtagtatgtcctgacaagaagttagcattttatataagaaattaaaaaatgcttattcctcca

SEQ ID NO: 72790 - DNA, 201 bp, Homo sapiens
cgcccagcaccccgtcaccctatggactgagctaccctcaggggtactccttggcctcgggccagctctccccagctgcagctcctcccctggcctctccytctgtctttacaagcactttgagcaaatcgcggcccactcctaagccgcgacagagacctactctgccgcctcctcagcctcccacagtaaacctctcgg

SEQ ID NO: 72791 - DNA, 201 bp, Homo sapiens
tgataaaatttttatccaagctgtcagaatatcaagatgtaaacaagatgactcccagtaatatggcaattgttttaggacccaacctcctatggccacargcagaagggaacattacagagatgatgaccacagtgtcgctgcaaattgttgggatcattgaacctatcatccagcatgcagactggttcttccctgggg

SEQ ID NO: 72792 - DNA, 201 bp, Homo sapiens
agccgctggaggagcacctcaccatcagcggccgggagatcgccttccccatcgaggcgtgtgtgaccatgctgcttgagtgtgggatgcaggaggagggrctcttccgagtagccccctctgcctccaaactgaagaagctgaaagcggccctggactgctgcgtggtggatgtgcaggagtactcggcagacccccacg

SEQ ID NO: 72793 - DNA, 201 bp, Homo sapiens
ggttttgtttgttcctttcgggtggtgacttcggccttttgtttgacctttgccttttgactttgtgcctcttttgatccactttcagcctccatgccagraaacacccacctctccatccaaggctggtcaggaacgtcctttgcagggtcggggtggtgcgggagaggctcactttgcctggttagacccaagggctgc

SEQ ID NO: 72794 - DNA, 201 bp, Homo sapiens
aaactgggtggctcgaagaggctcctcggccggtcggaaagtgtcctgcgccccgccctccatgcagcctcccgccccgcccgccgagctggctgcgcccytgccttcgccgctgccggagcagcccctggacagccccgcggcccccgcgctctctccatccggcctgggcctccagcctgggcccgagcgcaccagcac

SEQ ID NO: 72795 - DNA, 201 bp, Homo sapiens
cagtacacgtgaaccataatgccaactacagctcaatgccctccccagacatggaccctgctgaccggcgccagcccgagcaggcccgccggcccctcagygtcgccacggataatatgatgctggagttttacaaaaaggatggcatgggtgtgagggtcatggacacaaactgggtggctcgaagaggctcctcggccg

SEQ ID NO: 72796 - DNA, 201 bp, Homo sapiens
aattgttgggatcattgaacctatcatccagcatgcagactggttcttccctggggagatagagttcaacattactggcaattatgggagtccagtacacrtgaaccataatgccaactacagctcaatgccctccccagacatggaccctgctgaccggcgccagcccgagcaggcccgccggcccctcagcgtcgccac

SEQ ID NO: 72797 - DNA, 201 bp, Homo sapiens
accagacggtgggcagggctgaaaagacagaagttttgagtgaagaccttcttcaggtggagaagcgtctggagctggtgaaacaggtgtcccacagcacscacaagaagctcaccgcatgtctgcagggccagcaaggggcagaggctgacaagcgctccaaaaagttgcctttgacaacactggctcagtgtctgatgg

SEQ ID NO: 72798 - DNA, 201 bp, Homo sapiens
taaatgcttagttatttttcccaacacagtgtaaagtcaccctcctctgagagtgggatgtgcagagttttgatgttgcagctttgctcacttcctggcargggcaggtcatgcctcaatttgtaatgggagtctggggtaagggtgggggttgaaagttgttatctttaaatacatgtacaaatcgttgtcaaaagtaac

SEQ ID NO: 72799 - DNA, 201 bp, Homo sapiens
ccacctgtgtaaagccaggtccctggctgatctctcgcttgcttgtcttttgagtttttaaagctcttctttttacattctcctgggtagggaatatacayaataaatactagattcaacttacttacttacttacttactttacttacttacttccttggaaaatgctctccatttgtcgagcactaatccacgtctgta

SEQ ID NO: 72800 - DNA, 201 bp, Homo sapiens
aggttttgtttgttcctttcgggtggtgacttcggccttttgtttgacctttgccttttgactttgtgcctcttttgatccactttcagcctccatgccaraaaacacccacctctccatccaaggctggtcaggaacgtcctttgcagggtcggggtggtgcgggagaggctcactttgcctggttagacccaagggctg

SEQ ID NO: 72801 - DNA, 201 bp, Homo sapiens
tttatccttttcaaatagatgatataatatacctatacatgatataatatttgtatatatgaaatctctctatatttgtttaatttgagccattcaatctmaaccaatgtacaggtgtacaatgaaaaatttaaatgcttagttatttttcccaacacagtgtaaagtcaccctcctctgagagtgggatgtgcagagttt

SEQ ID NO: 72802 - DNA, 201 bp, Homo sapiens
tgtttcacttcctaacagttttcctttttccactgtgtgactgaaagctcctatatcattttatatttctgaatctataaaacaaaacaaacaagcctgamagtgtctggaggagccaaaggtggcctccctgtccccaaatatattggctatatgagagtaattttacccctctacgtacctaaaggcacccagttcact

SEQ ID NO: 72803 - DNA, 201 bp, Homo sapiens
ttttgatgttgcagctttgctcacttcctggcaagggcaggtcatgcctcaatttgtaatgggagtctggggtaagggtgggggttgaaagttgttatctytaaatacatgtacaaatcgttgtcaaaagtaacgttattaaaatagatttattatccctgagcttggcatctgttcttgctttaataaacctgcggggac

SEQ ID NO: 72804 - DNA, 201 bp, Homo sapiens
gttttgtttgttcctttcgggtggtgacttcggccttttgtttgacctttgccttttgactttgtgcctcttttgatccactttcagcctccatgccagamaacacccacctctccatccaaggctggtcaggaacgtcctttgcagggtcggggtggtgcgggagaggctcactttgcctggttagacccaagggctgct

SEQ ID NO: 72805 - DNA, 201 bp, Homo sapiens; identical to SEQ ID NO: 72790

SEQ ID NO: 72806 - DNA, 201 bp, Homo sapiens; identical to SEQ ID NO: 72791

SEQ ID NO: 72807 - DNA, 201 bp, Homo sapiens; identical to SEQ ID NO: 72792

SEQ ID NO: 72808 - DNA, 201 bp, Homo sapiens; identical to SEQ ID NO: 72793

SEQ ID NO: 72809 - DNA, 201 bp, Homo sapiens; identical to SEQ ID NO: 72794

SEQ ID NO: 72810 - DNA, 201 bp, Homo sapiens
cagtacacgtgaaccataatgccaactacagctcaatgccctccccagacatggaccctgctgaccggcgccagcccgagcaggcccgccggcccctcagygtcgccacggataatatgatgctggagttttacaaaaaggatgggtatgaactgctcgccagcatgggtgtgagggtcatggacacaaactgggtggctc

SEQ ID NO: 72811 - DNA, 201 bp, Homo sapiens; identical to SEQ ID NO: 72796

SEQ ID NO: 72812 - DNA, 201 bp, Homo sapiens; identical to SEQ ID NO: 72797

SEQ ID NO: 72813 - DNA, 201 bp, Homo sapiens; identical to SEQ ID NO: 72798

SEQ ID NO: 72814 - DNA, 201 bp, Homo sapiens; identical to SEQ ID NO: 72799

SEQ ID NO: 72815 - DNA, 201 bp, Homo sapiens; identical to SEQ ID NO: 72800

SEQ ID NO: 72816 - DNA, 201 bp, Homo sapiens; identical to SEQ ID NO: 72801

SEQ ID NO: 72817 - DNA, 201 bp, Homo sapiens; identical to SEQ ID NO: 72802

SEQ ID NO: 72818 - DNA, 201 bp, Homo sapiens; identical to SEQ ID NO: 72803

SEQ ID NO: 72819 - DNA, 201 bp, Homo sapiens; identical to SEQ ID NO: 72804

SEQ ID NO: 72820 - DNA, 201 bp, Homo sapiens; identical to SEQ ID NO: 72791

SEQ ID NO: 72821 - DNA, 201 bp, Homo sapiens; identical to SEQ ID NO: 72790

SEQ ID NO: 72822 - DNA, 201 bp, Homo sapiens; identical to SEQ ID NO: 72792

SEQ ID NO: 72823 - DNA, 201 bp, Homo sapiens; identical to SEQ ID NO: 72793

SEQ ID NO: 72824 - DNA, 201 bp, Homo sapiens
cagtacacgtgaaccataatgccaactacagctcaatgccctccccagacatggaccctgctgaccggcgccagcccgagcaggcccgccggcccctcagygtcgccacggataatatgatgctggagttttacaaaaaggatgggtatgaactgcatgggtgtgagggtcatggacacaaactgggtggctcgaagaggc

SEQ ID NO: 72825 - DNA, 201 bp, Homo sapiens; identical to SEQ ID NO: 72794

SEQ ID NO: 72826 - DNA, 201 bp, Homo sapiens; identical to SEQ ID NO: 72796

SEQ ID NO: 72827 - DNA, 201 bp, Homo sapiens; identical to SEQ ID NO: 72797

SEQ ID NO: 72828 - DNA, 201 bp, Homo sapiens; identical to SEQ ID NO: 72798

SEQ ID NO: 72829 - DNA, 201 bp, Homo sapiens; identical to SEQ ID NO: 72799

SEQ ID NO: 72830 - DNA, 201 bp, Homo sapiens; identical to SEQ ID NO: 72800

SEQ ID NO: 72831 - DNA, 201 bp, Homo sapiens; identical to SEQ ID NO: 72801

SEQ ID NO: 72832 - DNA, 201 bp, Homo sapiens; identical to SEQ ID NO: 72802

SEQ ID NO: 72833 - DNA, 201 bp, Homo sapiens; identical to SEQ ID NO: 72803

SEQ ID NO: 72834 - DNA, 201 bp, Homo sapiens; identical to SEQ ID NO: 72804

SEQ ID NO: 72835 - DNA, 201 bp, Homo sapiens
tggcgacatcgaggagatggaggagcgcagggagaagcgggagctgcggcaggtgcgggcggccctcctgtccagggagctggcaggcggcctggaggatsgggagcctcagcagaagcgggcccacacagaggagccacaggccaagaaggtcagagcccagtgaagatctgggagaccctgaactcagaaggctgtgtg

SEQ ID NO: 72836 - DNA, 201 bp, Homo sapiens
ccccgacacgtctctgctactggactgtggtgagggcacatttgggcagctgtgccgtcattacggagaccaggtggacagggtcctgggcaccctggctrctgtgtttgtgtcccacctgcacgcagatcaccacacgggcttgccaagtatcttgctgcagagagaacgcgccttggcatctttgggaaagccgcttca

SEQ ID NO: 72837 - DNA, 201 bp, Homo sapiens
tcctgcaccacatcagtatgattcctgccaaatgccttcaggaaggggctgagatctccagtcctgcagtggaaagattgatcagttcgctgttgcgaacrtgtgatttggaagagtttcagacctgtctggtgcggcactgcaagcatgcgtttggctgtgcgctggtgcacacctctggctggaaagtggtctattccg

SEQ ID NO: 72838 - DNA, 201 bp, Homo sapiens
tttaaagaagtcatggaaacagacggcggcacctttcctctaatccagcaaaatgattccctgcacaccagagacaagcagagtaacaggatcagtgggtytaagtgtccgagacttaacgaaaatagtatttcagctgcaataaagattgagtttgcaattgtgagttcttttgcttcctcctgcacagatcagggtctg

SEQ ID NO: 72839 - DNA, 201 bp, Homo sapiens
gaccacatgaaggtctgctttggagactttccaacaatgcccaagctgattcccccactgaaagccctgtttgctggcgacatcgaggagatggaggagcrcagggagaagcgggagctgcggcaggtgcgggcggccctcctgtccagggagctggcaggcggcctggaggatggggagcctcagcagaagcgggcccac

SEQ ID NO: 72840 - DNA, 201 bp, Homo sapiens
ggacgcaccatatcgcaggcacccgcccgccgcgagcggccgcgcaaggacccgctgcggcacctgcgcacgcgagagaagcgcggaccgtcggggtgctycggcggcccaaacaccgtgtacctgcaggtggtggcagcgggtagccgggactcgggcgccgcgctctacgtcttctccgagttcaaccggtatctcttc

SEQ ID NO: 72841 - DNA, 201 bp, Homo sapiens
agtgagcacctctggaacctgtcctcagagagccacccttattcgccaagtctttttgacaactcgagctgtgccagctcacagcagggcgtgctttctcwatcaatcaatcaatcaatcaatcaaatcaatcagtgagagcctggctgggctggtgtcattggtcagggaaatgcaagtcttctggtggttctgggtaaa

SEQ ID NO: 72842 - DNA, 201 bp, Homo sapiens
tcagtgggtctaagtgtccgagacttaacgaaaatagtatttcagctgcaataaagattgagtttgcaattgtgagttcttttgcttcctcctgcacagakcagggtctgctgtgcaccaccttggagaaggctctctgtgctgtagtgtggcagctgcctggtacccgggtggcttggaagaagtcagctcccgtcgtag

SEQ ID NO: 72843 - DNA, 201 bp, Homo sapiens
ggaaagatgccaccctcctgatacatgaagccaccctggaagatggtttggaagaggaagcagtggaaaagacacacagcacaacgtcccaagccatcagygtggggatgcggatgaacgcggagttcattatgctgaaccacttcagccagcgctatgccaaggtccccctcttcagccccaacttcagcgagaaagtgg

SEQ ID NO: 72844 - DNA, 201 bp, Homo sapiens
atgacagtttaccagatccccatacacagtgaacagaggaggggaaagcaccaaccatggcagagtccagaaaggcctctcagcaggctcagtccagagcratcttcagactccgagtcgaatgaaaatgagccacaccttccacatggtgttagccagagaagaggggtcagggactcttccctggtcgtagctttcatc

SEQ ID NO: 72845 - DNA, 106 bp, Homo sapiens
ggatcsgccatgcggagcggctaggtggtgcacgggaaacgcgggcgtaggtgaccggcggctttctcagttttggtggagacgggcgcatgtgggcgctttgctc

SEQ ID NO: 72846 - DNA, 201 bp, Homo sapiens
gaggcagctcaggataggtggtatggagctgtgccgaggcttggggtcccacataagcactagtctatagatgcctcttaggactggtgcctggcacagcygcgggccaggaggctgccacacggaagcaagcagatgaactaatttcatttcaaggcagtttttaaagaagtcatggaaacagacggcggcacctttcct

SEQ ID NO: 72847 - DNA, 201 bp, Homo sapiens
cacccgcccgccgcgagcggccgcgcaaggacccgctgcggcacctgcgcacgcgagagaagcgcggaccgtcggggtgctccggcggcccaaacaccgtktacctgcaggtggtggcagcgggtagccgggactcgggcgccgcgctctacgtcttctccgagttcaaccggtatctcttcaactgtggagaaggcgttc

SEQ ID NO: 72848 - DNA, 201 bp, Homo sapiens
gtgagcacctctggaacctgtcctcagagagccacccttattcgccaagtctttttgacaactcgagctgtgccagctcacagcagggcgtgctttctctmtcaatcaatcaatcaatcaatcaaatcaatcagtgagagcctggctgggctggtgtcattggtcagggaaatgcaagtcttctggtggttctgggtaaaa

SEQ ID NO: 72849 - DNA, 201 bp, Homo sapiens
tacagacgtggattagtgctcgacaaatggagagcattttccaaggaagtaagtaagtaaagtaagtaagtaagtaagtaagttgaatctagtatttattrtgtatattccctacccaggagaatgtaaaaagaagagctttaaaaactcaaaagacaagcaagcgagagatcagccagggacctggctttacacaggtgg

SEQ ID NO: 72850 - DNA, 201 bp, Homo sapiens
cccatacacagtgaacagaggaggggaaagcaccaaccatggcagagtccagaaaggcctctcagcaggctcagtccagagcgatcttcagactccgagtygaatgaaaatgagccacaccttccacatggtgttagccagagaagaggggtcagggactcttccctggtcgtagctttcatctgtaagcttcacttaaag

SEQ ID NO: 72851 - DNA, 201 bp, Homo sapiens
ctcttaggactggtgcctggcacagctgcgggccaggaggctgccacacggaagcaagcagatgaactaatttcatttcaaggcagtttttaaagaagtcwtggaaacagacggcggcacctttcctctaatccagcaaaatgattccctgcacaccagagacaagcagagtaacaggatcagtgggtctaagtgtccgag

SEQ ID NO: 72852 - DNA, 201 bp, Homo sapiens
tttccgctgtaagaaggagggccccaccctcagtgtgcccatggttcagggtgaatgcctcctcaagtaccagctccgtcccaggagggagtggcagaggratgccattattacttgcaatcctgaggaattcatagttgaggcgctgcagcttcccaacttccagcagagcgtgcaggagtacaggaggagtgcgcagga

SEQ ID NO: 72853 - DNA, 201 bp, Homo sapiens
gaacagggtctgccatcccgatgaagattcgaaatgtcagtgccacacttgtcaacataagccccgacacgtctctgctactggactgtggtgagggcacrtttgggcagctgtgccgtcattacggagaccaggtggacagggtcctgggcaccctggctgctgtgtttgtgtcccacctgcacgcagatcaccacacgg

SEQ ID NO: 72854 - DNA, 201 bp, Homo sapiens
ctgccacacggaagcaagcagatgaactaatttcatttcaaggcagtttttaaagaagtcatggaaacagacggcggcacctttcctctaatccagcaaartgattccctgcacaccagagacaagcagagtaacaggatcagtgggtctaagtgtccgagacttaacgaaaatagtatttcagctgcaataaagattgag

SEQ ID NO: 72855 - DNA, 201 bp, Homo sapiens
acgcacccgtatctgccctccttgctggtagaagctgaagagcacggtcccccaggaggcagctcaggataggtggtatggagctgtgccgaggcttgggstcccacataagcactagtctatagatgcctcttaggactggtgcctggcacagctgcgggccaggaggctgccacacggaagcaagcagatgaactaatt

SEQ ID NO: 72856 - DNA, 201 bp, Homo sapiens
cacagaggagccacaggccaagaaggtcagagcccagtgaagatctgggagaccctgaactcagaaggctgtgtgtcttctgccccacgcacgcacccgtrtctgccctccttgctggtagaagctgaagagcacggtcccccaggaggcagctcaggataggtggtatggagctgtgccgaggcttggggtcccacataa

SEQ ID NO: 72857 - DNA, 201 bp, Homo sapiens
ccgggcggcaggtcagccccgaagcgctggaagggaagatcctggctgttgatattagcatttggttaaaccaagcacttaaaggagtccgggatcgccaygggaactcaatagaaaatcctcatcttctcactttgtttcatcggctctgcaaactcttattttttcgaattcgtcctatttttgtgtttgatggggatg

SEQ ID NO: 72858 - DNA, 201 bp, Homo sapiens
ctactgtcaccggacagatgttcctggaaagccaggaactcctgcgcctgttcggcattccctacatccaggctcccatggaagcagaggcgcagtgcgcmatcctggacctgactgatcagacttccggaaccatcactgatgacagtgatatctggctgtttggagcgcggcatgtctatagaaacttttttaataaaa

SEQ ID NO: 72859 - DNA, 201 bp, Homo sapiens
tagagtagaagttgtcggggtccgctcttaggacgcagccgcctcatgggggtccaggggctctggaagctgctggagtgctccgggcggcaggtcagccycgaagcgctggaagggaagatcctggctgttgatattagcatttggttaaaccaagcacttaaaggagtccgggatcgccacgggaactcaatagaaaat

SEQ ID NO: 72860 - DNA, 201 bp, Homo sapiens
ccgtggaaccaatggaaattgactcggaagaaagtgaatctgatggaagtttcattgaagtgcaaagtgtgattagtgatgaggaacttcaagcagaattmcctgaaacttccaaacctccctcagaacaaggcgaagaggaactggtaggaactagggagggagaagcccctgctgagtccgagagcctcctgagggaca

SEQ ID NO: 72861 - DNA, 201 bp, Homo sapiens
agcaatgccagaggagtctgatgacttttcacagtaccaactcaaaggcttgcttaaaaagaactatctgaaccagcatatagaacatgtccaaaaggaartgaatcagcaacattcaggacacatccgaaggcagtatgaagatgaagggggctttctgaaggaggtagagtcaaggagagtggtctctgaagacacttc

SEQ ID NO: 72862 - DNA, 201 bp, Homo sapiens
ccagaggagtctgatgacttttcacagtaccaactcaaaggcttgcttaaaaagaactatctgaaccagcatatagaacatgtccaaaaggaaatgaatcrgcaacattcaggacacatccgaaggcagtatgaagatgaagggggctttctgaaggaggtagagtcaaggagagtggtctctgaagacacttcacattac

SEQ ID NO: 72863 - DNA, 104 bp, Homo sapiens
ttcrtgggtttgcggacccaccagcgaaggcgggaggtgtcgcagggacatcttctggctgtttccgtcgcctgcgtggcccttgcaccccggtcttccattag

SEQ ID NO: 72864 - DNA, 201 bp, Homo sapiens
ctttcctaacccagctgttgccgaggcctacctcaaacccgtggtggatgactcgaagggatcctttctgtgggggaaacctgatctcgacaaaattagakaattttgtcagcggtatttcggctggaacagaacgaagacagatgaatctctgtttcctgtattaaagcaactcgatgcccagcagacacagctccgaat

SEQ ID NO: 72865 - DNA, 201 bp, Homo sapiens
cgctcccattagtgccgtcccccactggaaaaccgtggcttctgtattatttgccatctttgttgtgtaggagcagggagggcttcctcccggggtcctargcggcggtgcagtccgtcgtagaagaattagagtagaagttgtcggggtccgctcttaggacgcagccgcctcatgggggtccaggggctctggaagctg

SEQ ID NO: 72866 - DNA, 201 bp, Homo sapiens
tgaaaacatttttgaaaagacaagccatcaaaactgccttcagaagcaaaagagatgaagcactacccagtcttacccaagttcgaagagaaaacgacctstatgttttgcctcctttacaagaggaagaaaaacacagttcagaagaggaagatgaaaaagaatggcaagaaagaatgaatcaaaaacaagcattacagg

SEQ ID NO: 72867 - DNA, 201 bp, Homo sapiens
cggatcgctgctactgtcaccggacagatgttcctggaaagccaggaactcctgcgcctgttcggcattccctacatccaggctcccatggaagcagaggygcagtgcgccatcctggacctgactgatcagacttccggaaccatcactgatgacagtgatatctggctgtttggagcgcggcatgtctatagaaacttt

SEQ ID NO: 72868 - DNA, 201 bp, Homo sapiens
tctctgaagacacttcacattacatcttgataaaaggtattcaagctaagacagttgcagaagtggattcagagtctcttccttcttccagcaaaatgcayggcatgtcttttgacgtgaagtcatctccatgtgaaaaactgaagacagagaaagagcctgatgctacccctccttctccaagaactttactagctatgc

SEQ ID NO: 72869 - DNA, 201 bp, Homo sapiens
cacattacatcttgataaaaggtattcaagctaagacagttgcagaagtggattcagagtctcttccttcttccagcaaaatgcacggcatgtcttttgaygtgaagtcatctccatgtgaaaaactgaagacagagaaagagcctgatgctacccctccttctccaagaactttactagctatgcaagctgccctgctgg

SEQ ID NO: 72870 - DNA, 201 bp, Homo sapiens
ctaagcgctgggcgaggcgaggccctgcccctccccgccaacggccattctctggacctgtctttcttccgggaggcggtgacagctgctgagacgtgttscagccagagtctctccgctttaatgcgctcccattagtgccgtcccccactggaaaaccgtggcttctgtattatttgccatctttgttgtgtaggagca

SEQ ID NO: 72871 - DNA, 201 bp, Homo sapiens
gtagacgaaggctccatatcaccccggactctttcagccattaagagagctcttgacgatgacgaagatgtaaaagtgtgtgctggggatgatgtgcagaygggagggccaggagcagaagaaatgcgtataaacagctccaccgagaacagtgatgaaggacttaaagtgagagatggaaaaggaataccgtttactgca

SEQ ID NO: 72872 - DNA, 201 bp, Homo sapiens
tcaaggagagtggtctctgaagacacttcacattacatcttgataaaaggtattcaagctaagacagttgcagaagtggattcagagtctcttccttcttscagcaaaatgcacggcatgtcttttgacgtgaagtcatctccatgtgaaaaactgaagacagagaaagagcctgatgctacccctccttctccaagaact

SEQ ID NO: 72873 - DNA, 201 bp, Homo sapiens
aagcagaattccctgaaacttccaaacctccctcagaacaaggcgaagaggaactggtaggaactagggagggagaagcccctgctgagtccgagagcctmctgagggacaactctgagagggacgacgtggatggtgagccacaggaagctgagaaagatgcggaagattcgctccatgaatggcaagatattaatttgg

SEQ ID NO: 72874 - DNA, 201 bp, Homo sapiens
gacagaaaagatcggctgcctctggagagtgcagtggttagacatagtgacgcacctgggctcccgaatggaagggaactgacaccggcatctccaacttstacaaattctgtgtcaaagaatgaaacacatgctgaagtgcttgagcagcagaacgaactttgcccatatgagagtaaattcgattcttctcttctttca

SEQ ID NO: 72875 - DNA, 201 bp, Homo sapiens
cgtcatctagtgtgaactctgcagaggagcacgtagccagcactaatgaggggagagagcccacagactcagttccaaaagaacaaatgtcacttgttcaygtggggactgaagcctttccgataagtgatgagtctatgattaaggacagaaaagatcggctgcctctggagagtgcagtggttagacatagtgacgcac

SEQ ID NO: 72876 - DNA, 201 bp, Homo sapiens
ggatttttgggggagacctgcctctcagaatcatctgatggatcttcaagtgaacatgctgaaagttcatctttaatgaatgtacaaaggagaacagctgygaaagagccaaaaaccagtgcttcagattcgcagaactcagtgaaggaagctcccgtgaagaatggaggtgcgaccaccagcagctctagtgatagtgat

SEQ ID NO: 72877 - DNA, 201 bp, Homo sapiens
ctcccattagtgccgtcccccactggaaaaccgtggcttctgtattatttgccatctttgttgtgtaggagcagggagggcttcctcccggggtcctaggyggcggtgcagtccgtcgtagaagaattagagtagaagttgtcggggtccgctcttaggacgcagccgcctcatgggggtccaggggctctggaagctgct

SEQ ID NO: 72878 - DNA, 163 bp, Homo sapiens
ccgccagatctgtgtttgggaagaaaagaaggaaactaagacgtgcgaggggaagaaaaaggaaaacctaattaaaaaatatgtatcctctataattagtyatgacagccatttgtaatgaatttgtcgcaaagacgtaataaaattaactggtggcacggtc

SEQ ID NO: 72879 - DNA, 109 bp, Homo sapiens
gaaaaaggaaaacctaattaaaaaatatgtatcctctataattagttatgacagccatttgtaatgaatttgtcgcaaagacgtaataaaattaactggtrgcacggtc

SEQ ID NO: 72880 - DNA, 201 bp, Homo sapiens
gaaaagaaagaggctttcagattctaaacgaaagaatacatgcggtggatttttgggggagacctgcctctcagaatcatctgatggatcttcaagtgaasatgctgaaagttcatctttaatgaatgtacaaaggagaacagctgcgaaagagccaaaaaccagtgcttcagattcgcagaactcagtgaaggaagctcc

SEQ ID NO: 72881 - DNA, 201 bp, Homo sapiens
ttcacagtaccaactcaaaggcttgcttaaaaagaactatctgaaccagcatatagaacatgtccaaaaggaaatgaatcagcaacattcaggacacatcygaaggcagtatgaagatgaagggggctttctgaaggaggtagagtcaaggagagtggtctctgaagacacttcacattacatcttgataaaaggtattca

SEQ ID NO: 72882 - DNA, 201 bp, Homo sapiens
ccttgcaccccggtcttccattagcggcgcagacgtttgggcctaagcgctgggcgaggcgaggccctgcccctccccgccaacggccattctctggaccygtctttcttccgggaggcggtgacagctgctgagacgtgttgcagccagagtctctccgctttaatgcgctcccattagtgccgtcccccactggaaaac

SEQ ID NO: 72883 - DNA, 156 bp, Homo sapiens
atgggggtccaggggctctggaagctgctggagtgctccgggcggcaggtcagccycgaagcgctggaagggaagatcctggctgttgaaacttcccagtggccgtatcacctcctgccattccttttgtcctgctgcactggcttcctggagata

SEQ ID NO: 72884 - DNA, 201 bp, Homo sapiens
agcattgggtataagagccgccctgtcgacccaagcgtgccctttgactccaagcttggggtcatccccaatgtggagggccgggttatggatgtgccagkcctctactgcagcggctgggtgaagagaggacctacaggtgtcatagccacaaccatgactgacagcttcctcaccggccagatgctgctgcaggacctg

SEQ ID NO: 72885 - DNA, 201 bp, Homo sapiens
cgcctgatcaccccgaggtgaagaatgtcatcaacacatttacccagacggcccattctggccgctgtgccttctggggcaacgtggaggtgggcagggaygtgacggtgccggagctgcgggaggcctaccacgctgtggtgctgagctacggggcagaggaccatcgggccctggaaattcctggtgaggagctgccag

SEQ ID NO: 72886 - DNA, 201 bp, Homo sapiens
tagcagtcactagactggagggtgtcgatgaggccacccgtgcagtgcccacgggagacatggaagacctcccttgtgggctggtgctcagcagcattggrtataagagccgccctgtcgacccaagcgtgccctttgactccaagcttggggtcatccccaatgtggagggccgggttatggatgtgccaggcctctact

SEQ ID NO: 72887 - DNA, 201 bp, Homo sapiens
aagaatgtcatcaacacatttacccagacggcccattctggccgctgtgccttctggggcaacgtggaggtgggcagggacgtgacggtgccggagctgcrggaggcctaccacgctgtggtgctgagctacggggcagaggaccatcgggccctggaaattcctggtgaggagctgccaggtgtgtgctccgcccgggcc

SEQ ID NO: 72888 - DNA, 201 bp, Homo sapiens
ctagactggagggtgtcgatgaggccacccgtgcagtgcccacgggagacatggaagacctcccttgtgggctggtgctcagcagcattgggtataagagycgccctgtcgacccaagcgtgccctttgactccaagcttggggtcatccccaatgtggagggccgggttatggatgtgccaggcctctactgcagcggct

SEQ ID NO: 72889 - DNA, 201 bp, Homo sapiens
agagtcgagtgaagacagtgtggctagtgggccggcgtggacccctgcaagtggccttcaccattaaggagcttcgggagatgattcagttaccgggagcycggcccattttggatcctgtggatttcttgggtctccaggacaagatcaaggaggtcccccgcccgaggaagcggctgacggaactgctgcttcgaacgg

SEQ ID NO: 72890 - DNA, 167 bp, Homo sapiens
gcccgggcaggagcgggcttgccctgcggagcagtagctaggaacagatccacttgcaggttgctgytcccagccatggcttcgcgctgctggcgctggtggggctggtcggcgtggcctcggacccggctgcctcccgccgggagcaccccgagcttctgccacca

SEQ ID NO: 72891 - DNA, 201 bp, Homo sapiens
gagtcgagtgaagacagtgtggctagtgggccggcgtggacccctgcaagtggccttcaccattaaggagcttcgggagatgattcagttaccgggagccyggcccattttggatcctgtggatttcttgggtctccaggacaagatcaaggaggtcccccgcccgaggaagcggctgacggaactgctgcttcgaacggc

SEQ ID NO: 72892 - DNA, 201 bp, Homo sapiens
gctggtggggctggtcggcgtggcctcggacccggctgcctcccgccgggagcaccccgagcttctgccaccatttctccacacaggagaagaccccccakatctgtgtggtgggcagtggcccagctggcttctacacggcccaacacctgctaaagcacccccaggcccacgtggacatctacgagaaacagcctgtgc

SEQ ID NO: 72893 - DNA, 201 bp, Homo sapiens; identical to SEQ ID NO: 72884

SEQ ID NO: 72894 - DNA, 201 bp, Homo sapiens; identical to SEQ ID NO: 72885

SEQ ID NO: 72895 - DNA, 201 bp, Homo sapiens; identical to SEQ ID NO: 72886

SEQ ID NO: 72896 - DNA, 201 bp, Homo sapiens; identical to SEQ ID NO: 72887

SEQ ID NO: 72897 - DNA, 201 bp, Homo sapiens; identical to SEQ ID NO: 72888

SEQ ID NO: 72898 - DNA, 201 bp, Homo sapiens; identical to SEQ ID NO: 72889

SEQ ID NO: 72899 - DNA, 167 bp, Homo sapiens; identical to SEQ ID NO: 72890

SEQ ID NO: 72900 - DNA, 201 bp, Homo sapiens; identical to SEQ ID NO: 72891

SEQ ID NO: 72901 - DNA, 201 bp, Homo sapiens; identical to SEQ ID NO: 72892

SEQ ID NO: 72902 - DNA, 191 bp, Homo sapiens
gaacttaattccatttgatcagatgaccattgaggacttgaatgaagctttcccagaaaccaaattagacaagaaaaagtatccctattggcctcaccaamcaattgagaatttataaaattgagtccaggaggaagctctggcccttgtattacacattctggacattaaaaataataattatacagttc

SEQ ID NO: 72903 - DNA, 201 bp, Homo sapiens
agaagatgaagaacttaattccatttgatcagatgaccattgaggacttgaatgaagctttcccagaaaccaaattagacaagaaaaagtatccctattgscctcaccaaccaattgagaatttataaaattgagtccaggaggaagctctggcccttgtattacacattctggacattaaaaataataattatacagttc

SEQ ID NO: 72904 - DNA, 109 bp, Homo sapiens
gatcccaaratggctgggcgaaaacttgctctaaaaaccattgactgggtagcttttgcagagatcataccccagaaccaaaaggccattgctagttccctgaaatcct

SEQ ID NO: 72905 - DNA, 201 bp, Homo sapiens
ctcaaaggccaggattgtagaatatgagaaagagatggagaagatgaagaacttaattccatttgatcagatgaccattgaggacttgaatgaagctttcycagaaaccaaattagacaagaaaaagtatccctattggcctcaccaaccaattgagaatttataaaattgagtccaggaggaagctctggcccttgtatt

SEQ ID NO: 72906 - DNA, 201 bp, Homo sapiens
tgagtgggtgtctctctcaaaggccaggattgtagaatatgagaaagagatggagaagatgaagaacttaattccatttgatcagatgaccattgaggacytgaatgaagctttcccagaaaccaaattagacaagaaaaagtatccctattggcctcaccaaccaattgagaatttataaaattgagtccaggaggaagc

SEQ ID NO: 72907 - DNA, 126 bp, Homo sapiens
tagacaagaaaaagtatccctattggcctcaccaaccaattgagaatttataaaattgagtccaggaggaagctctggcccttgtattacacattctggayattaaaaataataattatacagttc

SEQ ID NO: 72908 - DNA, 191 bp, Homo sapiens; identical to SEQ ID NO: 72902

SEQ ID NO: 72909 - DNA, 201 bp, Homo sapiens; identical to SEQ ID NO: 72903

SEQ ID NO: 72910 - DNA, 185 bp, Homo sapiens
ggctgaggaaagatcttcccgtgacccacttccgttacttgctgcggaggaccgtgggcagccagggtcggtgaaggatcccaaratggctgggcgaaaacttgctctaaaaaccattgactgggtagcttttgcagagatcataccccagaaccaaaaggccattgctagttccctgaaatcct

SEQ ID NO: 72911 - DNA, 201 bp, Homo sapiens; identical to SEQ ID NO: 72905

SEQ ID NO: 72912 - DNA, 201 bp, Homo sapiens; identical to SEQ ID NO: 72906

SEQ ID NO: 72913 - DNA, 126 bp, Homo sapiens; identical to SEQ ID NO: 72907

SEQ ID NO: 72914 - DNA, 187 bp, Homo sapiens
gaacttaattccatttgatcagatgaccattgaggacttgaatgaagctttcccagaaaccaaattagacaagaaaaagtatccctattggcctcaccaamcaattgagaatttataaaattgagtccaggaggaagctctggcccttgtattacacattctggacattaaaaataataattataca

SEQ ID NO: 72915 - DNA, 197 bp, Homo sapiens
agaagatgaagaacttaattccatttgatcagatgaccattgaggacttgaatgaagctttcccagaaaccaaattagacaagaaaaagtatccctattgscctcaccaaccaattgagaatttataaaattgagtccaggaggaagctctggcccttgtattacacattctggacattaaaaataataattataca

SEQ ID NO: 72916 - DNA, 185 bp, Homo sapiens; identical to SEQ ID NO: 72910

SEQ ID NO: 72917 - DNA, 201 bp, Homo sapiens; identical to SEQ ID NO: 72905

SEQ ID NO: 72918 - DNA, 201 bp, Homo sapiens; identical to SEQ ID NO: 72906

SEQ ID NO: 72919 - DNA, 122 bp, Homo sapiens
tagacaagaaaaagtatccctattggcctcaccaaccaattgagaatttataaaattgagtccaggaggaagctctggcccttgtattacacattctggayattaaaaataataattataca

SEQ ID NO: 72920 - DNA, 201 bp, Homo sapiens
ttaaaagtaaagactctgtcatgcatttttccccattcttttttttttccctgtctccgtgacaaccagtggttcttcatttttgatcatgcgaaatgcaytttgacccagatggtctgcagaacttcacttaggacattagcacacaaatagcacacatatcacatacccatttatatacataattagaaaatgttcctg

SEQ ID NO: 72921 - DNA, 201 bp, Homo sapiens
gtggttcttcatttttgatcatgcgaaatgcattttgacccagatggtctgcagaacttcacttaggacattagcacacaaatagcacacatatcacatayccatttatatacataattagaaaatgttcctgatacatgtgtcatgtgatttcttccaacaaatgttttggaaaacagcaagcaactagtctgtaggttg

SEQ ID NO: 72922 - DNA, 201 bp, Homo sapiens
aaggccaaggaagctgcggcattgggatcccgtggcagttgcagcactgaagtggagaaggagacccaggagaagatgaccatcctccagacatacttccrgcagaacagggatgaagtcttggacaacctcttggcttttgtctgtgacattcggccagaaatccatgaaaactaccgcataaatggatagaagagagaa

SEQ ID NO: 72923 - DNA, 201 bp, Homo sapiens
cttaggaatttaatggttatatgttgtctttttttcctatgtcttttggctcaagcaacatgtatatcagtgttgactttttctttcttagatctagtttaaaaaaaaaaaaaaccacataacaattctttgaagaaaggaagggattaaataatttttttccctaacactttcttgaaggtcaggggctttatctatgaa

SEQ ID NO: 72924 - DNA, 201 bp, Homo sapiens
tggttatatgttgtctttttttcctatgtcttttggctcaagcaacatgtatatcagtgttgactttttctttcttagatctagtttaaaaaaaaaaaaamccacataacaattctttgaagaaaggaagggattaaataatttttttccctaacactttcttgaaggtcaggggctttatctatgaaaaagtagtaaata

SEQ ID NO: 72925 - DNA, 201 bp, Homo sapiens
tgacaacgggggcgaagcgcaggcgcaaggagcaagcgcagattgtgggcggctgtgtcagctgacccaaggggccttcgaggtgccttaggccgcttgcsttgctctcagaatcgctgccgccatggctagtcagtctcaggggattcagcagctgctgcaggccgagaagcgggcagccgagaaggtgtccgaggcccg

SEQ ID NO: 72926 - DNA, 201 bp, Homo sapiens; identical to SEQ ID NO: 72920

SEQ ID NO: 72927 - DNA, 201 bp, Homo sapiens; identical to SEQ ID NO: 72921

SEQ ID NO: 72928 - DNA, 201 bp, Homo sapiens; identical to SEQ ID NO: 72922

SEQ ID NO: 72929 - DNA, 201 bp, Homo sapiens
caaatctagcttttttgtacagacttagaaattatctaaagatttcatctttttaccacatgtatatcagtgttgactttttctttcttagatctagtttaaaaaaaaaaaaaaccacataacaattctttgaagaaaggaagggattaaataatttttttccctaacactttcttgaaggtcaggggctttatctatgaa

SEQ ID NO: 72930 - DNA, 201 bp, Homo sapiens
tttgtacagacttagaaattatctaaagatttcatctttttaccacatgtatatcagtgttgactttttctttcttagatctagtttaaaaaaaaaaaaamccacataacaattctttgaagaaaggaagggattaaataatttttttccctaacactttcttgaaggtcaggggctttatctatgaaaaagtagtaaata

SEQ ID NO: 72931 - DNA, 201 bp, Homo sapiens; identical to SEQ ID NO: 72925

SEQ ID NO: 72932 - DNA, 201 bp, Homo sapiens
tgccgctggagctggagctgtgtcccgggcgctgggtgggcgggcaacacccgtgcttcatcattgccgagatcggccagaaccaccagggcgacctggaygtagccaagcgcatgatccgcatggccaaggagtgtggggctgattgtgctaagttccagaagagtgagctagaattcaagtttaatcggaaagccttgg

SEQ ID NO: 72933 - DNA, 201 bp, Homo sapiens
cgtgcttcatcattgccgagatcggccagaaccaccagggcgacctggacgtagccaagcgcatgatccgcatggccaaggagtgtggggctgattgtgcyaagttccagaagagtgagctagaattcaagtttaatcggaaagccttggagaggccatacacctcgaagcattcctgggggaagacgtacggggagcaca

SEQ ID NO: 72934 - DNA, 201 bp, Homo sapiens
ggtgggtgagcccaaaggctatcctcctgaagacatctttaatctagtgggcaagaaggtcctggtcactgttgaagaggatgacaccatcatggaagaaytggtagataatcatggcaaaaaaatcaagtcttaaaaataaagtgccattctctgaattctcagttcccttgctgatgctgtcaggtgtgtttgagtgag

SEQ ID NO: 72935 - DNA, 201 bp, Homo sapiens
tagccaagcgcatgatccgcatggccaaggagtgtggggctgattgtgctaagttccagaagagtgagctagaattcaagtttaatcggaaagccttggasaggccatacacctcgaagcattcctgggggaagacgtacggggagcacaaacgacatctggagttcagccatgaccagtacagggagctgcagaggtacg

SEQ ID NO: 72936 - DNA, 201 bp, Homo sapiens; identical to SEQ ID NO: 72932

SEQ ID NO: 72937 - DNA, 201 bp, Homo sapiens; identical to SEQ ID NO: 72933

SEQ ID NO: 72938 - DNA, 201 bp, Homo sapiens; identical to SEQ ID NO: 72935

SEQ ID NO: 72939 - DNA, 201 bp, Homo sapiens; identical to SEQ ID NO: 72932

SEQ ID NO: 72940 - DNA, 201 bp, Homo sapiens; identical to SEQ ID NO: 72933

SEQ ID NO: 72941 - DNA, 201 bp, Homo sapiens; identical to SEQ ID NO: 72934

SEQ ID NO: 72942 - DNA, 201 bp, Homo sapiens; identical to SEQ ID NO: 72935

SEQ ID NO: 72943 - DNA, 201 bp, Homo sapiens; identical to SEQ ID NO: 72932

SEQ ID NO: 72944 - DNA, 201 bp, Homo sapiens; identical to SEQ ID NO: 72933

SEQ ID NO: 72945 - DNA, 201 bp, Homo sapiens; identical to SEQ ID NO: 72935

SEQ ID NO: 72946 - DNA, 201 bp, Homo sapiens; identical to SEQ ID NO: 72934

SEQ ID NO: 72947 - DNA, 201 bp, Homo sapiens
gcatggacctggaccgcaggcgcgaggaggcccgcaaccccaagcggaagccgcgcctcatggaggaggacgagctcccctcgtggatcatcaaggacgaygcggaggtggagcggctgacctgtgaggaggaggaggagaagatgttcggccgtggctcccgccaccgcaaggaggtggactacagcgactcactgacgg

SEQ ID NO: 72948 - DNA, 201 bp, Homo sapiens
cgcgaaaggagctgcccgagtactacgagctcatccgcaagcccgtggacttcaagaagataaaggagcgcattcgcaaccacaagtaccgcagcctcaaygacctagagaaggacgtcatgctcctgtgccagaacgcacagaccttcaacctggagggctccctgatctatgaagactccatcgtcttgcagtcggtct

SEQ ID NO: 72949 - DNA, 201 bp, Homo sapiens
agaagcaccaggaatacctcaatagcattctccagcatgccaaggatttcaaggaatatcacagatccgtcacaggcaaaatccagaagctgaccaaggcrgtggccacgtaccatgccaacacggagcgggagcagaagaaagagaacgagcggatcgagaaggagcgcatgcggaggctcatggctgaagatgaggagg

SEQ ID NO: 72950 - DNA, 201 bp, Homo sapiens
agatcaagcttggccggaaggagaaggcacaggaccggctgaagggcggccggcggcggccgagccgagggtcccgagccaagccggtcgtgagtgacgaygacagtgaggaggaacaagaggaggaccgctcaggaagtggcagcgaagaagactgagccccgacattccagtctcgaccccgagcccctcgttccagag

SEQ ID NO: 72951 - DNA, 201 bp, Homo sapiens
tcaaggaatatcacagatccgtcacaggcaaaatccagaagctgaccaaggcagtggccacgtaccatgccaacacggagcgggagcagaagaaagagaaygagcggatcgagaaggagcgcatgcggaggctcatggctgaagatgaggaggggtaccgcaagctcatcgaccagaagaaggacaagcgcctggcctacc

SEQ ID NO: 72952 - DNA, 201 bp, Homo sapiens
acctcaatagcattctccagcatgccaaggatttcaaggaatatcacagatccgtcacaggcaaaatccagaagctgaccaaggcagtggccacgtaccaygccaacacggagcgggagcagaagaaagagaacgagcggatcgagaaggagcgcatgcggaggctcatggctgaagatgaggaggggtaccgcaagctca

SEQ ID NO: 72953 - DNA, 201 bp, Homo sapiens
gaggggtaccgcaagctcatcgaccagaagaaggacaagcgcctggcctacctcttgcagcagacagacgagtacgtggctaacctcacggagctggtgcsgcagcacaaggctgcccaggtcgccaaggagaaaaagaagaaaaagaaaaagaagaaggcagaaaatgcagaaggacagacgcctgccattgggccggat

SEQ ID NO: 72954 - DNA, 201 bp, Homo sapiens
cctacaagcgcagcaagcgccagtccctgcgcgaggcccgcatcactgagaagctggagaagcagcagaagatcgagcaggagcgcaagcgccggcagaarcaccaggaatacctcaatagcattctccagcatgccaaggatttcaaggaatatcacagatccgtcacaggcaaaatccagaagctgaccaaggcagtgg

SEQ ID NO: 72955 - DNA, 201 bp, Homo sapiens
cggaggctcatggctgaagatgaggaggggtaccgcaagctcatcgaccagaagaaggacaagcgcctggcctacctcttgcagcagacagacgagtacgwggctaacctcacggagctggtgcggcagcacaaggctgcccaggtcgccaaggagaaaaagaagaaaaagaaaaagaagaaggcagaaaatgcagaagga

SEQ ID NO: 72956 - DNA, 201 bp, Homo sapiens
cggtgcagggcaagcggccgatgcccgggatgcagcagcagatgccaacgctacctccaccctcggtgtccgcaacaggacccggccctggccctggcccyggccccggcccgggtcccggcccggcacctccaaattacagcaggcctcatggtatgggagggcccaacatgcctcccccaggaccctcgggcgtgcccc

SEQ ID NO: 72957 - DNA, 201 bp, Homo sapiens
ggacgacgagagcaagaagcagaagaagcgcgggcggccgcctgccgagaaactctcccctaacccacccaacctcaccaagaagatgaagaagattgtgsatgccgtgatcaagtacaaggacagcagcagtggacgtcagctcagcgaggtcttcatccagctgccctcgcgaaaggagctgcccgagtactacgagct

SEQ ID NO: 72958 - DNA, 201 bp, Homo sapiens
atgcctctagtccagttccagccagtggcccgtcttcggggccccagatgtcttccgggccaggaggtgccccgctggatggtgctgacccccaggccttkgggcagcagaaccggggcccaaccccatttaaccagaaccagctgcaccagctcagagctcagatcatggcctacaagatgctggccagggggcagcccc

SEQ ID NO: 72959 - DNA, 201 bp, Homo sapiens
ccgagtactacgagctcatccgcaagcccgtggacttcaagaagataaaggagcgcattcgcaaccacaagtaccgcagcctcaacgacctagagaaggaygtcatgctcctgtgccagaacgcacagaccttcaacctggagggctccctgatctatgaagactccatcgtcttgcagtcggtcttcaccagcgtgcggc

SEQ ID NO: 72960 - DNA, 201 bp, Homo sapiens; identical to SEQ ID NO: 72947

SEQ ID NO: 72961 - DNA, 201 bp, Homo sapiens; identical to SEQ ID NO: 72948

SEQ ID NO: 72962 - DNA, 201 bp, Homo sapiens; identical to SEQ ID NO: 72949

SEQ ID NO: 72963 - DNA, 201 bp, Homo sapiens; identical to SEQ ID NO: 72950

SEQ ID NO: 72964 - DNA, 201 bp, Homo sapiens; identical to SEQ ID NO: 72951

SEQ ID NO: 72965 - DNA, 201 bp, Homo sapiens
agggctggacctgtaccgagcctcgggtaaatttgagcttcttgatagaattcttcccaaactccgagcaaccaaccacaaagtgctgctgttctgccaartgacctccctcatgaccatcatggaagattactttgcgtatcgcggctttaaatacctcaggcttgatggaaccacgaaggcggaggaccggggcatgct

SEQ ID NO: 72966 - DNA, 201 bp, Homo sapiens; identical to SEQ ID NO: 72952

SEQ ID NO: 72967 - DNA, 201 bp, Homo sapiens; identical to SEQ ID NO: 72953

SEQ ID NO: 72968 - DNA, 201 bp, Homo sapiens; identical to SEQ ID NO: 72954

SEQ ID NO: 72969 - DNA, 201 bp, Homo sapiens; identical to SEQ ID NO: 72955

SEQ ID NO: 72970 - DNA, 201 bp, Homo sapiens; identical to SEQ ID NO: 72956

SEQ ID NO: 72971 - DNA, 201 bp, Homo sapiens; identical to SEQ ID NO: 72958

SEQ ID NO: 72972 - DNA, 201 bp, Homo sapiens
ggacgacgagagcaagaagcagaagaagcgcgggcggccgcctgccgagaaactctcccctaacccacccaacctcaccaagaagatgaagaagattgtgsatgccgtgatcaagtacaaggacagcagtggacgtcagctcagcgaggtcttcatccagctgccctcgcgaaaggagctgcccgagtactacgagctcat

SEQ ID NO: 72973 - DNA, 201 bp, Homo sapiens; identical to SEQ ID NO: 72959

SEQ ID NO: 72974 - DNA, 201 bp, Homo sapiens; identical to SEQ ID NO: 72947

SEQ ID NO: 72975 - DNA, 201 bp, Homo sapiens; identical to SEQ ID NO: 72948

SEQ ID NO: 72976 - DNA, 201 bp, Homo sapiens; identical to SEQ ID NO: 72949

SEQ ID NO: 72977 - DNA, 201 bp, Homo sapiens; identical to SEQ ID NO: 72950

SEQ ID NO: 72978 - DNA, 201 bp, Homo sapiens; identical to SEQ ID NO: 72951

SEQ ID NO: 72979 - DNA, 201 bp, Homo sapiens; identical to SEQ ID NO: 72952

SEQ ID NO: 72980 - DNA, 201 bp, Homo sapiens; identical to SEQ ID NO: 72953

SEQ ID NO: 72981 - DNA, 201 bp, Homo sapiens; identical to SEQ ID NO: 72954

SEQ ID NO: 72982 - DNA, 201 bp, Homo sapiens; identical to SEQ ID NO: 72955

SEQ ID NO: 72983 - DNA, 201 bp, Homo sapiens; identical to SEQ ID NO: 72956

SEQ ID NO: 72984 - DNA, 201 bp, Homo sapiens; identical to SEQ ID NO: 72957

SEQ ID NO: 72985 - DNA, 201 bp, Homo sapiens; identical to SEQ ID NO: 72958

SEQ ID NO: 72986 - DNA, 201 bp, Homo sapiens; identical to SEQ ID NO: 72959

SEQ ID NO: 72987 - DNA, 201 bp, Homo sapiens; identical to SEQ ID NO: 72947

SEQ ID NO: 72988 - DNA, 201 bp, Homo sapiens; identical to SEQ ID NO: 72948

SEQ ID NO: 72989 - DNA, 201 bp, Homo sapiens; identical to SEQ ID NO: 72949

SEQ ID NO: 72990 - DNA, 201 bp, Homo sapiens; identical to SEQ ID NO: 72950

SEQ ID NO: 72991 - DNA, 201 bp, Homo sapiens; identical to SEQ ID NO: 72951

SEQ ID NO: 72992 - DNA, 201 bp, Homo sapiens; identical to SEQ ID NO: 72952

SEQ ID NO: 72993 - DNA, 201 bp, Homo sapiens; identical to SEQ ID NO: 72953

SEQ ID NO: 72994 - DNA, 201 bp, Homo sapiens; identical to SEQ ID NO: 72954

SEQ ID NO: 72995 - DNA, 201 bp, Homo sapiens; identical to SEQ ID NO: 72955

SEQ ID NO: 72996 - DNA, 201 bp, Homo sapiens; identical to SEQ ID NO: 72956

SEQ ID NO: 72997 - DNA, 201 bp, Homo sapiens; identical to SEQ ID NO: 72957

SEQ ID NO: 72998 - DNA, 201 bp, Homo sapiens; identical to SEQ ID NO: 72958

SEQ ID NO: 72999 - DNA, 201 bp, Homo sapiens; identical to SEQ ID NO: 72959

SEQ ID NO: 73000 - DNA, 201 bp, Homo sapiens; identical to SEQ ID NO: 72947

SEQ ID NO: 73001 - DNA, 201 bp, Homo sapiens; identical to SEQ ID NO: 72948

SEQ ID NO: 73002 - DNA, 201 bp, Homo sapiens; identical to SEQ ID NO: 72949

SEQ ID NO: 73003 - DNA, 201 bp, Homo sapiens; identical to SEQ ID NO: 72950

SEQ ID NO: 73004 - DNA, 201 bp, Homo sapiens; identical to SEQ ID NO: 72951

SEQ ID NO: 73005 - DNA, 201 bp, Homo sapiens; identical to SEQ ID NO: 72952

SEQ ID NO: 73006 - DNA, 201 bp, Homo sapiens; identical to SEQ ID NO: 72953

SEQ ID NO: 73007 - DNA, 201 bp, Homo sapiens; identical to SEQ ID NO: 72954

SEQ ID NO: 73008 - DNA, 201 bp, Homo sapiens; identical to SEQ ID NO: 72955

SEQ ID NO: 73009 - DNA, 201 bp, Homo sapiens; identical to SEQ ID NO: 72956

SEQ ID NO: 73010 - DNA, 201 bp, Homo sapiens; identical to SEQ ID NO: 72957

SEQ ID NO: 73011 - DNA, 201 bp, Homo sapiens; identical to SEQ ID NO: 72958

SEQ ID NO: 73012 - DNA, 201 bp, Homo sapiens; identical to SEQ ID NO: 72959

SEQ ID NO: 73013 - DNA, 201 bp, Homo sapiens; identical to SEQ ID NO: 72947

SEQ ID NO: 73014 - DNA, 201 bp, Homo sapiens; identical to SEQ ID NO: 72948

SEQ ID NO: 73015 - DNA, 201 bp, Homo sapiens; identical to SEQ ID NO: 72950

SEQ ID NO: 73016 - DNA, 201 bp, Homo sapiens
ccgggccaggaggtgccccgctggatggtgctgacccccaggccttggggcagcagaaccggggcccaaccccatttaaccagaaccagaagaaagagaaygagcggatcgagaaggagcgcatgcggaggctcatggctgaagatgaggaggggtaccgcaagctcatcgaccagaagaaggacaagcgcctggcctacc

SEQ ID NO: 73017 - DNA, 201 bp, Homo sapiens; identical to SEQ ID NO: 72953

SEQ ID NO: 73018 - DNA, 201 bp, Homo sapiens; identical to SEQ ID NO: 72955

SEQ ID NO: 73019 - DNA, 201 bp, Homo sapiens
atgcctctagtccagttccagccagtggcccgtcttcggggccccagatgtcttccgggccaggaggtgccccgctggatggtgctgacccccaggccttkgggcagcagaaccggggcccaaccccatttaaccagaaccagaagaaagagaacgagcggatcgagaaggagcgcatgcggaggctcatggctgaagatg

SEQ ID NO: 73020 - DNA, 201 bp, Homo sapiens; identical to SEQ ID NO: 72972

SEQ ID NO: 73021 - DNA, 201 bp, Homo sapiens; identical to SEQ ID NO: 72959

SEQ ID NO: 73022 - DNA, 201 bp, Homo sapiens; identical to SEQ ID NO: 72947

SEQ ID NO: 73023 - DNA, 201 bp, Homo sapiens; identical to SEQ ID NO: 72948

SEQ ID NO: 73024 - DNA, 201 bp, Homo sapiens; identical to SEQ ID NO: 72949

SEQ ID NO: 73025 - DNA, 201 bp, Homo sapiens; identical to SEQ ID NO: 72950

SEQ ID NO: 73026 - DNA, 201 bp, Homo sapiens; identical to SEQ ID NO: 72951

SEQ ID NO: 73027 - DNA, 201 bp, Homo sapiens; identical to SEQ ID NO: 72952

SEQ ID NO: 73028 - DNA, 201 bp, Homo sapiens; identical to SEQ ID NO: 72953

SEQ ID NO: 73029 - DNA, 201 bp, Homo sapiens; identical to SEQ ID NO: 72954

SEQ ID NO: 73030 - DNA, 201 bp, Homo sapiens; identical to SEQ ID NO: 72955

SEQ ID NO: 73031 - DNA, 201 bp, Homo sapiens; identical to SEQ ID NO: 72956

SEQ ID NO: 73032 - DNA, 201 bp, Homo sapiens; identical to SEQ ID NO: 72957

SEQ ID NO: 73033 - DNA, 201 bp, Homo sapiens; identical to SEQ ID NO: 72958

SEQ ID NO: 73034 - DNA, 201 bp, Homo sapiens; identical to SEQ ID NO: 72959

SEQ ID NO: 73035 - DNA, 201 bp, Homo sapiens; identical to SEQ ID NO: 72947

SEQ ID NO: 73036 - DNA, 201 bp, Homo sapiens; identical to SEQ ID NO: 72948

SEQ ID NO: 73037 - DNA, 201 bp, Homo sapiens; identical to SEQ ID NO: 72950

SEQ ID NO: 73038 - DNA, 201 bp, Homo sapiens; identical to SEQ ID NO: 73016

SEQ ID NO: 73039 - DNA, 201 bp, Homo sapiens; identical to SEQ ID NO: 72953

SEQ ID NO: 73040 - DNA, 201 bp, Homo sapiens; identical to SEQ ID NO: 72955

SEQ ID NO: 73041 - DNA, 201 bp, Homo sapiens; identical to SEQ ID NO: 73019

SEQ ID NO: 73042 - DNA, 201 bp, Homo sapiens; identical to SEQ ID NO: 72957

SEQ ID NO: 73043 - DNA, 201 bp, Homo sapiens; identical to SEQ ID NO: 72959

SEQ ID NO: 73044 - DNA, 201 bp, Homo sapiens
gttccaggagacctttgaggacgtattctctgaccgctcccttcgcaaagtgccctggtacgtgctagccggaaaccatgaccaccttggcaatgtctctrcccagattgcatactctaagatctccaagcgctggaacttccccagccctttctaccgcctgcacttcaagatcccacagaccaatgtgtctgtggccat

SEQ ID NO: 73045 - DNA, 201 bp, Homo sapiens; identical to SEQ ID NO: 73044

SEQ ID NO: 73046 - DNA, 201 bp, Homo sapiens; identical to SEQ ID NO: 73044

SEQ ID NO: 73047 - DNA, 201 bp, Homo sapiens; identical to SEQ ID NO: 73044

SEQ ID NO: 73048 - DNA, 201 bp, Homo sapiens
atcgtggtcatcccgggcaaggtggaggaggtgtcactccccgagcaggtggacatcatcatctcggagcccatgggctacatgctcttcaacgagcgcawgctggagagctacctccacgccaagaagtacctgaagcccagcggaaacatgtttcctaccattggtgacgtccaccttgcacccttcacggatgaacag

SEQ ID NO: 73049 - DNA, 201 bp, Homo sapiens
ctgtgcccggccttcctggtgggcgtggtccgcgtggccgagtaccgaaaccactggtcggacgtgctggctggcttcctgacaggggcggccatcgccasctttttggtcacctgcgttgtgcataactttcagagccggccaccctctggccgaaggctctctccctgggaggacctgggccaagcccccaccatggat

SEQ ID NO: 73050 - DNA, 150 bp, Homo sapiens
ctcggagtctgcgcggcgcggccaggcccggccgaccgcgtctcggtctycgcgtctgccagcctggctggcagtccgtctgtccatcccgccgcgccggggcagtctaggcggagcgggggctcaggcggcggcggcctcgacgcgagt

SEQ ID NO: 73051 - DNA, 201 bp, Homo sapiens
tgtctccccttgcctgtgcccaggtcatcccaaacccttctgttatttattagggctgtgggaagggtttttcttctttttcttggaacctgcccctgttyttcacactgccccccatgcctcagcctcatacagatgtgccatcatggggggcatgggtggagcagaggggctccctcaccccgggcaggcaaaggcagt

SEQ ID NO: 73052 - DNA, 201 bp, Homo sapiens; identical to SEQ ID NO: 73049

SEQ ID NO: 73053 - DNA, 150 bp, Homo sapiens; identical to SEQ ID NO: 73050

SEQ ID NO: 73054 - DNA, 201 bp, Homo sapiens; identical to SEQ ID NO: 73049

SEQ ID NO: 73055 - DNA, 150 bp, Homo sapiens; identical to SEQ ID NO: 73050

SEQ ID NO: 73056 - DNA, 201 bp, Homo sapiens; identical to SEQ ID NO: 73051

SEQ ID NO: 73057 - DNA, 201 bp, Homo sapiens
cgccaaatgagatatcatttctttcctatccatctgttttacaaatgaggagacaggctcagagaagtaacctacttatctaaggccacatagctagtaastggtggaaccagaactggaactaaggccatttaactgcaaatactgacctcctgtcatttatcaagccattttcagacggcatgatattctcctgaggag

SEQ ID NO: 73058 - DNA, 201 bp, Homo sapiens
atataaaatgctacttctagtaagtttttaattatattcagacacttgaagtgaaaacctgcctataaaattaattatatctaacactaaatttgatagarataggaaagcttttggcagtgaaaaatattgttttccatcaaaccagtaaataacaagatttttaatgcttgaatgatgattaatcttcagcattagcag

SEQ ID NO: 73059 - DNA, 201 bp, Homo sapiens
atctgtgctttgaaaaatcctggaaaatacaaatctgtgtcagcatttgctccaatttgcaaccctgtactctgtccctggggcaaaaaagcctttagtgratatttgggaacagatcaaagtaaatggaaggcttatgatgctacccaccttgtgaaatcctatccaggatctcagctggacatactaattgatcaaggg

SEQ ID NO: 73060 - DNA, 201 bp, Homo sapiens
actatagctataagtgcgtaccaaaccatgttttttccaaatgaccttaatttcttggcactacccatgttggatacctcatttgcttccccaaagactgkgcccaaaatttctgttgtttctacaatgattctgcctgccaacaaagtctgaaaatctcaagtttgttataaaaacagcacagttagaacatgatgacat

SEQ ID NO: 73061 - DNA, 187 bp, Homo sapiens
aggggcggggcatcatatgggcggggctgaggcgaggccccggcggccatcttgagccccgccttttacttcggcccgcttcttctrgtcactccgccaccgtagaatcgcctaccatttggtgcaagcaaaaagcaatcagcaattggacaggaaaagaatggcattgaagcagatttccagcaac

SEQ ID NO: 73062 - DNA, 201 bp, Homo sapiens
atttatcaagccattttcagacggcatgatattctcctgaggagcaaaggaatggaattagagctagcacaaggagaaattgtgcatagcttgctgcctaygtaacttatgcagaagatctgagcagtcttcctgtttttagggatattttgcacatgtgaactatatagtgagaaaatgtcaaaaactaatacatgatat

SEQ ID NO: 73063 - DNA, 201 bp, Homo sapiens
ccagccctcgtggctgcaatattaaaggtgaagatgagagctgggactttggcactggtgctggattttatgttgatgccactgaagatccttggaaaacyaactacagaatgtactcttatgtcacagaggagcttccccaactcataaatgccaattttccagtggatccccaaaggatgtctatttttggccactcca

SEQ ID NO: 73064 - DNA, 201 bp, Homo sapiens; identical to SEQ ID NO: 73059

SEQ ID NO: 73065 - DNA, 187 bp, Homo sapiens; identical to SEQ ID NO: 73061

SEQ ID NO: 73066 - DNA, 201 bp, Homo sapiens; identical to SEQ ID NO: 73063

SEQ ID NO: 73067 - DNA, 201 bp, Homo sapiens; identical to SEQ ID NO: 73059

SEQ ID NO: 73068 - DNA, 187 bp, Homo sapiens; identical to SEQ ID NO: 73061

SEQ ID NO: 73069 - DNA, 201 bp, Homo sapiens; identical to SEQ ID NO: 73063

SEQ ID NO: 73070 - DNA, 201 bp, Homo sapiens
ccactcacctccggtgtgtctgcagcccggacactaagggagatggatgaatgggtggggaggatgcggcgcacatggccccgggcggctcggcggtcagstgccgcccccacagcggaccggtcggggcgggggtcgggcggtagaaaaaagggccgcgaggcgagcggggcactgggcggaccgcggcggcagcatgag

SEQ ID NO: 73071 - DNA, 201 bp, Homo sapiens
cctgcccatcgacgtgcaccagccccagcccctgggtgctgggagcccagctcccctgcctgctgacgccctggtctctgccttctgcttggaggctgtgwgcccagatcttgccagctttcagcgggccctggaccacatcaccacgctgctgaggcctggggggcacctcctcctcatcggggccctggaggagtcgtg

SEQ ID NO: 73072 - DNA, 201 bp, Homo sapiens
ctggtctctgccttctgcttggaggctgtgagcccagatcttgccagctttcagcgggccctggaccacatcaccacgctgctgaggcctggggggcaccwcctcctcatcggggccctggaggagtcgtggtacctggctggggaggccaggctgacggtggtgccagtgtctgaggaggaggtgagggaggccctggtg

SEQ ID NO: 73073 - DNA, 201 bp, Homo sapiens
ccaatgcgggcgcagcccctgactcggccccgggccaggcggcggtggcttcggcctaccagcgcttcgagccgcgcgcctacctccgcaacaactacgcrccccctcgcggggacctgtgcaacccgaacggcgtcgggccgtggaagctgcgctgcttggcgcagaccttcgccaccggtgaagtgtccggacgcaccc

SEQ ID NO: 73074 - DNA, 201 bp, Homo sapiens
ggataaggagcgccagctgcgagccagggtgaaacgggtcctgcccatcgacgtgcaccagccccagcccctgggtgctgggagcccagctcccctgcctrctgacgccctggtctctgccttctgcttggaggctgtgagcccagatcttgccagctttcagcgggccctggaccacatcaccacgctgctgaggcctgg

SEQ ID NO: 73075 - DNA, 201 bp, Homo sapiens
aggccctggtgcgtagtggctacaaggtccgggacctccgcacctatatcatgcctgcccaccttcagacaggcgtagatgatgtcaagggcgtcttcttygcctgggctcagaaggttgggctgtgagggctgtacctggtgccctgtggcccccacccacctggattccctgttctttgaagtggcacctaataaagaa

SEQ ID NO: 73076 - DNA, 201 bp, Homo sapiens
ttggaggctgtgagcccagatcttgccagctttcagcgggccctggaccacatcaccacgctgctgaggcctggggggcacctcctcctcatcggggcccwggaggagtcgtggtacctggctggggaggccaggctgacggtggtgccagtgtctgaggaggaggtgagggaggccctggtgcgtagtggctacaaggtc

SEQ ID NO: 73077 - DNA, 201 bp, Homo sapiens
tggtacctggctggggaggccaggctgacggtggtgccagtgtctgaggaggaggtgagggaggccctggtgcgtagtggctacaaggtccgggacctccrcacctatatcatgcctgcccaccttcagacaggcgtagatgatgtcaagggcgtcttcttcgcctgggctcagaaggttgggctgtgagggctgtacctg

SEQ ID NO: 73078 - DNA, 182 bp, Homo sapiens
agggcgagggctgcgggagcaagtacggagccgggggtgtgggggacgattgccgctgcagccgccgccccactcacctccrgtgtgtctgcagcccggacactaagggagatggatgaatgggtggggaggatgcggcgcacatggccccgggcggctcggcggtcagctgccgcccccac

SEQ ID NO: 73079 - DNA, 201 bp, Homo sapiens
cctggtgcgtagtggctacaaggtccgggacctccgcacctatatcatgcctgcccaccttcagacaggcgtagatgatgtcaagggcgtcttcttcgccwgggctcagaaggttgggctgtgagggctgtacctggtgccctgtggcccccacccacctggattccctgttctttgaagtggcacctaataaagaaataa

SEQ ID NO: 73080 - DNA, 201 bp, Homo sapiens
gggccttcaactggagcatgtacagccaacatgcctgcctcattgagggcaagggggaatgctggcaggataaggagcgccagctgcgagccagggtgaarcgggtcctgcccatcgacgtgcaccagccccagcccctgggtgctgggagcccagctcccctgcctgctgacgccctggtctctgccttctgcttggagg

SEQ ID NO: 73081 - DNA, 101 bp, Homo sapiens
aaggttgggctgtgagggctgtacctggtgccctgtggcccccacccacctggattccctgttctttgaagtggcacctaataaagaaataataccctgcy

SEQ ID NO: 73082 - DNA, 165 bp, Homo sapiens
atgctgggtggtgtccctaccctttgcgggactgggaacgagacatggactctccttgctctagrccaggccattgctcggcgtctgaaaccattcggtgtccagagatttctgtacacagggcgccagcccaggcctgaggaagcagcggaattccaggcagag

SEQ ID NO: 73083 - DNA, 201 bp, Homo sapiens
cagcaggtatcctagggccaccttacccagcaagcctggagaggagccatccccactgctgccatctggagattttcttccccgtgggttgttggtgagaycccaggctgagcttgctggtttccataaaccaaacaaccaactcagaaattcgtgggaatacacgagacctccgtacagggaagaagagccgtcagagtg

SEQ ID NO: 73084 - DNA, 201 bp, Homo sapiens
gcctgctccttaacacctgcaaccgagggactctgcaacaaggacttcttccagaagatgaaggaaacagctgtgttcatcaacatcagcaggtatcctarggccaccttacccagcaagcctggagaggagccatccccactgctgccatctggagattttcttccccgtgggttgttggtgagaccccaggctgagctt

SEQ ID NO: 73085 - DNA, 201 bp, Homo sapiens
tgtctgcttctcagcagtggcccccacccggcggggcctggcacacagcagcgtggcttcagggagtgttcccagggagcctctgcaggcccattatcctycaccacaaagggctggacttgaggatctgaagggccctctggaggccgcctcccacactgctgagcctggctttgtctggctgtggttcagtgatacttt

SEQ ID NO: 73086 - DNA, 201 bp, Homo sapiens
ctctccttgctctaggccaggccattgctcggcgtctgaaaccattcggtgtccagagatttctgtacacagggcgccagcccaggcctgaggaagcagcrgaattccaggcagagtttgtgtctacccctgagctggctgcccaatctgatttcatcgtcgtggcctgctccttaacacctgcaaccgagggactctgca

SEQ ID NO: 73087 - DNA, 201 bp, Homo sapiens
cattatcctccaccacaaagggctggacttgaggatctgaagggccctctggaggccgcctcccacactgctgagcctggctttgtctggctgtggttcartgatactttgaaccttatgctcctgggcggacagaccctaaaactcacgtggtcgtagctcctcacactgtccctaggggtgccttcaggccactgggca

SEQ ID NO: 73088 - DNA, 180 bp, Homo sapiens
  misc_feature (1)...(180): n = A,T,C or G
atgctgggtggtgtccctaccctttgcgggactgggaacgagacatggactctccttgctctaggccaggccattgctcngcgtctgaaaccattcggtgtccagagatttctgtacacagggcgccagcccaggcctgaggaagcagcggaattccaggcagagtttgtgtctacccct

SEQ ID NO: 73089 - DNA, 201 bp, Homo sapiens
cgggcggcagatggtggctggacctcgtggaagcccctctggctgtgtggctatggactcacgcagagcactgtcggcatcatcgggctggggcgcatagrccaggccattgctcggcgtctgaaaccattcggtgtccagagatttctgtacacagggcgccagcccaggcctgaggaagcagcggaattccaggcagag

SEQ ID NO: 73090 - DNA, 201 bp, Homo sapiens
gtgattctgccccacattggcagtgccacccacagaacccgcaacaccatgtccttgttggcagctaacaacttgctggctggcctgagaggggagccgakgcctagtgaactcaagctgtagccaaacagtagagatggagggccgggaagcaaaccgtgccctggtattgtcagacacacccaggcttgatttggatcc

SEQ ID NO: 73091 - DNA, 187 bp, Homo sapiens
gaagcaaaccgtgccctggtattgtcagacacacccaggcttgatttggatccacaggcagagccaagggaaggtgtgattctctgaggaaagagtgattytgatatatgtacttgtcacattggtgttggacacatttgcgccaaaagtatggtaattctattattaaataattctctgagagacc

SEQ ID NO: 73092 - DNA, 201 bp, Homo sapiens
ggctggggcgcataggccaggccattgctcggcgtctgaaaccattcggtgtccagagatttctgtacacagggcgccagcccaggcctgaggaagcagcrgaattccaggcagagtttgtgtctacccctgagctggctgcccaatctgatttcatcgtcgtggcctgctccttaacacctgcaaccgagggactctgca

SEQ ID NO: 73093 - DNA, 201 bp, Homo sapiens
  misc_feature (1)...(201): n = A,T,C or G
ggctggacctcgtggaagcccctctggctgtgtggctatggactcacgcagagcactgtcggcatcatcgggctggggcgcataggccaggccattgctcngcgtctgaaaccattcggtgtccagagatttctgtacacagggcgccagcccaggcctgaggaagcagcggaattccaggcagagtttgtgtctacccct

SEQ ID NO: 73094 - DNA, 104 bp, Homo sapiens
tccsgggccagcttctgtactgccaggtccgggtcggcggctgcactgcggatgagaccggtgcgactcatgaaggtgttcgtcacccgcaggatacccgccga

SEQ ID NO: 73095 - DNA, 167 bp, Homo sapiens
attgtcagacacacccaggcttgatttggatccacaggcagagccaagggaaggtgtgattctctgaggaaagagtgattctgatatatgtacttgtcacrttggtgttggacacatttgcgccaaaagtatggtaattctattattaaataattctctgagagacc

SEQ ID NO: 73096 - DNA, 201 bp, Homo sapiens
gaagtgaagaatggtggctggacctcgtggaagcccctctggctgtgtggctatggactcacgcagagcactgtcggcatcatcgggctggggcgcatagrccaggccattgctcggcgtctgaaaccattcggtgtccagagatttctgtacacagggcgccagcccaggcctgaggaagcagcggaattccaggcagag

SEQ ID NO: 73097 - DNA, 201 bp, Homo sapiens; identical to SEQ ID NO: 73090

SEQ ID NO: 73098 - DNA, 180 bp, Homo sapiens
cacagtcaccgctcagccgcaacccggcgctccctctcgcgaagccacaccccctgcgcacgccgcgcgcgacgtctctyccgcccactccagcctggccccgccccggcccagctacattcccgggccagcttctgtactgccaggtccgggtcggcggctgcactgcggatgagaccg

SEQ ID NO: 73099 - DNA, 187 bp, Homo sapiens; identical to SEQ ID NO: 73091

SEQ ID NO: 73100 - DNA, 199 bp, Homo sapiens
cacagtcaccgctcagccgcaacccggcgctccctctcgcgaagccacaccccctgcgcacgccgcgcgcgacgtctctcccgcccactccagcctggmcccgccccggcccagctacattcccgggccagcttctgtactgccaggtccgggtcggcggctgcactgcggatgagaccggtgcgactcatgaaggtgt

SEQ ID NO: 73101 - DNA, 201 bp, Homo sapiens; identical to SEQ ID NO: 73092

SEQ ID NO: 73102 - DNA, 167 bp, Homo sapiens; identical to SEQ ID NO: 73095

SEQ ID NO: 73103 - DNA, 201 bp, Homo sapiens
ccggcgctccctctcgcgaagccacaccccctgcgcacgccgcgcgcgacgtctctcccgcccactccagcctggccccgccccggcccagctacattccsgggccagcttctgtactgccaggtccgggtcggcggctgcactgcggatgagaccggtgcgactcatgaaggtgttcgtcacccgcaggatacccgccga

SEQ ID NO: 73104 - DNA, 201 bp, Homo sapiens; identical to SEQ ID NO: 73093
  misc_feature (1)...(201): n = A,T,C or G

SEQ ID NO: 73105 - DNA, 201 bp, Homo sapiens
gatgctgcaggggccaatctcaaagtcatcagcaccatgtctgtgggcatcgaccacttggctttggatgaaatcaagaagcgtgggatccgagttggctrcaccccagatgtcctgacagataccaccgccgaactcgcagtctccctgctacttaccacctgccgccggttgccggaggccatcgaggaagtgaagaat

SEQ ID NO: 73106 - DNA, 201 bp, Homo sapiens
gaggatcctggatgctgcaggggccaatctcaaagtcatcagcaccatgtctgtgggcatcgaccacttggctttggatgaaatcaagaagcgtgggatcygagttggctacaccccagatgtcctgacagataccaccgccgaactcgcagtctccctgctacttaccacctgccgccggttgccggaggccatcgagga

SEQ ID NO: 73107 - DNA, 201 bp, Homo sapiens; identical to SEQ ID NO: 73096

SEQ ID NO: 73108 - DNA, 107 bp, Homo sapiens
ccccccacacacacacaaggacactgtgtagggtcactgttactgtcactccccgagcacgcacagtcaccgctcagccgcaacccggcgctccctctcgcgaagcc

SEQ ID NO: 73109 - DNA, 105 bp, Homo sapiens
ccccycacacacacacaaggacactgtgtagggtcactgttactgtcactccccgagcacgcacagtcaccgctcagccgcaacccggcgctccctctcgcgaag

SEQ ID NO: 73110 - DNA, 201 bp, Homo sapiens; identical to SEQ ID NO: 73090

SEQ ID NO: 73111 - DNA, 201 bp, Homo sapiens
tactgtcactccccgagcacgcacagtcaccgctcagccgcaacccggcgctccctctcgcgaagccacaccccctgcgcacgccgcgcgcgacgtctctyccgcccactccagcctggccccgccccggcccagctacattcccgggccagcttctgtactgccaggtccgggtcggcggctgcactgcggatgagaccg

SEQ ID NO: 73112 - DNA, 187 bp, Homo sapiens; identical to SEQ ID NO: 73091

SEQ ID NO: 73113 - DNA, 201 bp, Homo sapiens
cgcacagtcaccgctcagccgcaacccggcgctccctctcgcgaagccacaccccctgcgcacgccgcgcgcgacgtctctcccgcccactccagcctggmcccgccccggcccagctacattcccgggccagcttctgtactgccaggtccgggtcggcggctgcactgcggatgagaccggtgcgactcatgaaggtgt

SEQ ID NO: 73114 - DNA, 201 bp, Homo sapiens; identical to SEQ ID NO: 73092

SEQ ID NO: 73115 - DNA, 167 bp, Homo sapiens; identical to SEQ ID NO: 73095

SEQ ID NO: 73116 - DNA, 201 bp, Homo sapiens; identical to SEQ ID NO: 73103

SEQ ID NO: 73117 - DNA, 201 bp, Homo sapiens; identical to SEQ ID NO: 73093
  misc_feature (1)...(201): n = A,T,C or G

SEQ ID NO: 73118 - DNA, 201 bp, Homo sapiens; identical to SEQ ID NO: 73105

SEQ ID NO: 73119 - DNA, 201 bp, Homo sapiens; identical to SEQ ID NO: 73106

SEQ ID NO: 73120 - DNA, 201 bp, Homo sapiens
ctgtgtatccagaactgcatgtgcctgaggacaggcctggcttcttcgggatgctccagaacaaaggactaacagactactgctttgactataaccctccsgatgaaaaccagattgtgggacaccaggtcattctgtacctctgtcatgggatgggccagaatcagtttttcgagtacacgtcccagaaagaaatacgct

SEQ ID NO: 73121 - DNA, 201 bp, Homo sapiens
aagcagtgaccagaacccaccaaaaactaggctgcattgctttgaagaggcaatcattttgccatttgtgaaagttgtgttggatttagtaaaaatgtgartaagctttgtacttattttgagaactttttaaatgttccaaaataccctattttcaaagggtaatcgtaagatgttaacccttggtatttagaaaattaa

SEQ ID NO: 73122 - DNA, 201 bp, Homo sapiens
atggatctttatttcacgaacagtccaagaaatgtgtccaggctgcgaggaaggagtcgagtgacagtttcgttccactcttacgagactgcaccaactcsgatcatcagaaatggttcttcaaagagcgcatgttatgaagcctcgtgtatcaaggagcccatcgaaggagactgtggagccaggactctgcccaacaaa

SEQ ID NO: 73123 - DNA, 201 bp, Homo sapiens
aaaaccagattgtgggacaccaggtcattctgtacctctgtcatgggatgggccagaatcagtttttcgagtacacgtcccagaaagaaatacgctataayacccaccagcctgagggctgcattgctgtggaagcaggaatggatacccttatcatgcatctctgcgaagaaactgccccagagaatcagaagttcatct

SEQ ID NO: 73124 - DNA, 201 bp, Homo sapiens
cgtgcccgcttggaaccttttggggatgtgacagagaggaagcagctccgggacaagctccagtgtaaagacttcaagtggttcttggagactgtgtatcyagaactgcatgtgcctgaggacaggcctggcttcttcgggatgctccagaacaaaggactaacagactactgctttgactataaccctcccgatgaaaac

SEQ ID NO: 73125 - DNA, 104 bp, Homo sapiens
gtgyaaagagaagaaatatgattatgataatttgcccaggacatctgttatcatagcattttataatgaagcctggtcaactctccttcggacagtttacagtg

SEQ ID NO: 73126 - DNA, 201 bp, Homo sapiens
caagcaacgtactttgcattaactgataatacctcagctgcggggttaaagttttcccagtatagagagactgtcactaggaacattgtattgatttattsaggtcattgagatcttctagatgtattttaaaaagaatgctttttggttatgtgttgctaccacagttaacactccataatgttcatgtcagccaaagag

SEQ ID NO: 73127 - DNA, 201 bp, Homo sapiens
tcagaaatggttcttcaaagagcgcatgttatgaagcctcgtgtatcaaggagcccatcgaaggagactgtggagccaggactctgcccaacaaagacttwgctaagcagtgaccagaacccaccaaaaactaggctgcattgctttgaagaggcaatcattttgccatttgtgaaagttgtgttggatttagtaaaaatg

SEQ ID NO: 73128 - DNA, 201 bp, Homo sapiens
ttactctcattagcaaaaaagataaagattttattttggtatttacaagaattcccaggtacgaagatatctgcatgggtggaaatcaggttcaagcaacrtactttgcattaactgataatacctcagctgcggggttaaagttttcccagtatagagagactgtcactaggaacattgtattgatttattcaggtcatt

SEQ ID NO: 73129 - DNA, 201 bp, Homo sapiens
aatacctggggaactccggggagccccagatcggcggtttcgactggaggctggtgttcacgtggcacacagttcctgagagggagaggatacggatgcartcccccgtcgatgtcatcaggtctccaacaatggctggtgggctgtttgctgtgagtaagaaatattttgaatatctggggtcttatgatacaggaatgg

SEQ ID NO: 73130 - DNA, 201 bp, Homo sapiens; identical to SEQ ID NO: 73120

SEQ ID NO: 73131 - DNA, 201 bp, Homo sapiens; identical to SEQ ID NO: 73121

SEQ ID NO: 73132 - DNA, 201 bp, Homo sapiens; identical to SEQ ID NO: 73122

SEQ ID NO: 73133 - DNA, 201 bp, Homo sapiens; identical to SEQ ID NO: 73123

SEQ ID NO: 73134 - DNA, 201 bp, Homo sapiens; identical to SEQ ID NO: 73124

SEQ ID NO: 73135 - DNA, 201 bp, Homo sapiens
ggctgcaggaggagagcgtgcggctgcaccagattaacatctacctcagcgaccgcatctcactgcaccgccgcctgcccgagcgctggaacccgctgtgyaaagagaagaaatatgattatgataatttgcccaggacatctgttatcatagcattttataatgaagcctggtcaactctccttcggacagtttacagtg

SEQ ID NO: 73136 - DNA, 201 bp, Homo sapiens; identical to SEQ ID NO: 73126

SEQ ID NO: 73137 - DNA, 201 bp, Homo sapiens; identical to SEQ ID NO: 73127

SEQ ID NO: 73138 - DNA, 201 bp, Homo sapiens; identical to SEQ ID NO: 73128

SEQ ID NO: 73139 - DNA, 201 bp, Homo sapiens; identical to SEQ ID NO: 73129

SEQ ID NO: 73140 - DNA, 201 bp, Homo sapiens; identical to SEQ ID NO: 73120

SEQ ID NO: 73141 - DNA, 201 bp, Homo sapiens; identical to SEQ ID NO: 73121

SEQ ID NO: 73142 - DNA, 201 bp, Homo sapiens; identical to SEQ ID NO: 73122

SEQ ID NO: 73143 - DNA, 201 bp, Homo sapiens; identical to SEQ ID NO: 73123

SEQ ID NO: 73144 - DNA, 201 bp, Homo sapiens; identical to SEQ ID NO: 73135

SEQ ID NO: 73145 - DNA, 201 bp, Homo sapiens; identical to SEQ ID NO: 73124

SEQ ID NO: 73146 - DNA, 201 bp, Homo sapiens; identical to SEQ ID NO: 73126

SEQ ID NO: 73147 - DNA, 201 bp, Homo sapiens; identical to SEQ ID NO: 73127

SEQ ID NO: 73148 - DNA, 201 bp, Homo sapiens; identical to SEQ ID NO: 73128

SEQ ID NO: 73149 - DNA, 201 bp, Homo sapiens; identical to SEQ ID NO: 73129

SEQ ID NO: 73150 - DNA, 201 bp, Homo sapiens
gccagtatgtgaccttcttgaggtctttctcagacaaacagaaaatctccctcctccacagctgcacgtgtgtgctttacacaccaagcaatgagcacttyggcattgtccctctggaagccatgtacatgcagtgcccagtcattgctgttaattcgggtggacccttggagtccattgaccacagtgtcacagggtttc

SEQ ID NO: 73151 - DNA, 201 bp, Homo sapiens
actcggttcccaagccgtcggtgctgttcctccacccagacctgggcgtgggcggcgctgagcggctggtgttggacgcggcgctggcgctgcaggcgcgsgggtgtagcgtgaagatctggacagcgcactacgacccgggccactgtttcgccgagagccgcgagctaccggtgcgctgtgccggggactggctgccgc

SEQ ID NO: 73152 - DNA, 201 bp, Homo sapiens
gccatgtacatgcagtgcccagtcattgctgttaattcgggtggacccttggagtccattgaccacagtgtcacagggtttctgtgtgagcctgacccggygcacttctcagaagcaatagaaaagttcatccgtgaaccttccttaaaagccaccatgggcctggctggaagagccagagtgaaggaaaaattttcccct

SEQ ID NO: 73153 - DNA, 201 bp, Homo sapiens
agtctgctacagacaacttagttacctgctgtatgggaagtagagacctccggcctccttcctttggatcacaacgtccttcagaaagtccaatccctacsgaaggaaaaatataaccggggtcagacaagatattttctcaggcagttactagaccctcacagatttgcgctgatgtggcctaactgacgcacgtacggc

SEQ ID NO: 73154 - DNA, 201 bp, Homo sapiens
gagctacgagcgcggagcttgcgcagaagacccccatcagggtgcggggtgcagttgcggctccagggccatggcggaggagcagggccgggaacgggacycggttcccaagccgtcggtgctgttcctccacccagacctgggcgtgggcggcgctgagcggctggtgttggacgcggcgctggcgctgcaggcgcgcgg

SEQ ID NO: 73155 - DNA, 201 bp, Homo sapiens
gttgcggctccagggccatggcggaggagcagggccgggaacgggactcggttcccaagccgtcggtgctgttcctccacccagacctgggcgtgggcggsgctgagcggctggtgttggacgcggcgctggcgctgcaggcgcgcgggtgtagcgtgaagatctggacagcgcactacgacccgggccactgtttcgccg

SEQ ID NO: 73156 - DNA, 201 bp, Homo sapiens; identical to SEQ ID NO: 73150

SEQ ID NO: 73157 - DNA, 201 bp, Homo sapiens; identical to SEQ ID NO: 73151

SEQ ID NO: 73158 - DNA, 201 bp, Homo sapiens
gccatgtacatgcagtgcccagtcattgctgttaattcgggtggacccttggagtccattgaccacagtgtcacagggtttctgtgtgagcctgacccggyccgtgaaccttccttaaaagccaccatgggcctggctggaagagccagagtgaaggaaaaattttcccctgaagcatttacagaacagctctaccgatat

SEQ ID NO: 73159 - DNA, 140 bp, Homo sapiens
tccagggccatggcggaggagcagggccgggaacgggacycggttcccaagccgtcggtgctgttcctccacccagacctgggcgtgggcggcgctgagcggctggtgttggacgcggcgctggcgctgcaggcgcgcgg

SEQ ID NO: 73160 - DNA, 193 bp, Homo sapiens
tccagggccatggcggaggagcagggccgggaacgggactcggttcccaagccgtcggtgctgttcctccacccagacctgggcgtgggcggsgctgagcggctggtgttggacgcggcgctggcgctgcaggcgcgcgggtgtagcgtgaagatctggacagcgcactacgacccgggccactgtttcgccg

SEQ ID NO: 73161 - DNA, 201 bp, Homo sapiens; identical to SEQ ID NO: 73150

SEQ ID NO: 73162 - DNA, 201 bp, Homo sapiens; identical to SEQ ID NO: 73151

SEQ ID NO: 73163 - DNA, 201 bp, Homo sapiens; identical to SEQ ID NO: 73152

SEQ ID NO: 73164 - DNA, 201 bp, Homo sapiens; identical to SEQ ID NO: 73153

SEQ ID NO: 73165 - DNA, 201 bp, Homo sapiens; identical to SEQ ID NO: 73154

SEQ ID NO: 73166 - DNA, 201 bp, Homo sapiens; identical to SEQ ID NO: 73155

SEQ ID NO: 73167 - DNA, 201 bp, Homo sapiens
acactatcattattccagaaaacctcaaaccacaaatgaaagtccaggtcaagctggatactggcaagaccttccaggctgtcatgaggtttgacactgaygtggagctcacttatttcctcaacgggggcatcctcaactacatgatccgcaagatggccaagtaggagacgtgcacttggtgctgcgcccagggaggaa

SEQ ID NO: 73168 - DNA, 201 bp, Homo sapiens
actttgagagctgccttggagccaagcaaggatttaaaggattccaagttgctcctgaacatcataatgaccataagacctttatctatgataacactgarttcacccttgctcatggttctgtggtcattgctgccattactagctgcacaaacaccagtaatccgtctgtgatgttaggggcaggattgttagcaaaga

SEQ ID NO: 73169 - DNA, 201 bp, Homo sapiens
caggattgttagcaaagaaagctgtggatgctggcctgaacgtgatgccttacatcaaaactagcctgtctcctgggagtggcgtggtcacctactacctrcaagaaagcggagtcatgccttatctgtctcagcttgggtttgacgtggtgggctatggctgcatgacctgcattggcaacagtgggcctttacctgaac

SEQ ID NO: 73170 - DNA, 201 bp, Homo sapiens
gatttgaaaacagtagtgccttgctgtagtggacccaaaaggcctcaggacaaagttgctgtgtccgacatgaaaaaggactttgagagctgccttggagmcaagcaaggatttaaaggattccaagttgctcctgaacatcataatgaccataagacctttatctatgataacactgagttcacccttgctcatggttct

SEQ ID NO: 73171 - DNA, 201 bp, Homo sapiens
acatgaaaaaggactttgagagctgccttggagccaagcaaggatttaaaggattccaagttgctcctgaacatcataatgaccataagacctttatctaygataacactgagttcacccttgctcatggttctgtggtcattgctgccattactagctgcacaaacaccagtaatccgtctgtgatgttaggggcaggat

SEQ ID NO: 73172 - DNA, 201 bp, Homo sapiens
agcaaagaaagctgtggatgctggcctgaacgtgatgccttacatcaaaactagcctgtctcctgggagtggcgtggtcacctactacctacaagaaagcrgagtcatgccttatctgtctcagcttgggtttgacgtggtgggctatggctgcatgacctgcattggcaacagtgggcctttacctgaacctgtggtaga

SEQ ID NO: 73173 - DNA, 201 bp, Homo sapiens
tgatccgcaagatggccaagtaggagacgtgcacttggtgctgcgcccagggaggaagccgcaccaccagccagcgcaggccctggtggagaggcctcccyggctgcctctgggaggggtgctgccttgtagatggagcaagtgagcactgagggtctggtgccaatcctgtaggcacaaaaccagaagtttctacattct

SEQ ID NO: 73174 - DNA, 201 bp, Homo sapiens
atcacaggacgttgctttttcactgtttcctattaatcttcagctgaacacaagcaaaccttctcaggaggtgtctcctaccctcttattgttcctcttamgctctgctcaatgaaaccttcctcttgagggtcattttcctttctgtattaattataccagtgttaagtgacatagataagaactttgcacacttcaaat

SEQ ID NO: 73175 - DNA, 201 bp, Homo sapiens; identical to SEQ ID NO: 73167

SEQ ID NO: 73176 - DNA, 201 bp, Homo sapiens; identical to SEQ ID NO: 73168

SEQ ID NO: 73177 - DNA, 201 bp, Homo sapiens; identical to SEQ ID NO: 73169

SEQ ID NO: 73178 - DNA, 201 bp, Homo sapiens; identical to SEQ ID NO: 73170

SEQ ID NO: 73179 - DNA, 201 bp, Homo sapiens; identical to SEQ ID NO: 73171

SEQ ID NO: 73180 - DNA, 201 bp, Homo sapiens; identical to SEQ ID NO: 73172

SEQ ID NO: 73181 - DNA, 201 bp, Homo sapiens; identical to SEQ ID NO: 73173

SEQ ID NO: 73182 - DNA, 201 bp, Homo sapiens; identical to SEQ ID NO: 73174

SEQ ID NO: 73183 - DNA, 201 bp, Homo sapiens
gctggagtcagggacggccgcacctgcctccgccggctccagtgtgcggggagcctctgcctgagtgtgcaccaggcccatgtttattgaccacagtctgrgggggggggaaggggactgcggtggacaccagaggaagctgtttcctgttgtgatgttggacctgtagtaggacatggtgatttgttaatttccatggga

SEQ ID NO: 73184 - DNA, 201 bp, Homo sapiens
gccatgatggcctagcatggagggaatctgttcccaggccctgcctggaagttgagggaaagtttagacatctgcagagaggcaggcagcccagcccaggkgacccgttcctcttgaaccagtcattgcctgtggcaaatgtgtgtatgagaatgtggggggtggagggcggggccctgatgtggagtagacagtgcgcac

SEQ ID NO: 73185 - DNA, 153 bp, Homo sapiens
ggggccctgatgtggagtagacagtgcgcacctcaggcccacacacggccccgccctggggccttgagcgcaggcctcatctttctgtgccgcgggactcygcacctacctcacagggttgttgtgaggctcaaataaaacatcactcagcac

SEQ ID NO: 73186 - DNA, 201 bp, Homo sapiens; identical to SEQ ID NO: 73183

SEQ ID NO: 73187 - DNA, 201 bp, Homo sapiens; identical to SEQ ID NO: 73184

SEQ ID NO: 73188 - DNA, 153 bp, Homo sapiens; identical to SEQ ID NO: 73185

SEQ ID NO: 73189 - DNA, 201 bp, Homo sapiens
tgctggtttacattcctccccaggctgagctgcggggtggctcctgggtggtgattgactcctccatcaacccccggcacatggagatgtatgctgaccgmgaaagcaggggatctgttctggagccagaagggacagtagaaatcaaattccgcagaaaggatctggtgaaaaccatgcgtcgggtggacccagtctaca

SEQ ID NO: 73190 - DNA, 201 bp, Homo sapiens
acctggagcagctcttgaccctggctgtgtactagccaaaatgcaactggacaaccccagcaaggttcagcaggctgaacttcacacaggtagtctgccayggatccagagcacggcactcagaggcgagaaactccatcgagtgttccattatgtcctggataatctggtcaatgtaatgaatggatactgccttccaga

SEQ ID NO: 73191 - DNA, 201 bp, Homo sapiens
aacctggtgaagttggacctactggaggagaaggagggctccttgtcacctgcttctgttggctcagatacactctctgatttggggatctctagcctacwggatggcttggccttgcacataaggtccagcatgtctggcttgcacctagtaaagcagggccgagacagaaagaaaatagattctcaacgagatttcact

SEQ ID NO: 73192 - DNA, 201 bp, Homo sapiens
tttcaaacatggtggtggctttgaaggagctgtctattcggggtgactttcgaactacagttgaatacctgatcaaattgttagagactgaaagctttcaratgaacagaattgatactggctggctggacagactgatagcagaaaaagtacaggctgagcgacctgacaccatgttgggggttgtgtgtggtgccctcc

SEQ ID NO: 73193 - DNA, 201 bp, Homo sapiens
aggccaatccagaggttgccatggattccatcatccatatgacgcagcacatatcacccactcagcgagcagaagtcatacggatcctctccacaatggaytccccttccacgtaggaagagcttcctgcctgtccctgccctgtctctggagaaaagggctagagctgccttttacaactgtaaccactgtaatgagaag

SEQ ID NO: 73194 - DNA, 201 bp, Homo sapiens
tggtccaggccaatccagaggttgccatggattccatcatccatatgacgcagcacatatcacccactcagcgagcagaagtcatacggatcctctccacwatggattccccttccacgtaggaagagcttcctgcctgtccctgccctgtctctggagaaaagggctagagctgccttttacaactgtaaccactgtaat

SEQ ID NO: 73195 - DNA, 201 bp, Homo sapiens
atctggagcctgctctggctttccagttagagctgaaccggatgagaaattttgacctcactgccattccatgtgctaatcacaagatgcacctgtatctyggggcagccaaggtggaagtgggcacagaagtgacagactacaggttctttgttcgtgcaatcatcaggcattctgatctggtcaccaaggaagcttctt

SEQ ID NO: 73196 - DNA, 201 bp, Homo sapiens
aatctggtcaatgtaatgaatggatactgccttccagatcctttctttagcagcaaggtaaaagactgggtagagcgattgatgaaaaccctcagagatcyctccctgcctctcctagaattgcaagatattatgaccagtgtgtctggccgcattccccccaatgtggagaagtctatcaagaaggaaatggctcagtat

SEQ ID NO: 73197 - DNA, 201 bp, Homo sapiens
gcaaatccgcagcttggtccaggccaatccagaggttgccatggattccatcatccatatgacgcagcacatatcacccactcagcgagcagaagtcatamggatcctctccacaatggattccccttccacgtaggaagagcttcctgcctgtccctgccctgtctctggagaaaagggctagagctgccttttacaact

SEQ ID NO: 73198 - DNA, 201 bp, Homo sapiens
actatgcaaatgtggaattaattcttgatattgctaaaaggatcccagtacaagcagtgtgggctggctggggtcatgcttctgagaatcccaaactaccsgaacttctcttgaaaaatggcattgccttcatgggtcctccaagccaggccatgtgggctttaggggataagattgcatcttccatagtggctcaaactg

SEQ ID NO: 73199 - DNA, 201 bp, Homo sapiens
gagggcaaaactgtgagccaagaagcagagaaagaaaatagaaccagttattcttgatttaggggacctcaaccttgggttcagtctctgaggacaaaggraaaggtagttgttggcctgcctctcgcctgcacgtcactgctggactagctgtcgcatgtggctgggagctgcaaggccagtgcttgaggggccccagca

SEQ ID NO: 73200 - DNA, 201 bp, Homo sapiens
tagaactaagtatcccagctgatccagcaaacctggattctgaagccaagataatccagcaggctggccaggtttggttcccagattctgcgtttaagacrtatcaggccatcaaggacttcaaccgggaagggctgcctctgatggtctttgccaactggagaggcttctctggtggaatgaaagatatgtacgaccaag

SEQ ID NO: 73201 - DNA, 166 bp, Homo sapiens
cctctcagagacaacgtgaagacggataagcaggcatcaggagcagagtggcctctcaggtctttytggaagtggatatctactcagacagtaagaattataagagctgtaagagctcattttggaggaataatggatgaaccatctcccttggcccaacctctgg

SEQ ID NO: 73202 - DNA, 201 bp, Homo sapiens
cacaggtggtgaagcctgagttggcagaggaggagccagaagagaactgccctttctgcactggtggaaactagttatttatgccatgtggagagccagtragatagatagatagtctgtttgttttgaggacttggaaagttgttcctatgaagcctggagcttggatggttttgagaggttaatggtgcctccacactc

SEQ ID NO: 73203 - DNA, 201 bp, Homo sapiens
atggattccccttccacgtaggaagagcttcctgcctgtccctgccctgtctctggagaaaagggctagagctgccttttacaactgtaaccactgtaatragaaggcacaggagacccagcactggagtcaaatggcattttacttcctctcgtttcaggttatgcatgacatcctgggatgtaagatcacagaatcccc

SEQ ID NO: 73204 - DNA, 201 bp, Homo sapiens; identical to SEQ ID NO: 73189

SEQ ID NO: 73205 - DNA, 201 bp, Homo sapiens; identical to SEQ ID NO: 73190

SEQ ID NO: 73206 - DNA, 201 bp, Homo sapiens; identical to SEQ ID NO: 73191

SEQ ID NO: 73207 - DNA, 201 bp, Homo sapiens; identical to SEQ ID NO: 73192

SEQ ID NO: 73208 - DNA, 201 bp, Homo sapiens; identical to SEQ ID NO: 73193

SEQ ID NO: 73209 - DNA, 201 bp, Homo sapiens; identical to SEQ ID NO: 73194

SEQ ID NO: 73210 - DNA, 201 bp, Homo sapiens; identical to SEQ ID NO: 73195

SEQ ID NO: 73211 - DNA, 201 bp, Homo sapiens; identical to SEQ ID NO: 73196

SEQ ID NO: 73212 - DNA, 201 bp, Homo sapiens; identical to SEQ ID NO: 73197

SEQ ID NO: 73213 - DNA, 201 bp, Homo sapiens; identical to SEQ ID NO: 73198

SEQ ID NO: 73214 - DNA, 201 bp, Homo sapiens; identical to SEQ ID NO: 73199

SEQ ID NO: 73215 - DNA, 201 bp, Homo sapiens; identical to SEQ ID NO: 73200

SEQ ID NO: 73216 - DNA, 201 bp, Homo sapiens; identical to SEQ ID NO: 73202

SEQ ID NO: 73217 - DNA, 201 bp, Homo sapiens; identical to SEQ ID NO: 73203

SEQ ID NO: 73218 - DNA, 201 bp, Homo sapiens
aacctggtgaagttggacctactggaggagaaggagggctccttgtcacctgcttctgttggctcagatacactctctgatttggggatctctagcctacwggatggcttggccttgcacataagttcttggattaaaaggtctggatcagtggttcttggttctcactgttcatcagaatcacctcggggagccttggga

SEQ ID NO: 73219 - DNA, 201 bp, Homo sapiens; identical to SEQ ID NO: 73189

SEQ ID NO: 73220 - DNA, 201 bp, Homo sapiens; identical to SEQ ID NO: 73190

SEQ ID NO: 73221 - DNA, 201 bp, Homo sapiens; identical to SEQ ID NO: 73191

SEQ ID NO: 73222 - DNA, 201 bp, Homo sapiens; identical to SEQ ID NO: 73192

SEQ ID NO: 73223 - DNA, 201 bp, Homo sapiens; identical to SEQ ID NO: 73193

SEQ ID NO: 73224 - DNA, 201 bp, Homo sapiens; identical to SEQ ID NO: 73194

SEQ ID NO: 73225 - DNA, 201 bp, Homo sapiens; identical to SEQ ID NO: 73195

SEQ ID NO: 73226 - DNA, 201 bp, Homo sapiens; identical to SEQ ID NO: 73196

SEQ ID NO: 73227 - DNA, 201 bp, Homo sapiens; identical to SEQ ID NO: 73197

SEQ ID NO: 73228 - DNA, 201 bp, Homo sapiens; identical to SEQ ID NO: 73198

SEQ ID NO: 73229 - DNA, 201 bp, Homo sapiens; identical to SEQ ID NO: 73199

SEQ ID NO: 73230 - DNA, 201 bp, Homo sapiens; identical to SEQ ID NO: 73200

SEQ ID NO: 73231 - DNA, 166 bp, Homo sapiens; identical to SEQ ID NO: 73201

SEQ ID NO: 73232 - DNA, 201 bp, Homo sapiens; identical to SEQ ID NO: 73202

SEQ ID NO: 73233 - DNA, 201 bp, Homo sapiens; identical to SEQ ID NO: 73203

SEQ ID NO: 73234 - DNA, 201 bp, Homo sapiens; identical to SEQ ID NO: 73196

SEQ ID NO: 73235 - DNA, 201 bp, Homo sapiens; identical to SEQ ID NO: 73195

SEQ ID NO: 73236 - DNA, 201 bp, Homo sapiens; identical to SEQ ID NO: 73189

SEQ ID NO: 73237 - DNA, 201 bp, Homo sapiens; identical to SEQ ID NO: 73198

SEQ ID NO: 73238 - DNA, 201 bp, Homo sapiens; identical to SEQ ID NO: 73200

SEQ ID NO: 73239 - DNA, 166 bp, Homo sapiens; identical to SEQ ID NO: 73201

SEQ ID NO: 73240 - DNA, 201 bp, Homo sapiens; identical to SEQ ID NO: 73190

SEQ ID NO: 73241 - DNA, 201 bp, Homo sapiens; identical to SEQ ID NO: 73191

SEQ ID NO: 73242 - DNA, 201 bp, Homo sapiens; identical to SEQ ID NO: 73192

SEQ ID NO: 73243 - DNA, 201 bp, Homo sapiens; identical to SEQ ID NO: 73189

SEQ ID NO: 73244 - DNA, 201 bp, Homo sapiens; identical to SEQ ID NO: 73190

SEQ ID NO: 73245 - DNA, 201 bp, Homo sapiens; identical to SEQ ID NO: 73191

SEQ ID NO: 73246 - DNA, 201 bp, Homo sapiens; identical to SEQ ID NO: 73192

SEQ ID NO: 73247 - DNA, 201 bp, Homo sapiens; identical to SEQ ID NO: 73193

SEQ ID NO: 73248 - DNA, 201 bp, Homo sapiens; identical to SEQ ID NO: 73194

SEQ ID NO: 73249 - DNA, 201 bp, Homo sapiens; identical to SEQ ID NO: 73195

SEQ ID NO: 73250 - DNA, 201 bp, Homo sapiens; identical to SEQ ID NO: 73196

SEQ ID NO: 73251 - DNA, 201 bp, Homo sapiens; identical to SEQ ID NO: 73199

SEQ ID NO: 73252 - DNA, 201 bp, Homo sapiens; identical to SEQ ID NO: 73198

SEQ ID NO: 73253 - DNA, 201 bp, Homo sapiens; identical to SEQ ID NO: 73197

SEQ ID NO: 73254 - DNA, 166 bp, Homo sapiens; identical to SEQ ID NO: 73201

SEQ ID NO: 73255 - DNA, 201 bp, Homo sapiens; identical to SEQ ID NO: 73200

SEQ ID NO: 73256 - DNA, 201 bp, Homo sapiens; identical to SEQ ID NO: 73202

SEQ ID NO: 73257 - DNA, 201 bp, Homo sapiens; identical to SEQ ID NO: 73203

SEQ ID NO: 73258 - DNA, 201 bp, Homo sapiens
tgcccacacactgctttcctcgcgaggaatctggggcccttgcagaggcggaaccaggatgtgacgtaataaccgcgcgcggcgctcggcgttcccgcaasgtcgctttgcagagcgggagcgcgcttaagtaactagtccgtagttcgagggtgcgccgtgtccttttgcgttggtaccagcggcgacatgacggggtac

SEQ ID NO: 73259 - DNA, 201 bp, Homo sapiens
cccggtcctaatttggtcgggtatagcggaggtgggcgtagagagaactggaggtggagacctttgtgcatgcccacacactgctttcctcgcgaggaatstggggcccttgcagaggcggaaccaggatgtgacgtaataaccgcgcgcggcgctcggcgttcccgcaaggtcgctttgcagagcgggagcgcgcttaag

SEQ ID NO: 73260 - DNA, 128 bp, Homo sapiens
aacacttctgatttttcttttgtttattgtttttctctttccttttcctccctttccaagcaattattagattaaaatgttctttccttctcactttcggwttaagtccctgttttgtgtattcttgt

SEQ ID NO: 73261 - DNA, 201 bp, Homo sapiens; identical to SEQ ID NO: 73258

SEQ ID NO: 73262 - DNA, 148 bp, Homo sapiens
atctgacactcaagactgtcagatttaggttgctgttaattttgtcatgagaatgtaaaatactaaaatctctaagtgaaaaatttgcatactagtgcttrttataaaggataatgcaaaaataaacttgggaactttgcattatgaa

SEQ ID NO: 73263 - DNA, 201 bp, Homo sapiens; identical to SEQ ID NO: 73259

SEQ ID NO: 73264 - DNA, 201 bp, Homo sapiens
gagcttgcagtaagccgagatagtgccactgagcctgggcgacagagcaagactccgtctcaaaaaaaaaaaaagctttccgaatcatttttgaagaattyagaaacttgattgaaaagcttattccaactatgatctgacactcaagactgtcagatttaggttgctgttaattttgtcatgagaatgtaaaatactaaa

SEQ ID NO: 73265 - DNA, 201 bp, Homo sapiens
ttcaagcccaggccttgtttgattttgcgcacttctcggtacatggtgaaggccttgatgtctaaatgagtgtggtgaaggatggtgcctgctggggcctmgcagatacctcaggacttcattccaatgaagcggttctccacgatgtcaatacggcccacgccgtgcttgcctgcaacttcattcaggtacacgaaaagc

SEQ ID NO: 73266 - DNA, 201 bp, Homo sapiens
ccttccactcattcctgggacttggcattacagtggcggacaaattcacactcagggctatgccagaaaccggtatacaccagctcagcaaatttcaagcycaggccttgtttgattttgcgcacttctcggtacatggtgaaggccttgatgtctaaatgagtgtggtgaaggatggtgcctgctggggcctcgcagata

SEQ ID NO: 73267 - DNA, 201 bp, Homo sapiens
caacagtgattctatagaaagggatgctgctcaggaagctgaggctgggacagggctggaacctgggagcaactctggccaatgctctgtgcccctaaagragggaaaagatgcacctatcaaaaaggaatccctgggccactggagtcaaggcttgaagatttctatgcaggaccccaaaatgcaggtttacaaagatga

SEQ ID NO: 73268 - DNA, 201 bp, Homo sapiens
ccagctcagcaaatttcaagcccaggccttgtttgattttgcgcacttctcggtacatggtgaaggccttgatgtctaaatgagtgtggtgaaggatggtscctgctggggcctcgcagatacctcaggacttcattccaatgaagcggttctccacgatgtcaatacggcccacgccgtgcttgcctgcaacttcattca

SEQ ID NO: 73269 - DNA, 201 bp, Homo sapiens
acacacaggaagagaaagagatcaggcaacagtgattctatagaaagggatgctgctcaggaagctgaggctgggacagggctggaacctgggagcaactmtggccaatgctctgtgcccctaaagaagggaaaagatgcacctatcaaaaaggaatccctgggccactggagtcaaggcttgaagatttctatgcaggac

SEQ ID NO: 73270 - DNA, 201 bp, Homo sapiens
gcttttcgtgtacctgaatgaagttgcaggcaagcacggcgtgggccgtattgacatcgtggagaaccgcttcattggaatgaagtcctgaggtatctgckaggccccagcaggcaccatccttcaccacactcatttagacatcaaggccttcaccatgtaccgagaagtgcgcaaaatcaaacaaggcctgggcttgaa

SEQ ID NO: 73271 - DNA, 201 bp, Homo sapiens
tatctgcgaggccccagcaggcaccatccttcaccacactcatttagacatcaaggccttcaccatgtaccgagaagtgcgcaaaatcaaacaaggcctgrgcttgaaatttgctgagctggtgtataccggtttctggcatagccctgagtgtgaatttgtccgccactgtaatgccaagtcccaggaatgagtggaagg

SEQ ID NO: 73272 - DNA, 201 bp, Homo sapiens
tgaatgaagttgcaggcaagcacggcgtgggccgtattgacatcgtggagaaccgcttcattggaatgaagtcctgaggtatctgcgaggccccagcaggsaccatccttcaccacactcatttagacatcaaggccttcaccatgtaccgagaagtgcgcaaaatcaaacaaggcctgggcttgaaatttgctgagctgg

SEQ ID NO: 73273 - DNA, 201 bp, Homo sapiens
ccgtgagatcggccccaacgatggcttcctggcccagctctgccagctcaatgacagactagccaaggaggggaagttgaaaccctagggcacccccaccrcctctgctcgagaggctcgtctgtgtccctgccactctgagttatccagaaaccaccacctacaaatgaggggactcatctagaagacctctaaggtccc

SEQ ID NO: 73274 - DNA, 135 bp, Homo sapiens
tgcaaatgaacagtccctaaacatatccccttcccccagatgccttaaattccactattggtgctatgttcctttgaataaaaaaccttagagaaagtagktgccttttcctcccagacagaagtctgggcagag

SEQ ID NO: 73275 - DNA, 201 bp, Homo sapiens
agggggaaggcctgtggcctgcatgcttcccgatggcccacggcaggaggtgtgtggaagtgtaaggcctaagatgctcacagaggtccctcatgacctcmcttccccaactcccgaatcctctcttgagtgtggacctcaacaccttgagccctagtaaaggaactatgcaaatgcaggccactctccccaccacgtctg

SEQ ID NO: 73276 - DNA, 201 bp, Homo sapiens
ccgtgagatcggccccaacgatggcttcctggcccagctctgccagctcaatgacagactagccaaggaggggaagttgaaaccctagggcacccccaccrcctctgctcgagaggtccgtgggggaggccgtgggcaaaggtgtcccgagctgccatgtttaggaaacacactgtaccctgctcccagcatcacaaggca

SEQ ID NO: 73277 - DNA, 201 bp, Homo sapiens
ggtgtctgataaaagtttaagaaattaaacactttttgagcaccaaatatatatagggcattgttctggtgggtgtgtcacgctcccagaagactgaattyatggtaggatcactcgcaaggccttgtgaaggagtcttacctaaaacaaaagaaatatcagggacttttgttgactatttacaactcagttttacattta

SEQ ID NO: 73278 - DNA, 201 bp, Homo sapiens
gcacttaccctcaatccagccccggagaagcaagtgaaaagggtgggtccctcataggctagaatgtgcagctctttctccaggtgggatgtagcaccccraagtagagctttctgctctgctcctggaaaaggctagggagctggggctggggctcccctcccatgaccaggcagtggtcaccccatgggacaggcacag

SEQ ID NO: 73279 - DNA, 201 bp, Homo sapiens
tgtgatgctatttatcttcagggtcactctgggcaaagagaaggtcctcagccatgcccccagcaccttgcacataggtgtctgataaaagtttaagaaaktaaacactttttgagcaccaaatatatatagggcattgttctggtgggtgtgtcacgctcccagaagactgaatttatggtaggatcactcgcaaggcct

SEQ ID NO: 73280 - DNA, 201 bp, Homo sapiens
aatatgccaaggtagggaatgtgcctttttcagagttggccaggagctcctggctgggacacggagaggcaggtgtggcgtaaggcctcactcccggctgkgaaggtctctgatcacacagaagcagccctgcccagcctggtcatttgctgtccgcttttctctgtgaccacagcagccctgaacaaccagtatgtgtct

SEQ ID NO: 73281 - DNA, 201 bp, Homo sapiens
tcccaggcacacaccctgcccattgcaggtggctcttacagctctctggtgccagcacgggatccctgaagtgactcagccaggcagacatgagacatggyggagtgtccaaatggatcctttattggtggtagagcaaaaaaacccaaacacgataaacctttcaaaagactttctaaggatgatattggaatgcaccag

SEQ ID NO: 73282 - DNA, 201 bp, Homo sapiens
atatatagggcattgttctggtgggtgtgtcacgctcccagaagactgaatttatggtaggatcactcgcaaggccttgtgaaggagtcttacctaaaacraaagaaatatcagggacttttgttgactatttacaactcagttttacatttaaattcaggcagtgttaatatgccaaggtagggaatgtgcctttttcag

SEQ ID NO: 73283 - DNA, 201 bp, Homo sapiens
ccaactcccgaatcctctcttgagtgtggacctcaacaccttgagccctagtaaaggaactatgcaaatgcaggccactctccccaccacgtctgtgcccygcactgtccccacagccttccacaccctgtgcataggcagccctctcacgtcttgaggtccgaagctggggtgggggtgtccgtcagttattagtggatg

SEQ ID NO: 73284 - DNA, 201 bp, Homo sapiens
gtaagagccaacacatgcccagctgcggatgggagctgttcctggacagccttctactgcctgggaagtgatggaacaggaactcagggtgcccttacccsctccccagacctgttccctttctttgactgacagagcaccatccaggcaaaattagagcgccaaatggttttcttctcaatcttaaagcagtataccttt

SEQ ID NO: 73285 - DNA, 135 bp, Homo sapiens; identical to SEQ ID NO: 73274

SEQ ID NO: 73286 - DNA, 201 bp, Homo sapiens
cctctaaggtccccttttggctctgaggggtctctaataatccccacttggaattcagcaccgcaaggaaattatgggtatgtgagccataatatgatggscagcaggtggcgctgccttccacccatggtgatggatggtttggaaagggaatgttggtgccttttgtgccacaagttaagatgctactgttttaaagga

SEQ ID NO: 73287 - DNA, 201 bp, Homo sapiens
tggaccctacgttcagcaaccagcctgtacctcccgatgctgtgcgcatggtgggcatccgcaagacagccggagaacatctgggtgtaacgttccgcgtrgagggcggcgagctggtgatcgcgcgcattctgcatgggggcatggtggctcagcaaggcctgctgcatgtgggtgacatcatcaaggaggtgaacgggc

SEQ ID NO: 73288 - DNA, 201 bp, Homo sapiens
ccctggccaaggcccatgagaggctggaggagacgaagctggaggccgtgagagacaacaacctggagctggtgcaggagatcctgcgggacctggcgcasctggctgagcagagcagcacagccgccgagctggcccacatcctccaggagccccacttccagtccctcctggagacgcacgactctgtggcctcaaaga

SEQ ID NO: 73289 - DNA, 183 bp, Homo sapiens
tgccattgtggactcttgtatttgagggacctcaagagagtgaggaccctaccatccactgtccatattcagtcccagccccagtgcgcttcctctgttcyctccctcagccatccaattcttgagttttctcactgattggttttctttctttttccttggattaaatgtgaaagcaaaggc

SEQ ID NO: 73290 - DNA, 201 bp, Homo sapiens
cctggccaaggcccatgagaggctggaggagacgaagctggaggccgtgagagacaacaacctggagctggtgcaggagatcctgcgggacctggcgcagstggctgagcagagcagcacagccgccgagctggcccacatcctccaggagccccacttccagtccctcctggagacgcacgactctgtggcctcaaagac

SEQ ID NO: 73291 - DNA, 201 bp, Homo sapiens
gcatccgcaagacagccggagaacatctgggtgtaacgttccgcgtggagggcggcgagctggtgatcgcgcgcattctgcatgggggcatggtggctcarcaaggcctgctgcatgtgggtgacatcatcaaggaggtgaacgggcagccagtgggcagtgacccccgcgcactgcaggagctcctgcgcaatgccagtg

SEQ ID NO: 73292 - DNA, 201 bp, Homo sapiens
gagaggaccttccgcgagctccagacagccatggagaagctacggacagagccccagtgggtgcctgtcagctgggtgtactgagcctgttcacctggtcyttggctcactctgtgttgaaacccagaacctgaatccatccccctcctgacctgtgaccccctgccacaatccttagcccccatatctggctgtccttgg

SEQ ID NO: 73293 - DNA, 201 bp, Homo sapiens
tgtgaccaggggaatgtgtggcccgctggcagccaggcaggcccgggtggtggtgccagcctggtgccatcttgaaggctggaggagtcagagtgagagcyagtggccacagctgcagagcactgcagctcccagctcctttggaaagggacagggtcgcagggcagatgctgctcggtccttccctcatccacagcttct

SEQ ID NO: 73294 - DNA, 201 bp, Homo sapiens
caggtcagccctgctccccacagggccaggctggcaggggccagtgggctcagcccaggtaggggcaggatggagggctgagccctgtgacaacctgctgytaccaactgaagagccccaagctctccatggcccacagcaggcacaggtctgagctctatgtccttgaccttggtccatttggttttctgtctagccagg

SEQ ID NO: 73295 - DNA, 201 bp, Homo sapiens
gttcatcgaggccccagacttcgagaccctgcgggccatgaacagggctgcgctggagagtggaatatccaccaagcagctcacggaggcggacctgagayggacagtggaggagagcagccgcatccagcggggctacgggcactactttgacctctgcctggtcaatagcaacctggagaggaccttccgcgagctcca

SEQ ID NO: 73296 - DNA, 201 bp, Homo sapiens
tcctccaggagccccacttccagtccctcctggagacgcacgactctgtggcctcaaagacctatgagacaccaccccccagccctggcctggaccctacrttcagcaaccagcctgtacctcccgatgctgtgcgcatggtgggcatccgcaagacagccggagaacatctgggtgtaacgttccgcgtggagggcggcg

SEQ ID NO: 73297 - DNA, 201 bp, Homo sapiens
gaagctacggacagagccccagtgggtgcctgtcagctgggtgtactgagcctgttcacctggtccttggctcactctgtgttgaaacccagaacctgaayccatccccctcctgacctgtgaccccctgccacaatccttagcccccatatctggctgtccttgggtaacagctcccagcaggccctaagtctggcttca

SEQ ID NO: 73298 - DNA, 201 bp, Homo sapiens
ggagaggccttgccgctttaagagccgggctagcgattgacaagcaataaacgctgagcgcccggctgcgctggagccgcccggagctaggggcttcccgsggcgcaggagagacgtttcagagcccttgcctccttcaccatgccggttgccgccaccaactctgaaactgccatgcagcaagtcctggacaacttggga

SEQ ID NO: 73299 - DNA, 201 bp, Homo sapiens
gtggttccacgtgcatgttcggcacctgtctgtgcctctggcaccaggttgtgtgtgtgtgcgtgtgcacgtgcgtgtgtgtgtgtgtgtgtcaggtttartttggggaggaagcaaagggttttgttttggaggtcactctttggggcccctttctgggggttccccatcagccctcatttcttataataccctgatccc

SEQ ID NO: 73300 - DNA, 201 bp, Homo sapiens
ggagcctgtcctcagaggggacaacctgtgacaccctgagtccaaacccttgtgcctcccagttcttccaagtgtctaactagtcttcgctgcagcgtcasccaaagctggcccctgaaccactgtgtgcccatttcctagggaaggggaaggagaataaacagaatatttattacaaatgttagaatatatttcttatac

SEQ ID NO: 73301 - DNA, 201 bp, Homo sapiens
gggtgttttcttgctgacctgaggctatagggtcacttgccatttcctaccttctctgggggatttgagggtagaggcaggggaagatctgttgttgcagytgcttctgcccccttgatccaaatgaccatcatctctgatggagatgggttgggtacctggccttcatggcaccttcactgctagggatgctcaaggggc

SEQ ID NO: 73302 - DNA, 201 bp, Homo sapiens; identical to SEQ ID NO: 73287

SEQ ID NO: 73303 - DNA, 201 bp, Homo sapiens; identical to SEQ ID NO: 73288

SEQ ID NO: 73304 - DNA, 201 bp, Homo sapiens; identical to SEQ ID NO: 73290

SEQ ID NO: 73305 - DNA, 201 bp, Homo sapiens; identical to SEQ ID NO: 73291

SEQ ID NO: 73306 - DNA, 201 bp, Homo sapiens; identical to SEQ ID NO: 73292

SEQ ID NO: 73307 - DNA, 201 bp, Homo sapiens; identical to SEQ ID NO: 73293

SEQ ID NO: 73308 - DNA, 201 bp, Homo sapiens; identical to SEQ ID NO: 73295

SEQ ID NO: 73309 - DNA, 201 bp, Homo sapiens; identical to SEQ ID NO: 73297

SEQ ID NO: 73310 - DNA, 201 bp, Homo sapiens; identical to SEQ ID NO: 73298

SEQ ID NO: 73311 - DNA, 177 bp, Homo sapiens
tgccattgtggactcttgtatttgagggacctcaagagagtgaggaccctaccatccactgtccatattcagtcccagccccagtgcgcttcctctgttcyctccctcagccatccaattcttgagttttctcactgattggttttctttctttttccttggattaaatgtgaaagc

SEQ ID NO: 73312 - DNA, 201 bp, Homo sapiens; identical to SEQ ID NO: 73294

SEQ ID NO: 73313 - DNA, 201 bp, Homo sapiens
gagcctgtcctcagaggggacaacctgtgacaccctgagtccaaacccttgtgcctcccagttcttccaagtgtctaactagtcttcgctgcagcgtcagscaaagctggcccctgaaccactgtgtgcccatttcctagggaaggggaaggagaataaacagaatatttattacaaatgttagaatatatttcttatact

SEQ ID NO: 73314 - DNA, 201 bp, Homo sapiens; identical to SEQ ID NO: 73296

SEQ ID NO: 73315 - DNA, 201 bp, Homo sapiens; identical to SEQ ID NO: 73287

SEQ ID NO: 73316 - DNA, 201 bp, Homo sapiens
aatactttggggcccatgagaggctggaggagacgaagctggaggccgtgagagacaacaacctggagctggtgcaggagatcctgcgggacctggcgcasctggctgagcagagcagcacagccgccgagctggcccacatcctccaggagccccacttccagtccctcctggagacgcacgactctgtggcctcaaaga

SEQ ID NO: 73317 - DNA, 183 bp, Homo sapiens; identical to SEQ ID NO: 73289

SEQ ID NO: 73318 - DNA, 201 bp, Homo sapiens
atactttggggcccatgagaggctggaggagacgaagctggaggccgtgagagacaacaacctggagctggtgcaggagatcctgcgggacctggcgcagstggctgagcagagcagcacagccgccgagctggcccacatcctccaggagccccacttccagtccctcctggagacgcacgactctgtggcctcaaagac

SEQ ID NO: 73319 - DNA, 201 bp, Homo sapiens; identical to SEQ ID NO: 73291

SEQ ID NO: 73320 - DNA, 201 bp, Homo sapiens; identical to SEQ ID NO: 73292

SEQ ID NO: 73321 - DNA, 201 bp, Homo sapiens; identical to SEQ ID NO: 73293

SEQ ID NO: 73322 - DNA, 201 bp, Homo sapiens; identical to SEQ ID NO: 73294

SEQ ID NO: 73323 - DNA, 201 bp, Homo sapiens
aaagtcccatagtaagatccctggccaaggtgataatggtattgtggtttatgcagcagaatgtctttgttcctatgaaatacatgctgaaatactttggrgcccatgagaggctggaggagacgaagctggaggccgtgagagacaacaacctggagctggtgcaggagatcctgcgggacctggcgcagctggctgagc

SEQ ID NO: 73324 - DNA, 201 bp, Homo sapiens; identical to SEQ ID NO: 73295

SEQ ID NO: 73325 - DNA, 201 bp, Homo sapiens; identical to SEQ ID NO: 73297

SEQ ID NO: 73326 - DNA, 201 bp, Homo sapiens; identical to SEQ ID NO: 73296

SEQ ID NO: 73327 - DNA, 201 bp, Homo sapiens; identical to SEQ ID NO: 73298

SEQ ID NO: 73328 - DNA, 201 bp, Homo sapiens
cagcccaggttcaccagttcccctcttcttgtgagactggtccaggcagcccttctggacactgcatgatcacaggagcagccctctggcccataatgacrgccctgtcttcgcaggtggccactcgggcccgcagccgctgggtaagggtgatgcctagcctggcttattgcaccttccttttggcggttggcttgtcgc

SEQ ID NO: 73329 - DNA, 201 bp, Homo sapiens
tagggaggaaaaccggaggagagcgcaggaggaaacagtaccggctggaggccggtcttgcaggagcgggggactgctgggggcggggcttggtggtgacygctggcggggcggggcctggggctcagaggggtgggctttggagatcagagggtcgacgctgcttcgttgcctggactctggtttccgccctggagcaag

SEQ ID NO: 73330 - DNA, 201 bp, Homo sapiens
gagtggatacacgtggatagccggccctttgcctccctgagccgtgactcaggggctgccctgggcctgggcattgccttgcactctccctgctatgcccrggtgcgtcgggcacagctgggaaatggccagaagatagcctgccttgtgctggccatggggctgctgggccccctggactggctgggccacccccctcag

SEQ ID NO: 73331 - DNA, 201 bp, Homo sapiens
cacctttctgggcgatcccaagatcctctttctgttctacttccccgcggcctactacgcctcccgccgtgtgggcatcgcggtgctctggatcagcctcmtcaccgagtggctcaacctcatcttcaagtggtttctttttggagacaggcccttttggtgggtccatgagtctggttactacagccaggctccagccca

SEQ ID NO: 73332 - DNA, 201 bp, Homo sapiens
ggctggctgatgactccccgagtgcctatggagcgggagctaagcttctatgggttgactgcactggccctcatgctaggcaccagcctcatctattggaycctctttacactgggcctggatctttcttggtccatcagcctagccttcaagtggtgtgagcggcctgagtggatacacgtggatagccggccctttgcc

SEQ ID NO: 73333 - DNA, 201 bp, Homo sapiens
gccaacactctgtgaccaccacactccaggaggcagccccatccccttccagcccctaagtaggccctcccctccctaaatctgcttccgcaccacctggkcttagccccaaagatgggccttctctctcccagataagttggtcctccctctgcctttcctctcaagcccccaaagagcaaaggcaacagcaagaccagc

SEQ ID NO: 73334 - DNA, 201 bp, Homo sapiens
gaccaccacactccaggaggcagccccatccccttccagcccctaagtaggccctcccctccctaaatctgcttccgcaccacctggtcttagccccaaasatgggccttctctctcccagataagttggtcctccctctgcctttcctctcaagcccccaaagagcaaaggcaacagcaagaccagcgggttcttgcaac

SEQ ID NO: 73335 - DNA, 201 bp, Homo sapiens
agcctacgacacggacgcaggcccagtgttcgtcaaagtcaaccgcaggacgcaggcccggcagatgtttgagggggaggtggccagcctggaggccctcmggagcacgggcctggtgcgggtgccgaggcccatgaaggtcatcgacctgccgggaggtggggccgcctttgtgatggagcatttgaagatgaagagctt

SEQ ID NO: 73336 - DNA, 163 bp, Homo sapiens
ccgggccgagggccggacctgcgtccgctgcggggcagggataccgggtccctgcagggagcwcaagccccagcgcgcccgcgaagagctgcgcggactcccggctgcttcccccgaatcccgggcgcaggaagcgcgaagccggacgaacgcggggagcgcg

SEQ ID NO: 73337 - DNA, 171 bp, Homo sapiens
ccgtccccccgtccccgtcccccgtccccgtcccccctgtccctgtcccccttcccccgacccctcccagatcctggggaccaataaagcccgcagcgggyctcggctggcgtcctgcgcctcgttcctccgctcgtggggctgctttcagggccagacgcacggcgagct

SEQ ID NO: 73338 - DNA, 201 bp, Homo sapiens
tccccaaggctccgggcttcgaccagcggctgctgctctaccagctgtttaactacctgaaccactggaaccacttcgggcgggagtacaggagcccttcsttgggcaccatgcgaaggctgctcaagtagcggcccctgccctcccttcccctgtccccgtccccgtctccgtctccccgtccctgtccccccgtccccc

SEQ ID NO: 73339 - DNA, 201 bp, Homo sapiens; identical to SEQ ID NO: 73335

SEQ ID NO: 73340 - DNA, 201 bp, Homo sapiens
tccctttcccaggacatcctggaatcagcagccccaccccgggccgagggccggacctgcgtccgctgcggggcagggataccgggtccctgcagggagcwcaagccccagcgcgcccgcgaagagctgcgcggactcccggctgcttcccccgaatcccgggcgcaggaagcgcgaagccggacgaacgcggggagcgcg

SEQ ID NO: 73341 - DNA, 171 bp, Homo sapiens; identical to SEQ ID NO: 73337

SEQ ID NO: 73342 - DNA, 201 bp, Homo sapiens; identical to SEQ ID NO: 73338

SEQ ID NO: 73343 - DNA, 201 bp, Homo sapiens; identical to SEQ ID NO: 73335

SEQ ID NO: 73344 - DNA, 201 bp, Homo sapiens; identical to SEQ ID NO: 73340

SEQ ID NO: 73345 - DNA, 201 bp, Homo sapiens; identical to SEQ ID NO: 73338

SEQ ID NO: 73346 - DNA, 201 bp, Homo sapiens; identical to SEQ ID NO: 73335

SEQ ID NO: 73347 - DNA, 201 bp, Homo sapiens
gacatcctggaatcagcagccccaccctgggccggcgcccgggccgagggccggacctgcgtccgctgcggggcagggataccgggtccctgcagggagcwcaagccccagcgcgcccgcgaagagctgcgcggactcccggctgcttcccccgaatcccgggcgcaggaagcgcgaagccggacgaacgcggggagcgcg

SEQ ID NO: 73348 - DNA, 171 bp, Homo sapiens; identical to SEQ ID NO: 73337

SEQ ID NO: 73349 - DNA, 201 bp, Homo sapiens; identical to SEQ ID NO: 73338

SEQ ID NO: 73350 - DNA, 201 bp, Homo sapiens
gattccaaagacggcagaaaactttcatgctctaagcactggagagaaaggatttggttataagggttcctgctttcacagaattattccagagtttatgygtcagggcggtgacttcacatgccataatggcactggtgcctctacggggagaaatttgatgtcgaggacttcaccctaaagcatacaggtcctgacatc

SEQ ID NO: 73351 - DNA, 201 bp, Homo sapiens
gaaggcatgaatattgtgaagcccatggagcgctttcggtccaggaatggcaagaccagcaagaagatcaccattgctgactggacaactctaataagtttcacttacgctttatcttaaccactggaccattccttctgtagctcagagagagcaccctccaccccatttgctcacactatcctgtcatctttgtgttct

SEQ ID NO: 73352 - DNA, 201 bp, Homo sapiens
tggagaaatatagccgcagcttgacccgcagctaccaaaacgtctatgtctgcacagggccactcttcctgcccaggacagaggctgatgggaaatcctaygtaaagtaccaggtcatcggcaagaaccacgtggcagtgcccacacacttcttcaaggtgctgatcctggaggcagcaggtgggcaaattgagctccgca

SEQ ID NO: 73353 - DNA, 201 bp, Homo sapiens
tggatcccgcgacgcggctcctttaagagcctcgcgggtcgcccgccgctaggtcgctccccggccatgcgggcgctgcgggccggcctgaccctggcgtygggcgcggggctgggtgcggtcgtcgagggctggcggcggcggcgggaggacgcgcgggcggcgccgggactgctgggccggctgcccgtgctgcccgtg

SEQ ID NO: 73354 - DNA, 201 bp, Homo sapiens
gtaaagtaccaggtcatcggcaagaaccacgtggcagtgcccacacacttcttcaaggtgctgatcctggaggcagcaggtgggcaaattgagctccgcayctacgtgatgcccaacgcacctgtggatgaggccatcccactggagcgcttcctggtgcccatcgagagcattgagcgggcttcggggctgctctttgtg

SEQ ID NO: 73355 - DNA, 201 bp, Homo sapiens
tacgtaaagtaccaggtcatcggcaagaaccacgtggcagtgcccacacacttcttcaaggtgctgatcctggaggcagcaggtgggcaaattgagctcckcacctacgtgatgcccaacgcacctgtggatgaggccatcccactggagcgcttcctggtgcccatcgagagcattgagcgggcttcggggctgctcttt

SEQ ID NO: 73356 - DNA, 118 bp, Homo sapiens
tggcgcgggcaggcagcctcaaggccatcacggcgggcagtaagtgagggtggagcccagtgagactgtgggtgtgtgcaggccggggagtattaaaggtsgtgatttttggagacaa

SEQ ID NO: 73357 - DNA, 193 bp, Homo sapiens
atgccgcctatttggacacctactctgcccaacctactccagcccgcgtgcccctgcagcccgtcgggcgcccaggccacgcccctgggcgayattggctctccgattggacagcttaatggaggtgtggccggaagaggcgagtctcattggcagaggcgggaccgacggtgtgtgcggaacatggcggagc

SEQ ID NO: 73358 - DNA, 201 bp, Homo sapiens
gccggtcagattgccagagcctgtgccatcttctgtgtggatgagatcgtggtgtttgatgaggagggccaggatgccaagactgtggagggggaattcasaggagttgggaagaaggggcaggcgtgcgtacagctggcccggatcctgcagtacctggagtgtccacagtacctgaggaaggcgttcttccccaagcac

SEQ ID NO: 73359 - DNA, 201 bp, Homo sapiens
tccgactggcttcctgcctcagtgctgtgtttgctgaggcccccttccaagatgggtatgacctgaccatcgggacgtcagagcgcggctcagatgtggcytctgcccagcttcccaacttcaggcatgctcttgtggtgttcgggggcctccagggtctggaagctggagcggatgctgaccccaacctggaggtggctg

SEQ ID NO: 73360 - DNA, 201 bp, Homo sapiens
ttccaggcagccttccctgatctgtcctctaacttctgtcaacctgcaggaccacgccctcactgtgagacttctgtagcctgcctggctcctccttgagsctggaactctctccagggtggttaactctttccctctgttttccttatgcccaacactgggtcaggcagagtgggcgacaataaacgctgctaggagaat

SEQ ID NO: 73361 - DNA, 201 bp, Homo sapiens
agccttctgaatattcacattcgtctgaggggagacttaacgactgtccatctctccccacagaggtgagcaacaagtgggcaaggaccatgacaggtgayatcccagcaccagcacaggtgccaggacaccggacgggggctccccctcagcagagtctcctcccttccaccaggccctaggaggcacctgctaatgaaa

SEQ ID NO: 73362 - DNA, 201 bp, Homo sapiens
ccccagccccacccagggtctcctgggaagaccagcccttccaactaccaacccgttccttttcccagtctgagccacaggaagagcctagcggggaatgycatgaatcgacctccatcctgagctctccaggcctgggacaatggaaagtggatagggggctgtcttcccagaaggaagctgggtcagaggttggtgccc

SEQ ID NO: 73363 - DNA, 201 bp, Homo sapiens
gaggagaaaaaaaaatggaaggatctcaagctgatgaaaaaactggagcggcagcgggcacaggaggaacaggcaaagcgcctggaagaggaggaggcagyggcagagaaggaggaccgcgggcggccctacacactgagcgtagccctgccgggctccatcctggacaatgctcagtcgccggagcttcgcacctacttg

SEQ ID NO: 73364 - DNA, 201 bp, Homo sapiens
gcacggaggaagccatcctcatctccctggccgccctgcagcctggcctcacccaggcgggtgcccggcacacctgaaagttctaaggggccgaggacatsagtgaagcagcagtgaaaccaggggctctgcaggtcacttgggacggacgccaccagacttgtctccaaaaatcaccacctttaatactccccggcctgc

SEQ ID NO: 73365 - DNA, 201 bp, Homo sapiens
tagattcaaactcccgagaagggtggagggaagtgctccaagcagagcagagactgaaggcgggagagcctggtgcaccgcggacctgcagggggaaggcrtgagagctcggtgcactggggacctgcatggggaaggcgggagagctcggtgcactggggacctgcatggggaaggcgtgagagctcggtgcactgggga

SEQ ID NO: 73366 - DNA, 201 bp, Homo sapiens
tgcggagctcaatttgcccacctgctgcctccaggatcagcaccttgaagaagtgtgtgggcactgccacgtggttcttgccgatgacctggtactttacrtaggatttcccatcagcctctgtcctgtgggcagacccaggcacacgtgggcagggggcctggatgaacccaaagccacctcttccaggcagccttccct

SEQ ID NO: 73367 - DNA, 201 bp, Homo sapiens
gggaagctgacaggcttgccaagaaaccagatgagtagggaactggtattgacccagagcctggggcaagcctggccctgtgagtggcagtaggggcctcrggtgagtgggaggttctgccgcccccctggtttccaccttacctgggcaggaagagtggccctgtgcagacatagacgttttggtagctgcgggtcaagc

SEQ ID NO: 73368 - DNA, 201 bp, Homo sapiens
cacaaagagcagccccgaagcccgctcaatgctctcgatgggcaccaggaagcgctccagtgggatggcctcatccacaggtgcgttgggcatcacgtagrtgcggagctcaatttgcccacctgctgcctccaggatcagcaccttgaagaagtgtgtgggcactgccacgtggttcttgccgatgacctggtactttac

SEQ ID NO: 73369 - DNA, 201 bp, Homo sapiens
ctgaacccagtgtcctctttgacctgtacgtcaatacctgtcctggccagggtagccgtaccatccgcacggaggaagccatcctcatctccctggccgcsctgcagcctggcctcacccaggcgggtgcccggcacacctgaaagttctaaggggccgaggacatcagtgaagcagcagtgaaaccaggggctctgcagg

SEQ ID NO: 73370 - DNA, 201 bp, Homo sapiens
aagttctaaggggccgaggacatcagtgaagcagcagtgaaaccaggggctctgcaggtcacttgggacggacgccaccagacttgtctccaaaaatcacsacctttaatactccccggcctgcacacacccacagtctcactgggctccaccctcacttactgcccgccgtgatggccttgaggctgcctgcccgcgcca

SEQ ID NO: 73371 - DNA, 201 bp, Homo sapiens
aaagagcagccccgaagcccgctcaatgctctcgatgggcaccaggaagcgctccagtgggatggcctcatccacaggtgcgttgggcatcacgtaggtgmggagctcaatttgcccacctgctgcctccaggatcagcaccttgaagaagtgtgtgggcactgccacgtggttcttgccgatgacctggtactttacgta

SEQ ID NO: 73372 - DNA, 201 bp, Homo sapiens
tggaagaggaggaggcagcggcagagaaggaggaccgcgggcggccctacacactgagcgtagccctgccgggctccatcctggacaatgctcagtcgccrgagcttcgcacctacttggccggtcagattgccagagcctgtgccatcttctgtgtggatgagatcgtggtgtttgatgaggagggccaggatgccaaga

SEQ ID NO: 73373 - DNA, 106 bp, Homo sapiens
atgccscctatttggacacctactctgcccaacctactccagcccgcgtgcccctgcagcccgtcgggcgcccaggccacgcccctgggcgatattggctctccga

SEQ ID NO: 73374 - DNA, 150 bp, Homo sapiens
atgccgcctatttggacacctactctgcccaacctactccagcccgcgtrcccctgcagcccgtcgggcgcccaggccacgcccctgggcgatattggctctccgattggacagcttaatggaggtgtggccggaagaggcgagtctcat

SEQ ID NO: 73375 - DNA, 201 bp, Homo sapiens
gaaccctatggtgaactgcgcatgtgaggaggttgcgcgcttcttttgaaaacctaatgcctgatctgtcgttgttgcccatcacctccagataggactgyctagttgcaggaaaacaagctcagggctcccacggatcctacattactgtgagttgtatatttcactatatgttacaatgtaataataatagaaataaaa

SEQ ID NO: 73376 - DNA, 201 bp, Homo sapiens
tttgacctgtacgtcaatacctgtcctggccagggtagccgtaccatccgcacggaggaagccatcctcatctccctggccgccctgcagcctggcctcayccaggcgggtgcccggcacacctgaaagttctaaggggccgaggacatcagtgaagcagcagtgaaaccaggggctctgcaggtcacttgggacggacgc

SEQ ID NO: 73377 - DNA, 201 bp, Homo sapiens
cacccatccgctccgtgacctacaccctggcccagctcccctgcgcctccatggctctgcagatcctctgggaagcggcccgccacctgtgaccagcagckgatgcctccttggccaccagaccatgggccaagagccgccgtggctatacctggggacttgatgttccttccagattgtggtgggccctgagtcctggtt

SEQ ID NO: 73378 - DNA, 201 bp, Homo sapiens
aagctggccgtggcctcccgggtgacgtcactgcggtcattgcctgatgagctcaggcagaggcgcctggggacggggctgctcctctgtcgagctgatcrcacccacagttgagctgcgctggccagagatgcctgcccacagcctggtgatgagcagcccggccctcccggccttcctgctctgcagcacgctgctggt

SEQ ID NO: 73379 - DNA, 201 bp, Homo sapiens
agctcaggcagaggcgcctggggacggggctgctcctctgtcgagctgatcacacccacagttgagctgcgctggccagagatgcctgcccacagcctggwgatgagcagcccggccctcccggccttcctgctctgcagcacgctgctggtcatcaagatgtacgtggtggccatcatcacgggccaagtgaggctgcgg

SEQ ID NO: 73380 - DNA, 201 bp, Homo sapiens
atggctctgcagatcctctgggaagcggcccgccacctgtgaccagcagctgatgcctccttggccaccagaccatgggccaagagccgccgtggctatayctggggacttgatgttccttccagattgtggtgggccctgagtcctggtttcctggcagcctgctgcgcgtgtgggtctctgggcacagtgggcctgtgt

SEQ ID NO: 73381 - DNA, 201 bp, Homo sapiens
ggaagctgcgggcacccatccgctccgtgacctacaccctggcccagctcccctgcgcctccatggctctgcagatcctctgggaagcggcccgccacctktgaccagcagctgatgcctccttggccaccagaccatgggccaagagccgccgtggctatacctggggacttgatgttccttccagattgtggtgggccc

SEQ ID NO: 73382 - DNA, 201 bp, Homo sapiens
ggggctgctcctctgtcgagctgatcacacccacagttgagctgcgctggccagagatgcctgcccacagcctggtgatgagcagcccggccctcccggcyttcctgctctgcagcacgctgctggtcatcaagatgtacgtggtggccatcatcacgggccaagtgaggctgcggaagaaggcctttgccaaccccgagg

SEQ ID NO: 73383 - DNA, 201 bp, Homo sapiens
acgtggtggccatcatcacgggccaagtgaggctgcggaagaaggcctttgccaaccccgaggatgccctgagacacggaggcccccagtattgcaggagygaccccgacgtggaacgctgcctcagggcccaccggaacgacatggagaccatctaccccttccttttcctgggcttcgtctactcctttctgggtccta

SEQ ID NO: 73384 - DNA, 133 bp, Homo sapiens
gattgtggtgggccctgagtcctggtttcctggcagcctgctgcgcgtgtgggtctctgggcacagtgggcctgtgtgtgtgcccgtgtgtgtgtatgtgwgtgttgttttctcctagacccgtgacctgaga

SEQ ID NO: 73385 - DNA, 201 bp, Homo sapiens; identical to SEQ ID NO: 73377

SEQ ID NO: 73386 - DNA, 201 bp, Homo sapiens; identical to SEQ ID NO: 73378

SEQ ID NO: 73387 - DNA, 201 bp, Homo sapiens; identical to SEQ ID NO: 73379

SEQ ID NO: 73388 - DNA, 201 bp, Homo sapiens; identical to SEQ ID NO: 73380

SEQ ID NO: 73389 - DNA, 201 bp, Homo sapiens; identical to SEQ ID NO: 73382

SEQ ID NO: 73390 - DNA, 201 bp, Homo sapiens; identical to SEQ ID NO: 73383

SEQ ID NO: 73391 - DNA, 201 bp, Homo sapiens
ggaagctgcgggcacccatccgctccgtgacctacaccctggcccagctcccctgcgcctccatggctctgcagatcctctgggaagcggcccgccacctwtgaccagcagctgatgcctccttggccaccagaccatgggccaagagccgccgtggctatacctggggacttgatgttccttccagattgtggtgggccc

SEQ ID NO: 73392 - DNA, 201 bp, Homo sapiens
atgtctttgctgcagtcttctctctggctcaggtgtgggtgggaggggcccacaggaagctcagccttctcctcccaaggtttgagtccctccaaagggcwgtgggtggaggaccgggagctttgggtgaccagccactcaaaggaactttctggtcccttcagtatcttcaaggtttggaaactgcaaatgtccccttga

SEQ ID NO: 73393 - DNA, 201 bp, Homo sapiens
acagagcatcaaaaacatcactccctctccctccctaacagtgaaaagagagaagggagactctatttaagattcccaaacctaatgatcatctgaatccygggctaagaatgcagacttttcagactgaccccagaaattctggcccagccaatctagaggcaagcctggccatctgtatttttttttttccaagacaga

SEQ ID NO: 73394 - DNA, 201 bp, Homo sapiens
ggtgggccctgagtcctggtttcctggcagcctgctgcgcgtgtgggtctctgggcacagtgggcctgtgtgtgtgcccgtgtgtgtgtatgtgtgtgtgkatgtttcttagccccttggattcctgcacgaagtggctgatgggaaccatttcaagacagattgtgaagattgatagaaaatccttcagctaaagtaaca

SEQ ID NO: 73395 - DNA, 201 bp, Homo sapiens
gattgtggtgggccctgagtcctggtttcctggcagcctgctgcgcgtgtgggtctctgggcacagtgggcctgtgtgtgtgcccgtgtgtgtgtatgtgwgtgtgtatgtttcttagccccttggattcctgcacgaagtggctgatgggaaccatttcaagacagattgtgaagattgatagaaaatccttcagctaaa

SEQ ID NO: 73396 - DNA, 201 bp, Homo sapiens; identical to SEQ ID NO: 73377

SEQ ID NO: 73397 - DNA, 201 bp, Homo sapiens; identical to SEQ ID NO: 73378

SEQ ID NO: 73398 - DNA, 201 bp, Homo sapiens
gtgctgggatgacaggcatgaatcactgtgctcagccaccatctggagttttaaaaggctcccatgtgagtccctgtgatggccaggccaggggacccctrccagttctctgtggaagcaaggctggggtcttgggttcctgtatggtggaagctgggtgagccaaggacagggctggctcctctgcccccgctgacgctt

SEQ ID NO: 73399 - DNA, 201 bp, Homo sapiens
gccaaggacagggctggctcctctgcccccgctgacgcttcccttgccgttggctttggatgtctttgctgcagtcttctctctggctcaggtgtgggtgkgaggggcccacaggaagctcagccttctcctcccaaggtttgagtccctccaaagggcagtgggtggaggaccgggagctttgggtgaccagccactcaa

SEQ ID NO: 73400 - DNA, 201 bp, Homo sapiens; identical to SEQ ID NO: 73379

SEQ ID NO: 73401 - DNA, 201 bp, Homo sapiens; identical to SEQ ID NO: 73380

SEQ ID NO: 73402 - DNA, 201 bp, Homo sapiens
acgtggtggccatcatcacgggccaagtgaggctgcggaagaaggcctttgccaaccccgaggatgccctgagacacggaggcccccagtattgcaggagygaccccgacgtggaacgctgcctcaggcaggcccaccggaacgacatggagaccatctaccccttccttttcctgggcttcgtctactcctttctgggtc

SEQ ID NO: 73403 - DNA, 201 bp, Homo sapiens; identical to SEQ ID NO: 73382

SEQ ID NO: 73404 - DNA, 201 bp, Homo sapiens; identical to SEQ ID NO: 73392

SEQ ID NO: 73405 - DNA, 201 bp, Homo sapiens; identical to SEQ ID NO: 73393

SEQ ID NO: 73406 - DNA, 201 bp, Homo sapiens; identical to SEQ ID NO: 73394

SEQ ID NO: 73407 - DNA, 201 bp, Homo sapiens; identical to SEQ ID NO: 73395

SEQ ID NO: 73408 - DNA, 201 bp, Homo sapiens; identical to SEQ ID NO: 73377

SEQ ID NO: 73409 - DNA, 124 bp, Homo sapiens
gctgctcctctgtcgagctgatcrcacccacagttgagctgcgctggccagagatgcctgcccacagcctggtgatgagcagcccggccctcccggccttcctgctctgcagcacgctgctggt

SEQ ID NO: 73410 - DNA, 201 bp, Homo sapiens; identical to SEQ ID NO: 73398

SEQ ID NO: 73411 - DNA, 173 bp, Homo sapiens
gctgctcctctgtcgagctgatcacacccacagttgagctgcgctggccagagatgcctgcccacagcctggwgatgagcagcccggccctcccggccttcctgctctgcagcacgctgctggtcatcaagatgtacgtggtggccatcatcacgggccaagtgaggctgcgg

SEQ ID NO: 73412 - DNA, 201 bp, Homo sapiens; identical to SEQ ID NO: 73399

SEQ ID NO: 73413 - DNA, 201 bp, Homo sapiens; identical to SEQ ID NO: 73380

SEQ ID NO: 73414 - DNA, 198 bp, Homo sapiens
gctgctcctctgtcgagctgatcacacccacagttgagctgcgctggccagagatgcctgcccacagcctggtgatgagcagcccggccctcccggcyttcctgctctgcagcacgctgctggtcatcaagatgtacgtggtggccatcatcacgggccaagtgaggctgcggaagaaggcctttgccaaccccgagg

SEQ ID NO: 73415 - DNA, 201 bp, Homo sapiens; identical to SEQ ID NO: 73383

SEQ ID NO: 73416 - DNA, 201 bp, Homo sapiens; identical to SEQ ID NO: 73392

SEQ ID NO: 73417 - DNA, 201 bp, Homo sapiens; identical to SEQ ID NO: 73393

SEQ ID NO: 73418 - DNA, 201 bp, Homo sapiens; identical to SEQ ID NO: 73394

SEQ ID NO: 73419 - DNA, 201 bp, Homo sapiens; identical to SEQ ID NO: 73395

SEQ ID NO: 73420 - DNA, 201 bp, Homo sapiens; identical to SEQ ID NO: 73377

SEQ ID NO: 73421 - DNA, 201 bp, Homo sapiens; identical to SEQ ID NO: 73378

SEQ ID NO: 73422 - DNA, 201 bp, Homo sapiens; identical to SEQ ID NO: 73398

SEQ ID NO: 73423 - DNA, 201 bp, Homo sapiens; identical to SEQ ID NO: 73379

SEQ ID NO: 73424 - DNA, 201 bp, Homo sapiens; identical to SEQ ID NO: 73399

SEQ ID NO: 73425 - DNA, 201 bp, Homo sapiens; identical to SEQ ID NO: 73380

SEQ ID NO: 73426 - DNA, 201 bp, Homo sapiens; identical to SEQ ID NO: 73382

SEQ ID NO: 73427 - DNA, 201 bp, Homo sapiens; identical to SEQ ID NO: 73383

SEQ ID NO: 73428 - DNA, 201 bp, Homo sapiens
atgcacttcacgctcaactctttcccatttggaggagtgggttccagtgggatgggagcttatcacggaaaacatagttttgatactttttctcatcagcrtccctgtttattaaaaagtttaaagagagaaggtgctaacaaactcagatatcctcccaacagccagtcaaaggtggattggggaaaattttttctcttg

SEQ ID NO: 73429 - DNA, 201 bp, Homo sapiens
gaagaggcctgtggaatgcagcattacctgctggacagagcagggcaggcagttctatgccttggagctcctgactgcagggactctgtccccacactcaraaagactcagctcactcaatgagagaatgtgatttactttatagaacgtataatcaactttgttgaataatttgttctattaaggctgtctaaagtatgt

SEQ ID NO: 73430 - DNA, 201 bp, Homo sapiens
acatagttttgatactttttctcatcagcgtccctgtttattaaaaagtttaaagagagaaggtgctaacaaactcagatatcctcccaacagccagtcaraggtggattggggaaaattttttctcttgaaacggttcaacaaagaaaaactcggtctcctgttgctcactttcctgggtattgtagccgctgtgcttgt

SEQ ID NO: 73431 - DNA, 201 bp, Homo sapiens
gagaatcttcctgaatgggttactgctaaaccagttaagaagaacgtgctcaccatgctggatgaggcctatattcagccacagcctctgggagtggtgckgataatcggagcttggaattaccccttcgttctcaccattcagccactgataggagccatcgctgcaggaaatgctgtgattataaagccttctgaactg

SEQ ID NO: 73432 - DNA, 201 bp, Homo sapiens
tagataaaattgcactatggaattttcattgagtatgtttaaattattggcttgtctactaatacacatctgcttcaaaatgaacatatttcataaaattrgcatcaattttaatgacgctcctggtatggaacctcagatataccctattggagacaatcctttgatcataaattctccccaactataaatcattttatg

SEQ ID NO: 73433 - DNA, 201 bp, Homo sapiens
aatgaacgtgaaaagcctctggctctttatgtattttcgcataaccataagctcatcaaacggatgattgatgagacatccagtggaggtgtcacaggcartgacgtcattatgcacttcacgctcaactctttcccatttggaggagtgggttccagtgggatgggagcttatcacggaaaacatagttttgatactttt

SEQ ID NO: 73434 - DNA, 201 bp, Homo sapiens
gccctgttgatttttctggtagttcacagactgcgttggtccagtaagcagagatgaacaccagatttcaaaacccagccctgtctgttaagagtgaggcwgaatattactgaagaatgatcctgttcaacctcctagtgcctctactgaattattcctcttttaaatggttaatgaaccaataatttttaaatcatacca

SEQ ID NO: 73435 - DNA, 201 bp, Homo sapiens
cgccctcagggactagctctccagggaactgggacgcgcccccggaccgtgcagttctctgcaggaccaggccatggagctcgaagtccggcgggtccgayaggcgttcctgtccggccggtcgcgacctctgcggtttcggctgcagcagctggaggccctgcggaggatggtgcaggagcgcgagaaggatatcctgac

SEQ ID NO: 73436 - DNA, 201 bp, Homo sapiens
caacctgaggtactctgctgagtgggcaaggctgaagaagaggcctgtggaatgcagcattacctgctggacagagcagggcaggcagttctatgccttgkagctcctgactgcagggactctgtccccacactcagaaagactcagctcactcaatgagagaatgtgatttactttatagaacgtataatcaactttgtt

SEQ ID NO: 73437 - DNA, 201 bp, Homo sapiens
ctccctcagtatttagaccaggatctctatattgttattaatggtggtgttgaggaaaccacggagctcctgaagcagcgatttgaccacattttctatabgggaaacactgcggttggcaaaattgtcatggaagctgctgccaagcatctgacccctgtgactcttgaactgggagggaaaagtccatgttatattgat

SEQ ID NO: 73438 - DNA, 201 bp, Homo sapiens
cctcagtatttagaccaggatctctatattgttattaatggtggtgttgaggaaaccacggagctcctgaagcagcgatttgaccacattttctatacggsaaacactgcggttggcaaaattgtcatggaagctgctgccaagcatctgacccctgtgactcttgaactgggagggaaaagtccatgttatattgataaa

SEQ ID NO: 73439 - DNA, 201 bp, Homo sapiens
aagtccatgttatattgataaagattgtgacctggacattgtttgcagacgcataacctggggaaaatacatgaattgtggccaaacctgcattgcacccractatattctctgtgaagcatccctccaaaatcaaattgtatggaagattaaggaaacagtgaaggaattttatggagaaaatataaaagagtctcctga

SEQ ID NO: 73440 - DNA, 201 bp, Homo sapiens
gctaaaccagttaagaagaacgtgctcaccatgctggatgaggcctatattcagccacagcctctgggagtggtgctgataatcggagcttggaattaccycttcgttctcaccattcagccactgataggagccatcgctgcaggaaatgctgtgattataaagccttctgaactgagtgaaaatacagccaagatcttg

SEQ ID NO: 73441 - DNA, 201 bp, Homo sapiens
atcgccgccgacctgtgcaagagtgaattcaatgtgtacagtcaggaagtcattactgtccttggggaaattgattttatgcttgagaatcttcctgaatrggttactgctaaaccagttaagaagaacgtgctcaccatgctggatgaggcctatattcagccacagcctctgggagtggtgctgataatcggagcttgg

SEQ ID NO: 73442 - DNA, 201 bp, Homo sapiens
aaaactgtggctctaagagagtaatcataaaataccttagataaaattgcactatggaattttcattgagtatgtttaaattattggcttgtctactaatacacatctgcttcaaaatgaacatatttcataaaattggcatcaattttaatgacgctcctggtatggaacctcagatataccctattggagacaatcctt

SEQ ID NO: 73443 - DNA, 201 bp, Homo sapiens
aaactgtggctctaagagagtaatcataaaataccttagataaaattgcactatggaattttcattgagtatgtttaaattattggcttgtctactaatacacatctgcttcaaaatgaacatatttcataaaattggcatcaattttaatgacgctcctggtatggaacctcagatataccctattggagacaatccttt

SEQ ID NO: 73444 - DNA, 201 bp, Homo sapiens
gcacttcacgctcaactctttcccatttggaggagtgggttccagtgggatgggagcttatcacggaaaacatagttttgatactttttctcatcagcgtycctgtttattaaaaagtttaaagagagaaggtgctaacaaactcagatatcctcccaacagccagtcaaaggtggattggggaaaattttttctcttgaa

SEQ ID NO: 73445 - DNA, 201 bp, Homo sapiens
gttcctgtccggccggtcgcgacctctgcggtttcggctgcagcagctggaggccctgcggaggatggtgcaggagcgcgagaaggatatcctgacggccwtcgccgccgacctgtgcaagagtgaattcaatgtgtacagtcaggaagtcattactgtccttggggaaattgattttatgcttgagaatcttcctgaatg

SEQ ID NO: 73446 - DNA, 201 bp, Homo sapiens
tcatggaagctgctgccaagcatctgacccctgtgactcttgaactgggagggaaaagtccatgttatattgataaagattgtgacctggacattgtttgsagacgcataacctggggaaaatacatgaattgtggccaaacctgcattgcacccgactatattctctgtgaagcatccctccaaaatcaaattgtatgga

SEQ ID NO: 73447 - DNA, 201 bp, Homo sapiens
ggaagctgctgccaagcatctgacccctgtgactcttgaactgggagggaaaagtccatgttatattgataaagattgtgacctggacattgtttgcagaygcataacctggggaaaatacatgaattgtggccaaacctgcattgcacccgactatattctctgtgaagcatccctccaaaatcaaattgtatggaagat

SEQ ID NO: 73448 - DNA, 201 bp, Homo sapiens
aatacatgaattgtggccaaacctgcattgcacccgactatattctctgtgaagcatccctccaaaatcaaattgtatggaagattaaggaaacagtgaasgaattttatggagaaaatataaaagagtctcctgattatgaaaggatcatcaatcttcgtcattttaagaggatactaagtttgcttgaaggacaaaaga

SEQ ID NO: 73449 - DNA, 201 bp, Homo sapiens
agttctctgcaggaccaggccatggagctcgaagtccggcgggtccgacaggcgttcctgtccggccggtcgcgacctctgcggtttcggctgcagcagcyggaggccctgcggaggatggtgcaggagcgcgagaaggatatcctgacggccatcgccgccgacctgtgcaagagtgaattcaatgtgtacagtcaggaa

SEQ ID NO: 73450 - DNA, 201 bp, Homo sapiens
gatcatcaatcttcgtcattttaagaggatactaagtttgcttgaaggacaaaagatagcttttggtggggagactgatgaggccacacgctacatagccycaacagtacttaccgatgttgatcctaaaaccaaggtgatgcaagaagaaatttttggaccaattcttccaatagtgcctgtgaaaaatgtagatgaggc

SEQ ID NO: 73451 - DNA, 201 bp, Homo sapiens
tccgcgggagacgaaccccggcttcccgccctcagggactagctctccagggaactgggacgcgcccccggaccgtgcagttctctgcaggaccaggccawggagctcgaagtccggcgggtccgacaggcgttcctgtccggccggtcgcgacctctgcggtttcggctgcagcagctggaggccctgcggaggatggtg

SEQ ID NO: 73452 - DNA, 201 bp, Homo sapiens
atttttggaccaattcttccaatagtgcctgtgaaaaatgtagatgaggccataaatttcataaatgaacgtgaaaagcctctggctctttatgtattttygcataaccataagctcatcaaacggatgattgatgagacatccagtggaggtgtcacaggcaatgacgtcattatgcacttcacgctcaactctttccca

SEQ ID NO: 73453 - DNA, 201 bp, Homo sapiens
ctttttctcatcagcgtccctgtttattaaaaagtttaaagagagaaggtgctaacaaactcagatatcctcccaacagccagtcaaaggtggattggggraaattttttctcttgaaacggttcaacaaagaaaaactcggtctcctgttgctcactttcctgggtattgtagccgctgtgcttgtcaagaaataccaag

SEQ ID NO: 73454 - DNA, 201 bp, Homo sapiens
acgctcaactctttcccatttggaggagtgggttccagtgggatgggagcttatcacggaaaacatagttttgatactttttctcatcagcgtccctgttkattaaaaagtttaaagagagaaggtgctaacaaactcagatatcctcccaacagccagtcaaaggtggattggggaaaattttttctcttgaaacggttc

SEQ ID NO: 73455 - DNA, 201 bp, Homo sapiens
ttgaaggacaaaagatagcttttggtggggagactgatgaggccacacgctacatagccccaacagtacttaccgatgttgatcctaaaaccaaggtgatscaagaagaaatttttggaccaattcttccaatagtgcctgtgaaaaatgtagatgaggccataaatttcataaatgaacgtgaaaagcctctggctcttt

SEQ ID NO: 73456 - DNA, 201 bp, Homo sapiens
aatgacgtcattatgcacttcacgctcaactctttcccatttggaggagtgggttccagtgggatgggagcttatcacggaaaacatagttttgatacttyttctcatcagcgtccctgtttattaaaaagtttaaagagagaaggtgctaacaaactcagatatcctcccaacagccagtcaaaggtggattggggaaaa

SEQ ID NO: 73457 - DNA, 201 bp, Homo sapiens; identical to SEQ ID NO: 73428

SEQ ID NO: 73458 - DNA, 201 bp, Homo sapiens; identical to SEQ ID NO: 73429

SEQ ID NO: 73459 - DNA, 201 bp, Homo sapiens; identical to SEQ ID NO: 73430

SEQ ID NO: 73460 - DNA, 201 bp, Homo sapiens; identical to SEQ ID NO: 73431

SEQ ID NO: 73461 - DNA, 201 bp, Homo sapiens; identical to SEQ ID NO: 73432

SEQ ID NO: 73462 - DNA, 201 bp, Homo sapiens; identical to SEQ ID NO: 73433

SEQ ID NO: 73463 - DNA, 201 bp, Homo sapiens
attggggaaaattttttctcttgaaacggttcaacaaagaaaaactcggtctcctgttgctcactttcctgggtattgtagccgctgtgcttgtcaaggcwgaatattactgaagaatgatcctgttcaacctcctagtgcctctactgaattattcctcttttaaatggttaatgaaccaataatttttaaatcatacca

SEQ ID NO: 73464 - DNA, 201 bp, Homo sapiens
cctgcacctgcatgcttcccgcctcccactccccagcgcccccggaccgtgcagttctctgcaggaccaggccatggagctcgaagtccggcgggtccgayaggcgttcctgtccggccggtcgcgacctctgcggtttcggctgcagcagctggaggccctgcggaggatggtgcaggagcgcgagaaggatatcctgac

SEQ ID NO: 73465 - DNA, 201 bp, Homo sapiens; identical to SEQ ID NO: 73436

SEQ ID NO: 73466 - DNA, 201 bp, Homo sapiens; identical to SEQ ID NO: 73437

SEQ ID NO: 73467 - DNA, 201 bp, Homo sapiens; identical to SEQ ID NO: 73438

SEQ ID NO: 73468 - DNA, 201 bp, Homo sapiens; identical to SEQ ID NO: 73439

SEQ ID NO: 73469 - DNA, 201 bp, Homo sapiens; identical to SEQ ID NO: 73440

SEQ ID NO: 73470 - DNA, 201 bp, Homo sapiens; identical to SEQ ID NO: 73441

SEQ ID NO: 73471 - DNA, 201 bp, Homo sapiens; identical to SEQ ID NO: 73442

SEQ ID NO: 73472 - DNA, 201 bp, Homo sapiens; identical to SEQ ID NO: 73443

SEQ ID NO: 73473 - DNA, 201 bp, Homo sapiens; identical to SEQ ID NO: 73444

SEQ ID NO: 73474 - DNA, 201 bp, Homo sapiens; identical to SEQ ID NO: 73445

SEQ ID NO: 73475 - DNA, 201 bp, Homo sapiens; identical to SEQ ID NO: 73446

SEQ ID NO: 73476 - DNA, 201 bp, Homo sapiens; identical to SEQ ID NO: 73447

SEQ ID NO: 73477 - DNA, 201 bp, Homo sapiens; identical to SEQ ID NO: 73448

SEQ ID NO: 73478 - DNA, 201 bp, Homo sapiens; identical to SEQ ID NO: 73449

SEQ ID NO: 73479 - DNA, 201 bp, Homo sapiens; identical to SEQ ID NO: 73450

SEQ ID NO: 73480 - DNA, 201 bp, Homo sapiens
gggaggcggagggaagggaggcgaggcctgcacctgcatgcttcccgcctcccactccccagcgcccccggaccgtgcagttctctgcaggaccaggccawggagctcgaagtccggcgggtccgacaggcgttcctgtccggccggtcgcgacctctgcggtttcggctgcagcagctggaggccctgcggaggatggtg

SEQ ID NO: 73481 - DNA, 201 bp, Homo sapiens; identical to SEQ ID NO: 73452

SEQ ID NO: 73482 - DNA, 201 bp, Homo sapiens
ctttttctcatcagcgtccctgtttattaaaaagtttaaagagagaaggtgctaacaaactcagatatcctcccaacagccagtcaaaggtggattggggraaattttttctcttgaaacggttcaacaaagaaaaactcggtctcctgttgctcactttcctgggtattgtagccgctgtgcttgtcaaggctgaatatt

SEQ ID NO: 73483 - DNA, 201 bp, Homo sapiens; identical to SEQ ID NO: 73454

SEQ ID NO: 73484 - DNA, 201 bp, Homo sapiens; identical to SEQ ID NO: 73455

SEQ ID NO: 73485 - DNA, 201 bp, Homo sapiens
agatggtatttgtcaactttttttttctcattttaaaattcttagctgagaagattttctcaaactttatgttctgctgtgtgtgttgggggtggtggttrgtagctatagtaaataggtttttccagtggcatcctcctacccccagttgctgatctagaacaagtgtttctgtaagcatatttgtagaacactaatccc

SEQ ID NO: 73486 - DNA, 201 bp, Homo sapiens; identical to SEQ ID NO: 73456

SEQ ID NO: 73487 - DNA, 201 bp, Homo sapiens
gggcctgattgagggccagaaggtggcttatgggggcaccggggatgccgccactcgctacatagcccccaccatcctcacggacgtggacccccagtccscggtgatgcaagaggagatcttcgggcctgtgctgcccatcgtgtgcgtgcgcagcctggaggaggccatccagttcatcaaccagcgtgagaagcccct

SEQ ID NO: 73488 - DNA, 201 bp, Homo sapiens
gctaagaaatcccgggactatggaagaatcattagtgcccggcacttccagagggtgatgggcctgattgagggccagaaggtggcttatgggggcaccgrggatgccgccactcgctacatagcccccaccatcctcacggacgtggacccccagtccccggtgatgcaagaggagatcttcgggcctgtgctgcccatc

SEQ ID NO: 73489 - DNA, 122 bp, Homo sapiens
actcctctgctgacctgctgacctgtgcacaccccactcccacatgggcccaggcctcaccattccaagtctccacccctttctagaccaataaagagacraatacaattttctaactcagc

SEQ ID NO: 73490 - DNA, 201 bp, Homo sapiens
tgacccagcactgaggaggggttgctccgcctggcctggccatactgtgtcccatcggagtgcggaccaccctcactggctctcctggccctgggagaatygctcctgcagccccagcccagccccactcctctgctgacctgctgacctgtgcacaccccactcccacatgggcccaggcctcaccattccaagtctcca

SEQ ID NO: 73491 - DNA, 201 bp, Homo sapiens
agagtccctgctacgtggacaagaactgtgacctggacgtggcctgccgacgcatcgcctgggggaaattcatgaacagtggccagacctgcgtggccccwgactacatcctctgtgacccctcgatccagaaccaaattgtggagaagctcaagaagtcactgaaagagttctacggggaagatgctaagaaatcccggg

SEQ ID NO: 73492 - DNA, 201 bp, Homo sapiens
acaagaatgaatggaacgcctactatgaggaggtggtgtacgtcctagaggagatcgagtacatgatccagaagctccctgagtgggccgcggatgagccygtggagaagacgccccagactcagcaggacgagctctacatccactcggagccactgggcgtggtcctcgtcattggcacctggaactaccccttcaacc

SEQ ID NO: 73493 - DNA, 201 bp, Homo sapiens
tggaggcgctgcagcgcctgatccaggagcaggagcaggagctggtgggcgcgctggccgcagacctgcacaagaatgaatggaacgcctactatgaggargtggtgtacgtcctagaggagatcgagtacatgatccagaagctccctgagtgggccgcggatgagcccgtggagaagacgccccagactcagcaggacg

SEQ ID NO: 73494 - DNA, 201 bp, Homo sapiens
agacatccagtggtggggtggcggccaacgatgtcatcgtccacatcaccttgcactctctgcccttcgggggcgtggggaacagcggcatgggatcctaycatggcaagaagagcttcgagactttctctcaccgccgctcttgcctggtgaggcctctgatgaatgatgaaggcctgaaggtcagataccccccgagcc

SEQ ID NO: 73495 - DNA, 201 bp, Homo sapiens
tacggggaagatgctaagaaatcccgggactatggaagaatcattagtgcccggcacttccagagggtgatgggcctgattgagggccagaaggtggcttwtgggggcaccggggatgccgccactcgctacatagcccccaccatcctcacggacgtggacccccagtccccggtgatgcaagaggagatcttcgggcct

SEQ ID NO: 73496 - DNA, 201 bp, Homo sapiens
ccactcggagccactgggcgtggtcctcgtcattggcacctggaactaccccttcaacctcaccatccagcccatggtgggcgccatcgctgcagggaackcagtggtcctcaagccctcggagctgagtgagaacatggcgagcctgctggctaccatcatcccccagtacctggacaaggatctgtacccagtaatcaa

SEQ ID NO: 73497 - DNA, 201 bp, Homo sapiens
ccttcagctcgggcaggacccgtccgctgcagttccggatccagcagctggaggcgctgcagcgcctgatccaggagcaggagcaggagctggtgggcgcrctggccgcagacctgcacaagaatgaatggaacgcctactatgaggaggtggtgtacgtcctagaggagatcgagtacatgatccagaagctccctgagt

SEQ ID NO: 73498 - DNA, 201 bp, Homo sapiens
taatcaatgggggtgtccctgagaccacggagctgctcaaggagaggttcgaccatatcctgtacacgggcagcacgggggtggggaagatcatcatgacrgctgctgccaagcacctgacccctgtcacgctggagctgggagggaagagtccctgctacgtggacaagaactgtgacctggacgtggcctgccgacgca

SEQ ID NO: 73499 - DNA, 201 bp, Homo sapiens
aggtcagataccccccgagcccggccaagatgacccagcactgaggaggggttgctccgcctggcctggccatactgtgtcccatcggagtgcggaccacmctcactggctctcctggccctgggagaatcgctcctgcagccccagcccagccccactcctctgctgacctgctgacctgtgcacaccccactcccacat

SEQ ID NO: 73500 - DNA, 201 bp, Homo sapiens
gcgcgcccgcgccgccttcagctcgggcaggacccgtccgctgcagttccggatccagcagctggaggcgctgcagcgcctgatccaggagcaggagcagsagctggtgggcgcgctggccgcagacctgcacaagaatgaatggaacgcctactatgaggaggtggtgtacgtcctagaggagatcgagtacatgatcca

SEQ ID NO: 73501 - DNA, 201 bp, Homo sapiens
tatcagcatgatcctttcagaggcgatccgtcggatccacaatggggagtccatgtcctaccttttcagaaacataggcttagatgactgagttttccttyaggaaaactcccgagggccaaactggaaacataagagtgactgctcggtgggatggatttcacaggaaccgtcatgcttgttcctccctctcccctgtaa

SEQ ID NO: 73502 - DNA, 145 bp, Homo sapiens
atatggaatatgtgattgtatttattttctgcaactaaaaaaggaataaaaacttgtgtttgtgtgtttttctaaaactttgtgttttggcaatcgttttrtaactaaaataaaatgaaagctaaatctacacgctgtgaatgtt

SEQ ID NO: 73503 - DNA, 201 bp, Homo sapiens
actcgaattcatcatgtatggagctatcaaagaaaattgcagagcggctaggggtggagatgggcaaagtgcaggtttaccaggaacctaacagagaaacragagtacaaattcaagagtctgtgaggggaaaagatgttttcatcatccaaactgtttcgaaggacgtgaacaccaccatcatggagctcctgatcatgg

SEQ ID NO: 73504 - DNA, 201 bp, Homo sapiens
ctttttatgtcggtttgggtgtttgtgagtttggggagcaatttttataaaagaaaaactttattctcctcttttgaaaaggtaagacctcgttttagttktaactgtttaaaaaataacacttggaataagatttgtaagctcacaaagccttcttccaaagttgcttgagccaagtgcttaaaaagttaataaaataaa

SEQ ID NO: 73505 - DNA, 201 bp, Homo sapiens
ggccaaactggaaacataagagtgactgctcggtgggatggatttcacaggaaccgtcatgcttgttcctccctctcccctgtaacctcacttcttattgwttcctaagaagatagaccaactttttatgtcggtttgggtgtttgtgagtttggggagcaatttttataaaagaaaaactttattctcctcttttgaaaa

SEQ ID NO: 73506 - DNA, 201 bp, Homo sapiens; identical to SEQ ID NO: 73501

SEQ ID NO: 73507 - DNA, 201 bp, Homo sapiens
tgcggggcgcaggaggaattttgttgtcagagaataaaaggaggttgtccataattgactttaagcagcaatcagtaaaacattgagctcttcagctccgyctttcttgctctgaaaattggaaaaccaagaaggttttgatgttttgtgtgacgccacctgaattagaaaccaagatgaacataaccaaaggtggtctgg

SEQ ID NO: 73508 - DNA, 145 bp, Homo sapiens; identical to SEQ ID NO: 73502

SEQ ID NO: 73509 - DNA, 201 bp, Homo sapiens; identical to SEQ ID NO: 73503

SEQ ID NO: 73510 - DNA, 201 bp, Homo sapiens; identical to SEQ ID NO: 73504

SEQ ID NO: 73511 - DNA, 201 bp, Homo sapiens; identical to SEQ ID NO: 73505

SEQ ID NO: 73512 - DNA, 201 bp, Homo sapiens; identical to SEQ ID NO: 73501

SEQ ID NO: 73513 - DNA, 201 bp, Homo sapiens
atgggacctgtggaggaattttgttgtcagagaataaaaggaggttgtccataattgactttaagcagcaatcagtaaaacattgagctcttcagctccgyctttcttgctctgaaaattggaaaaccaagaaggttttgatgttttgtgtgacgccacctgaattagaaaccaagatgaacataaccaaaggtggtctgg

SEQ ID NO: 73514 - DNA, 145 bp, Homo sapiens; identical to SEQ ID NO: 73502

SEQ ID NO: 73515 - DNA, 201 bp, Homo sapiens; identical to SEQ ID NO: 73503

SEQ ID NO: 73516 - DNA, 201 bp, Homo sapiens; identical to SEQ ID NO: 73504

SEQ ID NO: 73517 - DNA, 201 bp, Homo sapiens; identical to SEQ ID NO: 73505

SEQ ID NO: 73518 - DNA, 201 bp, Homo sapiens; identical to SEQ ID NO: 73501

SEQ ID NO: 73519 - DNA, 201 bp, Homo sapiens
ggtcggggccaggaggaattttgttgtcagagaataaaaggaggttgtccataattgactttaagcagcaatcagtaaaacattgagctcttcagctccgyctttcttgctctgaaaattggaaaaccaagaaggttttgatgttttgtgtgacgccacctgaattagaaaccaagatgaacataaccaaaggtggtctgg

SEQ ID NO: 73520 - DNA, 145 bp, Homo sapiens; identical to SEQ ID NO: 73502

SEQ ID NO: 73521 - DNA, 201 bp, Homo sapiens; identical to SEQ ID NO: 73503

SEQ ID NO: 73522 - DNA, 201 bp, Homo sapiens; identical to SEQ ID NO: 73504

SEQ ID NO: 73523 - DNA, 201 bp, Homo sapiens; identical to SEQ ID NO: 73505

SEQ ID NO: 73524 - DNA, 201 bp, Homo sapiens; identical to SEQ ID NO: 73501

SEQ ID NO: 73525 - DNA, 201 bp, Homo sapiens
gcttgaacccaggaggaattttgttgtcagagaataaaaggaggttgtccataattgactttaagcagcaatcagtaaaacattgagctcttcagctccgyctttcttgctctgaaaattggaaaaccaagaaggttttgatgttttgtgtgacgccacctgaattagaaaccaagatgaacataaccaaaggtggtctgg

SEQ ID NO: 73526 - DNA, 145 bp, Homo sapiens; identical to SEQ ID NO: 73502

SEQ ID NO: 73527 - DNA, 201 bp, Homo sapiens; identical to SEQ ID NO: 73503

SEQ ID NO: 73528 - DNA, 201 bp, Homo sapiens; identical to SEQ ID NO: 73504

SEQ ID NO: 73529 - DNA, 201 bp, Homo sapiens; identical to SEQ ID NO: 73505

SEQ ID NO: 73530 - DNA, 201 bp, Homo sapiens; identical to SEQ ID NO: 73501

SEQ ID NO: 73531 - DNA, 201 bp, Homo sapiens; identical to SEQ ID NO: 73519

SEQ ID NO: 73532 - DNA, 145 bp, Homo sapiens; identical to SEQ ID NO: 73502

SEQ ID NO: 73533 - DNA, 201 bp, Homo sapiens
atcaaagaaaattgcagactttttccccctttctcttctctaggcggctaggggtggagatgggcaaagtgcaggtttaccaggaacctaacagagaaacragagtacaaattcaagagtctgtgaggggaaaagatgttttcatcatccaaactgtttcgaaggacgtgaacaccaccatcatggagctcctgatcatgg

SEQ ID NO: 73534 - DNA, 201 bp, Homo sapiens; identical to SEQ ID NO: 73504

SEQ ID NO: 73535 - DNA, 201 bp, Homo sapiens; identical to SEQ ID NO: 73505

SEQ ID NO: 73536 - DNA, 201 bp, Homo sapiens; identical to SEQ ID NO: 73501

SEQ ID NO: 73537 - DNA, 145 bp, Homo sapiens; identical to SEQ ID NO: 73502

SEQ ID NO: 73538 - DNA, 201 bp, Homo sapiens; identical to SEQ ID NO: 73503

SEQ ID NO: 73539 - DNA, 201 bp, Homo sapiens; identical to SEQ ID NO: 73504

SEQ ID NO: 73540 - DNA, 201 bp, Homo sapiens; identical to SEQ ID NO: 73505

SEQ ID NO: 73541 - DNA, 201 bp, Homo sapiens; identical to SEQ ID NO: 73501

SEQ ID NO: 73542 - DNA, 189 bp, Homo sapiens
gaggaattttgttgtcagagaataaaaggaggttgtccataattgactttaagcagcaatcagtaaaacattgagctcttcagctccgyctttcttgctctgaaaattggaaaaccaagaaggttttgatgttttgtgtgacgccacctgaattagaaaccaagatgaacataaccaaaggtggtctgg

SEQ ID NO: 73543 - DNA, 145 bp, Homo sapiens; identical to SEQ ID NO: 73502

SEQ ID NO: 73544 - DNA, 201 bp, Homo sapiens; identical to SEQ ID NO: 73503

SEQ ID NO: 73545 - DNA, 201 bp, Homo sapiens; identical to SEQ ID NO: 73504

SEQ ID NO: 73546 - DNA, 201 bp, Homo sapiens; identical to SEQ ID NO: 73505

SEQ ID NO: 73547 - DNA, 201 bp, Homo sapiens
ccatggggcaagcttgatccctatgattcctctgaggtagagcctccagccctgcctttgcctttcagtgggctgctgcaggaagaccgggggcagggagyagagtgtgtgtgtgtgtgtgtgtgtgtgtgtgtgtgtgtgtgtttgtgtgtgtgtgtatctgggacctatttcagtcctgtgtcagccctagctccaaga

SEQ ID NO: 73548 - DNA, 201 bp, Homo sapiens
cctggggcatcgtggaagtggaaaacccagggcactgcgactttgtgaagctgaggacaatgctggtacgtacccacatgcaggacctgaaggatgtgacrcgggagacacattatgagaactaccgggcacagtgcatccagagcatgacccgcctggtggtgaaggaacggaatcgcaagtatgaccagaagccaggac

SEQ ID NO: 73549 - DNA, 201 bp, Homo sapiens
ctgcatcagcgggtcaacatcgtgcctatcctggctaaggcagacacactgacacctcccgaagtggaccacaagaaacgcaaaatccgggaggagattgwgcattttggaatcaagatctatcaattcccagactgtgactctgatgaggatgaggacttcaaattgcaggaccaagccctaaaggaaagcatcccattt

SEQ ID NO: 73550 - DNA, 201 bp, Homo sapiens
ctgatgaggatgaggacttcaaattgcaggaccaagccctaaaggaaagcatcccatttgcagtaattggcagcaacactgtagtagaggccagagggcgrcgagttcggggtcgactctacccctggggcatcgtggaagtggaaaacccagggcactgcgactttgtgaagctgaggacaatgctggtacgtacccaca

SEQ ID NO: 73551 - DNA, 201 bp, Homo sapiens
cctggggcatcgtggaagtggaaaacccagggcactgcgactttgtgaagctgaggacaatgctggtacgtacccacatgcaggacctgaaggatgtgacrcgggagacacattatgagaactaccgggcacagtgcatccagagcatgacccgcctggtggtgaaggaacggaatcgcaacaaactgactcgggaaagtg

SEQ ID NO: 73552 - DNA, 201 bp, Homo sapiens; identical to SEQ ID NO: 73549

SEQ ID NO: 73553 - DNA, 201 bp, Homo sapiens; identical to SEQ ID NO: 73550

SEQ ID NO: 73554 - DNA, 201 bp, Homo sapiens; identical to SEQ ID NO: 73551

SEQ ID NO: 73555 - DNA, 201 bp, Homo sapiens; identical to SEQ ID NO: 73549

SEQ ID NO: 73556 - DNA, 201 bp, Homo sapiens; identical to SEQ ID NO: 73550

SEQ ID NO: 73557 - DNA, 201 bp, Homo sapiens; identical to SEQ ID NO: 73549

SEQ ID NO: 73558 - DNA, 201 bp, Homo sapiens; identical to SEQ ID NO: 73548

SEQ ID NO: 73559 - DNA, 201 bp, Homo sapiens; identical to SEQ ID NO: 73550

SEQ ID NO: 73560 - DNA, 201 bp, Homo sapiens; identical to SEQ ID NO: 73551

SEQ ID NO: 73561 - DNA, 201 bp, Homo sapiens; identical to SEQ ID NO: 73549

SEQ ID NO: 73562 - DNA, 201 bp, Homo sapiens; identical to SEQ ID NO: 73550

SEQ ID NO: 73563 - DNA, 201 bp, Homo sapiens; identical to SEQ ID NO: 73547

SEQ ID NO: 73564 - DNA, 201 bp, Homo sapiens; identical to SEQ ID NO: 73551

SEQ ID NO: 73565 - DNA, 201 bp, Homo sapiens; identical to SEQ ID NO: 73549

SEQ ID NO: 73566 - DNA, 201 bp, Homo sapiens; identical to SEQ ID NO: 73550

SEQ ID NO: 73567 - DNA, 201 bp, Homo sapiens; identical to SEQ ID NO: 73551

SEQ ID NO: 73568 - DNA, 201 bp, Homo sapiens; identical to SEQ ID NO: 73549

SEQ ID NO: 73569 - DNA, 201 bp, Homo sapiens; identical to SEQ ID NO: 73550

SEQ ID NO: 73570 - DNA, 201 bp, Homo sapiens
tgagctgtggaggtggggtccttggaagctggatgacagcagctggcaaggggataagagagcagtgagcccctccctcaaggaggtctggctttatccayagacagggccctctgaggtggggctgaggtacaaagggggattgagcagcccaggagaagagagatgggggttcccttcttctcttctctcagatgcatg

SEQ ID NO: 73571 - DNA, 201 bp, Homo sapiens
ggctgggggtctcactgcagagatgaagctgcttctggccctagcagggctcctggccattctggccacgccccagccctctgaaggtgctgctccagctktcctgggggaggtggacacctcgttggtgctgagctccatggaggaggccaagcagctggtggacaaggcctacaaggagcggcgggaaaggtggggcac

SEQ ID NO: 73572 - DNA, 201 bp, Homo sapiens
gggttcccttcttctcttctctcagatgcatggtggacttaggaccttgctgggctgggggtctcactgcagagatgaagctgcttctggccctagcaggsctcctggccattctggccacgccccagccctctgaaggtgctgctccagctgtcctgggggaggtggacacctcgttggtgctgagctccatggaggagg

SEQ ID NO: 73573 - DNA, 201 bp, Homo sapiens
tttggtgggagaacgagggtgtgttcagcatgcagcagcgacaggccctggcccagatctcattgccccggatcatctgcgacaacacaggcatcaccacygtgtctaagaacaacatcttcatgtccaactcatatccccgggactttgtcaactgcagtacacttcctgcattgaacctggcttcctggagggaagcct

SEQ ID NO: 73574 - DNA, 201 bp, Homo sapiens
ggttcccttcttctcttctctcagatgcatggtggacttaggaccttgctgggctgggggtctcactgcagagatgaagctgcttctggccctagcagggstcctggccattctggccacgccccagccctctgaaggtgctgctccagctgtcctgggggaggtggacacctcgttggtgctgagctccatggaggaggc

SEQ ID NO: 73575 - DNA, 201 bp, Homo sapiens
ggaggccaagcagctggtggacaaggcctacaaggagcggcgggaaaggtggggcacgaggcactgcccagctctgggcaaggatgtcccaggcctttcasagaagcagcaggcagcagggagcttgaaggtgggagagggggactatggggacccatgtggactccctttctgtctgtctgtccctgtcatcaagcagcg

SEQ ID NO: 73576 - DNA, 201 bp, Homo sapiens
gggtgtgttcagcatgcagcagcgacaggccctggcccagatctcattgccccggatcatctgcgacaacacaggcatcaccaccgtgtctaagaacaacrtcttcatgtccaactcatatccccgggactttgtcaactgcagtacacttcctgcattgaacctggcttcctggagggaagcctcctagaggccaggtaa

SEQ ID NO: 73577 - DNA, 201 bp, Homo sapiens
tggccacagagctcaagagcctgaaccctaggtgggatggggagaggctctaccaggaagcccggaagatcgtgggggccatggtccagatcatcacttaycgggactacctgcccctggtgctggggccaacggccatgaggaagtacctgcccacgtaccgttcctacaatgactcagtggacccacgcatcgccaacg

SEQ ID NO: 73578 - DNA, 201 bp, Homo sapiens
aatgacccccgcatcaagaaccaagccgactgcatcccgttcttccgctcctgcccggcttgccccgggagcaacatcaccatccgcaaccagatcaacgygctcacttccttcgtggacgccagcatggtgtacggcagcgaggagcccctggccaggaacctgcgcaacatgtccaaccagctggggctgctggccgtc

SEQ ID NO: 73579 - DNA, 201 bp, Homo sapiens
aagaacaacatcttcatgtccaactcatatccccgggactttgtcaactgcagtacacttcctgcattgaacctggcttcctggagggaagcctcctagaggccaggtaagggggtgcagcagtgaggggtatatctgggctggccagttggaaccacggagatctccttgccctagatgagcccagccctgttctgggtg

SEQ ID NO: 73580 - DNA, 201 bp, Homo sapiens
gggatggggagaggctctaccaggaagcccggaagatcgtgggggccatggtccagatcatcacttaccgggactacctgcccctggtgctggggccaacrgccatgaggaagtacctgcccacgtaccgttcctacaatgactcagtggacccacgcatcgccaacgtcttcaccaatgccttccgctacggccacaccc

SEQ ID NO: 73581 - DNA, 201 bp, Homo sapiens
gagggtcgtgctggaaggtggcattgaccccatcctccggggcctcatggccacccctgccaagctgaatcgtcagaaccaaattgcagtggatgagatcygggagcgattgtttgagcaggtcatgaggattgggctggacctgcctgctctgaacatgcagcgcagcagggaccacggcctcccaggatacaatgcctg

SEQ ID NO: 73582 - DNA, 201 bp, Homo sapiens
aagcgcaacggcttcccggtggctctggctcgcgcggtctccaacgagatcgtgcgcttccccactgatcagctgactccggaccaggagcgctcactcaygttcatgcaatggggccagctgttggaccacgacctcgacttcacccctgagccggccgcccgggcctccttcgtcactggcgtcaactgcgagaccagc

SEQ ID NO: 73583 - DNA, 201 bp, Homo sapiens; identical to SEQ ID NO: 73570

SEQ ID NO: 73584 - DNA, 201 bp, Homo sapiens
ggctgggggtctcactgcagagatgaagctgcttctggccctagcagggctcctggccattctggccacgccccagccctctgaaggtgctgctccagctktcctgggggaggtggacacctcgttggtgctgagctccatggaggaggccaagcagctggtggacaaggcctacaaggagcggcgggaaagcatcaagca

SEQ ID NO: 73585 - DNA, 201 bp, Homo sapiens; identical to SEQ ID NO: 73572

SEQ ID NO: 73586 - DNA, 201 bp, Homo sapiens; identical to SEQ ID NO: 73573

SEQ ID NO: 73587 - DNA, 201 bp, Homo sapiens; identical to SEQ ID NO: 73574

SEQ ID NO: 73588 - DNA, 201 bp, Homo sapiens; identical to SEQ ID NO: 73576

SEQ ID NO: 73589 - DNA, 201 bp, Homo sapiens; identical to SEQ ID NO: 73577

SEQ ID NO: 73590 - DNA, 201 bp, Homo sapiens; identical to SEQ ID NO: 73578

SEQ ID NO: 73591 - DNA, 201 bp, Homo sapiens; identical to SEQ ID NO: 73579

SEQ ID NO: 73592 - DNA, 201 bp, Homo sapiens; identical to SEQ ID NO: 73580

SEQ ID NO: 73593 - DNA, 201 bp, Homo sapiens; identical to SEQ ID NO: 73581

SEQ ID NO: 73594 - DNA, 201 bp, Homo sapiens; identical to SEQ ID NO: 73582

SEQ ID NO: 73595 - DNA, 201 bp, Homo sapiens; identical to SEQ ID NO: 73570

SEQ ID NO: 73596 - DNA, 201 bp, Homo sapiens; identical to SEQ ID NO: 73584

SEQ ID NO: 73597 - DNA, 201 bp, Homo sapiens; identical to SEQ ID NO: 73572

SEQ ID NO: 73598 - DNA, 201 bp, Homo sapiens; identical to SEQ ID NO: 73573

SEQ ID NO: 73599 - DNA, 201 bp, Homo sapiens; identical to SEQ ID NO: 73574

SEQ ID NO: 73600 - DNA, 201 bp, Homo sapiens; identical to SEQ ID NO: 73576

SEQ ID NO: 73601 - DNA, 201 bp, Homo sapiens; identical to SEQ ID NO: 73577

SEQ ID NO: 73602 - DNA, 201 bp, Homo sapiens; identical to SEQ ID NO: 73578

SEQ ID NO: 73603 - DNA, 201 bp, Homo sapiens; identical to SEQ ID NO: 73579

SEQ ID NO: 73604 - DNA, 201 bp, Homo sapiens; identical to SEQ ID NO: 73580

SEQ ID NO: 73605 - DNA, 201 bp, Homo sapiens; identical to SEQ ID NO: 73581

SEQ ID NO: 73606 - DNA, 201 bp, Homo sapiens; identical to SEQ ID NO: 73582

SEQ ID NO: 73607 - DNA, 201 bp, Homo sapiens; identical to SEQ ID NO: 73570

SEQ ID NO: 73608 - DNA, 201 bp, Homo sapiens; identical to SEQ ID NO: 73584

SEQ ID NO: 73609 - DNA, 201 bp, Homo sapiens; identical to SEQ ID NO: 73572

SEQ ID NO: 73610 - DNA, 201 bp, Homo sapiens; identical to SEQ ID NO: 73573

SEQ ID NO: 73611 - DNA, 201 bp, Homo sapiens; identical to SEQ ID NO: 73574

SEQ ID NO: 73612 - DNA, 201 bp, Homo sapiens; identical to SEQ ID NO: 73576

SEQ ID NO: 73613 - DNA, 201 bp, Homo sapiens; identical to SEQ ID NO: 73577

SEQ ID NO: 73614 - DNA, 201 bp, Homo sapiens; identical to SEQ ID NO: 73578

SEQ ID NO: 73615 - DNA, 201 bp, Homo sapiens; identical to SEQ ID NO: 73579

SEQ ID NO: 73616 - DNA, 201 bp, Homo sapiens; identical to SEQ ID NO: 73580

SEQ ID NO: 73617 - DNA, 201 bp, Homo sapiens; identical to SEQ ID NO: 73581

SEQ ID NO: 73618 - DNA, 201 bp, Homo sapiens; identical to SEQ ID NO: 73582

SEQ ID NO: 73619 - DNA, 201 bp, Homo sapiens
aggtctccctctcgctgcggctccgcaaccggaccaactacctggggctgctggccatcaaccagcgctttcaagacaacggccgggccctgctgcccttygacaacctgcacgatgacccctgtctcctcaccaaccgctcggcgcgcatcccctgcttcctggcaggtgacacccgatcaacggaaacccccaaactgg

SEQ ID NO: 73620 - DNA, 128 bp, Homo sapiens
gagaagagctggaggaagtgagaggtcrgctgggggtcctcaaagtgagaggggagcagaggatcctcccgtgcaggctgtggatgtcactcacttcccagctggtgaagcctcgctgcagagatgca

SEQ ID NO: 73621 - DNA, 201 bp, Homo sapiens
ccagcaggaggcgcaatggcttccttctccctcttgtccgggctgtctccaaccagattgtgcgcttccccaatgagagactgacctccgaccgtggccgrgccctcatgttcatgcagtggggccagttcattgaccatgacctggacttctccccggagtccccggccagagtggccttcactgcaggcgttgactgtg

SEQ ID NO: 73622 - DNA, 201 bp, Homo sapiens
catggtccagatcatcacctaccgagactttctgcccctggttctgggcaaggcccgggccaggagaaccctggggcactacagggggtactgctccaatrtggacccacgggtggccaatgtcttcaccctggccttccgctttggccacacaatgctccagcccttcatgttccgcttggacagtcagtaccgggcctc

SEQ ID NO: 73623 - DNA, 201 bp, Homo sapiens
tcggctggacccccagcaggaggcgcaatggcttccttctccctcttgtccgggctgtctccaaccagattgtgcgcttccccaatgagagactgacctcygaccgtggccgagccctcatgttcatgcagtggggccagttcattgaccatgacctggacttctccccggagtccccggccagagtggccttcactgcag

SEQ ID NO: 73624 - DNA, 201 bp, Homo sapiens
cgctgcggctccgcaaccggaccaactacctggggctgctggccatcaaccagcgctttcaagacaacggccgggccctgctgcccttcgacaacctgcaygatgacccctgtctcctcaccaaccgctcggcgcgcatcccctgcttcctggcaggtgacacccgatcaacggaaacccccaaactggcagccatgcaca

SEQ ID NO: 73625 - DNA, 201 bp, Homo sapiens
ctggattggggccatcgctgagcctcttttgccgggggctcgagtggggcctcttctggcttgtctgttcgagaaccagttcagaagagcccgagacggaracaggttctggtggcagaaacgaggtgttttcaccaaaagacagcgcaaggccctgagcagaatttccttgtctcgaattatatgtgacaataccggtat

SEQ ID NO: 73626 - DNA, 201 bp, Homo sapiens
tggccaccgagctgagacgcctgaatccccggtggaatggagacaaactgtacaatgaggctcggaagatcatgggggccatggtccagatcatcacctaycgagactttctgcccctggttctgggcaaggcccgggccaggagaaccctggggcactacagggggtactgctccaatgtggacccacgggtggccaatg

SEQ ID NO: 73627 - DNA, 201 bp, Homo sapiens
cagctgcccccctgctttcccatcaagatcccacccaatgacccccgcatcaagaaccagcgtgactgcatccctttcttccgctcggcaccctcatgccyccaaaacaagaacagagtccgcaaccagatcaacgcgctcacctcctttgtggacgccagcatggtgtatggcagtgaggtctccctctcgctgcggctc

SEQ ID NO: 73628 - DNA, 201 bp, Homo sapiens
ccaatgtcttcaccctggccttccgctttggccacacaatgctccagcccttcatgttccgcttggacagtcagtaccgggcctccgcacccaactcgcawgtcccacttagctctgccttctttgccagctggcggatcgtgtatgaagggggcatcgaccccatcctccggggcctcatggccacccctgccaagctga

SEQ ID NO: 73629 - DNA, 201 bp, Homo sapiens
tcatgcagtggggccagttcattgaccatgacctggacttctccccggagtccccggccagagtggccttcactgcaggcgttgactgtgagaggacctgmgcccagctgcccccctgctttcccatcaagatcccacccaatgacccccgcatcaagaaccagcgtgactgcatccctttcttccgctcggcaccctcat

SEQ ID NO: 73630 - DNA, 201 bp, Homo sapiens
ttccccaatgagagactgacctccgaccgtggccgagccctcatgttcatgcagtggggccagttcattgaccatgacctggacttctccccggagtcccyggccagagtggccttcactgcaggcgttgactgtgagaggacctgcgcccagctgcccccctgctttcccatcaagatcccacccaatgacccccgcatc

SEQ ID NO: 73631 - DNA, 201 bp, Homo sapiens
cctgcgcccagctgcccccctgctttcccatcaagatcccacccaatgacccccgcatcaagaaccagcgtgactgcatccctttcttccgctcggcaccmtcatgcccccaaaacaagaacagagtccgcaaccagatcaacgcgctcacctcctttgtggacgccagcatggtgtatggcagtgaggtctccctctcgc

SEQ ID NO: 73632 - DNA, 201 bp, Homo sapiens
gcagcggttcagccagccccatggacctcctgtcctacttcaaacaaccggtagcagccaccaggacagttgttcgggccgcagattatatgcatgtggcyttggggctgcttgaagagaagttacaaccccagcggtccggacccttcaatgtcactgatgtgctaacagaaccacagctgcggctgctgtcccaggcca

SEQ ID NO: 73633 - DNA, 201 bp, Homo sapiens
tgagctccgggaccggctgtttcggcaagtgaggaggattgggctggacctggcagctctcaacatgcaacgaagccgggaccacggccttccagggtacwatgcttggaggcgcttctgtgggctctcccagccccggaatttggcacagcttagccgggtgctgaaaaaccaggacttggcaaggaagttcctgaattt

SEQ ID NO: 73634 - DNA, 137 bp, Homo sapiens
gagaagagctggaggaagtgagaggtcggctgggggycctcaaagtgagaggggagcagaggatcctcccgtgcaggctgtggatgtcactcacttcccagctggtgaagcctcgctgcagagatgcatctgctccc

SEQ ID NO: 73635 - DNA, 201 bp, Homo sapiens
gcatctgctcccagccctggcaggggtcctggccacactcgtcctcgcccagccctgtgagggcactgacccagcctcccctggggcagtggagacctcgrtcctgcgagactgcatagcagaggccaagttgctggtggatgctgcctacaattggacccagaagagcatcaagcagcggcttcgcagcggttcagccag

SEQ ID NO: 73636 - DNA, 201 bp, Homo sapiens
tgtgagaggacctgcgcccagctgcccccctgctttcccatcaagatcccacccaatgacccccgcatcaagaaccagcgtgactgcatccctttcttccrctcggcaccctcatgcccccaaaacaagaacagagtccgcaaccagatcaacgcgctcacctcctttgtggacgccagcatggtgtatggcagtgaggtc

SEQ ID NO: 73637 - DNA, 201 bp, Homo sapiens
  misc_feature (1)...(201): n = A,T,C or G
tggcaggggtcctggccacactcgtcctcgcccagccctgtgagggcactgacccagcctcccctggggcagtggagacctcggtcctgcgagactgcatngcagaggccaagttgctggtggatgctgcctacaattggacccagaagagcatcaagcagcggcttcgcagcggttcagccagccccatggacctcctgt

SEQ ID NO: 73638 - DNA, 201 bp, Homo sapiens
ccgcagattatatgcatgtggctttggggctgcttgaagagaagttacaaccccagcggtccggacccttcaatgtcactgatgtgctaacagaaccacasctgcggctgctgtcccaggccagtggctgtgctctccgggaccaggccgagcgctgcagcgacaagtaccgcaccatcactggacggtgcaacaacaaga

SEQ ID NO: 73639 - DNA, 201 bp, Homo sapiens; identical to SEQ ID NO: 73619

SEQ ID NO: 73640 - DNA, 128 bp, Homo sapiens; identical to SEQ ID NO: 73620

SEQ ID NO: 73641 - DNA, 201 bp, Homo sapiens; identical to SEQ ID NO: 73621

SEQ ID NO: 73642 - DNA, 201 bp, Homo sapiens; identical to SEQ ID NO: 73622

SEQ ID NO: 73643 - DNA, 201 bp, Homo sapiens; identical to SEQ ID NO: 73623

SEQ ID NO: 73644 - DNA, 201 bp, Homo sapiens; identical to SEQ ID NO: 73624

SEQ ID NO: 73645 - DNA, 201 bp, Homo sapiens; identical to SEQ ID NO: 73625

SEQ ID NO: 73646 - DNA, 201 bp, Homo sapiens; identical to SEQ ID NO: 73626

SEQ ID NO: 73647 - DNA, 201 bp, Homo sapiens; identical to SEQ ID NO: 73627

SEQ ID NO: 73648 - DNA, 201 bp, Homo sapiens; identical to SEQ ID NO: 73628

SEQ ID NO: 73649 - DNA, 201 bp, Homo sapiens; identical to SEQ ID NO: 73629

SEQ ID NO: 73650 - DNA, 201 bp, Homo sapiens; identical to SEQ ID NO: 73630

SEQ ID NO: 73651 - DNA, 201 bp, Homo sapiens; identical to SEQ ID NO: 73631

SEQ ID NO: 73652 - DNA, 201 bp, Homo sapiens; identical to SEQ ID NO: 73632

SEQ ID NO: 73653 - DNA, 201 bp, Homo sapiens; identical to SEQ ID NO: 73633

SEQ ID NO: 73654 - DNA, 137 bp, Homo sapiens; identical to SEQ ID NO: 73634

SEQ ID NO: 73655 - DNA, 201 bp, Homo sapiens; identical to SEQ ID NO: 73635

SEQ ID NO: 73656 - DNA, 201 bp, Homo sapiens; identical to SEQ ID NO: 73636

SEQ ID NO: 73657 - DNA, 201 bp, Homo sapiens; identical to SEQ ID NO: 73637
  misc_feature (1)...(201): n = A,T,C or G

SEQ ID NO: 73658 - DNA, 201 bp, Homo sapiens; identical to SEQ ID NO: 73638

SEQ ID NO: 73659 - DNA, 201 bp, Homo sapiens; identical to SEQ ID NO: 73619

SEQ ID NO: 73660 - DNA, 128 bp, Homo sapiens; identical to SEQ ID NO: 73620

SEQ ID NO: 73661 - DNA, 201 bp, Homo sapiens; identical to SEQ ID NO: 73621

SEQ ID NO: 73662 - DNA, 201 bp, Homo sapiens; identical to SEQ ID NO: 73622

SEQ ID NO: 73663 - DNA, 201 bp, Homo sapiens; identical to SEQ ID NO: 73623

SEQ ID NO: 73664 - DNA, 201 bp, Homo sapiens; identical to SEQ ID NO: 73624

SEQ ID NO: 73665 - DNA, 201 bp, Homo sapiens
ctggattggggccatcgctgagcctcttttgccgggggctcgagtggggcctcttctggcttgtctgttcgagaaccagttcagaagagcccgagacggaracaggtaagtgaccctatcataaaagacatcagcaccagaggcagagcagaaaaacactagcatttcaagactaaacattgaagaacactgctcttttta

SEQ ID NO: 73666 - DNA, 201 bp, Homo sapiens; identical to SEQ ID NO: 73626

SEQ ID NO: 73667 - DNA, 201 bp, Homo sapiens; identical to SEQ ID NO: 73627

SEQ ID NO: 73668 - DNA, 201 bp, Homo sapiens
ccaatgtcttcaccctggccttccgctttggccacacaatgctccagcccttcatgttccgcttggacagtcagtaccgggcctccgcacccaactcgcawgtcccacttagctctgccttctttgccagctggcggatcgtgtatgaaggtgaccaggttttccagggggcaaatggggggggcatcgaccccatcctcc

SEQ ID NO: 73669 - DNA, 201 bp, Homo sapiens; identical to SEQ ID NO: 73629

SEQ ID NO: 73670 - DNA, 201 bp, Homo sapiens; identical to SEQ ID NO: 73630

SEQ ID NO: 73671 - DNA, 201 bp, Homo sapiens; identical to SEQ ID NO: 73631

SEQ ID NO: 73672 - DNA, 201 bp, Homo sapiens; identical to SEQ ID NO: 73632

SEQ ID NO: 73673 - DNA, 201 bp, Homo sapiens; identical to SEQ ID NO: 73633

SEQ ID NO: 73674 - DNA, 137 bp, Homo sapiens; identical to SEQ ID NO: 73634

SEQ ID NO: 73675 - DNA, 201 bp, Homo sapiens; identical to SEQ ID NO: 73635

SEQ ID NO: 73676 - DNA, 201 bp, Homo sapiens; identical to SEQ ID NO: 73636

SEQ ID NO: 73677 - DNA, 201 bp, Homo sapiens; identical to SEQ ID NO: 73637
  misc_feature (1)...(201): n = A,T,C or G

SEQ ID NO: 73678 - DNA, 201 bp, Homo sapiens; identical to SEQ ID NO: 73638

SEQ ID NO: 73679 - DNA, 201 bp, Homo sapiens
tgatgagtacctggtcacgtccattgctaaagcctgtgccctggacccggggacaagggccactgggggctccctcagcaccgggaataatgataccagcraggcgtgtgatgctgactttgattcttctctgactgcgtgctctggagtggagagcacagcagctcctcaaaagctgctgatcctggatgcgcgatccta

SEQ ID NO: 73680 - DNA, 201 bp, Homo sapiens
tatctgtctacttagcgtggctgttttgagggactgtcccatcagtgaacaaactgcatggccttggagagagactctgggctcttggctcagatgtgttmatcaaatactcctttcagagctgttgtgggtgtaagtgacatgatgtggccaaaaatccaaactgtgcagttgcgttgtgacaaacatgcaatgtgctgt

SEQ ID NO: 73681 - DNA, 201 bp, Homo sapiens
ggaaagaaccagatgtggttgtccagtcatccaaagcaagtctctagcacaaagcccgttccactgaactgcccttctccagtgcctcctctgtatttggrtgatgatggactcccctttcccacggatgtgatccagcataggttacggcaaatcgaagcagggtacaaacaagaggtggagcagctacgtcgacaggtg

SEQ ID NO: 73682 - DNA, 131 bp, Homo sapiens
ctcctttcagagctgttgtgggtgtaagtgacatgatgtggccaaaaatccaaactgtgcagttgcgttgtgacaaacatgcaatgtgctgtaaaaattcratacagtttaaataaaatctctatattagt

SEQ ID NO: 73683 - DNA, 201 bp, Homo sapiens
atgttgagttggtgactccagcctctttctcctggaggtcacaagatgatgattgcgtagatgttgcctggtgcaaagtgccccaaacagcaatagaaagrcatatgtataaccaaactccaagtgataaccagacccatctctcctccaccttgacaaaagcagattatagtatacaaggtaggaattcctgtcctattt

SEQ ID NO: 73684 - DNA, 201 bp, Homo sapiens
ctttccccagtggcccagagccaggagttctctggccgctctctggacagattacctaaaaccagatccatggatgatcttctttctgcctgtgacacaarcagccccctgactcgtacatccagtgaccctaacctgaataaccactgtcaggaggtcagggtaggcctggagccctggcacagcaatcctgagggatca

SEQ ID NO: 73685 - DNA, 201 bp, Homo sapiens
gggacaagggccactgggggctccctcagcaccgggaataatgataccagcgaggcgtgtgatgctgactttgattcttctctgactgcgtgctctggagkggagagcacagcagctcctcaaaagctgctgatcctggatgcgcgatcctacacggcagcagtggccaaccgggccaagggtggaggctgtgaatgtgaa

SEQ ID NO: 73686 - DNA, 201 bp, Homo sapiens
tgatgatgagtacctggtcacgtccattgctaaagcctgtgccctggacccggggacaagggccactgggggctccctcagcaccgggaataatgataccrgcgaggcgtgtgatgctgactttgattcttctctgactgcgtgctctggagtggagagcacagcagctcctcaaaagctgctgatcctggatgcgcgatc

SEQ ID NO: 73687 - DNA, 201 bp, Homo sapiens
cctggggctgaccgaggaggaccagcacactcacctatgtcagccaggtgagcacatacgttgtcgacaggaggcggagcttgcaaggatgggctttgacstgcagaacgtctggagagtctcacacatcaacagcaactacaaattgtgccccagttacccccagaagctgctggttcctgtgtggatcactgacaaaga

SEQ ID NO: 73688 - DNA, 201 bp, Homo sapiens
atgtgatccagcataggttacggcaaatcgaagcagggtacaaacaagaggtggagcagctacgtcgacaggtgcgtgagcttcagatgaggctggacatycgtcactgctgtgcccctccagcagagccccccatggactatgaggatgattttacatgtttgaaggagtcagatggcagtgatactgaggattttggct

SEQ ID NO: 73689 - DNA, 201 bp, Homo sapiens
ctgtatctgtctacttagcgtggctgttttgagggactgtcccatcagtgaacaaactgcatggccttggagagagactctgggctcttggctcagatgtkttcatcaaatactcctttcagagctgttgtgggtgtaagtgacatgatgtggccaaaaatccaaactgtgcagttgcgttgtgacaaacatgcaatgtgc

SEQ ID NO: 73690 - DNA, 201 bp, Homo sapiens; identical to SEQ ID NO: 73679

SEQ ID NO: 73691 - DNA, 201 bp, Homo sapiens; identical to SEQ ID NO: 73680

SEQ ID NO: 73692 - DNA, 201 bp, Homo sapiens; identical to SEQ ID NO: 73681

SEQ ID NO: 73693 - DNA, 131 bp, Homo sapiens; identical to SEQ ID NO: 73682

SEQ ID NO: 73694 - DNA, 201 bp, Homo sapiens; identical to SEQ ID NO: 73683

SEQ ID NO: 73695 - DNA, 201 bp, Homo sapiens; identical to SEQ ID NO: 73684

SEQ ID NO: 73696 - DNA, 201 bp, Homo sapiens; identical to SEQ ID NO: 73685

SEQ ID NO: 73697 - DNA, 201 bp, Homo sapiens; identical to SEQ ID NO: 73686

SEQ ID NO: 73698 - DNA, 201 bp, Homo sapiens; identical to SEQ ID NO: 73687

SEQ ID NO: 73699 - DNA, 201 bp, Homo sapiens; identical to SEQ ID NO: 73688

SEQ ID NO: 73700 - DNA, 201 bp, Homo sapiens; identical to SEQ ID NO: 73689

SEQ ID NO: 73701 - DNA, 201 bp, Homo sapiens; identical to SEQ ID NO: 73679

SEQ ID NO: 73702 - DNA, 201 bp, Homo sapiens; identical to SEQ ID NO: 73680

SEQ ID NO: 73703 - DNA, 201 bp, Homo sapiens; identical to SEQ ID NO: 73681

SEQ ID NO: 73704 - DNA, 131 bp, Homo sapiens; identical to SEQ ID NO: 73682

SEQ ID NO: 73705 - DNA, 201 bp, Homo sapiens; identical to SEQ ID NO: 73683

SEQ ID NO: 73706 - DNA, 201 bp, Homo sapiens; identical to SEQ ID NO: 73684

SEQ ID NO: 73707 - DNA, 201 bp, Homo sapiens; identical to SEQ ID NO: 73685

SEQ ID NO: 73708 - DNA, 201 bp, Homo sapiens; identical to SEQ ID NO: 73686

SEQ ID NO: 73709 - DNA, 201 bp, Homo sapiens; identical to SEQ ID NO: 73687

SEQ ID NO: 73710 - DNA, 201 bp, Homo sapiens; identical to SEQ ID NO: 73688

SEQ ID NO: 73711 - DNA, 201 bp, Homo sapiens; identical to SEQ ID NO: 73689

SEQ ID NO: 73712 - DNA, 201 bp, Homo sapiens
tccatgttctacggcaggctagtggccgtggccacccttcggaaccaccggcctcggacggcccagcgggctgctgctcaggttctgggaagttctggatkgtttaataaccatggactccaagtacagcagcaacagcaaaggaatctctcactacatgaatacatgagtatggaattattgcaagaagctggtgtctcc

SEQ ID NO: 73713 - DNA, 194 bp, Homo sapiens
ccgcctgtcgcctgtgcgcctgcgcgcggcgccgaggggacggggtccgactcagaaatggcggcctccatgttctacggcaggctagtggccrtggccacccttcggaaccaccggcctcggacggcccagcgggctgctgctcaggttctgggaagttctggattgtttaataaccatggactccaagtaca

SEQ ID NO: 73714 - DNA, 201 bp, Homo sapiens
ggaaaaaattgtttaccaagcaaacgggagaaaagggcagaatatgcaatcaagtattggtctgtgagcgaaaatatcccaggagagaatactactttgcrataacaatggaaaggtcatttcaaggtcctgtattaataggaagttcacatggtggtgtcaacattgaagatgttgctgctgagactcctgaagcaataa

SEQ ID NO: 73715 - DNA, 201 bp, Homo sapiens
caaaggatatgtggcaaagtcaccagatgaagcttatgcaattgccaaaaaattaggtacagaagaaagaaataatatgtgcaggataaactgtaactatragtatttctggcaagttctctgggaccagaactcacaagtaataagaagcaggttcaaaagatgtcgtgataaaggcacaggttttagctggtggtagag

SEQ ID NO: 73716 - DNA, 201 bp, Homo sapiens
cgcctgtcgcctgtgcgcctgcgcgcggcgccgaggggacggggtccgactcagaaatggcggcctccatgttctacggcaggctagtggccgtggccacycttcggaaccaccggcctcggacggcccagcgggctgctgctcaggttctgggaagttctggattgtttaataaccatggactccaagtacagcagcaac

SEQ ID NO: 73717 - DNA, 201 bp, Homo sapiens
agaatactactttgcaataacaatggaaaggtcatttcaaggtcctgtattaataggaagttcacatggtggtgtcaacattgaagatgttgctgctgagwctcctgaagcaataattaaagaacctattgatattgaagaaggcatcaaaaaggaacaagctctccagcttgcacagaagatgggatttccacctaatat

SEQ ID NO: 73718 - DNA, 114 bp, Homo sapiens
ctaatattgtggaatcagcagcagaaaacatggtcaagctttacagcctttttctgaaatacgatgcaaccatgatagaaataaatccaatggtggaagaytcagatggagctg

SEQ ID NO: 73719 - DNA, 201 bp, Homo sapiens; identical to SEQ ID NO: 73712

SEQ ID NO: 73720 - DNA, 201 bp, Homo sapiens
gtcttttttgcttctcctacaaaacgtaacttgcaatttgccagtttattattgttggatacaaagttcttcattgataagagtcctataaataagataartacgaagataaagctttattctttagtgttaaaatacagtatatctaataactagcctcattagtagagcagtatattaaaacaatgttttatgtaaaaa

SEQ ID NO: 73721 - DNA, 160 bp, Homo sapiens
taatcattaggaaacactgattaactgcaagtcttcatgattctgtcatattaagaaacacctgtaggtttgcttcaaataaaggcatatataccaaggamttacagacaaaattaagaatgtcaatttaagttaataaaaatctcccaatatgatttgg

SEQ ID NO: 73722 - DNA, 201 bp, Homo sapiens
ggcacacaaacatttaaaaggatttggactgcatttaattgtaccattcagaatggactgtttgtacgaagcatgtataatgcagttatcttctttctttygtcgcagccagtcttttttgcttctcctacaaaacgtaacttgcaatttgccagtttattattgttggatacaaagttcttcattgataagagtcctata

SEQ ID NO: 73723 - DNA, 201 bp, Homo sapiens; identical to SEQ ID NO: 73714

SEQ ID NO: 73724 - DNA, 194 bp, Homo sapiens; identical to SEQ ID NO: 73713

SEQ ID NO: 73725 - DNA, 201 bp, Homo sapiens; identical to SEQ ID NO: 73716

SEQ ID NO: 73726 - DNA, 201 bp, Homo sapiens; identical to SEQ ID NO: 73717

SEQ ID NO: 73727 - DNA, 201 bp, Homo sapiens
tgtaaagctctctgaaatagtgaccttagcgaagcaagcacatgtggatgtgaaatttcagttgccaatatgatctgaaaacccagtggatggctgaaggwgttaaatgtgctataatcattaagaatactgtgttctgtgttattgttctttttctttttagtgtgtggagattgtaattgccatctaggcacacaaaca

SEQ ID NO: 73728 - DNA, 201 bp, Homo sapiens
ctaatattgtggaatcagcagcagaaaacatggtcaagctttacagcctttttctgaaatacgatgcaaccatgatagaaataaatccaatggtggaagaytcagatggagctgtattgtgtatggatgcaaagatcaattttgactctaattcagcctatcgccaaaagaaaatctttgatctacaggactggacccagg

SEQ ID NO: 73729 - DNA, 201 bp, Homo sapiens; identical to SEQ ID NO: 73712

SEQ ID NO: 73730 - DNA, 201 bp, Homo sapiens; identical to SEQ ID NO: 73720

SEQ ID NO: 73731 - DNA, 111 bp, Homo sapiens
taaacagagctttcaaacactcctcagaatattttcatgattctgtcatattaagaaacacctgtaggtttgcttcaaataaaggcatatataccaaggamttacagacaa

SEQ ID NO: 73732 - DNA, 201 bp, Homo sapiens; identical to SEQ ID NO: 73722

SEQ ID NO: 73733 - DNA, 201 bp, Homo sapiens; identical to SEQ ID NO: 73714

SEQ ID NO: 73734 - DNA, 194 bp, Homo sapiens; identical to SEQ ID NO: 73713

SEQ ID NO: 73735 - DNA, 201 bp, Homo sapiens; identical to SEQ ID NO: 73716

SEQ ID NO: 73736 - DNA, 201 bp, Homo sapiens; identical to SEQ ID NO: 73717

SEQ ID NO: 73737 - DNA, 201 bp, Homo sapiens; identical to SEQ ID NO: 73727

SEQ ID NO: 73738 - DNA, 201 bp, Homo sapiens; identical to SEQ ID NO: 73728

SEQ ID NO: 73739 - DNA, 114 bp, Homo sapiens
aggacattgccagmgtcttggcgatttggcccgacgcgctccgctttcgctacagcatggtggcctactggagacaggctggactcagctacatccgatactcccagatctgtg

SEQ ID NO: 73740 - DNA, 201 bp, Homo sapiens
caaattacagaaatgcagtcattgtagctaagtctcctgatgctgcaaagagggcccagtcctatgcggagagactgcgtctgggtttggccgtcattcayggggaagctcagtgcacggaactggacatggacgatggtcgtcactccccgcctatggtcaaaaatgctactgtgcacccaggcctggagttgccattga

SEQ ID NO: 73741 - DNA, 201 bp, Homo sapiens
ctcatgaggttcagaagctgcaatgtcccaagataaagactgtggatatcagtttgattctttctgaagccattcggagaatccacaatggagagtccatrgcctaccttttccgaaacatcactgtggatgactagctttcacgagggtctcgaccctggacctcctgagggaaacatggaaaaagcagtgccatgagtg

SEQ ID NO: 73742 - DNA, 201 bp, Homo sapiens
acggcatcctgtctgcagaggcccctcgcctgattgaggagtcctccgtagacgaggtggtggtgacgaatactgtccctcatgaggttcagaagctgcartgtcccaagataaagactgtggatatcagtttgattctttctgaagccattcggagaatccacaatggagagtccatggcctaccttttccgaaacatca

SEQ ID NO: 73743 - DNA, 122 bp, Homo sapiens
ggtgcgcaagggcacggacctmggagctctcccccgtcccgcgcgcccgccccgttcccccgccggccatgaacgccgctcgcaccggctaccgagtcttctcggccaactccacggccgcc

SEQ ID NO: 73744 - DNA, 201 bp, Homo sapiens
tagctaagtctcctgatgctgcaaagagggcccagtcctatgcggagagactgcgtctgggtttggccgtcattcacggggaagctcagtgcacggaactkgacatggacgatggtcgtcactccccgcctatggtcaaaaatgctactgtgcacccaggcctggagttgccattgatgatggccaaagagaagccaccga

SEQ ID NO: 73745 - DNA, 201 bp, Homo sapiens
gaccctggacctcctgagggaaacatggaaaaagcagtgccatgagtgatacagtgtttccttgcaagggaggactcgaaacagcctggagttagatatcytcttttgcccggattgatggggaggagggattaaaagagtcaggaagaagacagagctaatggataaatatcataacatggccttacatgtctgctgtca

SEQ ID NO: 73746 - DNA, 201 bp, Homo sapiens; identical to SEQ ID NO: 73740

SEQ ID NO: 73747 - DNA, 201 bp, Homo sapiens; identical to SEQ ID NO: 73741

SEQ ID NO: 73748 - DNA, 201 bp, Homo sapiens; identical to SEQ ID NO: 73742

SEQ ID NO: 73749 - DNA, 122 bp, Homo sapiens
ggtgcgcaagggcacggacctmggagctctccccttcccccgccggccatgaacgccgctcgcaccggctaccgagtcttctcggccaactccacggccgcctgcacggagctggccaagcg

SEQ ID NO: 73750 - DNA, 201 bp, Homo sapiens; identical to SEQ ID NO: 73744

SEQ ID NO: 73751 - DNA, 201 bp, Homo sapiens; identical to SEQ ID NO: 73745

SEQ ID NO: 73752 - DNA, 201 bp, Homo sapiens
ttggcttaggaggacacttccaaagctggggcgccccaaggaggcaccagtggccagaatgtccacgcagagcacccaccccctgaaacctgaggccccaygtctgccacctgggatccccgagtccccgagctgtcagcggcgccacacactccctgccagtgagtttcgctgcctcaccccggaggacgctgtcagcgc

SEQ ID NO: 73753 - DNA, 201 bp, Homo sapiens
tgctggccgtgcaccgcgccttccggcagcagggcaggggccccatcctgctgtggcgctacctgcaccacctgggcagccagccggccgtgcgccgggcygcgctcatgtgcgaggacgcgctggtacccttctatgagaggttcagcttccacgccgtgggcccctgcgccatcaccgtgggctccctcaccttcatgg

SEQ ID NO: 73754 - DNA, 201 bp, Homo sapiens
atcctctccacagtccaggtgctgggaggccctccttggcttaggaggacacttccaaagctggggcgccccaaggaggcaccagtggccagaatgtccaygcagagcacccaccccctgaaacctgaggccccacgtctgccacctgggatccccgagtccccgagctgtcagcggcgccacacactccctgccagtgag

SEQ ID NO: 73755 - DNA, 201 bp, Homo sapiens
gaagctggcagaggagagccgtgcccgggaataggaggaggcagcatgccgagcccctgggacctcccaggcaggctccggttctctcctggggactcacrgaagcatcgtggccaagcaggtgtcggactgctcagagtccgcatggcccaggagcaggtggtcggaggcccctggctttgtgcaaggccggatctgggc

SEQ ID NO: 73756 - DNA, 164 bp, Homo sapiens
ccctgcagccacagaaaccacgatggcaaaaaatctcattggttctcaaggactaacctgtgggggaaagcaatagagacactctttttctctctttttttaaagatttatttcttgaaataataaatattttattgggatgtgaggtgcagaagaggaactgt

SEQ ID NO: 73757 - DNA, 201 bp, Homo sapiens
gccggctccaacaccaagtaccgccggctctgcccctgccgcgacttccgcaagggccaggtggccttgtgccagggctgtctgtgaatccgcctctgccrccctgcctggcacccacgctggctctctcctgccgcgggagaaagcaccagcaggttctgagccctggctgcttgtcctcctcgcaacccccccaggccg

SEQ ID NO: 73758 - DNA, 201 bp, Homo sapiens
tggcattttttgcagacaagggcttgggatggaccctcagccccatggtacgccctgcccagtttccagttgccctgtccacttaccctaggtagcccccyaccccatcagtgccgagtccttgtccctacctccagcttcctccagcctcaaaccgcctctggatctagctgtccttctccgagtggcacgcctgcccca

SEQ ID NO: 73759 - DNA, 201 bp, Homo sapiens
ttaccctaggtagccccccaccccatcagtgccgagtccttgtccctacctccagcttcctccagcctcaaaccgcctctggatctagctgtccttctccragtggcacgcctgccccaggatgccccctttccctcccccccatgcccagagccccgcctgcctcagcgggtcaggccttcagaacactgccacccaccc

SEQ ID NO: 73760 - DNA, 201 bp, Homo sapiens
aggcaaccccacccaccagcctaggcctgctcctccacccttcccgggaggcagccccgggatgctgagagttggtggaggggccaggctggacgcttccygtgggagtcccctccagacctggctggcccctgcagccacagaaaccacgatggcaaaaaatctcattggttctcaaggactaacctgtgggggaaagca

SEQ ID NO: 73761 - DNA, 201 bp, Homo sapiens
gcttcagcccgccccacagctccctcaaccacgagttcttccgaggcaagcccacctccagagaggtgttctcccagcatccctacgcggagaacttcatyggcaagccccacgtgtggacagtcgactacaacaactcagaggagtttgaagcagccatcaaggccattatgagaactcaggtagacccctacctaccct

SEQ ID NO: 73762 - DNA, 201 bp, Homo sapiens
tccaaagcctcaatccctaccccctccaaggggcaggtttccagtccagcctcagagatcaggctctgggacccctgcctggggggtggccttcatgcacyagccacttccgcaggtgctgactcccgcactccctggcattttttgcagacaagggcttgggatggaccctcagccccatggtacgccctgcccagtttc

SEQ ID NO: 73763 - DNA, 201 bp, Homo sapiens
cacttccgcaggtgctgactcccgcactccctggcattttttgcagacaagggcttgggatggaccctcagccccatggtacgccctgcccagtttccagwtgccctgtccacttaccctaggtagccccccaccccatcagtgccgagtccttgtccctacctccagcttcctccagcctcaaaccgcctctggatctag

SEQ ID NO: 73764 - DNA, 201 bp, Homo sapiens
aggccaaactcttcatcgggtttggcttcccctacgagggccccgcccccctggaggccatcgccaatggttgcatcttcctgcagtcccgcttcagcccrccccacagctccctcaaccacgagttcttccgaggcaagcccacctccagagaggtgttctcccagcatccctacgcggagaacttcatcggcaagcccc

SEQ ID NO: 73765 - DNA, 201 bp, Homo sapiens
ccctgaaggagctgcagagtaacttaggggtaccgccaggccggggaagctgcccgctcaccatgcccctgcccttcgacctcatctacaccgactaccayggcctgcagcagatgaagcggcacatgggactctccttcaagaagtaccggtgccgaatcagggtcatcgacaccttcgggacggaacctgcgtacaacc

SEQ ID NO: 73766 - DNA, 201 bp, Homo sapiens
gggcggacattctgactgcactctatgtcctgggccatggcctgcgggtcacagtctccctgaaggagctgcagagtaacttaggggtaccgccaggccgsggaagctgcccgctcaccatgcccctgcccttcgacctcatctacaccgactaccacggcctgcagcagatgaagcggcacatgggactctccttcaaga

SEQ ID NO: 73767 - DNA, 201 bp, Homo sapiens
cctgatgacgtctctgggaggccagttctcggcccggcgcctgggggactcgccattcaccatccgcacagaagtgatggggggccccgagtcccgcggcrtcctgcgcaagatgagcgacctgctggagctgatggtgaagcgcatggacgcactggccaggctggagaacagcagtgagctgcaccgggccggcggcga

SEQ ID NO: 73768 - DNA, 201 bp, Homo sapiens
acctcatctacaccgactaccacggcctgcagcagatgaagcggcacatgggactctccttcaagaagtaccggtgccgaatcagggtcatcgacaccttygggacggaacctgcgtacaaccacgaggagtacgccacgctgcacggctaccggaccaactggggctactggaacctcaaccccaagcagttcatgacca

SEQ ID NO: 73769 - DNA, 201 bp, Homo sapiens
agctggcagaggagagccgtgcccgggaataggaggaggcagcatgccgagcccctgggacctcccaggcaggctccggttctctcctggggactcacagmagcatcgtggccaagcaggtgtcggactgctcagagtccgcatggcccaggagcaggtggtcggaggcccctggctttgtgcaaggccggatctgggcca

SEQ ID NO: 73770 - DNA, 201 bp, Homo sapiens
gcaagccccacgtgtggacagtcgactacaacaactcagaggagtttgaagcagccatcaaggccattatgagaactcaggtagacccctacctaccctaygagtacacctgcgaggggatgctggagcggatccacgcctacatccagcaccaggacttctgcagagctccagaccctgccctaccagaggcccacgccc

SEQ ID NO: 73771 - DNA, 201 bp, Homo sapiens
gctacgccttctttggggtggacggcaccgagtgctccttcctcatctacctcagtgaggtcgagtggttctgccccccgctgccctggaggaaccagacrgctgcccagagggcacccaagcccctccccaaagtccaggcagttttccgaagcaacctgtcccaccttctggacctgatgggcagcgggaaggagtccc

SEQ ID NO: 73772 - DNA, 201 bp, Homo sapiens; identical to SEQ ID NO: 73755

SEQ ID NO: 73773 - DNA, 164 bp, Homo sapiens; identical to SEQ ID NO: 73756

SEQ ID NO: 73774 - DNA, 201 bp, Homo sapiens; identical to SEQ ID NO: 73757

SEQ ID NO: 73775 - DNA, 201 bp, Homo sapiens; identical to SEQ ID NO: 73758

SEQ ID NO: 73776 - DNA, 201 bp, Homo sapiens; identical to SEQ ID NO: 73759

SEQ ID NO: 73777 - DNA, 201 bp, Homo sapiens; identical to SEQ ID NO: 73760

SEQ ID NO: 73778 - DNA, 201 bp, Homo sapiens; identical to SEQ ID NO: 73761

SEQ ID NO: 73779 - DNA, 201 bp, Homo sapiens; identical to SEQ ID NO: 73762

SEQ ID NO: 73780 - DNA, 201 bp, Homo sapiens; identical to SEQ ID NO: 73763

SEQ ID NO: 73781 - DNA, 201 bp, Homo sapiens; identical to SEQ ID NO: 73764

SEQ ID NO: 73782 - DNA, 201 bp, Homo sapiens; identical to SEQ ID NO: 73765

SEQ ID NO: 73783 - DNA, 201 bp, Homo sapiens; identical to SEQ ID NO: 73766

SEQ ID NO: 73784 - DNA, 201 bp, Homo sapiens; identical to SEQ ID NO: 73767

SEQ ID NO: 73785 - DNA, 201 bp, Homo sapiens; identical to SEQ ID NO: 73768

SEQ ID NO: 73786 - DNA, 201 bp, Homo sapiens; identical to SEQ ID NO: 73769

SEQ ID NO: 73787 - DNA, 201 bp, Homo sapiens; identical to SEQ ID NO: 73770

SEQ ID NO: 73788 - DNA, 201 bp, Homo sapiens; identical to SEQ ID NO: 73771

SEQ ID NO: 73789 - DNA, 201 bp, Homo sapiens; identical to SEQ ID NO: 73755

SEQ ID NO: 73790 - DNA, 164 bp, Homo sapiens; identical to SEQ ID NO: 73756

SEQ ID NO: 73791 - DNA, 201 bp, Homo sapiens; identical to SEQ ID NO: 73757

SEQ ID NO: 73792 - DNA, 201 bp, Homo sapiens; identical to SEQ ID NO: 73758

SEQ ID NO: 73793 - DNA, 201 bp, Homo sapiens; identical to SEQ ID NO: 73759

SEQ ID NO: 73794 - DNA, 201 bp, Homo sapiens; identical to SEQ ID NO: 73761

SEQ ID NO: 73795 - DNA, 201 bp, Homo sapiens; identical to SEQ ID NO: 73760

SEQ ID NO: 73796 - DNA, 201 bp, Homo sapiens; identical to SEQ ID NO: 73762

SEQ ID NO: 73797 - DNA, 201 bp, Homo sapiens; identical to SEQ ID NO: 73763

SEQ ID NO: 73798 - DNA, 201 bp, Homo sapiens; identical to SEQ ID NO: 73764

SEQ ID NO: 73799 - DNA, 201 bp, Homo sapiens; identical to SEQ ID NO: 73765

SEQ ID NO: 73800 - DNA, 201 bp, Homo sapiens; identical to SEQ ID NO: 73766

SEQ ID NO: 73801 - DNA, 201 bp, Homo sapiens; identical to SEQ ID NO: 73767

SEQ ID NO: 73802 - DNA, 201 bp, Homo sapiens; identical to SEQ ID NO: 73768

SEQ ID NO: 73803 - DNA, 201 bp, Homo sapiens; identical to SEQ ID NO: 73770

SEQ ID NO: 73804 - DNA, 201 bp, Homo sapiens; identical to SEQ ID NO: 73769

SEQ ID NO: 73805 - DNA, 201 bp, Homo sapiens; identical to SEQ ID NO: 73771

SEQ ID NO: 73806 - DNA, 201 bp, Homo sapiens
gcgttccgccccaggccactgtagggaacggcggtggcgcctccccagcaaaccggaccgactgggtccagccgccgcagggaatgacgccggtgctcctrcagccacggctccgggcggggaaggcgagccccacagccggccctgcgacgcccgcctgggcagcaccgataaggagctgaaggcaggagccgccgccac

SEQ ID NO: 73807 - DNA, 201 bp, Homo sapiens
tctacgtgcgggcgggagtgtctcgtgccatgctgctgcgcctcttcctggccatggagaagggcaggcatatggagtatgaatgcccctacttggtataygtgcccgtggtcgccttccgcttggagcccaaggatgggaaaggtgtgtttgcagtggatggggaattgatggttagcgaggccgtgcagggccaggtgc

SEQ ID NO: 73808 - DNA, 201 bp, Homo sapiens
gggaattgatggttagcgaggccgtgcagggccaggtgcacccaaactacttctggatggtcagcggttgcgtggagcccccgcccagctggaagccccakcagatgccaccgccagaagagcccttatgacccctgggccgcgctgtgccttagtgtctacttgcaggacccttcctccttccctagggctgcagggcct

SEQ ID NO: 73809 - DNA, 201 bp, Homo sapiens
ggaattgatggttagcgaggccgtgcagggccaggtgcacccaaactacttctggatggtcagcggttgcgtggagcccccgcccagctggaagccccagyagatgccaccgccagaagagcccttatgacccctgggccgcgctgtgccttagtgtctacttgcaggacccttcctccttccctagggctgcagggcctg

SEQ ID NO: 73810 - DNA, 201 bp, Homo sapiens
atgctggctatgagcaggtcaccaatgaagacctcctgaccaactgcacgctattgctgtgccgccggctgctgtcacccatgaacctgctgtctctgcayacggcttcggggctgcgcctcttctctgtgctcagcctggcctggggcttcattgctgatgtggacctagagagtgagaagtatcggcgtctgggggaga

SEQ ID NO: 73811 - DNA, 201 bp, Homo sapiens
agcccaaggatgggaaaggtgtgtttgcagtggatggggaattgatggttagcgaggccgtgcagggccaggtgcacccaaactacttctggatggtcagyggttgcgtggagcccccgcccagctggaagccccagcagatgccaccgccagaagagcccttatgacccctgggccgcgctgtgccttagtgtctacttg

SEQ ID NO: 73812 - DNA, 201 bp, Homo sapiens
ccaaactacttctggatggtcagcggttgcgtggagcccccgcccagctggaagccccagcagatgccaccgccagaagagcccttatgacccctgggccrcgctgtgccttagtgtctacttgcaggacccttcctccttccctagggctgcagggcctgtccacagctcctgtgggggtggaggagactcctctggaga

SEQ ID NO: 73813 - DNA, 197 bp, Homo sapiens
agtgccctccccgctccgcggcgccggctgcgaagttgagcgaaaagtttgaggccggagggagcgaggccggggagtccgctccagcggggcgctycagtccctcagacgtgggctgagcttgggacgagctgcgttccgccccaggccactgtagggaacggcggtggcgcctccccagcaaaccggaccgactg

SEQ ID NO: 73814 - DNA, 201 bp, Homo sapiens
ttgggacgagctgcgttccgccccaggccactgtagggaacggcggtggcgcctccccagcaaaccggaccgactgggtccagccgccgcagggaatgacrccggtgctcctacagccacggctccgggcggggaaggcgagccccacagccggccctgcgacgcccgcctgggcagcaccgataaggagctgaaggcagg

SEQ ID NO: 73815 - DNA, 201 bp, Homo sapiens
ccctctcactggacagtggtgcccgacgaggactttgtgctagtcctggcactgctgcactcgcacctgggcagtgagatgtttgctgcacccatgggccrctgtgcagctggcgtcatgcatctgttctacgtgcgggcgggagtgtctcgtgccatgctgctgcgcctcttcctggccatggagaagggcaggcatatg

SEQ ID NO: 73816 - DNA, 201 bp, Homo sapiens; identical to SEQ ID NO: 73806

SEQ ID NO: 73817 - DNA, 201 bp, Homo sapiens; identical to SEQ ID NO: 73807

SEQ ID NO: 73818 - DNA, 201 bp, Homo sapiens; identical to SEQ ID NO: 73808

SEQ ID NO: 73819 - DNA, 201 bp, Homo sapiens; identical to SEQ ID NO: 73809

SEQ ID NO: 73820 - DNA, 201 bp, Homo sapiens; identical to SEQ ID NO: 73810

SEQ ID NO: 73821 - DNA, 201 bp, Homo sapiens; identical to SEQ ID NO: 73811

SEQ ID NO: 73822 - DNA, 201 bp, Homo sapiens; identical to SEQ ID NO: 73812

SEQ ID NO: 73823 - DNA, 197 bp, Homo sapiens; identical to SEQ ID NO: 73813

SEQ ID NO: 73824 - DNA, 201 bp, Homo sapiens; identical to SEQ ID NO: 73814

SEQ ID NO: 73825 - DNA, 201 bp, Homo sapiens; identical to SEQ ID NO: 73815

SEQ ID NO: 73826 - DNA, 201 bp, Homo sapiens
acagagaggcccagaggggagctctggctggacttggcttctcagcgtggggtctgggttcacaggtccagccgccgcagggaatgacgccggtgctcctrcagccacggctccgggcggggaaggcgagccccacagccggccctgcgacgcccgcctgggcagcaccgataaggagctgaaggcaggagccgccgccac

SEQ ID NO: 73827 - DNA, 201 bp, Homo sapiens; identical to SEQ ID NO: 73807

SEQ ID NO: 73828 - DNA, 201 bp, Homo sapiens; identical to SEQ ID NO: 73808

SEQ ID NO: 73829 - DNA, 201 bp, Homo sapiens; identical to SEQ ID NO: 73809

SEQ ID NO: 73830 - DNA, 201 bp, Homo sapiens; identical to SEQ ID NO: 73810

SEQ ID NO: 73831 - DNA, 201 bp, Homo sapiens; identical to SEQ ID NO: 73811

SEQ ID NO: 73832 - DNA, 201 bp, Homo sapiens; identical to SEQ ID NO: 73812

SEQ ID NO: 73833 - DNA, 201 bp, Homo sapiens
atagcctgggatacagagaggcccagaggggagctctggctggacttggcttctcagcgtggggtctgggttcacaggtccagccgccgcagggaatgacrccggtgctcctacagccacggctccgggcggggaaggcgagccccacagccggccctgcgacgcccgcctgggcagcaccgataaggagctgaaggcagg

SEQ ID NO: 73834 - DNA, 201 bp, Homo sapiens; identical to SEQ ID NO: 73815

SEQ ID NO: 73835 - DNA, 201 bp, Homo sapiens
cattccctgggcatgccatagcatttgggaaaagtccagttgaatttctagaaatgcatatgagaagtatggacctgtatttagttttaccatggtaggcmagacatttacttaccttctggggagtgatgctgctgcgctgctttttaatagtaaaaatgaagacctgaatgcagaagatgtctacagtcacctgacgac

SEQ ID NO: 73836 - DNA, 201 bp, Homo sapiens; identical to SEQ ID NO: 73835

SEQ ID NO: 73837 - DNA, 201 bp, Homo sapiens
tttttttttttgagatggagtctcgctctgtcgcccaggctggagtgcagtggcgcgatctcagctcactgcatcctccgcctcccgggtttaagcaattstctacatcagcctcctgagtagttgggattacaggcacctgccaccacgcctggctaatttttgtatttttagtagagacagggtttcactcttttggct

SEQ ID NO: 73838 - DNA, 201 bp, Homo sapiens
ttgtgttggctttggcttgcaactctttggcaggaattcagcgagagaatttacagaaagccatggaactggtgacaatcaactattcctctgacctgaaraatctgattttgtatttgttgactgaccaaaacaggatgcgaagtgtaaatgacatcatgcccatgattggtgctcgattttatactcaattggatgctg

SEQ ID NO: 73839 - DNA, 201 bp, Homo sapiens
aattgaagctagtagctccaagaatgggcaggctggcgaccatgcccttctggcttacacactgggtgtgaaacaactaattgttggtgttaacaaaatgkattccactgagccaacttacagccagaagagatatgaggaaatcattaaggaagtcagcacttatattaataaaattggctacaatcctgacacagtagc

SEQ ID NO: 73840 - DNA, 201 bp, Homo sapiens
gagtacccatcaatatggtttggtggaacagagtcacagaaaacaatttacagattcaaggcaagtccaccactactggccatctgatctacaaatgtggwggaatcaacaaaagaatcattgaaaaattggaaaaggaggctgctgagatgggaaagggctccttcaagtattcctgggtcttggataaactgaaagctg

SEQ ID NO: 73841 - DNA, 201 bp, Homo sapiens; identical to SEQ ID NO: 73838

SEQ ID NO: 73842 - DNA, 201 bp, Homo sapiens
ccctctgtgcctaaagattgccccacacccatgggaaccaaagggaagaagcagttgccagatgcccagctcctggcccgccgcttcctgctcaggaggamgttcatacctgacccccaaggcaccaacctcatgtttgccttctttgcacaacacttcacccaccagttcttcaaaacttctggcaagatgggtcctggc

SEQ ID NO: 73843 - DNA, 201 bp, Homo sapiens
tggctgtgggccaggaggtgtttgggctgcttcctgggctcatgctgtatgccacgctctggctacgtgagcacaaccgtgtgtgtgacctgctgaaggcygagcaccccacctggggcgatgagcagcttttccagacgacccgcctcatcctcataggggagaccatcaagattgtcatcgaggagtacgtgcagcagc

SEQ ID NO: 73844 - DNA, 201 bp, Homo sapiens
atctggaatattgtgattctgtttattcttccagaatgctgaactccttgttagcccttcagattgttaggagtggttctcatttggtctgccagaatackgggttcttagttgacaacctagaatgtcagatttctggttgatttgtaacacagtcattctaggatgtggagctactgatgaaatctgctagaaagttag

SEQ ID NO: 73845 - DNA, 201 bp, Homo sapiens
cttcacccaccagttcttcaaaacttctggcaagatgggtcctggcttcaccaaggccttgggccatggggtagacctcggccacatttatggagacaatmtggagcgtcagtatcaactgcggctctttaaggatgggaaactcaagtaccaggtgctggatggagaaatgtacccgccctcggtagaagaggcgcctgt

SEQ ID NO: 73846 - DNA, 201 bp, Homo sapiens
ggccagggctgatggtcttaaatgctcattttctggtttggcatggtgagtgttggggttgacatttagaactttaagtctcacccattatctggaatatygtgattctgtttattcttccagaatgctgaactccttgttagcccttcagattgttaggagtggttctcatttggtctgccagaatactgggttcttagt

SEQ ID NO: 73847 - DNA, 201 bp, Homo sapiens
tctggaggggagagctttgtgcttgtcattccagagtgctgaggccagggctgatggtcttaaatgctcattttctggtttggcatggtgagtgttggggytgacatttagaactttaagtctcacccattatctggaatattgtgattctgtttattcttccagaatgctgaactccttgttagcccttcagattgttag

SEQ ID NO: 73848 - DNA, 201 bp, Homo sapiens
tcctgctcaggaggaagttcatacctgacccccaaggcaccaacctcatgtttgccttctttgcacaacacttcacccaccagttcttcaaaacttctggmaagatgggtcctggcttcaccaaggccttgggccatggggtagacctcggccacatttatggagacaatctggagcgtcagtatcaactgcggctcttta

SEQ ID NO: 73849 - DNA, 201 bp, Homo sapiens
acctggctccggaattcactgcggcccagcccctctttcacccacttcctgctcactcacgggcgctggttctgggagtttgtcaatgccaccttcatccragagatgctcatgcgcctggtactcacagtgcgctccaaccttatccccagtccccccacctacaactcagcacatgactacatcagctgggagtctttc

SEQ ID NO: 73850 - DNA, 201 bp, Homo sapiens
ggaagggctttgagggtggaaggatgggatgggttccagaggtattcctctcttaaatgcaagtgcctagattaggtagactttgcttagtattgacaackgcacatgaaagttttgcaaagggaaacaggctaaatgcaccaagaaagcttcttcagagtgaagaatcttaatgcttgtaatttaaacatttgttcctgg

SEQ ID NO: 73851 - DNA, 201 bp, Homo sapiens
tgggctggagctccgggcagtgtgcgaggcgcacgcacaggagcctgcactctgcgtcccgcaccccagcagccgcgccatgagccggagtctcttgctcyggttcttgctgttcctgctcctgctcccgccgctccccgtcctgctcgcggacccaggggcgcccacgccagtgaatccctgttgttactatccatgcca

SEQ ID NO: 73852 - DNA, 201 bp, Homo sapiens
ggttcttgctgttcctgctcctgctcccgccgctccccgtcctgctcgcggacccaggggcgcccacgccagtgaatccctgttgttactatccatgccarcaccagggcatctgtgtccgcttcggccttgaccgctaccagtgtgactgcacccgcacgggctattccggccccaactgcaccatccctggcctgtgga

SEQ ID NO: 73853 - DNA, 201 bp, Homo sapiens
gcccttctcaagactttagcttttccttccatccggtggcctattccaggaattcctcttttgcttaaatcagttggagtttgtgtctgttgcttgtaatmaagcctttatggctgctgggctgagtgacacaagcactttaatggcctggagggacttttaatcagtgaagatgcaatcagacaagtgttttggaaagag

SEQ ID NO: 73854 - DNA, 201 bp, Homo sapiens
gattcattttcctgttcagtgagatatcatagagacggagatcctaaggtccaacaagaatgcattccctgaatctgtgcctgcactgagagggcaaggargtggggtgttcttcttgggacccccactaagaccctggtctgaggatgtagagagaacaggtgggctgtattcacgccattggttggaagctaccagagc

SEQ ID NO: 73855 - DNA, 201 bp, Homo sapiens
atttggtggatgtgatggttggttttatttgtcagtttggttgggctatagcacacagttatttaatcaaacagtaatctaggtgtggctgtgaaggtatkttgtagatgtgattaacatctacaatcagttgactttaagtgaaagagattacttaaataatttgggtgagctgcacctgattagttgaaaggcctcaag

SEQ ID NO: 73856 - DNA, 201 bp, Homo sapiens
gcaagaggtttggcatgaaaccctacacctccttccaggagctcgtaggagagaaggagatggcagcagagttggaggaattgtatggagacattgatgcrttggagttctaccctggactgcttcttgaaaagtgccatccaaactctatctttggggagagtatgatagagattggggctcccttttccctcaagggtc

SEQ ID NO: 73857 - DNA, 201 bp, Homo sapiens
cacctccatgttggtggactatggggttgaggccctggtggatgccttctctcgccagattgctggccggatcggtgggggcaggaacatggaccaccacrtcctgcatgtggctgtggatgtcatcagggagtctcgggagatgcggctgcagcccttcaatgagtaccgcaagaggtttggcatgaaaccctacacctc

SEQ ID NO: 73858 - DNA, 201 bp, Homo sapiens
tgaaaccctacacctccttccaggagctcgtaggagagaaggagatggcagcagagttggaggaattgtatggagacattgatgcgttggagttctacccyggactgcttcttgaaaagtgccatccaaactctatctttggggagagtatgatagagattggggctcccttttccctcaagggtctcctagggaatccca

SEQ ID NO: 73859 - DNA, 201 bp, Homo sapiens
tcctgcatgtggctgtggatgtcatcagggagtctcgggagatgcggctgcagcccttcaatgagtaccgcaagaggtttggcatgaaaccctacacctcyttccaggagctcgtaggagagaaggagatggcagcagagttggaggaattgtatggagacattgatgcgttggagttctaccctggactgcttcttgaaa

SEQ ID NO: 73860 - DNA, 201 bp, Homo sapiens
cggtgggggcaggaacatggaccaccacatcctgcatgtggctgtggatgtcatcagggagtctcgggagatgcggctgcagcccttcaatgagtaccgcragaggtttggcatgaaaccctacacctccttccaggagctcgtaggagagaaggagatggcagcagagttggaggaattgtatggagacattgatgcgtt

SEQ ID NO: 73861 - DNA, 201 bp, Homo sapiens
cagcttttccagacgacccgcctcatcctcataggggagaccatcaagattgtcatcgaggagtacgtgcagcagctgagtggctatttcctgcagctgaratttgacccagagctgctgttcggtgtccagttccaataccgcaaccgcattgccatggagttcaaccatctctaccactggcaccccctcatgcctgac

SEQ ID NO: 73862 - DNA, 201 bp, Homo sapiens; identical to SEQ ID NO: 73842

SEQ ID NO: 73863 - DNA, 201 bp, Homo sapiens; identical to SEQ ID NO: 73843

SEQ ID NO: 73864 - DNA, 201 bp, Homo sapiens; identical to SEQ ID NO: 73844

SEQ ID NO: 73865 - DNA, 201 bp, Homo sapiens; identical to SEQ ID NO: 73845

SEQ ID NO: 73866 - DNA, 201 bp, Homo sapiens; identical to SEQ ID NO: 73846

SEQ ID NO: 73867 - DNA, 201 bp, Homo sapiens; identical to SEQ ID NO: 73847

SEQ ID NO: 73868 - DNA, 201 bp, Homo sapiens; identical to SEQ ID NO: 73848

SEQ ID NO: 73869 - DNA, 201 bp, Homo sapiens; identical to SEQ ID NO: 73849

SEQ ID NO: 73870 - DNA, 201 bp, Homo sapiens; identical to SEQ ID NO: 73850

SEQ ID NO: 73871 - DNA, 201 bp, Homo sapiens; identical to SEQ ID NO: 73851

SEQ ID NO: 73872 - DNA, 201 bp, Homo sapiens; identical to SEQ ID NO: 73852

SEQ ID NO: 73873 - DNA, 201 bp, Homo sapiens; identical to SEQ ID NO: 73853

SEQ ID NO: 73874 - DNA, 201 bp, Homo sapiens; identical to SEQ ID NO: 73854

SEQ ID NO: 73875 - DNA, 201 bp, Homo sapiens; identical to SEQ ID NO: 73855

SEQ ID NO: 73876 - DNA, 201 bp, Homo sapiens; identical to SEQ ID NO: 73856

SEQ ID NO: 73877 - DNA, 201 bp, Homo sapiens
ccgcaaccgcattgccatggagttcaaccatctctaccactggcaccccctcatgcctgactccttcaagatcggtgggggcaggaacatggaccaccacrtcctgcatgtggctgtggatgtcatcagggagtctcgggagatgcggctgcagcccttcaatgagtaccgcaagaggtttggcatgaaaccctacacctc

SEQ ID NO: 73878 - DNA, 201 bp, Homo sapiens; identical to SEQ ID NO: 73858

SEQ ID NO: 73879 - DNA, 201 bp, Homo sapiens; identical to SEQ ID NO: 73859

SEQ ID NO: 73880 - DNA, 201 bp, Homo sapiens; identical to SEQ ID NO: 73860

SEQ ID NO: 73881 - DNA, 201 bp, Homo sapiens; identical to SEQ ID NO: 73861

SEQ ID NO: 73882 - DNA, 116 bp, Homo sapiens
gatctgatcttacagtcaaggaaaaagaagaactcattgaagagtggcaaccagaacctcttgttcctcctgtcccaaaagaccatcctgctctcaactayaacattgttttagga

SEQ ID NO: 73883 - DNA, 201 bp, Homo sapiens
tggaaaaacactttgtgtgactgcaggatcggctccctctctgatcaacagttctagtactcttctttgtcagtatatcaacctacagctcctgaatgcaragccacaagagtgtttaatggggacagtgggcactctcctgcttgaaaacccacttgggcagaatggactcacccaccaaggtcttctgtatgaagcagc

SEQ ID NO: 73884 - DNA, 201 bp, Homo sapiens
acacacacatgaacacactgaagatatttccttcaggtgtgtgtaaaatatgctgcttggattgaaattcaaatgggattgattagtcaagtaacttgagwcctcacagtaatcttcacacttaaccttagacacctatgcagtcatgttgggagcaggttacaatgttacttcagcccacagtttatttctatacttgag

SEQ ID NO: 73885 - DNA, 201 bp, Homo sapiens
ggtcagcccttccctaattacacctatcccctacacatacatgcacatagacacacacatgaacacactgaagatatttccttcaggtgtgtgtaaaataygctgcttggattgaaattcaaatgggattgattagtcaagtaacttgagacctcacagtaatcttcacacttaaccttagacacctatgcagtcatgttg

SEQ ID NO: 73886 - DNA, 201 bp, Homo sapiens
ccacaggtgggactgcgcaatttgaagcacactcagatgctcaggctttggtcctcttagatgtcactcctgaccagtcaatggtagatgaaggaatggckcgggaagtcatcaatcgcatacagaaacttcgcaaaaagtgcaatctggttccaactgatgaaatcacagtgtactataaagcaaagtctgaaggaacat

SEQ ID NO: 73887 - DNA, 201 bp, Homo sapiens
ttgagttcttaagtacagaagatagaagtgatttaaatggcatagtatatatatcattttctggccttttaaaatttatttgagacctcttgatgaaatgracatattatatatttctgccacctggattttcctggataatttgatggaatattttaagtttcagtaaatcagaacaataaacaaactcagatataaatg

SEQ ID NO: 73888 - DNA, 201 bp, Homo sapiens
cttggattgaaattcaaatgggattgattagtcaagtaacttgagacctcacagtaatcttcacacttaaccttagacacctatgcagtcatgttgggagyaggttacaatgttacttcagcccacagtttatttctatacttgagttcttaagtacagaagatagaagtgatttaaatggcatagtatatatatcatttt

SEQ ID NO: 73889 - DNA, 201 bp, Homo sapiens
ctataaagcaaagtctgaaggaacatatctgaatagtgttattgaaagccacacagagttcatatttaccaccataaaggctcccttgaaaccatatccartttctccatcggataaagtccttattcaagaaaaaacacagttgaagggatctgaactggaaattacactcaccagaggatcttcccttcctggtcctgc

SEQ ID NO: 73890 - DNA, 101 bp, Homo sapiens
aacttgaaatgtgtaaactttgaagaacataaaaacttcatggtggtttcttattaagacagtggactagacatctaataaaacttctttccaaaatcccr

SEQ ID NO: 73891 - DNA, 201 bp, Homo sapiens
gatgtactgctcccatggtacaatgcctatcgcttcttaatccagaacgttctgaggctccagaaggaggaagaaatagaatttctctacaatgagaacayggttagagaaagccccaacattacagaccggtggatcctgtccttcatgcagtctctcattggcttctttgagactgaaatggcagcttataggctttat

SEQ ID NO: 73892 - DNA, 201 bp, Homo sapiens; identical to SEQ ID NO: 73883

SEQ ID NO: 73893 - DNA, 201 bp, Homo sapiens; identical to SEQ ID NO: 73884

SEQ ID NO: 73894 - DNA, 201 bp, Homo sapiens; identical to SEQ ID NO: 73885

SEQ ID NO: 73895 - DNA, 201 bp, Homo sapiens; identical to SEQ ID NO: 73886

SEQ ID NO: 73896 - DNA, 201 bp, Homo sapiens; identical to SEQ ID NO: 73887

SEQ ID NO: 73897 - DNA, 201 bp, Homo sapiens; identical to SEQ ID NO: 73888

SEQ ID NO: 73898 - DNA, 201 bp, Homo sapiens; identical to SEQ ID NO: 73889

SEQ ID NO: 73899 - DNA, 101 bp, Homo sapiens; identical to SEQ ID NO: 73890

SEQ ID NO: 73900 - DNA, 201 bp, Homo sapiens; identical to SEQ ID NO: 73891

SEQ ID NO: 73901 - DNA, 201 bp, Homo sapiens; identical to SEQ ID NO: 73883

SEQ ID NO: 73902 - DNA, 201 bp, Homo sapiens; identical to SEQ ID NO: 73884

SEQ ID NO: 73903 - DNA, 201 bp, Homo sapiens; identical to SEQ ID NO: 73885

SEQ ID NO: 73904 - DNA, 201 bp, Homo sapiens; identical to SEQ ID NO: 73886

SEQ ID NO: 73905 - DNA, 201 bp, Homo sapiens; identical to SEQ ID NO: 73887

SEQ ID NO: 73906 - DNA, 201 bp, Homo sapiens; identical to SEQ ID NO: 73888

SEQ ID NO: 73907 - DNA, 201 bp, Homo sapiens; identical to SEQ ID NO: 73889

SEQ ID NO: 73908 - DNA, 101 bp, Homo sapiens; identical to SEQ ID NO: 73890

SEQ ID NO: 73909 - DNA, 201 bp, Homo sapiens; identical to SEQ ID NO: 73891

SEQ ID NO: 73910 - DNA, 201 bp, Homo sapiens
tcactgcactgtgaaaacagattccagacgccgggaactcacgcctccaatcccagacgctatgtccagcaaaggctccgtggttctggcctacagtggcrgcctggacacctcgtgcatcctcgtgtggctgaaggaacaaggctatgacgtcattgcctatctggccaacattggccagaaggaagacttcgaggaagc

SEQ ID NO: 73911 - DNA, 201 bp, Homo sapiens
tcccaagaacccgtggagcatggatgagaacctcatgcacatcagctacgaggctggaatcctggagaaccccaagaaccaagcgcctccaggtctctacrcgaagacccaggacccagccaaagcccccaacacccctgacattctcgagatcgagttcaaaaaaggggtccctgtgaaggtgaccaacgtcaaggatgg

SEQ ID NO: 73912 - DNA, 147 bp, Homo sapiens
cgcctgcgcccccgccggcgcgcccctgggagggtgagccggcgcckggcccaggcccggacctggtgggaggcggggggaggtggggacgaggcctggggaggcgggccccgcccatctgcaggtggctgtgaacgctgagcggct

SEQ ID NO: 73913 - DNA, 201 bp, Homo sapiens
gaaccgcttcattggaatgaagtcccgaggtatctacgagaccccagcaggcaccatcctttaccatgctcatttagacatcgaggccttcaccatggacygggaagtgcgcaaaatcaaacaaggcctgggcttgaaatttgctgagctggtgtataccggtttctggcacagccctgagtgtgaatttgtccgccactg

SEQ ID NO: 73914 - DNA, 201 bp, Homo sapiens
gcaagcatggcgtgggccgtattgacatcgtggagaaccgcttcattggaatgaagtcccgaggtatctacgagaccccagcaggcaccatcctttaccaygctcatttagacatcgaggccttcaccatggaccgggaagtgcgcaaaatcaaacaaggcctgggcttgaaatttgctgagctggtgtataccggtttct

SEQ ID NO: 73915 - DNA, 201 bp, Homo sapiens
agggccgcaatgacctgatggagtacgcaaagcaacacgggattcccatcccggtcactcccaagaacccgtggagcatggatgagaacctcatgcacatyagctacgaggctggaatcctggagaaccccaagaaccaagcgcctccaggtctctacacgaagacccaggacccagccaaagcccccaacacccctgaca

SEQ ID NO: 73916 - DNA, 174 bp, Homo sapiens
gtaattgtgacttgttctccccggctggcagcgtagtggggctgccaggccccagctttgttccctggtccccctgaagcctgcaaacgttgtcatcgaarggaagggtggggggcagctgcggtggggagctataaaaatgacaattaaaagagacactagtcttttatttct

SEQ ID NO: 73917 - DNA, 201 bp, Homo sapiens
ctggaatcctggagaaccccaagaaccaagcgcctccaggtctctacacgaagacccaggacccagccaaagcccccaacacccctgacattctcgagatygagttcaaaaaaggggtccctgtgaaggtgaccaacgtcaaggatggcaccacccaccagacctccttggagctcttcatgtacctgaacgaagtcgcgg

SEQ ID NO: 73918 - DNA, 201 bp, Homo sapiens
aaaacagattccagacgccgggaactcacgcctccaatcccagacgctatgtccagcaaaggctccgtggttctggcctacagtggcggcctggacacctygtgcatcctcgtgtggctgaaggaacaaggctatgacgtcattgcctatctggccaacattggccagaaggaagacttcgaggaagccaggaagaaggca

SEQ ID NO: 73919 - DNA, 201 bp, Homo sapiens
tgaagcttggggccaaaaaggtcattgctccctggaggatgcctgaattctacaaccggttcaagggccgcaatgacctgatggagtacgcaaagcaacaygggattcccatcccggtcactcccaagaacccgtggagcatggatgagaacctcatgcacatcagctacgaggctggaatcctggagaaccccaagaacc

SEQ ID NO: 73920 - DNA, 201 bp, Homo sapiens
gaagcttggggccaaaaaggtgttcattgaggatgtcagcagggagtttgtggaggagttcatctggccggccatccagtccagcgcactgtatgaggacygctacctcctgggcacctctcttgccaggccctgcatcgcccgcaaacaagtggaaatcgcccagcgggagggggccaagtatgtgtcccacggcgccac

SEQ ID NO: 73921 - DNA, 201 bp, Homo sapiens; identical to SEQ ID NO: 73910

SEQ ID NO: 73922 - DNA, 201 bp, Homo sapiens; identical to SEQ ID NO: 73911

SEQ ID NO: 73923 - DNA, 147 bp, Homo sapiens; identical to SEQ ID NO: 73912

SEQ ID NO: 73924 - DNA, 201 bp, Homo sapiens
aggaccgctacctcctgggcacctctcttgccaggccctgcatcgcccgcaaacaagtggaaatcgcccagcgggagggggccaagtatgtgtcccacggygccacaggaaaggggaacgatcaggtccggtttgagctcagctgctactcactggccccccagataaaggtcattgctccctggaggatgcctgaattct

SEQ ID NO: 73925 - DNA, 201 bp, Homo sapiens; identical to SEQ ID NO: 73913

SEQ ID NO: 73926 - DNA, 201 bp, Homo sapiens; identical to SEQ ID NO: 73915

SEQ ID NO: 73927 - DNA, 201 bp, Homo sapiens; identical to SEQ ID NO: 73914

SEQ ID NO: 73928 - DNA, 174 bp, Homo sapiens; identical to SEQ ID NO: 73916

SEQ ID NO: 73929 - DNA, 201 bp, Homo sapiens; identical to SEQ ID NO: 73918

SEQ ID NO: 73930 - DNA, 201 bp, Homo sapiens; identical to SEQ ID NO: 73917

SEQ ID NO: 73931 - DNA, 201 bp, Homo sapiens
ccggccatccagtccagcgcactgtatgaggaccgctacctcctgggcacctctcttgccaggccctgcatcgcccgcaaacaagtggaaatcgcccagckggagggggccaagtatgtgtcccacggcgccacaggaaaggggaacgatcaggtccggtttgagctcagctgctactcactggccccccagataaaggtc

SEQ ID NO: 73932 - DNA, 201 bp, Homo sapiens
cactggccccccagataaaggtcattgctccctggaggatgcctgaattctacaaccggttcaagggccgcaatgacctgatggagtacgcaaagcaacaygggattcccatcccggtcactcccaagaacccgtggagcatggatgagaacctcatgcacatcagctacgaggctggaatcctggagaaccccaagaacc

SEQ ID NO: 73933 - DNA, 201 bp, Homo sapiens; identical to SEQ ID NO: 73920

SEQ ID NO: 73934 - DNA, 201 bp, Homo sapiens; identical to SEQ ID NO: 73910

SEQ ID NO: 73935 - DNA, 201 bp, Homo sapiens; identical to SEQ ID NO: 73911

SEQ ID NO: 73936 - DNA, 201 bp, Homo sapiens; identical to SEQ ID NO: 73924

SEQ ID NO: 73937 - DNA, 201 bp, Homo sapiens; identical to SEQ ID NO: 73913

SEQ ID NO: 73938 - DNA, 201 bp, Homo sapiens; identical to SEQ ID NO: 73915

SEQ ID NO: 73939 - DNA, 201 bp, Homo sapiens; identical to SEQ ID NO: 73914

SEQ ID NO: 73940 - DNA, 174 bp, Homo sapiens; identical to SEQ ID NO: 73916

SEQ ID NO: 73941 - DNA, 201 bp, Homo sapiens; identical to SEQ ID NO: 73918

SEQ ID NO: 73942 - DNA, 201 bp, Homo sapiens; identical to SEQ ID NO: 73917

SEQ ID NO: 73943 - DNA, 201 bp, Homo sapiens; identical to SEQ ID NO: 73931

SEQ ID NO: 73944 - DNA, 201 bp, Homo sapiens; identical to SEQ ID NO: 73932

SEQ ID NO: 73945 - DNA, 201 bp, Homo sapiens; identical to SEQ ID NO: 73920

SEQ ID NO: 73946 - DNA, 201 bp, Homo sapiens
agtcagcattcccaggccccagtgtggtctgtggggctgtgtgcagagtgtgcgagacgctatgtccagcaaaggctccgtggttctggcctacagtggcrgcctggacacctcgtgcatcctcgtgtggctgaaggaacaaggctatgacgtcattgcctatctggccaacattggccagaaggaagacttcgaggaagc

SEQ ID NO: 73947 - DNA, 201 bp, Homo sapiens; identical to SEQ ID NO: 73911

SEQ ID NO: 73948 - DNA, 201 bp, Homo sapiens; identical to SEQ ID NO: 73924

SEQ ID NO: 73949 - DNA, 201 bp, Homo sapiens; identical to SEQ ID NO: 73913

SEQ ID NO: 73950 - DNA, 201 bp, Homo sapiens; identical to SEQ ID NO: 73915

SEQ ID NO: 73951 - DNA, 201 bp, Homo sapiens; identical to SEQ ID NO: 73914

SEQ ID NO: 73952 - DNA, 174 bp, Homo sapiens; identical to SEQ ID NO: 73916

SEQ ID NO: 73953 - DNA, 201 bp, Homo sapiens
aggccccagtgtggtctgtggggctgtgtgcagagtgtgcgagacgctatgtccagcaaaggctccgtggttctggcctacagtggcggcctggacacctygtgcatcctcgtgtggctgaaggaacaaggctatgacgtcattgcctatctggccaacattggccagaaggaagacttcgaggaagccaggaagaaggca

SEQ ID NO: 73954 - DNA, 201 bp, Homo sapiens; identical to SEQ ID NO: 73917

SEQ ID NO: 73955 - DNA, 201 bp, Homo sapiens; identical to SEQ ID NO: 73931

SEQ ID NO: 73956 - DNA, 201 bp, Homo sapiens; identical to SEQ ID NO: 73932

SEQ ID NO: 73957 - DNA, 201 bp, Homo sapiens; identical to SEQ ID NO: 73920

SEQ ID NO: 73958 - DNA, 201 bp, Homo sapiens
gggatgggcacccctgccagtcctgctctgccgcctgccaccgctgcccgagcccgacgctatgtccagcaaaggctccgtggttctggcctacagtggcrgcctggacacctcgtgcatcctcgtgtggctgaaggaacaaggctatgacgtcattgcctatctggccaacattggccagaaggaagacttcgaggaagc

SEQ ID NO: 73959 - DNA, 201 bp, Homo sapiens; identical to SEQ ID NO: 73911

SEQ ID NO: 73960 - DNA, 201 bp, Homo sapiens; identical to SEQ ID NO: 73924

SEQ ID NO: 73961 - DNA, 201 bp, Homo sapiens; identical to SEQ ID NO: 73913

SEQ ID NO: 73962 - DNA, 201 bp, Homo sapiens; identical to SEQ ID NO: 73915

SEQ ID NO: 73963 - DNA, 201 bp, Homo sapiens; identical to SEQ ID NO: 73914

SEQ ID NO: 73964 - DNA, 174 bp, Homo sapiens; identical to SEQ ID NO: 73916

SEQ ID NO: 73965 - DNA, 201 bp, Homo sapiens
ctgccagtcctgctctgccgcctgccaccgctgcccgagcccgacgctatgtccagcaaaggctccgtggttctggcctacagtggcggcctggacacctygtgcatcctcgtgtggctgaaggaacaaggctatgacgtcattgcctatctggccaacattggccagaaggaagacttcgaggaagccaggaagaaggca

SEQ ID NO: 73966 - DNA, 201 bp, Homo sapiens; identical to SEQ ID NO: 73917

SEQ ID NO: 73967 - DNA, 201 bp, Homo sapiens; identical to SEQ ID NO: 73931

SEQ ID NO: 73968 - DNA, 201 bp, Homo sapiens; identical to SEQ ID NO: 73932

SEQ ID NO: 73969 - DNA, 201 bp, Homo sapiens; identical to SEQ ID NO: 73920

SEQ ID NO: 73970 - DNA, 201 bp, Homo sapiens; identical to SEQ ID NO: 73958

SEQ ID NO: 73971 - DNA, 201 bp, Homo sapiens; identical to SEQ ID NO: 73911

SEQ ID NO: 73972 - DNA, 201 bp, Homo sapiens
aggaccgctacctcctgggcacctctcttgccaggccctgcatcgcccgcaaacaagtggaaatcgcccagcgggagggggccaagtatgtgtcccacggygccacaggaaaggtcattgctccctggaggatgcctgaattctacaaccggttcaagggccgcaatgacctgatggagtacgcaaagcaacacgggattc

SEQ ID NO: 73973 - DNA, 201 bp, Homo sapiens; identical to SEQ ID NO: 73913

SEQ ID NO: 73974 - DNA, 201 bp, Homo sapiens; identical to SEQ ID NO: 73915

SEQ ID NO: 73975 - DNA, 201 bp, Homo sapiens; identical to SEQ ID NO: 73914

SEQ ID NO: 73976 - DNA, 174 bp, Homo sapiens; identical to SEQ ID NO: 73916

SEQ ID NO: 73977 - DNA, 201 bp, Homo sapiens; identical to SEQ ID NO: 73965

SEQ ID NO: 73978 - DNA, 201 bp, Homo sapiens; identical to SEQ ID NO: 73917

SEQ ID NO: 73979 - DNA, 201 bp, Homo sapiens
ccggccatccagtccagcgcactgtatgaggaccgctacctcctgggcacctctcttgccaggccctgcatcgcccgcaaacaagtggaaatcgcccagckggagggggccaagtatgtgtcccacggcgccacaggaaaggtcattgctccctggaggatgcctgaattctacaaccggttcaagggccgcaatgacctg

SEQ ID NO: 73980 - DNA, 201 bp, Homo sapiens
cccacggcgccacaggaaaggtcattgctccctggaggatgcctgaattctacaaccggttcaagggccgcaatgacctgatggagtacgcaaagcaacaygggattcccatcccggtcactcccaagaacccgtggagcatggatgagaacctcatgcacatcagctacgaggctggaatcctggagaaccccaagaacc

SEQ ID NO: 73981 - DNA, 201 bp, Homo sapiens
ttggaggtggagctgcttcatctgtgcaggtgcagggagataacaccagtgacctggactttggggctgtgcagcgaggagacccggagatggaacagaaratgaaccgtgtgatcagggcttgtgtggaggcccccaagggaaaccccatctgcagccttcatgatcagggcgctggtggcaatggcaatgtcctaaaag

SEQ ID NO: 73982 - DNA, 201 bp, Homo sapiens
gtccagtgcacaggccgcggggcccacgtggtggctggcactgccggctattgctttggaaatctgcatattccaggttacaatctgccctgggaggatcyaagcttccagtatcctgggaattttgcccggcccctggaggttgccattgaagccagtaatggagcttctgactatggcaacaagtttggggaaccagtg

SEQ ID NO: 73983 - DNA, 201 bp, Homo sapiens
gaagttgtaaaggttggaggtcccgtctacaggattggagttggaggtggagctgcttcatctgtgcaggtgcagggagataacaccagtgacctggactwtggggctgtgcagcgaggagacccggagatggaacagaagatgaaccgtgtgatcagggcttgtgtggaggcccccaagggaaaccccatctgcagcctt

SEQ ID NO: 73984 - DNA, 201 bp, Homo sapiens
ttcgtgggcaccatcactggagaccggagaatagtgctggtggacgatcgggagtgtcctgtcagaagaaatggccagggggatgcccccccgacaccccygccaacccctgtggacctggagctcgaatgggtgctgggcaagatgcctcggaaggagttcttcctgcagaggaagccccccatgctgcagcctctggcc

SEQ ID NO: 73985 - DNA, 201 bp, Homo sapiens
ccttgcccccagggctgagcgtgcaccaggctctggagagggttctgaggctgcccgccgtggccagcaagcgctacctcaccaataaggtggaccgctcygtgggaggcctggtggcccagcagcagtgcgtggggcccctgcaaactcctctggcagatgtagcggttgtggcactgagccatgaggagctcatagggg

SEQ ID NO: 73986 - DNA, 201 bp, Homo sapiens
gggggctgagtaccaggaatcaaatgctcttctgctgaggtcccccaaccgggacttcctgactcatgtcagtgcccgtgaacgttgcccggcttgcttcrtgggcaccatcactggagaccggagaatagtgctggtggacgatcgggagtgtcctgtcagaagaaatggccagggggatgcccccccgacacccccgcc

SEQ ID NO: 73987 - DNA, 201 bp, Homo sapiens
catggaagctgaccacataagcaaggaggccccagagccaggcatggaagttgtaaaggttggaggtcccgtctacaggattggagttggaggtggagctrcttcatctgtgcaggtgcagggagataacaccagtgacctggactttggggctgtgcagcgaggagacccggagatggaacagaagatgaaccgtgtgat

SEQ ID NO: 73988 - DNA, 201 bp, Homo sapiens; identical to SEQ ID NO: 73981

SEQ ID NO: 73989 - DNA, 201 bp, Homo sapiens; identical to SEQ ID NO: 73982

SEQ ID NO: 73990 - DNA, 201 bp, Homo sapiens; identical to SEQ ID NO: 73983

SEQ ID NO: 73991 - DNA, 201 bp, Homo sapiens
acctccccctggctccagctctttatcaatgcccgaaactggaccctggaagggagctgctgactggccacaggggctcacctgggccccatggcttttcrcctaagtgggtcctgccccctcccccatgaccttcaggagcaccccatattatttccaaaaatatcttggacagacaaggaccaaaatgccaaaatctca

SEQ ID NO: 73992 - DNA, 201 bp, Homo sapiens
ccggaagcggccagacaccttcagcctgggcgtgtgtaatggctgtcaactgctggctctgctcggctgggtgggaggcgaccccaatgaggatgctgcaragatgggccctgactcccagccagcccggccaggccttctgctacgccacaacctgtctgggcgctacgagtctcgctgggccagcgtgcgtgtggggcc

SEQ ID NO: 73993 - DNA, 201 bp, Homo sapiens; identical to SEQ ID NO: 73984

SEQ ID NO: 73994 - DNA, 201 bp, Homo sapiens; identical to SEQ ID NO: 73986

SEQ ID NO: 73995 - DNA, 201 bp, Homo sapiens; identical to SEQ ID NO: 73987

SEQ ID NO: 73996 - DNA, 201 bp, Homo sapiens
gtggctggcatctgctcctgtgatggccgccacctggctgtcatgcctcaccctgagcgggccgttaggccttggcagtgggcatggcgaccccctccatktgatactctgaccacctccccctggctccagctctttatcaatgcccgaaactggaccctggaagggagctgctgactggccacaggggctcacctgggc

SEQ ID NO: 73997 - DNA, 201 bp, Homo sapiens
tggtcccagcccccgagtcgccatcttgcgagaggagggcagtaatggagaccgggagatggccgatgccttccacttagctgggtttgaggtatgggacrtgaccatgcaggacctctgctctggggcaattgggctggacactttccgtggcgtggccttcgtgggcggcttcagctatgcagatgtcctgggctctgc

SEQ ID NO: 73998 - DNA, 201 bp, Homo sapiens; identical to SEQ ID NO: 73985

SEQ ID NO: 73999 - DNA, 201 bp, Homo sapiens
cctgccccctcccccatgaccttcaggagcaccccatattatttccaaaaatatcttggacagacaaggaccaaaatgccaaaatctcagcggactcgatratctgcctgctgatgttccttctgtggctgtgtctattttcagttctgctctaacatggcatgccctttctcagcccaggaaacagcatgtggttcagag

SEQ ID NO: 74000 - DNA, 201 bp, Homo sapiens
atgactttggggcctggatgcccaatgctccatcatccatgaggcagcccccaccccagaccaaggggaccaccaccctgaagacttacctagacaccctmcctgaagtgaacatcagctgtaacaacctcctcctcttctggttggttagccaagaacccaaggaccagaggcccctgggcacctacccagatgagcact

SEQ ID NO: 74001 - DNA, 201 bp, Homo sapiens
gccgctgaccaggcggagggcagtgtcccaattatacaggcgttacctccttttctccatctcagcatctgatccctccctccgcagtggaacccaggctsctgatatccatctgggtgagccagccagagggaccggctgtgtcagaggcaagcaaacaagtattagagtgcaagactgtgggcggagagaggaagcccg

SEQ ID NO: 74002 - DNA, 201 bp, Homo sapiens
cccatccctgatgtacatggagcccaatgttcgatactcagccaccaagacgatctcgctgctcttcaatgccatccctgcgtccttgggaatgaagcttygagggctgttggatcgcaagggctcctggaagaagctggatgacatgcagaacatcttctggtgccataagaccttcacgacaaagtatgtcacagagca

SEQ ID NO: 74003 - DNA, 201 bp, Homo sapiens
gcccttggccatccagctcagccagacccccgggcctgacagccccatcttcctgcccactgactccgaatgggactggctgctggccaagacgtgggtgmgcaactctgagttcctggtgcacgaaaacaacacgcactttctgtgcacgcatttgctgtgcgaggccttcgccatggccacgctgcgccagctgccgct

SEQ ID NO: 74004 - DNA, 201 bp, Homo sapiens
gtccatcgggaggcaaggcctcatctacctcatgagcacgggcctggcccacttcacctacaccaatttctgccttccggacagcctgcgggcccgcggcktcctggctatccccaactaccactaccgagacgacggcctgaagatctgggcggccattgagagctttgtctcagaaatcgtgggctactattatcccag

SEQ ID NO: 74005 - DNA, 201 bp, Homo sapiens
ggcccacttcacctacaccaatttctgccttccggacagcctgcgggcccgcggcgtcctggctatccccaactaccactaccgagacgacggcctgaagrtctgggcggccattgagagctttgtctcagaaatcgtgggctactattatcccagtgacgcatctgtgcagcaggattcggagctgcaggcctggactgg

SEQ ID NO: 74006 - DNA, 201 bp, Homo sapiens
aggaaccgcttcacttcttgccccacttggggcagcctcttgttccagcctcttggaatgcccagcttgggtttctgagcttttctccctcatcctccccmatccccaaactccttctcctaccatgcctttctacgttctctttcttccaagcctagagccaccagcccagcttccttctctggaaaagcctggaaactg

SEQ ID NO: 74007 - DNA, 201 bp, Homo sapiens
ccgggccgctgaccaggcggagggcagtgtcccaattatacaggcgttacctccttttctccatctcagcatctgatccctccctccgcagtggaacccakgctcctgatatccatctgggtgagccagccagagggaccggctgtgtcagaggcaagcaaacaagtattagagtgcaagactgtgggcggagagaggaag

SEQ ID NO: 74008 - DNA, 201 bp, Homo sapiens
tccagagccgcctggcccagatctcaagggacatccaggagcggaaccagggtctggcactgccctacacctacctggaccctcccctcattgagaacagygtctccatctaaccacccccaaataccacccaagaagaaagaaaggtccaagcatgaggaggaccagttcctcaggtcctccagacccttccatcctccc

SEQ ID NO: 74009 - DNA, 201 bp, Homo sapiens
aggagcggaaccagggtctggcactgccctacacctacctggaccctcccctcattgagaacagcgtctccatctaaccacccccaaataccacccaagargaaagaaaggtccaagcatgaggaggaccagttcctcaggtcctccagacccttccatcctccctgttctcagttcacctgaaccttctcttctgcacat

SEQ ID NO: 74010 - DNA, 201 bp, Homo sapiens
ataccacccaagaagaaagaaaggtccaagcatgaggaggaccagttcctcaggtcctccagacccttccatcctccctgttctcagttcacctgaacctyctcttctgcacatggagacttttgcagccaagatggctctgacatcatacaaactgggccctgagctgtgagagaccagcacagcagcgtccaggttaaa

SEQ ID NO: 74011 - DNA, 201 bp, Homo sapiens
gagctgggcccatcctcagccctacccagccccgcagcccctagccctccgcccagaaacccagccctgtccggcgtgccgctcttctcctccaggccggytgctgctgcggccagcgttgccggggcatcccttcctccttcccatcatggcagtgtaccgcctgtgtgtgaccactggtccctacctgagggccggcac

SEQ ID NO: 74012 - DNA, 201 bp, Homo sapiens
catgaggaggaccagttcctcaggtcctccagacccttccatcctccctgttctcagttcacctgaaccttctcttctgcacatggagacttttgcagccragatggctctgacatcatacaaactgggccctgagctgtgagagaccagcacagcagcgtccaggttaaaagccgctgaccaaagtccaatgcacaatag

SEQ ID NO: 74013 - DNA, 201 bp, Homo sapiens
cccactgactccgaatgggactggctgctggccaagacgtgggtgcgcaactctgagttcctggtgcacgaaaacaacacgcactttctgtgcacgcattkgctgtgcgaggccttcgccatggccacgctgcgccagctgccgctctgccaccccatctacaagctcctactcccccacactcgatacacgctgcaggtg

SEQ ID NO: 74014 - DNA, 185 bp, Homo sapiens
ctgggctcccgcccaggatcctgcaggcccagggcggtcctggagcggaaagaatgccacgcggggcattcagaccctgtttgcyggcgctgtatttcgctttcctgacctgccctactccagagcagagaatgagtggaacccaggctcctgatatccatctgggtgagccagccagagggacc

SEQ ID NO: 74015 - DNA, 201 bp, Homo sapiens; identical to SEQ ID NO: 74000

SEQ ID NO: 74016 - DNA, 201 bp, Homo sapiens
aagaatgccacgcggggcattcagaccctgtttgccggcgctgtatttcgctttcctgacctgccctactccagagcagagaatgagtggaacccaggctsctgatatccatctgggtgagccagccagagggaccggctgtgtcagaggcaagcaaacaagtattagagtgcaagactgtgggcggagagaggaagcccg

SEQ ID NO: 74017 - DNA, 201 bp, Homo sapiens; identical to SEQ ID NO: 74002

SEQ ID NO: 74018 - DNA, 201 bp, Homo sapiens; identical to SEQ ID NO: 74003

SEQ ID NO: 74019 - DNA, 201 bp, Homo sapiens; identical to SEQ ID NO: 74004

SEQ ID NO: 74020 - DNA, 201 bp, Homo sapiens; identical to SEQ ID NO: 74005

SEQ ID NO: 74021 - DNA, 201 bp, Homo sapiens; identical to SEQ ID NO: 74006

SEQ ID NO: 74022 - DNA, 201 bp, Homo sapiens
cggaaagaatgccacgcggggcattcagaccctgtttgccggcgctgtatttcgctttcctgacctgccctactccagagcagagaatgagtggaacccakgctcctgatatccatctgggtgagccagccagagggaccggctgtgtcagaggcaagcaaacaagtattagagtgcaagactgtgggcggagagaggaag

SEQ ID NO: 74023 - DNA, 201 bp, Homo sapiens; identical to SEQ ID NO: 74008

SEQ ID NO: 74024 - DNA, 201 bp, Homo sapiens; identical to SEQ ID NO: 74009

SEQ ID NO: 74025 - DNA, 201 bp, Homo sapiens; identical to SEQ ID NO: 74010

SEQ ID NO: 74026 - DNA, 201 bp, Homo sapiens; identical to SEQ ID NO: 74011

SEQ ID NO: 74027 - DNA, 201 bp, Homo sapiens; identical to SEQ ID NO: 74012

SEQ ID NO: 74028 - DNA, 201 bp, Homo sapiens; identical to SEQ ID NO: 74013

SEQ ID NO: 74029 - DNA, 201 bp, Homo sapiens
catgaattgatccacggaagctccttctgtgctgcagaactgggccaccttgttgtgtctctggatgggcctgattgttcctgtggaagccatgggtgcaytgaagcatacgcctctggaatggccttgcagagggaggcaaaaaagctccatgatgaggacctgctcttggtggaagggatgtcagtgccaaaagatgag

SEQ ID NO: 74030 - DNA, 201 bp, Homo sapiens
atgatcgcatccttttggcaggctgcccttcctatgacaaacttctctcagccaagaacaaagactacatgagcatcattcgcatgtggctaggtgatgakgtaaaatctaaagattacattgttgcactacagcaccctgtgaccactgacattaagcattccataaaaatgtttgaattaacattggatgcacttatct

SEQ ID NO: 74031 - DNA, 201 bp, Homo sapiens
agggaggcaaaaaagctccatgatgaggacctgctcttggtggaagggatgtcagtgccaaaagatgaggctgtgggtgcgctccatctcatccaagctgygaaacttggcaatgcgaaggcccagagcatcctaagaacagctggaacagctttgggtcttggggttgtgaacatcctccataccatgaatccctccctt

SEQ ID NO: 74032 - DNA, 201 bp, Homo sapiens
tcctcctgtgaaggagaatatctctcaagatattgaccatattcttgaaactctaagtgccttggccgttgatcttggcgggacgaacctccgagttgcartagtcagcatgaagggtgaaatagttaagaagtatactcagttcaatcctaaaacctatgaagagaggattaatttaatcctacagatgtgtgtggaagc

SEQ ID NO: 74033 - DNA, 201 bp, Homo sapiens
ctcccttgtgatcctctccggagtcctggccagtcactatatccacattgtcaaagacgtcattcgccagcaggccttgtcctccgtgcaggacgtggatrtggtggtttcggatttggttgaccccgccctgctgggtgctgccagcatggttctggactacacaacacgcaggatctactagacctccaggaacagaca

SEQ ID NO: 74034 - DNA, 201 bp, Homo sapiens
agccaagaacaaagactacatgagcatcattcgcatgtggctaggtgatgatgtaaaatctaaagattacattgttgcactacagcaccctgtgaccactracattaagcattccataaaaatgtttgaattaacattggatgcacttatctcatttaacaagcggaccctagtcctgtttccaaatattgacgcagggag

SEQ ID NO: 74035 - DNA, 201 bp, Homo sapiens
gtcaaagacgtcattcgccagcaggccttgtcctccgtgcaggacgtggatgtggtggtttcggatttggttgaccccgccctgctgggtgctgccagcayggttctggactacacaacacgcaggatctactagacctccaggaacagacatggaccttctctccagagctcctgagtggaatcaagttcttgtctttag

SEQ ID NO: 74036 - DNA, 201 bp, Homo sapiens
ataaaaatgtttgaattaacattggatgcacttatctcatttaacaagcggaccctagtcctgtttccaaatattgacgcagggagcaaagagatggttckagtgatgcggaagaagggcattgagcatcatcccaactttcgtgcagttaaacacgtcccatttgaccagtttatacagttggttgcccatgctggctgt

SEQ ID NO: 74037 - DNA, 201 bp, Homo sapiens
aagaatggaaataaccgaaagctgcgggtttgtgttgctacttgtaaccgtgcagattattctaaacttgccccgatcatgtttggcattaaaaccgaacytgagttctttgaacttgatgttgtggtacttggctctcacctgatagatgactatggaaatacatatcgaatgattgaacaagatgactttgacattaac

SEQ ID NO: 74038 - DNA, 201 bp, Homo sapiens
ttgagcatcatcccaactttcgtgcagttaaacacgtcccatttgaccagtttatacagttggttgcccatgctggctgtatgattgggaacagcagctgwggggttcgagaagttggagcttttggaacacctgtgatcaacctgggaacacgtcagattggaagagaaacaggggagaatgttcttcatgtccgggatg

SEQ ID NO: 74039 - DNA, 201 bp, Homo sapiens
tacacttatcacaggcacaggaatcggtggtggaattatccatcagcatgaattgatccacggaagctccttctgtgctgcagaactgggccaccttgttstgtctctggatgggcctgattgttcctgtggaagccatgggtgcattgaagcatacgcctctggaatggccttgcagagggaggcaaaaaagctccatga

SEQ ID NO: 74040 - DNA, 201 bp, Homo sapiens
ggcacaggaatcggtggtggaattatccatcagcatgaattgatccacggaagctccttctgtgctgcagaactgggccaccttgttgtgtctctggatgrgcctgattgttcctgtggaagccatgggtgcattgaagcatacgcctctggaatggccttgcagagggaggcaaaaaagctccatgatgaggacctgctc

SEQ ID NO: 74041 - DNA, 201 bp, Homo sapiens
gagggaggcaaaaaagctccatgatgaggacctgctcttggtggaagggatgtcagtgccaaaagatgaggctgtgggtgcgctccatctcatccaagctrcgaaacttggcaatgcgaaggcccagagcatcctaagaacagctggaacagctttgggtcttggggttgtgaacatcctccataccatgaatccctccct

SEQ ID NO: 74042 - DNA, 201 bp, Homo sapiens
gagaatggcatgaaccagggaggctggagtgcagtggctcaatgcaacctctgccccccaagttcaagtgattctcctgcctcagcctcttgagtagctgsgattacaggcacatgcaccacgcccggctgatttttttttgtatttttagtagacagggtttcaccatgttggccaggctggtcttgaactcctgacctc

SEQ ID NO: 74043 - DNA, 201 bp, Homo sapiens
gggattacaggtgtaagccatcacacctggccctagtgacaggtttttatgggtacttttagatgatctaagaaatcatgtgcatatatctttcagatttytattttgggaaaatgaaggtttctacaacatattgtttcagtgttcaaataaactgaaggactcaacattacatttgaactatatccttcctagtgggtt

SEQ ID NO: 74044 - DNA, 201 bp, Homo sapiens
gcaagcactgcaccttcagtttggtaaacagtacccttgttcaaagatatatggggatggaaatgctgttccaaggattttgaagtttctcaaatctatckatcttcaagagccactgcaaaagaaattctgctttcctcctgtgaaggagaatatctctcaagatattgaccatattcttgaaactctaagtgccttggc

SEQ ID NO: 74045 - DNA, 201 bp, Homo sapiens
tggaactctgtggaccttaggacccccctttctgacactttgcatctccctgtgtgggtagacaatgatggcaactgtgctgccctggcggaaaggaaatktggccaaggaaagggactggaaaactttgttacacttatcacaggcacaggaatcggtggtggaattatccatcagcatgaattgatccacggaagctcc

SEQ ID NO: 74046 - DNA, 201 bp, Homo sapiens
acctgatatccatgtgtgaggaccatgatcgcatccttttggcaggctgcccttcctatgacaaacttctctcagccaagaacaaagactacatgagcatyattcgcatgtggctaggtgatgatgtaaaatctaaagattacattgttgcactacagcaccctgtgaccactgacattaagcattccataaaaatgtttg

SEQ ID NO: 74047 - DNA, 201 bp, Homo sapiens; identical to SEQ ID NO: 74029

SEQ ID NO: 74048 - DNA, 201 bp, Homo sapiens; identical to SEQ ID NO: 74030

SEQ ID NO: 74049 - DNA, 201 bp, Homo sapiens; identical to SEQ ID NO: 74031

SEQ ID NO: 74050 - DNA, 201 bp, Homo sapiens; identical to SEQ ID NO: 74032

SEQ ID NO: 74051 - DNA, 201 bp, Homo sapiens; identical to SEQ ID NO: 74033

SEQ ID NO: 74052 - DNA, 201 bp, Homo sapiens; identical to SEQ ID NO: 74034

SEQ ID NO: 74053 - DNA, 201 bp, Homo sapiens; identical to SEQ ID NO: 74035

SEQ ID NO: 74054 - DNA, 201 bp, Homo sapiens; identical to SEQ ID NO: 74036

SEQ ID NO: 74055 - DNA, 201 bp, Homo sapiens; identical to SEQ ID NO: 74037

SEQ ID NO: 74056 - DNA, 201 bp, Homo sapiens; identical to SEQ ID NO: 74038

SEQ ID NO: 74057 - DNA, 201 bp, Homo sapiens; identical to SEQ ID NO: 74039

SEQ ID NO: 74058 - DNA, 201 bp, Homo sapiens; identical to SEQ ID NO: 74040

SEQ ID NO: 74059 - DNA, 201 bp, Homo sapiens; identical to SEQ ID NO: 74041

SEQ ID NO: 74060 - DNA, 201 bp, Homo sapiens
gcggcagaggccatggaagatggtccgctggtcagcaccctgcctgcgcctcaaaataccgccgggaaggtgggggacggggacgggagcagccaatcacrcgagctctctcgggtggcgtcagggcgcgatcgcggattcggcactccgggtgggcgtggctgggcgagcgaggagtggggacaaggtcgagcgacgagt

SEQ ID NO: 74061 - DNA, 201 bp, Homo sapiens; identical to SEQ ID NO: 74042

SEQ ID NO: 74062 - DNA, 201 bp, Homo sapiens; identical to SEQ ID NO: 74043

SEQ ID NO: 74063 - DNA, 201 bp, Homo sapiens; identical to SEQ ID NO: 74044

SEQ ID NO: 74064 - DNA, 201 bp, Homo sapiens; identical to SEQ ID NO: 74045

SEQ ID NO: 74065 - DNA, 201 bp, Homo sapiens; identical to SEQ ID NO: 74046

SEQ ID NO: 74066 - DNA, 201 bp, Homo sapiens; identical to SEQ ID NO: 74029

SEQ ID NO: 74067 - DNA, 201 bp, Homo sapiens; identical to SEQ ID NO: 74030

SEQ ID NO: 74068 - DNA, 201 bp, Homo sapiens; identical to SEQ ID NO: 74031

SEQ ID NO: 74069 - DNA, 201 bp, Homo sapiens; identical to SEQ ID NO: 74032

SEQ ID NO: 74070 - DNA, 201 bp, Homo sapiens; identical to SEQ ID NO: 74033

SEQ ID NO: 74071 - DNA, 201 bp, Homo sapiens; identical to SEQ ID NO: 74034

SEQ ID NO: 74072 - DNA, 201 bp, Homo sapiens; identical to SEQ ID NO: 74035

SEQ ID NO: 74073 - DNA, 201 bp, Homo sapiens; identical to SEQ ID NO: 74036

SEQ ID NO: 74074 - DNA, 201 bp, Homo sapiens; identical to SEQ ID NO: 74037

SEQ ID NO: 74075 - DNA, 201 bp, Homo sapiens; identical to SEQ ID NO: 74038

SEQ ID NO: 74076 - DNA, 201 bp, Homo sapiens; identical to SEQ ID NO: 74039

SEQ ID NO: 74077 - DNA, 201 bp, Homo sapiens; identical to SEQ ID NO: 74040

SEQ ID NO: 74078 - DNA, 201 bp, Homo sapiens; identical to SEQ ID NO: 74041

SEQ ID NO: 74079 - DNA, 201 bp, Homo sapiens; identical to SEQ ID NO: 74042

SEQ ID NO: 74080 - DNA, 201 bp, Homo sapiens; identical to SEQ ID NO: 74043

SEQ ID NO: 74081 - DNA, 201 bp, Homo sapiens; identical to SEQ ID NO: 74044

SEQ ID NO: 74082 - DNA, 201 bp, Homo sapiens; identical to SEQ ID NO: 74045

SEQ ID NO: 74083 - DNA, 201 bp, Homo sapiens; identical to SEQ ID NO: 74046

SEQ ID NO: 74084 - DNA, 201 bp, Homo sapiens; identical to SEQ ID NO: 74029

SEQ ID NO: 74085 - DNA, 201 bp, Homo sapiens; identical to SEQ ID NO: 74030

SEQ ID NO: 74086 - DNA, 201 bp, Homo sapiens; identical to SEQ ID NO: 74031

SEQ ID NO: 74087 - DNA, 201 bp, Homo sapiens; identical to SEQ ID NO: 74032

SEQ ID NO: 74088 - DNA, 201 bp, Homo sapiens; identical to SEQ ID NO: 74033

SEQ ID NO: 74089 - DNA, 201 bp, Homo sapiens; identical to SEQ ID NO: 74034

SEQ ID NO: 74090 - DNA, 201 bp, Homo sapiens; identical to SEQ ID NO: 74035

SEQ ID NO: 74091 - DNA, 201 bp, Homo sapiens; identical to SEQ ID NO: 74036

SEQ ID NO: 74092 - DNA, 201 bp, Homo sapiens; identical to SEQ ID NO: 74037

SEQ ID NO: 74093 - DNA, 201 bp, Homo sapiens; identical to SEQ ID NO: 74038

SEQ ID NO: 74094 - DNA, 201 bp, Homo sapiens; identical to SEQ ID NO: 74039

SEQ ID NO: 74095 - DNA, 201 bp, Homo sapiens; identical to SEQ ID NO: 74040

SEQ ID NO: 74096 - DNA, 201 bp, Homo sapiens; identical to SEQ ID NO: 74041

SEQ ID NO: 74097 - DNA, 201 bp, Homo sapiens
gcaggagaatggcatgaaccaggctggagtgcagtggctcaatgcaacctctgccccccaagttcaagtgattctcctgcctcagcctcttgagtagctgsgattacaggcacatgcaccacgcccggctgatttttttttgtatttttagtagacagggtttcaccatgttggccaggctggtcttgaactcctgacctc

SEQ ID NO: 74098 - DNA, 201 bp, Homo sapiens; identical to SEQ ID NO: 74043

SEQ ID NO: 74099 - DNA, 201 bp, Homo sapiens; identical to SEQ ID NO: 74044

SEQ ID NO: 74100 - DNA, 201 bp, Homo sapiens; identical to SEQ ID NO: 74045

SEQ ID NO: 74101 - DNA, 201 bp, Homo sapiens; identical to SEQ ID NO: 74046

SEQ ID NO: 74102 - DNA, 201 bp, Homo sapiens; identical to SEQ ID NO: 74029

SEQ ID NO: 74103 - DNA, 201 bp, Homo sapiens; identical to SEQ ID NO: 74030

SEQ ID NO: 74104 - DNA, 201 bp, Homo sapiens; identical to SEQ ID NO: 74031

SEQ ID NO: 74105 - DNA, 201 bp, Homo sapiens; identical to SEQ ID NO: 74032

SEQ ID NO: 74106 - DNA, 201 bp, Homo sapiens; identical to SEQ ID NO: 74033

SEQ ID NO: 74107 - DNA, 201 bp, Homo sapiens; identical to SEQ ID NO: 74034

SEQ ID NO: 74108 - DNA, 201 bp, Homo sapiens; identical to SEQ ID NO: 74035

SEQ ID NO: 74109 - DNA, 201 bp, Homo sapiens; identical to SEQ ID NO: 74036

SEQ ID NO: 74110 - DNA, 201 bp, Homo sapiens; identical to SEQ ID NO: 74037

SEQ ID NO: 74111 - DNA, 201 bp, Homo sapiens; identical to SEQ ID NO: 74038

SEQ ID NO: 74112 - DNA, 201 bp, Homo sapiens; identical to SEQ ID NO: 74039

SEQ ID NO: 74113 - DNA, 201 bp, Homo sapiens; identical to SEQ ID NO: 74040

SEQ ID NO: 74114 - DNA, 201 bp, Homo sapiens; identical to SEQ ID NO: 74041

SEQ ID NO: 74115 - DNA, 201 bp, Homo sapiens; identical to SEQ ID NO: 74060

SEQ ID NO: 74116 - DNA, 201 bp, Homo sapiens; identical to SEQ ID NO: 74097

SEQ ID NO: 74117 - DNA, 201 bp, Homo sapiens; identical to SEQ ID NO: 74043

SEQ ID NO: 74118 - DNA, 201 bp, Homo sapiens; identical to SEQ ID NO: 74044

SEQ ID NO: 74119 - DNA, 201 bp, Homo sapiens; identical to SEQ ID NO: 74045

SEQ ID NO: 74120 - DNA, 201 bp, Homo sapiens; identical to SEQ ID NO: 74046

SEQ ID NO: 74121 - DNA, 113 bp, Homo sapiens
tggcctccaggttgaacctgccaactgattaaaggacaccagactctggatgcttggatggaaagggaaaaatggaccctgtgatgctaataaaactgttytcccttaattat

SEQ ID NO: 74122 - DNA, 144 bp, Homo sapiens
tgtgtatcagattcaactaggagaaaatcccacctccaggctcyattaatccttccaatggagtggaagtttctctcacagagaaactagtaaggggatccaatgggaaaagaacgttcacacggactagaagacgaaaccaat

SEQ ID NO: 74123 - DNA, 201 bp, Homo sapiens
ccagaaggtacgaaatggtcagcggccatatttccggccaagcattgaccggacccaactgaatgaagagctagttttgctgatggagcgatgttgggctsaggacccagctgagcggccagactttggacagattaagggcttcattcggcgctttaacaaggagggtggcaccagcatattggacaacctcctgctgcg

SEQ ID NO: 74124 - DNA, 118 bp, Homo sapiens
atggcgctgccatcactyctgctgttggtggcagccctggcaggtggggtgcgtcctcccggggcgcggaacctgacgctggcggtggtgctgccagaacacaacctgagctatgcct

SEQ ID NO: 74125 - DNA, 201 bp, Homo sapiens
aacctgagctatgcctgggcctggccacgggtgggacccgctgtggcactagctgtggaggctctgggccgggcactgcccgtggacctgcggtttgtcarctccgaactggaaggcgcctgctctgagtacctggcaccgctgagcgctgtggacctcaagctgtaccatgaccccgacctgctgttaggtcccggttgc

SEQ ID NO: 74126 - DNA, 201 bp, Homo sapiens
accttgttaagggcatggcctttctccacaacagcattatttcatcgcatgggagtctcaagtcctccaactgtgtggtggatagtcgttttgtgctcaaratcacagactatggcctggccagcttccgatcaactgctgaacctgatgacagccatgccctctatgccaagaagctgtggactgccccagaactgctca

SEQ ID NO: 74127 - DNA, 201 bp, Homo sapiens
gcactagctgtggaggctctgggccgggcactgcccgtggacctgcggtttgtcagctccgaactggaaggcgcctgctctgagtacctggcaccgctgakcgctgtggacctcaagctgtaccatgaccccgacctgctgttaggtcccggttgcgtgtaccctgctgcctctgtggcccgctttgcctcccactggcgc

SEQ ID NO: 74128 - DNA, 201 bp, Homo sapiens
gctaagaatgaccattatcgtaccctggttcgcactggcccctctgctcccaagctgggtgagtttgtggtgacactacacgggcacttcaattggactgyccgtgctgccttgctgtacctggatgctcgcacagatgaccggcctcactacttcaccatcgagggcgtctttgaggccctgcagggcagcaacctcagt

SEQ ID NO: 74129 - DNA, 201 bp, Homo sapiens
tgtttgaactcaaacatatgagagatgttcagttcaaccatctcactcgcttcattggcgcctgcatagaccctcccaacatttgcattgtcactgaataytgtcctcgtgggagtttacaggatattctagaaaatgacagcatcaacttggactggatgtttcgttattcactcattaatgaccttgttaagggcatgg

SEQ ID NO: 74130 - DNA, 201 bp, Homo sapiens; identical to SEQ ID NO: 74123

SEQ ID NO: 74131 - DNA, 118 bp, Homo sapiens; identical to SEQ ID NO: 74124

SEQ ID NO: 74132 - DNA, 201 bp, Homo sapiens; identical to SEQ ID NO: 74125

SEQ ID NO: 74133 - DNA, 201 bp, Homo sapiens; identical to SEQ ID NO: 74128

SEQ ID NO: 74134 - DNA, 201 bp, Homo sapiens; identical to SEQ ID NO: 74126

SEQ ID NO: 74135 - DNA, 201 bp, Homo sapiens; identical to SEQ ID NO: 74127

SEQ ID NO: 74136 - DNA, 201 bp, Homo sapiens
tagtctccacctttcccagactctcccaacctgtttcttctcaaagggccagtctgtgctggggttgttggcctgaagatgccccgttattgtctttttggagacacagtgaacactgcttctcgaatggagtctaatggtcaagcgctgaagatccatgtctcctctaccaccaaggatgccctagatgagctaggatgc

SEQ ID NO: 74137 - DNA, 201 bp, Homo sapiens; identical to SEQ ID NO: 74129

SEQ ID NO: 74138 - DNA, 201 bp, Homo sapiens; identical to SEQ ID NO: 74123

SEQ ID NO: 74139 - DNA, 118 bp, Homo sapiens; identical to SEQ ID NO: 74124

SEQ ID NO: 74140 - DNA, 201 bp, Homo sapiens; identical to SEQ ID NO: 74125

SEQ ID NO: 74141 - DNA, 201 bp, Homo sapiens; identical to SEQ ID NO: 74126

SEQ ID NO: 74142 - DNA, 201 bp, Homo sapiens; identical to SEQ ID NO: 74127

SEQ ID NO: 74143 - DNA, 201 bp, Homo sapiens; identical to SEQ ID NO: 74128

SEQ ID NO: 74144 - DNA, 201 bp, Homo sapiens; identical to SEQ ID NO: 74129

SEQ ID NO: 74145 - DNA, 201 bp, Homo sapiens; identical to SEQ ID NO: 74123

SEQ ID NO: 74146 - DNA, 118 bp, Homo sapiens; identical to SEQ ID NO: 74124

SEQ ID NO: 74147 - DNA, 201 bp, Homo sapiens; identical to SEQ ID NO: 74125

SEQ ID NO: 74148 - DNA, 201 bp, Homo sapiens; identical to SEQ ID NO: 74128

SEQ ID NO: 74149 - DNA, 201 bp, Homo sapiens; identical to SEQ ID NO: 74126

SEQ ID NO: 74150 - DNA, 201 bp, Homo sapiens; identical to SEQ ID NO: 74127

SEQ ID NO: 74151 - DNA, 201 bp, Homo sapiens; identical to SEQ ID NO: 74136

SEQ ID NO: 74152 - DNA, 201 bp, Homo sapiens; identical to SEQ ID NO: 74129

SEQ ID NO: 74153 - DNA, 201 bp, Homo sapiens
cagggcctgactgctgcggaggcctcggcaatattgattttagacaggcagacttctgcgttatgacccggctgctgggctacgtggaccccctggatccyagctttgtggctgccgtcatcaccatcaccttcaatccgctctactggaatgtggttgcacgatgggaacacaagacccgcaagctgagcagggccttcg

SEQ ID NO: 74154 - DNA, 201 bp, Homo sapiens
tcctgaacttcctgcgctcgcactgcttcacgcaggccatgctgagccagcccaggatggagagcctggacacccccgcggcctacagcctgggcctcgcrctcctgggactgggcgtcgtgctcgtgctctccagcttctttgcactggggttcgctggaactttcctaggtgattacttcgggatcctcaaggaggcga

SEQ ID NO: 74155 - DNA, 201 bp, Homo sapiens
caatccgctctactggaatgtggttgcacgatgggaacacaagacccgcaagctgagcagggccttcggatccccctacctggcctgctactctctaagcrtcaccatcctgctcctgaacttcctgcgctcgcactgcttcacgcaggccatgctgagccagcccaggatggagagcctggacacccccgcggcctacag

SEQ ID NO: 74156 - DNA, 201 bp, Homo sapiens
catgtactggggaagcacagccaactacctgggctgggccatcatgcacgccagccccacgggcctgctcctgacggtgctggtggccctcacctacatartggctctcctatacgaagagcccttcaccgctgagatctaccggcagaaagcctccgggtcccacaagaggagctgattgagctgcaacagctttgctga

SEQ ID NO: 74157 - DNA, 201 bp, Homo sapiens
gaaccggcaggctctgcggcgaaacacactgggacttgtagttctcggctcctctagacgctgtcgcgagcccccagataaagaggcacttcgcggtgacrgggaactacatttcccagaaggccggaatatgttgggggtcaccgggaaagcgccccgactggcggcacttacccggctctataggtccggttccggggg

SEQ ID NO: 74158 - DNA, 201 bp, Homo sapiens
gcctcttccttacccatgctttggggtgttaacagctgaggctattcgtcggtgacctgtgggactcgagctattcctgcagctcagcagacctcctggcygtggcagacttctgcgttatgacccggctgctgggctacgtggaccccctggatcccagctttgtggctgccgtcatcaccatcaccttcaatccgctct

SEQ ID NO: 74159 - DNA, 201 bp, Homo sapiens
tgtgggactcgagctattcctgcagctcagcagacctcctggccgtggcagacttctgcgttatgacccggctgctgggctacgtggaccccctggatccyagctttgtggctgccgtcatcaccatcaccttcaatccgctctactggaatgtggttgcacgatgggaacacaagacccgcaagctgagcagggccttcg

SEQ ID NO: 74160 - DNA, 201 bp, Homo sapiens; identical to SEQ ID NO: 74154

SEQ ID NO: 74161 - DNA, 201 bp, Homo sapiens; identical to SEQ ID NO: 74155

SEQ ID NO: 74162 - DNA, 201 bp, Homo sapiens; identical to SEQ ID NO: 74156

SEQ ID NO: 74163 - DNA, 201 bp, Homo sapiens
ccagagacaagaccgtggtctctgctgaccttctcatagacgaccggccggacatcacaggggccgagccaacccccagctgggagcatgtcctcttcacygcctgccacaaccagcacctgcagctgcagcccccccgccgcaggctgcactcgtgggcggacgactggaaggccattctggacagcaagcggccctgct

SEQ ID NO: 74164 - DNA, 201 bp, Homo sapiens
cagagacaagaccgtggtctctgctgaccttctcatagacgaccggccggacatcacaggggccgagccaacccccagctgggagcatgtcctcttcaccrcctgccacaaccagcacctgcagctgcagcccccccgccgcaggctgcactcgtgggcggacgactggaaggccattctggacagcaagcggccctgctg

SEQ ID NO: 74165 - DNA, 201 bp, Homo sapiens
tgaggcagaagggggttccctgttcccagagtctgcagccatcagcaaggaggaccaggaacccggcgactgaggtgcttccaggtggggacaagcccctyttggtctcagccacagcaccccttattccagctgccctgcccaacctgctcaccccacatgaccttctgtgtattcagcaaacactcactaggtgacagc

SEQ ID NO: 74166 - DNA, 201 bp, Homo sapiens
gtggtggtgcacacctgtaatcccagcactttgggaggccgaggcagacgggtcacttgaggccaggagttcgagaccagcctgggcaatatggcgagacyccgtctctactacaaatacaaaagttagcctggcatggtggcgcatgcctgtaatctcagttactcaggaggctgaggcaggagcatcacttcaacccag

SEQ ID NO: 74167 - DNA, 201 bp, Homo sapiens
cctgtaatcccagcactttgggaggccgaggcagacgggtcacttgaggccaggagttcgagaccagcctgggcaatatggcgagaccccgtctctactamaaatacaaaagttagcctggcatggtggcgcatgcctgtaatctcagttactcaggaggctgaggcaggagcatcacttcaacccaggaggcagaagctg

SEQ ID NO: 74168 - DNA, 201 bp, Homo sapiens
ggctgaggcaggagcatcacttcaacccaggaggcagaagctgcagtcagccgaggtggcaccactgcacttcagcctgggcaagactggagactgcctcaaaaaaaaaagaaaaaaaatgttggtacttagatgataccatgacggcaacctccccacccccaccccgcattgataggtagtgcagaccagcccttggag

SEQ ID NO: 74169 - DNA, 201 bp, Homo sapiens
gctgaggcaggagcatcacttcaacccaggaggcagaagctgcagtcagccgaggtggcaccactgcacttcagcctgggcaagactggagactgcctcaaaaaaaaaagaaaaaaaatgttggtacttagatgataccatgacggcaacctccccacccccaccccgcattgataggtagtgcagaccagcccttggagg

SEQ ID NO: 74170 - DNA, 201 bp, Homo sapiens
ctgaggcaggagcatcacttcaacccaggaggcagaagctgcagtcagccgaggtggcaccactgcacttcagcctgggcaagactggagactgcctcaaaaaaaaaagaaaaaaaatgttggtacttagatgataccatgacggcaacctccccacccccaccccgcattgataggtagtgcagaccagcccttggaggc

SEQ ID NO: 74171 - DNA, 201 bp, Homo sapiens
atgaacagcaggaagaaggcacttcttccaaacaggtggtgaagcaaggcctgcaggagaggagcaaggaaggagatgtagaggagcccactgatgactcrctccccacgactggagatgctggaggccgtgagccaatggaagagaaactcctggaaatccaagggaaaatcgaagctgtggagatgcacttgaccaggg

SEQ ID NO: 74172 - DNA, 201 bp, Homo sapiens
aatttgaacacagtgtcccgtcatttctagaaacagaatggtctcttctagagagcttggataaggaccttgctgggttgagttaggttttaatccttgcyttggtttggaactgccttcgggctccagaacttaaattgcttggtccgtggcatctgatgtaccaacagagattaaaagtgtaaagcaacacatgggctg

SEQ ID NO: 74173 - DNA, 201 bp, Homo sapiens
ttgacatttccagatgtttcatttagtatccaggggtctgtctggagacttctagagagggacagctcagaagtgagacccttgagctctggtgctgtaarcttgtgcaattaagttgaacagagcctgggaatttctttcctctgcacagtcccttgatatttggaatccaggttctgcccccaacccctacccacccag

SEQ ID NO: 74174 - DNA, 201 bp, Homo sapiens
cacttcagcctgggcaagactggagactgcctcaaaaaaaaaagaaaaaaaatgttggtacttagatgataccatgacggcaacctccccacccccacccmgcattgataggtagtgcagaccagcccttggaggcacttctaaacagtctgctcagaaatgttttctgtttcctattcaaattgctgttttgtctcctat

SEQ ID NO: 74175 - DNA, 201 bp, Homo sapiens
ttttcaagaaagaaaccaagcagcattgaaatcatgagtaacagaattcagaacattgtatggtggaagtcatttgtgtctgcagctgttttttcactttrcaataaataagagtaaaaattgagatcatgtcaaaaaattattgcagttttaatcattatggcatagtttcacttcccctccccccattagaatcagtgg

SEQ ID NO: 74176 - DNA, 201 bp, Homo sapiens
catacctggccatcatcaccactgagggcatgatcaacggcctccaccctgttaacaaaaactaccaggtccaatttgttactctcaaaacctttgaagargcagctgctcagctcctggaatcttcagttcaaaacctttttaagcaggtagatttaatagacctagtacgctggaagattttaaaagataaacatatcc

SEQ ID NO: 74177 - DNA, 201 bp, Homo sapiens
cagcctgaagagaaggatgcactggaggaagccggaccctcacgagtggagagaagtccttggtgattgtaaagagggcccctggagctcatttctgaathgcactctccatttccagagactaaaggatgtcctttgaaatggctggactcagagagttggagtcgttttgagatgagcattagccccagctttgtaacc

SEQ ID NO: 74178 - DNA, 201 bp, Homo sapiens
atttttctcatttggtggtaatttcaagaagagcgtttatccactattgattttcaagaaagaaaccaagcagcattgaaatcatgagtaacagaattcakaacattgtatggtggaagtcatttgtgtctgcagctgttttttcactttacaataaataagagtaaaaattgagatcatgtcaaaaaattattgcagttt

SEQ ID NO: 74179 - DNA, 201 bp, Homo sapiens
ggagatttgttcttactagggaattttggactgctgccatttaaaacttaggtttttatttaaagcagttgtgcatttttgagaaaatgtattgggagtarctagagaggatctcccaaatttttttgtatgtctctctaggagtaaacatggcaacagtttttctagaacgtggactcactgcagggactggacccaatg

SEQ ID NO: 74180 - DNA, 201 bp, Homo sapiens
tcagaaaatagctgctggtctgcatccctccattcttgttttttatgcatatggaaaacattttcctaaaactctatattcttaagttgaagccaagactraaatttaatgtgtcaaatgatctggtgactattataatgaataattgtgacttatttttcattctctcctgggtcatcaggtttcctgacccaactcctt

SEQ ID NO: 74181 - DNA, 201 bp, Homo sapiens
aaacatggcaacagtttttctagaacgtggactcactgcagggactggacccaatggcattgttaagaccctaaaatctagccaccacctgcctcccccargtttccacacacccagttggaaggcctttccctgcccttgtccctgtctcacacccatggaggttaagctacagagctggggaaacaggagattttgagt

SEQ ID NO: 74182 - DNA, 201 bp, Homo sapiens
gctcaatccctgggcagggaaaagggggtcctcggggctccccgctcgctgtcctttttctggacaggcagttccttggccacctggtagggccgcgttgyctggcaacggcggggtccttcttggctcggcggcgctcggggcctgaggggagaaaaccgccgcggagggcgctgggggtggcggcggcggtccgggagg

SEQ ID NO: 74183 - DNA, 201 bp, Homo sapiens
gggggtctctacaagtgcccaggctcaggtgcagcccccagcaatgcatcgccggagactggccctgggtctggggttctgcctgttggcgggcacaagcytcagtgtcctgtgggtgtatcttgagaactggctgccagtctcctatgtcccctattatctcccctgcccagagatcttcaacatgaagctgcactacaa

SEQ ID NO: 74184 - DNA, 201 bp, Homo sapiens
acttctattatggtggggcagtcttcggggggcaggtggccagggtatatgagtttactaggggctgccacatggccatcctggcggacaaggccaatggyatcatggctgcctggcgggaggaaagccacctgaaccgtcacttcatctcaaacaagccgtccaaggtgctgtcccccgagtacctctgggacgacagga

SEQ ID NO: 74185 - DNA, 201 bp, Homo sapiens
tggactacctcttctgccttgatgtggacatggtgtttcggaacccgtggggccctgagaccttgggagacctggtggctgccattcacccaagctactaygccgttccccgccagcagttcccctatgagcgcaggcgtgtttccactgcctttgtggcagacagcgaaggggacttctattatggtggggcagtcttcg

SEQ ID NO: 74186 - DNA, 201 bp, Homo sapiens
ttcaacatgaagctgcactacaagagggagaagccactccagcccgtggtatggtcacagtaccctcagcccaagctgctggagcacaggcccacacagcygctgacactcacaccctggttggcgcccatcgtctccgagggaaccttcaacccagagcttctgcagcacatctaccagccactgaacctgaccattggg

SEQ ID NO: 74187 - DNA, 201 bp, Homo sapiens
ccatcgtctccgagggaaccttcaacccagagcttctgcagcacatctaccagccactgaacctgaccattggggtcacggtgtttgccgtggggaagtamactcatttcatccagtccttcctggagtcagccgaggagttcttcatgcgtgggtaccgggtgcactactacatcttcactgacaaccctgcagccgttc

SEQ ID NO: 74188 - DNA, 201 bp, Homo sapiens
cctggttggcgcccatcgtctccgagggaaccttcaacccagagcttctgcagcacatctaccagccactgaacctgaccattggggtcacggtgtttgcygtggggaagtacactcatttcatccagtccttcctggagtcagccgaggagttcttcatgcgtgggtaccgggtgcactactacatcttcactgacaacc

SEQ ID NO: 74189 - DNA, 201 bp, Homo sapiens
acatcttcactgacaaccctgcagccgttcccggggtcccgctgggtccccaccggcttctcagctccatccccatccagggtcactcccactgggaggaracatccatgcgccggatggagaccatcagccagcacattgctaagagggctcaccgggaggtggactacctcttctgccttgatgtggacatggtgtttc

SEQ ID NO: 74190 - DNA, 201 bp, Homo sapiens
cttgatgtggacatggtgtttcggaacccgtggggccctgagaccttgggagacctggtggctgccattcacccaagctactacgccgttccccgccagcmgttcccctatgagcgcaggcgtgtttccactgcctttgtggcagacagcgaaggggacttctattatggtggggcagtcttcggggggcaggtggccagg

SEQ ID NO: 74191 - DNA, 201 bp, Homo sapiens
cctccaaccgtcctaacgccgggccggcagcaaggagtgttcctgggacctcagagaccaggctcagagcctgacatccctgcgaggggacagcctcatcygcccaggccagtgggggtctctacaagtgcccaggctcaggtgcagcccccagcaatgcatcgccggagactggccctgggtctggggttctgcctgttg

SEQ ID NO: 74192 - DNA, 201 bp, Homo sapiens
ccaatggcatcatggctgcctggcgggaggaaagccacctgaaccgtcacttcatctcaaacaagccgtccaaggtgctgtcccccgagtacctctgggaygacaggaagccccagccacccagcctgaagctgatccgcttttctacactggacaaggatatcagctgcctgaggagctgaccacggagctgggggttgc

SEQ ID NO: 74193 - DNA, 201 bp, Homo sapiens
tcctaacgccgggccggcagcaaggagtgttcctgggacctcagagaccaggctcagagcctgacatccctgcgaggggacagcctcatccgcccaggccrgtgggggtctctacaagtgcccaggctcaggtgcagcccccagcaatgcatcgccggagactggccctgggtctggggttctgcctgttggcgggcacaa

SEQ ID NO: 74194 - DNA, 201 bp, Homo sapiens
cttctattatggtggggcagtcttcggggggcaggtggccagggtatatgagtttactaggggctgccacatggccatcctggcggacaaggccaatggcwtcatggctgcctggcgggaggaaagccacctgaaccgtcacttcatctcaaacaagccgtccaaggtgctgtcccccgagtacctctgggacgacaggaa

SEQ ID NO: 74195 - DNA, 201 bp, Homo sapiens
gggggtctctacaagtgcccaggctcaggtgcagcccccagcaatgcatcgccggagactggccctgggtctggggttctgcctgttggcgggcacaagcytcagtgtcctgtgggtgtatcttgagaactggctgccagtctcctatgtcccctattatctcccctgcccagagatcttacccatgatgatggctctttc

SEQ ID NO: 74196 - DNA, 201 bp, Homo sapiens; identical to SEQ ID NO: 74184

SEQ ID NO: 74197 - DNA, 201 bp, Homo sapiens; identical to SEQ ID NO: 74185

SEQ ID NO: 74198 - DNA, 201 bp, Homo sapiens
agcaacatgaagctgcactacaagagggagaagccactccagcccgtggtatggtcacagtaccctcagcccaagctgctggagcacaggcccacacagcygctgacactcacaccctggttggcgcccatcgtctccgagggaaccttcaacccagagcttctgcagcacatctaccagccactgaacctgaccattggg

SEQ ID NO: 74199 - DNA, 201 bp, Homo sapiens
cctggttggcgcccatcgtctccgagggaaccttcaacccagagcttctgcagcacatctaccagccactgaacctgaccattggggtcacggtgtttgcygtggggaatccttcctggagtcagccgaggagttcttcatgcgtgggtaccgggtgcactactacatcttcactgacaaccctgcagccgttcccggggt

SEQ ID NO: 74200 - DNA, 201 bp, Homo sapiens; identical to SEQ ID NO: 74189

SEQ ID NO: 74201 - DNA, 201 bp, Homo sapiens; identical to SEQ ID NO: 74191

SEQ ID NO: 74202 - DNA, 201 bp, Homo sapiens; identical to SEQ ID NO: 74190

SEQ ID NO: 74203 - DNA, 201 bp, Homo sapiens; identical to SEQ ID NO: 74192

SEQ ID NO: 74204 - DNA, 201 bp, Homo sapiens; identical to SEQ ID NO: 74193

SEQ ID NO: 74205 - DNA, 201 bp, Homo sapiens; identical to SEQ ID NO: 74194

SEQ ID NO: 74206 - DNA, 201 bp, Homo sapiens
ccgccgacggttcgctcttcgacaaccccaggacgttctccagacgtcccccagcccaggcgagtcggcaagcaaaggctacgaaaagaaaataccaagcrtccagtgaggctcccccagcgaaacggaggaacgaaacttcatttctcccagccaagaaaactagtgttaaagaaactcagaggacttttaaggggaacg

SEQ ID NO: 74207 - DNA, 201 bp, Homo sapiens
cctcccggaccgccgccgccacccccagcgccctccgcggcggttttctcccctcaggccccgagcgccgccgagccaagaaggaccccgccgttgccagrcaacgcggccctaccaggtggccaaggaactgcctgtccagaaaaaggacagcgagcggggagccccgaggacccccttttccctgcccagggattgagc

SEQ ID NO: 74208 - DNA, 201 bp, Homo sapiens
tgagatggcgccggatctcgcttctcagaggcattcagagagcttccccagcgtgaactctcggccgaatgtaattttgccaggccgcgagggacgcagaraggggctgccaccaggcgggggcacgcgcggtagtcttgtccctacccgcccggtgccgccgtccccggctcccctcgggacgagtccgtacagctggag

SEQ ID NO: 74209 - DNA, 201 bp, Homo sapiens; identical to SEQ ID NO: 74206

SEQ ID NO: 74210 - DNA, 201 bp, Homo sapiens
gttgaacccaaaggacaaagcggtccaggaggtctgtcctccaccagctggcgacaagctggacagctttgcaataccagagagtctcaagcagcatgtgrctgtggttcccagcaaactgaggcttgtctgcctagcggccttcatccttcagaaatgcaagtttgaggaagaccagaagatggttgtctttttctcaag

SEQ ID NO: 74211 - DNA, 201 bp, Homo sapiens
ttgattgctgcccttaactgtgttctgaagtttcacagcttggcttcagcctatcagcgcatacattggcatgaattttgtgaattagggtgttaaaaacyggaattgaatttgtacaaaaagagaatatatttatcactaattattttcttaatgtaggaatgtaccgttaaaaaggaccaaaagtttttggtctgggtc

SEQ ID NO: 74212 - DNA, 201 bp, Homo sapiens; identical to SEQ ID NO: 74208

SEQ ID NO: 74213 - DNA, 201 bp, Homo sapiens
agcaagacttcccagaaagtttaaaatctctctgggtcttcgagtggaacctggaagccccgggtggcagtggattgatgtccagttcttgtcagaggagscttgtgaaaaataactgcgcctttgcctgaataccacgtccccaagaatcagaggggccacagcccttctcctccatgggaggccctggagcctgataga

SEQ ID NO: 74214 - DNA, 201 bp, Homo sapiens
gagcctggtggccggcccctgcagcacagtctgcagccgacaccctgctttggccgtgggaaaacattaaaatggagaaaaacccaaaaaggtgtacagcrggacagcaagacttcccagaaagtttaaaatctctctgggtcttcgagtggaacctggaagccccgggtggcagtggattgatgtccagttcttgtcaga

SEQ ID NO: 74215 - DNA, 201 bp, Homo sapiens
agcttcggactaagagatgcccccaggaatcttagtgccttgactagaaagaagaggaaagcacacgtgaaaaggcctgaccttcataagaagacccagartaaacacagcctcgctgaaatcctacgttcggaatactcaagcggcatggaggccgacgtcgccaaggtcaaaaagcaaaacgcacctggagagcctggt

SEQ ID NO: 74216 - DNA, 201 bp, Homo sapiens
tgaagcacatcttccacgtccgatccctccaccttgggcatgtggcgaagagcttcggactaagagatgcccccaggaatcttagtgccttgactagaaaraagaggaaagcacacgtgaaaaggcctgaccttcataagaagacccagagtaaacacagcctcgctgaaatcctacgttcggaatactcaagcggcatgg

SEQ ID NO: 74217 - DNA, 201 bp, Homo sapiens
agcacacgtgaaaaggcctgaccttcataagaagacccagagtaaacacagcctcgctgaaatcctacgttcggaatactcaagcggcatggaggccgacrtcgccaaggtcaaaaagcaaaacgcacctggagagcctggtggccggcccctgcagcacagtctgcagccgacaccctgctttggccgtgggaaaacatt

SEQ ID NO: 74218 - DNA, 201 bp, Homo sapiens
aacattaaaatggagaaaaacccaaaaaggtgtacagcgggacagcaagacttcccagaaagtttaaaatctctctgggtcttcgagtggaacctggaagycccgggtggcagtggattgatgtccagttcttgtcagaggagccttgtgaaaaataactgcgcctttgcctgaataccacgtccccaagaatcagagggg

SEQ ID NO: 74219 - DNA, 201 bp, Homo sapiens
aagatggaagatattttgtgtgttctgacaagagatgattgttttaaagggaaacgatggggagcccagaaatcccatgctgttggcccccaggaaatccragagcgagccacagtcttgcagacggtatttgaagattacgtgcactccagtgagaggagggtctcctgggcaaagaaagctctgcagtccttcatccaa

SEQ ID NO: 74220 - DNA, 201 bp, Homo sapiens
tccactacagcctcttcctacagaccctgctgagcagctcaggggcgccggcatcagggcagttgccatctgcctccatgcgattaaaattcctacggctrcatggcggcatggagcaggaggaaagaacagcagtgtttcaggaattttcacattccagaagaggcgtccttctttgcacggatgttgcagctcggggct

SEQ ID NO: 74221 - DNA, 201 bp, Homo sapiens; identical to SEQ ID NO: 74207

SEQ ID NO: 74222 - DNA, 201 bp, Homo sapiens
ttctgacaagagatgattgttttaaagggaaacgatggggagcccagaaatcccatgctgttggcccccaggaaatccgagagcgagccacagtcttgcaracggtatttgaagattacgtgcactccagtgagaggagggtctcctgggcaaagaaagctctgcagtccttcatccaagcctacgccacctaccccaggg

SEQ ID NO: 74223 - DNA, 201 bp, Homo sapiens
ggggcggggagctggctcctgcgcctagaaaagtaaaggaaggaattagaggctgtttcccgtggaagcaagcaaaggctacgaaaagaaaataccaagcrtccagtgaggctcccccagcgaaacggaggaacgaaacttcatttctcccagccaagaaaactagtgttaaagaaactcagaggacttttaaggggaacg

SEQ ID NO: 74224 - DNA, 201 bp, Homo sapiens; identical to SEQ ID NO: 74210

SEQ ID NO: 74225 - DNA, 201 bp, Homo sapiens; identical to SEQ ID NO: 74211

SEQ ID NO: 74226 - DNA, 201 bp, Homo sapiens; identical to SEQ ID NO: 74213

SEQ ID NO: 74227 - DNA, 201 bp, Homo sapiens; identical to SEQ ID NO: 74214

SEQ ID NO: 74228 - DNA, 201 bp, Homo sapiens; identical to SEQ ID NO: 74215

SEQ ID NO: 74229 - DNA, 201 bp, Homo sapiens; identical to SEQ ID NO: 74216

SEQ ID NO: 74230 - DNA, 201 bp, Homo sapiens; identical to SEQ ID NO: 74217

SEQ ID NO: 74231 - DNA, 201 bp, Homo sapiens; identical to SEQ ID NO: 74218

SEQ ID NO: 74232 - DNA, 201 bp, Homo sapiens; identical to SEQ ID NO: 74219

SEQ ID NO: 74233 - DNA, 201 bp, Homo sapiens; identical to SEQ ID NO: 74220

SEQ ID NO: 74234 - DNA, 201 bp, Homo sapiens; identical to SEQ ID NO: 74222

SEQ ID NO: 74235 - DNA, 201 bp, Homo sapiens
acccacgcagaccatggcagccgccgacggttcgctcttcgacaaccccaggacgttctccagacgtcccccagcccaggcgagtcggggatgcgcctggragcggggagtggagcggtgtggaggggcggggagctggctcctgcgcctagaaaagtaaaggaaggaattagaggctgtttcccgtggaagcaagcaaag

SEQ ID NO: 74236 - DNA, 201 bp, Homo sapiens; identical to SEQ ID NO: 74206

SEQ ID NO: 74237 - DNA, 201 bp, Homo sapiens; identical to SEQ ID NO: 74207

SEQ ID NO: 74238 - DNA, 201 bp, Homo sapiens; identical to SEQ ID NO: 74208

SEQ ID NO: 74239 - DNA, 178 bp, Homo sapiens
taatttccacaataaatacggtcttaaaaatgtctagtatgaccaggtaagaacttcaggctcctcttgatttcttaggcattacgtgggtataaccggaygaaacctgtgtgtgcaaggcagagcaaatttgtgtcttggcgttggaacacagtgccaggttatcgaccataaaggg

SEQ ID NO: 74240 - DNA, 201 bp, Homo sapiens
gcccaactttacagggaaaagcagttaccgtgtatacaaattacccatttcctggagaaacatttaatagagaaaaattccgttctctggattgggaaaayccaacagaaagagaagatgattctgataaatactgtaaacttaatctgcaacaatctggttcatttcagtattatttccttcaaggaaatgagaaaagtg

SEQ ID NO: 74241 - DNA, 201 bp, Homo sapiens
tttcagtattatttccttcaaggaaatgagaaaagtggtggaggttacatagttgtggaccccattttacgtgttggtgctgataatcatgtgctaccctwggactgtgttactcttcagacatttttagctaagtgtttgggaccttttgatgaatgggaaagcagacttagggttgcaaaagaatcaggctacaacatg

SEQ ID NO: 74242 - DNA, 201 bp, Homo sapiens
tcagcccttaaatatgcaggtcttcaaggtttaatgtctgtattggcagaaataagaccaaagaatgacttggggcatcctttttgtaataatttgagatstggagattggatgattgactatgtcagtaaccggcttatttcacgatcaggaactattgctgaagttggtaaatggttgcaggctatgttcttctacctg

SEQ ID NO: 74243 - DNA, 201 bp, Homo sapiens
tggctgagctaaatcagatcctttaccgatgtgaatcagaagaaaaggaagatggtggagggtgctatgacataccaaactggtcagcccttaaatatgcmggtcttcaaggtttaatgtctgtattggcagaaataagaccaaagaatgacttggggcatcctttttgtaataatttgagatctggagattggatgattg

SEQ ID NO: 74244 - DNA, 201 bp, Homo sapiens
gatgttggacagctagtggaaaaattaaaaaaggaatggaatgttatttgtattactgatgttgtctacaatcatactgctgctaatagtaaatggatccrggaacatccagaatgtgcctataatcttgtgaattctccacacttaaaacctgcctgggtcttagacagagcactttggcgtttctcctgtgatgttgca

SEQ ID NO: 74245 - DNA, 201 bp, Homo sapiens
gaggaaatcgtttcaattgtggcacatggatggataaaatgggagaaagtgacagagctagaaacagaggaatcccagccacaccaagagatgggtctgcygtggaaattgtgggcctgagtaaatctgctgttcgctggttgctggaattatccaaaaaaaatattttcccttatcatgaagtcacagtaaaaagacatg

SEQ ID NO: 74246 - DNA, 201 bp, Homo sapiens
ttgcactaacgactttcataccacatgacaaggggccagcagcaattgaagaatgctgtaattggtttcataaaagaatggaggaattaaattcagagaakcatcgactcattaactatcatcaggaacaggcagttaattgccttttgggaaatgtgttttatgaacgactggctggccatggtccaaaactaggacctg

SEQ ID NO: 74247 - DNA, 201 bp, Homo sapiens
ctaacgactttcataccacatgacaaggggccagcagcaattgaagaatgctgtaattggtttcataaaagaatggaggaattaaattcagagaagcatcractcattaactatcatcaggaacaggcagttaattgccttttgggaaatgtgttttatgaacgactggctggccatggtccaaaactaggacctgtcact

SEQ ID NO: 74248 - DNA, 201 bp, Homo sapiens
atatattcaagaaatagaatttgaaaacttgtctccaggaagtgttattatattcagagttagtcttgatccacatgcacaagtcgctgttggaattcttygaaatcatctgacacaattcagtcctcactttaaatctggcagcctagctgttgacaatgcagatcctatattaaaaattccttttgcttctcttgcctc

SEQ ID NO: 74249 - DNA, 201 bp, Homo sapiens
gatttcagtggtttctgaagaacggttttacactaagtggaatcctgaagcattgccttcaaacacaggtgaagttaatttccaaagcggcattattgcakccaggtgtgctatcagtaaacttcatcaggagcttggagccaaggttgttctttctgcttctcaggtgtatgtggatcaagttgatgaagacatagtggc

SEQ ID NO: 74250 - DNA, 201 bp, Homo sapiens
cgtataactccctcggcgggtaactcattcgactgtggagttcttttaattcttatgaaagatttcaaatcctctagaagccaaaatgggacacagtaaayagattcgaattttacttctgaacgaaatggagaaactggaaaagaccctcttcagacttgaacaagggtatgagctacagttccgattaggcccaacttt

SEQ ID NO: 74251 - DNA, 201 bp, Homo sapiens
aataaaccagaggactgtccttatctctgggcacacatgaaaaaatacactgaaataactgcaacttatttccagggagtacgtcttgataactgccactsaacacctcttcacgtagctgagtacatgttggatgctgctaggaatttgcaacccaatttatatgtagtagctgaactgttcacaggaagtgaagatctg

SEQ ID NO: 74252 - DNA, 201 bp, Homo sapiens
ccctttgcccttcacggcgcccggccctccttgggctgcggcttctgtgcgaggctgggcagccagcccttccccttctgtttctccccgtcccctccccscgaccgtagcaccagagtcgcgggtcctgcagtgccccagaagccgcacgtataactccctcggcgggtaactcattcgactgtggagttcttttaattc

SEQ ID NO: 74253 - DNA, 201 bp, Homo sapiens
gaaaactttagatccagatgatatggtttactgtggaatttatgacaatgcattagacaatgacaactacaatcttgctaaaggtttcaattatcaccaasgacctgagtggctgtggcctattgggtattttcttcgtgcaaaattatatttttccagattgatgggcccggagactactgcaaagactatagttttggt

SEQ ID NO: 74254 - DNA, 201 bp, Homo sapiens
gacgctatgtagaagccaggaatattattttagcatttgcgggtaccctgaggcatggtctcattcctaatctactgggtgaaggaatttatgccagatasaattgtcgggatgctgtgtggtggtggctgcagtgtatccaggattactgtaaaatggttccaaatggtctagacattctcaagtgcccagtttccagaa

SEQ ID NO: 74255 - DNA, 201 bp, Homo sapiens
aatacaaagaaaagggaatacctgctttgattgaaaatgatcaccatatgaattccatccgaaaaataatttgggaggatatttttccaaagcttaaactytgggaatttttccaagtagatgtcaacaaagcggttgagcaatttagaagacttcttacacaagaaaataggcgagtaaccaagtctgatccaaaccaac

SEQ ID NO: 74256 - DNA, 201 bp, Homo sapiens
tagatttcaatttgaatcagaaagaaatatcattaccaatgaaatgtgtttgagttcagtaagaattattcaaatgcctagaaatccatagtttggaaaakaaaaatcatgtcatcttctatttgtacagaaatgaaaataaaatatgaaaataatgaaagaaatgaaaagatagcttttaattgtggtatatataatctt

SEQ ID NO: 74257 - DNA, 162 bp, Homo sapiens
caaagataattgggaaaacatgagactggtcatattgatgaatattgtaacatgtgaattgtgatccatttctgatatgtcttgaactactgtgtctagtrggcaaatgtcattgttacctctgtgtgttaagaaaataaaaatattttctaaaggtctgta

SEQ ID NO: 74258 - DNA, 201 bp, Homo sapiens
aagcattaggaaatttatttcctaaaaacagttttgtaaaattagtattgagttctattgagtattataagatagcttacattttcaaaatggaaattgtyggtcatatttctagaactttaaagaaaaaagaatgttatattagttttctaaaactcaactatctttagtcatgttcaaaaatctattgctagatcatag

SEQ ID NO: 74259 - DNA, 113 bp, Homo sapiens
acatgtgaattgtgatccatttctgatatgtcttgaactactgtgtctagtgggcaaatgtcattgttacctctgtgtgttaagaaaataaaaatattttytaaaggtctgta

SEQ ID NO: 74260 - DNA, 201 bp, Homo sapiens
ttcaacctttgtgaaacacctttcattgggttcagttcaactgtgtggagtaggaaaattcccttccctgccaattctttcacctgccctaatggatgtaycttataggttaaatgagatcacaaaagaaaaggagcaatgttgtgtttctctagctgcaggcttacctcatttttcttctggtattttccgctgctgggg

SEQ ID NO: 74261 - DNA, 201 bp, Homo sapiens
tacagatgattctgctcctttgcctgctggcacactggatcagccattgtttgaagtcatacaggaagcaatgcaaaaacacatgcagggcatacagttcygagaaaggaatgctggtccccagatagatcgaaacatgaaggacgaaggttttaatataactgcaggagttgatgaagaaacaggatttgtttatggagg

SEQ ID NO: 74262 - DNA, 201 bp, Homo sapiens
gtcctgcagtgccccagaagccgcacgtataactccctcggcgggtaactcattcgactgtggagttcttttaattcttatgaaagatttcaaatcctctrgaagccaaaatgggacacagtaaacagattcgaattttacttctgaacgaaatggagaaactggaaaagaccctcttcagacttgaacaagggtatgagc

SEQ ID NO: 74263 - DNA, 201 bp, Homo sapiens
agttttaactagcttagttttctggtttccaaaactaaaatagattaaatcctacaaatttaaggacagttgtgacagtaatctgaccactatctataaayacattggacattggtttccaaatctccctttcttcttcagttccttccttgttcaatatatacccttctctaaactgtgcgggtaaaaggaatgactgtc

SEQ ID NO: 74264 - DNA, 201 bp, Homo sapiens
taaacagattcgaattttacttctgaacgaaatggagaaactggaaaagaccctcttcagacttgaacaagggtatgagctacagttccgattaggcccarctttacagggaaaagcagttaccgtgtatacaaattacccatttcctggagaaacatttaatagagaaaaattccgttctctggattgggaaaatccaac

SEQ ID NO: 74265 - DNA, 201 bp, Homo sapiens
ctgctgattactggacgctatgtagaagccaggaatattattttagcatttgcgggtaccctgaggcatggtctcattcctaatctactgggtgaaggaawttatgccagatacaattgtcgggatgctgtgtggtggtggctgcagtgtatccaggattactgtaaaatggttccaaatggtctagacattctcaagtgc

SEQ ID NO: 74266 - DNA, 201 bp, Homo sapiens
cattctcaagtgcccagtttccagaatgtatcctacagatgattctgctcctttgcctgctggcacactggatcagccattgtttgaagtcatacaggaarcaatgcaaaaacacatgcagggcatacagttccgagaaaggaatgctggtccccagatagatcgaaacatgaaggacgaaggttttaatataactgcagg

SEQ ID NO: 74267 - DNA, 201 bp, Homo sapiens
aaaataatggtattttaaaataatgctactttcaaagtagcatttttttagttagtttacaggttacatacccaaaaccttaactatgactaagaaattamagaagaaaaccagcaaactaaaacttctgggcagcaaaaatatataaatgcttcagatgtcaaatacccatgcttgaaagctcgtgtaatttactttaag

SEQ ID NO: 74268 - DNA, 201 bp, Homo sapiens
tcagttggaagaaagtagtggcaagaattctttcattgctatataatattcagtggctcatttatacctaataaaataatggtattttaaaataatgctaytttcaaagtagcatttttttagttagtttacaggttacatacccaaaaccttaactatgactaagaaattaaagaagaaaaccagcaaactaaaacttct

SEQ ID NO: 74269 - DNA, 201 bp, Homo sapiens
tgtttctctagctgcaggcttacctcatttttcttctggtattttccgctgctggggaagggatacttttattgcacttagaggtatactgctgattactrgacgctatgtagaagccaggaatattattttagcatttgcgggtaccctgaggcatggtctcattcctaatctactgggtgaaggaatttatgccagata

SEQ ID NO: 74270 - DNA, 201 bp, Homo sapiens
cttaaattcaataaaatcactggaagtttttcatgataacttattttaagatgccttaaaaatcttaaagtcacaaaaggaaaaaggtttttaacatttayatgagttaacattttttcatagaacttatttcctagatagaattttttactgttttttactgttttcttaagaaaacagttaaatcattatgcattcagt

SEQ ID NO: 74271 - DNA, 201 bp, Homo sapiens; identical to SEQ ID NO: 74240

SEQ ID NO: 74272 - DNA, 201 bp, Homo sapiens; identical to SEQ ID NO: 74241

SEQ ID NO: 74273 - DNA, 201 bp, Homo sapiens; identical to SEQ ID NO: 74242

SEQ ID NO: 74274 - DNA, 201 bp, Homo sapiens; identical to SEQ ID NO: 74243

SEQ ID NO: 74275 - DNA, 201 bp, Homo sapiens; identical to SEQ ID NO: 74244

SEQ ID NO: 74276 - DNA, 201 bp, Homo sapiens; identical to SEQ ID NO: 74245

SEQ ID NO: 74277 - DNA, 201 bp, Homo sapiens; identical to SEQ ID NO: 74246

SEQ ID NO: 74278 - DNA, 201 bp, Homo sapiens; identical to SEQ ID NO: 74247

SEQ ID NO: 74279 - DNA, 201 bp, Homo sapiens; identical to SEQ ID NO: 74248

SEQ ID NO: 74280 - DNA, 201 bp, Homo sapiens
gatttcagtggtttctgaagaacggttttacactaagtggaatcctgaagcattgccttcaaacacaggtgaagttaatttccaaagcggcattattgcakccaggtgtgctatcagtaaacttcatcaggagcttggagccaagggttttattcaggtgtatgtggatcaagttgatgaagacatagtggcagtaacaag

SEQ ID NO: 74281 - DNA, 201 bp, Homo sapiens
gagcagactaatctcttgggtaactcattcgactgtggagttcttttaattcttatgaaagatttcaaatcctctagaagccaaaatgggacacagtaaayagattcgaattttacttctgaacgaaatggagaaactggaaaagaccctcttcagacttgaacaagggtatgagctacagttccgattaggcccaacttt

SEQ ID NO: 74282 - DNA, 201 bp, Homo sapiens; identical to SEQ ID NO: 74251

SEQ ID NO: 74283 - DNA, 201 bp, Homo sapiens; identical to SEQ ID NO: 74253

SEQ ID NO: 74284 - DNA, 201 bp, Homo sapiens; identical to SEQ ID NO: 74254

SEQ ID NO: 74285 - DNA, 201 bp, Homo sapiens; identical to SEQ ID NO: 74255

SEQ ID NO: 74286 - DNA, 201 bp, Homo sapiens; identical to SEQ ID NO: 74256

SEQ ID NO: 74287 - DNA, 162 bp, Homo sapiens; identical to SEQ ID NO: 74257

SEQ ID NO: 74288 - DNA, 201 bp, Homo sapiens; identical to SEQ ID NO: 74258

SEQ ID NO: 74289 - DNA, 113 bp, Homo sapiens; identical to SEQ ID NO: 74259

SEQ ID NO: 74290 - DNA, 201 bp, Homo sapiens; identical to SEQ ID NO: 74260

SEQ ID NO: 74291 - DNA, 201 bp, Homo sapiens; identical to SEQ ID NO: 74261

SEQ ID NO: 74292 - DNA, 201 bp, Homo sapiens
gggagattgcccacctgttatctttgagcagactaatctcttgggtaactcattcgactgtggagttcttttaattcttatgaaagatttcaaatcctctrgaagccaaaatgggacacagtaaacagattcgaattttacttctgaacgaaatggagaaactggaaaagaccctcttcagacttgaacaagggtatgagc

SEQ ID NO: 74293 - DNA, 201 bp, Homo sapiens; identical to SEQ ID NO: 74263

SEQ ID NO: 74294 - DNA, 201 bp, Homo sapiens; identical to SEQ ID NO: 74264

SEQ ID NO: 74295 - DNA, 201 bp, Homo sapiens; identical to SEQ ID NO: 74265

SEQ ID NO: 74296 - DNA, 201 bp, Homo sapiens; identical to SEQ ID NO: 74266

SEQ ID NO: 74297 - DNA, 201 bp, Homo sapiens; identical to SEQ ID NO: 74267

SEQ ID NO: 74298 - DNA, 201 bp, Homo sapiens; identical to SEQ ID NO: 74268

SEQ ID NO: 74299 - DNA, 201 bp, Homo sapiens; identical to SEQ ID NO: 74269

SEQ ID NO: 74300 - DNA, 201 bp, Homo sapiens; identical to SEQ ID NO: 74270

SEQ ID NO: 74301 - DNA, 201 bp, Homo sapiens; identical to SEQ ID NO: 74240

SEQ ID NO: 74302 - DNA, 201 bp, Homo sapiens; identical to SEQ ID NO: 74241

SEQ ID NO: 74303 - DNA, 201 bp, Homo sapiens; identical to SEQ ID NO: 74242

SEQ ID NO: 74304 - DNA, 201 bp, Homo sapiens; identical to SEQ ID NO: 74243

SEQ ID NO: 74305 - DNA, 201 bp, Homo sapiens; identical to SEQ ID NO: 74244

SEQ ID NO: 74306 - DNA, 201 bp, Homo sapiens; identical to SEQ ID NO: 74245

SEQ ID NO: 74307 - DNA, 201 bp, Homo sapiens; identical to SEQ ID NO: 74246

SEQ ID NO: 74308 - DNA, 201 bp, Homo sapiens; identical to SEQ ID NO: 74247

SEQ ID NO: 74309 - DNA, 201 bp, Homo sapiens; identical to SEQ ID NO: 74248

SEQ ID NO: 74310 - DNA, 201 bp, Homo sapiens
cattaggtttgcggagttattttaaacataattgaaaaatcaaggttttttaatactttaaataaaacatctgtttttcaatgtggtaatttaagtcctaygatgagtttattaacatgtgctttttatttagggtatgagctacagttccgattaggcccaactttacagggaaaagcagttaccgtgtatacaaattac

SEQ ID NO: 74311 - DNA, 201 bp, Homo sapiens; identical to SEQ ID NO: 74280

SEQ ID NO: 74312 - DNA, 201 bp, Homo sapiens; identical to SEQ ID NO: 74251

SEQ ID NO: 74313 - DNA, 201 bp, Homo sapiens; identical to SEQ ID NO: 74253

SEQ ID NO: 74314 - DNA, 201 bp, Homo sapiens; identical to SEQ ID NO: 74254

SEQ ID NO: 74315 - DNA, 201 bp, Homo sapiens; identical to SEQ ID NO: 74255

SEQ ID NO: 74316 - DNA, 201 bp, Homo sapiens; identical to SEQ ID NO: 74256

SEQ ID NO: 74317 - DNA, 162 bp, Homo sapiens; identical to SEQ ID NO: 74257

SEQ ID NO: 74318 - DNA, 113 bp, Homo sapiens; identical to SEQ ID NO: 74259

SEQ ID NO: 74319 - DNA, 201 bp, Homo sapiens; identical to SEQ ID NO: 74258

SEQ ID NO: 74320 - DNA, 201 bp, Homo sapiens; identical to SEQ ID NO: 74260

SEQ ID NO: 74321 - DNA, 201 bp, Homo sapiens; identical to SEQ ID NO: 74261

SEQ ID NO: 74322 - DNA, 201 bp, Homo sapiens; identical to SEQ ID NO: 74263

SEQ ID NO: 74323 - DNA, 201 bp, Homo sapiens; identical to SEQ ID NO: 74266

SEQ ID NO: 74324 - DNA, 201 bp, Homo sapiens; identical to SEQ ID NO: 74265

SEQ ID NO: 74325 - DNA, 201 bp, Homo sapiens
taaaacatctgtttttcaatgtggtaatttaagtcctacgatgagtttattaacatgtgctttttatttagggtatgagctacagttccgattaggcccarctttacagggaaaagcagttaccgtgtatacaaattacccatttcctggagaaacatttaatagagaaaaattccgttctctggattgggaaaatccaac

SEQ ID NO: 74326 - DNA, 201 bp, Homo sapiens; identical to SEQ ID NO: 74267

SEQ ID NO: 74327 - DNA, 201 bp, Homo sapiens; identical to SEQ ID NO: 74268

SEQ ID NO: 74328 - DNA, 201 bp, Homo sapiens; identical to SEQ ID NO: 74269

SEQ ID NO: 74329 - DNA, 201 bp, Homo sapiens; identical to SEQ ID NO: 74270

SEQ ID NO: 74330 - DNA, 201 bp, Homo sapiens; identical to SEQ ID NO: 74240

SEQ ID NO: 74331 - DNA, 201 bp, Homo sapiens; identical to SEQ ID NO: 74241

SEQ ID NO: 74332 - DNA, 201 bp, Homo sapiens; identical to SEQ ID NO: 74242

SEQ ID NO: 74333 - DNA, 201 bp, Homo sapiens; identical to SEQ ID NO: 74243

SEQ ID NO: 74334 - DNA, 201 bp, Homo sapiens; identical to SEQ ID NO: 74244

SEQ ID NO: 74335 - DNA, 201 bp, Homo sapiens; identical to SEQ ID NO: 74245

SEQ ID NO: 74336 - DNA, 201 bp, Homo sapiens; identical to SEQ ID NO: 74246

SEQ ID NO: 74337 - DNA, 201 bp, Homo sapiens; identical to SEQ ID NO: 74247

SEQ ID NO: 74338 - DNA, 201 bp, Homo sapiens; identical to SEQ ID NO: 74248

SEQ ID NO: 74339 - DNA, 201 bp, Homo sapiens; identical to SEQ ID NO: 74280

SEQ ID NO: 74340 - DNA, 201 bp, Homo sapiens; identical to SEQ ID NO: 74250

SEQ ID NO: 74341 - DNA, 201 bp, Homo sapiens; identical to SEQ ID NO: 74251

SEQ ID NO: 74342 - DNA, 201 bp, Homo sapiens; identical to SEQ ID NO: 74252

SEQ ID NO: 74343 - DNA, 201 bp, Homo sapiens; identical to SEQ ID NO: 74253

SEQ ID NO: 74344 - DNA, 201 bp, Homo sapiens; identical to SEQ ID NO: 74254

SEQ ID NO: 74345 - DNA, 201 bp, Homo sapiens; identical to SEQ ID NO: 74255

SEQ ID NO: 74346 - DNA, 201 bp, Homo sapiens; identical to SEQ ID NO: 74256

SEQ ID NO: 74347 - DNA, 162 bp, Homo sapiens; identical to SEQ ID NO: 74257

SEQ ID NO: 74348 - DNA, 201 bp, Homo sapiens; identical to SEQ ID NO: 74258

SEQ ID NO: 74349 - DNA, 113 bp, Homo sapiens; identical to SEQ ID NO: 74259

SEQ ID NO: 74350 - DNA, 201 bp, Homo sapiens; identical to SEQ ID NO: 74260

SEQ ID NO: 74351 - DNA, 201 bp, Homo sapiens; identical to SEQ ID NO: 74261

SEQ ID NO: 74352 - DNA, 201 bp, Homo sapiens; identical to SEQ ID NO: 74262

SEQ ID NO: 74353 - DNA, 201 bp, Homo sapiens; identical to SEQ ID NO: 74263

SEQ ID NO: 74354 - DNA, 201 bp, Homo sapiens; identical to SEQ ID NO: 74264

SEQ ID NO: 74355 - DNA, 201 bp, Homo sapiens; identical to SEQ ID NO: 74265

SEQ ID NO: 74356 - DNA, 201 bp, Homo sapiens; identical to SEQ ID NO: 74266

SEQ ID NO: 74357 - DNA, 201 bp, Homo sapiens; identical to SEQ ID NO: 74267

SEQ ID NO: 74358 - DNA, 201 bp, Homo sapiens; identical to SEQ ID NO: 74268

SEQ ID NO: 74359 - DNA, 201 bp, Homo sapiens; identical to SEQ ID NO: 74269

SEQ ID NO: 74360 - DNA, 201 bp, Homo sapiens; identical to SEQ ID NO: 74270

SEQ ID NO: 74361 - DNA, 201 bp, Homo sapiens; identical to SEQ ID NO: 74240

SEQ ID NO: 74362 - DNA, 201 bp, Homo sapiens; identical to SEQ ID NO: 74241

SEQ ID NO: 74363 - DNA, 201 bp, Homo sapiens; identical to SEQ ID NO: 74242

SEQ ID NO: 74364 - DNA, 201 bp, Homo sapiens; identical to SEQ ID NO: 74243

SEQ ID NO: 74365 - DNA, 201 bp, Homo sapiens; identical to SEQ ID NO: 74244

SEQ ID NO: 74366 - DNA, 201 bp, Homo sapiens; identical to SEQ ID NO: 74245

SEQ ID NO: 74367 - DNA, 201 bp, Homo sapiens; identical to SEQ ID NO: 74246

SEQ ID NO: 74368 - DNA, 201 bp, Homo sapiens; identical to SEQ ID NO: 74247

SEQ ID NO: 74369 - DNA, 201 bp, Homo sapiens; identical to SEQ ID NO: 74248

SEQ ID NO: 74370 - DNA, 201 bp, Homo sapiens; identical to SEQ ID NO: 74280

SEQ ID NO: 74371 - DNA, 201 bp, Homo sapiens
ccccattggtggctggcgacccgaatttgggaatggggagattgcccacctgttatctttgagcagactaatctcttaagccaaaatgggacacagtaaayagattcgaattttacttctgaacgaaatggagaaactggaaaagaccctcttcagacttgaacaagggtatgagctacagttccgattaggcccaacttt

SEQ ID NO: 74372 - DNA, 201 bp, Homo sapiens; identical to SEQ ID NO: 74251

SEQ ID NO: 74373 - DNA, 201 bp, Homo sapiens; identical to SEQ ID NO: 74253

SEQ ID NO: 74374 - DNA, 201 bp, Homo sapiens; identical to SEQ ID NO: 74254

SEQ ID NO: 74375 - DNA, 201 bp, Homo sapiens; identical to SEQ ID NO: 74255

SEQ ID NO: 74376 - DNA, 201 bp, Homo sapiens; identical to SEQ ID NO: 74256

SEQ ID NO: 74377 - DNA, 162 bp, Homo sapiens; identical to SEQ ID NO: 74257

SEQ ID NO: 74378 - DNA, 201 bp, Homo sapiens; identical to SEQ ID NO: 74258

SEQ ID NO: 74379 - DNA, 113 bp, Homo sapiens; identical to SEQ ID NO: 74259

SEQ ID NO: 74380 - DNA, 201 bp, Homo sapiens
cctctgttctcatctccccattggtggctggcgacccgaatttgggaatggggagattgcccacctgttatctttgagcagactaatctcttaagccaaartgggacacagtaaacagattcgaattttacttctgaacgaaatggagaaactggaaaagaccctcttcagacttgaacaagggtatgagctacagttccg

SEQ ID NO: 74381 - DNA, 201 bp, Homo sapiens; identical to SEQ ID NO: 74260

SEQ ID NO: 74382 - DNA, 201 bp, Homo sapiens; identical to SEQ ID NO: 74261

SEQ ID NO: 74383 - DNA, 201 bp, Homo sapiens; identical to SEQ ID NO: 74263

SEQ ID NO: 74384 - DNA, 201 bp, Homo sapiens; identical to SEQ ID NO: 74264

SEQ ID NO: 74385 - DNA, 201 bp, Homo sapiens; identical to SEQ ID NO: 74265

SEQ ID NO: 74386 - DNA, 201 bp, Homo sapiens; identical to SEQ ID NO: 74266

SEQ ID NO: 74387 - DNA, 201 bp, Homo sapiens; identical to SEQ ID NO: 74267

SEQ ID NO: 74388 - DNA, 201 bp, Homo sapiens; identical to SEQ ID NO: 74268

SEQ ID NO: 74389 - DNA, 201 bp, Homo sapiens; identical to SEQ ID NO: 74269

SEQ ID NO: 74390 - DNA, 201 bp, Homo sapiens; identical to SEQ ID NO: 74270

SEQ ID NO: 74391 - DNA, 201 bp, Homo sapiens; identical to SEQ ID NO: 74240

SEQ ID NO: 74392 - DNA, 201 bp, Homo sapiens; identical to SEQ ID NO: 74241

SEQ ID NO: 74393 - DNA, 201 bp, Homo sapiens; identical to SEQ ID NO: 74242

SEQ ID NO: 74394 - DNA, 201 bp, Homo sapiens; identical to SEQ ID NO: 74243

SEQ ID NO: 74395 - DNA, 201 bp, Homo sapiens; identical to SEQ ID NO: 74244

SEQ ID NO: 74396 - DNA, 201 bp, Homo sapiens; identical to SEQ ID NO: 74245

SEQ ID NO: 74397 - DNA, 201 bp, Homo sapiens; identical to SEQ ID NO: 74246

SEQ ID NO: 74398 - DNA, 201 bp, Homo sapiens; identical to SEQ ID NO: 74247

SEQ ID NO: 74399 - DNA, 201 bp, Homo sapiens; identical to SEQ ID NO: 74248

SEQ ID NO: 74400 - DNA, 201 bp, Homo sapiens; identical to SEQ ID NO: 74280

SEQ ID NO: 74401 - DNA, 184 bp, Homo sapiens
gggtaactcattcgactgtggagttcttttaattcttatgaaagatttcaaatcctctagaagccaaaatgggacacagtaaayagattcgaattttacttctgaacgaaatggagaaactggaaaagaccctcttcagacttgaacaagaaactgggtctcactatgttgcccaggttgatat

SEQ ID NO: 74402 - DNA, 201 bp, Homo sapiens; identical to SEQ ID NO: 74251

SEQ ID NO: 74403 - DNA, 201 bp, Homo sapiens; identical to SEQ ID NO: 74253

SEQ ID NO: 74404 - DNA, 201 bp, Homo sapiens; identical to SEQ ID NO: 74254

SEQ ID NO: 74405 - DNA, 201 bp, Homo sapiens; identical to SEQ ID NO: 74255

SEQ ID NO: 74406 - DNA, 201 bp, Homo sapiens; identical to SEQ ID NO: 74256

SEQ ID NO: 74407 - DNA, 162 bp, Homo sapiens; identical to SEQ ID NO: 74257

SEQ ID NO: 74408 - DNA, 201 bp, Homo sapiens; identical to SEQ ID NO: 74258

SEQ ID NO: 74409 - DNA, 113 bp, Homo sapiens; identical to SEQ ID NO: 74259

SEQ ID NO: 74410 - DNA, 201 bp, Homo sapiens; identical to SEQ ID NO: 74260

SEQ ID NO: 74411 - DNA, 201 bp, Homo sapiens; identical to SEQ ID NO: 74261

SEQ ID NO: 74412 - DNA, 159 bp, Homo sapiens
gggtaactcattcgactgtggagttcttttaattcttatgaaagatttcaaatcctctrgaagccaaaatgggacacagtaaacagattcgaattttacttctgaacgaaatggagaaactggaaaagaccctcttcagacttgaacaagaaactgggt

SEQ ID NO: 74413 - DNA, 201 bp, Homo sapiens; identical to SEQ ID NO: 74263

SEQ ID NO: 74414 - DNA, 201 bp, Homo sapiens
ctgaaagtactgggattacaagcataagccaccgggcatggccccaattctgagcattaatttatttattgggtatgagctacagttccgattaggcccarctttacagggaaaagcagttaccgtgtatacaaattacccatttcctggagaaacatttaatagagaaaaattccgttctctggattgggaaaatccaac

SEQ ID NO: 74415 - DNA, 201 bp, Homo sapiens; identical to SEQ ID NO: 74265

SEQ ID NO: 74416 - DNA, 201 bp, Homo sapiens; identical to SEQ ID NO: 74266

SEQ ID NO: 74417 - DNA, 201 bp, Homo sapiens; identical to SEQ ID NO: 74267

SEQ ID NO: 74418 - DNA, 201 bp, Homo sapiens; identical to SEQ ID NO: 74268

SEQ ID NO: 74419 - DNA, 201 bp, Homo sapiens; identical to SEQ ID NO: 74269

SEQ ID NO: 74420 - DNA, 201 bp, Homo sapiens; identical to SEQ ID NO: 74270

SEQ ID NO: 74421 - DNA, 201 bp, Homo sapiens; identical to SEQ ID NO: 74240

SEQ ID NO: 74422 - DNA, 201 bp, Homo sapiens; identical to SEQ ID NO: 74241

SEQ ID NO: 74423 - DNA, 201 bp, Homo sapiens; identical to SEQ ID NO: 74242

SEQ ID NO: 74424 - DNA, 201 bp, Homo sapiens; identical to SEQ ID NO: 74243

SEQ ID NO: 74425 - DNA, 201 bp, Homo sapiens; identical to SEQ ID NO: 74244

SEQ ID NO: 74426 - DNA, 201 bp, Homo sapiens; identical to SEQ ID NO: 74245

SEQ ID NO: 74427 - DNA, 201 bp, Homo sapiens; identical to SEQ ID NO: 74246

SEQ ID NO: 74428 - DNA, 201 bp, Homo sapiens; identical to SEQ ID NO: 74247

SEQ ID NO: 74429 - DNA, 201 bp, Homo sapiens; identical to SEQ ID NO: 74248

SEQ ID NO: 74430 - DNA, 201 bp, Homo sapiens; identical to SEQ ID NO: 74310

SEQ ID NO: 74431 - DNA, 201 bp, Homo sapiens; identical to SEQ ID NO: 74249

SEQ ID NO: 74432 - DNA, 201 bp, Homo sapiens; identical to SEQ ID NO: 74251

SEQ ID NO: 74433 - DNA, 201 bp, Homo sapiens; identical to SEQ ID NO: 74253

SEQ ID NO: 74434 - DNA, 201 bp, Homo sapiens; identical to SEQ ID NO: 74254

SEQ ID NO: 74435 - DNA, 201 bp, Homo sapiens; identical to SEQ ID NO: 74255

SEQ ID NO: 74436 - DNA, 201 bp, Homo sapiens; identical to SEQ ID NO: 74256

SEQ ID NO: 74437 - DNA, 162 bp, Homo sapiens; identical to SEQ ID NO: 74257

SEQ ID NO: 74438 - DNA, 113 bp, Homo sapiens; identical to SEQ ID NO: 74259

SEQ ID NO: 74439 - DNA, 201 bp, Homo sapiens; identical to SEQ ID NO: 74258

SEQ ID NO: 74440 - DNA, 201 bp, Homo sapiens; identical to SEQ ID NO: 74260

SEQ ID NO: 74441 - DNA, 201 bp, Homo sapiens; identical to SEQ ID NO: 74261

SEQ ID NO: 74442 - DNA, 201 bp, Homo sapiens; identical to SEQ ID NO: 74263

SEQ ID NO: 74443 - DNA, 201 bp, Homo sapiens; identical to SEQ ID NO: 74266

SEQ ID NO: 74444 - DNA, 201 bp, Homo sapiens; identical to SEQ ID NO: 74265

SEQ ID NO: 74445 - DNA, 201 bp, Homo sapiens; identical to SEQ ID NO: 74325

SEQ ID NO: 74446 - DNA, 201 bp, Homo sapiens; identical to SEQ ID NO: 74267

SEQ ID NO: 74447 - DNA, 201 bp, Homo sapiens; identical to SEQ ID NO: 74268

SEQ ID NO: 74448 - DNA, 201 bp, Homo sapiens; identical to SEQ ID NO: 74269

SEQ ID NO: 74449 - DNA, 201 bp, Homo sapiens; identical to SEQ ID NO: 74270

SEQ ID NO: 74450 - DNA, 201 bp, Homo sapiens; identical to SEQ ID NO: 74240

SEQ ID NO: 74451 - DNA, 201 bp, Homo sapiens; identical to SEQ ID NO: 74241

SEQ ID NO: 74452 - DNA, 201 bp, Homo sapiens; identical to SEQ ID NO: 74242

SEQ ID NO: 74453 - DNA, 201 bp, Homo sapiens; identical to SEQ ID NO: 74243

SEQ ID NO: 74454 - DNA, 201 bp, Homo sapiens; identical to SEQ ID NO: 74244

SEQ ID NO: 74455 - DNA, 201 bp, Homo sapiens; identical to SEQ ID NO: 74245

SEQ ID NO: 74456 - DNA, 201 bp, Homo sapiens; identical to SEQ ID NO: 74246

SEQ ID NO: 74457 - DNA, 201 bp, Homo sapiens; identical to SEQ ID NO: 74247

SEQ ID NO: 74458 - DNA, 201 bp, Homo sapiens; identical to SEQ ID NO: 74248

SEQ ID NO: 74459 - DNA, 201 bp, Homo sapiens; identical to SEQ ID NO: 74280

SEQ ID NO: 74460 - DNA, 201 bp, Homo sapiens
aaacacacttcgaacatgggtaactcattcgactgtggagttcttttaattcttatgaaagatttcaaatcctctagaagccaaaatgggacacagtaaayagattcgaattttacttctgaacgaaatggagaaactggaaaagaccctcttcagacttgaacaagggtatgagctacagttccgattaggcccaacttt

SEQ ID NO: 74461 - DNA, 201 bp, Homo sapiens; identical to SEQ ID NO: 74251

SEQ ID NO: 74462 - DNA, 201 bp, Homo sapiens; identical to SEQ ID NO: 74253

SEQ ID NO: 74463 - DNA, 201 bp, Homo sapiens; identical to SEQ ID NO: 74254

SEQ ID NO: 74464 - DNA, 201 bp, Homo sapiens; identical to SEQ ID NO: 74255

SEQ ID NO: 74465 - DNA, 201 bp, Homo sapiens; identical to SEQ ID NO: 74256

SEQ ID NO: 74466 - DNA, 162 bp, Homo sapiens; identical to SEQ ID NO: 74257

SEQ ID NO: 74467 - DNA, 201 bp, Homo sapiens; identical to SEQ ID NO: 74258

SEQ ID NO: 74468 - DNA, 113 bp, Homo sapiens; identical to SEQ ID NO: 74259

SEQ ID NO: 74469 - DNA, 201 bp, Homo sapiens; identical to SEQ ID NO: 74260

SEQ ID NO: 74470 - DNA, 201 bp, Homo sapiens; identical to SEQ ID NO: 74261

SEQ ID NO: 74471 - DNA, 201 bp, Homo sapiens
ctctttcattgctctgctaggcataaaacacacttcgaacatgggtaactcattcgactgtggagttcttttaattcttatgaaagatttcaaatcctctrgaagccaaaatgggacacagtaaacagattcgaattttacttctgaacgaaatggagaaactggaaaagaccctcttcagacttgaacaagggtatgagc

SEQ ID NO: 74472 - DNA, 201 bp, Homo sapiens; identical to SEQ ID NO: 74263

SEQ ID NO: 74473 - DNA, 201 bp, Homo sapiens; identical to SEQ ID NO: 74264

SEQ ID NO: 74474 - DNA, 201 bp, Homo sapiens; identical to SEQ ID NO: 74265

SEQ ID NO: 74475 - DNA, 201 bp, Homo sapiens; identical to SEQ ID NO: 74266

SEQ ID NO: 74476 - DNA, 201 bp, Homo sapiens; identical to SEQ ID NO: 74267

SEQ ID NO: 74477 - DNA, 201 bp, Homo sapiens; identical to SEQ ID NO: 74268

SEQ ID NO: 74478 - DNA, 201 bp, Homo sapiens; identical to SEQ ID NO: 74269

SEQ ID NO: 74479 - DNA, 201 bp, Homo sapiens; identical to SEQ ID NO: 74270

SEQ ID NO: 74480 - DNA, 201 bp, Homo sapiens
tgttctgggcggaggggccatctgcatggaacttctcaccaaacagggctggagcagtgcctactccatagagtcagtgatcatgcagatcagtgccacaytggtgaaggggaaagcacgagtgcagtttggagccaacaaatctcaatacagtctgacaagagcacagcagtcctacaagtccttggtgcagatccacga

SEQ ID NO: 74481 - DNA, 201 bp, Homo sapiens
cttgctggaacccttgctagcaggcattcttataaaagaaactttcgagcctccttatattgctggaaactcagctgtgctccagactagagcctccttayctatgctatggatttttaatttattttctcttatttcatgtacactgctttttttggttacagtgtatgatggatgtgtatgaaaaaaatgtatctttgg

SEQ ID NO: 74482 - DNA, 201 bp, Homo sapiens; identical to SEQ ID NO: 74480

SEQ ID NO: 74483 - DNA, 201 bp, Homo sapiens; identical to SEQ ID NO: 74481

SEQ ID NO: 74484 - DNA, 201 bp, Homo sapiens
cggatccggagttacctgagggaggtgagctcctacccctccacggtgggtgcggaggctcaggaggaattcctgcgggtcctcggctccatgtgccagargctccggtccatgcagtacaatggcagctacttcgacagaggagccaagggcggcagccgcctctgcacaccggaaggctggttctcctgccagggtccc

SEQ ID NO: 74485 - DNA, 201 bp, Homo sapiens
gcttggagtcccgatttcagagcaagtctggctatctgagatacagctgtgagagccggatccggagttacctgagggaggtgagctcctacccctccacrgtgggtgcggaggctcaggaggaattcctgcgggtcctcggctccatgtgccagaagctccggtccatgcagtacaatggcagctacttcgacagaggag

SEQ ID NO: 74486 - DNA, 201 bp, Homo sapiens
gcacccggcctgtgccagcttgcagagctcaccaggtgcagacccctgcggccagggcgaggacggatctgagcagctgggcagcaggtgccaccgcctgygggacccagagggcttgaggacatctgcaatgctccagaagcccaagagcgtgaagctgcgggccctgcgcagcccgaggaagttcggcgtggctggccg

SEQ ID NO: 74487 - DNA, 201 bp, Homo sapiens
cgggatcggcacccggcctgtgccagcttgcagagctcaccaggtgcagacccctgcggccagggcgaggacggatctgagcagctgggcagcaggtgccrccgcctgcgggacccagagggcttgaggacatctgcaatgctccagaagcccaagagcgtgaagctgcgggccctgcgcagcccgaggaagttcggcgtg

SEQ ID NO: 74488 - DNA, 201 bp, Homo sapiens; identical to SEQ ID NO: 74486

SEQ ID NO: 74489 - DNA, 201 bp, Homo sapiens; identical to SEQ ID NO: 74487

SEQ ID NO: 74490 - DNA, 201 bp, Homo sapiens
actgggagtatttttatggcctgctttttacctcagagaacctaaaactagtgcacattgtctgccataagaaaaccacccacaagctcaactgtgacccragcagaatctacaaaccccagacaaggttgaagcggaagcagcctgtgcggaaacgccagtgacacgtacacaccacgtcctggtctttgtttgaggcct

SEQ ID NO: 74491 - DNA, 201 bp, Homo sapiens; identical to SEQ ID NO: 74484

SEQ ID NO: 74492 - DNA, 201 bp, Homo sapiens; identical to SEQ ID NO: 74485

SEQ ID NO: 74493 - DNA, 201 bp, Homo sapiens
cgtgtgggtggcgggtgcacagagacggtctggaaggaaacacgcggatctgaacagcagtaatcctgggggatacgggggttgggctagattacagaggrctcattttctacgtcatgtattttatgatacttgaattttttgaaatgggcatttattttataacatgttaaaatgtactttttaaattaagtcattttg

SEQ ID NO: 74494 - DNA, 201 bp, Homo sapiens
ccctgctccgttggtcagcgttactatcatctcggatcatatggagctcatgtcagccgtgtgggtggcgggtgcacagagacggtctggaaggaaacacrcggatctgaacagcagtaatcctgggggatacgggggttgggctagattacagagggctcattttctacgtcatgtattttatgatacttgaattttttg

SEQ ID NO: 74495 - DNA, 201 bp, Homo sapiens
tggggttttttttgttgttttgttttgttttgtagatggatgcagtgatgcaatcttggctcactgcaacctccgcctctcaggttcaagtggttctcctkcctcagcctcccaagtagctgggattacaggcacctaccaccagggccagctaatttttgtatgtttagtagaaacggggtttcaccatgttggccaggc

SEQ ID NO: 74496 - DNA, 201 bp, Homo sapiens; identical to SEQ ID NO: 74486

SEQ ID NO: 74497 - DNA, 201 bp, Homo sapiens; identical to SEQ ID NO: 74487

SEQ ID NO: 74498 - DNA, 201 bp, Homo sapiens; identical to SEQ ID NO: 74486

SEQ ID NO: 74499 - DNA, 201 bp, Homo sapiens; identical to SEQ ID NO: 74487

SEQ ID NO: 74500 - DNA, 166 bp, Homo sapiens
cgaggatggcacggagctgacggaagattacttccccagtgttcccgacaacgccgagctggtgctgctcaccttgggccaggcctggcagggctggtttygccatgtttcccaggatagtctcacactcctgggctcaagctgtcctcctgccttggtctcctaa

SEQ ID NO: 74501 - DNA, 201 bp, Homo sapiens; identical to SEQ ID NO: 74486

SEQ ID NO: 74502 - DNA, 201 bp, Homo sapiens; identical to SEQ ID NO: 74487

SEQ ID NO: 74503 - DNA, 201 bp, Homo sapiens; identical to SEQ ID NO: 74486

SEQ ID NO: 74504 - DNA, 201 bp, Homo sapiens; identical to SEQ ID NO: 74487

SEQ ID NO: 74505 - DNA, 201 bp, Homo sapiens; identical to SEQ ID NO: 74490

SEQ ID NO: 74506 - DNA, 201 bp, Homo sapiens; identical to SEQ ID NO: 74484

SEQ ID NO: 74507 - DNA, 201 bp, Homo sapiens; identical to SEQ ID NO: 74485

SEQ ID NO: 74508 - DNA, 201 bp, Homo sapiens; identical to SEQ ID NO: 74493

SEQ ID NO: 74509 - DNA, 201 bp, Homo sapiens; identical to SEQ ID NO: 74494

SEQ ID NO: 74510 - DNA, 201 bp, Homo sapiens
ttgtttgagacagggtctcactctgtcgctcaggctggagtgcagtgatgcaatcttggctcactgcaacctccgcctctcaggttcaagtggttctcctkcctcagcctcccaagtagctgggattacaggcacctaccaccagggccagctaatttttgtatgtttagtagaaacggggtttcaccatgttggccaggc

SEQ ID NO: 74511 - DNA, 201 bp, Homo sapiens
caggccttctggccgtgcccatgccccttgggtgcctggggcagaggggtggaatacgttggggtgccccacgatagctgtggggggggctcttagtgcargatcctgtggattagaaacaagttgctcctcagagctctcaagcagggactgctctttaggaaggggagcagcggctgggagtgagcagggcagggtggg

SEQ ID NO: 74512 - DNA, 201 bp, Homo sapiens
cctgcctgtacgagagcggggccaggacctcctatgatgagatttccttttgtacattctccctgcgtgaggtcctggagaacgtgcccgccagccccaarccgcccaaccttggggacaagcctcgggggtgctgctggccctcctgacaggccttctggccgtgcccatgccccttgggtgcctggggcagaggggtgg

SEQ ID NO: 74513 - DNA, 201 bp, Homo sapiens
acgccggcctctcgtggggcagcgcccgggacctcaccgaggaggccatcggtggtgccgtgcaggactgggccacattcgctgtgggtcccggccacggygtgcagctgccctcaggccgcctgctggtacccgcctacacctaccgcgtggaccgccgagagtgttttggcaagatctgccggaccagccctcactcct

SEQ ID NO: 74514 - DNA, 201 bp, Homo sapiens
gggctcggctacacatgggtatccgcctgagccagtccccgctggacccgcgcagctggacagagccctgggtgatctacgagggccccagcggctactcygacctggcgtccatcgggccggctcctgaggggggcctggtttttgcctgcctgtacgagagcggggccaggacctcctatgatgagatttccttttgta

SEQ ID NO: 74515 - DNA, 201 bp, Homo sapiens
gcctcgggggtgctgctggccctcctgacaggccttctggccgtgcccatgccccttgggtgcctggggcagaggggtggaatacgttggggtgccccacratagctgtggggggggctcttagtgcaggatcctgtggattagaaacaagttgctcctcagagctctcaagcagggactgctctttaggaaggggagcag

SEQ ID NO: 74516 - DNA, 168 bp, Homo sapiens
ggcgaggcagccacccatgatgagctctgcagccttcccaaggtggctgccccgcatccaggtgcccygtgtgcccggcctgggcggctggccgtggatctgaccgctcctgcatggtggaggaccagcgttcccactgtctgcagctgtgccacctccctgtgccgg

SEQ ID NO: 74517 - DNA, 201 bp, Homo sapiens
gcctgagccagtccccgctggacccgcgcagctggacagagccctgggtgatctacgagggccccagcggctactccgacctggcgtccatcgggccggcycctgaggggggcctggtttttgcctgcctgtacgagagcggggccaggacctcctatgatgagatttccttttgtacattctccctgcgtgaggtcctgg

SEQ ID NO: 74518 - DNA, 201 bp, Homo sapiens
atcgggccggctcctgaggggggcctggtttttgcctgcctgtacgagagcggggccaggacctcctatgatgagatttccttttgtacattctccctgcrtgaggtcctggagaacgtgcccgccagccccaaaccgcccaaccttggggacaagcctcgggggtgctgctggccctcctgacaggccttctggccgtgc

SEQ ID NO: 74519 - DNA, 201 bp, Homo sapiens; identical to SEQ ID NO: 74511

SEQ ID NO: 74520 - DNA, 201 bp, Homo sapiens; identical to SEQ ID NO: 74512

SEQ ID NO: 74521 - DNA, 201 bp, Homo sapiens; identical to SEQ ID NO: 74513

SEQ ID NO: 74522 - DNA, 201 bp, Homo sapiens
cctctgggaggtcaactgcggcctcacagctgggcctgtcccagcacagcccttgttggagggcgcacccccgtctcctcagcaccccagtgttgagtgcmttgacctgcagaggggagcctgtgctggtcccgggcgtctgtgtggctcctgggtgcccatctgcacccctggccctgctctgggcttcagtggagccgt

SEQ ID NO: 74523 - DNA, 201 bp, Homo sapiens
cgtctctggagcagcagacccgtgtccctctgggaggtcaactgcggcctcacagctgggcctgtcccagcacagcccttgttggagggcgcacccccgtstcctcagcaccccagtgttgagtgcattgacctgcagaggggagcctgtgctggtcccgggcgtctgtgtggctcctgggtgcccatctgcacccctggc

SEQ ID NO: 74524 - DNA, 122 bp, Homo sapiens
agcccagcgaggcctgtgctgygaggggctgtgctgtgccaggggaggccccgcacccgggaagcccagaggagagtgtgcactcacggagccctcctggcagggccgcgtctctggagcag

SEQ ID NO: 74525 - DNA, 201 bp, Homo sapiens; identical to SEQ ID NO: 74514

SEQ ID NO: 74526 - DNA, 201 bp, Homo sapiens
aactgcggcctcacagctgggcctgtcccagcacagcccttgttggagggcgcacccccgtctcctcagcaccccagtgttgagtgcattgacctgcagasgggagcctgtgctggtcccgggcgtctgtgtggctcctgggtgcccatctgcacccctggccctgctctgggcttcagtggagccgtgccaccgtgggag

SEQ ID NO: 74527 - DNA, 201 bp, Homo sapiens; identical to SEQ ID NO: 74515

SEQ ID NO: 74528 - DNA, 201 bp, Homo sapiens; identical to SEQ ID NO: 74517

SEQ ID NO: 74529 - DNA, 201 bp, Homo sapiens; identical to SEQ ID NO: 74518

SEQ ID NO: 74530 - DNA, 201 bp, Homo sapiens; identical to SEQ ID NO: 74514

SEQ ID NO: 74531 - DNA, 201 bp, Homo sapiens; identical to SEQ ID NO: 74511

SEQ ID NO: 74532 - DNA, 201 bp, Homo sapiens; identical to SEQ ID NO: 74512

SEQ ID NO: 74533 - DNA, 201 bp, Homo sapiens; identical to SEQ ID NO: 74513

SEQ ID NO: 74534 - DNA, 201 bp, Homo sapiens; identical to SEQ ID NO: 74517

SEQ ID NO: 74535 - DNA, 201 bp, Homo sapiens; identical to SEQ ID NO: 74515

SEQ ID NO: 74536 - DNA, 201 bp, Homo sapiens; identical to SEQ ID NO: 74518

SEQ ID NO: 74537 - DNA, 201 bp, Homo sapiens
ggtacagctatgggccagatggtggaggggagggtggggacccctgccggcaagcagagtgtcacagctggctttcctcacttgggaaaagggtactgccrgtctagcagcctcctctgtactcagccaggacacccagcgcgtgggacctgtttgtgtctgttttgcttccttgggaacggcacagtcactcaccctgcc

SEQ ID NO: 74538 - DNA, 201 bp, Homo sapiens
tcaaattcagccattcagttgtaaagttgggaagaagtttcttgacaagactctgcaattaaatgcttaaaatttggaggggatccttccttgattacatsaagtatgttggtacatgggtttatacaagttcctcttgagaaggcaaaaagaccaccatgtgtgagagctctttgacttggccaataggggcctatctta

SEQ ID NO: 74539 - DNA, 201 bp, Homo sapiens
ttgtttccattttctgtctgtgcttctgtcagaaacttgctaggactttagtggccaataaaaaagaaattcctaatttcaaccttatccaaggattgtgrgtttttacttatttgtttgtctcaccagttgagaaactccagtactggtcacctatcctgataaatctgcctttcagaaaacctgcaagggctgtttttc

SEQ ID NO: 74540 - DNA, 201 bp, Homo sapiens
agagggtgggtgggaaaagaattgtctgttaaagctgcactataatttggtatctacattttatcacacaaaggaacctccccttttgacaacaactgggytaggcagctgttaatcacaacatttgtgcatcacttgtgccaagtgagaaaatgttctaaaatcacaagagagaacagtgccagaatgaaactgacccta

SEQ ID NO: 74541 - DNA, 201 bp, Homo sapiens
agatgagggtctacaacaacaccctcacgtacggagaggtgagaaacagcaaagccagtgcctactgtctggaccagggagcggaggacggcgaccgggcratcctctacccctgccacgggatgtcctcccagctggtgcggtacagcgctgacggcctgctgcagctggggcctctgggctccacagccttcttgcagt

SEQ ID NO: 74542 - DNA, 201 bp, Homo sapiens
acccggagatgagggtctacaacaacaccctcacgtacggagaggtgagaaacagcaaagccagtgcctactgtctggaccagggagcggaggacggcgaycgggcgatcctctacccctgccacgggatgtcctcccagctggtgcggtacagcgctgacggcctgctgcagctggggcctctgggctccacagccttct

SEQ ID NO: 74543 - DNA, 201 bp, Homo sapiens
gggtgtggcagtgtggcggcagcatggaggtgctgccctgctcccgcgtggcccacatcgagcgcaccaggaagccctacaacaacgacattgactactaygccaagcgcaacgccctgcgcgccgccgaggtgtggatggatgacttcaagtcccacgtgtacatggcctggaacatccccatgtcgaacccaggggtgg

SEQ ID NO: 74544 - DNA, 201 bp, Homo sapiens
tggagaacgtgtacccggagatgagggtctacaacaacaccctcacgtacggagaggtgagaaacagcaaagccagtgcctactgtctggaccagggagcrgaggacggcgaccgggcgatcctctacccctgccacgggatgtcctcccagctggtgcggtacagcgctgacggcctgctgcagctggggcctctgggct

SEQ ID NO: 74545 - DNA, 201 bp, Homo sapiens
tcaaacacgcacggcactgaccccacctccgcccggacccccacagacctcgggaaggcgctgggccgagccagtgtggctgagtgaccggggtgtgcccrgcagacacagcaggacagggctctatgtgcggccaggacagcagaggctgaggggccggggtgtggctgagtgaccagggtgtcacccactgcatctgga

SEQ ID NO: 74546 - DNA, 201 bp, Homo sapiens
gctggggcctctgggctccacagccttcttgcagtggccccattgtgagccgggccacgggccgctgcctggaggtggagatgtccaaagatgccaacttygggctccggctggtggtacagaggtgctcggggcagaagtggatgatcagaaactggatcaaacacgcacggcactgaccccacctccgcccggaccccc

SEQ ID NO: 74547 - DNA, 201 bp, Homo sapiens
catggaggtgctgccctgctcccgcgtggcccacatcgagcgcaccaggaagccctacaacaacgacattgactactacgccaagcgcaacgccctgcgcrccgccgaggtgtggatggatgacttcaagtcccacgtgtacatggcctggaacatccccatgtcgaacccaggggtggacttcggggacgtgtctgagag

SEQ ID NO: 74548 - DNA, 201 bp, Homo sapiens
agtcgtcggcttctttgatgcccacgtcgagttcaacacgggctgggccgagcccgcactgtcgcggatccgagaggaccggcgtcgcatcgtgctgccakccatcgacaacatcaagtacagcacgtttgaggtgcagcagtatgcgaacgccgcccatggctacaactggggcctctggtgcatgtacatcatcccccc

SEQ ID NO: 74549 - DNA, 201 bp, Homo sapiens
cccagaactacatccgctttgtggagaatcacgtgggagtcgcagtcaaatgggttggtgttggcaagtcaagagagtcgatgatccagctgttttagtcrcagactgagctgatcccaacaggccctggcagcgtctggacttgtgtaaacagcagcagtcacgttcctcggccgccacaaccaacaccaaagcaggaaa

SEQ ID NO: 74550 - DNA, 201 bp, Homo sapiens
tgggagtcgcagtcaaatgggttggtgttggcaagtcaagagagtcgatgatccagctgttttagtcgcagactgagctgatcccaacaggccctggcagygtctggacttgtgtaaacagcagcagtcacgttcctcggccgccacaaccaacaccaaagcaggaaaaccattttctgtacttttatatttctgttcaac

SEQ ID NO: 74551 - DNA, 201 bp, Homo sapiens
taggcaccaccaagaagggaatcggaccaacctactcttccaaagctgcccggacaggcctccgcatctgcgacctcctgtcagattttgatgagttttcytccagattcaagaacctggcccaccagcaccagtcgatgttccccaccctggaaatagacattgaaggccaactcaaaaggctcaagggctttgctgagc

SEQ ID NO: 74552 - DNA, 201 bp, Homo sapiens
atgctcacatggtcaacggattcactgcgctggccctgacgaagctggacatcctggacgtactgggtgaggttaaagtcggtgtctcatacaagctgaaygggaaaaggattccctatttcccagctaaccaggagatgcttcagaaggtcgaagttgagtatgaaacgctgcctgggtggaaagcagacaccacaggcg

SEQ ID NO: 74553 - DNA, 201 bp, Homo sapiens
ctcttcgcactccaggtctcagacaggagtcactcgcctcttcgtgccacgcccacgtctaagccgggtggaacaggccctgtgaggatggtcctggtgtccctcgtgctcgtgggctcggtccagctctccagggccccagtcagccctggctcctgctctcctgcagctggggcgacttccgacgaggcactcttgtcc

SEQ ID NO: 74554 - DNA, 201 bp, Homo sapiens
tttacgtcctcatcgagacttcaggctccaacgcaggccatgacgctgagaagctgggccacttcctggagcacgcgctgggctccggcctggtgaccgaygggaccatggccaccgaccagaggaaagtcaagatgctgtgggccctgagggaaaggatcacagaggcgctgagccgggatggctacgtgtacaagtacg

SEQ ID NO: 74555 - DNA, 201 bp, Homo sapiens
gcacctgcaaggggatgctgggtgagatcctgtctgcattcgagttcatggatgctgtgtgcatgcagctggtcgggcgccatctccacctggccagcccrgtgcaagagagtccgttttacgtcctcatcgagacttcaggctccaacgcaggccatgacgctgagaagctgggccacttcctggagcacgcgctgggct

SEQ ID NO: 74556 - DNA, 166 bp, Homo sapiens
aagaacgtgcggtgctgcgggcgagggccccggcacggacaagggccactgcagagtgtgtttctgctcgtcagctgccctgggcagcggatgggctgggygatgcagctggatgcacatctcattctgtcatgaatgtccagtaaaaatctgaattggttgcaac

SEQ ID NO: 74557 - DNA, 201 bp, Homo sapiens
tgagatcctgtctgcattcgagttcatggatgctgtgtgcatgcagctggtcgggcgccatctccacctggccagcccggtgcaagagagtccgttttacrtcctcatcgagacttcaggctccaacgcaggccatgacgctgagaagctgggccacttcctggagcacgcgctgggctccggcctggtgaccgatgggac

SEQ ID NO: 74558 - DNA, 143 bp, Homo sapiens
agggccccggcacggacaagggccactgcagagtgtgtttctgctcgtcagctgccctgggcagcggatgggctgggcgatgcagctggatgcacatctcrttctgtcatgaatgtccagtaaaaatctgaattggttgcaac

SEQ ID NO: 74559 - DNA, 201 bp, Homo sapiens
gccagcccggtgcaagagagtccgttttacgtcctcatcgagacttcaggctccaacgcaggccatgacgctgagaagctgggccacttcctggagcacgygctgggctccggcctggtgaccgatgggaccatggccaccgaccagaggaaagtcaagatgctgtgggccctgagggaaaggatcacagaggcgctgagc

SEQ ID NO: 74560 - DNA, 201 bp, Homo sapiens
cgcatcctgctcttcgcactccaggtctcagacaggagtcactcgcctcttcgtgccacgcccacgtctaagccgggtggaacaggccctgtgaggatggycctggtgtccctcgtgctcgtgggctcggtccagctctccagggccccagtcagccctggctcctgctctcctgcagctggggcgacttccgacgaggca

SEQ ID NO: 74561 - DNA, 201 bp, Homo sapiens
tggtgctactcagcccccaggtcaggctcttccctcgctcttgatgctcttcagcgtttttttgtttttgtttttgagacagagtctcactcttgtcaccmaggctggagtgcagtggcacaatcttggctcactgaaacctccgcctcctggttcaagcgattctcctgcctcagcctcccaagtagctgggattacagg

SEQ ID NO: 74562 - DNA, 201 bp, Homo sapiens
cactccaactgcagtcacctgtgtgccgcccgcctgtggtcctgggagcccgaggccagcccggctgccgcatcctgctcttcgcactccaggtctcagayaggagtcactcgcctcttcgtgccacgcccacgtctaagccgggtggaacaggccctgtgaggatggtcctggtgtccctcgtgctcgtgggctcggtcc

SEQ ID NO: 74563 - DNA, 201 bp, Homo sapiens
tactctctgggcggcagtgccatctggatcggtggttcctcttcatccaggttttctgtgttctgctctgatcccactccaactgcagtcacctgtgtgcygcccgcctgtggtcctgggagcccgaggccagcccggctgccgcatcctgctcttcgcactccaggtctcagacaggagtcactcgcctcttcgtgccac

SEQ ID NO: 74564 - DNA, 145 bp, Homo sapiens
tgggaccaggtgtgtaccaccatacctggctacatttttaaaatygttttatagagacagggtctcccatgatgcccaggctggtcttgaactcctgagctcaaacaattctcctgccttggcctcccaaagtgctggggctaca

SEQ ID NO: 74565 - DNA, 201 bp, Homo sapiens
ctccccgccctccaccttcagcccctggtggggctcctcaccacctgaccccggaacggctggggcagccttgactgcttctgccgacttactctctgggyggcagtgccatctggatcggtggttcctcttcatccaggttttctgtgttctgctctgatcccactccaactgcagtcacctgtgtgccgcccgcctgtg

SEQ ID NO: 74566 - DNA, 201 bp, Homo sapiens
gggccctgagtaccggccccccaccaaggaggagcccgaggtctccgtcccggcggcgatgctgccccgtcggcctctggcgtggcccgcgtggctgttgsggggtgctccgggagccgcgggttcttggggtcggccggttggccccctggcccgcagaggctgctgctccgccccggggacccccgaggtgccgctgac

SEQ ID NO: 74567 - DNA, 166 bp, Homo sapiens; identical to SEQ ID NO: 74556

SEQ ID NO: 74568 - DNA, 143 bp, Homo sapiens; identical to SEQ ID NO: 74558

SEQ ID NO: 74569 - DNA, 190 bp, Homo sapiens
cgtgccccagggagtttgagcctttgctgaagccacacgtggctgtgaagaaggtcccgtatgtggatgaggaggggaatctggtaaagycgctaaaaccgaacgggataaagatggagaagtttgtgtttgatgtgttccggtttgctaagttagtagtagaactcatttattttccccttcttccttc

SEQ ID NO: 74570 - DNA, 201 bp, Homo sapiens
ggaagtagaggcttgagggagccaagggccccgcgggcaagtctcagggagaagaccagagggtgctcttggccctgagggtaagcagcccctgaggtggrggcatagggagtccttggggctgtggacttgggaggacagtagtgccacctcccggaccttccactgcccccacccatggttaggagaggtctcctggcc

SEQ ID NO: 74571 - DNA, 201 bp, Homo sapiens
gcataccccgaggagcccgtgggcgtggtgtgccaggtggacggtgtcccccaggtggtggagtacagcgagatcagtcctgagaccgcacagctacgtgyctccgacgggagcctgctgtacaatgcaggcaacatctgcaaccacttcttcacccgaggcttccttaaggcggtcaccagggagtttgagcctttgctg

SEQ ID NO: 74572 - DNA, 201 bp, Homo sapiens
cgctcgccaggccctgctcacccagcactaccggtgggctctgcgggccggggcccgcttcctggatgcccatggggcctggctcccagagctgcccagtytcctatcgggactgggggtgctgggggagggctctgggcaggtgctgcaaggagatattgacaagtggactttccctagcttgcccccaaatggagaccc

SEQ ID NO: 74573 - DNA, 201 bp, Homo sapiens
ccagacctgccagccccggcgtcctggagctgggggctacagcccagcctgagctctgggtgggaaagcagcctgccccatgcttccagcctgcagaacamagaatgaaacatgctggtagactccacgagggcagggcctctcctgtcgcctctggacacaagtggcgacagcctgctgggggctctgtggctccattcc

SEQ ID NO: 74574 - DNA, 201 bp, Homo sapiens
cttccttaaggcggtcaccagggagtttgagcctttgctgaagccacacgtggctgtgaagaaggtcccgtatgtggatgaggaggggaatctggtaaagycgctaaaaccgaacgggataaagatggagaagtttgtgtttgatgtgttccggtttgctaagaactttgctgccttggaagtgctgcgggaggaggaatt

SEQ ID NO: 74575 - DNA, 201 bp, Homo sapiens
gaagtgtacctgcaaggccgggagttccagtccccgctcatcctggatgaagaccaggccagggagccgcagctgcaggagtcctgacccgcccagactgyccccagactcccccgagacctgccagccccggcatcctggaagtcccgactccccccagacctgccagccccggcgtcctggagctgggggctacagccc

SEQ ID NO: 74576 - DNA, 201 bp, Homo sapiens
gctgcgcgagcactgccggcgggcggcggaggcctgcgcgcgcccccacggcccgccgcccgacttggccgcgcgcctgcggcccctgcccccagagcgcktgggcagggccagccgcagcgaccccgagacacggcggcgctgggaggaggaaggtttccgtcagatttctctgaacaaggtggccgtcctgctgctggc

SEQ ID NO: 74577 - DNA, 201 bp, Homo sapiens
gctgcttctgggccctacgcgcggcttgcgcaatgccacccagaggatgtttgaaattgactatagccgggactccttcctcaaggatggccagccatttygctacatctcaggaagcattcactactcccgtgtgccccgcttctactggaaggaccggctgctgaagatgaagatggctgggctgaacgccatccagac

SEQ ID NO: 74578 - DNA, 201 bp, Homo sapiens
ggaaaggtcactttggaaaagttaaagacagtgggagcagctctggacattctgtgtccctctgggcccatcaaaagcctttatcccttgacatttatccmggtgaaacagcattatgggtttgtgctgtaccggacaacacttcctcaagattgcagcaacccagcacctctctcttcacccctcaatggagtccacgat

SEQ ID NO: 74579 - DNA, 201 bp, Homo sapiens
aaacaatgtgatcactctgaacataacagggaaagctggagccactctggaccttctggtagagaacatgggacgtgtgaactatggtgcatatatcaacrattttaagggtttggtttctaacctgactctcagttccaatatcctcacggactggacgatctttccactggacactgaggatgcagtgcgcagccacct

SEQ ID NO: 74580 - DNA, 201 bp, Homo sapiens
cgctacatctcaggaagcattcactactcccgtgtgccccgcttctactggaaggaccggctgctgaagatgaagatggctgggctgaacgccatccagaygtatgtgccctggaactttcatgagccctggccaggacagtaccagttttctgaggaccatgatgtggaatattttcttcggctggctcatgagctggga

SEQ ID NO: 74581 - DNA, 201 bp, Homo sapiens
gatcactctgaacataacagggaaagctggagccactctggaccttctggtagagaacatgggacgtgtgaactatggtgcatatatcaacgattttaagkgtttggtttctaacctgactctcagttccaatatcctcacggactggacgatctttccactggacactgaggatgcagtgcgcagccacctggggggctg

SEQ ID NO: 74582 - DNA, 201 bp, Homo sapiens
gtccttagtcaagtgacgcgaagcggccggcctgggcgccgactgcagagccgggaggctggtggtcatgccggggttcctggttcgcatcctccctctgytgctggttctgctgcttctgggccctacgcgcggcttgcgcaatgccacccagaggatgtttgaaattgactatagccgggactccttcctcaaggatgg

SEQ ID NO: 74583 - DNA, 201 bp, Homo sapiens
tcccttgacatttatccaggtgaaacagcattatgggtttgtgctgtaccggacaacacttcctcaagattgcagcaacccagcacctctctcttcacccytcaatggagtccacgatcgagcatatgttgctgtggatgggatcccccagggagtccttgagcgaaacaatgtgatcactctgaacataacagggaaagc

SEQ ID NO: 74584 - DNA, 201 bp, Homo sapiens
ctacatctcaggaagcattcactactcccgtgtgccccgcttctactggaaggaccggctgctgaagatgaagatggctgggctgaacgccatccagacgyatgtgccctggaactttcatgagccctggccaggacagtaccagttttctgaggaccatgatgtggaatattttcttcggctggctcatgagctgggact

SEQ ID NO: 74585 - DNA, 201 bp, Homo sapiens
agggaaagctggagccactctggaccttctggtagagaacatgggacgtgtgaactatggtgcatatatcaacgattttaagggtttggtttctaacctgrctctcagttccaatatcctcacggactggacgatctttccactggacactgaggatgcagtgcgcagccacctggggggctggggacaccgtgacagtgg

SEQ ID NO: 74586 - DNA, 201 bp, Homo sapiens
gggactgctggttatcctgaggcccgggccctacatctgtgcagagtgggaaatgggaggattacctgcttggctgctagagaaagagtctattcttctcmgctcctccgacccagattacctggcagctgtggacaagtggttgggagtccttctgcccaagatgaagcctctcctctatcagaatggagggccagttat

SEQ ID NO: 74587 - DNA, 201 bp, Homo sapiens
ctgggcccacaactcatccaactacacgctcccggccttttatatggggaacttctccattcccagtgggatcccagacttgccccaggacacctttatcyagtttcctggatggaccaagggccaggtctggattaatggctttaaccttggccgctattggccagcccggggccctcagttgaccttgtttgtgcccca

SEQ ID NO: 74588 - DNA, 201 bp, Homo sapiens
gtagagaacatgggacgtgtgaactatggtgcatatatcaacgattttaagggtttggtttctaacctgactctcagttccaatatcctcacggactggamgatctttccactggacactgaggatgcagtgcgcagccacctggggggctggggacaccgtgacagtggccaccatgatgaagcctgggcccacaactca

SEQ ID NO: 74589 - DNA, 201 bp, Homo sapiens
atgtggggccctgcagggcctctacaccacggtggactttggaacaggcagcaacatcacagatgctttcctaagccagaggaagtgtgagcccaaaggayccttgatcaattctgaattctatactggctggctagatcactggggccaacctcactccacaatcaagaccgaagcagtggcttcctccctctatgatat

SEQ ID NO: 74590 - DNA, 201 bp, Homo sapiens
ctgcagggcctctacaccacggtggactttggaacaggcagcaacatcacagatgctttcctaagccagaggaagtgtgagcccaaaggacccttgatcarttctgaattctatactggctggctagatcactggggccaacctcactccacaatcaagaccgaagcagtggcttcctccctctatgatatacttgcccgt

SEQ ID NO: 74591 - DNA, 201 bp, Homo sapiens
ctacaccacggtggactttggaacaggcagcaacatcacagatgctttcctaagccagaggaagtgtgagcccaaaggacccttgatcaattctgaattckatactggctggctagatcactggggccaacctcactccacaatcaagaccgaagcagtggcttcctccctctatgatatacttgcccgtggggcgagtgt

SEQ ID NO: 74592 - DNA, 201 bp, Homo sapiens
ggactggacgatctttccactggacactgaggatgcagtgcgcagccacctggggggctggggacaccgtgacagtggccaccatgatgaagcctgggccyacaactcatccaactacacgctcccggccttttatatggggaacttctccattcccagtgggatcccagacttgccccaggacacctttatccagtttcc

SEQ ID NO: 74593 - DNA, 201 bp, Homo sapiens
tgggctgaacgccatccagacgtatgtgccctggaactttcatgagccctggccaggacagtaccagttttctgaggaccatgatgtggaatattttcttyggctggctcatgagctgggactgctggttatcctgaggcccgggccctacatctgtgcagagtgggaaatgggaggattacctgcttggctgctagagaa

SEQ ID NO: 74594 - DNA, 201 bp, Homo sapiens
tcagaatggagggccagttataacagtgcaggttgaaaatgaatatggcagctactttgcctgtgattttgactacctgcgcttcctgcagaagcgctttygccaccatctgggggatgatgtggttctgtttaccactgatggagcacataaaacattcctgaaatgtggggccctgcagggcctctacaccacggtgga

SEQ ID NO: 74595 - DNA, 201 bp, Homo sapiens
atatatcaacgattttaagggtttggtttctaacctgactctcagttccaatatcctcacggactggacgatctttccactggacactgaggatgcagtgygcagccacctggggggctggggacaccgtgacagtggccaccatgatgaagcctgggcccacaactcatccaactacacgctcccggccttttatatggg

SEQ ID NO: 74596 - DNA, 178 bp, Homo sapiens
tagtgatttttattttggaagaatcatgttacctttttgttaaataaaatttgtactcaaatgatgatgtcactgtttttaatgtgcaggtattgaattayatggtctgacttaaatcataactagacttgagtgggctgaataaaccacttcactaacttgaagttcaaaaggatgg

SEQ ID NO: 74597 - DNA, 201 bp, Homo sapiens
ctgggccctacgcgcggcttgcgcaatgccacccagaggatgtttgaaattgactatagccgggactccttcctcaaggatggccagccatttcgctacayctcaggaagcattcactactcccgtgtgccccgcttctactggaaggaccggctgctgaagatgaagatggctgggctgaacgccatccagacgtatgtg

SEQ ID NO: 74598 - DNA, 201 bp, Homo sapiens
tggtagagaacatgggacgtgtgaactatggtgcatatatcaacgattttaagggtttggtttctaacctgactctcagttccaatatcctcacggactgkacgatctttccactggacactgaggatgcagtgcgcagccacctggggggctggggacaccgtgacagtggccaccatgatgaagcctgggcccacaact

SEQ ID NO: 74599 - DNA, 201 bp, Homo sapiens
caagatgaagcctctcctctatcagaatggagggccagttataacagtgcaggttgaaaatgaatatggcagctactttgcctgtgattttgactacctgygcttcctgcagaagcgctttcgccaccatctgggggatgatgtggttctgtttaccactgatggagcacataaaacattcctgaaatgtggggccctgca

SEQ ID NO: 74600 - DNA, 201 bp, Homo sapiens
tataacagtgcaggttgaaaatgaatatggcagctactttgcctgtgattttgactacctgcgcttcctgcagaagcgctttcgccaccatctgggggatkatgtggttctgtttaccactgatggagcacataaaacattcctgaaatgtggggccctgcagggcctctacaccacggtggactttggaacaggcagcaa

SEQ ID NO: 74601 - DNA, 201 bp, Homo sapiens
aatgccacccagaggatgtttgaaattgactatagccgggactccttcctcaaggatggccagccatttcgctacatctcaggaagcattcactactcccrtgtgccccgcttctactggaaggaccggctgctgaagatgaagatggctgggctgaacgccatccagacgtatgtgccctggaactttcatgagccctgg

SEQ ID NO: 74602 - DNA, 201 bp, Homo sapiens
catcacagatgctttcctaagccagaggaagtgtgagcccaaaggacccttgatcaattctgaattctatactggctggctagatcactggggccaacctyactccacaatcaagaccgaagcagtggcttcctccctctatgatatacttgcccgtggggcgagtgtgaacttgtacatgtttataggtgggaccaattt

SEQ ID NO: 74603 - DNA, 201 bp, Homo sapiens
ttgaccttgtttgtgccccagcacatcctgatgacctcggccccaaacaccatcaccgtgctggaactggagtgggcaccctgcagcagtgatgatccagractatgtgctgtgacgttcgtggacaggccagttattggctcatctgtgacctacgatcatccctccaaacctgttgaaaaaagactcatgcccccaccc

SEQ ID NO: 74604 - DNA, 201 bp, Homo sapiens
aagatgaagcctctcctctatcagaatggagggccagttataacagtgcaggttgaaaatgaatatggcagctactttgcctgtgattttgactacctgcrcttcctgcagaagcgctttcgccaccatctgggggatgatgtggttctgtttaccactgatggagcacataaaacattcctgaaatgtggggccctgcag

SEQ ID NO: 74605 - DNA, 201 bp, Homo sapiens
gtgcaggttgaaaatgaatatggcagctactttgcctgtgattttgactacctgcgcttcctgcagaagcgctttcgccaccatctgggggatgatgtggytctgtttaccactgatggagcacataaaacattcctgaaatgtggggccctgcagggcctctacaccacggtggactttggaacaggcagcaacatcaca

SEQ ID NO: 74606 - DNA, 201 bp, Homo sapiens; identical to SEQ ID NO: 74577

SEQ ID NO: 74607 - DNA, 201 bp, Homo sapiens; identical to SEQ ID NO: 74578

SEQ ID NO: 74608 - DNA, 130 bp, Homo sapiens
aaacaatgtgatcactctgaacataacagggaaagctggagccactctggaccttctggtagagaacatgggacgtgtgaactatggtgcatatatcaacrattttaaggtaggacaaaccacactgtca

SEQ ID NO: 74609 - DNA, 201 bp, Homo sapiens; identical to SEQ ID NO: 74580

SEQ ID NO: 74610 - DNA, 201 bp, Homo sapiens; identical to SEQ ID NO: 74582

SEQ ID NO: 74611 - DNA, 201 bp, Homo sapiens; identical to SEQ ID NO: 74583

SEQ ID NO: 74612 - DNA, 201 bp, Homo sapiens; identical to SEQ ID NO: 74584

SEQ ID NO: 74613 - DNA, 201 bp, Homo sapiens; identical to SEQ ID NO: 74586

SEQ ID NO: 74614 - DNA, 201 bp, Homo sapiens; identical to SEQ ID NO: 74589

SEQ ID NO: 74615 - DNA, 201 bp, Homo sapiens; identical to SEQ ID NO: 74590

SEQ ID NO: 74616 - DNA, 201 bp, Homo sapiens; identical to SEQ ID NO: 74591

SEQ ID NO: 74617 - DNA, 201 bp, Homo sapiens; identical to SEQ ID NO: 74593

SEQ ID NO: 74618 - DNA, 201 bp, Homo sapiens; identical to SEQ ID NO: 74594

SEQ ID NO: 74619 - DNA, 201 bp, Homo sapiens; identical to SEQ ID NO: 74597

SEQ ID NO: 74620 - DNA, 201 bp, Homo sapiens; identical to SEQ ID NO: 74599

SEQ ID NO: 74621 - DNA, 201 bp, Homo sapiens; identical to SEQ ID NO: 74601

SEQ ID NO: 74622 - DNA, 201 bp, Homo sapiens; identical to SEQ ID NO: 74600

SEQ ID NO: 74623 - DNA, 201 bp, Homo sapiens; identical to SEQ ID NO: 74602

SEQ ID NO: 74624 - DNA, 201 bp, Homo sapiens; identical to SEQ ID NO: 74605

SEQ ID NO: 74625 - DNA, 201 bp, Homo sapiens; identical to SEQ ID NO: 74604

SEQ ID NO: 74626 - DNA, 201 bp, Homo sapiens; identical to SEQ ID NO: 74577

SEQ ID NO: 74627 - DNA, 201 bp, Homo sapiens; identical to SEQ ID NO: 74578

SEQ ID NO: 74628 - DNA, 201 bp, Homo sapiens
ctgggccctacgcgcggcttgcgcaatgccacccagaggatgtttgaaattgactatagccgggactccttcctcaaggatggccagccatttcgctacayctcaggaagcattcactactcccgtgtgccccgcttctactggaaggaccggctgctgaagatgaagatggctgggctgaacgccatccagacattacct

SEQ ID NO: 74629 - DNA, 130 bp, Homo sapiens; identical to SEQ ID NO: 74608

SEQ ID NO: 74630 - DNA, 201 bp, Homo sapiens
cgctacatctcaggaagcattcactactcccgtgtgccccgcttctactggaaggaccggctgctgaagatgaagatggctgggctgaacgccatccagayattacctggcagctgtggacaagtggttgggagtccttctgcccaagatgaagcctctcctctatcagaatggagggccagttataacagtgcaggcagc

SEQ ID NO: 74631 - DNA, 201 bp, Homo sapiens; identical to SEQ ID NO: 74582

SEQ ID NO: 74632 - DNA, 201 bp, Homo sapiens; identical to SEQ ID NO: 74583

SEQ ID NO: 74633 - DNA, 201 bp, Homo sapiens
aatgccacccagaggatgtttgaaattgactatagccgggactccttcctcaaggatggccagccatttcgctacatctcaggaagcattcactactcccrtgtgccccgcttctactggaaggaccggctgctgaagatgaagatggctgggctgaacgccatccagacattacctggcagctgtggacaagtggttggg

SEQ ID NO: 74634 - DNA, 201 bp, Homo sapiens
tgaagcctctcctctatcagaatggagggccagttataacagtgcaggcagcaacatcacagatgctttcctaagccagaggaagtgtgagcccaaaggayccttgatcaattctgaattctatactggctggctagatcactggggccaacctcactccacaatcaagaccgaagcagtggcttcctccctctatgatat

SEQ ID NO: 74635 - DNA, 201 bp, Homo sapiens
cctctatcagaatggagggccagttataacagtgcaggcagcaacatcacagatgctttcctaagccagaggaagtgtgagcccaaaggacccttgatcarttctgaattctatactggctggctagatcactggggccaacctcactccacaatcaagaccgaagcagtggcttcctccctctatgatatacttgcccgt

SEQ ID NO: 74636 - DNA, 201 bp, Homo sapiens
atggagggccagttataacagtgcaggcagcaacatcacagatgctttcctaagccagaggaagtgtgagcccaaaggacccttgatcaattctgaattckatactggctggctagatcactggggccaacctcactccacaatcaagaccgaagcagtggcttcctccctctatgatatacttgcccgtggggcgagtgt

SEQ ID NO: 74637 - DNA, 201 bp, Homo sapiens; identical to SEQ ID NO: 74602

SEQ ID NO: 74638 - DNA, 201 bp, Homo sapiens
ctggccagaccatcagacaccagaatcagctgggcccctgctgcgcctagtggcagaggtggaggagagcccggagacagccgcccaccccgggcctatcrtagtccactgcagtgcagggattggccggacgggctgcttcatcgccacgcgaattggctgtcaacagctgaaagcccgaggagaagtggacattctggg

SEQ ID NO: 74639 - DNA, 196 bp, Homo sapiens
atgccaatgaggctcggtggggggctctcaagtgcctgatcctgccctgggctcagagccagcccagagggaagcaactgcacagccccacaggccctccytggcactgtccccccaaccccatctcagagctcagagggtacaagctccagaacagtaaccaagtgggaaaataaagacttcttggatgactgac

SEQ ID NO: 74640 - DNA, 201 bp, Homo sapiens
ctggttacccttgcctccacccatgtgtcataagagtaggctacagaggtgaccaggcctggcagttgaaatctctggaagagggaacatgtggggactaytcagaggcaaagaggagctgctcctgcctccatggttgctggccactcccaccaactactcttagggaggctaagcagtctctgttttgcttccatggct

SEQ ID NO: 74641 - DNA, 201 bp, Homo sapiens
gaggtgaccaggcctggcagttgaaatctctggaagagggaacatgtggggactactcagaggcaaagaggagctgctcctgcctccatggttgctggccwctcccaccaactactcttagggaggctaagcagtctctgttttgcttccatggctcaaataataccctgggtatgcaggacccactataccttgcatttg

SEQ ID NO: 74642 - DNA, 201 bp, Homo sapiens
cctccaatgtctctctgaacttaaagacaggagctggcatttatgacagacaaagaaagaagcccaggtgtcctggtgttctctgagacactctttgtgakcttcagtttcctgttctataacatgaacataagtgcttagctgccatgagggaaaagtaatgagagaagtttctagaagccactccagccactccttcct

SEQ ID NO: 74643 - DNA, 201 bp, Homo sapiens
accaactactcttagggaggctaagcagtctctgttttgcttccatggctcaaataataccctgggtatgcaggacccactataccttgcatttgctgagwacacctagagagcttggctgtttccaaaaacaatcagggtcataaccatccatgcagacatggaggctcggctgaaccaggactcctcactgtctacctg

SEQ ID NO: 74644 - DNA, 196 bp, Homo sapiens; identical to SEQ ID NO: 74639

SEQ ID NO: 74645 - DNA, 201 bp, Homo sapiens
ccttggtgattcaacacccccgccacctcgcccactgtgaccctggctctgggagatagggactgcccccaagaggagatggtcccaccacctccatgccycctgtcttgcccccagctgtcgcctcaccatgcgctgtcgttcaagggcttggtgaggccatttcctgtgacggttacagaggcgggagacggggggatg

SEQ ID NO: 74646 - DNA, 201 bp, Homo sapiens; identical to SEQ ID NO: 74641

SEQ ID NO: 74647 - DNA, 201 bp, Homo sapiens; identical to SEQ ID NO: 74638

SEQ ID NO: 74648 - DNA, 201 bp, Homo sapiens; identical to SEQ ID NO: 74640

SEQ ID NO: 74649 - DNA, 201 bp, Homo sapiens
cctgtgacggttacagaggcgggagacggggggatgggcaggaggaggaaggaaacacctccagcctacctccctggacagagaccccagaagccagaaayagacctgggagtggaacagcagcagttaggagaggaccctgctggggtccaggagcccgcctgcctggctgcccaaccagctccaacactgctggaggcc

SEQ ID NO: 74650 - DNA, 201 bp, Homo sapiens; identical to SEQ ID NO: 74642

SEQ ID NO: 74651 - DNA, 201 bp, Homo sapiens
gtcccaccacctccatgccccctgtcttgcccccagctgtcgcctcaccatgcgctgtcgttcaagggcttggtgaggccatttcctgtgacggttacagrggcgggagacggggggatgggcaggaggaggaaggaaacacctccagcctacctccctggacagagaccccagaagccagaaacagacctgggagtggaa

SEQ ID NO: 74652 - DNA, 201 bp, Homo sapiens; identical to SEQ ID NO: 74643

SEQ ID NO: 74653 - DNA, 201 bp, Homo sapiens; identical to SEQ ID NO: 74638

SEQ ID NO: 74654 - DNA, 196 bp, Homo sapiens; identical to SEQ ID NO: 74639

SEQ ID NO: 74655 - DNA, 201 bp, Homo sapiens; identical to SEQ ID NO: 74640

SEQ ID NO: 74656 - DNA, 201 bp, Homo sapiens; identical to SEQ ID NO: 74641

SEQ ID NO: 74657 - DNA, 201 bp, Homo sapiens; identical to SEQ ID NO: 74642

SEQ ID NO: 74658 - DNA, 201 bp, Homo sapiens; identical to SEQ ID NO: 74643

SEQ ID NO: 74659 - DNA, 201 bp, Homo sapiens; identical to SEQ ID NO: 74638

SEQ ID NO: 74660 - DNA, 196 bp, Homo sapiens; identical to SEQ ID NO: 74639

SEQ ID NO: 74661 - DNA, 201 bp, Homo sapiens; identical to SEQ ID NO: 74640

SEQ ID NO: 74662 - DNA, 201 bp, Homo sapiens; identical to SEQ ID NO: 74641

SEQ ID NO: 74663 - DNA, 201 bp, Homo sapiens; identical to SEQ ID NO: 74642

SEQ ID NO: 74664 - DNA, 201 bp, Homo sapiens; identical to SEQ ID NO: 74643

SEQ ID NO: 74665 - DNA, 196 bp, Homo sapiens; identical to SEQ ID NO: 74639

SEQ ID NO: 74666 - DNA, 201 bp, Homo sapiens; identical to SEQ ID NO: 74645

SEQ ID NO: 74667 - DNA, 201 bp, Homo sapiens; identical to SEQ ID NO: 74641

SEQ ID NO: 74668 - DNA, 201 bp, Homo sapiens; identical to SEQ ID NO: 74638

SEQ ID NO: 74669 - DNA, 201 bp, Homo sapiens; identical to SEQ ID NO: 74640

SEQ ID NO: 74670 - DNA, 201 bp, Homo sapiens; identical to SEQ ID NO: 74649

SEQ ID NO: 74671 - DNA, 201 bp, Homo sapiens; identical to SEQ ID NO: 74642

SEQ ID NO: 74672 - DNA, 201 bp, Homo sapiens; identical to SEQ ID NO: 74651

SEQ ID NO: 74673 - DNA, 201 bp, Homo sapiens; identical to SEQ ID NO: 74643

SEQ ID NO: 74674 - DNA, 114 bp, Homo sapiens
ctggccagaccatcagacaccagaatcagctgggcccctgctgcgcctagtggcagaggtggaggagagcccggagacagccgcccaccccgggcctatcrtagtccactgcag

SEQ ID NO: 74675 - DNA, 201 bp, Homo sapiens
acgacctcaaacgttgtcagtatgttacagagaaggtcttggctgctgtgtacaaggccctgagtgaccatcatgtatacctggaggggaccctgctcaarcccaacatggtgaccccgggccatgcctgtcccatcaagtataccccagaggagattgccatggcaactgtcactgccctgcgtcgcactgtgcccccag

SEQ ID NO: 74676 - DNA, 201 bp, Homo sapiens
tgagaccctctaccagaaagatgataatggtgttcccttcgtccgaaccatccaggataagggcatcgtcgtgggcatcaaggttgacaagggtgtggtgsctctagctgggactgatggagaaaccaccactcaagggctggatgggctctcagaacgctgtgcccaatacaagaaggatggtgctgactttgccaagtg

SEQ ID NO: 74677 - DNA, 201 bp, Homo sapiens; identical to SEQ ID NO: 74675

SEQ ID NO: 74678 - DNA, 201 bp, Homo sapiens; identical to SEQ ID NO: 74676

SEQ ID NO: 74679 - DNA, 201 bp, Homo sapiens
ctttgggaggcccaggtgggcggatcacctgaggttagaagtttgagaccagcctggccaacatggtgaaacctggcctctactaaaaatacaaaaattasccgggtgtggtggtgggtacctataatcccagctacttgggaggctgaggcaggagaatcgcttgaacctgggaggtggaggttgcagtgagctgagatc

SEQ ID NO: 74680 - DNA, 201 bp, Homo sapiens
aaacctccggtattcacaggcaaagacaaaacagaacccataaaaggctttcaaaaagcaatggtcaagactatgtctgcagccctgaagatacctcattktggttattgtgatgagattgaccttactgaactggttaagctccgagaagaattaaaacccattgcatttgctcgtggaattaaactctcctttatgcct

SEQ ID NO: 74681 - DNA, 201 bp, Homo sapiens
ttcagttcaagctctcagacattggagaagggattagagaagtaactgttaaagaatggtatgtaaaagaaggagatacagtgtctcagtttgatagcatstgtgaagttcaaagtgataaagcttctgttaccatcactagtcgttatgatggagtcattaaaaaactctattataatctagacgatattgcctatgtgg

SEQ ID NO: 74682 - DNA, 201 bp, Homo sapiens
gtagacatagaaacggaagctttaaaagattcagaagaagatgttgttgaaactcctgcagtgtctcatgatgaacatacacaccaagagataaagggccraaaaacactggcaactcctgcagttcgccgtctggcaatggaaaacaatattaagctgagtgaagttgttggctcaggaaaagatggcagaatacttaaa

SEQ ID NO: 74683 - DNA, 201 bp, Homo sapiens
ggaggctgaggcaggagaattgcttgagcccaagaggtggaggttacagtgagcagagatcacaccactgcactccagcctgggtggcagagcaacacttygtctcagaaaaaaaaaaaaaaaccaaaaagccaagtgtggtggtgtgcacctatagtcccagctactcaggaagctgagacaagaggatcaattgagccc

SEQ ID NO: 74684 - DNA, 201 bp, Homo sapiens
tggggaagccattagtagacatagaaacggaagctttaaaagattcagaagaagatgttgttgaaactcctgcagtgtctcatgatgaacatacacaccargagataaagggccgaaaaacactggcaactcctgcagttcgccgtctggcaatggaaaacaatattaagctgagtgaagttgttggctcaggaaaagatg

SEQ ID NO: 74685 - DNA, 201 bp, Homo sapiens
agttgttggctcaggaaaagatggcagaatacttaaagaagatatcctcaactatttggaaaagcagacaggagctatattgcctccttcacccaaagttkaaattatgccacctccaccaaagccaaaagacatgactgttcctatactagtatcaaaacctccggtattcacaggcaaagacaaaacagaacccataaa

SEQ ID NO: 74686 - DNA, 201 bp, Homo sapiens
tgagcagggtttgattgtccctaatgtgaaaaatgttcagatctgctctatatttgacatcgccactgaactgaaccgcctccagaaattgggctctgtgrgtcagctcagcaccactgatcttacaggaggaacatttactctttccaacattggatcaattggtggtacctttgccaaaccagtgataatgccacctga

SEQ ID NO: 74687 - DNA, 201 bp, Homo sapiens
tgaagactgataagacattcttgaactttttgagcttccaaagagtatgtaaaccctagctgtgccagcacatgttcatctttacaatttatattgtaaaygatttgtatcgtatgattaaggatctaaggcacaatatttgtcactgttctattagactttttactgaaaatgaataatggtgtaatggttctcctgggg

SEQ ID NO: 74688 - DNA, 201 bp, Homo sapiens
gctgatcacagagttattgatggtgctacaatgtcacgcttctccaatttgtggaaatcctatttagaaaacccagcttttatgctactagatctgaaatkaagactgataagacattcttgaactttttgagcttccaaagagtatgtaaaccctagctgtgccagcacatgttcatctttacaatttatattgtaaatg

SEQ ID NO: 74689 - DNA, 201 bp, Homo sapiens
gtctgcggttgtcagcccgcgaggcctcggaagaggagctgggcctggtgcacaggcctcccgggcaccatggccagagggcggctgccaacgggttctgygtgttcaacaacgtggccatagcagctgcacatgccaagcagaaacacgggctacacaggatcctcgtcgtggactgggatgtgcaccatggccagggga

SEQ ID NO: 74690 - DNA, 201 bp, Homo sapiens
ctctctgtcgaccctccccactccggcctggcctgtagtttgaccctgagctggtgctggtctcggcaggatttgactcagccatcggggaccctgagggrcaaatgcaggccacgccagagtgcttcgcccacctcacacagctgctgcaggtgctggccggcggccgggtctgtgccgtgctggagggcggctaccacc

SEQ ID NO: 74691 - DNA, 201 bp, Homo sapiens
ctgtgtggctggggaaggtgctcaggaggggatgggatgggcctggctcgccctcacctgggctccagcccctctctgtcgaccctccccactccggcctkgcctgtagtttgaccctgagctggtgctggtctcggcaggatttgactcagccatcggggaccctgaggggcaaatgcaggccacgccagagtgcttcgc

SEQ ID NO: 74692 - DNA, 201 bp, Homo sapiens
catagcagctgcacatgccaagcagaaacacgggctacacaggatcctcgtcgtggactgggatgtgcaccatggccaggggatccagtatctctttgagratgaccccagcgtcctttacttctcctggcaccgctatgagcatgggcgcttctggcctttcctgcgagagtcagatgcagacgcagtggggcggggaca

SEQ ID NO: 74693 - DNA, 201 bp, Homo sapiens
gagctccctcctggaccagccgtgcctctgccccgcaccctctgtccgcaccgctgttgccctgacaacgccggatatcacattggttctgccccctgacrtcatccaacaggaagcgtcagccctgagggaggagacagaagcctgggccaggtgaacagtggtatagcagccactccagcctctgctgcagcagccacc

SEQ ID NO: 74694 - DNA, 201 bp, Homo sapiens
ccggcggccgggtctgtgccgtgctggagggcggctaccacctggagtcactggcggagtcagtgtgcatgacagtacagacgctgctgggtgacccggcyccacccctgtcagggccaatggcgccatgtcagagtgccctagagtccatccagagtgcccgtgctgcccaggccccgcactggaagagcctccagcagc

SEQ ID NO: 74695 - DNA, 201 bp, Homo sapiens
tgtaaggcagctgcatctgcaccgagctccctcctggaccagccgtgcctctgccccgcaccctctgtccgcaccgctgttgccctgacaacgccggatakcacattggttctgccccctgacgtcatccaacaggaagcgtcagccctgagggaggagacagaagcctgggccaggtgaacagtggtatagcagccactc

SEQ ID NO: 74696 - DNA, 201 bp, Homo sapiens
cgcactggaagagcctccagcagcaagatgtgaccgctgtgccgatgagccccagcagccactccccagaggggaggcctccacctctgctgcctgggggwccagtgtgtaaggcagctgcatctgcaccgagctccctcctggaccagccgtgcctctgccccgcaccctctgtccgcaccgctgttgccctgacaacgc

SEQ ID NO: 74697 - DNA, 201 bp, Homo sapiens
gctggggcctggccatggcctgcagggcccccacgctgcactcctggctgcaatgcttcgggggctggcagggggccgagtcctggccctcctggaggagractccacaccccagctagcagggatcctggcccgggtgctgaatggagaggcacctcctagcctaggcccttcctctgtggcctccccagaggacgtcca

SEQ ID NO: 74698 - DNA, 201 bp, Homo sapiens
agcatgggcgcttctggcctttcctgcgagagtcagatgcagacgcagtggggcggggacagggcctcggcttcactgtcaacctgccctggaaccagggrcaaatgcaggccacgccagagtgcttcgcccacctcacacagctgctgcaggtgctggccggcggccgggtctgtgccgtgctggagggcggctaccacc

SEQ ID NO: 74699 - DNA, 201 bp, Homo sapiens
agctggtggacgctgtgctcactggagctgtgcaaaatgggcttgccctggtgaggcctcccgggcaccatggccagagggcggctgccaacgggttctgygtgttcaacaacgtggccatagcagctgcacatgccaagcagaaacacgggctacacaggatcctcgtcgtggactgggatgtgcaccatggccagggga

SEQ ID NO: 74700 - DNA, 201 bp, Homo sapiens
cagtggtatagcagccactccagcctctgctgcagcagccaccctggatgtggctgttcggagaggcctgtcccacggagcccagagctggggtgtgggasaagggctgctggaggcaatgccaggtgggtctccagcacagaggctcagcagtcacagcacccctgcccatggccccgtgaatgctcttccacctctgcc

SEQ ID NO: 74701 - DNA, 201 bp, Homo sapiens; identical to SEQ ID NO: 74692

SEQ ID NO: 74702 - DNA, 201 bp, Homo sapiens
cctgtcccacggagcccagagctggggtgtgggagaagggctgctggaggcaatgccaggtgggtctccagcacagaggctcagcagtcacagcacccctrcccatggccccgtgaatgctcttccacctctgcctctgcggtttgggctcaggaggatgaccggtggtttcctgagctgcatcttgggcttggtgctgcc

SEQ ID NO: 74703 - DNA, 201 bp, Homo sapiens
gccccgtgaatgctcttccacctctgcctctgcggtttgggctcaggaggatgaccggtggtttcctgagctgcatcttgggcttggtgctgcccctggcstatggcttccagcctgacctggtgctggtggcgctggggcctggccatggcctgcagggcccccacgctgcactcctggctgcaatgcttcgggggctgg

SEQ ID NO: 74704 - DNA, 201 bp, Homo sapiens
gagctccctcctggaccagccgtgcctctgccccgcaccctctgtccgcaccgctgttgccctgacaacgccggatatcacattggttctgccccctgacrtcatccaacaggaagcgtcagccctgagggaggagacagaagcctgggccaggccacacgagtccctggcccgggaggaggccctcactgcacttgggaa

SEQ ID NO: 74705 - DNA, 201 bp, Homo sapiens
ccggcggccgggtctgtgccgtgctggagggcggctaccacctggagtcactggcggagtcagtgtgcatgacagtacagacgctgctgggtgacccggcyccacccctgtcagggccaatggcgccatgtcagaggtgcgaggggagtgccctagagtccatccagagtgcccgtgctgcccaggccccgcactggaaga

SEQ ID NO: 74706 - DNA, 201 bp, Homo sapiens
tgtaaggcagctgcatctgcaccgagctccctcctggaccagccgtgcctctgccccgcaccctctgtccgcaccgctgttgccctgacaacgccggatakcacattggttctgccccctgacgtcatccaacaggaagcgtcagccctgagggaggagacagaagcctgggccaggccacacgagtccctggcccgggag

SEQ ID NO: 74707 - DNA, 201 bp, Homo sapiens; identical to SEQ ID NO: 74696

SEQ ID NO: 74708 - DNA, 201 bp, Homo sapiens; identical to SEQ ID NO: 74697

SEQ ID NO: 74709 - DNA, 201 bp, Homo sapiens
agcatgggcgcttctggcctttcctgcgagagtcagatgcagacgcagtggggcggggacagggcctcggcttcactgtcaacctgccctggaaccagggrcaaatgcaggccacgccagagtgcttcgcccacctcacacagctgctgcaggtgctggccggcggccgggtctgtgccgtgctggagtgccctagagtcc

SEQ ID NO: 74710 - DNA, 201 bp, Homo sapiens; identical to SEQ ID NO: 74689

SEQ ID NO: 74711 - DNA, 201 bp, Homo sapiens; identical to SEQ ID NO: 74692

SEQ ID NO: 74712 - DNA, 201 bp, Homo sapiens
aggaggcggctgccctatccatgttccatgtctccacgccactgccagtgatgaccggtggtttcctgagctgcatcttgggcttggtgctgcccctggcstatggcttccagcctgacctggtgctggtggcgctggggcctggccatggcctgcagggcccccacgctgcactcctggctgcaatgcttcgggggctgg

SEQ ID NO: 74713 - DNA, 201 bp, Homo sapiens; identical to SEQ ID NO: 74704

SEQ ID NO: 74714 - DNA, 201 bp, Homo sapiens; identical to SEQ ID NO: 74696

SEQ ID NO: 74715 - DNA, 201 bp, Homo sapiens; identical to SEQ ID NO: 74706

SEQ ID NO: 74716 - DNA, 201 bp, Homo sapiens
cctggctgcaatgcttcgggggctggcagggggccgagtcctggccctcctggaggaggtaagctgggcagggtggaggtgctgcggggtgggacgagggraaggaccagtgactgcttccgtcttcgcccctggtccagaactccacaccccagctagcagggatcctggcccgggtgctgaatggagaggcacctccta

SEQ ID NO: 74717 - DNA, 201 bp, Homo sapiens
ctggccctcctggaggaggtaagctgggcagggtggaggtgctgcggggtgggacgagggaaaggaccagtgactgcttccgtcttcgcccctggtccagractccacaccccagctagcagggatcctggcccgggtgctgaatggagaggcacctcctagcctaggcccttcctctgtggcctccccagaggacgtcca

SEQ ID NO: 74718 - DNA, 201 bp, Homo sapiens
ctgccttcctgcacctgctgctcccactggcctttgagtttgaccctgagctggtgctggtctcggcaggatttgactcagccatcggggaccctgagggrcaaatgcaggccacgccagagtgcttcgcccacctcacacagctgctgcaggtgctggccggcggccgggtctgtgccgtgctggagggcggctaccacc

SEQ ID NO: 74719 - DNA, 201 bp, Homo sapiens; identical to SEQ ID NO: 74699

SEQ ID NO: 74720 - DNA, 201 bp, Homo sapiens; identical to SEQ ID NO: 74692

SEQ ID NO: 74721 - DNA, 201 bp, Homo sapiens; identical to SEQ ID NO: 74712

SEQ ID NO: 74722 - DNA, 201 bp, Homo sapiens; identical to SEQ ID NO: 74704

SEQ ID NO: 74723 - DNA, 201 bp, Homo sapiens
gcccccacgctgcactcctggctgcaatgcttcgggggctggcagggggccgagtcctggccctcctggaggaggtaagctgggcagggtggaggtgctgyggggtgggacgagggaaaggaccagtgactgcttccgtcttcgcccctggtccagaactccacaccccagctagcagggatcctggcccgggtgctgaat

SEQ ID NO: 74724 - DNA, 201 bp, Homo sapiens; identical to SEQ ID NO: 74705

SEQ ID NO: 74725 - DNA, 201 bp, Homo sapiens; identical to SEQ ID NO: 74706

SEQ ID NO: 74726 - DNA, 201 bp, Homo sapiens; identical to SEQ ID NO: 74696

SEQ ID NO: 74727 - DNA, 201 bp, Homo sapiens; identical to SEQ ID NO: 74697

SEQ ID NO: 74728 - DNA, 201 bp, Homo sapiens; identical to SEQ ID NO: 74718

SEQ ID NO: 74729 - DNA, 201 bp, Homo sapiens; identical to SEQ ID NO: 74699

SEQ ID NO: 74730 - DNA, 201 bp, Homo sapiens; identical to SEQ ID NO: 74692

SEQ ID NO: 74731 - DNA, 201 bp, Homo sapiens; identical to SEQ ID NO: 74712

SEQ ID NO: 74732 - DNA, 201 bp, Homo sapiens; identical to SEQ ID NO: 74704

SEQ ID NO: 74733 - DNA, 201 bp, Homo sapiens; identical to SEQ ID NO: 74694

SEQ ID NO: 74734 - DNA, 201 bp, Homo sapiens; identical to SEQ ID NO: 74706

SEQ ID NO: 74735 - DNA, 201 bp, Homo sapiens; identical to SEQ ID NO: 74696

SEQ ID NO: 74736 - DNA, 201 bp, Homo sapiens; identical to SEQ ID NO: 74697

SEQ ID NO: 74737 - DNA, 201 bp, Homo sapiens; identical to SEQ ID NO: 74718

SEQ ID NO: 74738 - DNA, 201 bp, Homo sapiens; identical to SEQ ID NO: 74699

SEQ ID NO: 74739 - DNA, 201 bp, Homo sapiens; identical to SEQ ID NO: 74692

SEQ ID NO: 74740 - DNA, 201 bp, Homo sapiens; identical to SEQ ID NO: 74712

SEQ ID NO: 74741 - DNA, 201 bp, Homo sapiens; identical to SEQ ID NO: 74704

SEQ ID NO: 74742 - DNA, 201 bp, Homo sapiens; identical to SEQ ID NO: 74705

SEQ ID NO: 74743 - DNA, 201 bp, Homo sapiens; identical to SEQ ID NO: 74706

SEQ ID NO: 74744 - DNA, 201 bp, Homo sapiens; identical to SEQ ID NO: 74696

SEQ ID NO: 74745 - DNA, 201 bp, Homo sapiens; identical to SEQ ID NO: 74697

SEQ ID NO: 74746 - DNA, 201 bp, Homo sapiens
agggcctcggcttcactgtcaacctgccctggaaccagtttgaccctgagctggtgctggtctcggcaggatttgactcagccatcggggaccctgagggrcaaatgcaggccacgccagagtgcttcgcccacctcacacagctgctgcaggtgctggccggcggccgggtctgtgccgtgctggagggcggctaccacc

SEQ ID NO: 74747 - DNA, 201 bp, Homo sapiens; identical to SEQ ID NO: 74699

SEQ ID NO: 74748 - DNA, 201 bp, Homo sapiens; identical to SEQ ID NO: 74700

SEQ ID NO: 74749 - DNA, 201 bp, Homo sapiens; identical to SEQ ID NO: 74692

SEQ ID NO: 74750 - DNA, 201 bp, Homo sapiens; identical to SEQ ID NO: 74702

SEQ ID NO: 74751 - DNA, 201 bp, Homo sapiens; identical to SEQ ID NO: 74703

SEQ ID NO: 74752 - DNA, 201 bp, Homo sapiens; identical to SEQ ID NO: 74704

SEQ ID NO: 74753 - DNA, 201 bp, Homo sapiens; identical to SEQ ID NO: 74705

SEQ ID NO: 74754 - DNA, 201 bp, Homo sapiens; identical to SEQ ID NO: 74706

SEQ ID NO: 74755 - DNA, 201 bp, Homo sapiens; identical to SEQ ID NO: 74696

SEQ ID NO: 74756 - DNA, 201 bp, Homo sapiens; identical to SEQ ID NO: 74697

SEQ ID NO: 74757 - DNA, 201 bp, Homo sapiens; identical to SEQ ID NO: 74712

SEQ ID NO: 74758 - DNA, 201 bp, Homo sapiens
tgcaggcgctgtccggacagttcgacgccatctactaccacctggagtcactggcggagtcagtgtgcatgacagtacagacgctgctgggtgacccggcyccacccctgtcagggccaatggcgccatgtcagagtgccctagagtccatccagagtgcccgtgctgcccaggccccgcactggaagagcctccagcagc

SEQ ID NO: 74759 - DNA, 201 bp, Homo sapiens; identical to SEQ ID NO: 74704

SEQ ID NO: 74760 - DNA, 201 bp, Homo sapiens; identical to SEQ ID NO: 74696

SEQ ID NO: 74761 - DNA, 201 bp, Homo sapiens; identical to SEQ ID NO: 74706

SEQ ID NO: 74762 - DNA, 201 bp, Homo sapiens; identical to SEQ ID NO: 74697

SEQ ID NO: 74763 - DNA, 201 bp, Homo sapiens
tcggcttcactgtcaacctgccctggaaccaggttgggatgggaaacgctgactacgtggctgccttcctgcacctgctgctcccactggcctttgagggrcaaatgcaggccacgccagagtgcttcgcccacctcacacagctgctgcaggtgctggccggcggccgggtctgtgccgtgctggagggcggctaccacc

SEQ ID NO: 74764 - DNA, 201 bp, Homo sapiens; identical to SEQ ID NO: 74699

SEQ ID NO: 74765 - DNA, 201 bp, Homo sapiens; identical to SEQ ID NO: 74692

SEQ ID NO: 74766 - DNA, 201 bp, Homo sapiens; identical to SEQ ID NO: 74712

SEQ ID NO: 74767 - DNA, 201 bp, Homo sapiens; identical to SEQ ID NO: 74704

SEQ ID NO: 74768 - DNA, 201 bp, Homo sapiens; identical to SEQ ID NO: 74694

SEQ ID NO: 74769 - DNA, 201 bp, Homo sapiens; identical to SEQ ID NO: 74706

SEQ ID NO: 74770 - DNA, 201 bp, Homo sapiens; identical to SEQ ID NO: 74696

SEQ ID NO: 74771 - DNA, 201 bp, Homo sapiens
atggataatctggcacagatgccaatgatcagcattcctcgagtagaaagtcctttggaaaagaaccacatcactgccttcgcagaagtcacatgatatcraagcagatggtttttcactgcattggacatcatccctttttaccatccattcataacacccaaagtttgtttgattgcaagtgaagtttataaagttgtt

SEQ ID NO: 74772 - DNA, 116 bp, Homo sapiens
aggtgagctcctcaacaataactttgcaataattaaaactaccctaagtaactttggcttatatggcaaagtaactttggcagtaattgactgaaatgaayctttctaaactttac

SEQ ID NO: 74773 - DNA, 201 bp, Homo sapiens
cagaatatcgaaatcattggtcagatgttatagcaggctttctggttggaatatctatagcagtatttctggttgtgtgcgtggtgaataatttcaaaggragacaagcagaaaatgagcatatacacatggataatctggcacagatgccaatgatcagcattcctcgagtagaaagtcctttggaaaagaaccacatca

SEQ ID NO: 74774 - DNA, 201 bp, Homo sapiens
atacacaattcatcagtggggaagaggcctgtactggcaacccagatctcatcatgagagcccgaaaaacctttccatccaaagaagcagctctcagtgtstatgcagctatgtatctgaccatgtacatcaccaacacaatcaaagccaagggaaccagacttgctaagccagttctatgcttgggcttaatgtgtttgg

SEQ ID NO: 74775 - DNA, 201 bp, Homo sapiens
cctcgagggcaggattgtctttttttttctgtgtccccagcacttacaacaaagcctagcacaaagtaggtgttcaacaaaaatgtgatgaccaaatgaamaaaattcttaaataaaacattcactttagtttctcacagaatcattgcaattatgttaaaagaaatctctacataaatcgtatttgtgtatgaaaacctt

SEQ ID NO: 74776 - DNA, 201 bp, Homo sapiens
agaagaaatggggtcggactagagcccaacattaatgctggaggctgcaacttcaattccttcctcagacgagctgtcagattcgttgatcttaattcacyaatgtttaatgaatatgtttgatgctgacacaaccaccaacttggtaacaatttctttcattttgcctataggtgttcatgtatttggattatgctctac

SEQ ID NO: 74777 - DNA, 201 bp, Homo sapiens; identical to SEQ ID NO: 54317

SEQ ID NO: 74778 - DNA, 201 bp, Homo sapiens
aggttcagcagtcctggccctccaccgttttcaccaccttgcactccatgtggctctcctttcccctaattcacagggtgaagccagatttggtgttgtgwaacggaccaggaacatgtgttcctatctgtgtatctgcccttctccttgggatactaggaataaagaaagtgatcattgtctacgttgaaagcatctgcc

SEQ ID NO: 74779 - DNA, 201 bp, Homo sapiens
tacgttgaaagcatctgccgtgtagaaacgttatccatgtccggaaagattctgtttcatctctcagattacttcattgttcagtggccggctctgaaagmaaagtatcccaaatcggtgtaccttgggcgaattgtttgacaaatggcaactgacttctttagaattttgcagttaacagtagtatgtactcaaattggg

SEQ ID NO: 74780 - DNA, 131 bp, Homo sapiens
atggtgtgcgttctcgttctagctgcggccrcaggagctgtggcggttttcctaatcctgcgaatatgggtagtgcttcgttccatggacgttacgccccgggagtctctcagtatcttggtagtggctgg

SEQ ID NO: 74781 - DNA, 201 bp, Homo sapiens; identical to SEQ ID NO: 74778

SEQ ID NO: 74782 - DNA, 201 bp, Homo sapiens; identical to SEQ ID NO: 74779

SEQ ID NO: 74783 - DNA, 131 bp, Homo sapiens; identical to SEQ ID NO: 74780

SEQ ID NO: 74784 - DNA, 201 bp, Homo sapiens
acagcgaggagcttcatgattgtatccaaaaaaccttgaatgaatggagttcccaaatcaacccagatttggtcagggagtttccagatgtcttggaatgmactgtatctcatgcagtagaaaagataaatcctgatgaaagagaagaaatgaaagtttctgcaaaactgttcattgtagaatcaaactcttcatcatcaa

SEQ ID NO: 74785 - DNA, 201 bp, Homo sapiens
cagttgagtaaaatgtgtaatatttattccccattaataactgactaggaaggactaaaagccagaaaggggatgaaaaaaaaatccttaattcagggccracattatctacttaaacaactttgagatatggtcttaattattttaaagcagaataatataattgaaagtttatagctaaaagagactatataggtcatt

SEQ ID NO: 74786 - DNA, 201 bp, Homo sapiens
gagatatggtcttaattattttaaagcagaataatataattgaaagtttatagctaaaagagactatataggtcatttagtataattcttcattagtttamgaaccacaaaattgcaaataaataagctatgaactttgatgtacactataaatctccttaattctataaatttgtgtctgtaacctgaatagtttgaaaa

SEQ ID NO: 74787 - DNA, 201 bp, Homo sapiens
ggcagcctcgcgctccctctcgggtctctctcgggcctcgggcaccgcgtcctgtggggcggccgcctgcctgcccgcccgcccgcagccccttcgctgckcggcccctgggcggccgctgccatgggcaccgacagccgcgcggccaaggcgctcctggcgcgggcccgcaccctgcacctgcagacggggaacctgctg

SEQ ID NO: 74788 - DNA, 201 bp, Homo sapiens
gaagaaatgaaagtttctgcaaaactgttcattgtagaatcaaactcttcatcatcaactagaagtgcagttgacatggcctgttcagtccttggagttgmacagctggattctgtgatcattgcttcacctcctattgaagatggagttaatctttccttggagcatttacagccttactgggaggaattagaaaactta

SEQ ID NO: 74789 - DNA, 201 bp, Homo sapiens
aatcgcttgaacctgggaggcggagtttgcagtgagccgagatcacgccattgcactccagcctgggcgacagagcgagactgcgtctcaaaaaaaaaaaraaaagaaaaattatgtgaaatcatgtgatttgcctgggaaaacttgtttagatattgagctacttatgccttctagcctttatattaattgtatgtaatg

SEQ ID NO: 74790 - DNA, 201 bp, Homo sapiens
tttaagagggaactttaatatcccatttattgtttttataaccctggacttataaaaatgggttgtttgaagggttattttgaaagtgggggaaaaaaaaacttagttgctaatgtatctaaacttcagcagagctttttggtgatctcctacctgcaccctcaactcttgacaaagaagcaagactatagattcattttc

SEQ ID NO: 74791 - DNA, 201 bp, Homo sapiens
tgttgactcacaatgatccaaaagaactgctttctgaagcaagtttccaagaagctcttcaggaaagcattcctgacattcaagcgcacgagtgggtgccrctgtggctactgcggtattcggtcattgtgaaaagtagaggaattatcaaatcaaaaggctacattttacaagctaaaagaaggggttcttaactgactt

SEQ ID NO: 74792 - DNA, 201 bp, Homo sapiens; identical to SEQ ID NO: 74784

SEQ ID NO: 74793 - DNA, 201 bp, Homo sapiens; identical to SEQ ID NO: 74785

SEQ ID NO: 74794 - DNA, 201 bp, Homo sapiens
agtttatataagagatgttttctgaggagatgtgcatccagtgagaccaaggtagaaagtttatataattgttttttttccagtaaatatgaaaaaaaaaagctgtagcttgtttattacatgtccaaaatacagtggagccttactttaacacaatgtactgtaacttggaatttgttctgttatgagtctatcttgaat

SEQ ID NO: 74795 - DNA, 201 bp, Homo sapiens; identical to SEQ ID NO: 74786

SEQ ID NO: 74796 - DNA, 201 bp, Homo sapiens; identical to SEQ ID NO: 74787

SEQ ID NO: 74797 - DNA, 201 bp, Homo sapiens
tcatcattaacttcctaatataccagaacatatacctttttcatgtaaagttggcaatgggatatggcagttttatttttgaaaaatatgtaacatgactttaatatttttatagttttcagaattagaaacataggaagggaaaatgttttaattagataagtcaactttttatgtgtctgtagtggtgtactataatag

SEQ ID NO: 74798 - DNA, 201 bp, Homo sapiens; identical to SEQ ID NO: 74788

SEQ ID NO: 74799 - DNA, 201 bp, Homo sapiens
ttcatcattaacttcctaatataccagaacatatacctttttcatgtaaagttggcaatgggatatggcagttttatttttgaaaaatatgtaacatgactttaatatttttatagttttcagaattagaaacataggaagggaaaatgttttaattagataagtcaactttttatgtgtctgtagtggtgtactataata

SEQ ID NO: 74800 - DNA, 201 bp, Homo sapiens; identical to SEQ ID NO: 74789

SEQ ID NO: 74801 - DNA, 201 bp, Homo sapiens; identical to SEQ ID NO: 74790

SEQ ID NO: 74802 - DNA, 201 bp, Homo sapiens
tcttaattttcaatgataaaaggtctaaggttcatttaattatgctcctttaacactgtctttctagatttttcacccagtattttcaaaatttgggaatrtaaacaattgatatatttattgtatgttggctagcagttcatccttctgcaaaatatgcattcagagaaatgtgaagcttgttttaatgaagacttaaac

SEQ ID NO: 74803 - DNA, 201 bp, Homo sapiens; identical to SEQ ID NO: 74791

SEQ ID NO: 74804 - DNA, 201 bp, Homo sapiens
acagcgaggagcttcatgattgtatccaaaaaaccttgaatgaatggagttcccaaatcaacccagatttggtcagggagtttccagatgtcttggaatgmactgtatctcatgcagtagaaaagataaatcctgatgaaagagaagaaatgaaagtttctgcctgttcagtccttggagttgcacagctggattctgtga

SEQ ID NO: 74805 - DNA, 201 bp, Homo sapiens; identical to SEQ ID NO: 74785

SEQ ID NO: 74806 - DNA, 201 bp, Homo sapiens; identical to SEQ ID NO: 74786

SEQ ID NO: 74807 - DNA, 201 bp, Homo sapiens; identical to SEQ ID NO: 74787

SEQ ID NO: 74808 - DNA, 201 bp, Homo sapiens
ccagatgtcttggaatgcactgtatctcatgcagtagaaaagataaatcctgatgaaagagaagaaatgaaagtttctgcctgttcagtccttggagttgmacagctggattctgtgatcattgcttcacctcctattgaagatggagttaatctttccttggagcatttacagccttactgggaggaattagaaaactta

SEQ ID NO: 74809 - DNA, 201 bp, Homo sapiens; identical to SEQ ID NO: 74789

SEQ ID NO: 74810 - DNA, 201 bp, Homo sapiens; identical to SEQ ID NO: 74790

SEQ ID NO: 74811 - DNA, 201 bp, Homo sapiens; identical to SEQ ID NO: 74791

SEQ ID NO: 74812 - DNA, 201 bp, Homo sapiens; identical to SEQ ID NO: 74804

SEQ ID NO: 74813 - DNA, 201 bp, Homo sapiens; identical to SEQ ID NO: 74785

SEQ ID NO: 74814 - DNA, 201 bp, Homo sapiens; identical to SEQ ID NO: 74794

SEQ ID NO: 74815 - DNA, 201 bp, Homo sapiens; identical to SEQ ID NO: 74786

SEQ ID NO: 74816 - DNA, 201 bp, Homo sapiens; identical to SEQ ID NO: 74787

SEQ ID NO: 74817 - DNA, 201 bp, Homo sapiens; identical to SEQ ID NO: 74797

SEQ ID NO: 74818 - DNA, 201 bp, Homo sapiens; identical to SEQ ID NO: 74808

SEQ ID NO: 74819 - DNA, 201 bp, Homo sapiens; identical to SEQ ID NO: 74799

SEQ ID NO: 74820 - DNA, 201 bp, Homo sapiens; identical to SEQ ID NO: 74789

SEQ ID NO: 74821 - DNA, 201 bp, Homo sapiens; identical to SEQ ID NO: 74790

SEQ ID NO: 74822 - DNA, 201 bp, Homo sapiens; identical to SEQ ID NO: 74802

SEQ ID NO: 74823 - DNA, 201 bp, Homo sapiens; identical to SEQ ID NO: 74791

SEQ ID NO: 74824 - DNA, 201 bp, Homo sapiens
caaggaggtggtgaagcggcatcggagggggccatcgggggcatcgtgggccacactgagcaccaggctgtctcctccaactttaacagtgacacccactmttccaccttcaacactggggctggcattgccctcaacggcctctttgtcaggctcgtttccgggtatgacaatgaatttggctacagcaacaaagtgata

SEQ ID NO: 74825 - DNA, 201 bp, Homo sapiens
tcagacgtgtgcaccccgggtggcaccaccatctatggactccacgccctggagcagggcgggctgcgagcagccaccatgagcgccgtggaggctgccayctgccgggccaaggagctcagcagaaagtaggctgggctctggccatcctttcctgcctctgtgcccctgcctctccctgtgtcccttcccctgaggact

SEQ ID NO: 74826 - DNA, 201 bp, Homo sapiens
cgtcatctttgccaccaagcctcatgtgctgccagctgtcctggcagaggtggctcctgtggtcaccactgaacacatcttggtgtccgtggctgctgggrtgtctctgagcaccctggaggagctgctgcccccaaacacacgggtgctgcgggtcttgcccaacctgccctgtgtggtccaggaaggggccatagtgat

SEQ ID NO: 74827 - DNA, 201 bp, Homo sapiens
aaacacacgggtgctgcgggtcttgcccaacctgccctgtgtggtccaggaaggggccatagtgatggcgcggggccgccacgtggggagcagcgagaccmacctcctgcagcatctgctggaggcctgtgggcggtgtgaggaggtgcctgaagcctacgtcgacatccacactggcctcagtggcagtggcgtggcctt

SEQ ID NO: 74828 - DNA, 201 bp, Homo sapiens
acacacgggtgctgcgggtcttgcccaacctgccctgtgtggtccaggaaggggccatagtgatggcgcggggccgccacgtggggagcagcgagaccaasctcctgcagcatctgctggaggcctgtgggcggtgtgaggaggtgcctgaagcctacgtcgacatccacactggcctcagtggcagtggcgtggccttcg

SEQ ID NO: 74829 - DNA, 201 bp, Homo sapiens
gtgtcccttcccctgaggactgcggctccctccctcctgcatgagggtctcctactgctccttctccccttgcacagggaaatgcagggggcaggacttgrgaggttccagcaggcgggggagccccgaccagtggggacactcctccctccccagtgagcagaaggcaccgtggtggtggctctgccccttgctgcagtg

SEQ ID NO: 74830 - DNA, 201 bp, Homo sapiens
gcggcgcgtgggcttcgtgggcgcgggccgcatggcgggggccatcgcgcagggcctcatcagagcaggaaaagtggaagctcagcacatactggccagtrcaccaacagacaggaacctatgtcactttcaagctctgggttgccggaccacgcactccaaccaggaggtgctgcagagctgcctgctcgtcatctttgc

SEQ ID NO: 74831 - DNA, 201 bp, Homo sapiens
gtgtggtccaggaaggggccatagtgatggcgcggggccgccacgtggggagcagcgagaccaacctcctgcagcatctgctggaggcctgtgggcggtgygaggaggtgcctgaagcctacgtcgacatccacactggcctcagtggcagtggcgtggccttcgtgtgtgcattctccgaggccctggctgaaggagccg

SEQ ID NO: 74832 - DNA, 130 bp, Homo sapiens
ggcgcggcctgtggatgggcggtgagcgcmgcggcgtccgaggcaacaagatggcagctgcggagccgtctccgcggcgcgtgggcttcgtgggcgcgggccgcatggcgggggccatcgcgcagggcct

SEQ ID NO: 74833 - DNA, 201 bp, Homo sapiens
gcgcagggcctcatcagagcaggaaaagtggaagctcagcacatactggccagtgcaccaacagacaggaacctatgtcactttcaagctctgggttgccrgaccacgcactccaaccaggaggtgctgcagagctgcctgctcgtcatctttgccaccaagcctcatgtgctgccagctgtcctggcagaggtggctcct

SEQ ID NO: 74834 - DNA, 201 bp, Homo sapiens
cgtgtgcaccccgggtggcaccaccatctatggactccacgccctggagcagggcgggctgcgagcagccaccatgagcgccgtggaggctgccacctgcmgggccaaggagctcagcagaaagtaggctgggctctggccatcctttcctgcctctgtgcccctgcctctccctgtgtcccttcccctgaggactgcggc

SEQ ID NO: 74835 - DNA, 201 bp, Homo sapiens
tgggttgccggaccacgcactccaaccaggaggtgctgcagagctgcctgctcgtcatctttgccaccaagcctcatgtgctgccagctgtcctggcagargtggctcctgtggtcaccactgaacacatcttggtgtccgtggctgctggggtgtctctgagcaccctggaggagctgctgcccccaaacacacgggtgc

SEQ ID NO: 74836 - DNA, 201 bp, Homo sapiens
tccctcatgctcagctgcctctgcggccacggacttctgcccttcatctgctctctcttactctcctgagcctagcccgtccgtaagctccctcccctgcytggttcccagggcaggctgactcagttgactgcttggtccaagcctggccctggcacttgtcagggtcagcctaaggagatgggaataaagaggccagag

SEQ ID NO: 74837 - DNA, 201 bp, Homo sapiens
gcggcgcgtgggcttcgtgggcgcgggccgcatggcgggggccatcgcgcagggcctcatcagagcaggaaaagtggaagctcagcacatactggccagtrcaccaacagacaggaacctatgtcactttcaactctctcttactctcctgagcctagcccgtccgtaagctccctcccctgcctggttcccagggcaggc

SEQ ID NO: 74838 - DNA, 130 bp, Homo sapiens; identical to SEQ ID NO: 74832

SEQ ID NO: 74839 - DNA, 201 bp, Homo sapiens
agcacatactggccagtgcaccaacagacaggaacctatgtcactttcaactctctcttactctcctgagcctagcccgtccgtaagctccctcccctgcytggttcccagggcaggctgactcagttgactgcttggtccaagcctggccctggcacttgtcagggtcagcctaaggagatgggaataaagaggccagag

SEQ ID NO: 74840 - DNA, 201 bp, Homo sapiens; identical to SEQ ID NO: 74825

SEQ ID NO: 74841 - DNA, 201 bp, Homo sapiens; identical to SEQ ID NO: 74826

SEQ ID NO: 74842 - DNA, 201 bp, Homo sapiens; identical to SEQ ID NO: 74827

SEQ ID NO: 74843 - DNA, 201 bp, Homo sapiens; identical to SEQ ID NO: 74828

SEQ ID NO: 74844 - DNA, 201 bp, Homo sapiens; identical to SEQ ID NO: 74829

SEQ ID NO: 74845 - DNA, 201 bp, Homo sapiens; identical to SEQ ID NO: 74830

SEQ ID NO: 74846 - DNA, 201 bp, Homo sapiens
gtaggtggggtggcttgaggtctgggagggtggccctggccagccaggacacatgcagacccctggctttagtctggatacaggctccctctttcctcccratcctaagctcctgacaagtggccaggtggctctgggccctcctgccccgtgcctaggtcaggggtcctggaataccccgtagctctggcaccaccacac

SEQ ID NO: 74847 - DNA, 201 bp, Homo sapiens; identical to SEQ ID NO: 74831

SEQ ID NO: 74848 - DNA, 130 bp, Homo sapiens; identical to SEQ ID NO: 74832

SEQ ID NO: 74849 - DNA, 201 bp, Homo sapiens; identical to SEQ ID NO: 74833

SEQ ID NO: 74850 - DNA, 201 bp, Homo sapiens; identical to SEQ ID NO: 74834

SEQ ID NO: 74851 - DNA, 201 bp, Homo sapiens; identical to SEQ ID NO: 74835

SEQ ID NO: 74852 - DNA, 201 bp, Homo sapiens; identical to SEQ ID NO: 74836

SEQ ID NO: 74853 - DNA, 201 bp, Homo sapiens
ctttgtggcctatgccttggcttttccccgggccttccagggcctcctggacacctacagcgtgtggaggagtggtctccccaacttcctagcagtcgccytggccctgggagagctgggctaccgggcagtgggcgtgaggctggacagtggtgacctgctacagcaggctcaggagatccgcaaggtcttccgagctgc

SEQ ID NO: 74854 - DNA, 201 bp, Homo sapiens
ccacccgtcctccatcgagtcccgtgccgctcccaaaccgcacgataagccccacagggagtgcgccataggccggggcgcgtcacggggccggggcgggscggagtccggacgtcgggagcaggatggcggcggagcaggaccccgaggcgcgcgcggcggcgcggccgctgctcactgacctctaccaggccaccatgg

SEQ ID NO: 74855 - DNA, 201 bp, Homo sapiens
tagccccacccgtcctccatcgagtcccgtgccgctcccaaaccgcacgataagccccacagggagtgcgccataggccggggcgcgtcacggggccgggkcggggcggagtccggacgtcgggagcaggatggcggcggagcaggaccccgaggcgcgcgcggcggcgcggccgctgctcactgacctctaccaggccac

SEQ ID NO: 74856 - DNA, 126 bp, Homo sapiens
gtaccaggtggtgctgtccgagaggctgcaggccctggtgaacagtctgtgtgcggggcagtccccctgagactcggagcggggctgactggaaacaacasgaatcactcacttttccccacagct

SEQ ID NO: 74857 - DNA, 201 bp, Homo sapiens
caacttcctagcagtcgccttggccctgggagagctgggctaccgggcagtgggcgtgaggctggacagtggtgacctgctacagcaggctcaggagatcygcaaggtcttccgagctgctgcagcccagttccaggtgccctggctggagtcagtcctcatcgtagtcagcaacaacattgacgaggaggcgctggcccg

SEQ ID NO: 74858 - DNA, 201 bp, Homo sapiens
ataagctggtggccgtggggggccagccacgaatgaagctgaccgaggaccccgagaagcagacgttgcctgggagcaaggctgctttccggctcctgggytctgacgggtctccactcatggacatgctgcagttagcagaagagccagtgccacaggctgggcaggagctgagggtgtggcctccaggggcccaggagc

SEQ ID NO: 74859 - DNA, 201 bp, Homo sapiens
tggacacctacagcgtgtggaggagtggtctccccaacttcctagcagtcgccttggccctgggagagctgggctaccgggcagtgggcgtgaggctggayagtggtgacctgctacagcaggctcaggagatccgcaaggtcttccgagctgctgcagcccagttccaggtgccctggctggagtcagtcctcatcgtag

SEQ ID NO: 74860 - DNA, 201 bp, Homo sapiens
tcccccaccccatcccgggtccagctgtttcagcccctctcggcgcgccgatactattagccccacccgtcctccatcgagtcccgtgccgctcccaaacsgcacgataagccccacagggagtgcgccataggccggggcgcgtcacggggccggggcggggcggagtccggacgtcgggagcaggatggcggcggagca

SEQ ID NO: 74861 - DNA, 201 bp, Homo sapiens
gcttcctgcgcgccttccgcctgcgggacgccgacgtgcagttcctggcctcggtgctgcccccagacacggatcctgcgttcttcgagcaccttcgggcyctcgactgctccgaggtgacggtgcgagccctgcccgagggctccctcgccttccccggagtgccgctcctgcaggtgtccgggccgctcctggtggtgc

SEQ ID NO: 74862 - DNA, 201 bp, Homo sapiens
accatggcgttgggctattggcgcgcgggccgggcgcgggacgccgccgagttcgagctcttcttccgccgctgcccgttcggcggcgccttcgccttggycgccggcttgcgcgactgtgtgcgcttcctgcgcgccttccgcctgcgggacgccgacgtgcagttcctggcctcggtgctgcccccagacacggatcct

SEQ ID NO: 74863 - DNA, 201 bp, Homo sapiens
atccaggcgagcgggcagcctttgtggcctatgccttggcttttccccgggccttccagggcctcctggacacctacagcgtgtggaggagtggtctcccyaacttcctagcagtcgccttggccctgggagagctgggctaccgggcagtgggcgtgaggctggacagtggtgacctgctacagcaggctcaggagatcc

SEQ ID NO: 74864 - DNA, 201 bp, Homo sapiens
ccatggcgttgggctattggcgcgcgggccgggcgcgggacgccgccgagttcgagctcttcttccgccgctgcccgttcggcggcgccttcgccttggcmgccggcttgcgcgactgtgtgcgcttcctgcgcgccttccgcctgcgggacgccgacgtgcagttcctggcctcggtgctgcccccagacacggatcctg

SEQ ID NO: 74865 - DNA, 201 bp, Homo sapiens
gccgggcgcgggacgccgccgagttcgagctcttcttccgccgctgcccgttcggcggcgccttcgccttggccgccggcttgcgcgactgtgtgcgcttyctgcgcgccttccgcctgcgggacgccgacgtgcagttcctggcctcggtgctgcccccagacacggatcctgcgttcttcgagcaccttcgggccctcg

SEQ ID NO: 74866 - DNA, 201 bp, Homo sapiens
tgtataggctgggatattttgatgatgctttggaagatttcaagaaggtcttagacttaaatcctggatttcaagatgctactttgagcttaaaacagacyattctagacaaagaagaaaaacaaagaagaaatgttgcaaaaaattattgatatttttaacttaatggaagtattgattcatgatccttacatctgcatc

SEQ ID NO: 74867 - DNA, 201 bp, Homo sapiens
agtccaacccaattttgaagttccatattacaacagagggttgatactgtataggctgggatattttgatgatgctttggaagatttcaagaaggtcttasacttaaatcctggatttcaagatgctactttgagcttaaaacagactattctagacaaagaagaaaaacaaagaagaaatgttgcaaaaaattattgata

SEQ ID NO: 74868 - DNA, 201 bp, Homo sapiens
caaccctaacactcgcccaggctcatttcaacaatggagagtacgcggaggccgaggcactgtactccgcttacattcgccggtgcgcttgcgcggcctcyagcgacgagagtcccgggaggtaactatcgcgagacctggggccgcggcgaccccgggtggaggcgacgttggggttgtttgggctcctatctttgcctc

SEQ ID NO: 74869 - DNA, 118 bp, Homo sapiens
ctagcgccaaggttggcygtcaaggtagattccagggtgtggaagtggctttgtggtgccacctctaaccgctcggaggtcaacccccattctacaccgaaaactaggccttggctgc

SEQ ID NO: 74870 - DNA, 201 bp, Homo sapiens
actatcgcgagacctggggccgcggcgaccccgggtggaggcgacgttggggttgtttgggctcctatctttgcctctggagctcacggtcggcgcttgtyataacccagcactaggactgagcgggcggacgttcgtctttctagaaaggcctaggcgaggcctaggacgagggcggcggagaacgcggggagaagccca

SEQ ID NO: 74871 - DNA, 201 bp, Homo sapiens
gtaatttagatattgagctattttgatttatatttaagaaattaatacattagcactgaaagttaaatagtgtgtttaaggtagttaatttcaggttgaaygggttttttttaatgaagtgtaaataataccaatgtataagtgtatattattatattaaatattatagtaaaaaggaatgtgtggtattttcttcagcaa

SEQ ID NO: 74872 - DNA, 201 bp, Homo sapiens
agacttaaatcctggatttcaagatgctactttgagcttaaaacagactattctagacaaagaagaaaaacaaagaagaaatgttgcaaaaaattattgayatttttaacttaatggaagtattgattcatgatccttacatctgcatctagttatcagtaatttagatattgagctattttgatttatatttaagaaatt

SEQ ID NO: 74873 - DNA, 201 bp, Homo sapiens; identical to SEQ ID NO: 74866

SEQ ID NO: 74874 - DNA, 201 bp, Homo sapiens; identical to SEQ ID NO: 74867

SEQ ID NO: 74875 - DNA, 201 bp, Homo sapiens
caaccctaacactcgcccaggctcatttcaacaatggagagtacgcggaggccgaggcactgtactccgcttacattcgccggtgcgcttgcgcggcctcyagcgacgagagtcccgggagcaaatgcagccctgaggatttggctactgcatataacaacagggggcaaatcaagtacttcagggttgatttttatgaag

SEQ ID NO: 74876 - DNA, 132 bp, Homo sapiens
cataaggcacaaacctagcgccaaggttggcygtcaaggtagattccagggtgtggaagtggctttgtggtgccacctctaaccgctcggaggtcaacccccattctacaccgaaaactaggccttggctgc

SEQ ID NO: 74877 - DNA, 201 bp, Homo sapiens; identical to SEQ ID NO: 74871

SEQ ID NO: 74878 - DNA, 201 bp, Homo sapiens; identical to SEQ ID NO: 74872

SEQ ID NO: 74879 - DNA, 201 bp, Homo sapiens
cagcccctagaagggacatttccctgtgactttgcttggggagttgttgacaactacattcaagtagataccactctgtctcagtttaccgacctgaatgyttacctgtgggatgtccaccacagtaaaaggcttattaaagtggatggggttgtgaccaagaagaggaaatcctactgtgttgactttgctgccatccag

SEQ ID NO: 74880 - DNA, 201 bp, Homo sapiens
ggaaatgcacgttacacattttcgcttctccctggactgggccctgattctccctctgggtaaccagtcccaggtgaaccacaccatcctgcagtactatygctgcatggccagcgagcttgtccgtgtcaacatcaccccagtggtggccctgtggcagcctatggccccgaaccaaggactgccgcgcctcctggccag

SEQ ID NO: 74881 - DNA, 201 bp, Homo sapiens
accgagggcggctggcagcagcacggcaagggtgcgtccatctgggacacgttcacccaccaccccctggcacccccgggagactcccggaacgccagtckgccgttgggcgccccgtcgccgctgcagcccgccaccggggacgtagccagcgacagctacaacaacgtcttccgcgacacggaggcgctgcgcgagctc

SEQ ID NO: 74882 - DNA, 201 bp, Homo sapiens
actcccccagtcaggtggcggtagtgccctgggggttgcgcaaagtgctgaactggctgaagttcaagtacggagacctccccatgtacataatatccaayggaatcgatgacgggctgcatgctgaggacgaccagctgagggtgtattatatgcagaattacataaacgaagctctcaaagcccacatactggatggta

SEQ ID NO: 74883 - DNA, 201 bp, Homo sapiens
ttactgaatctgagaaaaagttcatcaaaggaactgctgacttttttgctctttgctttggacccaccttgagttttcaacttttggaccctcacatgaarttccgccaattggaatctcccaacctgaggcaactgctttcctggattgaccttgaatttaaccatcctcaaatatttattgtggaaaatggctggtttg

SEQ ID NO: 74884 - DNA, 201 bp, Homo sapiens
aaaagtttaggcatgctcagaatgggaaaatatccatagccttgcaggctgattggatagaacctgcctgccctttctcccaaaaggacaaagaggtggcygagagagttttggaatttgacattggctggctggctgagcccattttcggctctggagattatccatgggtgatgagggactggctgaaccaaagaaaca

SEQ ID NO: 74885 - DNA, 201 bp, Homo sapiens
tatcccgagagcatgaagaataacctttcatctattctgcctgattttactgaatctgagaaaaagttcatcaaaggaactgctgacttttttgctctttsctttggacccaccttgagttttcaacttttggaccctcacatgaagttccgccaattggaatctcccaacctgaggcaactgctttcctggattgacctt

SEQ ID NO: 74886 - DNA, 201 bp, Homo sapiens
ggcttattaaagtggatggggttgtgaccaagaagaggaaatcctactgtgttgactttgctgccatccagccccagatcgctttactccaggaaatgcaygttacacattttcgcttctccctggactgggccctgattctccctctgggtaaccagtcccaggtgaaccacaccatcctgcagtactatcgctgcatgg

SEQ ID NO: 74887 - DNA, 201 bp, Homo sapiens
atctctggactttgtactaggttggtttgccaaacccgtatttattgatggtgactatcccgagagcatgaagaataacctttcatctattctgcctgatkttactgaatctgagaaaaagttcatcaaaggaactgctgacttttttgctctttgctttggacccaccttgagttttcaacttttggaccctcacatgaa

SEQ ID NO: 74888 - DNA, 201 bp, Homo sapiens
agggcaccttccccgacggcttcctctgggccgtgggcagcgccgcctaccagaccgagggcggctggcagcagcacggcaagggtgcgtccatctgggayacgttcacccaccaccccctggcacccccgggagactcccggaacgccagtctgccgttgggcgccccgtcgccgctgcagcccgccaccggggacgtag

SEQ ID NO: 74889 - DNA, 152 bp, Homo sapiens
cgcgcagcatgcccgccagcgccccgccgcgccgcccgcggccgccgccgcmgtcgctgtcgctgctgctggtgctgctgggcctgggcggccgccgcctgcgtgcggagccgggcgacggcgcgcagacctgggcccgtttctcgcggcct

SEQ ID NO: 74890 - DNA, 201 bp, Homo sapiens
ctttctaagccaggacaagatgttgttgccaaagtcttcagccttgttctaccaaaagctgatagagaaaaatggcttccctcctttacctgaaaatcagyccctagaagggacatttccctgtgactttgcttggggagttgttgacaactacattcaagtagataccactctgtctcagtttaccgacctgaatgttta

SEQ ID NO: 74891 - DNA, 201 bp, Homo sapiens
tgtactgagtgcagtttttttcacacccgaaagtctttactggctttcatagcttttctattttttgcttctattatttctctctcccttatattttactrctcgaagaaaggcagaagaagttacaaatagttctgaacatttttctattcattcattttgaaataattatgcagacacatcagctgttaaccatttgca

SEQ ID NO: 74892 - DNA, 201 bp, Homo sapiens
aaaagctgatagagaaaaatggcttccctcctttacctgaaaatcagcccctagaagggacatttccctgtgactttgcttggggagttgttgacaactayattcaagtagataccactctgtctcagtttaccgacctgaatgtttacctgtgggatgtccaccacagtaaaaggcttattaaagtggatggggttgtga

SEQ ID NO: 74893 - DNA, 201 bp, Homo sapiens
gccgccgccgccgtcgctgtcgctgctgctggtgctgctgggcctgggcggccgccgcctgcgtgcggagccgggcgacggcgcgcagacctgggcccgtktctcgcggcctcctgcccccgaggccgcgggcctcttccagggcaccttccccgacggcttcctctgggccgtgggcagcgccgcctaccagaccgaggg

SEQ ID NO: 74894 - DNA, 201 bp, Homo sapiens
tggctttaagccattataccaccatccttgtagactcagaaaaagaagatccaataaaatacaatgattacctagaagtgcaagaaatgaccgacatcacrtggctcaactcccccagtcaggtggcggtagtgccctgggggttgcgcaaagtgctgaactggctgaagttcaagtacggagacctccccatgtacataa

SEQ ID NO: 74895 - DNA, 201 bp, Homo sapiens
aaagtttaggcatgctcagaatgggaaaatatccatagccttgcaggctgattggatagaacctgcctgccctttctcccaaaaggacaaagaggtggccragagagttttggaatttgacattggctggctggctgagcccattttcggctctggagattatccatgggtgatgagggactggctgaaccaaagaaacaa

SEQ ID NO: 74896 - DNA, 201 bp, Homo sapiens; identical to SEQ ID NO: 74883

SEQ ID NO: 74897 - DNA, 201 bp, Homo sapiens; identical to SEQ ID NO: 74885

SEQ ID NO: 74898 - DNA, 201 bp, Homo sapiens; identical to SEQ ID NO: 74887

SEQ ID NO: 74899 - DNA, 201 bp, Homo sapiens; identical to SEQ ID NO: 74888

SEQ ID NO: 74900 - DNA, 201 bp, Homo sapiens; identical to SEQ ID NO: 74881

SEQ ID NO: 74901 - DNA, 152 bp, Homo sapiens; identical to SEQ ID NO: 74889

SEQ ID NO: 74902 - DNA, 201 bp, Homo sapiens
ctttctaagccaggacaagatgttgttgccaaagtcttcagccttgttctaccaaaagctgatagagaaaaatggcttccctcctttacctgaaaatcagyccctagaagggacatttccctgtgactttgcttggggagttgttgacaactacattcaagtaagtcagctgacaaaaccaatcagcagtctcaccaagcc

SEQ ID NO: 74903 - DNA, 201 bp, Homo sapiens; identical to SEQ ID NO: 74893

SEQ ID NO: 74904 - DNA, 155 bp, Homo sapiens
aaaagctgatagagaaaaatggcttccctcctttacctgaaaatcagcccctagaagggacatttccctgtgactttgcttggggagttgttgacaactayattcaagtaagtcagctgacaaaaccaatcagcagtctcaccaagccctatcac

SEQ ID NO: 74905 - DNA, 201 bp, Homo sapiens
ttggcccagaaattccagatatccaaatggacactttgtgagaaatttaggtgatgttggagagaaagagactgaaacagaagttttgttacttgaacacratgttccccatcagcctttttcacaggctgttcttagttttctgccaaagatgccctggagcattactgaaaaggacatgaaaaaccgagaagacctgag

SEQ ID NO: 74906 - DNA, 201 bp, Homo sapiens
gttacttgaagtaattttttcccagtcaccatcatgttgatcctgtgcacaacgatatatgcgaggaactcttaagcttagtctttgattctgacagaggyattctatggactgctgcattgaaaagggcttgctgttttcatccaacacctctgtgttgtgtggtcttgctgtgaaaaagaagacaataccttgttttca

SEQ ID NO: 74907 - DNA, 201 bp, Homo sapiens
atcttcaggaatattttgggatagggttgccttaaaacattttacttggcttattcaatttctaaagcacttacgttgtgccaggttccactcaagtaaaytatctctgccttcaaggagcttgcagtatagtgagaaaagcctgccaagtaaatcagcaggtatactaaataggtagtcatttaggcactcaataaatgt

SEQ ID NO: 74908 - DNA, 201 bp, Homo sapiens
tggctgtgtccccaggcaataggaatttttcagctccattgtaatcttacgggatcatcatcgtatatttggccattgttgaccaaaagttatgcagcacrtcattataattttgatgtgtcacaaaacattactcatttgatttcccccacccccgccaaccatttaaaaaagtttgccggctaggtgcggtggctcatg

SEQ ID NO: 74909 - DNA, 201 bp, Homo sapiens
catctttaattcacctaacttacactaggtgttctcttactgtctttaaaagcttcctgtattttattagtggtccttgaaaaactgtgaatgtttgggawttggtagaaaggcaaaaagtaggatattttgacctgactggaaagatggttgtgtttttattgccaggtaataagtgtgatcattgttgaacttcagctc

SEQ ID NO: 74910 - DNA, 201 bp, Homo sapiens
cctaacctacaaacctgtatggcatattactgtactgattactgtaggcagttgtaacacagtgctaagtatttgtgtatctaaacatatctaaacatagmaaaggtacagtaaaaatatatatatagatatatataagatataaaatggtacacctatttaggacatttaccatgaacaagttggcaggactggaagctg

SEQ ID NO: 74911 - DNA, 201 bp, Homo sapiens
gtgatacagtttgttacttttaagtacattttaataatttcagacatctgcatttttattgaacagttgactgtatctgacccatcatactactatacttstgggttgaacagaattatttatgcagaataattcaattgaatatccatcacttaaatacagtgacaggacagcaacttcagggatctgtaaagatcattt

SEQ ID NO: 74912 - DNA, 201 bp, Homo sapiens
acaggctggcattttcatgtatttgggaaatgaatcacaatgctgaaatcttaaaaacgaagtttaccaaaagtgttattaattcaaaggcatctctgacrtatgctgaagctcagttgagaattgattcagcaaacatgaatgatgatattaccactagtctccgtggactgaataaactagccaaaattctgaagaaaa

SEQ ID NO: 74913 - DNA, 201 bp, Homo sapiens
gctgtggagcttctccccaagagtcagtgggtagcaccatcttctgtggttttacatgatgaaggtcaaaatgaagaagatgtggagaaagaagaagagasagaacgaatgcttaagactgctgtaagcgagaaaatgttgaagcctacaggtagagttgtaggaataataaaaaggaattggagaccatattgtggcatg

SEQ ID NO: 74914 - DNA, 201 bp, Homo sapiens
aagctacagcaaggcataaaatctggtacataccttcaaggaacatttagagctagcagggaaaattacttggaagctacagtatggattcatggcgacartgaagaaaataaagagataatcttacagggacttaaacatttaaacagagctgttcacgaagatattgtggctgtggagcttctccccaagagtcagtgg

SEQ ID NO: 74915 - DNA, 201 bp, Homo sapiens
tatagacgatgctctacattgtcgagaactcgaaaatggaaatttggaggttggtgttcatattgctgatgtgagccattttattaggccaggaaatgccktggatcaagaatcagccagaagaggaacaactgtgtatctttgtgaaaagaggattgacatggttccagagttgcttagctctaacttgtgttccttaaa

SEQ ID NO: 74916 - DNA, 201 bp, Homo sapiens
catgaatgatgatattaccactagtctccgtggactgaataaactagccaaaattctgaagaaaagaaggattgaaaaaggggctttgactctatcctctyctgaagttcgattccacatggacagtgaaactcacgatcctatagatctgcagaccaaggaacttagggaaacaaattccatggttgaagaatttatgtt

SEQ ID NO: 74917 - DNA, 201 bp, Homo sapiens
agatatatgtaaaaatctaaatttccggcacaaaatggctcaatatgcccaacgtgcatcagtggcttttcatacccagttattcttcaaaagcaaaggartagtaagtgaagaagcctatattttatttgtaagaaagaatgccattgtggtattaattccaaagtatggtttagaagggacagtcttttttgaagaaaa

SEQ ID NO: 74918 - DNA, 201 bp, Homo sapiens
aaaagaagatgaagcttggaaaatagctatattcaacaaaaatcttcaaagactggtttcttttttaaaagaaaaaacttgaaagaacacttctaagcctragtgtgtgatacagtttgttacttttaagtacattttaataatttcagacatctgcatttttattgaacagttgactgtatctgacccatcatactacta

SEQ ID NO: 74919 - DNA, 201 bp, Homo sapiens; identical to SEQ ID NO: 74905

SEQ ID NO: 74920 - DNA, 201 bp, Homo sapiens; identical to SEQ ID NO: 74906

SEQ ID NO: 74921 - DNA, 201 bp, Homo sapiens; identical to SEQ ID NO: 74907

SEQ ID NO: 74922 - DNA, 201 bp, Homo sapiens; identical to SEQ ID NO: 74908

SEQ ID NO: 74923 - DNA, 201 bp, Homo sapiens; identical to SEQ ID NO: 74909

SEQ ID NO: 74924 - DNA, 201 bp, Homo sapiens; identical to SEQ ID NO: 74910

SEQ ID NO: 74925 - DNA, 201 bp, Homo sapiens; identical to SEQ ID NO: 74911

SEQ ID NO: 74926 - DNA, 201 bp, Homo sapiens; identical to SEQ ID NO: 74912

SEQ ID NO: 74927 - DNA, 201 bp, Homo sapiens; identical to SEQ ID NO: 74913

SEQ ID NO: 74928 - DNA, 201 bp, Homo sapiens; identical to SEQ ID NO: 74914

SEQ ID NO: 74929 - DNA, 201 bp, Homo sapiens; identical to SEQ ID NO: 74915

SEQ ID NO: 74930 - DNA, 104 bp, Homo sapiens
acgytgtgaggtggcgtccagaaggaagccccgcctaggccacgggcggaaatggctcctcgccttgctttgccgcccctccccactctcgcccaatccccgcg

SEQ ID NO: 74931 - DNA, 201 bp, Homo sapiens; identical to SEQ ID NO: 74916

SEQ ID NO: 74932 - DNA, 201 bp, Homo sapiens; identical to SEQ ID NO: 74917

SEQ ID NO: 74933 - DNA, 201 bp, Homo sapiens; identical to SEQ ID NO: 74918

SEQ ID NO: 74934 - DNA, 201 bp, Homo sapiens; identical to SEQ ID NO: 74905

SEQ ID NO: 74935 - DNA, 201 bp, Homo sapiens; identical to SEQ ID NO: 74906

SEQ ID NO: 74936 - DNA, 201 bp, Homo sapiens; identical to SEQ ID NO: 74907

SEQ ID NO: 74937 - DNA, 201 bp, Homo sapiens; identical to SEQ ID NO: 74908

SEQ ID NO: 74938 - DNA, 201 bp, Homo sapiens; identical to SEQ ID NO: 74909

SEQ ID NO: 74939 - DNA, 201 bp, Homo sapiens; identical to SEQ ID NO: 74910

SEQ ID NO: 74940 - DNA, 201 bp, Homo sapiens; identical to SEQ ID NO: 74911

SEQ ID NO: 74941 - DNA, 201 bp, Homo sapiens; identical to SEQ ID NO: 74912

SEQ ID NO: 74942 - DNA, 201 bp, Homo sapiens; identical to SEQ ID NO: 74913

SEQ ID NO: 74943 - DNA, 201 bp, Homo sapiens
aagctacagcaaggcataaaatctggtacataccttcaaggaacatttagagctagcagggaaaattacttggaagctacagtatggattcatggcgacartgaagaaaataaagaggcaaataatcttacagggacttaaacatttaaacagagctgttcacgaagatattgtggctgtggagcttctccccaagagtca

SEQ ID NO: 74944 - DNA, 201 bp, Homo sapiens; identical to SEQ ID NO: 74915

SEQ ID NO: 74945 - DNA, 104 bp, Homo sapiens; identical to SEQ ID NO: 74930

SEQ ID NO: 74946 - DNA, 201 bp, Homo sapiens; identical to SEQ ID NO: 74916

SEQ ID NO: 74947 - DNA, 201 bp, Homo sapiens; identical to SEQ ID NO: 74917

SEQ ID NO: 74948 - DNA, 201 bp, Homo sapiens; identical to SEQ ID NO: 74918

SEQ ID NO: 74949 - DNA, 201 bp, Homo sapiens; identical to SEQ ID NO: 74905

SEQ ID NO: 74950 - DNA, 201 bp, Homo sapiens; identical to SEQ ID NO: 74906

SEQ ID NO: 74951 - DNA, 201 bp, Homo sapiens; identical to SEQ ID NO: 74907

SEQ ID NO: 74952 - DNA, 201 bp, Homo sapiens; identical to SEQ ID NO: 74908

SEQ ID NO: 74953 - DNA, 201 bp, Homo sapiens; identical to SEQ ID NO: 74909

SEQ ID NO: 74954 - DNA, 201 bp, Homo sapiens; identical to SEQ ID NO: 74910

SEQ ID NO: 74955 - DNA, 201 bp, Homo sapiens; identical to SEQ ID NO: 74911

SEQ ID NO: 74956 - DNA, 201 bp, Homo sapiens; identical to SEQ ID NO: 74912

SEQ ID NO: 74957 - DNA, 201 bp, Homo sapiens; identical to SEQ ID NO: 74913

SEQ ID NO: 74958 - DNA, 201 bp, Homo sapiens; identical to SEQ ID NO: 74943

SEQ ID NO: 74959 - DNA, 201 bp, Homo sapiens; identical to SEQ ID NO: 74915

SEQ ID NO: 74960 - DNA, 201 bp, Homo sapiens; identical to SEQ ID NO: 74916

SEQ ID NO: 74961 - DNA, 201 bp, Homo sapiens; identical to SEQ ID NO: 74917

SEQ ID NO: 74962 - DNA, 201 bp, Homo sapiens; identical to SEQ ID NO: 74918

SEQ ID NO: 74963 - DNA, 201 bp, Homo sapiens
gggccatccagcactggctgaccgagagcgcccgcctcatctcccacacgggctccgtggtggagtgggtcacacccctgggcgtccccgtcatccagccstatcgcctggactccaaggtcaagcaaataggaggtggaattcagagcatcacctacacccacaacggagacatcagccgaaagcccaacacacgaaagt

SEQ ID NO: 74964 - DNA, 201 bp, Homo sapiens
tgcaggctacgcagatgccatgcagcctggacaagccgcatcgctcctctcggcttgtccctgtggtctaccacgtgtattccttccgcaacgtccagcaratcggcatcctgaagccgcacccggcctacgtgcagctgctggagaaggctacggagcccacgctgaccttcgaggcggtggatgtacccatgttttgcc

SEQ ID NO: 74965 - DNA, 201 bp, Homo sapiens
cggccccaggaggagctcatccgccagcccccaggagcaagaccaagaccgcaggaaggactggggccacgtggagctgctggaggtgctccaggcgcggrtgcggcagctgcaggctgggagcgtgtcggaggtggtggtgaacagggtggatgtggcgcggctcccagaatgtggcagtggaggtggtagcctccagcc

SEQ ID NO: 74966 - DNA, 201 bp, Homo sapiens
tcaagatccacctggtcaacctcacggggttgaagaagcgggagcctctgcggaagcgcctggcctttgcggaggaggtgatggatgacatcttggactcygcggaccaacccttgacgggccgaaagtggtggatgggcgcggaggaaccctggcagacgctggcctgctgtatggaggtggcgaacactgtgcgcgcct

SEQ ID NO: 74967 - DNA, 201 bp, Homo sapiens
gggctcaaacgggccctgcggccttgcggccgcccgggactccccgccaaagaagggaccgtcggtggcgtctgcggccccaggaggagctcatccgccarcccccaggagcaagaccaagaccgcaggaaggactggggccacgtggagctgctggaggtgctccaggcgcgggtgcggcagctgcaggctgggagcgtg

SEQ ID NO: 74968 - DNA, 201 bp, Homo sapiens
accacctgctggtggtccaccacggccagcggcagaagcggaagctgctcacgctggacatgtacaacgccgtgatgcttggctgggcgcggcagggtgcyttcaaggagctggtgtatgtgttattcatggtgaaggatgccggcttgaccccggacctgctgtcctatgcggctgccctccagtgcatggggaggcagg

SEQ ID NO: 74969 - DNA, 201 bp, Homo sapiens
caacctcacggggttgaagaagcgggagcctctgcggaagcgcctggcctttgcggaggaggtgatggatgacatcttggactccgcggaccaacccttgrcgggccgaaagtggtggatgggcgcggaggaaccctggcagacgctggcctgctgtatggaggtggcgaacactgtgcgcgcctccgaccctgccgccta

SEQ ID NO: 74970 - DNA, 201 bp, Homo sapiens; identical to SEQ ID NO: 74965

SEQ ID NO: 74971 - DNA, 201 bp, Homo sapiens; identical to SEQ ID NO: 74967

SEQ ID NO: 74972 - DNA, 201 bp, Homo sapiens; identical to SEQ ID NO: 74968

SEQ ID NO: 74973 - DNA, 201 bp, Homo sapiens; identical to SEQ ID NO: 74963

SEQ ID NO: 74974 - DNA, 201 bp, Homo sapiens; identical to SEQ ID NO: 74964

SEQ ID NO: 74975 - DNA, 201 bp, Homo sapiens; identical to SEQ ID NO: 74966

SEQ ID NO: 74976 - DNA, 201 bp, Homo sapiens; identical to SEQ ID NO: 74969

SEQ ID NO: 74977 - DNA, 141 bp, Homo sapiens
tccagcctgggcaacagagcaagactccatctcagggtgcyttcaaggagctggtgtatgtgttattcatggtgaaggatgccggcttgaccccggacctgctgtcctatgcggctgccctccagtgcatggggaggcagg

SEQ ID NO: 74978 - DNA, 201 bp, Homo sapiens
gctcggtcctgctgccggtgttcatcaccttctggtgtagcctccagcggtcgcgccggcagctgcaccgcagggacatcttccgcaagagcaagcacggrtggcgcgacacggacctgttcagccagcccacctactgctgcgtgtgcgcgcagcacattctgcagggcgccttctgcgactgctgcgggctccgcgtgg

SEQ ID NO: 74979 - DNA, 201 bp, Homo sapiens
gagccgcgcctccacccgcgcgaggtatcgtccttggagaagatggaagcggagaggcggccggcgccgggctcgccctccgagggcctgtttgcggacgrgcacctgatcttgtggacgctgtgctcggtcctgctgccggtgttcatcaccttctggtgtagcctccagcggtcgcgccggcagctgcaccgcagggac

SEQ ID NO: 74980 - DNA, 201 bp, Homo sapiens
agaaaacagtacatgatgagtgcatgaaaaatagtttaaagaatgaaaaatgtgattttggagaattcaaaaacctaatcattccaccaagttatttaacmtccattaatcagatgcgtaaagacaaaaaaacagattatgaagtgctagcctctaagcttggaaagcagtggaccccattaataatcctggccaactctc

SEQ ID NO: 74981 - DNA, 201 bp, Homo sapiens
atggaacccagccgcagtttgccaactgcagtgtttatgatttttttgtgtggctccattattattctgttagagatacattattaggaccaggacgcccytacagggccatagatttctcacatcaaggacctgcatttgttacctggcaccggtaccatttgttgtgtctggaaagagatctccagcgactcattggca

SEQ ID NO: 74982 - DNA, 201 bp, Homo sapiens
ttatgaatgctgatcaattaagtcttatcatttgaaagcaaaccatctgtacaaaacatgacaattcagaattaagtggttatattctgctatgcaatcaycagatcatgaggaataagaatgagacaatctttactacgatgttcagacttatcatgatggaccccacttcagagaagttaatggctcttgagatttcca

SEQ ID NO: 74983 - DNA, 201 bp, Homo sapiens
tagacctatattacaggattcaatagctggatacacattgattctatagtgataaatagagaagataataaaattatagagtttcctggttagttgatatrctactgtaaacctattaacaaatacagaattactctttccaaggaaggctgactgaaggctggtgaggctgtaaacctgaacatgagacaatttgacttg

SEQ ID NO: 74984 - DNA, 201 bp, Homo sapiens
tcttgtgggtatttttttaagaagaaaggaatagaaagcaaagaaaaataaaaaatactgaaaagaaaagactgaaagagtagaagataaggagaaaagtrcgacagagacaaggaaagtaagagagagagagagctctcccaattataaagccatgagccccctttggtgggggtttctgctcagttgcttgggctgcaa

SEQ ID NO: 74985 - DNA, 201 bp, Homo sapiens
gaatgtaaagaatgggtgttaagaggtccctggagctgccttcaacataaggggtcctagagggtgcaagactcatcaagaaccagtttaccccatgcaawaggactgctaaagccagagaaatggacaaagcccagttggaactgaatttgaatctcataaagctacaggtgcatctgagagcaggctcagtggtgaaga

SEQ ID NO: 74986 - DNA, 157 bp, Homo sapiens
ttggtgatctcccagataagccttcaagatgggtcaatttgttggagactctaaggttgaagctcttcctatttctatagtgccttacttatcctgagtaytttataaatattctttgaatgaataagtgaatgaataaactaatttcaaagtagaa

SEQ ID NO: 74987 - DNA, 201 bp, Homo sapiens
atgaccgtgagctgtggccaagaaaattcttccaccggacctgcaagtgcacaggaaactttgccggctataattgtggagactgcaagtttggctggacyggtcccaactgcgagcggaagaaaccaccagtgattcggcagaacatccattccttgagtcctcaggaaagagagcagttcttgggcgccttagatctcg

SEQ ID NO: 74988 - DNA, 201 bp, Homo sapiens
caattaaagtcaagagctaaggagggagggagagggtttagaaataccagcataataagtagtatgactgggtgctctgtaaattaactcaattagacaamgcctgacttaacgggggaagatggtgagaagcgctaccctcattaaatttggttgttagaggcgcttctaaggaaattaagtctgttagttgtttgaatc

SEQ ID NO: 74989 - DNA, 201 bp, Homo sapiens
ttgccctactggaactttgccactgggaggaacgagtgtgatgtgtgtacagaccagctgtttggggcagcgagaccagacgatccgactctgattagtcrgaactcaagattctccagctgggaaactgtctgtgatagcttggatgactacaaccacctggtcaccttgtgcaatggaacctatgaaggtttgctgaga

SEQ ID NO: 74990 - DNA, 201 bp, Homo sapiens
gaaagagagcagttcttgggcgccttagatctcgcgaagaagagagtacaccccgactacgtgatcaccacacaacactggctgggcctgcttgggcccartggaacccagccgcagtttgccaactgcagtgtttatgatttttttgtgtggctccattattattctgttagagatacattattaggaccaggacgcccc

SEQ ID NO: 74991 - DNA, 201 bp, Homo sapiens
tgatagggggaagaattcaaccttggagaaaatgaccagatcactttactgcttatatcttcagtattagaaaaactgcatgtatgattttaatagaaatrctttttataaagctaacattcagaaatgggataaaatgcaataacatctttcctttgtgcattaaattcccttctaattctaaaattgacatttgtatct

SEQ ID NO: 74992 - DNA, 201 bp, Homo sapiens; identical to SEQ ID NO: 74989

SEQ ID NO: 74993 - DNA, 201 bp, Homo sapiens
tagagtctccagggagagtgcagccgcctggctgacacacgccagtcctgccaacaccttcattttagacttctggccttcagaacagaccaggacgcccytacagggccatagatttctcacatcaaggacctgcatttgttacctggcaccggtaccatttgttgtgtctggaaagagatctccagcgactcattggca

SEQ ID NO: 74994 - DNA, 201 bp, Homo sapiens; identical to SEQ ID NO: 74985

SEQ ID NO: 74995 - DNA, 157 bp, Homo sapiens; identical to SEQ ID NO: 74986

SEQ ID NO: 74996 - DNA, 201 bp, Homo sapiens; identical to SEQ ID NO: 74991

SEQ ID NO: 74997 - DNA, 174 bp, Homo sapiens
agtgtttatgatttttttgtgtggctccattattattctgttagagatacattattaggtgggttttttccttggctgaaggtatattattacaggtttgkgattgggttgagggtatggcagtgggaagtaatttcatgcaagttaattaagagagcaaccacaaggcagcct

SEQ ID NO: 74998 - DNA, 201 bp, Homo sapiens
gaaagagagcagttcttgggcgccttagatctcgcgaagaagagagtacaccccgactacgtgatcaccacacaacactggctgggcctgcttgggcccartggaacccagccgcagtttgccaactgcagtgtttatgatttttttgtgtggctccattattattctgttagagatacattattaggtgggttttttcct

SEQ ID NO: 74999 - DNA, 201 bp, Homo sapiens; identical to SEQ ID NO: 74984

SEQ ID NO: 75000 - DNA, 201 bp, Homo sapiens; identical to SEQ ID NO: 74987

SEQ ID NO: 75001 - DNA, 201 bp, Homo sapiens; identical to SEQ ID NO: 74988

SEQ ID NO: 75002 - DNA, 201 bp, Homo sapiens
caagacggctgctgaccgcaggaatgtcaagcagaaccaggccttccagtacgagtttggagccatgtatgcatggatgctgtgtgtcttcactgtcatcrtggcctacagcatcacttgtcccatcatcgcgccatttggcctcatctacatcctgctcaagcacatggtggaccggcacaacctctacttcgtctacct

SEQ ID NO: 75003 - DNA, 201 bp, Homo sapiens
ctgctgaccctgaggacatctgctggaagaacctctctatccagggcctccgctggtggctacagtggctgggcatcaacttcaccctcttcctggggctrtttttcctgaccacaccctccatcatcctgtccaccatggacaagtttaatgtcaccaaacccatccatgcgctgaataacccgatcatcagccagttct

SEQ ID NO: 75004 - DNA, 201 bp, Homo sapiens
gcttcaagcacctcagccctctgaactacaaaacagaagagcctgcaagtgacaaaggaagtgaggcagaggcccacatgcccccaccgttcacaccctaygtgcctcggattctgaacggcttggcctcggagaggacagcactgtctccgcagcagcagcagcagcagacctatggtgccatccacaacatcagcggga

SEQ ID NO: 75005 - DNA, 201 bp, Homo sapiens
gctgggtcagggttaccccatagcaggcagggacaaggaccactcataatatgcccattggaccacagttaagatccagcctctctcacctcttcagggcygagtgcatgagtctgcacctccaggcaggctctgtgcagtactcaccccctccgtctgctccctccaaggtgtgggggtgggcagtgctcagggcctcct

SEQ ID NO: 75006 - DNA, 201 bp, Homo sapiens
tcctggggattctggggaatgggatgcaacttaagacttctgcctgagaagcctcctccctgctgcctccagggggcaccaaggcacaagcctgtgcagtwggggcgggatgggggtgtggaagagcaggtccaggctcctagcacaactggcctggggccttggcacctctgtaggccctgcctgtgcctgtccgctggc

SEQ ID NO: 75007 - DNA, 201 bp, Homo sapiens
ccatccactacctgtccttccagaggcacatcatcttcctgttggtggtggtcagctttttgtccctgtgtgtcatcctgcctgtcaacctctcaggggayttgctggacaaagacccgtatagttttgggaggacaacaatagcaaacctacagactgacaatgacctcctttggctgcacaccatctttgctgtcattt

SEQ ID NO: 75008 - DNA, 201 bp, Homo sapiens
caaagacccgtatagttttgggaggacaacaatagcaaacctacagactgacaatgacctcctttggctgcacaccatctttgctgtcatttacctcttcytcactgtgggtttcatgcggcaccacactcagtccattaagtacaaagaggagaacctggtgaggcggaccctgttcatcacaggactccccagagatgc

SEQ ID NO: 75009 - DNA, 201 bp, Homo sapiens
tggtgctgatcctgccctccctgggtctcaccagtctagattttttcttccggtggctctttgacaaaacttcctcggaggcctccatcaggttggagtgygtcttcctgcctgaccagggtgccttctttgtgaactatgtcatcgcctcggccttcatcggcaatggcatggagctgctgcggctgccaggtctcatcc

SEQ ID NO: 75010 - DNA, 201 bp, Homo sapiens
ggacagcactgtctccgcagcagcagcagcagcagacctatggtgccatccacaacatcagcgggactatccctggacagtgcttggcgcagagcgccacrggcagtgtggctgctgccccccaggaggcctgaggctgggtctcactgctctgaaaagacacaaccagaatggcctggggctcaggcccttggctgagtg

SEQ ID NO: 75011 - DNA, 201 bp, Homo sapiens
gaggtggctggggctgcttttgcctttgccagagacagctccaactgaggacctctccaacgggcccatccacagtccttccttcccctagtgtctgggargacaggcgcgatgatggactccccgttcctggagctgtggcagtccaaggcagtgtccatcagggagcagctgggactcggggaccggcccaacgactcc

SEQ ID NO: 75012 - DNA, 201 bp, Homo sapiens
tctgtaggccctgcctgtgcctgtccgctggcctggggggcctgggcttatctgggccttctcactcagggactctcttgacgctgacttgcccccgcagyggtggccagtgctgcctctgctccaagctgcccctgcgctgggaggggtgggggcggtgccattggtctggtgcagcatagccctggccagtggcctcat

SEQ ID NO: 75013 - DNA, 201 bp, Homo sapiens
ggtggctctttgacaaaacttcctcggaggcctccatcaggttggagtgcgtcttcctgcctgaccagggtgccttctttgtgaactatgtcatcgcctcrgccttcatcggcaatggcatggagctgctgcggctgccaggtctcatcctctataccttccgcatgatcatggccaagacggctgctgaccgcaggaatg

SEQ ID NO: 75014 - DNA, 201 bp, Homo sapiens
gggggtgggcagtgctcagggcctcctcggagccaaaggacagcatggtcggcacagaggaaggggtacctgggctgggtgcagggccatcccactgcccktgagctgtggctctggcaggaaggaggggcagcccatccctcttctccctcctggggattctggggaatgggatgcaacttaagacttctgcctgagaag

SEQ ID NO: 75015 - DNA, 201 bp, Homo sapiens
caaaaggaattattagactacaaaggaattggcattagtattcttgaaatgagtcacaggccgtcagattttatcaagattattaacaatgcagagaatcytgtgcggggattgctagctgttccagacaactacgaggtgatttttgtgcaaggaggtgggtcgagccagttcagtgctgtccccttaaagttgattggc

SEQ ID NO: 75016 - DNA, 201 bp, Homo sapiens
gtgacttattttccttttactatacagcttggcagagaaaataaatatcatcaaataagatacagtacaagctttcttttaatatatactgtatagatagwtatgacatgtttagtataaacagcatctattacaatcttacaaaaatgaagtatctgcacattttgcccctaaaccacattaaaataacttaaatatgct

SEQ ID NO: 75017 - DNA, 149 bp, Homo sapiens
cgcgttcctttcggagcggcggtgaaggtcctgggtgaggtaggggtgkatggtgcttgccgcgtatcatggctgcctccggaaaactcagcacttgccgtctccctccgttgcccacgattcgagaaatcattaagttgttaagactg

SEQ ID NO: 75018 - DNA, 201 bp, Homo sapiens
atctgcacattttgcccctaaaccacattaaaataacttaaatatgctttaaataaagcaaaaactaacaaacagctgaaagaaaatgcccagaggatttwaaaaaatggccctttgaaaactattaatcacgacttccccagccttactttttccacataacttaattattagaatgtaattttaaggatcctaaatcat

SEQ ID NO: 75019 - DNA, 146 bp, Homo sapiens
cgcgttcctttcggagcggcggtgaaggtcctgggtgaggtagggktggatggtgcttgccgcgtatcatggctgcctccggaaaactcagcacttgccgtctccctccgttgcccacgattcgagaaatcattaagttgttaaga

SEQ ID NO: 75020 - DNA, 201 bp, Homo sapiens
aggaagtggcagagagacttgcagccaatacaggaagcaaacagcgtagtcgcctctctgttatggctcagtacctctgcaatgttcgacacatctttacrattccaggacaagcttttgtccccaaaccagaggtggacgtgggcgtggtgcacttcactcccttgatacagcccaagatagagcagccattcaagctgg

SEQ ID NO: 75021 - DNA, 107 bp, Homo sapiens
cgcgttyctttcggagcggcggtgaaggtcctgggtgaggtaggggtggatggtgcttgccgcgtatcatggctgcctccggaaaactcagcacttgccgtctccct

SEQ ID NO: 75022 - DNA, 201 bp, Homo sapiens
aagctttcttttaatatatactgtatagatagatatgacatgtttagtataaacagcatctattacaatcttacaaaaatgaagtatctgcacattttgcycctaaaccacattaaaataacttaaatatgctttaaataaagcaaaaactaacaaacagctgaaagaaaatgcccagaggatttaaaaaaatggcccttt

SEQ ID NO: 75023 - DNA, 201 bp, Homo sapiens
ctgatattatttctatttaatactcttttctctcaagaaaaaaaaaaagtatgttttttctttattgtccttcatagcagaccaagtattgcctctctgcmatagacagctactgtcaatacatgctgtaatttgacattctgggtcacagatataaggtatttaaaatctatttatgctttatagagaaaccagacatta

SEQ ID NO: 75024 - DNA, 201 bp, Homo sapiens
gcacgcccttgggcagcggcggggcgcctgctcttccttccgcttgcgctgtgagctgaggcggtgtatgtgcggcaataacatgtcaaccccgctgcccrccatcgtgcccgccgcccggaaggccaccactgaggtgattttcctgcatggattgggagatactgggcacggatgggcagaagcctttgcaggtatcag

SEQ ID NO: 75025 - DNA, 201 bp, Homo sapiens
ggaccaggcttttattttccctgatattatttctatttaatactcttttctctcaagaaaaaaaaaaagtatgttttttctttattgtccttcatagcagrccaagtattgcctctctgccatagacagctactgtcaatacatgctgtaatttgacattctgggtcacagatataaggtatttaaaatctatttatgctt

SEQ ID NO: 75026 - DNA, 201 bp, Homo sapiens
atggcccttttattttgggaccaggcttttattttccctgatattatttctatttaatactcttttctctcaagaaaaaaaaaaagtatgttttttctttwttgtccttcatagcagaccaagtattgcctctctgccatagacagctactgtcaatacatgctgtaatttgacattctgggtcacagatataaggtattt

SEQ ID NO: 75027 - DNA, 201 bp, Homo sapiens
ttctcttcaattaatggcccttttattttgggaccaggcttttattttccctgatattatttctatttaatactcttttctctcaagaaaaaaaaaaagtwtgttttttctttattgtccttcatagcagaccaagtattgcctctctgccatagacagctactgtcaatacatgctgtaatttgacattctgggtcacag

SEQ ID NO: 75028 - DNA, 201 bp, Homo sapiens
ctcttccttccgcttgcgctgtgagctgaggcggtgtatgtgcggcaataacatgtcaaccccgctgcccaccatcgtgcccgccgcccggaaggccaccrctgaggtgattttcctgcatggattgggagatactgggcacggatgggcagaagcctttgcaggtatcagaagttcacatatcaaatatatctgcccgca

SEQ ID NO: 75029 - DNA, 201 bp, Homo sapiens
tcgttctcttcaattaatggcccttttattttgggaccaggcttttattttccctgatattatttctatttaatactcttttctctcaagaaaaaaaaaaagtatgttttttctttattgtccttcatagcagaccaagtattgcctctctgccatagacagctactgtcaatacatgctgtaatttgacattctgggtca

SEQ ID NO: 75030 - DNA, 201 bp, Homo sapiens
gcggcggggcgcctgctcttccttccgcttgcgctgtgagctgaggcggtgtatgtgcggcaataacatgtcaaccccgctgcccaccatcgtgcccgccscccggaaggccaccactgaggtgattttcctgcatggattgggagatactgggcacggatgggcagaagcctttgcaggtatcagaagttcacatatcaa

SEQ ID NO: 75031 - DNA, 201 bp, Homo sapiens
atgattataatacataataagaatgaggtggtattacattattcctaataatagggataatgctgtttattgtcaagaaaaagtaaaatcgttctcttcawttaatggcccttttattttgggaccaggcttttattttccctgatattatttctatttaatactcttttctctcaagaaaaaaaaaaagtatgttttttc

SEQ ID NO: 75032 - DNA, 201 bp, Homo sapiens
agcagttaagatataaacaatttatgcatgctgtgacttagtctatggatttattccaaaattgcttagtcactatgcagtgtctgtatttttatatatgygttcatatatacataatgattataatacataataagaatgaggtggtattacattattcctaataatagggataatgctgtttattgtcaagaaaaagta

SEQ ID NO: 75033 - DNA, 201 bp, Homo sapiens
taatgaaaatttgttcaggtataaatgagcagttaagatataaacaatttatgcatgctgtgacttagtctatggatttattccaaaattgcttagtcacyatgcagtgtctgtatttttatatatgcgttcatatatacataatgattataatacataataagaatgaggtggtattacattattcctaataatagggat

SEQ ID NO: 75034 - DNA, 201 bp, Homo sapiens
accatcgtgcccgccgcccggaaggccaccactgaggtgattttcctgcatggattgggagatactgggcacggatgggcagaagcctttgcaggtatcakaagttcacatatcaaatatatctgcccgcatgcgcctgttaggcctgttaacattaaatatgaacatagctatgccttcatggtttgatattattgggct

SEQ ID NO: 75035 - DNA, 201 bp, Homo sapiens
cgctgcccaccatcgtgcccgccgcccggaaggccaccactgaggtgattttcctgcatggattgggagatactgggcacggatgggcagaagcctttgcmggtatcagaagttcacatatcaaatatatctgcccgcatgcgcctgttaggcctgttaacattaaatatgaacatagctatgccttcatggtttgatatt

SEQ ID NO: 75036 - DNA, 201 bp, Homo sapiens
caccagattttttattacatcatttgaaaattagcagtatgcttaatgaaaatttgttcaggtataaatgagcagttaagatataaacaatttatgcatgytgtgacttagtctatggatttattccaaaattgcttagtcactatgcagtgtctgtatttttatatatgcgttcatatatacataatgattataatacat

SEQ ID NO: 75037 - DNA, 201 bp, Homo sapiens
tatctttatatactgcccttaccacgcaccagaaactggcaggtgtcactgcactcaattgctggcttccactttgggcttcctttccacagggtcctatyggtggtgctaatagagatatttctattctccagtgccacggggattgtgaccctttggttcccctgatgtttggttctcttacggttgaaaaactaaaaa

SEQ ID NO: 75038 - DNA, 201 bp, Homo sapiens
atactgcccttaccacgcaccagaaactggcaggtgtcactgcactcaattgctggcttccactttgggcttcctttccacagggtcctatcggtggtgcyaatagagatatttctattctccagtgccacggggattgtgaccctttggttcccctgatgtttggttctcttacggttgaaaaactaaaaaacattggtg

SEQ ID NO: 75039 - DNA, 201 bp, Homo sapiens
tgctgtgagaattctcctttgagatttcagaagaaaggaaacaatgtgattcaagatatttacataccagaagcatctaggactgatggatcactgtcccrattcaaattattcttcagtccatttccccttcctatttcagctgttccttttcacctaactgttcagtcattctggttttcaagcagtgctttatctcat

SEQ ID NO: 75040 - DNA, 196 bp, Homo sapiens
gccatcgcgccattcctagttaaggcggcacagggccgaggcgtagtgtgggtgactcctccgttccttgggtcccgtcgtctgtgatactgcagygcagccatggcagaaccgcagcccccgtccggcggcctcacggacgaggccgccctcagttgctgctccgacgcggaccccagtaccaaggattttctat

SEQ ID NO: 75041 - DNA, 201 bp, Homo sapiens
aaaaatgacatccctaaagaaaaagatgaaaaaatagcctgggcgctctccagaaaagctacacttgagctgacacacaattggggcactgaagatgatgmgacccagagttaccacaatggcaattcagaccctcgaggattcggtcatattggaattgctgttcctgatgtatacagtgcttgtaaaaggtttgaagaa

SEQ ID NO: 75042 - DNA, 195 bp, Homo sapiens
atgactatatttagatttctctagactctagtggaagacctttggaaaggccatgccaaccgtgcttgtactgctagaagcactttatgtttcctttttgrgtgaaatggatttatgtgagtgctttaaacaaatagcaatacttatagactgaaataaaatgaaacttcaaataagactatgtttaatttgtaa

SEQ ID NO: 75043 - DNA, 141 bp, Homo sapiens
gccatcgcgccattcctagttaaggcggcacagggccgagkcgtagtgtgggtgactcctccgttccttgggtcccgtcgtctgtgatactgcagtgcagccatggcagaaccgcagcccccgtccggcggcctcacggac

SEQ ID NO: 75044 - DNA, 201 bp, Homo sapiens
gggcgctctccagaaaagctacacttgagctgacacacaattggggcactgaagatgatgagacccagagttaccacaatggcaattcagaccctcgaggwttcggtcatattggaattgctgttcctgatgtatacagtgcttgtaaaaggtttgaagaactgggagtcaaatttgtgaagaaacctgatgatggtaaaa

SEQ ID NO: 75045 - DNA, 201 bp, Homo sapiens
cagtgcagccatggcagaaccgcagcccccgtccggcggcctcacggacgaggccgccctcagttgctgctccgacgcggaccccagtaccaaggattttytattgcagcagaccatgctacgagtgaaggatcctaagaagtcactggatttttatactagagttcttggaatgacgctaatccaaaaatgtgattttcc

SEQ ID NO: 75046 - DNA, 201 bp, Homo sapiens; identical to SEQ ID NO: 75039

SEQ ID NO: 75047 - DNA, 196 bp, Homo sapiens; identical to SEQ ID NO: 75040

SEQ ID NO: 75048 - DNA, 201 bp, Homo sapiens; identical to SEQ ID NO: 75041

SEQ ID NO: 75049 - DNA, 178 bp, Homo sapiens
atgactatatttagatttctctagactctagtggaagacctttggaaaggccatgccaaccgtgcttgtactgctagaagcactttatgtttcctttttgrgtgaaatggatttatgtgagtgctttaaacaaatagcaatacttatagactgaaataaaatgaaacttcaaataaga

SEQ ID NO: 75050 - DNA, 141 bp, Homo sapiens; identical to SEQ ID NO: 75043

SEQ ID NO: 75051 - DNA, 201 bp, Homo sapiens; identical to SEQ ID NO: 75044

SEQ ID NO: 75052 - DNA, 201 bp, Homo sapiens; identical to SEQ ID NO: 75045

SEQ ID NO: 75053 - DNA, 201 bp, Homo sapiens
acgaccctgagaagctgaaagagctgattgagctgccgccctttgagattgtcacaggagaacggctgcctgccaacttctttaaattccagttccggaaygtggagtacagttccgggaggaacaagaccttcctctgctatgtggttgaagcacagggcaaggggggccaagtgcaggcatctcggggatacctagagg

SEQ ID NO: 75054 - DNA, 201 bp, Homo sapiens
ttcttcaacaccatcctgccagccttcgacccagccctgcggtacaatgtcacctggtatgtgtcctccagcccctgtgcagcgtgtgctgaccgcattaycaaaacccttagcaagaccaagaacctgcgtctgctcattctggtgggtcgactcttcatgtgggaggagccggagatccaggctgctctgaagaagctg

SEQ ID NO: 75055 - DNA, 201 bp, Homo sapiens
gggtcgactcttcatgtgggaggagccggagatccaggctgctctgaagaagctgaaggaggctggctgtaaactgcgcatcatgaagccccaggacttcraatatgtctggcagaattttgtggagcaagaagagggtgaatccaaggcctttcagccctgggaggacattcaggagaacttcctatactacgaggagaa

SEQ ID NO: 75056 - DNA, 201 bp, Homo sapiens
cagttgttcttttatacttgggaaagcagcaagtcctgtgacagacccaaagtcactctagggagaaaatcaatagcaagtctggctgttttaactctcamcaccactgtaagggaaaacaagaaaatgtctagtttcccgaatagctctgatactgaaccattggctaaatccatgaactttattttcctaccatgacca

SEQ ID NO: 75057 - DNA, 201 bp, Homo sapiens
agctgccgccctttgagattgtcacaggagaacggctgcctgccaacttctttaaattccagttccggaatgtggagtacagttccgggaggaacaagacsttcctctgctatgtggttgaagcacagggcaaggggggccaagtgcaggcatctcggggatacctagaggatgagcatgcggctgcccatgcagaggaag

SEQ ID NO: 75058 - DNA, 201 bp, Homo sapiens
gaaagagctgattgagctgccgccctttgagattgtcacaggagaacggctgcctgccaacttctttaaattccagttccggaatgtggagtacagttccrggaggaacaagaccttcctctgctatgtggttgaagcacagggcaaggggggccaagtgcaggcatctcggggatacctagaggatgagcatgcggctgc

SEQ ID NO: 75059 - DNA, 201 bp, Homo sapiens
tctgaagaagctgaaggaggctggctgtaaactgcgcatcatgaagccccaggacttcgaatatgtctggcagaattttgtggagcaagaagagggtgaayccaaggcctttcagccctgggaggacattcaggagaacttcctatactacgaggagaagttggcagacatcctgaagtagggcaactgggctttgcctca

SEQ ID NO: 75060 - DNA, 201 bp, Homo sapiens
cgacgcggacttcgaggcccacatcatcgacatgctggccaaggccagcaagatcgaagtctaccggggcaactgagccgggcctcgccgcgacccttccrgcccatctatcgggcaccggggctccggcccgggacccaggaccagcaacccgcgaccaatcatgctgcagcccaggggcgtctgctgtgccccgccaat

SEQ ID NO: 75061 - DNA, 201 bp, Homo sapiens
gccttcgggggcgggccagcggccgctcaatccccactccctcatgctttgggttagggttttctttcacgctttctgaggaggagagcatggcgcgggcytcggcgaagcacttccgtcagcctcgggcggaggatcgtcttagtagctggccagacctggaggagagcgggcggtctttgcgggcctcaggagataggt

SEQ ID NO: 75062 - DNA, 201 bp, Homo sapiens
cacgacgcggacttcgaggcccacatcatcgacatgctggccaaggccagcaagatcgaagtctaccggggcaactgagccgggcctcgccgcgacccttscggcccatctatcgggcaccggggctccggcccgggacccaggaccagcaacccgcgaccaatcatgctgcagcccaggggcgtctgctgtgccccgcca

SEQ ID NO: 75063 - DNA, 201 bp, Homo sapiens
cgctcccctacctggactcaggggccctggatgggacgcaccgggtgaagctggtgcccggctatgccggcctgcagcgcctcagcaaggagaggctctcrggcaagagctgtgcctgtcgccgctgcatgggcgatgccggtgcctccgactggtttgacagccactttgacggtaacatttcccccgtctggacccgag

SEQ ID NO: 75064 - DNA, 201 bp, Homo sapiens
cagccactcctgccaacgtgtgttctccctacatgagggagggcgtggcaagggacccctgccactgtcccctgctgcagcacgtgcccctatgccctttrcatgtggtgccagaataggcaggctacgccgtggctggcccctcagcgggctgggaaaagagtggccacggtgaccgtcacccgcctgccggcaccatga

SEQ ID NO: 75065 - DNA, 201 bp, Homo sapiens; identical to SEQ ID NO: 75060

SEQ ID NO: 75066 - DNA, 201 bp, Homo sapiens; identical to SEQ ID NO: 75061

SEQ ID NO: 75067 - DNA, 201 bp, Homo sapiens; identical to SEQ ID NO: 75062

SEQ ID NO: 75068 - DNA, 201 bp, Homo sapiens; identical to SEQ ID NO: 75063

SEQ ID NO: 75069 - DNA, 201 bp, Homo sapiens; identical to SEQ ID NO: 75064

SEQ ID NO: 75070 - DNA, 201 bp, Homo sapiens; identical to SEQ ID NO: 75060

SEQ ID NO: 75071 - DNA, 201 bp, Homo sapiens; identical to SEQ ID NO: 75061

SEQ ID NO: 75072 - DNA, 201 bp, Homo sapiens; identical to SEQ ID NO: 75062

SEQ ID NO: 75073 - DNA, 201 bp, Homo sapiens; identical to SEQ ID NO: 75063

SEQ ID NO: 75074 - DNA, 201 bp, Homo sapiens; identical to SEQ ID NO: 75064

SEQ ID NO: 75075 - DNA, 201 bp, Homo sapiens; identical to SEQ ID NO: 75060

SEQ ID NO: 75076 - DNA, 201 bp, Homo sapiens; identical to SEQ ID NO: 75061

SEQ ID NO: 75077 - DNA, 201 bp, Homo sapiens; identical to SEQ ID NO: 75062

SEQ ID NO: 75078 - DNA, 201 bp, Homo sapiens; identical to SEQ ID NO: 75063

SEQ ID NO: 75079 - DNA, 201 bp, Homo sapiens; identical to SEQ ID NO: 75064

SEQ ID NO: 75080 - DNA, 201 bp, Homo sapiens; identical to SEQ ID NO: 75060

SEQ ID NO: 75081 - DNA, 201 bp, Homo sapiens; identical to SEQ ID NO: 75061

SEQ ID NO: 75082 - DNA, 201 bp, Homo sapiens; identical to SEQ ID NO: 75062

SEQ ID NO: 75083 - DNA, 201 bp, Homo sapiens; identical to SEQ ID NO: 75063

SEQ ID NO: 75084 - DNA, 201 bp, Homo sapiens; identical to SEQ ID NO: 75064

SEQ ID NO: 75085 - DNA, 201 bp, Homo sapiens
caccggtacctgccgcctgcccgtcgggggatttgccgaactcatcggtagcaacggaccacagaagttttgcattgacaaagttggcaaggaaacctggytgcccagaagccacacctgcttcaaccgtctggatcttccaccctacaagagctacgaacagctgagagagaagctgctgtatgccattgaggagaccga

SEQ ID NO: 75086 - DNA, 201 bp, Homo sapiens
ccagagagtggtttttcctcctgtctcacgaggtgctcaaccctatgtattgtttatttgaatatgccggaaagaacaattactgcctgcagatcaacccygcctcctccatcaacccggaccacctcacctactttcgctttataggcagattcatcgccatggcgctgtaccatggaaagttcatcgacacgggcttca

SEQ ID NO: 75087 - DNA, 201 bp, Homo sapiens
aaccctatgacctgcgccgccggctctacatcatcatgcgtggcgaggagggcctggactatgggggcatcgccagagagtggtttttcctcctgtctcaygaggtgctcaaccctatgtattgtttatttgaatatgccggaaagaacaattactgcctgcagatcaaccccgcctcctccatcaacccggaccacctca

SEQ ID NO: 75088 - DNA, 201 bp, Homo sapiens
atgctcccagattctcgaccttcccccggcccgggaggtgcagcctgcgtctgcctctgtcgtgtgtgctgatttgagtggcttagcttgccacagcgcarcctcttctgtccctttcagtcatttgctgtacttccctgtggcacgttaccatggaagccgctccagggtgggtcagggtgcaagctgctggtgaggttt

SEQ ID NO: 75089 - DNA, 201 bp, Homo sapiens
tgcccagaagccacacctgcttcaaccgtctggatcttccaccctacaagagctacgaacagctgagagagaagctgctgtatgccattgaggagaccgarggctttggacaggagtaaccgaggccgcccctcccacgccccccagcgcacatgtagtcctgagtcctccctgcctgagaggccactggccccgcagccc

SEQ ID NO: 75090 - DNA, 201 bp, Homo sapiens
cacggcagcttcacggtgatgatatggcatctgccagctctagccgggcaggagtggccctgccttttgagaagtctcagctcactttgaaagtggtgtcygcaaagcccaaggtgcataatcgtcaacctcgaattaactcctacgtggaggtggcggtggatggactccccagtgagaccaagaagactgggaagcgca

SEQ ID NO: 75091 - DNA, 201 bp, Homo sapiens
agctggagctgatgctgtgcggcatgcaggagatagacatgagcgactggcagaagagcaccatctaccggcactacaccaagaacagcaagcagatccastggttctggcaggtggtgaaggagatggacaacgagaagaggatccggctgctgcagtttgtcaccggtacctgccgcctgcccgtcgggggatttgccg

SEQ ID NO: 75092 - DNA, 201 bp, Homo sapiens
gggccctggggcgaggccatctctgcctgcctccctagcaggcgccagcggtggaggctgagtcgcaggacacatgccggccagttaattcattctcagcmaatgaaggtttgtctaagctgcctgggtatccacgggacaaaaacagcaaactccctcagactttgtccatgtataaacttgaagtggttgtgttgtagg

SEQ ID NO: 75093 - DNA, 201 bp, Homo sapiens
aagaatgtggcctggagctgtacttcatccaggacatggagatactgggcaaggtgacgacccacgagctgaaggagggcggcgagagcatccgggtcacrgaggagaacaaggaagagtacatcatgctgctgactgactggcgtttcacccgaggcgtggaagagcagaccaaagccttcctggatggcttcaacgagg

SEQ ID NO: 75094 - DNA, 201 bp, Homo sapiens
acagtggcttggccaatggcacagtgaatgatgaacccacaacagccactgatcccgaagaaccttccgttgttggtgtgacgtccccacctgctgcaccyttgagtgtgaccccgaatcccaacacgacttctctccctgccccagccacaccggctgaaggagaggaacccagcacttcgggtacacagcagctcccag

SEQ ID NO: 75095 - DNA, 201 bp, Homo sapiens
gcaaatgaaggtttgtctaagctgcctgggtatccacgggacaaaaacagcaaactccctcagactttgtccatgtataaacttgaagtggttgtgttgtrgggttgcaggttttttgttacgctgctgtcactttctgtccaggagctggcaccccaggtgttctgagaccttgagggacccagacctttgggtccaaga

SEQ ID NO: 75096 - DNA, 201 bp, Homo sapiens
ttttgttacgctgctgtcactttctgtccaggagctggcaccccaggtgttctgagaccttgagggacccagacctttgggtccaagagtttcccaaacarccacgcctctcaggaacccacctggcggttccgtgagctcaggcaggcctgacccggcggcacagcctggcagggacctcgtccccaagcctggcagaat

SEQ ID NO: 75097 - DNA, 201 bp, Homo sapiens
agggggccatgcagcacttcagccaaagattcctctaccagtcttcgagtgcttcgactgaccatgatcccctgggccccctccctcctggctgggagaaragacaggacaatggacgggtgtattacgtgaaccataacactcgcacgacccagtgggaggatccccggacccaggggatgatccaggaaccagctctgc

SEQ ID NO: 75098 - DNA, 201 bp, Homo sapiens
gtgcttcgactgaccatgatcccctgggccccctccctcctggctgggagaaaagacaggacaatggacgggtgtattacgtgaaccataacactcgcacracccagtgggaggatccccggacccaggggatgatccaggaaccagctctgcccccaggatgggagatgaaatacaccagcgagggggtgcgatactttg

SEQ ID NO: 75099 - DNA, 201 bp, Homo sapiens
ctgccagctctagccgggcaggagtggccctgccttttgagaagtctcagctcactttgaaagtggtgtccgcaaagcccaaggtgcataatcgtcaacckcgaattaactcctacgtggaggtggcggtggatggactccccagtgagaccaagaagactgggaagcgcattgggagctctgagcttctctggaatgaga

SEQ ID NO: 75100 - DNA, 201 bp, Homo sapiens; identical to SEQ ID NO: 75085

SEQ ID NO: 75101 - DNA, 201 bp, Homo sapiens; identical to SEQ ID NO: 75086

SEQ ID NO: 75102 - DNA, 201 bp, Homo sapiens; identical to SEQ ID NO: 75087

SEQ ID NO: 75103 - DNA, 201 bp, Homo sapiens; identical to SEQ ID NO: 75088

SEQ ID NO: 75104 - DNA, 201 bp, Homo sapiens; identical to SEQ ID NO: 75089

SEQ ID NO: 75105 - DNA, 201 bp, Homo sapiens
tccaccagcttcacggtgatgatatggcatctgccagctctagccgggcaggagtggccctgccttttgagaagtctcagctcactttgaaagtggtgtcygcaaagcccaaggtgcataatcgtcaacctcgaattaactcctacgtggaggtggcggtggatggactccccagtgagaccaagaagactgggaagcgca

SEQ ID NO: 75106 - DNA, 201 bp, Homo sapiens; identical to SEQ ID NO: 75091

SEQ ID NO: 75107 - DNA, 201 bp, Homo sapiens; identical to SEQ ID NO: 75092

SEQ ID NO: 75108 - DNA, 201 bp, Homo sapiens; identical to SEQ ID NO: 75093

SEQ ID NO: 75109 - DNA, 201 bp, Homo sapiens; identical to SEQ ID NO: 75094

SEQ ID NO: 75110 - DNA, 201 bp, Homo sapiens; identical to SEQ ID NO: 75095

SEQ ID NO: 75111 - DNA, 201 bp, Homo sapiens; identical to SEQ ID NO: 75096

SEQ ID NO: 75112 - DNA, 201 bp, Homo sapiens; identical to SEQ ID NO: 75097

SEQ ID NO: 75113 - DNA, 201 bp, Homo sapiens; identical to SEQ ID NO: 75098

SEQ ID NO: 75114 - DNA, 201 bp, Homo sapiens; identical to SEQ ID NO: 75099

SEQ ID NO: 75115 - DNA, 201 bp, Homo sapiens; identical to SEQ ID NO: 75085

SEQ ID NO: 75116 - DNA, 201 bp, Homo sapiens; identical to SEQ ID NO: 75086

SEQ ID NO: 75117 - DNA, 201 bp, Homo sapiens; identical to SEQ ID NO: 75087

SEQ ID NO: 75118 - DNA, 201 bp, Homo sapiens
tgcccagaagccacacctgcttcaaccgtctggatcttccaccctacaagagctacgaacagctgagagagaagctgctgtatgccattgaggagaccgarggctttggacaggagggctgccgcagaggccggagacctcctggactagttcggcgaggagactggccactgggggtggctgttcgggactgagagcgcc

SEQ ID NO: 75119 - DNA, 201 bp, Homo sapiens; identical to SEQ ID NO: 75090

SEQ ID NO: 75120 - DNA, 201 bp, Homo sapiens; identical to SEQ ID NO: 75091

SEQ ID NO: 75121 - DNA, 201 bp, Homo sapiens
gggccctggggcgaggccatctctgcctgcctccctagcaggcgccagcggtggaggctgagtcgcaggacacatgccggccagttaattcattctcagcmaatgaaggacatgaaaaccagcagaaaggccctgagctgctgcatagccccatctgatttctgcagttcccgccagcctccaacacggggactctgccgt

SEQ ID NO: 75122 - DNA, 201 bp, Homo sapiens; identical to SEQ ID NO: 75094

SEQ ID NO: 75123 - DNA, 201 bp, Homo sapiens; identical to SEQ ID NO: 75093

SEQ ID NO: 75124 - DNA, 201 bp, Homo sapiens; identical to SEQ ID NO: 75097

SEQ ID NO: 75125 - DNA, 201 bp, Homo sapiens; identical to SEQ ID NO: 75098

SEQ ID NO: 75126 - DNA, 201 bp, Homo sapiens; identical to SEQ ID NO: 75099

SEQ ID NO: 75127 - DNA, 201 bp, Homo sapiens; identical to SEQ ID NO: 75085

SEQ ID NO: 75128 - DNA, 201 bp, Homo sapiens; identical to SEQ ID NO: 75086

SEQ ID NO: 75129 - DNA, 201 bp, Homo sapiens; identical to SEQ ID NO: 75087

SEQ ID NO: 75130 - DNA, 201 bp, Homo sapiens; identical to SEQ ID NO: 75088

SEQ ID NO: 75131 - DNA, 201 bp, Homo sapiens; identical to SEQ ID NO: 75089

SEQ ID NO: 75132 - DNA, 201 bp, Homo sapiens; identical to SEQ ID NO: 75105

SEQ ID NO: 75133 - DNA, 201 bp, Homo sapiens; identical to SEQ ID NO: 75091

SEQ ID NO: 75134 - DNA, 201 bp, Homo sapiens; identical to SEQ ID NO: 75092

SEQ ID NO: 75135 - DNA, 201 bp, Homo sapiens; identical to SEQ ID NO: 75093

SEQ ID NO: 75136 - DNA, 201 bp, Homo sapiens; identical to SEQ ID NO: 75094

SEQ ID NO: 75137 - DNA, 201 bp, Homo sapiens; identical to SEQ ID NO: 75095

SEQ ID NO: 75138 - DNA, 201 bp, Homo sapiens; identical to SEQ ID NO: 75096

SEQ ID NO: 75139 - DNA, 201 bp, Homo sapiens; identical to SEQ ID NO: 75097

SEQ ID NO: 75140 - DNA, 201 bp, Homo sapiens; identical to SEQ ID NO: 75098

SEQ ID NO: 75141 - DNA, 201 bp, Homo sapiens; identical to SEQ ID NO: 75099

SEQ ID NO: 75142 - DNA, 201 bp, Homo sapiens
ggaatgcgtacattgtggcttcccgagatttcgtccaacatgttttgaagaaccctaaatcccaacaactgattgaatgggtaaaagacacttatagcccwgatgaacacctctgggccacccttcagcgtgcacggtggatgcctggctctgttcccaaccaccccaagtacgacatctcagacatgacttctattgcca

SEQ ID NO: 75143 - DNA, 201 bp, Homo sapiens
tgcccctcagaacatatactgtgtccatgtggatgagaagtccccagaaactttcaaagaggcggtcaaagcaattatttcttgcttcccaaatgtcttcrtagccagtaagctggttcgggtggtttatgcctcctggtccagggtgcaagctgacctcaactgcatggaagacttgctccagagctcagtgccgtggaa

SEQ ID NO: 75144 - DNA, 201 bp, Homo sapiens
ggataagagggctgctattagattgtgggtaagtagatcttttgccttgcaaattgctgcctgggtgaatgctgcttgttctctcacccctaaccctagtmgttcctccactaactttctcactaagtgagaatgagaactgctgtgatagggagagtgaaggagggatatgtggtagagcacttgatttcagttgaatgc

SEQ ID NO: 75145 - DNA, 201 bp, Homo sapiens
ttctattgccaggctggtcaagtggcagggtcatgagggagacatcgataagggtgctccttatgctccctgctctggaatccaccagcgggctatctgcrtttatggggctggggacttgaattggatgcttcaaaaccatcacctgttggccaacaagtttgacccaaaggtagatgataatgctcttcagtgcttaga

SEQ ID NO: 75146 - DNA, 201 bp, Homo sapiens
acttcctgaatacatgtgggacggactttcctataaagagcaatgcagagatggtccaggctctcaagatgttgaatgggaggaatagcatggagtcagargtacctcctaagcacaaagaaacccgctggaaatatcactttgaggtagtgagagacacattacacctaaccaacaagaagaaggatcctcccccttata

SEQ ID NO: 75147 - DNA, 201 bp, Homo sapiens
tgagagacacattacacctaaccaacaagaagaaggatcctcccccttataatttaactatgtttacagggaatgcgtacattgtggcttcccgagatttygtccaacatgttttgaagaaccctaaatcccaacaactgattgaatgggtaaaagacacttatagcccagatgaacacctctgggccacccttcagcgtg

SEQ ID NO: 75148 - DNA, 201 bp, Homo sapiens
gcatgtacaaacatgctcagaacttgctgggacagtgtgggtgggagaccagggctttgcaattcgtggcatcctttaggataagagggctgctattagaktgtgggtaagtagatcttttgccttgcaaattgctgcctgggtgaatgctgcttgttctctcacccctaaccctagtagttcctccactaactttctcac

SEQ ID NO: 75149 - DNA, 201 bp, Homo sapiens; identical to SEQ ID NO: 75142

SEQ ID NO: 75150 - DNA, 201 bp, Homo sapiens; identical to SEQ ID NO: 75143

SEQ ID NO: 75151 - DNA, 201 bp, Homo sapiens; identical to SEQ ID NO: 75144

SEQ ID NO: 75152 - DNA, 201 bp, Homo sapiens; identical to SEQ ID NO: 75145

SEQ ID NO: 75153 - DNA, 201 bp, Homo sapiens; identical to SEQ ID NO: 75146

SEQ ID NO: 75154 - DNA, 201 bp, Homo sapiens; identical to SEQ ID NO: 75147

SEQ ID NO: 75155 - DNA, 201 bp, Homo sapiens; identical to SEQ ID NO: 75148

SEQ ID NO: 75156 - DNA, 169 bp, Homo sapiens
gcctgtaatcctagcactttggaaggccaaggcaggcggaccacctgaggtcaggagagcttgagtccrgccactgtctgggtactgccagccatcgggcccaggtctctggggttgtcttaccgcagtgagtaccacgcggtactacagagaccggctgcccgtgtgc

SEQ ID NO: 75157 - DNA, 201 bp, Homo sapiens
gagagcttgagtccagccactgtctgggtactgccagccatcgggcccaggtctctggggttgtcttaccgcagtgagtaccacgcggtactacagagacyggctgcccgtgtgcctggcaggtggagccgcccgcatcagcggcctcggggaatggaagcggagaacgcgggcagctattcccttcagcaagctcaagct

SEQ ID NO: 75158 - DNA, 201 bp, Homo sapiens
ccagtaagccaataattttaaagattctttatctgcatcattgctgtttgttactataaattaaatgaacctcatggaaaggttgaggtgtatacctttgygattttctaatgagttttccatggtgctacaaataatccagactaccaggtctggtagatattaaagctgggtactaagaaatgttatttgcatcctctc

SEQ ID NO: 75159 - DNA, 201 bp, Homo sapiens
tttactgcaatgatgagagcatcaagtacccactgaaaactggtgagacaataaatgacgctgtgctctgtgccgtggggatcgtcattgccatcctcgcratcatcacgggggaattctaccggatctattacctgaagaagtcgcggtcgacgattcagaacccctacgtggcagcactctataagcaagtgggctgct

SEQ ID NO: 75160 - DNA, 201 bp, Homo sapiens
tttttgtaaaatgactgctgacagcaagttcttgctgctctccaatctcatcagacagtagaatgtagggaaaaacttttgcccgactgatttttaaaaargaaaaaaaaaatgttttactatgtggccttccaaaataggtagtgtttgcctatgtggaaacaacagcaaactaacaccaagtgccagagtcctggatgt

SEQ ID NO: 75161 - DNA, 201 bp, Homo sapiens
aagacgacgctctccctgcctgcccctgctatccggaaggaaatcctttcacctgtggacattattgacaggaacaatcaccacaacatgatgtaggtgcyacccacctcctgagctgtttttgtaaaatgactgctgacagcaagttcttgctgctctccaatctcatcagacagtagaatgtagggaaaaacttttgcc

SEQ ID NO: 75162 - DNA, 201 bp, Homo sapiens
cacatgatgccagaaatagcactgaatcaagaaaatagccattgcggagctgccctcttgagtctttctgtccatcccattctattctgtactgtgacttyagttcaggaagttttgttttgtgttttaaataaaaggaaagagcaagtttgctcagtcaagtgatcagatcccgaatctagattcccagttctaaggcct

SEQ ID NO: 75163 - DNA, 201 bp, Homo sapiens
acgagtgaatttcacaaacagcacaatttcagaagaaatcgagggcacaggccctcacttttcttcttttgacgcatcatcctgtgatgttgaaatgtcarttgcaggatgctgatgttgtgcacgtcaatcaccgggcacttgcatactcttagaaacagttcgacttcggttactgccttctcccttgaaatccttgct

SEQ ID NO: 75164 - DNA, 201 bp, Homo sapiens
gatgcagaggtgatgacagcaaagtccaggaagccaggaagtccttcttctctggccatgcctccttctccatgtacactatgctgtatttggtgctatayctgcaggcccgcttcacttggcgaggagcccgcctgctccggcccctcctgcagttcaccttgatcatgatggccttctacacgggactgtctcgcgtat

SEQ ID NO: 75165 - DNA, 201 bp, Homo sapiens
atttctgaaacaatttagctatatccactatgattataaactgtgtctcgacctgtgttatttacattagctgcttaaaaaagcattgagttaattttttwaaatatcaactaaaatatcatagttctgtggtagacattgttttataatgaaataactgcaactagagaaaactgtataaaaacattaaattgtcagtat

SEQ ID NO: 75166 - DNA, 201 bp, Homo sapiens; identical to SEQ ID NO: 75159

SEQ ID NO: 75167 - DNA, 201 bp, Homo sapiens; identical to SEQ ID NO: 75160

SEQ ID NO: 75168 - DNA, 201 bp, Homo sapiens; identical to SEQ ID NO: 75161

SEQ ID NO: 75169 - DNA, 201 bp, Homo sapiens; identical to SEQ ID NO: 75162

SEQ ID NO: 75170 - DNA, 201 bp, Homo sapiens; identical to SEQ ID NO: 75163

SEQ ID NO: 75171 - DNA, 201 bp, Homo sapiens; identical to SEQ ID NO: 75164

SEQ ID NO: 75172 - DNA, 201 bp, Homo sapiens; identical to SEQ ID NO: 75165

SEQ ID NO: 75173 - DNA, 201 bp, Homo sapiens; identical to SEQ ID NO: 75159

SEQ ID NO: 75174 - DNA, 201 bp, Homo sapiens; identical to SEQ ID NO: 75160

SEQ ID NO: 75175 - DNA, 201 bp, Homo sapiens; identical to SEQ ID NO: 75161

SEQ ID NO: 75176 - DNA, 201 bp, Homo sapiens
cacatgatgccagaaatagcactgaatcaagaaaatagccattgcggagctgccctcttgagtctttctgtccatcccattctattctgtactgtgacttyagttcaggaagttttgttttgtattcccagttctaaggccttatcacctcccctgcccataggccaacaaccatagttcctcacattagtgattagcaga

SEQ ID NO: 75177 - DNA, 201 bp, Homo sapiens; identical to SEQ ID NO: 75163

SEQ ID NO: 75178 - DNA, 201 bp, Homo sapiens; identical to SEQ ID NO: 75164

SEQ ID NO: 75179 - DNA, 201 bp, Homo sapiens; identical to SEQ ID NO: 75159

SEQ ID NO: 75180 - DNA, 201 bp, Homo sapiens; identical to SEQ ID NO: 75160

SEQ ID NO: 75181 - DNA, 201 bp, Homo sapiens; identical to SEQ ID NO: 75161

SEQ ID NO: 75182 - DNA, 201 bp, Homo sapiens; identical to SEQ ID NO: 75176

SEQ ID NO: 75183 - DNA, 201 bp, Homo sapiens; identical to SEQ ID NO: 75163

SEQ ID NO: 75184 - DNA, 201 bp, Homo sapiens; identical to SEQ ID NO: 75164

SEQ ID NO: 75185 - DNA, 201 bp, Homo sapiens
tatggcgtcggagactacaagcttggcaatgactttatgggaatcacgctcgcttctagccaggctgtcagcaacgccaggaagctggagtggccactgayggaagttgcagaaggtgtttttgaaaccgaggccccgggaggatataagttctatttgcagaatcgcagtctgcctcagtcagatcctgtattaaaagta

SEQ ID NO: 75186 - DNA, 201 bp, Homo sapiens
accactttcactgggctccgccgcagcgcccggacccagcgcctcgcgtcaaggtcccaagcctggaccacctgcagcaacggtcgcacgacaaacctcgmgggtctcaccagcgccgccatgttccctgagacccgggctgcgtcacgaaagcgcgccgtcggcggctagtgacgtcacggcccgtggcgcccttcgtgg

SEQ ID NO: 75187 - DNA, 201 bp, Homo sapiens
ctcctcgagcggttgtttctctcgttgctcctgggcactggcctcagatggtgccttgcggggctgcttcccaggagcgcgcttctgttccaccacctctycggaaggaaacaccactttcactgggctccgccgcagcgcccggacccagcgcctcgcgtcaaggtcccaagcctggaccacctgcagcaacggtcgcac

SEQ ID NO: 75188 - DNA, 201 bp, Homo sapiens; identical to SEQ ID NO: 75185

SEQ ID NO: 75189 - DNA, 201 bp, Homo sapiens; identical to SEQ ID NO: 75185

SEQ ID NO: 75190 - DNA, 201 bp, Homo sapiens; identical to SEQ ID NO: 75186

SEQ ID NO: 75191 - DNA, 201 bp, Homo sapiens; identical to SEQ ID NO: 75187

SEQ ID NO: 75192 - DNA, 201 bp, Homo sapiens; identical to SEQ ID NO: 75185

SEQ ID NO: 75193 - DNA, 201 bp, Homo sapiens; identical to SEQ ID NO: 75186

SEQ ID NO: 75194 - DNA, 201 bp, Homo sapiens; identical to SEQ ID NO: 75187

SEQ ID NO: 75195 - DNA, 201 bp, Homo sapiens; identical to SEQ ID NO: 75185

SEQ ID NO: 75196 - DNA, 201 bp, Homo sapiens; identical to SEQ ID NO: 75186

SEQ ID NO: 75197 - DNA, 201 bp, Homo sapiens; identical to SEQ ID NO: 75187

SEQ ID NO: 75198 - DNA, 201 bp, Homo sapiens; identical to SEQ ID NO: 75185

SEQ ID NO: 75199 - DNA, 201 bp, Homo sapiens; identical to SEQ ID NO: 75186

SEQ ID NO: 75200 - DNA, 201 bp, Homo sapiens; identical to SEQ ID NO: 75187

SEQ ID NO: 75201 - DNA, 201 bp, Homo sapiens
gctgcagcaaagtgttactcaccaaaggctgtgtggatgcctgggagcccaaagtgctccgggcgggtatgggcgcacatttccggatgcccattatcaayaatctggaatgggaaaccgtgcccaattacctgccccctgacactcgggtctatgtggctgacaactgtggcctttatgcccaggctgagatgtctaata

SEQ ID NO: 75202 - DNA, 201 bp, Homo sapiens
ttatgcccaggctgagatgtctaataaagctagtgaccatggctgggtgtgtgatcaacgagtgatgaagtttcacaagtatgaggaagaggaagatgtasaaaccggagccagtcaagattggctgcctcatgttgaggttcagagttacgactcggactggacagaggcgccggcagctgtggtgattggcggggagac

SEQ ID NO: 75203 - DNA, 148 bp, Homo sapiens
gtgacgcagcccgggtctcagggaacatggcggcgctggtgagaccckcgaggtttgtcgtgcgaccgttgctgcaggtggtccaggcttgggaccttgacgcgaggcgctgggtccgggcgctgcggcggagcccagtgaaagtggt

SEQ ID NO: 75204 - DNA, 201 bp, Homo sapiens
gtgcgaccgttgctgcaggtggtccaggcttgggaccttgacgcgaggcgctgggtccgggcgctgcggcggagcccagtgaaagtggtgtttccttccgragaggtggtggaacagaagcgcgctcctgggaagcagccccgcaaggcaccatctgaggccagtgcccaggagcaacgagagaaacaaccgctcgaggag

SEQ ID NO: 75205 - DNA, 201 bp, Homo sapiens
aaattaaaatcatatttccttccatgaatggaagaaacacactattggtttttccccttggaaacagcaatcccaaataatgtcggcttacaaaaaaaaawagttaccacttttttagagtccttccctgtaacattggattttttttttcccttatgagatccacctaaggccattgacgtggcctgcgatctcagtgac

SEQ ID NO: 75206 - DNA, 201 bp, Homo sapiens
tcgttgttatagaagaccttgttgctatggaacatgaaactgtgtgtcagatggagagatccccttaacctaagagccttaaatagccctgaaagtacacygggacggtttgcgatggaattaaaattggaagtgaatatttttaggtgctcttgaagctttctggggactcaaaattatcaaaagtcagggacagtccgg

SEQ ID NO: 75207 - DNA, 169 bp, Homo sapiens
gtcagatggagagatccccttaacctaagagccttaaatagccctgaaagtacactgggacggtttgcgatggaattaaaattggaagtgaatatttttargtgctcttgaagctttctggggactcaaaattatcaaaagtcagggacagtccggaggaagagcgtct

SEQ ID NO: 75208 - DNA, 201 bp, Homo sapiens
attacaggatgacagcagccgagaccattgcgtgggtcaggatctgcagacctggctcggtgattgggcctcagcagcagtttttggtgatgaagcaaacmaacctctggctggaaggggactattttcgtcagaagttaaaggggcaggagaatggacaacacagagcagccttctccaaacttctctctggcgttgatg

SEQ ID NO: 75209 - DNA, 201 bp, Homo sapiens
cagagtgccttctcccgcagccctactggaacacagcagagtctgtgccatgaagcagttacagaaacagaattgatgtgctgctaaaaaaaaaaaaaaaatggggcccgaaataaaagaatatatagtactcacctcagttccttccataagaagtgggtggtttaatgattgttaagccatttttgcctgtgccgggag

SEQ ID NO: 75210 - DNA, 201 bp, Homo sapiens
gatgccaaacgctttacggatgctggcttcgatcaccatgatcttttctttgcggatggcagcacccctactgatgccattgtcaaagaattcctagatayctgtgaaaatgctgagggtgccattgcagtacattgcaaagctggccttggtcgcacgggcactctgatagcctgctacatcatgaagcattacaggatg

SEQ ID NO: 75211 - DNA, 201 bp, Homo sapiens
aattaaaatcatatttccttccatgaatggaagaaacacactattggtttttccccttggaaacagcaatcccaaataatgtcggcttacaaaaaaaaaawgttaccacttttttagagtccttccctgtaacattggattttttttttcccttatgagatccacctaaggccattgacgtggcctgcgatctcagtgaca

SEQ ID NO: 75212 - DNA, 201 bp, Homo sapiens; identical to SEQ ID NO: 75205

SEQ ID NO: 75213 - DNA, 201 bp, Homo sapiens; identical to SEQ ID NO: 75206

SEQ ID NO: 75214 - DNA, 201 bp, Homo sapiens
gtcagatggagagatccccttaacctaagagccttaaatagccctgaaagtacactgggacggtttgcgatggaattaaaattggaagtgaatatttttargtgctcttgaagctttctggggactcaaaattatcaaaagtcagggacagtccggaggaagagcgtctgcaaaactgggttcctagaagtatagacggac

SEQ ID NO: 75215 - DNA, 201 bp, Homo sapiens; identical to SEQ ID NO: 75208

SEQ ID NO: 75216 - DNA, 201 bp, Homo sapiens; identical to SEQ ID NO: 75209

SEQ ID NO: 75217 - DNA, 201 bp, Homo sapiens; identical to SEQ ID NO: 75210

SEQ ID NO: 75218 - DNA, 201 bp, Homo sapiens; identical to SEQ ID NO: 75211

SEQ ID NO: 75219 - DNA, 201 bp, Homo sapiens; identical to SEQ ID NO: 75205

SEQ ID NO: 75220 - DNA, 201 bp, Homo sapiens; identical to SEQ ID NO: 75206

SEQ ID NO: 75221 - DNA, 169 bp, Homo sapiens; identical to SEQ ID NO: 75207

SEQ ID NO: 75222 - DNA, 201 bp, Homo sapiens; identical to SEQ ID NO: 75208

SEQ ID NO: 75223 - DNA, 201 bp, Homo sapiens; identical to SEQ ID NO: 75209

SEQ ID NO: 75224 - DNA, 201 bp, Homo sapiens; identical to SEQ ID NO: 75210

SEQ ID NO: 75225 - DNA, 201 bp, Homo sapiens; identical to SEQ ID NO: 75211

SEQ ID NO: 75226 - DNA, 201 bp, Homo sapiens; identical to SEQ ID NO: 75205

SEQ ID NO: 75227 - DNA, 201 bp, Homo sapiens; identical to SEQ ID NO: 75208

SEQ ID NO: 75228 - DNA, 201 bp, Homo sapiens
ctaagtgccttctcccgcagccctactggaacacagcagagtctgtgccatgaagcagttacagaaacagaattgatgtgctgctaaaaaaaaaaaaaaaatggggcccgaaataaaagaatatatagtactcacctcagttccttccataagaagtgggtggtttaatgattgttaagccatttttgcctgtgccgggag

SEQ ID NO: 75229 - DNA, 201 bp, Homo sapiens; identical to SEQ ID NO: 75210

SEQ ID NO: 75230 - DNA, 201 bp, Homo sapiens; identical to SEQ ID NO: 75211

SEQ ID NO: 75231 - DNA, 201 bp, Homo sapiens; identical to SEQ ID NO: 75205

SEQ ID NO: 75232 - DNA, 201 bp, Homo sapiens; identical to SEQ ID NO: 75206

SEQ ID NO: 75233 - DNA, 201 bp, Homo sapiens; identical to SEQ ID NO: 75214

SEQ ID NO: 75234 - DNA, 201 bp, Homo sapiens; identical to SEQ ID NO: 75208

SEQ ID NO: 75235 - DNA, 201 bp, Homo sapiens; identical to SEQ ID NO: 75209

SEQ ID NO: 75236 - DNA, 201 bp, Homo sapiens; identical to SEQ ID NO: 75210

SEQ ID NO: 75237 - DNA, 201 bp, Homo sapiens; identical to SEQ ID NO: 75211

SEQ ID NO: 75238 - DNA, 201 bp, Homo sapiens
aaccacccaaacactagatgtgtgtgtgcacacacacagaaaccacgaggtagtttaaatcaccattaaaaatcaacgctttctctgattctgtgtcacasagtggtggccagtggctacacaatagcgatttttaaatgattggttaagtgaaaaccagaactcaaaatattccaggagagaagataacatttacaagta

SEQ ID NO: 75239 - DNA, 201 bp, Homo sapiens
actgcaacattaaaccaagtgctgtgggcttttcaagtattattcacaacactaaaggaaagtttcttcaaagggctctctggctaatcttcaaagccgcrgttaggcaaaatgacagtgtgacagcttcaaagccactgactcatgacacagccctgatgttgtaccggctaggttcagatttcagaaatcagggcactt

SEQ ID NO: 75240 - DNA, 201 bp, Homo sapiens
gacttggggacgacagccctcatcggcgtctttcatggggttaatctgcttgagtctaagtcgccagccagaaacgtggtgcccagggtgccctgcctcargacatgtccacacccacgtcacaagcacctgaggagtccggccggggcactgtggtccaaaaggtcctgccgcctccgcatctgactgtcccaacggcat

SEQ ID NO: 75241 - DNA, 201 bp, Homo sapiens; identical to SEQ ID NO: 75208

SEQ ID NO: 75242 - DNA, 201 bp, Homo sapiens; identical to SEQ ID NO: 75210

SEQ ID NO: 75243 - DNA, 201 bp, Homo sapiens
ccgagggcagaggcctttgtacgcagctgccgaactctgactctagttctgcggaagaaaaggatgcggtatttgcttttgccatgatccctttccatttrattggcaggttaaataacatggtttttgaagtcacatacttaatattcttcctaaaaaccacccaaacactagatgtgtgtgtgcacacacacagaaacc

SEQ ID NO: 75244 - DNA, 201 bp, Homo sapiens; identical to SEQ ID NO: 75238

SEQ ID NO: 75245 - DNA, 201 bp, Homo sapiens; identical to SEQ ID NO: 75239

SEQ ID NO: 75246 - DNA, 201 bp, Homo sapiens; identical to SEQ ID NO: 75240

SEQ ID NO: 75247 - DNA, 201 bp, Homo sapiens; identical to SEQ ID NO: 75208

SEQ ID NO: 75248 - DNA, 201 bp, Homo sapiens; identical to SEQ ID NO: 75210

SEQ ID NO: 75249 - DNA, 201 bp, Homo sapiens; identical to SEQ ID NO: 75243

SEQ ID NO: 75250 - DNA, 201 bp, Homo sapiens; identical to SEQ ID NO: 75205

SEQ ID NO: 75251 - DNA, 201 bp, Homo sapiens; identical to SEQ ID NO: 75206

SEQ ID NO: 75252 - DNA, 169 bp, Homo sapiens; identical to SEQ ID NO: 75207

SEQ ID NO: 75253 - DNA, 201 bp, Homo sapiens; identical to SEQ ID NO: 75208

SEQ ID NO: 75254 - DNA, 201 bp, Homo sapiens; identical to SEQ ID NO: 75209

SEQ ID NO: 75255 - DNA, 201 bp, Homo sapiens; identical to SEQ ID NO: 75210

SEQ ID NO: 75256 - DNA, 201 bp, Homo sapiens; identical to SEQ ID NO: 75211

SEQ ID NO: 75257 - DNA, 201 bp, Homo sapiens
tacttgtaaatgttatcttctctcctggaatattttgagttctggttttcacttaaccaatcatttaaaaatcgctattgtgtagccactggccaccactstgtgacacagaatcagagaaagcgttgatttttaatggtgatttaaactacctcgtggtttctgtgtgtgtgcacacacacatctagtgtttgggtggtt

SEQ ID NO: 75258 - DNA, 201 bp, Homo sapiens
acagggaataccgaccctatgagacagagaggcaggcagacttcacagctgagaagtttccagatgaaaaaccaggtgataggtttgatcgagacagaccrttgagaggacgtggaggcccgagagggggtatgcgcggcagaggcagaggtggccctgggaacagagtttttgacgcttttgaccagagaggaaagcgag

SEQ ID NO: 75259 - DNA, 201 bp, Homo sapiens
gagatgatatggtaaaagatgactatgaggacgattcccatgttttccggaaacccgccaatgacatcacatcccagctggagattaattttggtaacctycctcgtcctgggcgtggagccagaggaggcacccggggaggccggggaaggatcaggagggcagagaactatggacccagagcagaagtggtgatgcaag

SEQ ID NO: 75260 - DNA, 201 bp, Homo sapiens
actatgaggacgattcccatgttttccggaaacccgccaatgacatcacatcccagctggagattaattttggtaacctccctcgtcctgggcgtggagcyagaggaggcacccggggaggccggggaaggatcaggagggcagagaactatggacccagagcagaagtggtgatgcaagatgttgcccccaacccagatg

SEQ ID NO: 75261 - DNA, 201 bp, Homo sapiens
cagacttcacagctgagaagtttccagatgaaaaaccaggtgataggtttgatcgagacagaccgttgagaggacgtggaggcccgagagggggtatgcgyggcagaggcagaggtggccctgggaacagagtttttgacgcttttgaccagagaggaaagcgagaatttgaaagatatggtgggaatgacaaaatagcag

SEQ ID NO: 75262 - DNA, 201 bp, Homo sapiens
gtggggagacttttccagctgggccaagggagtcagactctaagaacaatagatgttgcttttcccgtgtcatgtaaatttgttgcacttttttgggctgrgctgttagaggggcttctccagaggctcgagagcaggccatttcccaagaagatgaagaatggtgactgtgtttttattgaaggaatttcaaatgaagaa

SEQ ID NO: 75263 - DNA, 201 bp, Homo sapiens
ggtttctgtgtgtgtgcacacacacatctagtgtttgggtggtttttaggaagaatattaagtatgtgacttcaaaaaccatgttatttaacctgccaatyaaatggaaagggatcatggcaaaagcaaataccgcatccttttcttccgcagaactagagtcagagttcggcagctgcgtacaaaggcctctgccctcgg

SEQ ID NO: 75264 - DNA, 201 bp, Homo sapiens
cccaacccagatgacccggaagatttccctgcgctgtcttgaaagagccctgtttcccagcaccgcggagctgcactgcacacctgtggggagacttttcyagctgggccaagggagtcagactctaagaacaatagatgttgcttttcccgtgtcatgtaaatttgttgcacttttttgggctgagctgttagaggggct

SEQ ID NO: 75265 - DNA, 201 bp, Homo sapiens; identical to SEQ ID NO: 75257

SEQ ID NO: 75266 - DNA, 201 bp, Homo sapiens; identical to SEQ ID NO: 75258

SEQ ID NO: 75267 - DNA, 201 bp, Homo sapiens; identical to SEQ ID NO: 75261

SEQ ID NO: 75268 - DNA, 201 bp, Homo sapiens; identical to SEQ ID NO: 75263

SEQ ID NO: 75269 - DNA, 201 bp, Homo sapiens
ccggcgcgggcggccggagggagtcgcagaaggagcgcaagagcctcccggcgcccgtcgctcagcggcccgatagccccgggggcggcctgcaggcgccsggccagaagcggactcctagaagaggggagcagcaaggatggaatgacagccgtgggccggaggggatgctcgaaagagctgagcggagatcctacaggg

SEQ ID NO: 75270 - DNA, 201 bp, Homo sapiens; identical to SEQ ID NO: 75259

SEQ ID NO: 75271 - DNA, 201 bp, Homo sapiens; identical to SEQ ID NO: 75260

SEQ ID NO: 75272 - DNA, 201 bp, Homo sapiens; identical to SEQ ID NO: 75262

SEQ ID NO: 75273 - DNA, 201 bp, Homo sapiens; identical to SEQ ID NO: 75264

SEQ ID NO: 75274 - DNA, 201 bp, Homo sapiens; identical to SEQ ID NO: 75257

SEQ ID NO: 75275 - DNA, 201 bp, Homo sapiens; identical to SEQ ID NO: 75269

SEQ ID NO: 75276 - DNA, 201 bp, Homo sapiens; identical to SEQ ID NO: 75259

SEQ ID NO: 75277 - DNA, 201 bp, Homo sapiens; identical to SEQ ID NO: 75260

SEQ ID NO: 75278 - DNA, 201 bp, Homo sapiens; identical to SEQ ID NO: 75262

SEQ ID NO: 75279 - DNA, 201 bp, Homo sapiens; identical to SEQ ID NO: 75263

SEQ ID NO: 75280 - DNA, 201 bp, Homo sapiens; identical to SEQ ID NO: 75264

SEQ ID NO: 75281 - DNA, 201 bp, Homo sapiens
ccctttcttccctacccttgccactcccactttctggcaccgagtttatttttcacttacttacttccccagaccccgggctcgcctccacaaaggagaaragactgccctggcggtcctggtggcttttcttagcatgtgtggcactgttgcccagtgtgggagttggtttaaattctcctgactccagtttataacatc

SEQ ID NO: 75282 - DNA, 201 bp, Homo sapiens
cagagtacccattcaaaccaccgaagatcacatttaaaacaaagatctatcacccaaacatcgacgaaaaggggcaggtctgtctgccagtaattagtgcsgaaaactggaagccagcaaccaaaaccgaccaagtaatccagtccctcatagcactggtgaatgacccccagcctgagcacccgcttcgggctgacctag

SEQ ID NO: 75283 - DNA, 201 bp, Homo sapiens
aagctacagccagaatgtccgtttgaaactcctagctcatctgtcaccgagcttcatccgaatgtgccacggagcttgctctccacttcctccgtgcagtkgccctgccacagccctccctcggcacactttgaccctttgtaggattggaattagcaggactcggctatttaaagcaccagtctggggtcgcctgggccc

SEQ ID NO: 75284 - DNA, 201 bp, Homo sapiens
tttttgttttaattttaattctataacttgagatctttccggggcctacaggcgtgtaagacagcttggtctggtctgtgcagaagtggggagtgatgggyaggttcggcagcctaacattgttcaggcgcatggcccctgcggtgtgtacacgaactcggcttcttttgtcctaggtacgccaagggcaggtttctggag

SEQ ID NO: 75285 - DNA, 152 bp, Homo sapiens
ccccaagctcactcaggaattcacacccgcctggtttcttgaagtgtgctgggtccttccctctgctccctactccccaccacggcagagaataggctttytaagatgctgcgatcccgttctgctgcccgtaataaaaatgctctcagaca

SEQ ID NO: 75286 - DNA, 201 bp, Homo sapiens
tgcggtgtgtacacgaactcggcttcttttgtcctaggtacgccaagggcaggtttctggagactcccttgtgcccgggatggcaagggcaccgggctggygtttccacatctgtcttcattagcagaaaagtgatgatggattttatttcactcacactccagtttgtaataaaatgccaaattctgtcagctatccaaa

SEQ ID NO: 75287 - DNA, 201 bp, Homo sapiens
aaagctacagccagaatgtccgtttgaaactcctagctcatctgtcaccgagcttcatccgaatgtgccacggagcttgctctccacttcctccgtgcagyggccctgccacagccctccctcggcacactttgaccctttgtaggattggaattagcaggactcggctatttaaagcaccagtctggggtcgcctgggcc

SEQ ID NO: 75288 - DNA, 201 bp, Homo sapiens
gccctccctcggcacactttgaccctttgtaggattggaattagcaggactcggctatttaaagcaccagtctggggtcgcctgggcccctgctgaccccytcctccagagcagccagcccagcccgggaacaagacggacttcctctcccttcggactcacagcctttgcagagtcaagctccacttgaagctcactcag

SEQ ID NO: 75289 - DNA, 201 bp, Homo sapiens; identical to SEQ ID NO: 75281

SEQ ID NO: 75290 - DNA, 201 bp, Homo sapiens; identical to SEQ ID NO: 75282

SEQ ID NO: 75291 - DNA, 201 bp, Homo sapiens; identical to SEQ ID NO: 75283

SEQ ID NO: 75292 - DNA, 201 bp, Homo sapiens; identical to SEQ ID NO: 75284

SEQ ID NO: 75293 - DNA, 155 bp, Homo sapiens
ccccaagctcactcaggaattcacacccgcctggtttcttgaagtgtgctgggtccttccctctgctccctactccccaccacggcagagaataggctttytaagatgctgcgatcccgttctgctgcccgtaataaaaatgctctcagacactg

SEQ ID NO: 75294 - DNA, 201 bp, Homo sapiens; identical to SEQ ID NO: 75286

SEQ ID NO: 75295 - DNA, 201 bp, Homo sapiens; identical to SEQ ID NO: 75287

SEQ ID NO: 75296 - DNA, 201 bp, Homo sapiens; identical to SEQ ID NO: 75288

SEQ ID NO: 75297 - DNA, 201 bp, Homo sapiens; identical to SEQ ID NO: 75281

SEQ ID NO: 75298 - DNA, 201 bp, Homo sapiens; identical to SEQ ID NO: 75282

SEQ ID NO: 75299 - DNA, 201 bp, Homo sapiens; identical to SEQ ID NO: 75283

SEQ ID NO: 75300 - DNA, 201 bp, Homo sapiens; identical to SEQ ID NO: 75284

SEQ ID NO: 75301 - DNA, 155 bp, Homo sapiens; identical to SEQ ID NO: 75293

SEQ ID NO: 75302 - DNA, 201 bp, Homo sapiens; identical to SEQ ID NO: 75286

SEQ ID NO: 75303 - DNA, 201 bp, Homo sapiens; identical to SEQ ID NO: 75287

SEQ ID NO: 75304 - DNA, 201 bp, Homo sapiens; identical to SEQ ID NO: 75288

SEQ ID NO: 75305 - DNA, 201 bp, Homo sapiens
gtgcccaccctgacagacaccctggctggccctgactgactgtattctctggccacattcaagtcccccattggtgggggcagagaagtaggaccaggccrtccttggctccagagctcgaagaccccaagacagccctctgctctcagcggcgccacagagagcctgggctcagccttctgcatcaggacatggcctcgt

SEQ ID NO: 75306 - DNA, 201 bp, Homo sapiens
cccgagagaccctgcaggagctctacaaggagttcaaaggggacgagattctggcagccaccatgaaggccccggagaagaagaaagtggacaagctgaaygctgcccactattccacagggaaggtcagcgcttccttcacctccaccgcgatggtcccggagaccacacatgaagcagctgccatcgacgaggatgtgc

SEQ ID NO: 75307 - DNA, 201 bp, Homo sapiens
gaagcgagcagcagaggaagagccctcaaccagtgccactgtccccatgtccaagaagaagcccagtcggggttttggggacttcagctcctggtagcagyaggctgcctgatgaccactagaggtatgtctgcccctcgtcaccctgctgcacaccaatctgtggcccttcatcatgctaagaacaagaactgcgccatg

SEQ ID NO: 75308 - DNA, 201 bp, Homo sapiens
gtacatcaacccagcagccacgaagcgagcagcagaggaagagccctcaaccagtgccactgtccccatgtccaagaagaagcccagtcggggttttgggracttcagctcctggtagcagcaggctgcctgatgaccactagaggtatgtctgcccctcgtcaccctgctgcacaccaatctgtggcccttcatcatgct

SEQ ID NO: 75309 - DNA, 201 bp, Homo sapiens
aggacacagtgactgcccaggtgtccacacacctgtaggcctctgagccagcgtccagggtacaggtgcgggtggtggggatgaaggcctgaccagggagkgagaagcaggtttggagaggaccctgtgcccaccctgacagacaccctggctggccctgactgactgtattctctggccacattcaagtcccccattggt

SEQ ID NO: 75310 - DNA, 201 bp, Homo sapiens
tgaacttttccaagaacagtgaggggaagtaccactgcccagtgctgtttaccgtgttcaccaacaacacccacatcgtggctgtgaggacgaccggcaaygtctacgcctatgaggcagtggaacagctaaatatcaaggccaagaacttccgggacctgctgaccgacgagcccttctcccggcaggacatcatcaccc

SEQ ID NO: 75311 - DNA, 201 bp, Homo sapiens
tcaaagacgagttccggcccaacctctcgcacacgggccgcggcatcctcagcatggccaactccgggcccaacagcaacaggtctcaattcttcatcacrtttcgctcctgtgcctacctggacaagaagcataccatctttggacgggttgttgggggctttgacgtactgacagccatggagaatgtggagagtgacc

SEQ ID NO: 75312 - DNA, 201 bp, Homo sapiens; identical to SEQ ID NO: 75306

SEQ ID NO: 75313 - DNA, 201 bp, Homo sapiens
ccgccctcctgctgaagtggccttgctgctctcaggcccggccactgggctccaagactctgctcctcctgtcagtcactgactctgatggccttgggccrgctgcatcagcagcccttaaagaaagacccctccctcaacccccatttttctgttaaatgtgcccctggctggctttttcttcgtcttcagcccaggcca

SEQ ID NO: 75314 - DNA, 201 bp, Homo sapiens
agggtcttgctctgttgcccaggctccagtgcagtggtgtgatcatggctcactgcagcctcgacctcctgggctcaagcaatcctcctgcctcagcctcrcaagtagctgggactacagccgtgcaccactacatccagctgtatatgtctggttttcttacccctacttctgtcatcttctcagggacagcctatttat

SEQ ID NO: 75315 - DNA, 201 bp, Homo sapiens
gtacatcaacccagcagccacgaagcgagcagcagaggaagagccctcaaccagtgccactgtccccatgtccaagaagaagcccagtcggggttttgggracttcagctcctggtagcagcaggttggccgctgtggaccttggtggggttgcagggctgggggcccatgtccacatctccatttccagcctttctagcc

SEQ ID NO: 75316 - DNA, 201 bp, Homo sapiens; identical to SEQ ID NO: 75305

SEQ ID NO: 75317 - DNA, 201 bp, Homo sapiens
gaagcgagcagcagaggaagagccctcaaccagtgccactgtccccatgtccaagaagaagcccagtcggggttttggggacttcagctcctggtagcagyaggttggccgctgtggaccttggtggggttgcagggctgggggcccatgtccacatctccatttccagcctttctagcctgccctctgctgccagccaat

SEQ ID NO: 75318 - DNA, 201 bp, Homo sapiens; identical to SEQ ID NO: 75309

SEQ ID NO: 75319 - DNA, 201 bp, Homo sapiens
ggccttggccctgtttccaggacctggcccagccagagcccactgctgggaccttcaagcacaaggcctgccctacacccaggctggtgcctcaggcctcycctctagtaggcaggccaggttagtgaggaaggactgtgtctccagattgtggtttcctctttaagacagggtcttgctctgttgcccaggctccagtgc

SEQ ID NO: 75320 - DNA, 201 bp, Homo sapiens; identical to SEQ ID NO: 75311

SEQ ID NO: 75321 - DNA, 201 bp, Homo sapiens; identical to SEQ ID NO: 75310

SEQ ID NO: 75322 - DNA, 201 bp, Homo sapiens; identical to SEQ ID NO: 75306

SEQ ID NO: 75323 - DNA, 201 bp, Homo sapiens
ccaccgagcagcagaggaagagccctcaaccagtgccactgtccccatgtccaagaagaagcccagtcggggttttggggacttcagctcctggtagcagyaggttggccgctgtggaccttggtggggttgcagggctgggggcccatgtccacatctccatttccagcctttctagcctgccctctgctgccagccaat

SEQ ID NO: 75324 - DNA, 201 bp, Homo sapiens; identical to SEQ ID NO: 75313

SEQ ID NO: 75325 - DNA, 201 bp, Homo sapiens; identical to SEQ ID NO: 75314

SEQ ID NO: 75326 - DNA, 201 bp, Homo sapiens
gcaagtacatcaacccagcagccaccgagcagcagaggaagagccctcaaccagtgccactgtccccatgtccaagaagaagcccagtcggggttttgggracttcagctcctggtagcagcaggttggccgctgtggaccttggtggggttgcagggctgggggcccatgtccacatctccatttccagcctttctagcc

SEQ ID NO: 75327 - DNA, 201 bp, Homo sapiens; identical to SEQ ID NO: 75310

SEQ ID NO: 75328 - DNA, 201 bp, Homo sapiens; identical to SEQ ID NO: 75311

SEQ ID NO: 75329 - DNA, 201 bp, Homo sapiens; identical to SEQ ID NO: 75319

SEQ ID NO: 75330 - DNA, 201 bp, Homo sapiens; identical to SEQ ID NO: 75306

SEQ ID NO: 75331 - DNA, 201 bp, Homo sapiens; identical to SEQ ID NO: 75313

SEQ ID NO: 75332 - DNA, 201 bp, Homo sapiens
cttcagctcctggtagcagcaggctccagtgcagtggtgtgatcatggctcactgcagcctcgacctcctgggctcaagcaatcctcctgcctcagcctcrcaagtagctgggactacagccgtgcaccactacatccagctgtatatgtctggttttcttacccctacttctgtcatcttctcagggacagcctatttat

SEQ ID NO: 75333 - DNA, 201 bp, Homo sapiens
gtacatcaacccagcagccacgaagcgagcagcagaggaagagccctcaaccagtgccactgtccccatgtccaagaagaagcccagtcggggttttgggracttcagctcctggtagcagcaggctccagtgcagtggtgtgatcatggctcactgcagcctcgacctcctgggctcaagcaatcctcctgcctcagcct

SEQ ID NO: 75334 - DNA, 201 bp, Homo sapiens; identical to SEQ ID NO: 75305

SEQ ID NO: 75335 - DNA, 201 bp, Homo sapiens
gaagcgagcagcagaggaagagccctcaaccagtgccactgtccccatgtccaagaagaagcccagtcggggttttggggacttcagctcctggtagcagyaggctccagtgcagtggtgtgatcatggctcactgcagcctcgacctcctgggctcaagcaatcctcctgcctcagcctcgcaagtagctgggactacag

SEQ ID NO: 75336 - DNA, 201 bp, Homo sapiens; identical to SEQ ID NO: 75309

SEQ ID NO: 75337 - DNA, 201 bp, Homo sapiens; identical to SEQ ID NO: 75310

SEQ ID NO: 75338 - DNA, 201 bp, Homo sapiens; identical to SEQ ID NO: 75311

SEQ ID NO: 75339 - DNA, 201 bp, Homo sapiens
gtgggacaacatcaatgtccaaaagagagcggcagtccgaaggccagctggtgggaaacgggcagctggagattgcgacaggaggctgggtgatgccagaygaggccaattcccactactttgcattgattgaccagctcatcgaaggacaccagtggctggagagaaatcttggtgcaaccccccgctctggctgggcag

SEQ ID NO: 75340 - DNA, 201 bp, Homo sapiens
tccatgtcctggtgtgatgagcaggatcagagtgactctgggaggacaggggtggggacccagagttagcagtggggatggagcagtagaaggaatcactrtttctcctaggagtctgaaggcctcgctgctttctgtgatggctttgcagtaagtgccgcctggcctgcatgcattggctaacaggctgcagaatggcag

SEQ ID NO: 75341 - DNA, 201 bp, Homo sapiens
actccatgtgcttgggcagcttgagaaggcgttcagcaccacgcctagcaggcagaccttgaagcctcacctttagtctatctgcagaggtattcagttcytggcacaggggactaggggcatgtagagtatatgaggaggcagtatggctgtgcaggagccttcatttcagcttcaattaatagggaagaatttatgata

SEQ ID NO: 75342 - DNA, 201 bp, Homo sapiens
  misc_feature (1)...(201): n = A,T,C or G
cgcatcaactgcccttggaaggtgccaccccgggccatcacagaggccaacgtggcagagagggcagccctgcttctggaccaataccggaagaagtcccngctgttccgaagcaacgtcctcctggtgcctcttggagatgacttccgatatgacaagccccaggagtgggatgcccagttcttcaactaccaacggctc

SEQ ID NO: 75343 - DNA, 201 bp, Homo sapiens
tcagagtgggcagtgccaggctctgctttgggttgtgagtggacacccaactgggcacaggctcaggcacccatcctttttccaaacagggatatagaagwggtggaagcagacagaagaggtaagggaggctaagtgggtaacagcccagcatcagggtcactgtggcaacagcaggctctaggggaatcctgtggttat

SEQ ID NO: 75344 - DNA, 201 bp, Homo sapiens
agcctacctcttcctgcccgatggcgaggccaagccctacgtccccaaggagccccccgtgctgcgtgtcactgaaggccctttcttctcagaggtggttkcgtactatgagcacattcaccaggcggtccggctttacaatctgccaggggtggaggggctgtctctggacatatcatccctggtggacatccgggacta

SEQ ID NO: 75345 - DNA, 201 bp, Homo sapiens
cactggcacggccaaggaggctgtggtggtggactatggggtcaggcttctgcgctcccttgtcaacctgaagcaggtcatcattcatgcagcccactatytggtgctgggggacaaggagacctaccactttgaccctgaggcgcccttcctccaagtggatgacactcgcttaagtcacgacgccctcccagagcgcac

SEQ ID NO: 75346 - DNA, 201 bp, Homo sapiens
ttcatgcagcccactatctggtgctgggggacaaggagacctaccactttgaccctgaggcgcccttcctccaagtggatgacactcgcttaagtcacgaygccctcccagagcgcacggtgatccagctggattcctcgcccaggtttgtggtcctattcaacccactggaacaggagcgattcagcatggtgtccctgc

SEQ ID NO: 75347 - DNA, 201 bp, Homo sapiens
cacgacgccctcccagagcgcacggtgatccagctggattcctcgcccaggtttgtggtcctattcaacccactggaacaggagcgattcagcatggtgtycctgctggtcaactctccccgcgtgcgtgtcctttcggaggagggtcagcccctggccgtgcagatcagcgcacactggagctctgccaccgaggcggtc

SEQ ID NO: 75348 - DNA, 201 bp, Homo sapiens
ctacgtcaacaaggagctggccctgcacatccatacagacatcgacagccagggtgcagccccgacggtatctgaagaagctccccctccaggccaacttytaccccatgccagtcatggcctatatccaggacgcacagaagcgcctcacgctgcacactgcccaggccctgggtgtctctagcctcaaagatggccagc

SEQ ID NO: 75349 - DNA, 201 bp, Homo sapiens
gggcgctgacggtgtgtgtggaggccagtatgaagctgaaaaagcaggtgacagtgtgtggggctgccatcttctgtgtggcagtcttctcgctctacctyatgctggaccgagtgcaacacgatcccacccgacaccagaatggtgggaacttcccccggagccaaatttctgtgctgcagaaccgcattgagcagctgg

SEQ ID NO: 75350 - DNA, 201 bp, Homo sapiens
gcctatgtactgatttgtgggatggtggcaggggtgtggggtccttcaccctgcctgaattctctttggcttctgtgctctgtatgctgctgtccccaagrgctctttcttattatggcagggagtggggattggtcctactttctttctctggaaaggaaagcctccaagactccatgtgcttgggcagcttgagaaggc

SEQ ID NO: 75351 - DNA, 201 bp, Homo sapiens
tggtgggaaacgggcagctggagattgcgacaggaggctgggtgatgccagatgaggccaattcccactactttgcattgattgaccagctcatcgaaggwcaccagtggctggagagaaatcttggtgcaaccccccgctctggctgggcagtggacccctttggatacagctccaccatgccttacctgctgcgccgtg

SEQ ID NO: 75352 - DNA, 201 bp, Homo sapiens
ccggcggctgatgcaggatgacaaccggggcctaggccaagggctcaaggacaacaagagaacctgcaaccgtttccgcctcctgctagagcggcgaaccrtgggcagtgaggtccaagatagccactctaccagctacccatccctcctcagccacctgacctccatgtacctgaacgccccggcgctcgctctgcctgt

SEQ ID NO: 75353 - DNA, 201 bp, Homo sapiens
ggagccttcatttcagcttcaattaatagggaagaatttatgatagctctatagatgctgaaaaggtatttcgtaagatttaaaatccatcccttattaamactcttagtaaattaagtctggaaagaaacaccctaatctagataaaggtctgtttcagaaaccaacagtgatggcattctaaagagtcagacgccacag

SEQ ID NO: 75354 - DNA, 201 bp, Homo sapiens
ggtgggacaacatcaatgtccaaaagagagcggcagtccgaaggccgctggtgggaaacgggcagctggagattgcgacaggaggctgggtgatgccagaygaggccaattcccactactttgcattgattgaccagctcatcgaaggacaccagtggctggagagaaatcttggtgcaaccccccgctctggctgggcag

SEQ ID NO: 75355 - DNA, 201 bp, Homo sapiens; identical to SEQ ID NO: 75340

SEQ ID NO: 75356 - DNA, 201 bp, Homo sapiens; identical to SEQ ID NO: 75341

SEQ ID NO: 75357 - DNA, 201 bp, Homo sapiens; identical to SEQ ID NO: 75342
  misc_feature (1)...(201): n = A,T,C or G

SEQ ID NO: 75358 - DNA, 114 bp, Homo sapiens
ggggctacgggtgrgcgggcgcccgccttcgcctgcgtcgctgcctgcacgcgggccgccgtccccgggcgtgtgagagccggcagctcggccgactgggcccggagcggcgcg

SEQ ID NO: 75359 - DNA, 201 bp, Homo sapiens; identical to SEQ ID NO: 75343

SEQ ID NO: 75360 - DNA, 201 bp, Homo sapiens
gagtggagcctacctcttcctgcccgatggcgagccctacgtccccaaggagccccccgtgctgcgtgtcactgaaggccctttcttctcagaggtggttkcgtactatgagcacattcaccaggcggtccggctttacaatctgccaggggtggaggggctgtctctggacatatcatccctggtggacatccgggacta

SEQ ID NO: 75361 - DNA, 201 bp, Homo sapiens; identical to SEQ ID NO: 75345

SEQ ID NO: 75362 - DNA, 201 bp, Homo sapiens; identical to SEQ ID NO: 75346

SEQ ID NO: 75363 - DNA, 201 bp, Homo sapiens; identical to SEQ ID NO: 75347

SEQ ID NO: 75364 - DNA, 201 bp, Homo sapiens; identical to SEQ ID NO: 75348

SEQ ID NO: 75365 - DNA, 118 bp, Homo sapiens
ggggctacgggtgggcgkgcgcccgccttcgcctgcgtcgctgcctgcacgcgggccgccgtccccgggcgtgtgagagccggcagctcggccgactgggcccggagcggcgcggagg

SEQ ID NO: 75366 - DNA, 201 bp, Homo sapiens
taacgggccgggtgtgtgtggaggccagtatgaagctgaaaaagcaggtgacagtgtgtggggctgccatcttctgtgtggcagtcttctcgctctacctyatgctggaccgagtgcaacacgatcccacccgacaccagaatggtgggaacttcccccggagccaaatttctgtgctgcagaaccgcattgagcagctgg

SEQ ID NO: 75367 - DNA, 201 bp, Homo sapiens; identical to SEQ ID NO: 75350

SEQ ID NO: 75368 - DNA, 201 bp, Homo sapiens; identical to SEQ ID NO: 75351

SEQ ID NO: 75369 - DNA, 201 bp, Homo sapiens; identical to SEQ ID NO: 75352

SEQ ID NO: 75370 - DNA, 201 bp, Homo sapiens; identical to SEQ ID NO: 75353

SEQ ID NO: 75371 - DNA, 201 bp, Homo sapiens
agtggtgggacaacatcaatgtccaaaagagagcggcagtccgaaggctggtgggaaacgggcagctggagattgcgacaggaggctgggtgatgccagaygaggccaattcccactactttgcattgattgaccagctcatcgaaggacaccagtggctggagagaaatcttggtgcaaccccccgctctggctgggcag

SEQ ID NO: 75372 - DNA, 201 bp, Homo sapiens; identical to SEQ ID NO: 75340

SEQ ID NO: 75373 - DNA, 201 bp, Homo sapiens; identical to SEQ ID NO: 75341

SEQ ID NO: 75374 - DNA, 201 bp, Homo sapiens; identical to SEQ ID NO: 75342
  misc_feature (1)...(201): n = A,T,C or G

SEQ ID NO: 75375 - DNA, 201 bp, Homo sapiens; identical to SEQ ID NO: 75343

SEQ ID NO: 75376 - DNA, 201 bp, Homo sapiens; identical to SEQ ID NO: 75344

SEQ ID NO: 75377 - DNA, 201 bp, Homo sapiens; identical to SEQ ID NO: 75345

SEQ ID NO: 75378 - DNA, 201 bp, Homo sapiens; identical to SEQ ID NO: 75346

SEQ ID NO: 75379 - DNA, 201 bp, Homo sapiens; identical to SEQ ID NO: 75347

SEQ ID NO: 75380 - DNA, 201 bp, Homo sapiens; identical to SEQ ID NO: 75348

SEQ ID NO: 75381 - DNA, 201 bp, Homo sapiens; identical to SEQ ID NO: 75349

SEQ ID NO: 75382 - DNA, 201 bp, Homo sapiens; identical to SEQ ID NO: 75350

SEQ ID NO: 75383 - DNA, 201 bp, Homo sapiens; identical to SEQ ID NO: 75351

SEQ ID NO: 75384 - DNA, 201 bp, Homo sapiens; identical to SEQ ID NO: 75352

SEQ ID NO: 75385 - DNA, 201 bp, Homo sapiens; identical to SEQ ID NO: 75353

SEQ ID NO: 75386 - DNA, 201 bp, Homo sapiens; identical to SEQ ID NO: 75354

SEQ ID NO: 75387 - DNA, 201 bp, Homo sapiens; identical to SEQ ID NO: 75340

SEQ ID NO: 75388 - DNA, 201 bp, Homo sapiens; identical to SEQ ID NO: 75341

SEQ ID NO: 75389 - DNA, 201 bp, Homo sapiens; identical to SEQ ID NO: 75342
  misc_feature (1)...(201): n = A,T,C or G

SEQ ID NO: 75390 - DNA, 114 bp, Homo sapiens; identical to SEQ ID NO: 75358

SEQ ID NO: 75391 - DNA, 201 bp, Homo sapiens; identical to SEQ ID NO: 75343

SEQ ID NO: 75392 - DNA, 201 bp, Homo sapiens; identical to SEQ ID NO: 75344

SEQ ID NO: 75393 - DNA, 201 bp, Homo sapiens; identical to SEQ ID NO: 75345

SEQ ID NO: 75394 - DNA, 201 bp, Homo sapiens; identical to SEQ ID NO: 75346

SEQ ID NO: 75395 - DNA, 201 bp, Homo sapiens; identical to SEQ ID NO: 75347

SEQ ID NO: 75396 - DNA, 201 bp, Homo sapiens
atacagacatcgacagccagggtatcttcttcacagacctcaatggctttcaggtgcagccccgacggtatctgaagaagctccccctccaggccaacttytaccccatgccagtcatggcctatatccaggacgcacagaagcgcctcacgctgcacactgcccaggccctgggtgtctctagcctcaaagatggccagc

SEQ ID NO: 75397 - DNA, 118 bp, Homo sapiens; identical to SEQ ID NO: 75365

SEQ ID NO: 75398 - DNA, 201 bp, Homo sapiens; identical to SEQ ID NO: 75366

SEQ ID NO: 75399 - DNA, 201 bp, Homo sapiens; identical to SEQ ID NO: 75350

SEQ ID NO: 75400 - DNA, 201 bp, Homo sapiens; identical to SEQ ID NO: 75351

SEQ ID NO: 75401 - DNA, 201 bp, Homo sapiens
ccggcggctgatgcaggatgacaaccggggcctaggccaagggctcaaggacaacaagagaacctgcaaccgtttccgcctcctgctagagcggcgaaccrtgggcagtgagcctgactttttctccaaactggcagccatgtttaggggcttgatctttcacagcagcaggagcggtaaccgagaggtccaagatagcca

SEQ ID NO: 75402 - DNA, 201 bp, Homo sapiens; identical to SEQ ID NO: 75353

SEQ ID NO: 75403 - DNA, 201 bp, Homo sapiens
cccggcggcgcttcctctgggcagaggtctccttcttcgccaagtggctggtgggaaacgggcagctggagattgcgacaggaggctgggtgatgccagaygaggccaattcccactactttgcattgattgaccagctcatcgaaggacaccagtggctggagagaaatcttggtgcaaccccccgctctggctgggcag

SEQ ID NO: 75404 - DNA, 201 bp, Homo sapiens
cactggcacggccaaggaggctgtggtggtggactatggggtcaggcttctgcgctcccttgtcaacctgaagcaggtcatcattcatgcagcccactatytggtgctgggggacaaggagacctaccactttgaccctgaggcgcccttcctccaagtggtggggtgggaggaggctgagcccatgatggttcttccctt

SEQ ID NO: 75405 - DNA, 201 bp, Homo sapiens; identical to SEQ ID NO: 75396

SEQ ID NO: 75406 - DNA, 118 bp, Homo sapiens; identical to SEQ ID NO: 75365

SEQ ID NO: 75407 - DNA, 201 bp, Homo sapiens; identical to SEQ ID NO: 75366

SEQ ID NO: 75408 - DNA, 201 bp, Homo sapiens; identical to SEQ ID NO: 75350

SEQ ID NO: 75409 - DNA, 201 bp, Homo sapiens; identical to SEQ ID NO: 75352

SEQ ID NO: 75410 - DNA, 201 bp, Homo sapiens; identical to SEQ ID NO: 75353

SEQ ID NO: 75411 - DNA, 201 bp, Homo sapiens; identical to SEQ ID NO: 75341

SEQ ID NO: 75412 - DNA, 201 bp, Homo sapiens; identical to SEQ ID NO: 75340

SEQ ID NO: 75413 - DNA, 201 bp, Homo sapiens; identical to SEQ ID NO: 75343

SEQ ID NO: 75414 - DNA, 114 bp, Homo sapiens; identical to SEQ ID NO: 75358

SEQ ID NO: 75415 - DNA, 201 bp, Homo sapiens; identical to SEQ ID NO: 75342
  misc_feature (1)...(201): n = A,T,C or G

SEQ ID NO: 75416 - DNA, 201 bp, Homo sapiens
tcatcctctggcttcctcactgccctgtgacttccacctgctcaacctacgtacgctccaggctgagcactgcctctgggcagaggcgctgctgcatctcygatctctgaaagccctgcgcccacttccctgggcactgtctgtcatccaggaggacaccctaccctcggcggagaccgcactcatcttacaccgcaaggg

SEQ ID NO: 75417 - DNA, 201 bp, Homo sapiens; identical to SEQ ID NO: 75344

SEQ ID NO: 75418 - DNA, 201 bp, Homo sapiens
cgcccttcctccaagtggtggggtgggaggaggctgagcccatgatggttcttcccttccggctcactgaattccaggatgacactcgcttaagtcacgaygccctcccagagcgcacggtgatccagctggattcctcgcccaggtttgtggtcctattcaacccactggaacaggagcgattcagcatggtgtccctgc

SEQ ID NO: 75419 - DNA, 201 bp, Homo sapiens; identical to SEQ ID NO: 75347

SEQ ID NO: 75420 - DNA, 201 bp, Homo sapiens; identical to SEQ ID NO: 75351

SEQ ID NO: 75421 - DNA, 201 bp, Homo sapiens
gactttttaaaaagctgatacttgacaagattttggatgaagacttatatatcaatgccaatgaccaggcgatcgcttatgtgatgctcggaaataaagcmcaaactgtactaaatggcaatttaaaggtagactttatggaaacagaaaattccagcagtgtgaaaaaacaaaaagcgttagtagcaaaagtgtctcaga

SEQ ID NO: 75422 - DNA, 201 bp, Homo sapiens
atggacatcgccagctgaagacagttccccagggataagcctgtccagcagcagaggccccggaagaagtgccgctgaggagctcgacgaggaaatacccrtatcttcccactactttgcaagtaaaaccagaaatgaaaggaagaggaaaaagatgccagcctcccaaaggtctaagaggagaaaaactgcttccagtgg

SEQ ID NO: 75423 - DNA, 201 bp, Homo sapiens
  misc_feature (1)...(201): n = A,T,C or G
cccagggtacagaaggacatcctgactcagctgaagattctcagacctcaggtgtttagcatgagctttaacagacataatctgaaatactatgtattacngaaaaagcctaaaaaggtggcatttgattgcctagaatggatcagaaagcaccacccatatgattcagggataatttactgcctctccaggcgagaatgt

SEQ ID NO: 75424 - DNA, 184 bp, Homo sapiens
agggggcaggtggaccaaggatgtgaacaggctagtctcagaagaagaaatacacatgctcatggcccggcactgtggctcacgcctgggatcccagcackttgggaggccgaggcaggtggatcacgaggtcaggagtttgagaccagcctgcccaacatggtgaaaccccgtctctactaaa

SEQ ID NO: 75425 - DNA, 201 bp, Homo sapiens
ttattgccagatttcttgcagactccgaaggaagttgtatgcactacccaaaacacaccaactgtaaagaaatcccgggatactgctctcaagaaattagratttagttcttcaccagattctttaagtaccatcaatgattgggatgatatggatgactttgatacttctgagacttcaaaatcatttgttacaccaccc

SEQ ID NO: 75426 - DNA, 201 bp, Homo sapiens
atctactgctcaaaatataaacttctcagagtcaattcagaattatactgacaagtcagcacaaaatttagcatccagaaatctgaaacatgagcgtttcyaaagtcttagttttcctcatacaaaggaaatgatgaagatttttcataaaaaatttggcctgcataattttagaactaatcagctagaggcgatcaatgc

SEQ ID NO: 75427 - DNA, 201 bp, Homo sapiens
aacagacataatctgaaatactatgtattaccgaaaaagcctaaaaaggtggcatttgattgcctagaatggatcagaaagcaccacccatatgattcagrgataatttactgcctctccaggcgagaatgtgacaccatggctgacacgttacagagagatgggctcgctgctcttgcttaccatgctggcctcagtgat

SEQ ID NO: 75428 - DNA, 201 bp, Homo sapiens
ctgaaacatgagcgtttccaaagtcttagttttcctcatacaaaggaaatgatgaagatttttcataaaaaatttggcctgcataattttagaactaatcrgctagaggcgatcaatgctgcactgcttggtgaagactgttttatcctgatgccgactggaggtggtaagagtttgtgttaccagctccctgcctgtgtt

SEQ ID NO: 75429 - DNA, 201 bp, Homo sapiens
tgactgaggaacagaaggatgactcagaatggttaagcagcgatgtgatttgcatcgatgatggccccattgctgaagtgcatataaatgaagatgctcargaaagtgactctctgaaaactcatttggaagatgaaagagataatagcgaaaagaagaagaatttggaagaagctgaattacattcaactgagaaagttc

SEQ ID NO: 75430 - DNA, 201 bp, Homo sapiens
tgaaaagacttataatgatggaaaaagatggaaaccatcatacaagagaaactcacttcaataatttgtatagcatggtacattactgtgaaaatataacrgaatgcaggagaatacagcttttggcctactttggtgaaaatggatttaatcctgatttttgtaagaaacacccagatgtttcttgtgataattgctgta

SEQ ID NO: 75431 - DNA, 201 bp, Homo sapiens
gtaagtagcaactgggctgaaacaccaagactaggaaaaaaaaatgaaagctcttatttcccaggaaatgttctcacaagcactgctgtgaaagatcagartaaacatactgcttcaataaatgacttagaaagagaaacccaaccttcctatgatattgataattttgacatagatgactttgatgatgatgatgactgg

SEQ ID NO: 75432 - DNA, 201 bp, Homo sapiens
taaagcccaaactgtactaaatggcaatttaaaggtagactttatggaaacagaaaattccagcagtgtgaaaaaacaaaaagcgttagtagcaaaagtgwctcagagggaagagatggttaaaaaatgtcttggagaacttacagaagtctgcaaatctctggggaaagtttttggtgtccattacttcaatatttttaa

SEQ ID NO: 75433 - DNA, 201 bp, Homo sapiens
aatttgtatagcatggtacattactgtgaaaatataacggaatgcaggagaatacagcttttggcctactttggtgaaaatggatttaatcctgatttttstaagaaacacccagatgtttcttgtgataattgctgtaaaacaaaggattataaaacaagagatgtgactgacgatgtgaaaagtattgtaagatttgtt

SEQ ID NO: 75434 - DNA, 201 bp, Homo sapiens
cgatgatggccccattgctgaagtgcatataaatgaagatgctcaggaaagtgactctctgaaaactcatttggaagatgaaagagataatagcgaaaagwagaagaatttggaagaagctgaattacattcaactgagaaagttccatgtattgaatttgatgatgatgattatgatacggattttgttccaccttctcc

SEQ ID NO: 75435 - DNA, 201 bp, Homo sapiens
tacagaaatactctgaatggacatcgccagctgaagacagttccccagggataagcctgtccagcagcagaggccccggaagaagtgccgctgaggagctygacgaggaaatacccgtatcttcccactactttgcaagtaaaaccagaaatgaaaggaagaggaaaaagatgccagcctcccaaaggtctaagaggagaa

SEQ ID NO: 75436 - DNA, 201 bp, Homo sapiens
agacttataatgatggaaaaagatggaaaccatcatacaagagaaactcacttcaataatttgtatagcatggtacattactgtgaaaatataacggaatkcaggagaatacagcttttggcctactttggtgaaaatggatttaatcctgatttttgtaagaaacacccagatgtttcttgtgataattgctgtaaaaca

SEQ ID NO: 75437 - DNA, 201 bp, Homo sapiens
aatggacatcgccagctgaagacagttccccagggataagcctgtccagcagcagaggccccggaagaagtgccgctgaggagctcgacgaggaaataccygtatcttcccactactttgcaagtaaaaccagaaatgaaaggaagaggaaaaagatgccagcctcccaaaggtctaagaggagaaaaactgcttccagtg

SEQ ID NO: 75438 - DNA, 201 bp, Homo sapiens; identical to SEQ ID NO: 75421

SEQ ID NO: 75439 - DNA, 201 bp, Homo sapiens; identical to SEQ ID NO: 75422

SEQ ID NO: 75440 - DNA, 201 bp, Homo sapiens; identical to SEQ ID NO: 75423
  misc_feature (1)...(201): n = A,T,C or G

SEQ ID NO: 75441 - DNA, 184 bp, Homo sapiens; identical to SEQ ID NO: 75424

SEQ ID NO: 75442 - DNA, 201 bp, Homo sapiens; identical to SEQ ID NO: 75425

SEQ ID NO: 75443 - DNA, 201 bp, Homo sapiens; identical to SEQ ID NO: 75426

SEQ ID NO: 75444 - DNA, 201 bp, Homo sapiens; identical to SEQ ID NO: 75427

SEQ ID NO: 75445 - DNA, 201 bp, Homo sapiens; identical to SEQ ID NO: 75428

SEQ ID NO: 75446 - DNA, 201 bp, Homo sapiens
tgactgaggaacagaaggatgactcagaatggttaagcagcgatgtgatttgcatcgatgatggccccattgctgaagtgcatataaatgaagatgctcargaaagtgactctctgaaaactcatttggaagatgaaagagtggttaacaaatctatgtttatcaactgttttactgtagataatagcgaaaagaagaaga

SEQ ID NO: 75447 - DNA, 201 bp, Homo sapiens; identical to SEQ ID NO: 75430

SEQ ID NO: 75448 - DNA, 201 bp, Homo sapiens; identical to SEQ ID NO: 75431

SEQ ID NO: 75449 - DNA, 201 bp, Homo sapiens; identical to SEQ ID NO: 75432

SEQ ID NO: 75450 - DNA, 201 bp, Homo sapiens; identical to SEQ ID NO: 75433

SEQ ID NO: 75451 - DNA, 201 bp, Homo sapiens
tgctcaggaaagtgactctctgaaaactcatttggaagatgaaagagtggttaacaaatctatgtttatcaactgttttactgtagataatagcgaaaagwagaagaatttggaagaagctgaattacattcaactgagaaagttccatgtattgaatttgatgatgatgattatgatacggattttgttccaccttctcc

SEQ ID NO: 75452 - DNA, 201 bp, Homo sapiens; identical to SEQ ID NO: 75435

SEQ ID NO: 75453 - DNA, 201 bp, Homo sapiens; identical to SEQ ID NO: 75436

SEQ ID NO: 75454 - DNA, 201 bp, Homo sapiens; identical to SEQ ID NO: 75437

SEQ ID NO: 75455 - DNA, 201 bp, Homo sapiens
tggaggacttggatgggtttgagggttactccctgagtgactggctgtgcctggcttttgtggaaagcaagttcaacatatcaaagataaatgaaaatgcrgatggaagctttgactatggcctcttccagatcaacagccactactggtgcaacgattataagagttactcggaaaacctttgccacgtagactgtcaag

SEQ ID NO: 75456 - DNA, 201 bp, Homo sapiens
cttcttgcaggcatccactgcgcaaaaaggattgtgtccggagcacgggggatgaacaactgggtagaatggaggttgcactgttcaggccggccactctyctactggctgacaggatgccgcctgagatgaaacagggtgcgggtgcaccgtggagtcattccaagactcctgtcctcactcagggattcttcatttctt

SEQ ID NO: 75457 - DNA, 201 bp, Homo sapiens
aggacttggatgggtttgagggttactccctgagtgactggctgtgcctggcttttgtggaaagcaagttcaacatatcaaagataaatgaaaatgcagayggaagctttgactatggcctcttccagatcaacagccactactggtgcaacgattataagagttactcggaaaacctttgccacgtagactgtcaagatc

SEQ ID NO: 75458 - DNA, 201 bp, Homo sapiens
gaatcccaaccttcttgcaggcatccactgcgcaaaaaggattgtgtccggagcacgggggatgaacaactgggtagaatggaggttgcactgttcaggcsggccactcttctactggctgacaggatgccgcctgagatgaaacagggtgcgggtgcaccgtggagtcattccaagactcctgtcctcactcagggattc

SEQ ID NO: 75459 - DNA, 201 bp, Homo sapiens
tcaggccggccactcttctactggctgacaggatgccgcctgagatgaaacagggtgcgggtgcaccgtggagtcattccaagactcctgtcctcactcarggattcttcatttcttcttcctactgcctccacttcatgttattttcttcccttcccatttacaactaaaactgaccagagccccaggaataaatggttt

SEQ ID NO: 75460 - DNA, 201 bp, Homo sapiens
ggtgcaacgattataagagttactcggaaaacctttgccacgtagactgtcaagatctgctgaatcccaaccttcttgcaggcatccactgcgcaaaaagkattgtgtccggagcacgggggatgaacaactgggtagaatggaggttgcactgttcaggccggccactcttctactggctgacaggatgccgcctgagat

SEQ ID NO: 75461 - DNA, 201 bp, Homo sapiens
atgaagccttgaagctcttcaagatgcactcccctcagacttctgccatgctcttcacggtggacaatgaggctggcaagatcacgtgcctgtgtcaagtyccccagaatgcagccaatcggggcttaaaagccagcgagtgggtgcagcaggtgtcaggcttgatggacggtaaaggtggtggcaaggatgtgtctgcac

SEQ ID NO: 75462 - DNA, 201 bp, Homo sapiens
aaggatgtgtctgcacaggccacaggcaagaacgttggctgcctgcaggaggcgctgcagctggccacttccttcgcccagctgcgcctcggggatgtaawgaactgagtggggaaggaggaggctcccactggatccatccgtccagccaagagctcttcatctgctacaagaacatttgaatcttgggacctttaaaga

SEQ ID NO: 75463 - DNA, 201 bp, Homo sapiens
ctgcgcctcggggatgtaaagaactgagtggggaaggaggaggctcccactggatccatccgtccagccaagagctcttcatctgctacaagaacatttgwatcttgggacctttaaagagcccctcctaacccagcagtaactggaacacacttgggagcagtcctatgtctcagtgccccttaaatttctgccctgagc

SEQ ID NO: 75464 - DNA, 201 bp, Homo sapiens
atgggcctggaacgactggtatctgtgctgcagaataagatgtccaactatgacactgacctttttgtcccttactttgaagccattcagaagggcacagrtgcccgaccatacactgggaaagttggtgctgaggatgccgatgggattgacatggcctaccgggtgctggctgaccacgctcggaccatcactgtggca

SEQ ID NO: 75465 - DNA, 201 bp, Homo sapiens
agaacatttgaatcttgggacctttaaagagcccctcctaacccagcagtaactggaacacacttgggagcagtcctatgtctcagtgccccttaaatttytgccctgagccctccacgtcagtgccatcggtctagaaccactaaccccgcattgctgttgatcgtcacgctcgcatctatagataacggctctccagac

SEQ ID NO: 75466 - DNA, 201 bp, Homo sapiens
aagccattcagaagggcacaggtgcccgaccatacactgggaaagttggtgctgaggatgccgatgggattgacatggcctaccgggtgctggctgaccaygctcggaccatcactgtggcactggctgatggtggccggcctgacaacacagggcgtggatatgtgttgagacggattctccgccgagctgtccgatacg

SEQ ID NO: 75467 - DNA, 201 bp, Homo sapiens
cggaagaagccattgccaagggtatccggaggattgtggctgtcacaggtgccgaggcccagaaggccctcaggaaagcagagagcttgaagaaatgtctstctgtcatggaagccaaagtgaaggctcagactgctccaaacaaggatgtgcagagggagatcgctgaccttggagaggccctggccactgcagtcatcc

SEQ ID NO: 75468 - DNA, 201 bp, Homo sapiens
aaaatttggggctggatgacaccaaaatcctcccaggcaacatgaaggataacttctgggagatgggtgacacgggcccctgtggtccttgcagtgagatscactacgaccggattggtggtcgggacgccgcacatcttgtcaaccaggacgaccctaatgtgctggagatctggaaccttgtgttcatccagtataaca

SEQ ID NO: 75469 - DNA, 201 bp, Homo sapiens; identical to SEQ ID NO: 75461

SEQ ID NO: 75470 - DNA, 201 bp, Homo sapiens; identical to SEQ ID NO: 75467

SEQ ID NO: 75471 - DNA, 201 bp, Homo sapiens; identical to SEQ ID NO: 75462

SEQ ID NO: 75472 - DNA, 201 bp, Homo sapiens; identical to SEQ ID NO: 75463

SEQ ID NO: 75473 - DNA, 201 bp, Homo sapiens; identical to SEQ ID NO: 75465

SEQ ID NO: 75474 - DNA, 201 bp, Homo sapiens
cttcagcacaccagtgggtggatatgacagatgtgactgtctggctcaattccacacatgcatcaaaaacatgtaaaccagcattgggctacagttttgcrgctggcactattgatggagttggaggcctcaattttacacaggggaaaacagaaggggatccattttgggacaccattcgggaccagatcctgggaaagc

SEQ ID NO: 75475 - DNA, 201 bp, Homo sapiens
gctcagcgatatgaggcagcatcgacaatttatggaccgcacacattatctgcttacattcagctcttcagaaaccttgctaaggctattgctacggacayggtagccaacctgagcagaggtccagaacctccctttttcaaacaattaatagttccattaattcctagtattgtggatagagcaccaaaaggcagaact

SEQ ID NO: 75476 - DNA, 201 bp, Homo sapiens
ttgttatttcaggtctatgcaacgtctatacacattacattaccacttatgaagaataccaggctcagcgatatgaggcagcatcgacaatttatggaccrcacacattatctgcttacattcagctcttcagaaaccttgctaaggctattgctacggacacggtagccaacctgagcagaggtccagaacctccctttt

SEQ ID NO: 75477 - DNA, 201 bp, Homo sapiens
agggcatcctcaccaggctatacagtcgtgccttcatcatggcagaacctgatgggtccaatcgaacagtgtttgtcagcatcgacataggcatggtatcmcaaaggctcaggctggaggtcctgaacagactgcagagtaaatatggctccctgtacagaagagataatgtcatcctgagtggcactcacactcattcag

SEQ ID NO: 75478 - DNA, 201 bp, Homo sapiens
tatttcaggtctatgcaacgtctatacacattacattaccacttatgaagaataccaggctcagcgatatgaggcagcatcgacaatttatggaccgcacrcattatctgcttacattcagctcttcagaaaccttgctaaggctattgctacggacacggtagccaacctgagcagaggtccagaacctccctttttcaa

SEQ ID NO: 75479 - DNA, 201 bp, Homo sapiens
tcttgtttatcaccagtgggaccattgaaaaccacaaagatttaggaggccattttttttcaaccacccaaagccctccagccacccagggctccacagcygcccaacgctccacagccacccagcattccacagccacccagagctccacagccactcaaacttctccagtgcctttaaccccagagtctcctctatttc

SEQ ID NO: 75480 - DNA, 201 bp, Homo sapiens
ttacgaccatgtctggacgaagacttcgagaggcagttcaagcagaatttgcatctcatgggatgcagaacatgactgttgttatttcaggtctatgcaaygtctatacacattacattaccacttatgaagaataccaggctcagcgatatgaggcagcatcgacaatttatggaccgcacacattatctgcttacattc

SEQ ID NO: 75481 - DNA, 201 bp, Homo sapiens
tcttgtaaacagtgacaatgtgggctatgcatcttacctgcttgagcaagagaagaacaaaggatatctacctggacaggggccatttgtagcagcctttkcttcatcaaacctaggagatgtgtcccccaacattcttggaccacgttgcatcaacacaggagagtcctgtgataacgccaatagcacttgtcccattgg

SEQ ID NO: 75482 - DNA, 201 bp, Homo sapiens
catcaaacctaggagatgtgtcccccaacattcttggaccacgttgcatcaacacaggagagtcctgtgataacgccaatagcacttgtcccattggtggrcctagcatgtgcattgctaagggacctggacaggatatgtttgacagcacacaaattataggacgggccatgtatcagagagcaaaggaactctatgcct

SEQ ID NO: 75483 - DNA, 201 bp, Homo sapiens
ctatcaaaacctcacccctggcatccagacattgttgatgttcagattattacccttgggtccttggccataactgccatccccggggagtttacgaccaygtctggacgaagacttcgagaggcagttcaagcagaatttgcatctcatgggatgcagaacatgactgttgttatttcaggtctatgcaacgtctataca

SEQ ID NO: 75484 - DNA, 201 bp, Homo sapiens
cacaaatatgaaaccaggcaaaatcttcatcaataaaggaaatgtggatggtgtgcagatcaacagaagtccgtattcttaccttcaaaatccgcagtcakagagagcaaggtattcttcaaatacagacaaggaaatgatagttttgaaaatggtagatttgaatggagatgacttgggccttatcagctggtttgccat

SEQ ID NO: 75485 - DNA, 201 bp, Homo sapiens
ttcctttgatctctcttctgaattgcagaaatcagataaaaactacttggtgaaatgacttcttgtcacattgctgaagaacatatacaaaaggttgctayctttggaggaacccatgggaatgagctaaccggagtatttctggttaagcattggctagagaatggcgctgagattcagagaacagggctggaggtaaaa

SEQ ID NO: 75486 - DNA, 201 bp, Homo sapiens
aaatgtcagaagatttgccatatgaagtgagaagggctcaagaaataaatcatttatttggtccaaaagacagtgaagattcctatgacattatttttgamcttcacaacaccacctctaacatggggtgcactcttattcttgaggattccaggaataactttttaattcagatgtttcattacattaagacttctctgg

SEQ ID NO: 75487 - DNA, 201 bp, Homo sapiens
gtgagaagggctcaagaaataaatcatttatttggtccaaaagacagtgaagattcctatgacattatttttgaccttcacaacaccacctctaacatggrgtgcactcttattcttgaggattccaggaataactttttaattcagatgtttcattacattaagacttctctggctccactaccctgctacgtttatctg

SEQ ID NO: 75488 - DNA, 201 bp, Homo sapiens
accactgcatcctggggatcccatgtttttaactcttgatgggaagacgatcccactgggcggagactgtaccgtgtaccccgtgtttgtgaatgaggccrcatattacgaaaagaaagaagcttttgcaaagacaactaaactaacgctcaatgcaaaaagtattcgctgctgtttacattagaaatcacttccagctta

SEQ ID NO: 75489 - DNA, 201 bp, Homo sapiens
tgagctaaccggagtatttctggttaagcattggctagagaatggcgctgagattcagagaacagggctggaggtaaaaccatttattactaaccccagarcagtgaagaagtgtaccagatatattgactgtgacctgaatcgcatttttgaccttgaaaatcttggcaaaaaaatgtcagaagatttgccatatgaagt

SEQ ID NO: 75490 - DNA, 201 bp, Homo sapiens
ttgtgaatgaggccgcatattacgaaaagaaagaagcttttgcaaagacaactaaactaacgctcaatgcaaaaagtattcgctgctgtttacattagaartcacttccagcttacatcttacacggtgtcttacaaattctgctagtctgtaagctccttaagagtagggttgtgccttattcaactgcatacatagctc

SEQ ID NO: 75491 - DNA, 201 bp, Homo sapiens
aattctgctagtctgtaagctccttaagagtagggttgtgccttattcaactgcatacatagctcctagcacagtgccttattcggtaggcatctaagcamatttcttaaattaattaatatatctttaaagatatcatattttatgtatgtagcttattcaaagaagtgtttcctatttctatatagtttattatacatg

SEQ ID NO: 75492 - DNA, 201 bp, Homo sapiens
tggaaaccactgcatcctggggatcccatgtttttaactcttgatgggaagacgatcccactgggcggagactgtaccgtgtaccccgtgtttgtgaatgmggccgcatattacgaaaagaaagaagcttttgcaaagacaactaaactaacgctcaatgcaaaaagtattcgctgctgtttacattagaaatcacttcca

SEQ ID NO: 75493 - DNA, 201 bp, Homo sapiens
gacattatttttgaccttcacaacaccacctctaacatggggtgcactcttattcttgaggattccaggaataactttttaattcagatgtttcattacaytaagacttctctggctccactaccctgctacgtttatctgattgagcatccttccctcaaatatgcgaccactcgttccatagccaagtatcctgtgggt

SEQ ID NO: 75494 - DNA, 201 bp, Homo sapiens
gggttctgagagctgatatcttggatcaaatgagaaaaatgattaaacatgctcttgattttatacatcatttcaatgaaggaaaagaatttcctccctgmgccattgaggtctataaaattatagagaaagttgattatccccgggatgaaaatggagaaattgctgctatcatccatcctaatctgcaggatcaagact

SEQ ID NO: 75495 - DNA, 201 bp, Homo sapiens
aaaatcttggcaaaaaaatgtcagaagatttgccatatgaagtgagaagggctcaagaaataaatcatttatttggtccaaaagacagtgaagattcctakgacattatttttgaccttcacaacaccacctctaacatggggtgcactcttattcttgaggattccaggaataactttttaattcagatgtttcattaca

SEQ ID NO: 75496 - DNA, 201 bp, Homo sapiens
ctcaaatatgcgaccactcgttccatagccaagtatcctgtgggtatagaagttggtcctcagcctcaaggggttctgagagctgatatcttggatcaaakgagaaaaatgattaaacatgctcttgattttatacatcatttcaatgaaggaaaagaatttcctccctgcgccattgaggtctataaaattatagagaaa

SEQ ID NO: 75497 - DNA, 201 bp, Homo sapiens
aaaaatgtcagaagatttgccatatgaagtgagaagggctcaagaaataaatcatttatttggtccaaaagacagtgaagattcctatgacattatttttkaccttcacaacaccacctctaacatggggtgcactcttattcttgaggattccaggaataactttttaattcagatgtttcattacattaagacttctct

SEQ ID NO: 75498 - DNA, 201 bp, Homo sapiens
ctgcaggatcaagactggaaaccactgcatcctggggatcccatgtttttaactcttgatgggaagacgatcccactgggcggagactgtaccgtgtaccycgtgtttgtgaatgaggccgcatattacgaaaagaaagaagcttttgcaaagacaactaaactaacgctcaatgcaaaaagtattcgctgctgtttacat

SEQ ID NO: 75499 - DNA, 201 bp, Homo sapiens
cctccctgcgccattgaggtctataaaattatagagaaagttgattatccccgggatgaaaatggagaaattgctgctatcatccatcctaatctgcaggwtcaagactggaaaccactgcatcctggggatcccatgtttttaactcttgatgggaagacgatcccactgggcggagactgtaccgtgtaccccgtgttt

SEQ ID NO: 75500 - DNA, 201 bp, Homo sapiens
ctgggcggagactgtaccgtgtaccccgtgtttgtgaatgaggccgcatattacgaaaagaaagaagcttttgcaaagacaactaaactaacgctcaatgmaaaaagtattcgctgctgtttacattagaaatcacttccagcttacatcttacacggtgtcttacaaattctgctagtctgtaagctccttaagagtagg

SEQ ID NO: 75501 - DNA, 201 bp, Homo sapiens
tctgcaggatcaagactggaaaccactgcatcctggggatcccatgtttttaactcttgatgggaagacgatcccactgggcggagactgtaccgtgtacyccgtgtttgtgaatgaggccgcatattacgaaaagaaagaagcttttgcaaagacaactaaactaacgctcaatgcaaaaagtattcgctgctgtttaca

SEQ ID NO: 75502 - DNA, 201 bp, Homo sapiens
atgattaaacatgctcttgattttatacatcatttcaatgaaggaaaagaatttcctccctgcgccattgaggtctataaaattatagagaaagttgattrtccccgggatgaaaatggagaaattgctgctatcatccatcctaatctgcaggatcaagactggaaaccactgcatcctggggatcccatgtttttaact

SEQ ID NO: 75503 - DNA, 201 bp, Homo sapiens
cagataaaaactacttggtgaaatgacttcttgtcacattgctgaagaacatatacaaaaggttgctatctttggaggaacccatgggaatgagctaaccrgagtatttctggttaagcattggctagagaatggcgctgagattcagagaacagggctggaggtaaaaccatttattactaaccccagagcagtgaagaa

SEQ ID NO: 75504 - DNA, 201 bp, Homo sapiens
gtgtttgtgaatgaggccgcatattacgaaaagaaagaagcttttgcaaagacaactaaactaacgctcaatgcaaaaagtattcgctgctgtttacattrgaaatcacttccagcttacatcttacacggtgtcttacaaattctgctagtctgtaagctccttaagagtagggttgtgccttattcaactgcatacata

SEQ ID NO: 75505 - DNA, 201 bp, Homo sapiens
gcagaaatcagataaaaactacttggtgaaatgacttcttgtcacattgctgaagaacatatacaaaaggttgctatctttggaggaacccatgggaatgrgctaaccggagtatttctggttaagcattggctagagaatggcgctgagattcagagaacagggctggaggtaaaaccatttattactaaccccagagca

SEQ ID NO: 75506 - DNA, 201 bp, Homo sapiens
tgctatcatccatcctaatctgcaggatcaagactggaaaccactgcatcctggggatcccatgtttttaactcttgatgggaagacgatcccactgggcrgagactgtaccgtgtaccccgtgtttgtgaatgaggccgcatattacgaaaagaaagaagcttttgcaaagacaactaaactaacgctcaatgcaaaaag

SEQ ID NO: 75507 - DNA, 201 bp, Homo sapiens
tttttaactcttgatgggaagacgatcccactgggcggagactgtaccgtgtaccccgtgtttgtgaatgaggccgcatattacgaaaagaaagaagcttytgcaaagacaactaaactaacgctcaatgcaaaaagtattcgctgctgtttacattagaaatcacttccagcttacatcttacacggtgtcttacaaatt

SEQ ID NO: 75508 - DNA, 201 bp, Homo sapiens
ttctgaattgcagaaatcagataaaaactacttggtgaaatgacttcttgtcacattgctgaagaacatatacaaaaggttgctatctttggaggaacccmtgggaatgagctaaccggagtatttctggttaagcattggctagagaatggcgctgagattcagagaacagggctggaggtaaaaccatttattactaac

SEQ ID NO: 75509 - DNA, 201 bp, Homo sapiens
tgattaaacatgctcttgattttatacatcatttcaatgaaggaaaagaatttcctccctgcgccattgaggtctataaaattatagagaaagttgattahccccgggatgaaaatggagaaattgctgctatcatccatcctaatctgcaggatcaagactggaaaccactgcatcctggggatcccatgtttttaactc

SEQ ID NO: 75510 - DNA, 201 bp, Homo sapiens
gggaccactgtctacaccgagggagtcatgagcagcccagggaccactgtctacacccagggagtcaggagcagcccggggactgctgtctacaccgaggrtgtcaggagcagcccagggaccactgtctacactgagagcgtcaggagcagcccagggaccgccgtccacaccaagagcgccaaggagcagcccagggac

SEQ ID NO: 75511 - DNA, 201 bp, Homo sapiens
ggaatgagcaaagcccggctcgctgaggctgcaggctgcaggcaagtgaggactgaaagggtaacgggctctgggctttgtcctctctttgttccggacarcccctgcgatggggtcatattttgcactcacatacaagaacccatgagcctgcccacggtcacgcggctggtgagtgatgcacttcccaggagcacggtg

SEQ ID NO: 75512 - DNA, 201 bp, Homo sapiens
cccctgcgatggggtcatattttgcactcacatacaagaacccatgagcctgcccacggtcacgcggctggtgagtgatgcacttcccaggagcacggtgrcctcttcgatggccctcactagagaagatggacagtgcccccctagccttttttactggaacagatacaaggctgagaagctgaaatcaggagcagccca

SEQ ID NO: 75513 - DNA, 201 bp, Homo sapiens
atggggtcatattttgcactcacatacaagaacccatgagcctgcccacggtcacgcggctggtgagtgatgcacttcccaggagcacggtggcctcttcratggccctcactagagaagatggacagtgcccccctagccttttttactggaacagatacaaggctgagaagctgaaatcaggagcagcccagggaccac

SEQ ID NO: 75514 - DNA, 201 bp, Homo sapiens
agtgctggagaagtggaagaacatcacgggccacaccctgctggagcggtatggcatgaccgagatcggcatggctctgtccgggcccctgaccactgccrtgcgcctgccaggatgtgctggttttgtccagtgccaccggccacagtcaccacgtaatatggacggaatgagcaaagcccggctcgctgaggctgcagg

SEQ ID NO: 75515 - DNA, 201 bp, Homo sapiens
gccgtccacaccaagagcgccaaggagcagcccagggaccgccgtccacaccgagggcgccaaggagcagatagtagcccagagacccaggggaggctcascttccccacgctggaatcagaactcctaggcgaacaggaaggagccccagacagatggcacagggagaggagtccccggctgaggagggggatccagaga

SEQ ID NO: 75516 - DNA, 201 bp, Homo sapiens
ggtcctccgggaaggcattggaggtgcaaatggctcggtcccatctgtctctctctctctctcatctccacttcagaaatacctggagaattacctcaacygtctcttgaccatgtctttctatcgcaactaccatgccatgacagagttcctggaagtcagtcagctgtcctttatcccggacttgggccgcaaaggact

SEQ ID NO: 75517 - DNA, 145 bp, Homo sapiens
gccccgcctcggccggggcgtgggctccggctgcagctccggtcygctctcttggctccggaacccccgcgggcgctggctccgtctgccagggatgacggcgacccctgagagcctcttccccactggggacgaactggactcc

SEQ ID NO: 75518 - DNA, 201 bp, Homo sapiens
tgacctgcactaccgactgactgaccttggagactcctctgaatcagctgcctcccagtgctcctctctttggccctggctctgtacagccccatgacttmcccttgcccctggcttgggtgtgttccccctacagcctcccaccccgcgcccagactcaccagccaccccagacctctctcacaaccaattcttctggct

SEQ ID NO: 75519 - DNA, 201 bp, Homo sapiens
tcatcacagactggtggttgagtcctgaggtttacctgaagcgtccggcccattcagatgactggagactggacattatgctcaagaggaaggcggaggarggtgtccgtgtgtctattctgctgtttaaagaagtggaattggccttgggcatcaacagtggctatagcaagagggcgctgatgctgctgcaccccaaca

SEQ ID NO: 75520 - DNA, 201 bp, Homo sapiens
gcaaggtgctcatcgcagatgaccggacagtcatcattggttctgcaaacatcaatgaccggagcttgctggggaagcgggacagtgagctggccgtgctratcgaggacacagagacggaaccatccctcatgaatggggcagagtatcaggcgggcaggtttgccttgagtctgcggaagcactgcttcggtgtgattc

SEQ ID NO: 75521 - DNA, 201 bp, Homo sapiens
cctgctgtacatgtgcctcgagacaggtgccatctcatttgttcagctctttgaccctggctttgaggtgcaagtggggaaaaggagcacggaggcacggyacggcgtgcggatcgatacctcccacaggtccttgattctcaagtgcagcagctaccggcaggcacggtggtgggcccaagagatcactgagctggcaca

SEQ ID NO: 75522 - DNA, 201 bp, Homo sapiens
acttttcctggacaaccaagaagaaataccgtcattttcaggagctgcatcgggacctcctgagacacaaagtcttgatgagtctgctccctctggctcgwtttgccgttgcctattctccagcccgagatgcaggcaacagagagatgccctctctaccccgggcaggtcctgagggctccaccagacatgcagccagca

SEQ ID NO: 75523 - DNA, 201 bp, Homo sapiens
ccacgtctggctccctgccccttaaccccaaggactgagggcagtgccctttgagatctggggaggcaggcattcctgaagggaactagaggtgttacagmggacccttacgtgagaaatagctgaaaagggcactcccaaccctgggctggggaggaggagagagtcccagagctcatcccccctgctgcccagtgcaaa

SEQ ID NO: 75524 - DNA, 201 bp, Homo sapiens
ctcacccaggtccagggccacctggtccacttccccctcaagttcctagaggatgagtctttgctgcccccgctgggtagcaaggagggcatgatccccckagaagtgtggacatagttgaggcccccgtcagggagaggtcaccagctgctgtgccccaccacgtctggctccctgccccttaaccccaaggactgaggg

SEQ ID NO: 75525 - DNA, 201 bp, Homo sapiens
gccacgcgttccctgcggactctccgggagtacgtggccgtggagcccttggccacggtcagtccccccttggctcggtctgagctcacccaggtccaggrccacctggtccacttccccctcaagttcctagaggatgagtctttgctgcccccgctgggtagcaaggagggcatgatccccctagaagtgtggacatag

SEQ ID NO: 75526 - DNA, 201 bp, Homo sapiens
ggcacggcgtgcggatcgatacctcccacaggtccttgattctcaagtgcagcagctaccggcaggcacggtggtgggcccaagagatcactgagctggcrcagggcccaggcagagacttcctacagctgcaccggcatgacagctacgccccaccccggcctgggaccttggcccggtggtttgtgaatggggcaggtt

SEQ ID NO: 75527 - DNA, 201 bp, Homo sapiens
aggggctggaggtagggagggagccagggcagattggcacctcctgctgactctgccatccctccacgtcagaccaccaaggccaagtacaagactcccayatacccctacctgcttcccaagtctaccagcacggccaatcagctccccttcacacttccaggagggcagtgcaccaccgtacaggtcttgcgatcagtg

SEQ ID NO: 75528 - DNA, 201 bp, Homo sapiens
ggccgtgctgatcgaggacacagagacggaaccatccctcatgaatggggcagagtatcaggcgggcaggtttgccttgagtctgcggaagcactgcttcrgtgtgattcttggagcaaatacccggccagacttggatctccgagaccccatctgtgatgacttcttccagttgtggcaagacatggctgagagcaacgc

SEQ ID NO: 75529 - DNA, 201 bp, Homo sapiens
atacccggccagacttggatctccgagaccccatctgtgatgacttcttccagttgtggcaagacatggctgagagcaacgccaatatctatgagcagatyttccgctgcctgccatccaatgccacgcgttccctgcggactctccgggagtacgtggccgtggagcccttggccacggtcagtccccccttggctcggt

SEQ ID NO: 75530 - DNA, 201 bp, Homo sapiens
gggcagtgcaccaccgtacaggtcttgcgatcagtggaccgctggtcagcagggactctggagaactccatcctcaatgcctacctgcacaccatcagggrgagccagcacttcctctacattgaggtctgactgggaggaggtgggggagagcatggaaggggtgtcccaggagagagacctggggaatgagtggagtca

SEQ ID NO: 75531 - DNA, 201 bp, Homo sapiens
cctcttcctgcccttgaaccccctccctgtcccagggccctcccagcccattgctgccaaggtggagggaaggataaagccacttctggcttcagcccccmccaggggaaggaaggagggcacattaactccctccaccagcctgctgacagacactaactttgtatccgttcaataagcatttcataaataaaggtgtag

SEQ ID NO: 75532 - DNA, 201 bp, Homo sapiens
ttctgcaaacatcaatgaccggagcttgctggggaagcgggacagtgagctggccgtgctgatcgaggacacagagacggaaccatccctcatgaatgggrcagagtatcaggcgggcaggtttgccttgagtctgcggaagcactgcttcggtgtgattcttggagcaaatacccggccagacttggatctccgagaccc

SEQ ID NO: 75533 - DNA, 101 bp, Homo sapiens
gaaggagggcacattaactccctccaccagcctgctgacagacactaactttgtatccgttcaataagcatttcataaataaaggtgtagaaaaggttcaw

SEQ ID NO: 75534 - DNA, 201 bp, Homo sapiens
ggccaagtacaagactcccacatacccctacctgcttcccaagtctaccagcacggccaatcagctccccttcacacttccaggagggcagtgcaccaccrtacaggtcttgcgatcagtggaccgctggtcagcagggactctggagaactccatcctcaatgcctacctgcacaccatcagggagagccagcacttcct

SEQ ID NO: 75535 - DNA, 159 bp, Homo sapiens
gccccgcctcggccggggcgtgggctccggctgcagctccggtctgctctcttggctcsggaacccccgcgggcgctggctccgtctgccagggatgacggcgacccctgagagcctcttccccactggggacgaactggactccagccagctccagat

SEQ ID NO: 75536 - DNA, 201 bp, Homo sapiens
tgcaggcaacagagagatgccctctctaccccgggcaggtcctgagggctccaccagacatgcagccagcaaacagaaatacctggagaattacctcaacygtctcttgaccatgtctttctatcgcaactaccatgccatgacagagttcctggaagtcagtcagctgtcctttatcccggacttgggccgcaaaggact

SEQ ID NO: 75537 - DNA, 145 bp, Homo sapiens; identical to SEQ ID NO: 75517

SEQ ID NO: 75538 - DNA, 201 bp, Homo sapiens; identical to SEQ ID NO: 75519

SEQ ID NO: 75539 - DNA, 201 bp, Homo sapiens; identical to SEQ ID NO: 75521

SEQ ID NO: 75540 - DNA, 201 bp, Homo sapiens
gcaaggtgctcatcgcagatgaccggacagtcatcattggttctgcaaacatcaatgaccggagcttgctggggaagcgggacagtgagctggccgtgctratcgaggacacagagacggaaccatccctcatgaatggggcagagtatcaggcgggcagtgtgattcttggagcaaatacccggccagacttggatctcc

SEQ ID NO: 75541 - DNA, 201 bp, Homo sapiens; identical to SEQ ID NO: 75522

SEQ ID NO: 75542 - DNA, 201 bp, Homo sapiens; identical to SEQ ID NO: 75523

SEQ ID NO: 75543 - DNA, 201 bp, Homo sapiens; identical to SEQ ID NO: 75524

SEQ ID NO: 75544 - DNA, 201 bp, Homo sapiens; identical to SEQ ID NO: 75525

SEQ ID NO: 75545 - DNA, 201 bp, Homo sapiens; identical to SEQ ID NO: 75526

SEQ ID NO: 75546 - DNA, 201 bp, Homo sapiens; identical to SEQ ID NO: 75529

SEQ ID NO: 75547 - DNA, 201 bp, Homo sapiens
ggggtggtcgtccatggcctaccggcccgggaccttgcccggcacttcatccagcgctggaacttcaccaagaccaccaaggccaagtacaagactcccayatacccctacctgcttcccaagtctaccagcacggccaatcagctccccttcacacttccaggagggcagtgcaccaccgtacaggtcttgcgatcagtg

SEQ ID NO: 75548 - DNA, 201 bp, Homo sapiens
gggcagtgcaccaccgtacaggtcttgcgatcagtggaccgctggtcagcagggactctggagaactccatcctcaatgcctacctgcacaccatcagggrgagccagcacttcctctacattgagaatcagttcttcattagctgctcagatgggcggacggttctgaacaaggtgggcgatgagattgtggacagaatc

SEQ ID NO: 75549 - DNA, 201 bp, Homo sapiens
ttctgcaaacatcaatgaccggagcttgctggggaagcgggacagtgagctggccgtgctgatcgaggacacagagacggaaccatccctcatgaatgggrcagagtatcaggcgggcagtgtgattcttggagcaaatacccggccagacttggatctccgagaccccatctgtgatgacttcttccagttgtggcaaga

SEQ ID NO: 75550 - DNA, 201 bp, Homo sapiens; identical to SEQ ID NO: 75531

SEQ ID NO: 75551 - DNA, 201 bp, Homo sapiens
gacttttcctggacaaccaagaagaaataccgtcattttcaggagctgcatcgggacctcctgagacacaaagtcttgatgagtctgctccctctggctcwatttgccgttgcctattctccagcccgagatgcaggcaacagagagatgccctctctaccccgggcaggtcctgagggctccaccagacatgcagccagc

SEQ ID NO: 75552 - DNA, 201 bp, Homo sapiens; identical to SEQ ID NO: 75534

SEQ ID NO: 75553 - DNA, 159 bp, Homo sapiens; identical to SEQ ID NO: 75535

SEQ ID NO: 75554 - DNA, 201 bp, Homo sapiens; identical to SEQ ID NO: 75536

SEQ ID NO: 75555 - DNA, 145 bp, Homo sapiens; identical to SEQ ID NO: 75517

SEQ ID NO: 75556 - DNA, 201 bp, Homo sapiens; identical to SEQ ID NO: 75519

SEQ ID NO: 75557 - DNA, 201 bp, Homo sapiens; identical to SEQ ID NO: 75521

SEQ ID NO: 75558 - DNA, 201 bp, Homo sapiens; identical to SEQ ID NO: 75520

SEQ ID NO: 75559 - DNA, 201 bp, Homo sapiens; identical to SEQ ID NO: 75522

SEQ ID NO: 75560 - DNA, 201 bp, Homo sapiens; identical to SEQ ID NO: 75523

SEQ ID NO: 75561 - DNA, 201 bp, Homo sapiens; identical to SEQ ID NO: 75524

SEQ ID NO: 75562 - DNA, 201 bp, Homo sapiens; identical to SEQ ID NO: 75525

SEQ ID NO: 75563 - DNA, 201 bp, Homo sapiens; identical to SEQ ID NO: 75526

SEQ ID NO: 75564 - DNA, 201 bp, Homo sapiens; identical to SEQ ID NO: 75529

SEQ ID NO: 75565 - DNA, 201 bp, Homo sapiens; identical to SEQ ID NO: 75547

SEQ ID NO: 75566 - DNA, 201 bp, Homo sapiens; identical to SEQ ID NO: 75528

SEQ ID NO: 75567 - DNA, 201 bp, Homo sapiens; identical to SEQ ID NO: 75548

SEQ ID NO: 75568 - DNA, 201 bp, Homo sapiens; identical to SEQ ID NO: 75532

SEQ ID NO: 75569 - DNA, 201 bp, Homo sapiens; identical to SEQ ID NO: 75531

SEQ ID NO: 75570 - DNA, 201 bp, Homo sapiens; identical to SEQ ID NO: 75551

SEQ ID NO: 75571 - DNA, 201 bp, Homo sapiens; identical to SEQ ID NO: 75534

SEQ ID NO: 75572 - DNA, 159 bp, Homo sapiens; identical to SEQ ID NO: 75535

SEQ ID NO: 75573 - DNA, 201 bp, Homo sapiens
ggatgactgggccacttggacctccttcctctcgggggtgaacatccagattgtgggggatgacttgacagtcaccaaccccaagaggattgcccaggccrttgagaagaaggcctgcaactgtctgctgctgaaggtcaaccagatcggctcggtgaccgaatcgatccaggcgtgcaaactggctcagtctaatggctg

SEQ ID NO: 75574 - DNA, 201 bp, Homo sapiens
gcatggatgtggcagcatctgagttctatcgcaatgggaagtacgatcttgacttcaagtcgcctgatgatcccgcacggcacatcactggggagaagctyggagagctgtataagagctttatcaagaactatcctgtggtctccatcgaagacccctttgaccaggatgactgggccacttggacctccttcctctcgg

SEQ ID NO: 75575 - DNA, 201 bp, Homo sapiens
ctgctgaaggtcaaccagatcggctcggtgaccgaatcgatccaggcgtgcaaactggctcagtctaatggctggggggtgatggtgagccaccgctctgrggagactgaggacacattcattgctgaccttgtggtggggctctgcacaggacagatcaagactggcgccccctgccgctcggagcgtctggccaaatac

SEQ ID NO: 75576 - DNA, 201 bp, Homo sapiens
ggggcttccacgggtatctatgaggctctggaactaagagacggagacaaaggccgctacctggggaaaggagtcctgaaggctgtggagaacatcaacartactctgggccctgctctgctgcaaaaggcaaaaactaagcgttgtggatcaagaaaaagttgacaaatttatgattgagctagatgggaccgagaataa

SEQ ID NO: 75577 - DNA, 201 bp, Homo sapiens
aggatgactgggccacttggacctccttcctctcgggggtgaacatccagattgtgggggatgacttgacagtcaccaaccccaagaggattgcccaggcygttgagaagaaggcctgcaactgtctgctgctgaaggtcaaccagatcggctcggtgaccgaatcgatccaggcgtgcaaactggctcagtctaatggct

SEQ ID NO: 75578 - DNA, 201 bp, Homo sapiens
acaaaggccgctacctggggaaaggagtcctgaaggctgtggagaacatcaacaatactctgggccctgctctgctgcaaaaggcaaaaactaagcgttgyggatcaagaaaaagttgacaaatttatgattgagctagatgggaccgagaataagtccaagtttggggccaatgccatcctgggcgtgtccttggccgtg

SEQ ID NO: 75579 - DNA, 201 bp, Homo sapiens; identical to SEQ ID NO: 75573

SEQ ID NO: 75580 - DNA, 201 bp, Homo sapiens; identical to SEQ ID NO: 75574

SEQ ID NO: 75581 - DNA, 201 bp, Homo sapiens; identical to SEQ ID NO: 75575

SEQ ID NO: 75582 - DNA, 201 bp, Homo sapiens
ggggcttccacgggtatctatgaggctctggaactaagagacggagacaaaggccgctacctggggaaaggagtcctgaaggctgtggagaacatcaacartactctgggccctgctctgctgcaaaagaaactaagcgttgtggatcaagaaaaagttgacaaatttatgattgagctagatgggaccgagaataagtcc

SEQ ID NO: 75583 - DNA, 201 bp, Homo sapiens; identical to SEQ ID NO: 75577

SEQ ID NO: 75584 - DNA, 201 bp, Homo sapiens
ggagacaaaggccgctacctggggaaaggagtcctgaaggctgtggagaacatcaacaatactctgggccctgctctgctgcaaaagaaactaagcgttgyggatcaagaaaaagttgacaaatttatgattgagctagatgggaccgagaataagtccaagtttggggccaatgccatcctgggcgtgtccttggccgtg

SEQ ID NO: 75585 - DNA, 201 bp, Homo sapiens
cttctgccctgtcacccctccatgaggctccttctgacctctagccgtgtctctgccctgtctctgccttgtctctgccctgtctctgctctgtctctgcyctgtctctgccctgtctctgccctgtctctgctctgtctctgccctgtctctgccctgtctctgctctgtctctgccctgtctctgctccaaaccccacc

SEQ ID NO: 75586 - DNA, 201 bp, Homo sapiens
ctgacctctagccgtgtctctgccctgtctctgccttgtctctgccctgtctctgctctgtctctgccctgtctctgccctgtctctgccctgtctctgcyctgtctctgccctgtctctgccctgtctctgctctgtctctgccctgtctctgctccaaaccccaccagtggtctccatcgaagacccctttgaccagga

SEQ ID NO: 75587 - DNA, 201 bp, Homo sapiens; identical to SEQ ID NO: 75573

SEQ ID NO: 75588 - DNA, 201 bp, Homo sapiens
gcatggatgtggcagcatctgagttctatcgcaatgggaagtacgatcttgacttcaagtcgcctgatgatcccgcacggcacatcactggggagaagctyggagagctgtataagagctttatcaagaactatcctggtgaggcgttcgggtgtcccagtgttcctgcccgaatcccgtgcagctgcctaatatactgat

SEQ ID NO: 75589 - DNA, 201 bp, Homo sapiens; identical to SEQ ID NO: 75584

SEQ ID NO: 75590 - DNA, 201 bp, Homo sapiens; identical to SEQ ID NO: 75577

SEQ ID NO: 75591 - DNA, 201 bp, Homo sapiens; identical to SEQ ID NO: 75575

SEQ ID NO: 75592 - DNA, 201 bp, Homo sapiens
tcacccctccatgaggctccttctgacctctagccgtgtctctgccctgtctctgccttgtctctgccctgtctctgctctgtctctgccctgtctctgcyctgtctctgccctgtctctgctctgtctctgccctgtctctgccctgtctctgctctgtctctgccctgtctctgctccaaaccccaccagtggtctcca

SEQ ID NO: 75593 - DNA, 201 bp, Homo sapiens
cattaaaatccccatttaagctcttctgccctgtcacccctccatgaggctccttctgacctctagccgtgtctctgccctgtctctgccttgtctctgcyctgtctctgctctgtctctgccctgtctctgccctgtctctgccctgtctctgctctgtctctgccctgtctctgccctgtctctgctctgtctctgccc

SEQ ID NO: 75594 - DNA, 201 bp, Homo sapiens; identical to SEQ ID NO: 75582

SEQ ID NO: 75595 - DNA, 201 bp, Homo sapiens
atcagtcgggcgccttgccagccgaaagggcctgtctaaattcgtttcctgtcccctaactcatcccggcgctggctggcctggagagggtaggatggggyggcgccgagaatggccgttatgaggaccctaagagccatggccatgcagaaaatctttgcccgggaaatcttggactccaggggcaaccccacggtggag

SEQ ID NO: 75596 - DNA, 201 bp, Homo sapiens; identical to SEQ ID NO: 75573

SEQ ID NO: 75597 - DNA, 201 bp, Homo sapiens; identical to SEQ ID NO: 75574

SEQ ID NO: 75598 - DNA, 201 bp, Homo sapiens; identical to SEQ ID NO: 75575

SEQ ID NO: 75599 - DNA, 201 bp, Homo sapiens; identical to SEQ ID NO: 75576

SEQ ID NO: 75600 - DNA, 201 bp, Homo sapiens; identical to SEQ ID NO: 75577

SEQ ID NO: 75601 - DNA, 201 bp, Homo sapiens; identical to SEQ ID NO: 75578

SEQ ID NO: 75602 - DNA, 201 bp, Homo sapiens; identical to SEQ ID NO: 75573

SEQ ID NO: 75603 - DNA, 201 bp, Homo sapiens; identical to SEQ ID NO: 75574

SEQ ID NO: 75604 - DNA, 201 bp, Homo sapiens; identical to SEQ ID NO: 75575

SEQ ID NO: 75605 - DNA, 194 bp, Homo sapiens
aatgcgcagcctgagagggggtgagctgacactgtcccagctgccacctagactcggagctccatccaaacctccagcgaagacatcccaggtygggtgaatcttccagccctgggggtggaggtagtaaaggccatggccatgcagaaaatctttgcccgggaaatcttggactccaggggcaaccccacggt

SEQ ID NO: 75606 - DNA, 201 bp, Homo sapiens; identical to SEQ ID NO: 75582

SEQ ID NO: 75607 - DNA, 201 bp, Homo sapiens; identical to SEQ ID NO: 75577

SEQ ID NO: 75608 - DNA, 201 bp, Homo sapiens; identical to SEQ ID NO: 75584

SEQ ID NO: 75609 - DNA, 201 bp, Homo sapiens; identical to SEQ ID NO: 75573

SEQ ID NO: 75610 - DNA, 201 bp, Homo sapiens; identical to SEQ ID NO: 75574

SEQ ID NO: 75611 - DNA, 201 bp, Homo sapiens; identical to SEQ ID NO: 75575

SEQ ID NO: 75612 - DNA, 201 bp, Homo sapiens; identical to SEQ ID NO: 75582

SEQ ID NO: 75613 - DNA, 201 bp, Homo sapiens; identical to SEQ ID NO: 75577

SEQ ID NO: 75614 - DNA, 201 bp, Homo sapiens; identical to SEQ ID NO: 75584

SEQ ID NO: 75615 - DNA, 201 bp, Homo sapiens
tgctggaacagggagtgcttcagcaggtggacaatgccatccatgaggccagccgtgcctcccagctcgttgacgtggagaaggagtatcggtcggtcctrgatgacctcacgtcatgtacgacatccctaaggcaaatcaataaaattattgaacagcttagccctcaagctgccaccagcagagacatcaacaggaaac

SEQ ID NO: 75616 - DNA, 201 bp, Homo sapiens
gtacgacatccctaaggcaaatcaataaaattattgaacagcttagccctcaagctgccaccagcagagacatcaacaggaaactagattctgtaaaacgrcagaagtataataaggaacaacagctaaaaaagatcactgcaaaacaaaagcatctccaggccatccttggaggagcagaggtgaaaattgaactagatc

SEQ ID NO: 75617 - DNA, 201 bp, Homo sapiens
caaaggcaaggagaccttgggagtcagacatgaggccagaggcagagggagactctgagggtgaagagtctgagtatttccccacagaggaggaggaagargaggaagatgacgaggtggagggggcagaggcggacctgtctggagatggtactgactatgagctgaagcctctgcccaagggcgggaaacggcagaaga

SEQ ID NO: 75618 - DNA, 201 bp, Homo sapiens
gcctccagccccagtgcaaaataaaaacaaaccaaacaagaaagccagagttctgtccaaaaaagaggagcgtttgaaaaagcacatcaagaaactccagwagagggctttgcagttccaggggaaagtgggattgccaaaggcaaggagaccttgggagtcagacatgaggccagaggcagagggagactctgagggtga

SEQ ID NO: 75619 - DNA, 201 bp, Homo sapiens
ctcaggagcaagactgtttacagagtcaacctgtcagtaataatgaagaaatggcaatcaagcaagaaagtggtggtgatggggaggtggaggagtacctstcctttcgttctgtgggtgacgggctgtccacctctgctgtggggtgcgcatcagcagctccgaggagagggccagccctgctgcacatcgaccgacatc

SEQ ID NO: 75620 - DNA, 201 bp, Homo sapiens
gactctgagggtgaagagtctgagtatttccccacagaggaggaggaagaggaggaagatgacgaggtggagggggcagaggcggacctgtctggagatgrtactgactatgagctgaagcctctgcccaagggcgggaaacggcagaagaaagtgccagtgcaggagattgatgatgactttttcccaagttctggggaa

SEQ ID NO: 75621 - DNA, 201 bp, Homo sapiens
gcaggagattgatgatgactttttcccaagttctggggaagaagctgaagctgcttctgtaggagaaggaggaggaggaggtcggaaagtgggaagatacygagatgatggagatgaagattattataagcagcggttaagtcccaagatgcctcgaacactaagtttacatgaaataactgaccttttagagacagatga

SEQ ID NO: 75622 - DNA, 201 bp, Homo sapiens
caataaaattattgaacagcttagccctcaagctgccaccagcagagacatcaacaggaaactagattctgtaaaacgacagaagtataataaggaacaayagctaaaaaagatcactgcaaaacaaaagcatctccaggccatccttggaggagcagaggtgaaaattgaactagatcacgccagtctggaggaggatgc

SEQ ID NO: 75623 - DNA, 201 bp, Homo sapiens; identical to SEQ ID NO: 75615

SEQ ID NO: 75624 - DNA, 201 bp, Homo sapiens
agatggatggtaccactacaatagcttcaagacagccactgattacgagatacaatgaggacacatccatatttgtgtttcttctgaccacgcgggtgggyggcttaggtgtcaacctgacgggggcaaacagagttgtcatctatgacccagactggaacccaagcacggacacgcaggcccgggagcgagcatggagaa

SEQ ID NO: 75625 - DNA, 201 bp, Homo sapiens
acgggggcaaacagagttgtcatctatgacccagactggaacccaagcacggacacgcaggcccgggagcgagcatggagaataggccagaagaagcaagkgactgtgtacaggctcctgactgcgggcaccattgaagaaaagatctaccaccgacaaatcttcaagcagtttttgacaaatagagtgctaaaagaccca

SEQ ID NO: 75626 - DNA, 201 bp, Homo sapiens
acttctggtggtgaaggaatttggaaactcaagccagaatactgctaaacaacattgcttcctaaactttcaagtccctttttctaacgggcatttctgaytattaatttattattaataatcatgtttgtcaatggaagttggctgcacttgatgtttgtttgcatgatgtctacctcagaattaaaactttaaggaaga

SEQ ID NO: 75627 - DNA, 201 bp, Homo sapiens
gatcagatgttcagacacccaaatgccatctaaaaagaaggattcaaccagcctttggagcagaccatgatgttccaaaacgcaagaagttccctgcttcyaacatatctgtaaatgatgccacatcatctgaagagaaatctgaggctaaaggagctgaagtaaatgcagtaacttctaatcgaagtgatcctttgaaag

SEQ ID NO: 75628 - DNA, 201 bp, Homo sapiens; identical to SEQ ID NO: 75616

SEQ ID NO: 75629 - DNA, 201 bp, Homo sapiens
aaatgatgccacatcatctgaagagaaatctgaggctaaaggagctgaagtaaatgcagtaacttctaatcgaagtgatcctttgaaagatgaccctcacrtgagtagtaatgtaactagcaatgataggcttggagaagagacaaatgcagtatctggaccagaagagttgtcagtgattagtggaaatggggaatgttc

SEQ ID NO: 75630 - DNA, 201 bp, Homo sapiens; identical to SEQ ID NO: 75617

SEQ ID NO: 75631 - DNA, 201 bp, Homo sapiens
tcatccgggcccctcgcttcctcctcactcttggctaaaatgagagctagaaaccacctgattctgccagagcgtttagaaagtgaaagcgggcacctgcrggaagcttctgccctgctgcccaccacagaacacgatgaccttctggtggagatgagaaacttcatcgctttccaggcccacactgatggccaggccagc

SEQ ID NO: 75632 - DNA, 201 bp, Homo sapiens
aatttgacgaaggttttaaagtgccaggttttctgttcaaaaagctttttaagtaccagcagacaggtgttaggtggctgtgggaattgcactgccagcargcaggaggaattctgggagatgaaatgggattgggcaagaccatccagataattgccttcttggcaggtctgagctacagcaagatcaggactcgtggtt

SEQ ID NO: 75633 - DNA, 201 bp, Homo sapiens; identical to SEQ ID NO: 75622

SEQ ID NO: 75634 - DNA, 201 bp, Homo sapiens
caggtatgactggcactatgtgatcttggacgaaggacacaaaattcgaaatccaaatgctgctgtcacccttgcttgcaaacagtttcgcacccctcatyggatcattctgtctggctcaccgatgcaaaataacctccgagagctgtggtcgctctttgacttcatcttcccgggaaagttaggcacgttgcctgtgtt

SEQ ID NO: 75635 - DNA, 201 bp, Homo sapiens
aggtcttcctgatgatgaactagaagaagatcagtttgggtactggaaacgttctgggaaaatgattgttgttgagtctttgttgaaaatatggcacaagyagggtcagcgagtattgctgttttctcagtcaaggcagatgctggacatacttgaagtattccttagagcccaaaagtatacctatctcaagatggatgg

SEQ ID NO: 75636 - DNA, 201 bp, Homo sapiens
cacgcgggtgggtggcttaggtgtcaacctgacgggggcaaacagagttgtcatctatgacccagactggaacccaagcacggacacgcaggcccgggagygagcatggagaataggccagaagaagcaagtgactgtgtacaggctcctgactgcgggcaccattgaagaaaagatctaccaccgacaaatcttcaagca

SEQ ID NO: 75637 - DNA, 201 bp, Homo sapiens
aaagatctaccaccgacaaatcttcaagcagtttttgacaaatagagtgctaaaagacccaaaacaaaggcggtttttcaaatccaatgatctctatgagytatttactctgactagtcctgatgcatcccagagcactgaaacaagtgcaatttttgcaggaactggatcagatgttcagacacccaaatgccatctaaa

SEQ ID NO: 75638 - DNA, 201 bp, Homo sapiens
accactccaggcctctcttgtctgcaggctggcaggctgtcttctctccagttgccttcgtcttgcgcctgcctttgcattccttgcgacgggctttcttrtttctgcggtttggattccagccaaggctgtttgtatctcactactgtttatgtgtttgtggttctgtgatggtgttgctttgatcctcagtttattttc

SEQ ID NO: 75639 - DNA, 201 bp, Homo sapiens
tggtgaagaaaaggcgttaccagaagcaagacagtgaaaacaagagtgaggccaaggaacagagcaatgacgattatgttttggaaaagcttttcaaaaartcagttggcgtgcacagtgtcatgaagcacgatgccatcatggatggagccagcccagattatgtactggtggaggcagaagccaaccgagtggcccagg

SEQ ID NO: 75640 - DNA, 201 bp, Homo sapiens; identical to SEQ ID NO: 75618

SEQ ID NO: 75641 - DNA, 201 bp, Homo sapiens
cttgcaaacagtttcgcacccctcatcggatcattctgtctggctcaccgatgcaaaataacctccgagagctgtggtcgctctttgacttcatcttcccrggaaagttaggcacgttgcctgtgtttatggagcagttctccgtccccatcaccatggggggatattcaaatgcttccccagtacaggtcaaaactgctt

SEQ ID NO: 75642 - DNA, 201 bp, Homo sapiens
gagaaacatctgagaccaaagcaaaagcctaagaactctaagcattgcagagacgccaagtttgaaggaactcgaattccacacctggtgaagaaaaggcsttaccagaagcaagacagtgaaaacaagagtgaggccaaggaacagagcaatgacgattatgttttggaaaagcttttcaaaaaatcagttggcgtgcac

SEQ ID NO: 75643 - DNA, 201 bp, Homo sapiens
gaatctcaaaggtcttcctgatgatgaactagaagaagatcagtttgggtactggaaacgttctgggaaaatgattgttgttgagtctttgttgaaaatawggcacaagcagggtcagcgagtattgctgttttctcagtcaaggcagatgctggacatacttgaagtattccttagagcccaaaagtatacctatctcaa

SEQ ID NO: 75644 - DNA, 201 bp, Homo sapiens
catcatagtgtggcagaagaagagaccctggagaaacatctgagaccaaagcaaaagcctaagaactctaagcattgcagagacgccaagtttgaaggaaytcgaattccacacctggtgaagaaaaggcgttaccagaagcaagacagtgaaaacaagagtgaggccaaggaacagagcaatgacgattatgttttggaa

SEQ ID NO: 75645 - DNA, 201 bp, Homo sapiens
aggaaggagaagttggcctgccagtcttgaactgctctcctttgacctgttatttaagagtaaaataaaatactgacttgcttaagctactgtcttttgamgtctattatagcaattagtttgctttaaatatgtaatttatattaatggccttataccatccttattttgcaactaacttttcatttaatattatatgca

SEQ ID NO: 75646 - DNA, 201 bp, Homo sapiens
ggagcacatttgttcctttacccaaaagatgctgtcagggagcacagttagaagtttgcagaacagaaatctcaatatttttttttattggtgctaaaaasaggtcttacattcagtcagacctgttcaataagttcatcaatatctgataacagcattattttgatgcttaaactttaaacatttatatttaccatttgc

SEQ ID NO: 75647 - DNA, 201 bp, Homo sapiens
taagcacaagtcaaaaacaaaacatcatagtgtggcagaagaagagaccctggagaaacatctgagaccaaagcaaaagcctaagaactctaagcattgcrgagacgccaagtttgaaggaactcgaattccacacctggtgaagaaaaggcgttaccagaagcaagacagtgaaaacaagagtgaggccaaggaacagag

SEQ ID NO: 75648 - DNA, 201 bp, Homo sapiens
tctgtaaatgatgccacatcatctgaagagaaatctgaggctaaaggagctgaagtaaatgcagtaacttctaatcgaagtgatcctttgaaagatgaccstcacatgagtagtaatgtaactagcaatgataggcttggagaagagacaaatgcagtatctggaccagaagagttgtcagtgattagtggaaatggggaa

SEQ ID NO: 75649 - DNA, 201 bp, Homo sapiens; identical to SEQ ID NO: 75619

SEQ ID NO: 75650 - DNA, 201 bp, Homo sapiens
cttctctgtgcagcatccttcatcaacatctccaacagagaagtgccaggatggcatcatgaaaaaggagggaaaagataatgtccctgagcattttagtrgaagagcagaagatgcagactcttcatccgggcccctcgcttcctcctcactcttggctaaaatgagagctagaaaccacctgattctgccagagcgttt

SEQ ID NO: 75651 - DNA, 201 bp, Homo sapiens
agtcctgatgcatcccagagcactgaaacaagtgcaatttttgcaggaactggatcagatgttcagacacccaaatgccatctaaaaagaaggattcaacyagcctttggagcagaccatgatgttccaaaacgcaagaagttccctgcttctaacatatctgtaaatgatgccacatcatctgaagagaaatctgaggct

SEQ ID NO: 75652 - DNA, 201 bp, Homo sapiens; identical to SEQ ID NO: 75620

SEQ ID NO: 75653 - DNA, 201 bp, Homo sapiens
gaaagcgggcacctgcaggaagcttctgccctgctgcccaccacagaacacgatgaccttctggtggagatgagaaacttcatcgctttccaggcccacaytgatggccaggccagcaccagggagatactgcaggagtttgaatccaagttatctgcatcacagtcttgtgtcttccgagaactattgagaaatctgtgc

SEQ ID NO: 75654 - DNA, 201 bp, Homo sapiens
gcaggagattgatgatgactttttcccaagttctggggaagaagctgaagctgcttctgtaggagaaggaggaggaggaggtcggaaagtgggaagatacygagatgatggagatgaagattattataagcagcggttaaggagatggaataaactgagactgcaggacaaagagaaacgtctgaagctggaggacgattc

SEQ ID NO: 75655 - DNA, 201 bp, Homo sapiens; identical to SEQ ID NO: 75625

SEQ ID NO: 75656 - DNA, 201 bp, Homo sapiens; identical to SEQ ID NO: 75626

SEQ ID NO: 75657 - DNA, 201 bp, Homo sapiens; identical to SEQ ID NO: 75616

SEQ ID NO: 75658 - DNA, 201 bp, Homo sapiens; identical to SEQ ID NO: 75629

SEQ ID NO: 75659 - DNA, 201 bp, Homo sapiens; identical to SEQ ID NO: 75617

SEQ ID NO: 75660 - DNA, 201 bp, Homo sapiens; identical to SEQ ID NO: 75631

SEQ ID NO: 75661 - DNA, 201 bp, Homo sapiens; identical to SEQ ID NO: 75622

SEQ ID NO: 75662 - DNA, 201 bp, Homo sapiens; identical to SEQ ID NO: 75634

SEQ ID NO: 75663 - DNA, 201 bp, Homo sapiens; identical to SEQ ID NO: 75635

SEQ ID NO: 75664 - DNA, 201 bp, Homo sapiens; identical to SEQ ID NO: 75636

SEQ ID NO: 75665 - DNA, 201 bp, Homo sapiens; identical to SEQ ID NO: 75638

SEQ ID NO: 75666 - DNA, 201 bp, Homo sapiens; identical to SEQ ID NO: 75639

SEQ ID NO: 75667 - DNA, 201 bp, Homo sapiens; identical to SEQ ID NO: 75641

SEQ ID NO: 75668 - DNA, 201 bp, Homo sapiens; identical to SEQ ID NO: 75642

SEQ ID NO: 75669 - DNA, 201 bp, Homo sapiens; identical to SEQ ID NO: 75643

SEQ ID NO: 75670 - DNA, 201 bp, Homo sapiens; identical to SEQ ID NO: 75644

SEQ ID NO: 75671 - DNA, 201 bp, Homo sapiens; identical to SEQ ID NO: 75645

SEQ ID NO: 75672 - DNA, 201 bp, Homo sapiens; identical to SEQ ID NO: 75646

SEQ ID NO: 75673 - DNA, 201 bp, Homo sapiens; identical to SEQ ID NO: 75619

SEQ ID NO: 75674 - DNA, 201 bp, Homo sapiens; identical to SEQ ID NO: 75650

SEQ ID NO: 75675 - DNA, 201 bp, Homo sapiens; identical to SEQ ID NO: 75620

SEQ ID NO: 75676 - DNA, 201 bp, Homo sapiens; identical to SEQ ID NO: 75653

SEQ ID NO: 75677 - DNA, 201 bp, Homo sapiens; identical to SEQ ID NO: 75654

SEQ ID NO: 75678 - DNA, 201 bp, Homo sapiens; identical to SEQ ID NO: 75624

SEQ ID NO: 75679 - DNA, 201 bp, Homo sapiens; identical to SEQ ID NO: 75615

SEQ ID NO: 75680 - DNA, 201 bp, Homo sapiens; identical to SEQ ID NO: 75627

SEQ ID NO: 75681 - DNA, 201 bp, Homo sapiens; identical to SEQ ID NO: 75632

SEQ ID NO: 75682 - DNA, 201 bp, Homo sapiens; identical to SEQ ID NO: 75637

SEQ ID NO: 75683 - DNA, 183 bp, Homo sapiens
cgcccaggtgcgcgcgtggcggagggggaacagagaagcaggacagctctgcatccttcccgtgttcagtcgtgggagacaayaagagaggtcacagcctggcgaccaaaaagtagtctgtagagaatgccaaatgagggaatcccccactcaagtcaaactcaggagcaagactgtttacag

SEQ ID NO: 75684 - DNA, 151 bp, Homo sapiens
cgcccaggtgcgcgcgtggcggagggggaacagagaagcaggacagctctscatccttcccgtgttcagtcgtgggagacaacaagagaggtcacagcctggcgaccaaaaagtagtctgtagagaatgccaaatgagggaatcccccact

SEQ ID NO: 75685 - DNA, 201 bp, Homo sapiens; identical to SEQ ID NO: 75618

SEQ ID NO: 75686 - DNA, 201 bp, Homo sapiens; identical to SEQ ID NO: 75647

SEQ ID NO: 75687 - DNA, 201 bp, Homo sapiens; identical to SEQ ID NO: 75648

SEQ ID NO: 75688 - DNA, 201 bp, Homo sapiens; identical to SEQ ID NO: 75651

SEQ ID NO: 75689 - DNA, 201 bp, Homo sapiens; identical to SEQ ID NO: 75638

SEQ ID NO: 75690 - DNA, 201 bp, Homo sapiens; identical to SEQ ID NO: 75626

SEQ ID NO: 75691 - DNA, 201 bp, Homo sapiens; identical to SEQ ID NO: 75639

SEQ ID NO: 75692 - DNA, 201 bp, Homo sapiens; identical to SEQ ID NO: 75627

SEQ ID NO: 75693 - DNA, 201 bp, Homo sapiens; identical to SEQ ID NO: 75629

SEQ ID NO: 75694 - DNA, 201 bp, Homo sapiens; identical to SEQ ID NO: 75631

SEQ ID NO: 75695 - DNA, 201 bp, Homo sapiens; identical to SEQ ID NO: 75642

SEQ ID NO: 75696 - DNA, 201 bp, Homo sapiens; identical to SEQ ID NO: 75644

SEQ ID NO: 75697 - DNA, 201 bp, Homo sapiens; identical to SEQ ID NO: 75645

SEQ ID NO: 75698 - DNA, 201 bp, Homo sapiens
cattgcaaagcccagacaaatcttcaagcagtttttgacaaatagagtgctaaaagacccaaaacaaaggcggtttttcaaatccaatgatctctatgagytatttactctgactagtcctgatgcatcccagagcactgaaacaagtgcaatttttgcaggaactggatcagatgttcagacacccaaatgccatctaaa

SEQ ID NO: 75699 - DNA, 201 bp, Homo sapiens; identical to SEQ ID NO: 75646

SEQ ID NO: 75700 - DNA, 201 bp, Homo sapiens; identical to SEQ ID NO: 75647

SEQ ID NO: 75701 - DNA, 201 bp, Homo sapiens; identical to SEQ ID NO: 75650

SEQ ID NO: 75702 - DNA, 201 bp, Homo sapiens; identical to SEQ ID NO: 75648

SEQ ID NO: 75703 - DNA, 201 bp, Homo sapiens; identical to SEQ ID NO: 75653

SEQ ID NO: 75704 - DNA, 201 bp, Homo sapiens; identical to SEQ ID NO: 75651

SEQ ID NO: 75705 - DNA, 201 bp, Homo sapiens; identical to SEQ ID NO: 75624

SEQ ID NO: 75706 - DNA, 201 bp, Homo sapiens; identical to SEQ ID NO: 75615

SEQ ID NO: 75707 - DNA, 201 bp, Homo sapiens; identical to SEQ ID NO: 75625

SEQ ID NO: 75708 - DNA, 201 bp, Homo sapiens; identical to SEQ ID NO: 75627

SEQ ID NO: 75709 - DNA, 201 bp, Homo sapiens; identical to SEQ ID NO: 75616

SEQ ID NO: 75710 - DNA, 201 bp, Homo sapiens; identical to SEQ ID NO: 75629

SEQ ID NO: 75711 - DNA, 201 bp, Homo sapiens; identical to SEQ ID NO: 75617

SEQ ID NO: 75712 - DNA, 201 bp, Homo sapiens; identical to SEQ ID NO: 75632

SEQ ID NO: 75713 - DNA, 201 bp, Homo sapiens; identical to SEQ ID NO: 75622

SEQ ID NO: 75714 - DNA, 201 bp, Homo sapiens; identical to SEQ ID NO: 75634

SEQ ID NO: 75715 - DNA, 201 bp, Homo sapiens; identical to SEQ ID NO: 75635

SEQ ID NO: 75716 - DNA, 201 bp, Homo sapiens; identical to SEQ ID NO: 75636

SEQ ID NO: 75717 - DNA, 201 bp, Homo sapiens; identical to SEQ ID NO: 75637

SEQ ID NO: 75718 - DNA, 201 bp, Homo sapiens; identical to SEQ ID NO: 75639

SEQ ID NO: 75719 - DNA, 201 bp, Homo sapiens; identical to SEQ ID NO: 75618

SEQ ID NO: 75720 - DNA, 201 bp, Homo sapiens; identical to SEQ ID NO: 75642

SEQ ID NO: 75721 - DNA, 201 bp, Homo sapiens; identical to SEQ ID NO: 75641

SEQ ID NO: 75722 - DNA, 201 bp, Homo sapiens; identical to SEQ ID NO: 75643

SEQ ID NO: 75723 - DNA, 201 bp, Homo sapiens; identical to SEQ ID NO: 75644

SEQ ID NO: 75724 - DNA, 201 bp, Homo sapiens; identical to SEQ ID NO: 75647

SEQ ID NO: 75725 - DNA, 201 bp, Homo sapiens; identical to SEQ ID NO: 75648

SEQ ID NO: 75726 - DNA, 201 bp, Homo sapiens; identical to SEQ ID NO: 75619

SEQ ID NO: 75727 - DNA, 201 bp, Homo sapiens; identical to SEQ ID NO: 75651

SEQ ID NO: 75728 - DNA, 201 bp, Homo sapiens; identical to SEQ ID NO: 75620

SEQ ID NO: 75729 - DNA, 201 bp, Homo sapiens; identical to SEQ ID NO: 75654

SEQ ID NO: 75730 - DNA, 201 bp, Homo sapiens
caagacattttagagctgggcaaaacctgtgtaggtctcgctgtgggtttgctggggaccaagggggtgatgaaaaggggaggggcggagctcctgcccargagaggggctgtggggccccaggataaaacagacacagtgacagggccaagagccagcactgctggccttggtgtcatgccagaatctaccaggactgag

SEQ ID NO: 75731 - DNA, 201 bp, Homo sapiens
tggtcaactgctccacaccggccaactacttccacgtgctgcgccggcagatcctgctgcccttccgcaagccgctgattatcttcacacctaaatctctkctgaggcacccagaggccaagtccagctttgaccaaatggtatccgggaccagcttccagcgggtgattcctgaagatggggccgcagcacgggcccctg

SEQ ID NO: 75732 - DNA, 201 bp, Homo sapiens
ccattgataaactggccttctatgaccttcaggaggctgaccttgataaggagttccagctgccgacaaccaccttcattgggggctctgaaaacaccctytctctgcgggagatcattcggcgcctggagaacacctactgccagcacattggcctggagttcatgttcatcaacgatgtggagcagtgccagtggatcc

SEQ ID NO: 75733 - DNA, 201 bp, Homo sapiens
gccgtgcggacatgaccaagaaccggacggtggactgggcgttggcagagtacatggcctttggctccctgctgaaggaaggcatccacgtgcggctcagygggcaggatgtggagaggggcacattcagtcaccggcaccatgttctccatgaccaggaggttgaccgcaggacgtgtgtgcctatgaatcatctctggc

SEQ ID NO: 75734 - DNA, 201 bp, Homo sapiens
atcggcagtgtggccagctctgtgcccctggaggactttaagatccacactggcctctctcgcattctgcggggccgtgcggacatgaccaagaaccggayggtggactgggcgttggcagagtacatggcctttggctccctgctgaaggaaggcatccacgtgcggctcagcgggcaggatgtggagaggggcacattc

SEQ ID NO: 75735 - DNA, 201 bp, Homo sapiens
catctctggcctgaccaggccccgtacaccgtgtgcaacagctccctctcggagtacggagtcctgggctttgagctgggctatgccatggccagccccartgccctggtcctctgggaggcccagtttggggacttccacaacacggcccagtgcatcatcgaccagttcatcagcaccggccaggccaagtgggtgcgg

SEQ ID NO: 75736 - DNA, 201 bp, Homo sapiens
tagggagttcagcagtaacagccaggtgaagcgaacctgctgggtgatttgtttgcgctctgttttatggggcattcctgcgagatgtgtcagcttctgtrtgaaatgcagccacagctcatgtgtaccaaagtagaaaaccaaatcacagagaaataaaaacatgcttcagagagatttgctgttttcatttcatgttgt

SEQ ID NO: 75737 - DNA, 201 bp, Homo sapiens
cgggaccagcttccagcgggtgattcctgaagatggggccgcagcacgggcccctgagcaggtgcagcggctcatcttctgcacgggaaaggtgtactatracctggtgaaggagcggagcagccaggacctggaggagaaagtggccatcacgcgcctggagcagatctctccattccccttcgacctgatcaagcagga

SEQ ID NO: 75738 - DNA, 201 bp, Homo sapiens
tcattgggggctctgaaaacaccctttctctgcgggagatcattcggcgcctggagaacacctactgccagcacattggcctggagttcatgttcatcaaygatgtggagcagtgccagtggatccggcagaagtttgagacccctggtgtgatgcagttctccagcgaggagaagcggaccctgctggcccggctagtgc

SEQ ID NO: 75739 - DNA, 201 bp, Homo sapiens
atataaagcactggttggactccccctggcctggcttcttcaacgtagatggggagcccaagagcatgacatgcccagccacggggatccctgaggacatsctcacccacatcggcagtgtggccagctctgtgcccctggaggactttaagatccacactggcctctctcgcattctgcggggccgtgcggacatgacca

SEQ ID NO: 75740 - DNA, 201 bp, Homo sapiens
acaccctttctctgcgggagatcattcggcgcctggagaacacctactgccagcacattggcctggagttcatgttcatcaacgatgtggagcagtgccartggatccggcagaagtttgagacccctggtgtgatgcagttctccagcgaggagaagcggaccctgctggcccggctagtgcgctccatgaggtttgaag

SEQ ID NO: 75741 - DNA, 201 bp, Homo sapiens
acatgcccagccacggggatccctgaggacatgctcacccacatcggcagtgtggccagctctgtgcccctggaggactttaagatccacactggcctctstcgcattctgcggggccgtgcggacatgaccaagaaccggacggtggactgggcgttggcagagtacatggcctttggctccctgctgaaggaaggcatc

SEQ ID NO: 75742 - DNA, 201 bp, Homo sapiens
gtttgaccccaagctggaggcggcggacgagggctccggggatgtcaagtaccacctgggcatgtaccatgagaggatcaaccgcgtcaccaaccggaacmtcactctgtcgctggttgccaacccctcccacctggaggcagtggaccctgtggtgcaggggaagacaaaggcagagcagttctaccgtggagatgccca

SEQ ID NO: 75743 - DNA, 201 bp, Homo sapiens
ggatgccacacaggggaaggctgaacgtgctggccaacgtgatccgcaaggacctggagcagatcttctgccagtttgaccccaagctggaggcggcggaygagggctccggggatgtcaagtaccacctgggcatgtaccatgagaggatcaaccgcgtcaccaaccggaacatcactctgtcgctggttgccaacccct

SEQ ID NO: 75744 - DNA, 201 bp, Homo sapiens
actcacctggtgtcactgaagaagtttctggatactgccttcaatctccaggcctttgagggcaagacattttagagctgggcaaaacctgtgtaggtctygctgtgggtttgctggggaccaagggggtgatgaaaaggggaggggcggagctcctgcccaagagaggggctgtggggccccaggataaaacagacacag

SEQ ID NO: 75745 - DNA, 201 bp, Homo sapiens
ctccggggatgtcaagtaccacctgggcatgtaccatgagaggatcaaccgcgtcaccaaccggaacatcactctgtcgctggttgccaacccctcccacytggaggcagtggaccctgtggtgcaggggaagacaaaggcagagcagttctaccgtggagatgcccagggcaagaaggtcatgtccatcctggttcatgg

SEQ ID NO: 75746 - DNA, 201 bp, Homo sapiens
cccaggataaaacagacacagtgacagggccaagagccagcactgctggccttggtgtcatgccagaatctaccaggactgagggagccagaggagtcctrtaggcaggctactgtgctggagcatcccccagctgctcccatcttgctggaatttcttgggcggcttctccacctgtatctcaagacagacacccggggg

SEQ ID NO: 75747 - DNA, 201 bp, Homo sapiens; identical to SEQ ID NO: 75730

SEQ ID NO: 75748 - DNA, 201 bp, Homo sapiens; identical to SEQ ID NO: 75731

SEQ ID NO: 75749 - DNA, 201 bp, Homo sapiens; identical to SEQ ID NO: 75732

SEQ ID NO: 75750 - DNA, 201 bp, Homo sapiens; identical to SEQ ID NO: 75733

SEQ ID NO: 75751 - DNA, 201 bp, Homo sapiens; identical to SEQ ID NO: 75734

SEQ ID NO: 75752 - DNA, 201 bp, Homo sapiens; identical to SEQ ID NO: 75735

SEQ ID NO: 75753 - DNA, 201 bp, Homo sapiens; identical to SEQ ID NO: 75736

SEQ ID NO: 75754 - DNA, 201 bp, Homo sapiens; identical to SEQ ID NO: 75737

SEQ ID NO: 75755 - DNA, 201 bp, Homo sapiens; identical to SEQ ID NO: 75738

SEQ ID NO: 75756 - DNA, 201 bp, Homo sapiens; identical to SEQ ID NO: 75739

SEQ ID NO: 75757 - DNA, 201 bp, Homo sapiens; identical to SEQ ID NO: 75740

SEQ ID NO: 75758 - DNA, 201 bp, Homo sapiens; identical to SEQ ID NO: 75741

SEQ ID NO: 75759 - DNA, 201 bp, Homo sapiens; identical to SEQ ID NO: 75742

SEQ ID NO: 75760 - DNA, 201 bp, Homo sapiens; identical to SEQ ID NO: 75743

SEQ ID NO: 75761 - DNA, 201 bp, Homo sapiens; identical to SEQ ID NO: 75744

SEQ ID NO: 75762 - DNA, 201 bp, Homo sapiens; identical to SEQ ID NO: 75745

SEQ ID NO: 75763 - DNA, 201 bp, Homo sapiens; identical to SEQ ID NO: 75746

SEQ ID NO: 75764 - DNA, 201 bp, Homo sapiens; identical to SEQ ID NO: 75730

SEQ ID NO: 75765 - DNA, 201 bp, Homo sapiens; identical to SEQ ID NO: 75731

SEQ ID NO: 75766 - DNA, 201 bp, Homo sapiens; identical to SEQ ID NO: 75732

SEQ ID NO: 75767 - DNA, 201 bp, Homo sapiens; identical to SEQ ID NO: 75733

SEQ ID NO: 75768 - DNA, 201 bp, Homo sapiens; identical to SEQ ID NO: 75734

SEQ ID NO: 75769 - DNA, 201 bp, Homo sapiens; identical to SEQ ID NO: 75735

SEQ ID NO: 75770 - DNA, 201 bp, Homo sapiens; identical to SEQ ID NO: 75736

SEQ ID NO: 75771 - DNA, 201 bp, Homo sapiens; identical to SEQ ID NO: 75737

SEQ ID NO: 75772 - DNA, 201 bp, Homo sapiens; identical to SEQ ID NO: 75738

SEQ ID NO: 75773 - DNA, 201 bp, Homo sapiens; identical to SEQ ID NO: 75739

SEQ ID NO: 75774 - DNA, 201 bp, Homo sapiens; identical to SEQ ID NO: 75740

SEQ ID NO: 75775 - DNA, 201 bp, Homo sapiens; identical to SEQ ID NO: 75741

SEQ ID NO: 75776 - DNA, 201 bp, Homo sapiens; identical to SEQ ID NO: 75742

SEQ ID NO: 75777 - DNA, 201 bp, Homo sapiens; identical to SEQ ID NO: 75743

SEQ ID NO: 75778 - DNA, 201 bp, Homo sapiens; identical to SEQ ID NO: 75744

SEQ ID NO: 75779 - DNA, 201 bp, Homo sapiens; identical to SEQ ID NO: 75745

SEQ ID NO: 75780 - DNA, 201 bp, Homo sapiens; identical to SEQ ID NO: 75746

SEQ ID NO: 75781 - DNA, 201 bp, Homo sapiens
agaaactgttccacccctggaccagacatcaagctttatccattcatataccatgctgtcgagtcctgtgcagagaccgctgaccattcagggcaaaggayagggacctgaggagccgagcgaatagcatctcctcccacctcccaccagagacgtcctgtttgagctgtcaggtgtaatatatgaattgacttaagttaa

SEQ ID NO: 75782 - DNA, 201 bp, Homo sapiens
aatacacaggctatgctgagacatatcgttggtcccggagccacgaagatgggagtgaaagggacgactggcagcggcgctgcactgagatcgttgccatygatgctcttcacttcagacgctacctcgatcagtttgtgcctgagaaaatgagacgcgagctgaacaaggcttactgtggatttctccgtcctggagttt

SEQ ID NO: 75783 - DNA, 201 bp, Homo sapiens
tttccagaaattgtacttttgaggtatcatttttatctgtaatggtttgtctgtcttttttcctctgatcagtatttttttataccagttttggagactgsctgagatgaaaggaaatgtggaataaaaggaggttttcctgatgtggtgtaaagaaaacagattcaagagaattgaagattttttttgtttcttggtact

SEQ ID NO: 75784 - DNA, 200 bp, Homo sapiens
attgtagatgtgaaaaacccttgacacgattgcatgtcacttacgaaggtaccatagaagaaaatggccaaggcatgctacaggtggattttgcaaatcrttttgttggaggtggtgtaaccagtgcaggacttgtgcaagaagaaatccgctttttaatcaatcctgagttgattatttcacggctcttcactgaggtg

SEQ ID NO: 75785 - DNA, 170 bp, Homo sapiens
  misc_feature (1)...(170): n = A,T,C or G
attgtagatgtgaaaaacccttgacacgattgcatgtcacttacgaaggtaccatagaagaaaatggccnaggcatgctacaggtggattttgcaaatcattttgttggaggtggtgtaaccagtgcaggacttgtgcaagaagaaatccgctttttaatcaatcctgag

SEQ ID NO: 75786 - DNA, 201 bp, Homo sapiens
gttggctggtacaccggctggagagcagacaggccttttgccatcgacatggcaggatttgctgtaagtcttcaagtcattttgtccaatccaaaagctgkatttaagcgtcgtggatcccagccagggatgcaagaatctgactttctcaaacagataacaacagtcgaagaactggaaccgaaagcaaataactgcact

SEQ ID NO: 75787 - DNA, 201 bp, Homo sapiens
tcctaattgtcatcatcatgctcgacgtggacacgcgcaggccagtgcccccgctcaccccgcgcccctacttctctccctacgcggtgggccgcgggggygcccgactcccgctccgcaggggcggcccggctcacgggacccaaaagcgcaaccagtctcggccgcagccacagccggagccgcagctgcccaccatct

SEQ ID NO: 75788 - DNA, 201 bp, Homo sapiens
cagcgcacccatcaccactccctaagtgctggcgccgccgctgtccaagctgcgcactggggtccctcggctcgcccctctctggggtgtccgagaggccrgggagcgtgcaccatgaagtccgcgcttttcacccgcttctttatcctcctgccctggatcctaattgtcatcatcatgctcgacgtggacacgcgcagg

SEQ ID NO: 75789 - DNA, 201 bp, Homo sapiens
ttgcgcgaacctgccgctcctccacgcccaggtagtgagccccgcggctccaggtctctgcagcgccctcggccccatggacagcgcacccatcaccactycctaagtgctggcgccgccgctgtccaagctgcgcactggggtccctcggctcgcccctctctggggtgtccgagaggccagggagcgtgcaccatgaag

SEQ ID NO: 75790 - DNA, 201 bp, Homo sapiens
tagttagttaccctgtttgcatatagtgcagaaaaaggtcttcatgttagcactatgtacattaagaagagatccaaattacaagagaggcagataaaatytgaattctttaagcattcattaaacgaagttttggagtaacatccacgtttatcttcctttcactaatcacgttccctgttaagcacatcataacaacag

SEQ ID NO: 75791 - DNA, 181 bp, Homo sapiens
agtgcagttatttgctttcggttccagttcttcgactgttgttatctgtttgagaaagtcagattcttgcatccctggctgggatccacgacgcttaaatmcagcttttggattggacaaaatgacttgaagacttacagcaaatcctttgtgaaaaataaaaaaaaaaaagagactttaa

SEQ ID NO: 75792 - DNA, 201 bp, Homo sapiens
ttcctgggctgagtccgcccgcggtcccggcggcgccaggtgcgttcactctgcccggctccagccagcgtccgccgccgccgtagctgccccaggctccycgccccgctgccgagatggcgacgcgctcctgtcgggagaaggctcagaagctgaacgagcagcaccagctcatcctatccaagcttctgagggaggagg

SEQ ID NO: 75793 - DNA, 201 bp, Homo sapiens
aaggagccagaaaagccggcaaaaccacttacagctgaaaagctgcagaagaaagatcagcaactggagcctaaaaaaagtaccagccctaaaaaagctgyggagcccactgtggatcttttaggacttgatggccctgctgtggcaccagtgaccaacgggaacacaacggtgccacccctgaacgatgatctggacatc

SEQ ID NO: 75794 - DNA, 201 bp, Homo sapiens
cgcatctagttcccctgtttattcatatgcatattttttttctttttacccatttgttcatattaagaatgatctgattgaccgtgttggtctgtactgaktcaatttgatgtggtgaaaagcaggttgataaatcattttatgtcaagggcagctttgctcatatttcccatgatttcatgtactgcattatttgagaag

SEQ ID NO: 75795 - DNA, 201 bp, Homo sapiens
cagtccccctccccctcccctcgccggctagggtggtgcgtgccggcaggccggtcaaggaggcgggacacgtcggcgctaccaccgccaccgccgccgcygcccctcctcccgttccagctgccgctgccgcttcctgggctgagtccgcccgcggtcccggcggcgccaggtgcgttcactctgcccggctccagccag

SEQ ID NO: 75796 - DNA, 198 bp, Homo sapiens
acccagtccccctccccctcccctcgccggctagggtggtgcgtgccggcaggccggtcaaggaggcgggacacgtcggcgctaccaccgccaccgcygccgccgcccctcctcccgttccagctgccgctgccgcttcctgggctgagtccgcccgcggtcccggcggcgccaggtgcgttcactctgcccggctcc

SEQ ID NO: 75797 - DNA, 201 bp, Homo sapiens
ctgttgttatgatgtgcttaacagggaacgtgattagtgaaaggaagataaacgtggatgttactccaaaacttcgtttaatgaatgcttaaagaattcarattttatctgcctctcttgtaatttggatctcttcttaatgtacatagtgctaacatgaagacctttttctgcactatatgcaaacagggtaactaacta

SEQ ID NO: 75798 - DNA, 201 bp, Homo sapiens
cagaactaccacctgacattccttgctgaaacgcatctagttcccctgtttattcatatgcatattttttttctttttacccatttgttcatattaagaawgatctgattgaccgtgttggtctgtactgattcaatttgatgtggtgaaaagcaggttgataaatcattttatgtcaagggcagctttgctcatatttcc

SEQ ID NO: 75799 - DNA, 201 bp, Homo sapiens
ggcctgccgcaagctcagcagccccagtggagcctctcacagataatgcagaagggtgatgctgttctccagcactccatcagtgcaatctactggccaaygacaaggtggttaaaatgtcctttagtagatgaatcagcagatggctggcatgagtatcagtagtgcaacccctactgcaggttttggccagccctccag

SEQ ID NO: 75800 - DNA, 198 bp, Homo sapiens; identical to SEQ ID NO: 75796

SEQ ID NO: 75801 - DNA, 201 bp, Homo sapiens; identical to SEQ ID NO: 75797

SEQ ID NO: 75802 - DNA, 201 bp, Homo sapiens; identical to SEQ ID NO: 75798

SEQ ID NO: 75803 - DNA, 181 bp, Homo sapiens; identical to SEQ ID NO: 75791

SEQ ID NO: 75804 - DNA, 201 bp, Homo sapiens; identical to SEQ ID NO: 75793

SEQ ID NO: 75805 - DNA, 201 bp, Homo sapiens; identical to SEQ ID NO: 75792

SEQ ID NO: 75806 - DNA, 201 bp, Homo sapiens; identical to SEQ ID NO: 75794

SEQ ID NO: 75807 - DNA, 201 bp, Homo sapiens; identical to SEQ ID NO: 75795

SEQ ID NO: 75808 - DNA, 201 bp, Homo sapiens
aggacccaaagtatgtacagcatatatagtataggatgtctggctcagtgtgggtacttgcatagatgttaatttcttataccaaaaaccccaaatgaacytgaattgaatttaaagtgtggtgatgcattgatagtggtggtggtgatgtaggaattaagaattgtcatttacttttctttctagaattagtttggatga

SEQ ID NO: 75809 - DNA, 201 bp, Homo sapiens; identical to SEQ ID NO: 75799

SEQ ID NO: 75810 - DNA, 201 bp, Homo sapiens
ttctttaagagaaagaaaagtagtttacagaatgtagttgcagaaataatgtgaaagagagcacagattgaggagtaggaaaattaaatttagagtcccarctttgtggagtggcgtgaataaagggaagtgtacatatcactgaattcatgcttttccttaagttatctgttttcagagcagtggaatttttcatcagag

SEQ ID NO: 75811 - DNA, 201 bp, Homo sapiens; identical to SEQ ID NO: 75797

SEQ ID NO: 75812 - DNA, 201 bp, Homo sapiens; identical to SEQ ID NO: 75798

SEQ ID NO: 75813 - DNA, 181 bp, Homo sapiens; identical to SEQ ID NO: 75791

SEQ ID NO: 75814 - DNA, 201 bp, Homo sapiens; identical to SEQ ID NO: 75793

SEQ ID NO: 75815 - DNA, 201 bp, Homo sapiens; identical to SEQ ID NO: 75794

SEQ ID NO: 75816 - DNA, 181 bp, Homo sapiens; identical to SEQ ID NO: 75791

SEQ ID NO: 75817 - DNA, 201 bp, Homo sapiens; identical to SEQ ID NO: 75792

SEQ ID NO: 75818 - DNA, 201 bp, Homo sapiens; identical to SEQ ID NO: 75793

SEQ ID NO: 75819 - DNA, 201 bp, Homo sapiens; identical to SEQ ID NO: 75794

SEQ ID NO: 75820 - DNA, 201 bp, Homo sapiens; identical to SEQ ID NO: 75795

SEQ ID NO: 75821 - DNA, 198 bp, Homo sapiens; identical to SEQ ID NO: 75796

SEQ ID NO: 75822 - DNA, 201 bp, Homo sapiens; identical to SEQ ID NO: 75797

SEQ ID NO: 75823 - DNA, 201 bp, Homo sapiens; identical to SEQ ID NO: 75798

SEQ ID NO: 75824 - DNA, 201 bp, Homo sapiens; identical to SEQ ID NO: 75799

SEQ ID NO: 75825 - DNA, 198 bp, Homo sapiens; identical to SEQ ID NO: 75796

SEQ ID NO: 75826 - DNA, 201 bp, Homo sapiens; identical to SEQ ID NO: 75797

SEQ ID NO: 75827 - DNA, 201 bp, Homo sapiens; identical to SEQ ID NO: 75798

SEQ ID NO: 75828 - DNA, 181 bp, Homo sapiens; identical to SEQ ID NO: 75791

SEQ ID NO: 75829 - DNA, 201 bp, Homo sapiens; identical to SEQ ID NO: 75793

SEQ ID NO: 75830 - DNA, 201 bp, Homo sapiens; identical to SEQ ID NO: 75792

SEQ ID NO: 75831 - DNA, 201 bp, Homo sapiens; identical to SEQ ID NO: 75794

SEQ ID NO: 75832 - DNA, 201 bp, Homo sapiens; identical to SEQ ID NO: 75795

SEQ ID NO: 75833 - DNA, 201 bp, Homo sapiens
ctcagttggtggagactggggctgggactggagtcagcccagctgggaggaggggctggggaggatctgcagctgaagcccgaggcagggttggtgtgatsccaaggcaaagtggtgaggagaaaacaggaaacgggctttctctgaattggtaaatgggaaagaagtgagcaacttaagattgtcacaattaatcacaag

SEQ ID NO: 75834 - DNA, 201 bp, Homo sapiens
gttggtggagactggggctgggactggagtcagcccagctgggaggaggggctggggaggatctgcagctgaagcccgaggcagggttggtgtgatgccarggcaaagtggtgaggagaaaacaggaaacgggctttctctgaattggtaaatgggaaagaagtgagcaacttaagattgtcacaattaatcacaagtgta

SEQ ID NO: 75835 - DNA, 201 bp, Homo sapiens
cgatgccgtcacggggctcagtggcagcgggcctgcctatgcattcatggctctggacgcattggctgatggtggggtgaagatgggtttgccacggcgcytggcaatccaactcggggcccaggctttgctgggagctgccaagatgctgctggactcggagcagcatccatgccagcttaaggacaatgtctgctcccc

SEQ ID NO: 75836 - DNA, 201 bp, Homo sapiens; identical to SEQ ID NO: 75835

SEQ ID NO: 75837 - DNA, 201 bp, Homo sapiens; identical to SEQ ID NO: 75833

SEQ ID NO: 75838 - DNA, 201 bp, Homo sapiens; identical to SEQ ID NO: 75834

SEQ ID NO: 75839 - DNA, 201 bp, Homo sapiens; identical to SEQ ID NO: 75835

SEQ ID NO: 75840 - DNA, 201 bp, Homo sapiens; identical to SEQ ID NO: 75835

SEQ ID NO: 75841 - DNA, 201 bp, Homo sapiens
tgtactcagcattttttaaataacaatgtttatttgaactaatattaaattaacaaattcagtgtaatcaaaatgtgtaaagaacaatcaatatactttawttttttttctattttataaaataaatatatatgctatgctttaaattttggagctttcataaatgttcaatgcattttaagtgtgtggcttataaatatt

SEQ ID NO: 75842 - DNA, 201 bp, Homo sapiens
atatcctagcagaagaattaagtacaaacaaaaaccaactgaagcagctgacagagacatatgaggaagatcgaaaaaactactctgaagttcaaattagwtgtcaacgtttggccttagaattagcagacacaaaacagttaattcagcaaggtgactaccgtcaagagaactatgataaagtcaagagtgaacgtgatg

SEQ ID NO: 75843 - DNA, 201 bp, Homo sapiens
aaagtcaagagtgaacgtgatgcacttgaacaggaagtaattgagcttaggagaaaacatgaaatacttgaagcctctcacatgattcaaacaaaagaacraagtgaattatcaaaagaggtagtcaccttagagcaaactgttactttactgcaaaaggataaagaatatcttaatcgccaaaacatggagcttagtgtt

SEQ ID NO: 75844 - DNA, 105 bp, Homo sapiens
cacarcgtgtgttgctttccgctcctcggaacatccgggagagttgacttccggcggcttgtgggagtgctggttctgtcctccttgcgggtgcggagatggttg

SEQ ID NO: 75845 - DNA, 201 bp, Homo sapiens
gagacagaaacaactagaagagacaaatcttcagctaagagaaaaagctggagatgttcgtcgaaacctgcgtgactttgagttgacagaagagcaatatrttaaattaaaagcttttcctgaagatcagctttctattcctgaatatgtatctgttcgcttctatgagctagtgaatccattaagaaaggaaatctgtga

SEQ ID NO: 75846 - DNA, 201 bp, Homo sapiens; identical to SEQ ID NO: 75842

SEQ ID NO: 75847 - DNA, 201 bp, Homo sapiens; identical to SEQ ID NO: 75843

SEQ ID NO: 75848 - DNA, 105 bp, Homo sapiens; identical to SEQ ID NO: 75844

SEQ ID NO: 75849 - DNA, 201 bp, Homo sapiens; identical to SEQ ID NO: 75845

SEQ ID NO: 75850 - DNA, 201 bp, Homo sapiens
ttttaaataaaaacagggaaatggtttaacaaactagggttggtttgcctaagtcattgctttttaaaaatggtttcactatacataatatatatggaagygacctaagaaataatagaaacatctttcagaagaatgtagtttgatatttatttagtataaaacgtttgtgcacagtgttaacaaatacaatttttacaa

SEQ ID NO: 75851 - DNA, 201 bp, Homo sapiens
agcggcgaggcgacccgcacagtactgtaagattgatgttaaaggcatggtgttcaccccacttcatcagcgtacataagttatctcttcttttggacccktattttatgccataatgcaacaagctttagaactagctttggatcgtgcagagtatgtcattgaaagtgcccgacagagacctcctaaaaggaaatacct

SEQ ID NO: 75852 - DNA, 201 bp, Homo sapiens
cagcatcaaatggctatggcagcagcagcagcacaaacagctcagctacatcatcatcggcatacaggcagccagtcaaaaagtaaaatgaagagaggcaygccaaccactccaaaattttgagtcttgcattactttttgttccttttttaaaaacacaagagcactgaatcaaaagaattgagtttctactttttgttt

SEQ ID NO: 75853 - DNA, 201 bp, Homo sapiens
tgatatttatttagtataaaacgtttgtgcacagtgttaacaaatacaatttttacaaatctgttttgaaaatgtggtggctgtttatttgggtttcatastcttaattacttcatccatcagttttttaacttctttgtgtcttgtaactgctcggctcatacagtcctgaagtttagctccagttagcccacttccacc

SEQ ID NO: 75854 - DNA, 201 bp, Homo sapiens
acctcctattttggttgatctcctagaaaaatctcaggttaatatttttcattgcggatgtgtcatagcagaaatacgtgactacaggcagtccagtaacrtgaaatctcctggttaccaaagtcggcacattctcttacgtccaacaatgcagactttaatttgtgatgtacattcaataacaagtgataaccacaaatg

SEQ ID NO: 75855 - DNA, 106 bp, Homo sapiens
tgccartcggaagtgcggccgccggaactggctgttggtgggggtgcagcactgagccgccgacggggcgggtgggctttgctgccgagcaggcggcgccgtcttg

SEQ ID NO: 75856 - DNA, 201 bp, Homo sapiens; identical to SEQ ID NO: 75850

SEQ ID NO: 75857 - DNA, 201 bp, Homo sapiens
cgagatccggccagggtcagagtactgtaagattgatgttaaaggcatggtgttcaccccacttcatcagcgtacataagttatctcttcttttggacccktattttatgccataatgcaacaagctttagaactagctttggatcgtgcagagtatgtcattgaaagtgcccgacagagacctcctaaaaggaaatacct

SEQ ID NO: 75858 - DNA, 201 bp, Homo sapiens; identical to SEQ ID NO: 75852

SEQ ID NO: 75859 - DNA, 201 bp, Homo sapiens; identical to SEQ ID NO: 75853

SEQ ID NO: 75860 - DNA, 201 bp, Homo sapiens; identical to SEQ ID NO: 75854

SEQ ID NO: 75861 - DNA, 201 bp, Homo sapiens; identical to SEQ ID NO: 75850

SEQ ID NO: 75862 - DNA, 201 bp, Homo sapiens; identical to SEQ ID NO: 75857

SEQ ID NO: 75863 - DNA, 201 bp, Homo sapiens; identical to SEQ ID NO: 75852

SEQ ID NO: 75864 - DNA, 201 bp, Homo sapiens; identical to SEQ ID NO: 75853

SEQ ID NO: 75865 - DNA, 201 bp, Homo sapiens; identical to SEQ ID NO: 75854

SEQ ID NO: 75866 - DNA, 201 bp, Homo sapiens
tgctaaaccaattccgaacagatttggaaaagctggaaaaggagattacagcccggaatgagcaacttgactggccctatgaatatctgaagcccagctgyatagagaacagtgtcaccatctgagccctagagtgactctacctgcaagatttcacatcagctttaggactgacatttctatcttgaatttcatgctttc

SEQ ID NO: 75867 - DNA, 201 bp, Homo sapiens
ggcaggatgatgagttgttcagctaccagttcctcaatggtgccaaccccatgctgttgagacgctcgacctctctgccctccaggctagtgctgccctcrgggatggaagagcttcaggctcaactggagaaagaacttcagaatggttccctgtttgaagctgacttcatccttctggatggaattccagccaacgtga

SEQ ID NO: 75868 - DNA, 201 bp, Homo sapiens
tggccaccggggcctggctcttctccgggtcgtacaaccgcgtgcagctttggctggtcgggacgcgcggggaggcggagctggagctgcagctgcggccsgcgcggggcgaggaggaggagtttgatcatgacgttgcagaggacttggggctcctgcagttcgtgaggctgcgcaagcaccactggctggtggacgacg

SEQ ID NO: 75869 - DNA, 201 bp, Homo sapiens
gcccccacccaccaccaaggaagatgtgacgatggccacagtgatggggtcactacctgatgtccggcaggcctgtcttcaaatggccatctcatggcatytgagtcgccgccagccagacatggtgcctctggggcaccacaaagaaaaatatttctcaggccccaagcccaaagctgtgctaaaccaattccgaacaga

SEQ ID NO: 75870 - DNA, 201 bp, Homo sapiens
atccgaggagagaagcaatacctggctgcccccctcgttatgctgaagatggagcccaatgggaagctgcagcccatggtcatccagattcagcctcccarccccagctctccaaccccaacactgttcctgccctcagaccccccacttgcctggctcctggcaaagtcctgggtccgaaattcagatttccaactgcac

SEQ ID NO: 75871 - DNA, 201 bp, Homo sapiens
gcctgctgggactcccaggtgctctctatgcccatgatgctttacggctctgggagatcattgccaggtatgtggaggggatcgtccacctcttctaccaragggatgacatagtgaagggggaccctgagctgcaggcctggtgtcgggagatcacggaggtggggctgtgccaggcccaggaccgaggtttccctgtct

SEQ ID NO: 75872 - DNA, 201 bp, Homo sapiens
agccagacatggtgcctctggggcaccacaaagaaaaatatttctcaggccccaagcccaaagctgtgctaaaccaattccgaacagatttggaaaagctrgaaaaggagattacagcccggaatgagcaacttgactggccctatgaatatctgaagcccagctgcatagagaacagtgtcaccatctgagccctagagt

SEQ ID NO: 75873 - DNA, 201 bp, Homo sapiens
cgtaaggatgatctacctccaaatatgagattccatgaggagaagaggctggactttgaatggacactgaaggcaggggctctggagatggccctcaaacrtgtttacaccctcctgagctcctggaactgcctagaagactttgatcagatcttctggggccagaagagtgccctggctgagaaggttcgccagtgctgg

SEQ ID NO: 75874 - DNA, 201 bp, Homo sapiens
tcctgccctcagaccccccacttgcctggctcctggcaaagtcctgggtccgaaattcagatttccaactgcacgagatccagtatcacttgctgaacackcacctggtggctgaggtcatcgctgtcgccaccatgcggtgcctcccaggactgcaccccatcttcaagttcctgatcccccatatccgctacaccatgg

SEQ ID NO: 75875 - DNA, 201 bp, Homo sapiens
ttcagctaccagttcctcaatggtgccaaccccatgctgttgagacgctcgacctctctgccctccaggctagtgctgccctcggggatggaagagcttcrggctcaactggagaaagaacttcagaatggttccctgtttgaagctgacttcatccttctggatggaattccagccaacgtgatccgaggagagaagcaa

SEQ ID NO: 75876 - DNA, 201 bp, Homo sapiens; identical to SEQ ID NO: 75866

SEQ ID NO: 75877 - DNA, 201 bp, Homo sapiens; identical to SEQ ID NO: 75867

SEQ ID NO: 75878 - DNA, 201 bp, Homo sapiens; identical to SEQ ID NO: 75868

SEQ ID NO: 75879 - DNA, 201 bp, Homo sapiens; identical to SEQ ID NO: 75869

SEQ ID NO: 75880 - DNA, 201 bp, Homo sapiens; identical to SEQ ID NO: 75870

SEQ ID NO: 75881 - DNA, 201 bp, Homo sapiens; identical to SEQ ID NO: 75871

SEQ ID NO: 75882 - DNA, 201 bp, Homo sapiens; identical to SEQ ID NO: 75872

SEQ ID NO: 75883 - DNA, 160 bp, Homo sapiens
gagatagagtctgatctggaggctggaaggcggggctaaaactcccactcacttacctcyaccaacaactaggccaccaagtcatttctgaggactggctcaagaaagcagatttaacttacactggcctagcccaggccaccagatgcatccacggaga

SEQ ID NO: 75884 - DNA, 201 bp, Homo sapiens; identical to SEQ ID NO: 75873

SEQ ID NO: 75885 - DNA, 201 bp, Homo sapiens; identical to SEQ ID NO: 75874

SEQ ID NO: 75886 - DNA, 201 bp, Homo sapiens; identical to SEQ ID NO: 75875

SEQ ID NO: 75887 - DNA, 201 bp, Homo sapiens
cctgcggcccagcgtggtggaaaacagtgtggccatctaagcgtcgccaccctttggttatttcagcccccatcacccaagccacaagctgaccccttcgyggttatagccctgccctcccaagtcccaccctcttcccatgtcccaccctccctagaggggcaccttttcatggtctctgcacccagtgaacacatttta

SEQ ID NO: 75888 - DNA, 201 bp, Homo sapiens
ccttttcatggtctctgcacccagtgaacacattttactctagaggcatcacctgggaccttactcctctttccttccttcctcctttcctatcttccttsctctctctcttcctctttcttcattcagatctatatggcaaatagccacaattatataaatcatttcaagactagaatagggggatataatacatattac

SEQ ID NO: 75889 - DNA, 201 bp, Homo sapiens
tcatccagctccagctgccccgcacaggatccccaccacctccccttttcttgcctacggatcccccaatggcctggcttctggccaaatgctgggtgcgmagctctgacttccagctccatgagctgcagtctcatcttctgaggggacacttgatggctgaggtcattgttgtggccaccatgaggtgcctgccgtcga

SEQ ID NO: 75890 - DNA, 201 bp, Homo sapiens
tcctgggagtgaagtcttccttctatgcccaagatgcgctgcggctctgggaaatcatctatcggtatgtggaaggaatcgtgagtctccactataagacrgacgtggctgtgaaagacgacccagagctgcagacctggtgtcgagagatcactgaaatcgggctgcaaggggcccaggaccgagggtttcctgtctctt

SEQ ID NO: 75891 - DNA, 201 bp, Homo sapiens; identical to SEQ ID NO: 75887

SEQ ID NO: 75892 - DNA, 201 bp, Homo sapiens; identical to SEQ ID NO: 75888

SEQ ID NO: 75893 - DNA, 201 bp, Homo sapiens; identical to SEQ ID NO: 75889

SEQ ID NO: 75894 - DNA, 201 bp, Homo sapiens; identical to SEQ ID NO: 75890

SEQ ID NO: 75895 - DNA, 201 bp, Homo sapiens
ggagtataatgacatatgaactcaaattgccaccaaaagcttccctacttccaggacctccagaagcatctgaagaattttatatgacgatttatgaagaytcagttgcaacgcatcttacaaaaatcctcaattctgatgaacatgcagtggtcatatcttctgccaagacgctatgtgaaactgtaaaggacttcgttg

SEQ ID NO: 75896 - DNA, 201 bp, Homo sapiens
cacatgaagagcgagtatccaatgccttacactctgtggaggtggaattacagaaactgacagagattccttggctttattatatcttacacccaaatgargatgaggaacctcctatggattgcaccaaaaggaacaacagaagcaccgtatttcgaatagtgccaaagtttaaaaaggaaaaggttcagaagcagaaga

SEQ ID NO: 75897 - DNA, 201 bp, Homo sapiens
caaagtctctgatatttgatgaagttgacctctcagatgctagtgtagctgaagcaagcacgaaaaatgctaacaacagcttcacgatcatcactccattyagaaggctaatgctgtgtgctgagaacagaaaggagatggaggattggatcagctcactgaagtctgtacagaccagagaaccctacgaggtggcccagt

SEQ ID NO: 75898 - DNA, 201 bp, Homo sapiens
tggcctcagccctctcattgtggaagaagatgctgtggaatcgtccagtgaagagtccctgggtgaaagcaaagagcagcttggggatgacgttacaaaaycttcctcccagaaagccgtcaaaccaagggaaatcatgttgcgggcaaatagtttaaagaaagcagtgaggcaagtcattgaggaagccggaaaagttat

SEQ ID NO: 75899 - DNA, 201 bp, Homo sapiens
gcacaactggtacgcctgctcccacgcccgacccaccttctgtaacgtgtgcagagagagtctttctggagtcacctcccatggcctgtcctgcgaagtgkgtaaattcaaggctcacaaaagatgtgcagtgagagcaacaaataactgtaaatggactaccctggcctccatcgggaaggacattatagaagatgaaga

SEQ ID NO: 75900 - DNA, 201 bp, Homo sapiens
ggcggggccgggagaggattcgtctgacagcgaagcggagcaagagggaccccagaaactgatccgcaaagtgtctacctcggggcagatccggaccaagmccagtattaaagagggacagctattgaagcaaaccagttctttccaaaggtggaaaaagcgatacttcaaacttcgaggccgcaccctttactatgcaaa

SEQ ID NO: 75901 - DNA, 201 bp, Homo sapiens
taagagcaggactggctgcctcaattgctgggagttcgattatcaacaaaatgttactggcaaacattgatccttttggtgccacgccgtttattgaccckgatctagattccgtagatggatattcagaaaaatgtgtcatgaacaattactttgggattggattagatgcaaaaatttcattagaatttaataataaaa

SEQ ID NO: 75902 - DNA, 201 bp, Homo sapiens
aaccaagggaaatcatgttgcgggcaaatagtttaaagaaagcagtgaggcaagtcattgaggaagccggaaaagttatggatgacccgacagttcacccstgtgaaccagctaatcagtcctctgattatgacagcacagaaacagatgaatctaaggaggaagctaaagatgatgttaaaactgcacctcggtctccag

SEQ ID NO: 75903 - DNA, 201 bp, Homo sapiens
ttgcatctggaaaggcgagatcttaagagactgatagagaaggttgctgcaaaattggctgcacgtacaggcttgccttttgtcactgctccaaataaatktgaagctctggctgctcatgacgctctggttgagctcagtggagccatgaacactactgcctgtagtctgatgacgatagcaaataatattcgttttctg

SEQ ID NO: 75904 - DNA, 201 bp, Homo sapiens; identical to SEQ ID NO: 75895

SEQ ID NO: 75905 - DNA, 201 bp, Homo sapiens; identical to SEQ ID NO: 75896

SEQ ID NO: 75906 - DNA, 201 bp, Homo sapiens
gacattttgagttgaatgttttcaagccaatgatgattaaaaatgtgttacactcagccaggctgctggcggatgcttcagtttcctttacagaaaactgygtggtgggaatccaggccaatacagaaaggatcaacaagctgatgaatgagtctcaaatgttggtgacagctctcaatcctcgtatagcgtatgacaagg

SEQ ID NO: 75907 - DNA, 201 bp, Homo sapiens; identical to SEQ ID NO: 75897

SEQ ID NO: 75908 - DNA, 201 bp, Homo sapiens
tggcctcagccctctcattgtggaagaagatgctgtggaatcgtccagtgaagagtccctgggtgaaagcaaagagcagcttggggatgacgttacaaaaycttcctcccagaaagccgtcaaaccaagggaaatcatgttgcgggcaaatagtttaaagaaagcagtgaggcaagtcattgaggaagccggaaaaggcct

SEQ ID NO: 75909 - DNA, 201 bp, Homo sapiens; identical to SEQ ID NO: 75899

SEQ ID NO: 75910 - DNA, 201 bp, Homo sapiens; identical to SEQ ID NO: 75900

SEQ ID NO: 75911 - DNA, 201 bp, Homo sapiens
aggggctgaacttttgcatctggaaaggcgagatcttaagagactgatagagaaggttgctgcaaaattggctgcacgtacaggcttgccttttgtcactrctccaaataaatttgaagctctggctgctcatgacgctctggttgagctcagtggagccatgaacactactgcctgtagtctgatgacgatagcaaataa

SEQ ID NO: 75912 - DNA, 201 bp, Homo sapiens; identical to SEQ ID NO: 75901

SEQ ID NO: 75913 - DNA, 201 bp, Homo sapiens
gaacactactgcctgtagtctgatgacgatagcaaataatattcgttttctgggttctggcccttggtcaggtctgggagaactgatcttgcctgaaaatsaaccaggaagtagtatcatgccaggcaaggtgaaccctactcagtgtgaagcaatgaccatggttgtagcccaagtcatggggaatcatgttgctgtaac

SEQ ID NO: 75914 - DNA, 201 bp, Homo sapiens
gttgctgtaacagttggaggcagcagtggacattttgagttgaatgttttcaagccaatgatgattaaaaatgtgttacactcagccaggctgctggcggwtgcttcagtttcctttacagaaaactgcgtggtgggaatccaggccaatacagaaaggatcaacaagctgatgaatgagtctcaaatgttggtgacagct

SEQ ID NO: 75915 - DNA, 201 bp, Homo sapiens; identical to SEQ ID NO: 75895

SEQ ID NO: 75916 - DNA, 201 bp, Homo sapiens; identical to SEQ ID NO: 75896

SEQ ID NO: 75917 - DNA, 201 bp, Homo sapiens; identical to SEQ ID NO: 75897

SEQ ID NO: 75918 - DNA, 201 bp, Homo sapiens; identical to SEQ ID NO: 75898

SEQ ID NO: 75919 - DNA, 201 bp, Homo sapiens; identical to SEQ ID NO: 75899

SEQ ID NO: 75920 - DNA, 201 bp, Homo sapiens; identical to SEQ ID NO: 75900

SEQ ID NO: 75921 - DNA, 201 bp, Homo sapiens; identical to SEQ ID NO: 75901

SEQ ID NO: 75922 - DNA, 201 bp, Homo sapiens
gcaccgtatttcgaatagtgccaaagtttaaaaaggaaaaggttcagaagcagaagacaagttcacagcctggatctggggataccgaaagtgggtcatgygaagcgaattctccagggaattaaagagcttggaaggagcactccacagtcggaggtgtaatcatattggtgctattccttggaagagaagttattgcca

SEQ ID NO: 75923 - DNA, 201 bp, Homo sapiens; identical to SEQ ID NO: 75902

SEQ ID NO: 75924 - DNA, 201 bp, Homo sapiens
gggataccgaaagtgggtcatgtgaagcgaattctccagggaattaaagagcttggaaggagcactccacagtcggaggtgtaatcatattggtgctattycttggaagagaagttattgccacttaatacaaagtccttggaagcaagtggctgttcttgtagttttctgcatagataagtaagcaccactgaagcacct

SEQ ID NO: 75925 - DNA, 201 bp, Homo sapiens
tccgcctgcctcagcctcccaaaatgctgggattacaggtgcgagtcaccgcacccagtcaagagattcttgagtgattgttgcttattttattctcattrgtaggccatgttaaagtcgtgaaacaaatagtctgcaaggatgttctatatccataactttgtacagaagtttcctgcattcctgtttgtccttggataa

SEQ ID NO: 75926 - DNA, 124 bp, Homo sapiens
tagttaagaatttgtaaaggccasagaactacctacgattctctcagcgggtaattggctgctcctaggtttgtgtaacaagaggcaaaactggtagggttgtttaaaacctcttatcccagtt

SEQ ID NO: 75927 - DNA, 201 bp, Homo sapiens
agaggcaaaactggtagggttgtttaaaacctcttatcccagttcttaagcgtgacataaggttcccaaacccctccttgtgacttgcctcttctcttgtkctactttggttgtcatcgtgttcatcactagattttagatgtcctcggtgttactgacggtttttctgtccacttcgtcttgcagtctctcttctcctca

SEQ ID NO: 75928 - DNA, 201 bp, Homo sapiens
cgtaggtgaggccggcggcgtgggccttttctctgcacggagccggcgcttttgcagttgcttctgcggaaaggtggtagttaagaatttgtaaaggccasagaactacctacgattctctcagcggtctctcttctcctcaagtttgaaatgctttatctcatcgggttgggcctgggagatgccaaggacatcacagtc

SEQ ID NO: 75929 - DNA, 201 bp, Homo sapiens
acagtgatcttgttctaagagcaacaaagctgggaattccttatagagttattcacaatgcctccataatgaatgctgtaggctgctgtggtttacagttrtataagtttggagagacagtttctattgttttttggacagacacttggagaccagaaagcttctttgacaaagtgaagaagaacagacaaaatggcatgc

SEQ ID NO: 75930 - DNA, 197 bp, Homo sapiens
ggtgaggccggcggcgtgggccttttctctgcacggagccggcgcttttgcagttgcttctgcggaaaggtggtagttaagaatttgtaaaggccasagaactacctacgattctctcagcgggaagagttttatggaagaaaattggttgttgctgatagagaagaagtggaacaagaagcagataatattttaaa

SEQ ID NO: 75931 - DNA, 201 bp, Homo sapiens
acagtgatcttgttctaagagcaacaaagctgggaattccttatagagttattcacaatgcctccataatgaatgctgtaggctgctgtggtttacagttrtataagtttggagagacagtttctattgacacttggagaccagaaagcttctttgacaaagtgaagaagaacagacaaaatggcatgcacacattatgtt

SEQ ID NO: 75932 - DNA, 201 bp, Homo sapiens; identical to SEQ ID NO: 75928

SEQ ID NO: 75933 - DNA, 201 bp, Homo sapiens; identical to SEQ ID NO: 75931

SEQ ID NO: 75934 - DNA, 124 bp, Homo sapiens; identical to SEQ ID NO: 75926

SEQ ID NO: 75935 - DNA, 201 bp, Homo sapiens; identical to SEQ ID NO: 75927

SEQ ID NO: 75936 - DNA, 201 bp, Homo sapiens; identical to SEQ ID NO: 75929

SEQ ID NO: 75937 - DNA, 201 bp, Homo sapiens; identical to SEQ ID NO: 75928

SEQ ID NO: 75938 - DNA, 201 bp, Homo sapiens
ccgcgggcactgaagtcctcccggctgccgctcgagtagccacgggcgcgatcgggaccagaagtctcctcctccatgatcactttggaagccgggggaasactttgccctgccctgagagctggtctgcgtttcccaggcgcggcggcggcggagcagcagctgcagcagccgagtccaaataggagcggccacagccag

SEQ ID NO: 75939 - DNA, 201 bp, Homo sapiens
cctgccctgagagctggtctgcgtttcccaggcgcggcggcggcggagcagcagctgcagcagccgagtccaaataggagcggccacagccaggggcgtgwgcgccccgcgcggagcgagctcgggttcccctcggaatgtccccggggcgcccggcgcgctgaccccgaagccgcctccgccttcggcgcctgctgcctc

SEQ ID NO: 75940 - DNA, 201 bp, Homo sapiens
ccgccttcggcgcctgctgcctccctcggccaggcttgttgttcgggactgtgagcttcctggctcctgggcagtggggaagcccccgggggcgagtgacytcagctggccacgacccagccctcccccgtgcgtatctcgcttaagatggcagcggagtcaggggaactaatcggggcttgtgagttcatgaaagatcgg

SEQ ID NO: 75941 - DNA, 201 bp, Homo sapiens
aactaaaatcatacagtttgtcaagaaagaaaatagtgcactacacctgttttgaccaacggaaaagagcaaatgcagcatttttgataggtgcctatgcmgtaatctatttaaagaagacaccagaagaagcctacagagcactcctgtctggctcaaaccccccctatcttccattcagggatgcttcctttggaaatt

SEQ ID NO: 75942 - DNA, 201 bp, Homo sapiens
agaacaccgaaggggccatcgccgttcactgcaaagctggtcttggaagaacagggacattgatagcctgttatgtaatgaaacactacaggtttacacaygctgaaataattgcttggattagaatatgccggccaggctctattataggaccccagcagcacttcctggaagaaaaacaagcatcgttgtgggtccaag

SEQ ID NO: 75943 - DNA, 201 bp, Homo sapiens
acaggtttacacatgctgaaataattgcttggattagaatatgccggccaggctctattataggaccccagcagcacttcctggaagaaaaacaagcatcrttgtgggtccaaggagacattttccgatccaaactgaaaaatcgaccatccagtgaaggaagtattaataaaattctttctggcctagatgatatgtcta

SEQ ID NO: 75944 - DNA, 201 bp, Homo sapiens
tcttgaatggcagctcccagccaactaccagaaattaccctgagctcaacaataatcagtacaacagaagcagcaacagcaacgggggcaacctgaacagycccccaggcccccacagcgccaagacagaggagcacaccaccatcctccgaccctcctacaccgggctttcttcttcttcagcgagattcctgagccgtt

SEQ ID NO: 75945 - DNA, 201 bp, Homo sapiens
gaatcagaaagggattacaacatggattttttgactttgagacatttgatgtggatgaatatgaacattatgagcgagttgaaaatggtgacttcaactgkattgttccaggaaaatttttagcatttagtggaccacatcctaaaagcaaaattgagaatggttatcctcttcacgcccctgaagcctactttccttatt

SEQ ID NO: 75946 - DNA, 201 bp, Homo sapiens
cttattaagaagaagtaagggagaaagtttttagaaagtgatttttatgctcgcactataaatatggcaggtcagttcattcttttgggaagtcagtttarttacactgagtttatccaagtttatctctaccaagagtataatggcatgggatggcttatttaggacaattccctttcccattgtttttgttgctgagcc

SEQ ID NO: 75947 - DNA, 201 bp, Homo sapiens; identical to SEQ ID NO: 75938

SEQ ID NO: 75948 - DNA, 201 bp, Homo sapiens; identical to SEQ ID NO: 75939

SEQ ID NO: 75949 - DNA, 201 bp, Homo sapiens; identical to SEQ ID NO: 75940

SEQ ID NO: 75950 - DNA, 201 bp, Homo sapiens; identical to SEQ ID NO: 75941

SEQ ID NO: 75951 - DNA, 201 bp, Homo sapiens; identical to SEQ ID NO: 75942

SEQ ID NO: 75952 - DNA, 201 bp, Homo sapiens; identical to SEQ ID NO: 75943

SEQ ID NO: 75953 - DNA, 201 bp, Homo sapiens; identical to SEQ ID NO: 75944

SEQ ID NO: 75954 - DNA, 201 bp, Homo sapiens; identical to SEQ ID NO: 75945

SEQ ID NO: 75955 - DNA, 201 bp, Homo sapiens; identical to SEQ ID NO: 75938

SEQ ID NO: 75956 - DNA, 201 bp, Homo sapiens; identical to SEQ ID NO: 75939

SEQ ID NO: 75957 - DNA, 201 bp, Homo sapiens; identical to SEQ ID NO: 75940

SEQ ID NO: 75958 - DNA, 201 bp, Homo sapiens
gcctcaaattcatgctgatttctaaagtaagtgccaacttgaaaacatgattagggcacttttttaaaaaaaaattaaggctctactgtaaacaaaccackgtaaatagttgatatatattgtctgattaatattcataactacctggtgagttaggtaatactatctctattttataggaaggaaattgcatatcagaga

SEQ ID NO: 75959 - DNA, 194 bp, Homo sapiens
tttgtttggttccactattgtagagacaagaaactggggtcccagaaaatttgtgatttgtgtaaagttccagggttgtttagtagtggggccactttgasaactgggcattcaattcctagtttaggtctttctaccacgttatacctgaggtgaagctaagtatctggtttatacttttatatctttaaagg

SEQ ID NO: 75960 - DNA, 201 bp, Homo sapiens; identical to SEQ ID NO: 75941

SEQ ID NO: 75961 - DNA, 201 bp, Homo sapiens; identical to SEQ ID NO: 75942

SEQ ID NO: 75962 - DNA, 107 bp, Homo sapiens
ggggccactttgacaactgggcattcaattcctagtttaggtctttctaccacgttatacctgaggtgaagctaagtatctggtttatacttttatatctytaaagg

SEQ ID NO: 75963 - DNA, 201 bp, Homo sapiens; identical to SEQ ID NO: 75943

SEQ ID NO: 75964 - DNA, 201 bp, Homo sapiens; identical to SEQ ID NO: 75945

SEQ ID NO: 75965 - DNA, 201 bp, Homo sapiens; identical to SEQ ID NO: 75938

SEQ ID NO: 75966 - DNA, 201 bp, Homo sapiens; identical to SEQ ID NO: 75939

SEQ ID NO: 75967 - DNA, 201 bp, Homo sapiens; identical to SEQ ID NO: 75958

SEQ ID NO: 75968 - DNA, 194 bp, Homo sapiens; identical to SEQ ID NO: 75959

SEQ ID NO: 75969 - DNA, 201 bp, Homo sapiens; identical to SEQ ID NO: 75940

SEQ ID NO: 75970 - DNA, 201 bp, Homo sapiens
aactaaaatcatacagtttgtcaagaaagaaaatagtgcactacacctgttttgaccaacggaaaagagcaaatgcagcatttttgataggtgcctatgcmgtgaaaaaaattccttagaagggatcttccaattccaagtttgaacatcatgtggggcaggtatctttctgtctcccagggccaaccattagatggtccc

SEQ ID NO: 75971 - DNA, 201 bp, Homo sapiens; identical to SEQ ID NO: 75942

SEQ ID NO: 75972 - DNA, 107 bp, Homo sapiens; identical to SEQ ID NO: 75962

SEQ ID NO: 75973 - DNA, 201 bp, Homo sapiens; identical to SEQ ID NO: 75943

SEQ ID NO: 75974 - DNA, 201 bp, Homo sapiens; identical to SEQ ID NO: 75945

SEQ ID NO: 75975 - DNA, 201 bp, Homo sapiens
gctgatttctggcaccagcatagccagtagtattcgatgtatgagaagagctgtcctgagtgaaacttttaggagctctgatccagccacacgccaaatgmtaattggtacggttctccatgaggtgtttcaaaaagccataaataatagctttgccccagaaaagctacaagaacttgcttttcaaacaattcaagaaat

SEQ ID NO: 75976 - DNA, 201 bp, Homo sapiens
agagttattgtaagtggagaagaaaggtcactgtttgctttgtctagaggatatgtgaaggagattaacatgacaacagtaacttgtttattagacagaarcttgtcggtccttccagaatcaactttgttcagattagaccaagaagaaaaaaattgtgatatagataccccattaggaaatctttccaaattgatggaa

SEQ ID NO: 75977 - DNA, 201 bp, Homo sapiens
aacctcagtttatatcctaccttagttctgttcttccacatgatgcaaaggatacagttgcctgcattctaaagggtttgaataagcctcagaggcaagcratgaaaaaggtacttctttcaaaagactacacactcatcgtgggtatgcctgggacaggaaaaacaactacgatatgtactctcgtaagaattctctacg

SEQ ID NO: 75978 - DNA, 201 bp, Homo sapiens
tgatgctgcccaaaatagaagaagaaacccagcatctgaagcaaacacacttagaatatttcagcctttggtgtctaatgttaaccctggagtcacaatcraaggataataaaaagaatcaccaaaatatctggctaatgcctgcttcggaaatggagaagagtggcagttgcattggaaacctgattagaatggaacatg

SEQ ID NO: 75979 - DNA, 201 bp, Homo sapiens
gccagtagtattcgatgtatgagaagagctgtcctgagtgaaacttttaggagctctgatccagccacacgccaaatgctaattggtacggttctccatgrggtgtttcaaaaagccataaataatagctttgccccagaaaagctacaagaacttgcttttcaaacaattcaagaaataagacatttgaaggaaatgtac

SEQ ID NO: 75980 - DNA, 201 bp, Homo sapiens
gtatgagaagagctgtcctgagtgaaacttttaggagctctgatccagccacacgccaaatgctaattggtacggttctccatgaggtgtttcaaaaagcmataaataatagctttgccccagaaaagctacaagaacttgcttttcaaacaattcaagaaataagacatttgaaggaaatgtaccgcttaaatctaagtc

SEQ ID NO: 75981 - DNA, 201 bp, Homo sapiens
agggtttgaataagcctcagaggcaagcgatgaaaaaggtacttctttcaaaagactacacactcatcgtgggtatgcctgggacaggaaaaacaactacratatgtactctcgtaagaattctctacgcctgtggttttagcgttttgttgaccagctatacacactctgctgttgacaatattcttttgaagttagcca

SEQ ID NO: 75982 - DNA, 201 bp, Homo sapiens
ccttaatacagacaaggttccagcgccagaacaagttgaaaaaggtggtgtgagcaatgtaacagaagccaaactcatagttttcctaacctccatttttrttaaggctggatgcagtccctctgatattggtattattgcaccgtacaggcagcaattaaagatcatcaatgatttattggcacgttctattgggatggt

SEQ ID NO: 75983 - DNA, 201 bp, Homo sapiens
gaaaggaatcgcagatgtccccgagtggttcaaaggcagtcggctcaactatgcagaaaacctcctgcggcacaaagagaatgacagagttgccctttacrttgcaagggaaggcaaagaggaaattgtgaaggtgacttttgaagagctgaggcaagaagtggctttgtttgcagcagcaatgaggaaaatgggtgtgaa

SEQ ID NO: 75984 - DNA, 201 bp, Homo sapiens
gcattggtgccatctggagctccacgtccccggacttcggtgtgaatggtgtgctggaccggttttctcaaattcagccaaagctcatcttctctgtggargctgttgtctataatggcaaagagcacaaccacatggaaaagctgcagcaggtggttaaaggcctaccagacttgaagaaagtggtggtgattccttatg

SEQ ID NO: 75985 - DNA, 201 bp, Homo sapiens
gagatcatgtcatcagcacccctaagtcaagtcacgggtttccatagccaggcagttggtatgtacaattcagttcagcgtatgaacttgtatctctaatmtgatgtccatttttatattttttgaaactgagcacaatgaaatcctttcttgaatcattttccttttggattataaaaatatgggggaaagtgctatgat

SEQ ID NO: 75986 - DNA, 201 bp, Homo sapiens
cgctggaaaagccgtggagcaaggaggtgctttctcgaaccccgagaccctggatctgtaccgggacatccctgagctgcagggcttctgagtcagactgsctggcgtgtcactcagccgcacccgtgtgcactgtaacttttgtgtgctcaagaaattatacagaaacctacagctgttgtaaaaggatgctcgcaccaa

SEQ ID NO: 75987 - DNA, 201 bp, Homo sapiens; identical to SEQ ID NO: 75983

SEQ ID NO: 75988 - DNA, 201 bp, Homo sapiens; identical to SEQ ID NO: 75984

SEQ ID NO: 75989 - DNA, 201 bp, Homo sapiens
gcttgtctgcgcgacacgtgcccagcctcatcctggaaaccaagggcatcccgtatacgctcaacggcaagaaagtggaagttgccgtcaaacagatcatygctggaaaagccgtggagcaaggaggtgctttctcgaaccccgagaccctggatctgtaccgggacatccctgagctgcagggcttctgagtcagactgg

SEQ ID NO: 75990 - DNA, 201 bp, Homo sapiens; identical to SEQ ID NO: 75985

SEQ ID NO: 75991 - DNA, 201 bp, Homo sapiens; identical to SEQ ID NO: 75986

SEQ ID NO: 75992 - DNA, 201 bp, Homo sapiens; identical to SEQ ID NO: 75983

SEQ ID NO: 75993 - DNA, 201 bp, Homo sapiens; identical to SEQ ID NO: 75984

SEQ ID NO: 75994 - DNA, 201 bp, Homo sapiens; identical to SEQ ID NO: 75989

SEQ ID NO: 75995 - DNA, 201 bp, Homo sapiens; identical to SEQ ID NO: 75985

SEQ ID NO: 75996 - DNA, 201 bp, Homo sapiens; identical to SEQ ID NO: 75986

SEQ ID NO: 75997 - DNA, 201 bp, Homo sapiens; identical to SEQ ID NO: 75983

SEQ ID NO: 75998 - DNA, 201 bp, Homo sapiens; identical to SEQ ID NO: 75984

SEQ ID NO: 75999 - DNA, 201 bp, Homo sapiens; identical to SEQ ID NO: 75989

SEQ ID NO: 76000 - DNA, 201 bp, Homo sapiens
atgtggattacagcaagctgaagaaggaatgtccagatttctaaatgaaatgtttcactataacactgctttagaatgaaggttttccagaagccacatcygcacaatttttcacttaaccaggaaatatttcttctctaaatgcatgaaatcatgttggagatctctattgtaatctctattggagattacactgattaa

SEQ ID NO: 76001 - DNA, 134 bp, Homo sapiens
gcagacactttttagctcagggcctggtggctakgttggttctctcctttccaatcagagacctctgccgcaaacatgctctgccagatcctcggtcaggccaagaagcatccgagcttgggacagaaataacc

SEQ ID NO: 76002 - DNA, 176 bp, Homo sapiens
gcagacactttttagctcagggcctggtggctaggttggttctctcctttccaatcagagacctctgccgcaaacmtgctctgccagatcctcggtcaggccaagaagcatccgagcttgggacagaaataacccagagccctggaacaaactgggtcccaatgatcaatacaagt

SEQ ID NO: 76003 - DNA, 201 bp, Homo sapiens
gttggttctctcctttccaatcagagacctctgccgcaaacatgctctgccagatcctcggtcaggccaagaagcatccgagcttgggacagaaataaccyagagccctggaacaaactgggtcccaatgatcaatacaagttctgctcagtgaatgtggattacagcaagctgaagaaggaatgtccagatttctaaatg

SEQ ID NO: 76004 - DNA, 201 bp, Homo sapiens; identical to SEQ ID NO: 76000

SEQ ID NO: 76005 - DNA, 134 bp, Homo sapiens
gcagacactttttagctcagggcctggtggctakgttggttctctcctttccaatcagagacctctgccgcaaacatgctctgccagatcctcggtcaggccaagaagcatccgagcttgatccccctctttgt

SEQ ID NO: 76006 - DNA, 176 bp, Homo sapiens
gcagacactttttagctcagggcctggtggctaggttggttctctcctttccaatcagagacctctgccgcaaacmtgctctgccagatcctcggtcaggccaagaagcatccgagcttgatccccctctttgtatttattggaactggagcttctggagcaacactgtatctctt

SEQ ID NO: 76007 - DNA, 201 bp, Homo sapiens
cccctctttgtatttattggaactggagcttctggagcaacactgtatctcttgcatctggcattgttcaatccagatgtttgttgggacagaaataaccyagagccctggaacaaactgggtcccaatgatcaatacaagttctgctcagtgaatgtggattacagcaagctgaagaaggaatgtccagatttctaaatg

SEQ ID NO: 76008 - DNA, 201 bp, Homo sapiens
gatcaagttttgaaattcctttctcaagatgaacttgtgtatacatttggcgaaactgttgctctgggtgcttctggaattgtaatatggggaaccctcartataatgcgaagtatgaaatcttgcttgctcctagacaattacatggagactatactgaatccttacataatcaacgtcacactagcagccaaaatgtgt

SEQ ID NO: 76009 - DNA, 201 bp, Homo sapiens
cctttcatctgtgctcatactttgcatcagatattgggtaaaccaaagtgtgtaggaagaaataaatgttttcatagtcattactctttacaatgggagtrctaaaattcaagcacatctttttcagaagctttgttaaatcaagtggagtatcccagatagttttcaccttccttctgattccatgttgcttgactctga

SEQ ID NO: 76010 - DNA, 201 bp, Homo sapiens
tttgttaaatcaagtggagtatcccagatagttttcaccttccttctgattccatgttgcttgactctgaatttcagagcacctcctgttattccaaatgygcctttcctctgggcctggaatgccccaagtgaattttgtcttggaaaatttgatgagccactagatatgagcctcttctctttcataggaagcccccga

SEQ ID NO: 76011 - DNA, 201 bp, Homo sapiens
aagatgtttacaagaataggtctattgaattggttcagcaacaaaatgtacaacttagtctcacagaggccactgagaaagcaaaacaagaatttgaaaargcagggaaggatttcctggtagagactataaaattgggaaaattacttcggccaaatcacttgtggggttattatctttttccggattgttacaaccatc

SEQ ID NO: 76012 - DNA, 201 bp, Homo sapiens
gttcacagtacgtggaaaaccgacacttgaagacctggagcaattttctgaaaaattttattgcagctgttatagcaccttgagttgtaaggagaaagctratgtaaaagacactgatgctgttgatgtgtgtattgctgatggtgtctgtatagatgcttttctaaaacctcccatggagacagaagaacctcaaatttt

SEQ ID NO: 76013 - DNA, 130 bp, Homo sapiens
atttataaagaattatgccttttccatcaattttagcatggaaaaataatttcaggcaatatgcttaaaaattgggggaagacaaaagaaatccatatcgwgtaaataaaaataaattttggttttgctc

SEQ ID NO: 76014 - DNA, 201 bp, Homo sapiens
cacttccggtttttgcatatacccgcatagtttttactgatcaagttttgaaattcctttctcaagatgaacttgtgtatacatttggcgaaactgttgcyctgggtgcttctggaattgtaatatggggaaccctcagtataatgcgaagtatgaaatcttgcttgctcctagacaattacatggagactatactgaatc

SEQ ID NO: 76015 - DNA, 201 bp, Homo sapiens; identical to SEQ ID NO: 76008

SEQ ID NO: 76016 - DNA, 201 bp, Homo sapiens; identical to SEQ ID NO: 76009

SEQ ID NO: 76017 - DNA, 201 bp, Homo sapiens; identical to SEQ ID NO: 76010

SEQ ID NO: 76018 - DNA, 201 bp, Homo sapiens; identical to SEQ ID NO: 76011

SEQ ID NO: 76019 - DNA, 201 bp, Homo sapiens; identical to SEQ ID NO: 76012

SEQ ID NO: 76020 - DNA, 201 bp, Homo sapiens; identical to SEQ ID NO: 76014

SEQ ID NO: 76021 - DNA, 201 bp, Homo sapiens; identical to SEQ ID NO: 76008

SEQ ID NO: 76022 - DNA, 201 bp, Homo sapiens; identical to SEQ ID NO: 76009

SEQ ID NO: 76023 - DNA, 201 bp, Homo sapiens; identical to SEQ ID NO: 76010

SEQ ID NO: 76024 - DNA, 201 bp, Homo sapiens; identical to SEQ ID NO: 76011

SEQ ID NO: 76025 - DNA, 201 bp, Homo sapiens; identical to SEQ ID NO: 76012

SEQ ID NO: 76026 - DNA, 201 bp, Homo sapiens; identical to SEQ ID NO: 76014

SEQ ID NO: 76027 - DNA, 147 bp, Homo sapiens
cgaggctagggggaaggagaagggatcagaagcgggagctgaggggrgagagaggccggtcctggtctggccgctgcggctgctagcccgaggtctccaagccgggctgcggctccatcctcggctcctgggcaccgtctgcgaggc

SEQ ID NO: 76028 - DNA, 201 bp, Homo sapiens
ttgacacatacacccctaattccctcaacagcagaacctacctgcagccaccaggggaccagctctgtgtaggtaaccagatggctctttttcccaagccrccatcttccagctgaccagactaaactcccaaccccagaccagggcaggggacaggtctcaagtccttcccagcatacacacagggaacaaacacatacc

SEQ ID NO: 76029 - DNA, 147 bp, Homo sapiens; identical to SEQ ID NO: 76027

SEQ ID NO: 76030 - DNA, 201 bp, Homo sapiens; identical to SEQ ID NO: 76028

SEQ ID NO: 76031 - DNA, 201 bp, Homo sapiens
catcaagagagttgttctgagtggtcatcctttcaaaatttttactaagatggcagtagtacgttacatgttcttcaacagagaggatgtgctgtggtttmaaccagtggaactgagaacgaagtggggccggagaggacatatcaaggaacctttaggtacccatggccacatgaaatgcagctttgatgggaagctaaa

SEQ ID NO: 76032 - DNA, 201 bp, Homo sapiens
tcttcaacagagaggatgtgctgtggtttaaaccagtggaactgagaacgaagtggggccggagaggacatatcaaggaacctttaggtacccatggccamatgaaatgcagctttgatgggaagctaaaatctcaagacacagtactgatgaacctgtataaacgagtcttccccaaatggacttatgatccatatgtac

SEQ ID NO: 76033 - DNA, 112 bp, Homo sapiens
gggatctgcacrttgtgttagacatggctaaagtagctgataccatcctgttcctccttgatccactagaaggctgggacagcaccggtgattactgtctttcctgcctctt

SEQ ID NO: 76034 - DNA, 201 bp, Homo sapiens
gcaaagtttattttctatgtcagcctgtcagtccactgccccattttgcaagacttttttttagccttgacaaaatgtctcagttaagtataaaagttttyccactacttagtccaaaaaaaactattaaatcttaatgaaatagccactctccattaagaatctgataactaagagttgacaatactaggaaacaaaatg

SEQ ID NO: 76035 - DNA, 201 bp, Homo sapiens
ggaatccttgcaagcagaggttatcccagatccaatggagggagagcaaacctggcccactgaggaggagctgagcgaggcaaaggatttcttgaaggaargttctaaggtggtaaagaaggtccccaaaggaacatccagttaccaagctgaatggattttggatggtggcagccaaagtggtggggaaggagatgaata

SEQ ID NO: 76036 - DNA, 201 bp, Homo sapiens
tcagtagatccagacagaatggtcatcaagagagttgttctgagtggtcatcctttcaaaatttttactaagatggcagtagtacgttacatgttcttcarcagagaggatgtgctgtggtttaaaccagtggaactgagaacgaagtggggccggagaggacatatcaaggaacctttaggtacccatggccacatgaaa

SEQ ID NO: 76037 - DNA, 114 bp, Homo sapiens
gggatctgcacgtygtgttagacatggctaaagtagctgataccatcctgttcctccttgatccactagaaggctgggacagcaccggtgattactgtctttcctgcctctttg

SEQ ID NO: 76038 - DNA, 201 bp, Homo sapiens; identical to SEQ ID NO: 76031

SEQ ID NO: 76039 - DNA, 201 bp, Homo sapiens; identical to SEQ ID NO: 76032

SEQ ID NO: 76040 - DNA, 201 bp, Homo sapiens
acacttgaatgaattgggaaacacccagaactttatgctgctgtgcccccgcttgaaacatcggtggtttttcacctcagcaaggccaggggatctgcacrttgtgttagacatggctaaagtagctgataccatcctgttcctccttgatccactagaaggctgggacagcaccggtgattactgtctttcctgcctctt

SEQ ID NO: 76041 - DNA, 201 bp, Homo sapiens; identical to SEQ ID NO: 76034

SEQ ID NO: 76042 - DNA, 201 bp, Homo sapiens; identical to SEQ ID NO: 76035

SEQ ID NO: 76043 - DNA, 201 bp, Homo sapiens
acttgaatgaattgggaaacacccagaactttatgctgctgtgcccccgcttgaaacatcggtggtttttcacctcagcaaggccaggggatctgcacgtygtgttagacatggctaaagtagctgataccatcctgttcctccttgatccactagaaggctgggacagcaccggtgattactgtctttcctgcctctttg

SEQ ID NO: 76044 - DNA, 201 bp, Homo sapiens; identical to SEQ ID NO: 76036

SEQ ID NO: 76045 - DNA, 201 bp, Homo sapiens; identical to SEQ ID NO: 76032

SEQ ID NO: 76046 - DNA, 201 bp, Homo sapiens; identical to SEQ ID NO: 76035

SEQ ID NO: 76047 - DNA, 201 bp, Homo sapiens; identical to SEQ ID NO: 76036

SEQ ID NO: 76048 - DNA, 201 bp, Homo sapiens
cggccccgcggctgagagcgagcctcggtcccgctgaagctcccctgacttctgcctgctccctctcccgacgggacggaaagggccggggctcgggcatggggtcccctgcggtccgagcctgcccacggcgaagccggtgcagcctggccccgtgacccctctgaatccccgtccggccgtcgccgtgcagttgtcaag

SEQ ID NO: 76049 - DNA, 201 bp, Homo sapiens; identical to SEQ ID NO: 76031

SEQ ID NO: 76050 - DNA, 201 bp, Homo sapiens; identical to SEQ ID NO: 76034

SEQ ID NO: 76051 - DNA, 201 bp, Homo sapiens; identical to SEQ ID NO: 76040

SEQ ID NO: 76052 - DNA, 201 bp, Homo sapiens; identical to SEQ ID NO: 76043

SEQ ID NO: 76053 - DNA, 201 bp, Homo sapiens
ctccctttccgaacgacggtggccgcgctgggaggaaaagcgcccgccgccggttccagaggggcgggaccggagcgagagcctgggtggggcgggcgggsgctgcgcgtgcgcagaggtgcggccggggaggcgcgcggaggctggagctggaggcgcggcgccggtgagctgagaaccatgtgtgctcagtattgcatc

SEQ ID NO: 76054 - DNA, 201 bp, Homo sapiens
gattttagcttcccatcaaagctgcatttcatgtggccatgggtacctagttccttgatatgtcctctccggccccacttcgttctcagttccactggttkaaaccacagcacatcctctctgttgaagaacatgtaacgtactactgccatcttagtaaaaattttgaaaggatgaccactcagaacaactctcttgatg

SEQ ID NO: 76055 - DNA, 201 bp, Homo sapiens
gtacatatggatcataagtccatttggggaagactcgtttatacaggttcatcagtactgtgtcttgagattttagcttcccatcaaagctgcatttcatktggccatgggtacctagttccttgatatgtcctctccggccccacttcgttctcagttccactggtttaaaccacagcacatcctctctgttgaagaaca

SEQ ID NO: 76056 - DNA, 201 bp, Homo sapiens
cattttgtttcctagtattgtcaactcttagttatcagattcttaatggagagtggctatttcattaagatttaatagttttttttggactaagtagtggraaaacttttatacttaactgagacattttgtcaaggctaaaaaaaagtcttgcaaaatggggcagtggactgacaggctgacatagaaaataaactttgc

SEQ ID NO: 76057 - DNA, 186 bp, Homo sapiens
gcatttcatgtggccatgggtacctagttccttgatatgtcctctccggccccacttcgttctcagttccactggtttaaaccacagcacatcctctctgytgaagaacatgtaacgtactactgccatcttagtaaaaattttgaaaggatgaccactcagaacaactctcttgatgaccattct

SEQ ID NO: 76058 - DNA, 201 bp, Homo sapiens; identical to SEQ ID NO: 76053

SEQ ID NO: 76059 - DNA, 201 bp, Homo sapiens
ctgcagaaatgcagacatggtctcaaatcccgtgtttccttacctaaaggttccttgatatgtcctctccggccccacttcgttctcagttccactggttkaaaccacagcacatcctcttagaatcaaacacattaaagaccaagatgaaacatttacccacaaaatgtaaacccaacctttataccacaaaggcaatca

SEQ ID NO: 76060 - DNA, 201 bp, Homo sapiens
gtacatatggatcataagtccatttggggaagactcgtttatacaggttcatcagtactgtgtcttgagattttagcttcccatcaaagctgcatttcatktggccatgggtacctagaaagacatcagaacaagtcggtcaaattaaaagtagaaaattttaaagcaatgacttccaacccaacagtcatttagcaacac

SEQ ID NO: 76061 - DNA, 201 bp, Homo sapiens; identical to SEQ ID NO: 76056

SEQ ID NO: 76062 - DNA, 201 bp, Homo sapiens
attaaagaccaagatgaaacatttacccacaaaatgtaaacccaacctttataccacaaaggcaatcagatcccatcctcctccttcatacccacctctgytgaagaacatgtaacgtactactgccatcttagtaaaaattttgaaaggatgaccactcagaacaactctcttgatgaccattctgtctggatctactga

SEQ ID NO: 76063 - DNA, 201 bp, Homo sapiens; identical to SEQ ID NO: 76054

SEQ ID NO: 76064 - DNA, 201 bp, Homo sapiens; identical to SEQ ID NO: 76055

SEQ ID NO: 76065 - DNA, 201 bp, Homo sapiens; identical to SEQ ID NO: 76056

SEQ ID NO: 76066 - DNA, 186 bp, Homo sapiens; identical to SEQ ID NO: 76057

SEQ ID NO: 76067 - DNA, 201 bp, Homo sapiens
ggacccgacctgccatctggaaaacctgccaaatatgatgacatcaagaagatgatgaagcaggcttcagaggatcctatcaagggcatcctgggctacaytgagcaccagattgtctcctccgacttcaacagtgacacacagtcttccacctttgatgctggggctggcattaccctcaacgaccactttgtcaagctc

SEQ ID NO: 76068 - DNA, 201 bp, Homo sapiens
gagcgcaagaaggctcagcacaaacactgggaactggcggggaccaaactgggagatataatgggcgtcaagaaggaggaagagccagataaagctgtgayggaggatgggaaggtggactacaggacagagcagaagtttgcagatcacatgaagagaaagagcgaagccagcagtgaatttgcaaagaagaagtccatc

SEQ ID NO: 76069 - DNA, 201 bp, Homo sapiens
ctgatctggactgtcaggttggtggtcttatttgcaagtccaaaagtgcggccagcgagcagcatgtcttcaaggctcctgctccccgcccttcattactsggactggacttgctggcttccctgaaacggagagagcgagaggagaaggacgatggggaggacaagaagaagtccaaagtctcctcctacaaggactggg

SEQ ID NO: 76070 - DNA, 201 bp, Homo sapiens
cgcgcttggtgagagaaatcccagatcctgtgatgggggacaccagtgaggatgcctcgatccatcgattggaaggcactgatctggactgtcaggttggyggtcttatttgcaagtccaaaagtgcggccagcgagcagcatgtcttcaaggctcctgctccccgcccttcattactcggactggacttgctggcttccc

SEQ ID NO: 76071 - DNA, 201 bp, Homo sapiens
gaccagactctctggcagaggaggtggagttcttccatgcaggagcacggcatggcgggagcggggctgcagagtatccgaggtgctgccggggcagcggraggtggctggacccatcgcatctaaaactggcccaggacacttggtgtatgcgtgacttggctgtggctgtcttttttaatccttgtgtaaagcagcaaa

SEQ ID NO: 76072 - DNA, 201 bp, Homo sapiens
cccgctggaccctgccctgtccaagatgctcatcgtgtcctgtgacatgggctgcagctccgagatcctgctcatcgtttccatgctctcggtcccagccrtcttctacaggcccaagggtcgagaggaggagagtgatcaaatccgggagaagttcgctgttcctgagagcgatcatttgacctacctgaatgtttacct

SEQ ID NO: 76073 - DNA, 201 bp, Homo sapiens
gccagcccgctttggtctgtgagctgaggctgtccccagagaggatggcagcagggcagttcctgctggaccagactctctggcagaggaggtggagttcytccatgcaggagcacggcatggcgggagcggggctgcagagtatccgaggtgctgccggggcagcgggaggtggctggacccatcgcatctaaaactggc

SEQ ID NO: 76074 - DNA, 201 bp, Homo sapiens
atgaggactttgaagaggacaacgcggccaaggtgcatctgatggtgcacaatctggtgcctccctttctggatgggcgcattgtcttcaccaagcagccrgagccggtgattccagtgaaggatgctacttctgacctggccatcattgctcggaaaggcagccagacagtgcggaagcacagggagcagaaggagcgca

SEQ ID NO: 76075 - DNA, 201 bp, Homo sapiens
aaatcccagatcctgtgatgggggacaccagtgaggatgcctcgatccatcgattggaaggcactgatctggactgtcaggttggtggtcttatttgcaartccaaaagtgcggccagcgagcagcatgtcttcaaggctcctgctccccgcccttcattactcggactggacttgctggcttccctgaaacggagagagc

SEQ ID NO: 76076 - DNA, 201 bp, Homo sapiens
ccaaggtgcatctgatggtgcacaatctggtgcctccctttctggatgggcgcattgtcttcaccaagcagccggagccggtgattccagtgaaggatgcyacttctgacctggccatcattgctcggaaaggcagccagacagtgcggaagcacagggagcagaaggagcgcaagaaggctcagcacaaacactgggaac

SEQ ID NO: 76077 - DNA, 201 bp, Homo sapiens
gggacagaagggtcccaagagtcgcgcttggtgagagaaatcccagatcctgtgatgggggacaccagtgaggatgcctcgatccatcgattggaaggcastgatctggactgtcaggttggtggtcttatttgcaagtccaaaagtgcggccagcgagcagcatgtcttcaaggctcctgctccccgcccttcattactc

SEQ ID NO: 76078 - DNA, 201 bp, Homo sapiens
agacagacattatcggtctgctcgggtagagactccatcccatccgggtggtgtgagcgaagagttttgggaacgcagtcggcagagagagcgggagcggmgggaacatggtgtctatgcctcgtccaaagaagaaaaggattggaagaaggagaaatcgcgggatcgagactatgaccgcaagagggacagagatgcagc

SEQ ID NO: 76079 - DNA, 201 bp, Homo sapiens
cccctggagacatccttatcttcatgcctggccaagaggacattgaggtgacctcagaccagattgtggagcatctggaggaactggagaacgcgcctgcmctggctgtgctgcccatctactctcagctgccttctgacctccaggccaaaatcttccagaaggctccagatggcgttcggaagtgcatcgttgccacca

SEQ ID NO: 76080 - DNA, 201 bp, Homo sapiens
ccatctttgcagtgcagcaggagctgctcactattatcagagacaacagcatcgtgatcgtggttggggagacggggagtggtaagaccactcagctgacrcagtacctgcatgaagatggttacacggactatgggatgattgggtgtacccagccccggcgtgtagctgccatgtcagtggccaagagagtcagtgaag

SEQ ID NO: 76081 - DNA, 201 bp, Homo sapiens; identical to SEQ ID NO: 76068

SEQ ID NO: 76082 - DNA, 201 bp, Homo sapiens; identical to SEQ ID NO: 76069

SEQ ID NO: 76083 - DNA, 201 bp, Homo sapiens; identical to SEQ ID NO: 76070

SEQ ID NO: 76084 - DNA, 201 bp, Homo sapiens; identical to SEQ ID NO: 76071

SEQ ID NO: 76085 - DNA, 201 bp, Homo sapiens; identical to SEQ ID NO: 76072

SEQ ID NO: 76086 - DNA, 201 bp, Homo sapiens; identical to SEQ ID NO: 76073

SEQ ID NO: 76087 - DNA, 201 bp, Homo sapiens; identical to SEQ ID NO: 76074

SEQ ID NO: 76088 - DNA, 201 bp, Homo sapiens; identical to SEQ ID NO: 76075

SEQ ID NO: 76089 - DNA, 201 bp, Homo sapiens; identical to SEQ ID NO: 76076

SEQ ID NO: 76090 - DNA, 201 bp, Homo sapiens; identical to SEQ ID NO: 76077

SEQ ID NO: 76091 - DNA, 201 bp, Homo sapiens
agacagacattatcggtctgctcgggtagagactccatcccatccgggtggtgtgagcgaagagttttgggaacgcagtcggcagagagagcgggagcggmgggaacatggtgtctatgcctcgtccaaagaagaaaaggattggaagaaggagaaatcgcgggatcgagactatgaccgcaagagggacagagatgagcg

SEQ ID NO: 76092 - DNA, 201 bp, Homo sapiens; identical to SEQ ID NO: 76079

SEQ ID NO: 76093 - DNA, 201 bp, Homo sapiens; identical to SEQ ID NO: 76080

SEQ ID NO: 76094 - DNA, 201 bp, Homo sapiens; identical to SEQ ID NO: 76068

SEQ ID NO: 76095 - DNA, 201 bp, Homo sapiens; identical to SEQ ID NO: 76069

SEQ ID NO: 76096 - DNA, 201 bp, Homo sapiens; identical to SEQ ID NO: 76070

SEQ ID NO: 76097 - DNA, 201 bp, Homo sapiens; identical to SEQ ID NO: 76071

SEQ ID NO: 76098 - DNA, 201 bp, Homo sapiens
aagagcaaggggagcccatgacccctcgccgcacgccagcccgctttggtctgtgagctgaggctgtccccagagaggatggcagcaggtattgggtcctsagccttctggcgggagccctgaggctgcggacaaagccctttcatctgaggactttcatctgtgcatatcacggccccccagggcagttcctgctggacc

SEQ ID NO: 76099 - DNA, 201 bp, Homo sapiens; identical to SEQ ID NO: 76072

SEQ ID NO: 76100 - DNA, 201 bp, Homo sapiens
ggacaaagccctttcatctgaggactttcatctgtgcatatcacggccccccagggcagttcctgctggaccagactctctggcagaggaggtggagttcytccatgcaggagcacggcatggcgggagcggggctgcagagtatccgaggtgctgccggggcagcgggaggtggctggacccatcgcatctaaaactggc

SEQ ID NO: 76101 - DNA, 201 bp, Homo sapiens; identical to SEQ ID NO: 76074

SEQ ID NO: 76102 - DNA, 201 bp, Homo sapiens; identical to SEQ ID NO: 76075

SEQ ID NO: 76103 - DNA, 201 bp, Homo sapiens; identical to SEQ ID NO: 76076

SEQ ID NO: 76104 - DNA, 201 bp, Homo sapiens; identical to SEQ ID NO: 76077

SEQ ID NO: 76105 - DNA, 201 bp, Homo sapiens; identical to SEQ ID NO: 76091

SEQ ID NO: 76106 - DNA, 201 bp, Homo sapiens; identical to SEQ ID NO: 76079

SEQ ID NO: 76107 - DNA, 201 bp, Homo sapiens; identical to SEQ ID NO: 76080

SEQ ID NO: 76108 - DNA, 193 bp, Homo sapiens
gggcttaatgacggaaggagcatggcgtggagacacctgaaaaagcgggcccaggatgctgtgatcatcctggggggaggaggacttctcttygcctcctacctgatggccacgggagatgagcgtttctatgctgaacacctgatgccgactctgcaggggctgctggacccggagtcagcccacagactgg

SEQ ID NO: 76109 - DNA, 140 bp, Homo sapiens
gggcttaatgacggaaggagcatggcgtggagacacctgmaaaagcgggcccaggatgctgtgatcatcctggggggaggaggacttctcttcgcctcctacctgatggccacgggagatgagcgtttctatgctgaaca

SEQ ID NO: 76110 - DNA, 118 bp, Homo sapiens
ctcaaaccattcgggagatgtatgcactcacccaaggcaaggtttcccgtgtttgtgtcttcagatctgcgtgtggcttgggctcctgggtcgtgatgggratcatcattccctaatc

SEQ ID NO: 76111 - DNA, 201 bp, Homo sapiens
tcagcccacagactggctgttcgcttcacctccctggggctccttccacgggccagatttcaagactctgacatgctggtatggatttaacagtcacgggmtttcagtggtggaacacaggttacgggccagacagcagaagcaggccaagctcacagaaggtgctgcaggagagggatggcttgcggagagtgcacaggc

SEQ ID NO: 76112 - DNA, 193 bp, Homo sapiens; identical to SEQ ID NO: 76108

SEQ ID NO: 76113 - DNA, 140 bp, Homo sapiens; identical to SEQ ID NO: 76109

SEQ ID NO: 76114 - DNA, 201 bp, Homo sapiens
tgtgactccaaaacctcaggaaggaaaccctagacccagagtcttccgcctccctgaggaccaagctgtcattaacaggtatggatttaacagtcacgggmtttcagtggtggaacacaggttacgggccagacagcagaagcaggccaagctcacagaagatggactgcctctgggggtcaacttggggaagaacaagac

SEQ ID NO: 76115 - DNA, 201 bp, Homo sapiens
cgggaactggaggcccttctgaaagagcagggctttggcggagtcacagatgccattggagcagatcatcggaggtgaggacagcgtctgacgggaagccygatctggaaccttcccaaggactcaggcaagcctttgtggctggatcatgagaggagggactccatcttgagccatgtcccccagccatggcatggctgc

SEQ ID NO: 76116 - DNA, 201 bp, Homo sapiens
tcctgacctcaccagccaggataaggaggacattgccagtgtggtcaaagaggccgagttcccataattggggttggtggtgtgagcagcgggcaggacgygctggagaagatccgggcaggggcctccctggtgcagctgtacacggccctcaccttctgggggccacccgttgtgggcaaagtcaagcgggaactggag

SEQ ID NO: 76117 - DNA, 201 bp, Homo sapiens
gagaattgcttgaacctgggaggcggaggttgcagtgagccaagattgcaccagtgcactccagcttgggcgacagatcaagactctgtcacacacaaacraacaaacaaattttcccgtttctctctgtccctttctctataacatggataaaatattcacgtcttatgtatttattattgctgagtcattggtgcctta

SEQ ID NO: 76118 - DNA, 201 bp, Homo sapiens
aggagaattgcttgaacctgggaggcggaggttgcagtgagccaagattgcaccagtgcactccagcttgggcgacagatcaagactctgtcacacacaaacgaacaaacaaattttcccgtttctctctgtccctttctctataacatggataaaatattcacgtcttatgtatttattattgctgagtcattggtgcct

SEQ ID NO: 76119 - DNA, 201 bp, Homo sapiens; identical to SEQ ID NO: 76114

SEQ ID NO: 76120 - DNA, 201 bp, Homo sapiens; identical to SEQ ID NO: 76115

SEQ ID NO: 76121 - DNA, 151 bp, Homo sapiens
aagcgggcccaggatgctgtgatcatcctggggggaggaggacttctcttygcctcctacctgatggccacgggagatgagcgtttctatgctgaacacctgatgccgactctgcaggggctgctggacccggagtcagcccacagactgg

SEQ ID NO: 76122 - DNA, 201 bp, Homo sapiens
tgaacctgggaggcggaggttgcagtgagccaagattgcaccagtgcactccagcttgggcgacagatcaagactctgtcacacacaaacgaacaaacaaattttcccgtttctctctgtccctttctctataacatggataaaatattcacgtcttatgtatttattattgctgagtcattggtgccttattcttcagtg

SEQ ID NO: 76123 - DNA, 201 bp, Homo sapiens
ttgaacctgggaggcggaggttgcagtgagccaagattgcaccagtgcactccagcttgggcgacagatcaagactctgtcacacacaaacgaacaaacaaattttcccgtttctctctgtccctttctctataacatggataaaatattcacgtcttatgtatttattattgctgagtcattggtgccttattcttcagt

SEQ ID NO: 76124 - DNA, 201 bp, Homo sapiens
attgcttgaacctgggaggcggaggttgcagtgagccaagattgcaccagtgcactccagcttgggcgacagatcaagactctgtcacacacaaacgaacraacaaattttcccgtttctctctgtccctttctctataacatggataaaatattcacgtcttatgtatttattattgctgagtcattggtgccttattct

SEQ ID NO: 76125 - DNA, 201 bp, Homo sapiens
cttgaacctgggaggcggaggttgcagtgagccaagattgcaccagtgcactccagcttgggcgacagatcaagactctgtcacacacaaacgaacaaacaaattttcccgtttctctctgtccctttctctataacatggataaaatattcacgtcttatgtatttattattgctgagtcattggtgccttattcttcag

SEQ ID NO: 76126 - DNA, 201 bp, Homo sapiens
gcttgaacctgggaggcggaggttgcagtgagccaagattgcaccagtgcactccagcttgggcgacagatcaagactctgtcacacacaaacgaacaaacaaattttcccgtttctctctgtccctttctctataacatggataaaatattcacgtcttatgtatttattattgctgagtcattggtgccttattcttca

SEQ ID NO: 76127 - DNA, 201 bp, Homo sapiens
cctccgggatttatcaactcaaaccattcgggagatgtatgcactcacccaaggcaagttcccataattggggttggtggtgtgagcagcgggcaggacgygctggagaagatccgggcaggggcctccctggtgcagctgtacacggccctcaccttctgggggccacccgttgtgggcaaagtcaagcgggaactggag

SEQ ID NO: 76128 - DNA, 201 bp, Homo sapiens; identical to SEQ ID NO: 76117

SEQ ID NO: 76129 - DNA, 140 bp, Homo sapiens; identical to SEQ ID NO: 76109

SEQ ID NO: 76130 - DNA, 201 bp, Homo sapiens; identical to SEQ ID NO: 76118

SEQ ID NO: 76131 - DNA, 201 bp, Homo sapiens; identical to SEQ ID NO: 76114

SEQ ID NO: 76132 - DNA, 201 bp, Homo sapiens; identical to SEQ ID NO: 76115

SEQ ID NO: 76133 - DNA, 193 bp, Homo sapiens; identical to SEQ ID NO: 76108

SEQ ID NO: 76134 - DNA, 201 bp, Homo sapiens; identical to SEQ ID NO: 76122

SEQ ID NO: 76135 - DNA, 201 bp, Homo sapiens; identical to SEQ ID NO: 76124

SEQ ID NO: 76136 - DNA, 201 bp, Homo sapiens; identical to SEQ ID NO: 76123

SEQ ID NO: 76137 - DNA, 201 bp, Homo sapiens; identical to SEQ ID NO: 76125

SEQ ID NO: 76138 - DNA, 201 bp, Homo sapiens
gatttatcaactcaaaccattcgggagatgtatgcactcacccaaggcaaggtttcccttcccataattggggttggtggtgtgagcagcgggcaggacgygctggagaagatccgggcaggggcctccctggtgcagctgtacacggccctcaccttctgggggccacccgttgtgggcaaagtcaagcgggaactggag

SEQ ID NO: 76139 - DNA, 201 bp, Homo sapiens; identical to SEQ ID NO: 76126

SEQ ID NO: 76140 - DNA, 201 bp, Homo sapiens; identical to SEQ ID NO: 76117

SEQ ID NO: 76141 - DNA, 140 bp, Homo sapiens; identical to SEQ ID NO: 76109

SEQ ID NO: 76142 - DNA, 201 bp, Homo sapiens; identical to SEQ ID NO: 76118

SEQ ID NO: 76143 - DNA, 201 bp, Homo sapiens; identical to SEQ ID NO: 76114

SEQ ID NO: 76144 - DNA, 201 bp, Homo sapiens; identical to SEQ ID NO: 76115

SEQ ID NO: 76145 - DNA, 193 bp, Homo sapiens; identical to SEQ ID NO: 76108

SEQ ID NO: 76146 - DNA, 201 bp, Homo sapiens; identical to SEQ ID NO: 76122

SEQ ID NO: 76147 - DNA, 201 bp, Homo sapiens; identical to SEQ ID NO: 76124

SEQ ID NO: 76148 - DNA, 201 bp, Homo sapiens; identical to SEQ ID NO: 76123

SEQ ID NO: 76149 - DNA, 201 bp, Homo sapiens; identical to SEQ ID NO: 76125

SEQ ID NO: 76150 - DNA, 201 bp, Homo sapiens; identical to SEQ ID NO: 76126

SEQ ID NO: 76151 - DNA, 201 bp, Homo sapiens; identical to SEQ ID NO: 76127

SEQ ID NO: 76152 - DNA, 201 bp, Homo sapiens
gtgtctctgggagggcgctgctttccccggccacccggcgcgatgatccagaatgtcggaaatcacctgcgacggggcttggcctctgtgttctccaaccrcacatcccggaagtcagccttacgtgcggggaacgacagtgccatggcagacggcgagggataccggaaccccacggaggtgcagatgagccagctggtg

SEQ ID NO: 76153 - DNA, 165 bp, Homo sapiens
caggcttcatttggagtcaggcctggctgttgctcaggtgaccagcttgtgtctctgggagggcrctgctttccccggccacccggcgcgatgatccagaatgtcggaaatcacctgcgacggggcttggcctctgtgttctccaaccgcacatcccggaagtca

SEQ ID NO: 76154 - DNA, 201 bp, Homo sapiens
gtcctgcctccccacgccaatcaccagggcaacacctttgggggccagatcatggcctggatggagaatgtggccaccattgcagccagccggctctgccrtgcccaccctacgctgaaggccattgaaatgttccacttccgaggcccgtcccaggtcggcgaccgtctggtgctcaaagccatcgtgaacaatgccttc

SEQ ID NO: 76155 - DNA, 201 bp, Homo sapiens
gaggagaagatggagcacagtgtggcggctgagcgccggcgcatgcgccttgtctatgcagacaccatcaaggacctcctggccaactgcgccattcaggrcgatctggagagcagagactgtagccgcatggtgccggctgagaagacccgtgtggagagtgtggagctggtcctgcctccccacgccaatcaccagggc

SEQ ID NO: 76156 - DNA, 201 bp, Homo sapiens
ctctccgtcccctgggaccctagcaaccaggtgtacctgagctacaataacgtctcctccttgaagatgcttgtggccaaggacaactgggtgctgtcctyggagatcagtcaggtccgcctgtacactctggaggatgacaagttcctctccttccacatggagatggtggtgcatgtggatgcagcccaggccttcctg

SEQ ID NO: 76157 - DNA, 201 bp, Homo sapiens
agtcaggcctggctgttgctcaggtgaccagcttgtgtctctgggagggcgctgctttccccggccacccggcgcgatgatccagaatgtcggaaatcacytgcgacggggcttggcctctgtgttctccaaccgcacatcccggaagtcagccttacgtgcggggaacgacagtgccatggcagacggcgagggataccg

SEQ ID NO: 76158 - DNA, 201 bp, Homo sapiens
agcgccggcgcatgcgccttgtctatgcagacaccatcaaggacctcctggccaactgcgccattcagggcgatctggagagcagagactgtagccgcatrgtgccggctgagaagacccgtgtggagagtgtggagctggtcctgcctccccacgccaatcaccagggcaacacctttgggggccagatcatggcctgga

SEQ ID NO: 76159 - DNA, 201 bp, Homo sapiens
gcctggctgttgctcaggtgaccagcttgtgtctctgggagggcgctgctttccccggccacccggcgcgatgatccagaatgtcggaaatcacctgcgayggggcttggcctctgtgttctccaaccgcacatcccggaagtcagccttacgtgcggggaacgacagtgccatggcagacggcgagggataccggaaccc

SEQ ID NO: 76160 - DNA, 201 bp, Homo sapiens
ccctatgtcatcgcgctgaggtcggtcacgctgcccacacaccgagagacgccagagtacagacgcggagagaccctctgctcaggcttctgcctctggcrcgagggggaccagctgaccaagtgctgctgggttagggtctccctgactgagctggtctcggcaagtggcttctattcctgggggctcgaatccaggtca

SEQ ID NO: 76161 - DNA, 201 bp, Homo sapiens
gaggacctgtgctctgagaagcagtggaatgtgtgcaaggccttggccaccttcgtggcccgccgagagatcaccaaggtgaagctgaagcagatcacgcygcggacagaagaggagaagatggagcacagtgtggcggctgagcgccggcgcatgcgccttgtctatgcagacaccatcaaggacctcctggccaactgc

SEQ ID NO: 76162 - DNA, 201 bp, Homo sapiens
agctagtgcagcaggtagacgaggacgacgccatctaccacgtcaccagccctgccctcggaggtcacacaaagccccaggacttcgtgatcctggcctcraggcggaagccttgtgacaatggggacccctatgtcatcgcgctgaggtcggtcacgctgcccacacaccgagagacgccagagtacagacgcggagaga

SEQ ID NO: 76163 - DNA, 201 bp, Homo sapiens
aggccttggccaccttcgtggcccgccgagagatcaccaaggtgaagctgaagcagatcacgccgcggacagaagaggagaagatggagcacagtgtggcrgctgagcgccggcgcatgcgccttgtctatgcagacaccatcaaggacctcctggccaactgcgccattcagggcgatctggagagcagagactgtagcc

SEQ ID NO: 76164 - DNA, 201 bp, Homo sapiens
tcccaggtcggcgaccgtctggtgctcaaagccatcgtgaacaatgccttcaaacatagcatggaggtgggcgtgtgcgtggaggcctatcgccaggaggstgagacccaccggcgccacatcaacagtgcctttatgacctttgtggtcctggacgcagatgaccagccccagttgctgccctggattcggccccagccc

SEQ ID NO: 76165 - DNA, 201 bp, Homo sapiens
atgtcggaaatcacctgcgacggggcttggcctctgtgttctccaaccgcacatcccggaagtcagccttacgtgcggggaacgacagtgccatggcagayggcgagggataccggaaccccacggaggtgcagatgagccagctggtgctgccctgccacaccaaccaacgtggtgagctgagcgtcgggcagctgctca

SEQ ID NO: 76166 - DNA, 201 bp, Homo sapiens; identical to SEQ ID NO: 76157

SEQ ID NO: 76167 - DNA, 201 bp, Homo sapiens; identical to SEQ ID NO: 76159

SEQ ID NO: 76168 - DNA, 201 bp, Homo sapiens
cttggacaaccggaatgatctggcccccagcctccagaccctctagatgccctcagtggccacatcatgcccactcccactccatcctgtccccaaggacwcacatacagtgcctggagaaagccaaagacctttatttcttcctgcctccccgtgggaagcctccgccctgaggtccgctggcccaccacccctgggtgc

SEQ ID NO: 76169 - DNA, 201 bp, Homo sapiens
tgacggtggcccggggggaggatgccagcagcctgcctatggctccagctgtgctgtggcccagcagcatggcctgcatctggaaggacacaggttgccaragcccctggcacaactctagcatatctgtgagcagctgttccctgtagccactgcccagcacctcctcaggccagcctggtgccacagtcacgtggggga

SEQ ID NO: 76170 - DNA, 201 bp, Homo sapiens; identical to SEQ ID NO: 76164

SEQ ID NO: 76171 - DNA, 201 bp, Homo sapiens; identical to SEQ ID NO: 76165

SEQ ID NO: 76172 - DNA, 165 bp, Homo sapiens; identical to SEQ ID NO: 76153

SEQ ID NO: 76173 - DNA, 201 bp, Homo sapiens; identical to SEQ ID NO: 76152

SEQ ID NO: 76174 - DNA, 201 bp, Homo sapiens; identical to SEQ ID NO: 76156

SEQ ID NO: 76175 - DNA, 201 bp, Homo sapiens; identical to SEQ ID NO: 76155

SEQ ID NO: 76176 - DNA, 201 bp, Homo sapiens
cgtgggagattttggccccaacccacacaggccaatgcaagaggccaaggctggagaggcgtgccagcaaggccagggatggccggagggctgcgggctcygctatttgcaaatggatgccccagtgtccgggatgtgtggccagctgctgcaggcaggactccagcgtcaggatgttgccacttggagtatgaacaatgg

SEQ ID NO: 76177 - DNA, 201 bp, Homo sapiens
ccctatgtcatcgcgctgaggtcggtcacgctgcccacacaccgagagacgccagagtacagacgcggagagaccctctgctcaggcttctgcctctggcrcgagggggaccagctgaccaaggtatcctactacaaccaggccaccccaggtgttctcaactatgtgaccaccaacgtggccggcctctcctctgagttc

SEQ ID NO: 76178 - DNA, 201 bp, Homo sapiens; identical to SEQ ID NO: 76163

SEQ ID NO: 76179 - DNA, 201 bp, Homo sapiens
cagcaagtccttgtggtagccctggggtagcctgtagtagactcgggtcctgtccacagccctagctgccagcaatgctgtcctcacagaggcatagtcgyccccagctgggttgtgctccactgtgacggtggcccggggggaggatgccagcagcctgcctatggctccagctgtgctgtggcccagcagcatggcctg

SEQ ID NO: 76180 - DNA, 201 bp, Homo sapiens; identical to SEQ ID NO: 76154

SEQ ID NO: 76181 - DNA, 108 bp, Homo sapiens
ggccaggagccctgtgctcttgacatcactgtactccctctccctccccgcaaccctgccccaccttgcatccagggtatggtgtaaataaacctgtgttrccatggc

SEQ ID NO: 76182 - DNA, 201 bp, Homo sapiens; identical to SEQ ID NO: 76158

SEQ ID NO: 76183 - DNA, 201 bp, Homo sapiens; identical to SEQ ID NO: 76161

SEQ ID NO: 76184 - DNA, 201 bp, Homo sapiens
tagtagactcgggtcctgtccacagccctagctgccagcaatgctgtcctcacagaggcatagtcgcccccagctgggttgtgctccactgtgacggtggsccggggggaggatgccagcagcctgcctatggctccagctgtgctgtggcccagcagcatggcctgcatctggaaggacacaggttgccagagcccctgg

SEQ ID NO: 76185 - DNA, 201 bp, Homo sapiens
catcctgtccccaaggactcacatacagtgcctggagaaagccaaagacctttatttcttcctgcctccccgtgggaagcctccgccctgaggtccgctgrcccaccacccctgggtgctcagtttctaccaacatgagccagcaagtccttgtggtagccctggggtagcctgtagtagactcgggtcctgtccacagcc

SEQ ID NO: 76186 - DNA, 201 bp, Homo sapiens
gtgggagattttggccccaacccacacaggccaatgcaagaggccaaggctggagaggcgtgccagcaaggccagggatggccggagggctgcgggctccrctatttgcaaatggatgccccagtgtccgggatgtgtggccagctgctgcaggcaggactccagcgtcaggatgttgccacttggagtatgaacaatggg

SEQ ID NO: 76187 - DNA, 201 bp, Homo sapiens
tccacagccctagctgccagcaatgctgtcctcacagaggcatagtcgcccccagctgggttgtgctccactgtgacggtggcccggggggaggatgccakcagcctgcctatggctccagctgtgctgtggcccagcagcatggcctgcatctggaaggacacaggttgccagagcccctggcacaactctagcatatct

SEQ ID NO: 76188 - DNA, 201 bp, Homo sapiens; identical to SEQ ID NO: 76162

SEQ ID NO: 76189 - DNA, 201 bp, Homo sapiens; identical to SEQ ID NO: 76157

SEQ ID NO: 76190 - DNA, 201 bp, Homo sapiens; identical to SEQ ID NO: 76159

SEQ ID NO: 76191 - DNA, 201 bp, Homo sapiens; identical to SEQ ID NO: 76168

SEQ ID NO: 76192 - DNA, 201 bp, Homo sapiens; identical to SEQ ID NO: 76164

SEQ ID NO: 76193 - DNA, 201 bp, Homo sapiens; identical to SEQ ID NO: 76165

SEQ ID NO: 76194 - DNA, 201 bp, Homo sapiens; identical to SEQ ID NO: 76152

SEQ ID NO: 76195 - DNA, 165 bp, Homo sapiens; identical to SEQ ID NO: 76153

SEQ ID NO: 76196 - DNA, 201 bp, Homo sapiens; identical to SEQ ID NO: 76155

SEQ ID NO: 76197 - DNA, 201 bp, Homo sapiens; identical to SEQ ID NO: 76156

SEQ ID NO: 76198 - DNA, 201 bp, Homo sapiens; identical to SEQ ID NO: 76177

SEQ ID NO: 76199 - DNA, 201 bp, Homo sapiens
gaagcctccgccctgaggtccgctggcccaccacccctgggtgctcagtttctaccaacatgagccagcaagccagggatggccggagggctgcgggctcygctatttgcaaatggatgccccagtgtccgggatgtgtggccagctgctgcaggcaggactccagcgtcaggatgttgccacttggagtatgaacaatgg

SEQ ID NO: 76200 - DNA, 201 bp, Homo sapiens; identical to SEQ ID NO: 76163

SEQ ID NO: 76201 - DNA, 201 bp, Homo sapiens; identical to SEQ ID NO: 76154

SEQ ID NO: 76202 - DNA, 201 bp, Homo sapiens; identical to SEQ ID NO: 76158

SEQ ID NO: 76203 - DNA, 201 bp, Homo sapiens; identical to SEQ ID NO: 76161

SEQ ID NO: 76204 - DNA, 201 bp, Homo sapiens
catcctgtccccaaggactcacatacagtgcctggagaaagccaaagacctttatttcttcctgcctccccgtgggaagcctccgccctgaggtccgctgrcccaccacccctgggtgctcagtttctaccaacatgagccagcaagccagggatggccggagggctgcgggctccgctatttgcaaatggatgccccagt

SEQ ID NO: 76205 - DNA, 201 bp, Homo sapiens
aagcctccgccctgaggtccgctggcccaccacccctgggtgctcagtttctaccaacatgagccagcaagccagggatggccggagggctgcgggctccrctatttgcaaatggatgccccagtgtccgggatgtgtggccagctgctgcaggcaggactccagcgtcaggatgttgccacttggagtatgaacaatggg

SEQ ID NO: 76206 - DNA, 201 bp, Homo sapiens; identical to SEQ ID NO: 76162

SEQ ID NO: 76207 - DNA, 201 bp, Homo sapiens
agatatgctagagttgtgccaggggctctggcaacctgtgtccttccagatgcaggccatgctgctgggccacagcacagctggagccataggcaggctgmtggcatcctccccccgggccaccgtcacagtggagcacaacccagctgggggcgactatgcctctgtgaggacagcattgctggcagctagggctgtgga

SEQ ID NO: 76208 - DNA, 201 bp, Homo sapiens
acgtccgggataacactgctgtccaccaagtctactatgacatctttgagcctctcctggaacagctgctcacagatatgctagagttgtgccaggggctytggcaacctgtgtccttccagatgcaggccatgctgctgggccacagcacagctggagccataggcaggctgctggcatcctccccccgggccaccgtca

SEQ ID NO: 76209 - DNA, 201 bp, Homo sapiens
ccaggggctctggcaacctgtgtccttccagatgcaggccatgctgctgggccacagcacagctggagccataggcaggctgctggcatcctccccccggsccaccgtcacagtggagcacaacccagctgggggcgactatgcctctgtgaggacagcattgctggcagctagggctgtggacaggacccgagtctacta

SEQ ID NO: 76210 - DNA, 201 bp, Homo sapiens
caggccatgctgctgggccacagcacagctggagccataggcaggctgctggcatcctccccccgggccaccgtcacagtggagcacaacccagctggggrcgactatgcctctgtgaggacagcattgctggcagctagggctgtggacaggacccgagtctactacaggctaccccagggctaccacaaggacttgctg

SEQ ID NO: 76211 - DNA, 201 bp, Homo sapiens; identical to SEQ ID NO: 76207

SEQ ID NO: 76212 - DNA, 201 bp, Homo sapiens
ccattgttcatactccaagtggcaacatcctgacgctggagtcctgcctgcagcagctggccacacatcccggacactggggcatccatttgcaaatagcrgagcccgcagccctccggccatccctggccttgctggcacgcctctccagccttggcctcttgcattggcctgtgtgggttggggccaaaatctcccacg

SEQ ID NO: 76213 - DNA, 201 bp, Homo sapiens
aaccaatgtactacacgggaggcagcctgatccctcttctccagctgcctggggatgacggtctgaatgtggagtggctggttcctgacgtccagggcagyggtaaaacagcaacaatgaccctcccagacacagaaggcatgatcctgctgaacactggcctcgagggaactgtggctgaaaaccccgtgcccattgttc

SEQ ID NO: 76214 - DNA, 201 bp, Homo sapiens
tcccccacgtgactgtggcaccaggctggcctgaggaggtgctgggcagtggctacagggaacagctgctcacagatatgctagagttgtgccaggggctytggcaacctgtgtccttccagatgcaggccatgctgctgggccacagcacagctggagccataggcaggctgctggcatcctccccccgggccaccgtca

SEQ ID NO: 76215 - DNA, 201 bp, Homo sapiens; identical to SEQ ID NO: 76209

SEQ ID NO: 76216 - DNA, 201 bp, Homo sapiens
cccattgttcatactccaagtggcaacatcctgacgctggagtcctgcctgcagcagctggccacacatcccggacactggggcatccatttgcaaatagyggagcccgcagccctccggccatccctggccttgctggcacgcctctccagccttggcctcttgcattggcctgtgtgggttggggccaaaatctcccac

SEQ ID NO: 76217 - DNA, 201 bp, Homo sapiens; identical to SEQ ID NO: 76210

SEQ ID NO: 76218 - DNA, 170 bp, Homo sapiens
ggctgtggacaggacccgagtctactacaggctaccccagggctaccacaaggacttgctggctcatgttggtagaaactgagcacccaggggtggtgggycagcggacctcagggcggaggcttcccacggggaggcaggaagaaataaaggtctttggctttctccag

SEQ ID NO: 76219 - DNA, 198 bp, Homo sapiens
cacaagtggggtactgaaattcatgaaggaatttacaacatgttgatgctattaatagaactggtcgcagagagaataaaacaagatccaattcccaytggtctcctgggtgtgcttacaatggctttcaatcctgataatgaataccattttaaaaacagaatgaaagtgtctcaaaggaattgggcagaagtgttt

SEQ ID NO: 76220 - DNA, 201 bp, Homo sapiens
gattcaaccagggcctataaaaaccaaaggtgcctttagccgtctggacccaactggaacatttgagaaagaaatgattggcagaattccctgtggtcgcmtggggactgtagaagaactcgcaaatcttgctgctttcctttgtagtgattatgcttcttggattaatggagcagtcattaaatttgacggtggagagga

SEQ ID NO: 76221 - DNA, 156 bp, Homo sapiens
acggtggagaggaagtacttatttcaggggaattcaacgacctgagaaaggtcaccaaggagcagtgggacaccatagaagaactcatcaggaagacaaawggttcctaagaccactttggccttcatctatttcaagtctaataaattcttaatt

SEQ ID NO: 76222 - DNA, 146 bp, Homo sapiens
ggaagtacttatttcaggggaattcaacgacctgagaaaggtcaccaaggagcagtgggacaccatagaagaactcatcaggaagacaaaaggttcctaaraccactttggccttcatctatttcaagtctaataaattcttaatt

SEQ ID NO: 76223 - DNA, 201 bp, Homo sapiens; identical to SEQ ID NO: 76220

SEQ ID NO: 76224 - DNA, 201 bp, Homo sapiens
acggtggagaggaagtacttatttcaggggaattcaacgacctgagaaaggtcaccaaggagcagtgggacaccatagaagaactcatcaggaagacaaawggttcctaagaccactttggccttcatcttggttacagaaaagggaatagaaatgaaacaaattatctctcatcttttgactatttcaagtctaataaat

SEQ ID NO: 76225 - DNA, 190 bp, Homo sapiens
ctttggccttcatcttggttacagaaaagggaatagaaatgaaacaaattatctctcatcttttgactatttcaagtctaataaattcttaattaacaaamattcattgaatatgtattatgtgccaggccagtgatagccattgtatattcaaagataaataaaatgaaatatagtccttcaaaacatt

SEQ ID NO: 76226 - DNA, 201 bp, Homo sapiens
ggaagtacttatttcaggggaattcaacgacctgagaaaggtcaccaaggagcagtgggacaccatagaagaactcatcaggaagacaaaaggttcctaaraccactttggccttcatcttggttacagaaaagggaatagaaatgaaacaaattatctctcatcttttgactatttcaagtctaataaattcttaattaa

SEQ ID NO: 76227 - DNA, 201 bp, Homo sapiens
ttccggcattgattatgttgtggagtccactggtgtcttcactgccatggggaaggctaggactcattttcagggggtggggggagccaaaagggtcatcwtctctgccccctctgctgatggccccaagtttgtgatggacataaaccatgagaaacctggcaaatatgatgacatcaagaaagtggagggccccctcaa

SEQ ID NO: 76228 - DNA, 201 bp, Homo sapiens
aattgtatgtgcctgttttttactcttagcattagatgaattcaaatttggaaacagattgatagcaattttttctaaaaacattagacttttgttaacctttttttttttttttttaaatttgcttcaacaagctctccaccagttgactttctttggctaattttactttgcatgatatgccttaatatgccttcataa

SEQ ID NO: 76229 - DNA, 201 bp, Homo sapiens
attgtatgtgcctgttttttactcttagcattagatgaattcaaatttggaaacagattgatagcaattttttctaaaaacattagacttttgttaacctttttttttttttttttaaatttgcttcaacaagctctccaccagttgactttctttggctaattttactttgcatgatatgccttaatatgccttcataaa

SEQ ID NO: 76230 - DNA, 201 bp, Homo sapiens
tcatgaagtagcagatgagagggcagtcagtttagcacaaagcaatactaggctgaaggagagacctgagaactttcctaggtagatcaatccattgtatmattcagttcttctaaagcctacgttggttaggctgatggcagtattatagttgctaaattcagcactgtgttcctgttgtcgtggttcaagacccaccag

SEQ ID NO: 76231 - DNA, 201 bp, Homo sapiens
gatcttctggagagtgtatcccatgctgtggagcactctgtggaagccacgggtcctttagacagctcatcctatgaggagcacttcttaactggcactgrttctgagaacaaggctctgtgccatccctcgtctgttgactccctctccaccagcgcagccacggaggaccacgtctccatgggaggatgggcagcaagg

SEQ ID NO: 76232 - DNA, 201 bp, Homo sapiens
accatcaggtgcttggataatgtccaagatcttctggagagtgtatcccatgctgtggagcactctgtggaagccacgggtcctttagacagctcatcctrtgaggagcacttcttaactggcactgtttctgagaacaaggctctgtgccatccctcgtctgttgactccctctccaccagcgcagccacggaggaccac

SEQ ID NO: 76233 - DNA, 173 bp, Homo sapiens
ggtgctcttcgctccagtttggggaatgctggattctttcagcccctgcagccctccaggtcaaaatgacactttgtcactgagttttctacacagctctrttagtaactgacagcacacgccttcaagggaacttcaagggaaacatggaataaactaagtctcaattgcct

SEQ ID NO: 76234 - DNA, 201 bp, Homo sapiens
aattgccatctaaaatgggccgaacagtggatttcacaatagagttttcaccctttagatttacaacctgtcaggtggaaactgaagtgaaaactgctgcmcacagcaattcagggagcaaaaaatgtgctgaggagactgtttacctaaaggttgttcttggtgctattctttgtcaaaatgtgaacacacacaaatgag

SEQ ID NO: 76235 - DNA, 201 bp, Homo sapiens
caggtggaaactgaagtgaaaactgctgcccacagcaattcagggagcaaaaaatgtgctgaggagactgtttacctaaaggttgttcttggtgctattcyttgtcaaaatgtgaacacacacaaatgaggtttgtgcattgtcatccgtgggctgccattgagccagtaacccccagtggtctcatggtgctcttcgctc

SEQ ID NO: 76236 - DNA, 201 bp, Homo sapiens
ggtctccgaagagtggctgggctgatgctaaatacgtgctagaagcccatggattgaaaccagttattttaaaaccaaaagagggcctggcactcatcaaygggacgcagatgatcacatccctgggctgtgaagctgtagagcgagccagtgctattgcacggcaggctgacattgtggcagccctgacccttgaggtgc

SEQ ID NO: 76237 - DNA, 201 bp, Homo sapiens; identical to SEQ ID NO: 76228

SEQ ID NO: 76238 - DNA, 201 bp, Homo sapiens; identical to SEQ ID NO: 76229

SEQ ID NO: 76239 - DNA, 201 bp, Homo sapiens
agggacgctacaaaataaagctcaccccaacagctgagaagagggtgcagaaatccagggaggtcatagatagcatcataaaagagaaaacagttgtttayggtattactacaggttttgggaaatttgccagaactgtaattcctatcaataagctacaggagcttcaggtcaacttagtacgctcacattcttcaggtg

SEQ ID NO: 76240 - DNA, 201 bp, Homo sapiens
ccctggagaccctcaaacaagtcatagaaatgtttaatgcctcctgcctgccctatgtcccagagaaaggaaccgttggtgccagtggagaccttgccccrctctctcatcttgctcttgggctagttggagaagggaagatgtggtctccgaagagtggctgggctgatgctaaatacgtgctagaagcccatggattga

SEQ ID NO: 76241 - DNA, 201 bp, Homo sapiens; identical to SEQ ID NO: 76230

SEQ ID NO: 76242 - DNA, 201 bp, Homo sapiens
agcccatggattgaaaccagttattttaaaaccaaaagagggcctggcactcatcaatgggacgcagatgatcacatccctgggctgtgaagctgtagagygagccagtgctattgcacggcaggctgacattgtggcagccctgacccttgaggtgctgaagggcaccaccaaagcctttgacactgacattcatgctct

SEQ ID NO: 76243 - DNA, 201 bp, Homo sapiens
gggagcctgaaaagtacatcgagttagatggagaccgtctgaccacggaggatctggtcaacttgggaaagggacgctacaaaataaagctcaccccaacwgctgagaagagggtgcagaaatccagggaggtcatagatagcatcataaaagagaaaacagttgtttacggtattactacaggttttgggaaatttgcca

SEQ ID NO: 76244 - DNA, 201 bp, Homo sapiens
tgtggtgaatgatacaatagcatttgtgaagaacatcattaccacagaactgaacagcgcaacagataatcctatggtctttgccaataggggagagacartttctggaggaaacttccatggtgaatacccagccaaagccctagactacttggccattggcatccatgaacttgctgcaatcagtgagagaagaatcga

SEQ ID NO: 76245 - DNA, 201 bp, Homo sapiens
gcccttaatggcagagaacacagacagaaacgagggaagagagagaaattggggaccctgaagaaagggggccagcagcaggtaggtgccatcagggacamgaacagcacctcccagggtgggagaccccaggcctttctggcagcaggtctggatggaaagtggacaggaggctcacccgtctgcatcccctgctcctgc

SEQ ID NO: 76246 - DNA, 201 bp, Homo sapiens
ctctgcaatccctccctcagtgagctgcctgccttcctggtggctgaaggtggtctgaactctgggttcatgatagctcactgcacggcagcagcccttgrttctgagaacaaggctctgtgccatccctcgtctgttgactccctctccaccagcgcagccacggaggaccacgtctccatgggaggatgggcagcaagg

SEQ ID NO: 76247 - DNA, 173 bp, Homo sapiens; identical to SEQ ID NO: 76233

SEQ ID NO: 76248 - DNA, 201 bp, Homo sapiens; identical to SEQ ID NO: 76234

SEQ ID NO: 76249 - DNA, 201 bp, Homo sapiens; identical to SEQ ID NO: 76235

SEQ ID NO: 76250 - DNA, 201 bp, Homo sapiens
tgccggtggcccgagcccggtggcctcccggcgaccctcggcgcgaggcgacatggcaggcggccacagcctcctgctggagaacgcgcagcaagtggtgytggtgtgcgcccgcggcgagcgcttcctggcgcgggatgcgctgcgcagcctggcggtgctggaaggcgccagcctggtggtgggcaaagatggatttat

SEQ ID NO: 76251 - DNA, 201 bp, Homo sapiens
ccggacagcgcaggctgcggcttttcgtcctccactgagtcctgccggtggcccgagcccggtggcctcccggcgaccctcggcgcgaggcgacatggcargcggccacagcctcctgctggagaacgcgcagcaagtggtgctggtgtgcgcccgcggcgagcgcttcctggcgcgggatgcgctgcgcagcctggcggt

SEQ ID NO: 76252 - DNA, 201 bp, Homo sapiens
aagatggatttataaaagctattggtcctgctgatgttattcaaagacagttttctggagaaacttttgaagaaataattgactgctctgggaaatgtatyctaccaggtttggtggatgcacacacacatccagtatgggctggtgaaagagttcacgaatttgcaatgaagttggcaggagccacctacatggaaattc

SEQ ID NO: 76253 - DNA, 188 bp, Homo sapiens
ccagccccggacagcgcaggctgcggcttttcgtcctccactgagtcctgccggtggcccgagcccggtggcctcccggcgaccctcrgcgcgaggcgacatggcaggcggccacagcctcctgctggagaacgcgcagcaagtggtgctggtgtgcgcccgcggcgagcgcttcctggcgcgggatg

SEQ ID NO: 76254 - DNA, 201 bp, Homo sapiens
aagacacatcatttatacacaggcacaggggccttcctgaaatgggtgcatttttaccaactacaatcatgtaatttttttggaaattttttaaaattttygattctttacattacaattgggtgaaacacattttacagctctcaataaatgtttgctgtcgctcttattgttgttgtttcctttcagcctggaagtaga

SEQ ID NO: 76255 - DNA, 201 bp, Homo sapiens
ttctcaatctcagcaatagagcttcccagcagcgttcaagacacatcatttatacacaggcacaggggccttcctgaaatgggtgcatttttaccaactamaatcatgtaatttttttggaaattttttaaaattttcgattctttacattacaattgggtgaaacacattttacagctctcaataaatgtttgctgtcgc

SEQ ID NO: 76256 - DNA, 201 bp, Homo sapiens; identical to SEQ ID NO: 76250

SEQ ID NO: 76257 - DNA, 201 bp, Homo sapiens; identical to SEQ ID NO: 76251

SEQ ID NO: 76258 - DNA, 201 bp, Homo sapiens; identical to SEQ ID NO: 76252

SEQ ID NO: 76259 - DNA, 188 bp, Homo sapiens; identical to SEQ ID NO: 76253

SEQ ID NO: 76260 - DNA, 201 bp, Homo sapiens; identical to SEQ ID NO: 76254

SEQ ID NO: 76261 - DNA, 201 bp, Homo sapiens; identical to SEQ ID NO: 76255

SEQ ID NO: 76262 - DNA, 201 bp, Homo sapiens
ccgcactgtgcctgaattttaactgcatgctaattctaatacctgtcagtcgaaaccttatttcattcataagaggaacaagtatttgctgcagaggaccrtggaggaggcaattagacaaaaacctcagatttcacaaactggtcgcctatgggatagctgttaatgcaaccatccacatcgtggcgcatttcttcaacc

SEQ ID NO: 76263 - DNA, 201 bp, Homo sapiens
agcgtggctttaaaatggcgccagggcagtacatcttggtgcagtgcccagccatatcttcgctggagtggcaccccttcacccttacctctgccccccargaagactttttcagcgtgcacatccgggcagcaggagactggacagcagcgctactggaggcctttggggcagagggacaggccctccaggagccctgga

SEQ ID NO: 76264 - DNA, 201 bp, Homo sapiens
gtggctttaaaatggcgccagggcagtacatcttggtgcagtgcccagccatatcttcgctggagtggcaccccttcacccttacctctgccccccaggargactttttcagcgtgcacatccgggcagcaggagactggacagcagcgctactggaggcctttggggcagagggacaggccctccaggagccctggagcc

SEQ ID NO: 76265 - DNA, 201 bp, Homo sapiens
ccattacacacgagttattttgggttcaacactggcttgggcacgagcatccgcactgtgcctgaattttaactgcatgctaattctaatacctgtcagtmgaaaccttatttcattcataagaggaacaagtatttgctgcagaggaccgtggaggaggcaattagacaaaaacctcagatttcacaaactggtcgccta

SEQ ID NO: 76266 - DNA, 201 bp, Homo sapiens
agcctaacaagtgccaacttacagatgattacgcattttgaattctaatgaactgttttaaccttcaggaagaattgtaaagacctgtacatagcacaacwtgatccggataatatatatactgttcatgtacatccacaaatacaccttgtaccaaataatgctttcttgtagtagaataagaatcgtgtaaattctaag

SEQ ID NO: 76267 - DNA, 201 bp, Homo sapiens
caacttacagatgattacgcattttgaattctaatgaactgttttaaccttcaggaagaattgtaaagacctgtacatagcacaacatgatccggataatatatatactgttcatgtacatccacaaatacaccttgtaccaaataatgctttcttgtagtagaataagaatcgtgtaaattctaagagattttagcaggt

SEQ ID NO: 76268 - DNA, 201 bp, Homo sapiens
aacttacagatgattacgcattttgaattctaatgaactgttttaaccttcaggaagaattgtaaagacctgtacatagcacaacatgatccggataatatatatactgttcatgtacatccacaaatacaccttgtaccaaataatgctttcttgtagtagaataagaatcgtgtaaattctaagagattttagcaggtt

SEQ ID NO: 76269 - DNA, 201 bp, Homo sapiens
cagggacaactatttttgaactttaagtgccactttaatgcagttagtttgataaaaccatgtgggttttttttttagggctagctctacgggagtggaaktgagagccaggcatgagtgcgtctccacatgcttttccacctgccctgagtgtgttacatactgaaacaggcctacatagatgttacaacttcccttcct

SEQ ID NO: 76270 - DNA, 201 bp, Homo sapiens
cattatacaaacccacaaaccttatagaaactcgtaagtgtgttgtgactggaaattgattcattagaacccagttttctttaagaactttgtgacttggttttttttttccttttccaaagactgtaaaaatagttgccccaaaatgtcagcactgcacaccctccagggacttggaatacaatcctttttacttttttt

SEQ ID NO: 76271 - DNA, 201 bp, Homo sapiens
acttggttttttttttccttttccaaagactgtaaaaatagttgccccaaaatgtcagcactgcacaccctccagggacttggaatacaatcctttttacttttttttttttttttttaagaaactgggtctctctgtcacccaggctggagtgcagtggcaacgatcatagctaactgcagctttgacctcctgggctca

SEQ ID NO: 76272 - DNA, 201 bp, Homo sapiens
tcgtagaggcatatagatttcagtctgtgcttgtatgggatagatgatctgagtggctttctggcctcttttttgagtttaaaatccatatgaggttgacktgtcatactaaggtaacatgtttgtgagattttatttgatatgcccactcaccctcgacgaatctgcccgctttgggctgtggtgcctgtgtatctttgc

SEQ ID NO: 76273 - DNA, 201 bp, Homo sapiens
gccaacttacagatgattacgcattttgaattctaatgaactgttttaaccttcaggaagaattgtaaagacctgtacatagcacaacatgatccggataatatatatactgttcatgtacatccacaaatacaccttgtaccaaataatgctttcttgtagtagaataagaatcgtgtaaattctaagagattttagcag

SEQ ID NO: 76274 - DNA, 201 bp, Homo sapiens
ccaacttacagatgattacgcattttgaattctaatgaactgttttaaccttcaggaagaattgtaaagacctgtacatagcacaacatgatccggataatatatatactgttcatgtacatccacaaatacaccttgtaccaaataatgctttcttgtagtagaataagaatcgtgtaaattctaagagattttagcagg

SEQ ID NO: 76275 - DNA, 164 bp, Homo sapiens
tttttagttctgtaatttgttgattgtatttaactatgtgagttctgttgtgatgtttactgtattgtaaagcacctcattcatgtgatgagtgctctatraatcaataaatgatgacttagaggctgtatcacgagctattttggttttaggatgcaggtctc

SEQ ID NO: 76276 - DNA, 201 bp, Homo sapiens; identical to SEQ ID NO: 76266

SEQ ID NO: 76277 - DNA, 201 bp, Homo sapiens; identical to SEQ ID NO: 76267

SEQ ID NO: 76278 - DNA, 201 bp, Homo sapiens; identical to SEQ ID NO: 76268

SEQ ID NO: 76279 - DNA, 201 bp, Homo sapiens; identical to SEQ ID NO: 76269

SEQ ID NO: 76280 - DNA, 201 bp, Homo sapiens; identical to SEQ ID NO: 76270

SEQ ID NO: 76281 - DNA, 201 bp, Homo sapiens; identical to SEQ ID NO: 76271

SEQ ID NO: 76282 - DNA, 129 bp, Homo sapiens
tcgtagaggcatatagatttcagtctgtgcttgtatgggatagatgatctgagtggctttctggcctcttttttgagtttaaaatccatatgaggttgacktgtcatactaaggtaacatgtttgtgag

SEQ ID NO: 76283 - DNA, 201 bp, Homo sapiens; identical to SEQ ID NO: 76273

SEQ ID NO: 76284 - DNA, 201 bp, Homo sapiens; identical to SEQ ID NO: 76274

SEQ ID NO: 76285 - DNA, 201 bp, Homo sapiens
aaatggagaatttaaaagaaaagttgcccgctgtgtaagaaaaagccaagagactgcttttgagtttactattgcttttcttcataattttaccaaatttkcatgtttaaacaatgtatttcatgattttgaactgtttatatgtggaatgataatgaatgcattcttctgttacttttattgctcaatattcttcaaatt

SEQ ID NO: 76286 - DNA, 201 bp, Homo sapiens; identical to SEQ ID NO: 76266

SEQ ID NO: 76287 - DNA, 201 bp, Homo sapiens; identical to SEQ ID NO: 76267

SEQ ID NO: 76288 - DNA, 201 bp, Homo sapiens; identical to SEQ ID NO: 76268

SEQ ID NO: 76289 - DNA, 201 bp, Homo sapiens; identical to SEQ ID NO: 76269

SEQ ID NO: 76290 - DNA, 201 bp, Homo sapiens; identical to SEQ ID NO: 76270

SEQ ID NO: 76291 - DNA, 201 bp, Homo sapiens; identical to SEQ ID NO: 76271

SEQ ID NO: 76292 - DNA, 201 bp, Homo sapiens; identical to SEQ ID NO: 76272

SEQ ID NO: 76293 - DNA, 201 bp, Homo sapiens; identical to SEQ ID NO: 76273

SEQ ID NO: 76294 - DNA, 201 bp, Homo sapiens; identical to SEQ ID NO: 76274

SEQ ID NO: 76295 - DNA, 164 bp, Homo sapiens; identical to SEQ ID NO: 76275

SEQ ID NO: 76296 - DNA, 201 bp, Homo sapiens
catctttggggacacggaagacgtggcgggcaaggcctacacgggccgcgagtttgatgacctcagccccgagcagcagcgccaggcctgccgcaccgccygctgcttcgcccgcgtggagcccgcacacaagtcccgcatcgtggagaacctgcagtcctttaacgagatcactgctatgactggcgatggagtgaacga

SEQ ID NO: 76297 - DNA, 201 bp, Homo sapiens
catgggctcaggcacggccgtggccaagtcggcggcagagatggtgctgtcagatgacaactttgcctccatcgtggctgcggtggaggagggccgggccmtctacagcaacatgaagcaattcatccgctacctcatctcctccaatgttggcgaggtcgtctgcatcttcctcacggcaattctgggcctgcccgaagc

SEQ ID NO: 76298 - DNA, 201 bp, Homo sapiens
cgtggccgtgtgggtcatcaacatcggccacttcgccgacccggcccacggtggctcctggctgcgtggcgctgtctactacttcaagatcgccgtggccytggcggtggcggccatccccgagggcctcccggctgtcatcactacatgcctggcactgggcacgcggcgcatggcacgcaagaacgccatcgtgcgaag

SEQ ID NO: 76299 - DNA, 201 bp, Homo sapiens
ctaccaggcgggcatccgcgtggtcatgatcacgggggataacaaaggcactgccgtggccatctgccgcaggcttggcatctttggggacacggaagacrtggcgggcaaggcctacacgggccgcgagtttgatgacctcagccccgagcagcagcgccaggcctgccgcaccgcccgctgcttcgcccgcgtggagcc

SEQ ID NO: 76300 - DNA, 201 bp, Homo sapiens
tggcctggttcgaggagggcgaggagaccacgaccgccttcgtggagcccctggtcatcatgctgatcctcgtggccaacgccattgtgggcgtgtggcargaacgcaacgccgagagtgccatcgaggccctgaaggagtatgagcctgagatgggcaaggtgatccgctcggaccgcaagggcgtgcagaggatccgtg

SEQ ID NO: 76301 - DNA, 201 bp, Homo sapiens
ccgagggcgaagtgcggcagggggatcagcctgtgcgctgcggccagttcgacgggctggtggagctggcgaccatctgcgccctgtgcaacgactcggckctggactacaacgaggccaagggtgtgtatgagaaggtgggagaggccacggagacagctctgacttgcctggtggagaagatgaacgtgttcgacaccg

SEQ ID NO: 76302 - DNA, 201 bp, Homo sapiens
gcaacgactcggctctggactacaacgaggccaagggtgtgtatgagaaggtgggagaggccacggagacagctctgacttgcctggtggagaagatgaaygtgttcgacaccgacctgcaggctctgtcccgggtggagcgagctggcgcctgtaacacgggggctcctgagagtgtgatcgagcgctgtagctcagtcc

SEQ ID NO: 76303 - DNA, 201 bp, Homo sapiens
ccggcatcgactgtgaggtgttcgagtcacgcttccccaccaccatggccttgtccgtgctcgtgaccattgaaatgtgcaatgccctcaacagcgtctcrgagaaccagtcgctgctgcggatgccgccctggatgaacccctggctgctggtggctgtggccatgtccatggccctgcacttcctcatcctgctcgtgc

SEQ ID NO: 76304 - DNA, 201 bp, Homo sapiens
ccctgacccccacctccagggagcagatcctggcaaagatccgggattggggctcaggctcagacacgctgcgctgcctggcactggccacccgggacgcscccccaaggaaggaggacatggagctggacgactgcagcaagtttgtgcagtacgagacggacctgaccttcgtgggctgcgtaggcatgctggacccgc

SEQ ID NO: 76305 - DNA, 201 bp, Homo sapiens
ccaatgttggcgaggtcgtctgcatcttcctcacggcaattctgggcctgcccgaagccctgatccctgtgcagctgctctgggtgaacctggtgacagayggcctacctgccacggctctgggcttcaacccgccagacctggacatcatggagaagctgccccggagcccccgagaagccctcatcagtggctggctct

SEQ ID NO: 76306 - DNA, 201 bp, Homo sapiens
tggcctggttcgaggagggcgaggagaccacgaccgccttcgtggagcccctggtcatcatgctgatcctcgtggccaacgccattgtgggcgtgtggcadgaacgcaacgccgagagtgccatcgaggccctgaaggagtatgagcctgagatgggcaaggtgatccgctcggaccgcaagggcgtgcagaggatccgtg

SEQ ID NO: 76307 - DNA, 201 bp, Homo sapiens
ccttcgtgggctgcgtaggcatgctggacccgccgcgacctgaggtggctgcctgcatcacacgctgctaccaggcgggcatccgcgtggtcatgatcacrggggataacaaaggcactgccgtggccatctgccgcaggcttggcatctttggggacacggaagacgtggcgggcaaggcctacacgggccgcgagtttg

SEQ ID NO: 76308 - DNA, 201 bp, Homo sapiens
ccgagtcccccgcgccccgctttgtagccccccggcggagaggcggcctcgacggtgcggacggcgcagacggccgggcgggcggcatggaggcggcgcayctgctcccggccgccgacgtgctgcgccacttctcggtgacagccgagggcggcctgagcccggcgcaggtgaccggcgcgcgggagcgctacggcccca

SEQ ID NO: 76309 - DNA, 201 bp, Homo sapiens
ccgaagccctgatccctgtgcagctgctctgggtgaacctggtgacagacggcctacctgccacggctctgggcttcaacccgccagacctggacatcatrgagaagctgccccggagcccccgagaagccctcatcagtggctggctcttcttccgatacctggctatcggagtgtacgtaggcctggccacagtggctg

SEQ ID NO: 76310 - DNA, 201 bp, Homo sapiens
tctggactacaacgaggccaagggtgtgtatgagaaggtgggagaggccacggagacagctctgacttgcctggtggagaagatgaacgtgttcgacaccracctgcaggctctgtcccgggtggagcgagctggcgcctgtaacacgggggctcctgagagtgtgatcgagcgctgtagctcagtccgcgtggggagccg

SEQ ID NO: 76311 - DNA, 201 bp, Homo sapiens
aggcctgccgcaccgcccgctgcttcgcccgcgtggagcccgcacacaagtcccgcatcgtggagaacctgcagtcctttaacgagatcactgctatgacyggcgatggagtgaacgacgcaccagccctgaagaaagcagagatcggcatcgccatgggctcaggcacggccgtggccaagtcggcggcagagatggtgc

SEQ ID NO: 76312 - DNA, 201 bp, Homo sapiens
ctgtgcgctgcggccagttcgacgggctggtggagctggcgaccatctgcgccctgtgcaacgactcggctctggactacaacgaggccaagggtgtgtaygagaaggtgggagaggccacggagacagctctgacttgcctggtggagaagatgaacgtgttcgacaccgacctgcaggctctgtcccgggtggagcgag

SEQ ID NO: 76313 - DNA, 201 bp, Homo sapiens
gacggcagctgtcccacgccatctctgtgatctgcgtggccgtgtgggtcatcaacatcggccacttcgccgacccggcccacggtggctcctggctgcgyggcgctgtctactacttcaagatcgccgtggccctggcggtggcggccatccccgagggcctcccggctgtcatcactacatgcctggcactgggcacgc

SEQ ID NO: 76314 - DNA, 201 bp, Homo sapiens
tacacgggccgcgagtttgatgacctcagccccgagcagcagcgccaggcctgccgcaccgcccgctgcttcgcccgcgtggagcccgcacacaagtcccrcatcgtggagaacctgcagtcctttaacgagatcactgctatgactggcgatggagtgaacgacgcaccagccctgaagaaagcagagatcggcatcgcc

SEQ ID NO: 76315 - DNA, 201 bp, Homo sapiens; identical to SEQ ID NO: 76300

SEQ ID NO: 76316 - DNA, 201 bp, Homo sapiens; identical to SEQ ID NO: 76308

SEQ ID NO: 76317 - DNA, 201 bp, Homo sapiens; identical to SEQ ID NO: 76313

SEQ ID NO: 76318 - DNA, 201 bp, Homo sapiens; identical to SEQ ID NO: 76298

SEQ ID NO: 76319 - DNA, 201 bp, Homo sapiens; identical to SEQ ID NO: 76306

SEQ ID NO: 76320 - DNA, 201 bp, Homo sapiens; identical to SEQ ID NO: 76296

SEQ ID NO: 76321 - DNA, 201 bp, Homo sapiens; identical to SEQ ID NO: 76297

SEQ ID NO: 76322 - DNA, 201 bp, Homo sapiens
cagatatctctgcctgtcatcctgctggatgaggccctcaagtacctgtcccggaaccacatgcacgaagaaatgagccagaagtgagcgctgggaacagrgtggagtctccggtgtgtacctcagactgatggtgcccatgtgttcgcctccgccccccacccttgccaccacactcgcccacttgcccaccgggtcccg

SEQ ID NO: 76323 - DNA, 201 bp, Homo sapiens
atggacagaatttttctcttaactcagcttttgctactttggcaaaaactagcgaggggtagcagaaacctgcaccaaggattgtccctatgtcttggccmctcctagagcgtgtgcagactgatgattttatatgtaaatcaagactcacatccctttcctagtcccccacatccaaagcccctcagcctgccttgcaga

SEQ ID NO: 76324 - DNA, 201 bp, Homo sapiens; identical to SEQ ID NO: 76298

SEQ ID NO: 76325 - DNA, 201 bp, Homo sapiens; identical to SEQ ID NO: 76299

SEQ ID NO: 76326 - DNA, 201 bp, Homo sapiens; identical to SEQ ID NO: 76300

SEQ ID NO: 76327 - DNA, 201 bp, Homo sapiens; identical to SEQ ID NO: 76301

SEQ ID NO: 76328 - DNA, 201 bp, Homo sapiens
gcaacgactcggctctggactacaacgaggccaagggtgtgtatgagaaggtgggagaggccacggagacagctctgacttgcctggtggagaagatgaaygtgttcgacaccgacctgcaggctctgtcccgggtggagcgagctggcgcctgtaacacggtcatcaagcagctgatgcggaaggagttcaccctggagt

SEQ ID NO: 76329 - DNA, 201 bp, Homo sapiens; identical to SEQ ID NO: 76303

SEQ ID NO: 76330 - DNA, 201 bp, Homo sapiens; identical to SEQ ID NO: 76304

SEQ ID NO: 76331 - DNA, 201 bp, Homo sapiens
gtacagcgagggtgggcagccccctccactccactctgcttccacaaagtcggctcccgagagctcgaggctgcttctgtttatatgtgcagggcccgggsgggtgaagggtcagagagacggacacaaggagccggcaggagggcggagcgaggatgtcctttcccgggagacaagtcgggaaagcctggctggactgcc

SEQ ID NO: 76332 - DNA, 201 bp, Homo sapiens; identical to SEQ ID NO: 76305

SEQ ID NO: 76333 - DNA, 201 bp, Homo sapiens; identical to SEQ ID NO: 76306

SEQ ID NO: 76334 - DNA, 201 bp, Homo sapiens; identical to SEQ ID NO: 76307

SEQ ID NO: 76335 - DNA, 201 bp, Homo sapiens; identical to SEQ ID NO: 76308

SEQ ID NO: 76336 - DNA, 201 bp, Homo sapiens; identical to SEQ ID NO: 76309

SEQ ID NO: 76337 - DNA, 201 bp, Homo sapiens
tctggactacaacgaggccaagggtgtgtatgagaaggtgggagaggccacggagacagctctgacttgcctggtggagaagatgaacgtgttcgacaccracctgcaggctctgtcccgggtggagcgagctggcgcctgtaacacggtcatcaagcagctgatgcggaaggagttcaccctggagttctcccgagaccg

SEQ ID NO: 76338 - DNA, 201 bp, Homo sapiens
ctgtgtacagcgagggtgggcagccccctccactccactctgcttccacaaagtcggctcccgagagctcgaggctgcttctgtttatatgtgcagggccygggcgggtgaagggtcagagagacggacacaaggagccggcaggagggcggagcgaggatgtcctttcccgggagacaagtcgggaaagcctggctggac

SEQ ID NO: 76339 - DNA, 201 bp, Homo sapiens; identical to SEQ ID NO: 76312

SEQ ID NO: 76340 - DNA, 201 bp, Homo sapiens; identical to SEQ ID NO: 76311

SEQ ID NO: 76341 - DNA, 201 bp, Homo sapiens
tacagcgagggtgggcagccccctccactccactctgcttccacaaagtcggctcccgagagctcgaggctgcttctgtttatatgtgcagggcccgggcsggtgaagggtcagagagacggacacaaggagccggcaggagggcggagcgaggatgtcctttcccgggagacaagtcgggaaagcctggctggactgcct

SEQ ID NO: 76342 - DNA, 201 bp, Homo sapiens; identical to SEQ ID NO: 76313

SEQ ID NO: 76343 - DNA, 201 bp, Homo sapiens
cggtcatcaagcagctgatgcggaaggagttcaccctggagttctcccgagaccggaaatccatgtccgtgtactgcacgcccacccgccctcaccctacyggccagggcagcaagatgtttgtgaagggggctcctgagagtgtgatcgagcgctgtagctcagtccgcgtggggagccgcacagcacccctgaccccca

SEQ ID NO: 76344 - DNA, 201 bp, Homo sapiens; identical to SEQ ID NO: 76314

SEQ ID NO: 76345 - DNA, 201 bp, Homo sapiens; identical to SEQ ID NO: 76296

SEQ ID NO: 76346 - DNA, 201 bp, Homo sapiens; identical to SEQ ID NO: 76297

SEQ ID NO: 76347 - DNA, 201 bp, Homo sapiens; identical to SEQ ID NO: 76322

SEQ ID NO: 76348 - DNA, 201 bp, Homo sapiens; identical to SEQ ID NO: 76323

SEQ ID NO: 76349 - DNA, 201 bp, Homo sapiens; identical to SEQ ID NO: 76298

SEQ ID NO: 76350 - DNA, 201 bp, Homo sapiens; identical to SEQ ID NO: 76299

SEQ ID NO: 76351 - DNA, 201 bp, Homo sapiens; identical to SEQ ID NO: 76300

SEQ ID NO: 76352 - DNA, 201 bp, Homo sapiens; identical to SEQ ID NO: 76301

SEQ ID NO: 76353 - DNA, 201 bp, Homo sapiens; identical to SEQ ID NO: 76328

SEQ ID NO: 76354 - DNA, 201 bp, Homo sapiens; identical to SEQ ID NO: 76303

SEQ ID NO: 76355 - DNA, 201 bp, Homo sapiens; identical to SEQ ID NO: 76304

SEQ ID NO: 76356 - DNA, 201 bp, Homo sapiens; identical to SEQ ID NO: 76331

SEQ ID NO: 76357 - DNA, 201 bp, Homo sapiens; identical to SEQ ID NO: 76305

SEQ ID NO: 76358 - DNA, 201 bp, Homo sapiens; identical to SEQ ID NO: 76306

SEQ ID NO: 76359 - DNA, 201 bp, Homo sapiens; identical to SEQ ID NO: 76307

SEQ ID NO: 76360 - DNA, 201 bp, Homo sapiens; identical to SEQ ID NO: 76308

SEQ ID NO: 76361 - DNA, 201 bp, Homo sapiens; identical to SEQ ID NO: 76309

SEQ ID NO: 76362 - DNA, 201 bp, Homo sapiens; identical to SEQ ID NO: 76337

SEQ ID NO: 76363 - DNA, 201 bp, Homo sapiens; identical to SEQ ID NO: 76338

SEQ ID NO: 76364 - DNA, 201 bp, Homo sapiens; identical to SEQ ID NO: 76312

SEQ ID NO: 76365 - DNA, 201 bp, Homo sapiens; identical to SEQ ID NO: 76311

SEQ ID NO: 76366 - DNA, 201 bp, Homo sapiens; identical to SEQ ID NO: 76341

SEQ ID NO: 76367 - DNA, 201 bp, Homo sapiens; identical to SEQ ID NO: 76313

SEQ ID NO: 76368 - DNA, 201 bp, Homo sapiens; identical to SEQ ID NO: 76343

SEQ ID NO: 76369 - DNA, 201 bp, Homo sapiens; identical to SEQ ID NO: 76314

SEQ ID NO: 76370 - DNA, 201 bp, Homo sapiens; identical to SEQ ID NO: 76296

SEQ ID NO: 76371 - DNA, 201 bp, Homo sapiens; identical to SEQ ID NO: 76297

SEQ ID NO: 76372 - DNA, 201 bp, Homo sapiens
tcaggacagtctcgcaggcctggagtaggcagccgctgaccacctcttggaccccagaccacaccggaagaaatgagccagaagtgagcgctgggaacagrgtggagtctccggtgtgtacctcagactgatggtgcccatgtgttcgcctccgccccccacccttgccaccacactcgcccacttgcccaccgggtcccg

SEQ ID NO: 76373 - DNA, 201 bp, Homo sapiens; identical to SEQ ID NO: 76323

SEQ ID NO: 76374 - DNA, 201 bp, Homo sapiens; identical to SEQ ID NO: 76298

SEQ ID NO: 76375 - DNA, 201 bp, Homo sapiens; identical to SEQ ID NO: 76299

SEQ ID NO: 76376 - DNA, 201 bp, Homo sapiens; identical to SEQ ID NO: 76300

SEQ ID NO: 76377 - DNA, 201 bp, Homo sapiens; identical to SEQ ID NO: 76301

SEQ ID NO: 76378 - DNA, 201 bp, Homo sapiens; identical to SEQ ID NO: 76328

SEQ ID NO: 76379 - DNA, 201 bp, Homo sapiens; identical to SEQ ID NO: 76303

SEQ ID NO: 76380 - DNA, 201 bp, Homo sapiens; identical to SEQ ID NO: 76304

SEQ ID NO: 76381 - DNA, 201 bp, Homo sapiens; identical to SEQ ID NO: 76331

SEQ ID NO: 76382 - DNA, 201 bp, Homo sapiens; identical to SEQ ID NO: 76305

SEQ ID NO: 76383 - DNA, 201 bp, Homo sapiens; identical to SEQ ID NO: 76306

SEQ ID NO: 76384 - DNA, 201 bp, Homo sapiens; identical to SEQ ID NO: 76307

SEQ ID NO: 76385 - DNA, 201 bp, Homo sapiens; identical to SEQ ID NO: 76308

SEQ ID NO: 76386 - DNA, 201 bp, Homo sapiens; identical to SEQ ID NO: 76309

SEQ ID NO: 76387 - DNA, 201 bp, Homo sapiens; identical to SEQ ID NO: 76337

SEQ ID NO: 76388 - DNA, 201 bp, Homo sapiens; identical to SEQ ID NO: 76338

SEQ ID NO: 76389 - DNA, 201 bp, Homo sapiens; identical to SEQ ID NO: 76312

SEQ ID NO: 76390 - DNA, 201 bp, Homo sapiens; identical to SEQ ID NO: 76311

SEQ ID NO: 76391 - DNA, 201 bp, Homo sapiens; identical to SEQ ID NO: 76341

SEQ ID NO: 76392 - DNA, 201 bp, Homo sapiens; identical to SEQ ID NO: 76313

SEQ ID NO: 76393 - DNA, 201 bp, Homo sapiens; identical to SEQ ID NO: 76343

SEQ ID NO: 76394 - DNA, 201 bp, Homo sapiens; identical to SEQ ID NO: 76314

SEQ ID NO: 76395 - DNA, 201 bp, Homo sapiens
gactgcttgactgaagtatacaggagctgccaggggatcctggcacaccagaaagccacatcaacaagcccatgagccccagcgttcagaaggccagcatygtcttccatgggagatgactcttaagccataagggttggttttccgtactccaaaccatcaggtggacacagtcctaggaaccattatggatatagtgca

SEQ ID NO: 76396 - DNA, 201 bp, Homo sapiens
atgtcaaaagtaatgtcagcaaagaacattgggaaattgctaagcatgttcaggtttactttgttgatgtttgtgaagcaaaacaatgggaaactgacatyagatgtcttgagaaagctatattttccattagtgccccttgtgtaaagttacaaaaaaaacaagccctccaggaactggttagcaggaagaaatgtccta

SEQ ID NO: 76397 - DNA, 201 bp, Homo sapiens
tctaaactttgccagctactgggcctccacatttgctccccttgccaccaccctccagtctatgttaagggatgtatctgtactttttcatagcctacctytaaattgattttttttttttttttggtagagacaggtctcactatgttgcgctggctggtctcaaacttccagacccaagcatcctcctgccttggcctc

SEQ ID NO: 76398 - DNA, 201 bp, Homo sapiens
gagctgcactggccccggtgctggcatctggtggagcggacccactcccctcacattccacaggcccatggactcacttttgtaacaaactcctaccaacmctgaccaataaaaaaaaatgtgggttttttttttttttaatatataatgtgtgggcctggttcttgagcctgcagcacctcccctaggcctacatcccaa

SEQ ID NO: 76399 - DNA, 201 bp, Homo sapiens
ggacatctttctttgagtgaccgtctgtgcaggccctgtagtccgccacagggctctgagctgcactggccccggtgctggcatctggtggagcggacccmctcccctcacattccacaggcccatggactcacttttgtaacaaactcctaccaacactgaccaataaaaaaaaatgtgggttttttttttttttaatat

SEQ ID NO: 76400 - DNA, 201 bp, Homo sapiens
gaggtggagaagccctttgccatcgccaaggagtagggcacagggacatctttctttgagtgaccgtctgtgcaggccctgtagtccgccacagggctctsagctgcactggccccggtgctggcatctggtggagcggacccactcccctcacattccacaggcccatggactcacttttgtaacaaactcctaccaaca

SEQ ID NO: 76401 - DNA, 201 bp, Homo sapiens
attttgtggccttagctacaggagagaaaggatttggctacaaaaacagcaaattccatcgtgtaatcaaggacttcatgatccagggcggagacttcacyaggggagatggcacaggaggaaagagcatctacggtgagcgcttccccgatgagaacttcaaactgaagcactacgggcctggctgggtgagcatggcca

SEQ ID NO: 76402 - DNA, 201 bp, Homo sapiens
cagggacatctttctttgagtgaccgtctgtgcaggccctgtagtccgccacagggctctgagctgcactggccccggtgctggcatctggtggagcggamccactcccctcacattccacaggcccatggactcacttttgtaacaaactcctaccaacactgaccaataaaaaaaaatgtgggttttttttttttttaa

SEQ ID NO: 76403 - DNA, 201 bp, Homo sapiens
aaggagtagggcacagggacatctttctttgagtgaccgtctgtgcaggccctgtagtccgccacagggctctgagctgcactggccccggtgctggcatytggtggagcggacccactcccctcacattccacaggcccatggactcacttttgtaacaaactcctaccaacactgaccaataaaaaaaaatgtgggttt

SEQ ID NO: 76404 - DNA, 201 bp, Homo sapiens
ataaacccctgaaggatgtgatcatcgcagactgcggcaagatcgaggtggagaagccctttgccatcgccaaggagtagggcacagggacatctttcttwgagtgaccgtctgtgcaggccctgtagtccgccacagggctctgagctgcactggccccggtgctggcatctggtggagcggacccactcccctcacatt

SEQ ID NO: 76405 - DNA, 201 bp, Homo sapiens
tcgaggtggagaagccctttgccatcgccaaggagtagggcacagggacatctttctttgagtgaccgtctgtgcaggccctgtagtccgccacagggctytgagctgcactggccccggtgctggcatctggtggagcggacccactcccctcacattccacaggcccatggactcacttttgtaacaaactcctaccaa

SEQ ID NO: 76406 - DNA, 201 bp, Homo sapiens
gctacccaggaaaagtcaggcaggagcttttgccccctgcttctaaactttgccagctactgggcctccacatttgctccccttgccaccaccctccagtytatgttaagggatgtatctgtactttttcatagcctacctctaaattgattttttttttttttttggtagagacaggtctcactatgttgcgctggctgg

SEQ ID NO: 76407 - DNA, 201 bp, Homo sapiens
gagggcatggaggtggtgcggaaggtggagagcaccaagacagacagccgggataaacccctgaaggatgtgatcatcgcagactgcggcaagatcgaggyggagaagccctttgccatcgccaaggagtagggcacagggacatctttctttgagtgaccgtctgtgcaggccctgtagtccgccacagggctctgagct

SEQ ID NO: 76408 - DNA, 201 bp, Homo sapiens
ctttgccatcgccaaggagtagggcacagggacatctttctttgagtgaccgtctgtgcaggccctgtagtccgccacagggctctgagctgcactggccycggtgctggcatctggtggagcggacccactcccctcacattccacaggcccatggactcacttttgtaacaaactcctaccaacactgaccaataaaaa

SEQ ID NO: 76409 - DNA, 201 bp, Homo sapiens
gcctcagctgtccgggctgctttcgcctccgcctgtggatgctgcgcctctccgaacgcaacatgaaggtgctccttgccgccgccctcatcgcggggtcmgtcttcttcctgctgctgccgggaccttctgcggccgatgagaagaagaaggggcccaaagtcaccgtcaaggtgtattttgacctacgaattggagatg

SEQ ID NO: 76410 - DNA, 201 bp, Homo sapiens; identical to SEQ ID NO: 76397

SEQ ID NO: 76411 - DNA, 201 bp, Homo sapiens; identical to SEQ ID NO: 76398

SEQ ID NO: 76412 - DNA, 201 bp, Homo sapiens; identical to SEQ ID NO: 76399

SEQ ID NO: 76413 - DNA, 201 bp, Homo sapiens; identical to SEQ ID NO: 76400

SEQ ID NO: 76414 - DNA, 201 bp, Homo sapiens; identical to SEQ ID NO: 76401

SEQ ID NO: 76415 - DNA, 201 bp, Homo sapiens; identical to SEQ ID NO: 76402

SEQ ID NO: 76416 - DNA, 201 bp, Homo sapiens; identical to SEQ ID NO: 76403

SEQ ID NO: 76417 - DNA, 201 bp, Homo sapiens; identical to SEQ ID NO: 76404

SEQ ID NO: 76418 - DNA, 201 bp, Homo sapiens; identical to SEQ ID NO: 76405

SEQ ID NO: 76419 - DNA, 201 bp, Homo sapiens; identical to SEQ ID NO: 76406

SEQ ID NO: 76420 - DNA, 201 bp, Homo sapiens; identical to SEQ ID NO: 76407

SEQ ID NO: 76421 - DNA, 201 bp, Homo sapiens; identical to SEQ ID NO: 76408

SEQ ID NO: 76422 - DNA, 201 bp, Homo sapiens; identical to SEQ ID NO: 76409

SEQ ID NO: 76423 - DNA, 201 bp, Homo sapiens
ccacgaccacgcaggccaagggactgagagcgaggagcaggaaggcgacagcccctaggggccggcccaacttagacgcggctctcctccggcagggcccycagagggcagaagcagcgtggaggggccctcacgcagcagcccagccactttctgagtgttgtcctggggctctttggaacgccatcttcctcccactta

SEQ ID NO: 76424 - DNA, 201 bp, Homo sapiens
cagcagtggcagcgggcctgaccacgaccacgcaggccaagggactgagagcgaggagcaggaaggcgacagcccctaggggccggcccaacttagacgcrgctctcctccggcagggcccccagagggcagaagcagcgtggaggggccctcacgcagcagcccagccactttctgagtgttgtcctggggctctttgga

SEQ ID NO: 76425 - DNA, 201 bp, Homo sapiens
gaagcaggggcagcagtggcagcgggcctgaccacgaccacgcaggccaagggactgagagcgaggagcaggaaggcgacagcccctaggggccggcccarcttagacgcggctctcctccggcagggcccccagagggcagaagcagcgtggaggggccctcacgcagcagcccagccactttctgagtgttgtcctggg

SEQ ID NO: 76426 - DNA, 201 bp, Homo sapiens
agatcgccttgaagtgtgctgacatttgcaatccttgtagaatctgggagatgagcaagcagtggagtgaaagggtctgtgaagaattctacaggcaaggkgaacttgaacagaaatttgaactggaaatcagtcctctttgtaatcaacagaaagattccatccctagtatacaaattggtttcatgagctacatcgtgg

SEQ ID NO: 76427 - DNA, 201 bp, Homo sapiens
accacagccaaaacccgtatcacaatgctgttcacgcagccgacgtcacccaggccatgcactgctacctgaaagagccaaagcttgccagcttcctcacrcctctggacatcatgcttggactgctggctgcagcagcacacgatgtggaccacccaggggtgaaccagccatttttgataaaaactaaccaccatcttg

SEQ ID NO: 76428 - DNA, 201 bp, Homo sapiens; identical to SEQ ID NO: 76423

SEQ ID NO: 76429 - DNA, 201 bp, Homo sapiens; identical to SEQ ID NO: 76424

SEQ ID NO: 76430 - DNA, 201 bp, Homo sapiens; identical to SEQ ID NO: 76425

SEQ ID NO: 76431 - DNA, 201 bp, Homo sapiens; identical to SEQ ID NO: 76426

SEQ ID NO: 76432 - DNA, 201 bp, Homo sapiens; identical to SEQ ID NO: 76427

SEQ ID NO: 76433 - DNA, 201 bp, Homo sapiens
tttgtgccttcctctctgtcctggtatggggcctacctggtcaatgcgtatcccctggatatgtcccagtattttcggcttttcaactcaactcgtttacycaaacccagtcgggatgaactcttcactgatgacaaggccagacacctcctggtcctaaggaaaggaaatttttatatctttgatgtcctggatcaagat

SEQ ID NO: 76434 - DNA, 201 bp, Homo sapiens
gtccagtttcagagaggaggcaaagaattcctgaagaagcaaaagctgagccctgacgcagttgcccagctggcattccagatggccttcctgcggcagtwcgggcagacagtggccacctacgagtcctgtagcactgccgcattcaagcacggccgcactgagaccatccgcccggcctccgtctatacaaagaggtgc

SEQ ID NO: 76435 - DNA, 201 bp, Homo sapiens
ggcattccagatggccttcctgcggcagtacgggcagacagtggccacctacgagtcctgtagcactgccgcattcaagcacggccgcactgagaccatcygcccggcctccgtctatacaaagaggtgctctgaggcctttgtcagggagccctccaggcacagtgctggtgagcttcagcagatgatggttgagtgctc

SEQ ID NO: 76436 - DNA, 201 bp, Homo sapiens
gtatgctgttcatgacaactggataggctgcaatgtctcttcctacccaggccgcaatgcccgggagtttctccaatgtgtggagaaggccttagaagacrtgtttgatgccttagaaggcaaatccatcaaaagttaacttctgggcagatgaaaagctaccatcacttcctcatcatgaaaactgggaggccgggcatg

SEQ ID NO: 76437 - DNA, 201 bp, Homo sapiens
tgaagcagaattgcttgaacccaggaggtggaggttgcagtgagctgagatcacaccactgcactccggcctgggcgacagagcgagactgtctcaaaaaracaaaaaagaaaaaaaaactggggcctgtgtagccagtgggtgctattctgtgaaactaatcataagctgcctaggcagccagctacaggcttgagcttt

SEQ ID NO: 76438 - DNA, 201 bp, Homo sapiens
aaccgctggtttgataaatcctttaacctcattatcgccaaggatggctctactgccgtccactttgagcactcttggggtgatggtgtggcagtgctcarattttttaatgaagtatttaaagacagcactcagacccctgccgtcactccacagagccagccagctaccactgactctactgtcacggtgcagaaactc

SEQ ID NO: 76439 - DNA, 201 bp, Homo sapiens
agaattcctgaagaagcaaaagctgagccctgacgcagttgcccagctggcattccagatggccttcctgcggcagtacgggcagacagtggccacctacragtcctgtagcactgccgcattcaagcacggccgcactgagaccatccgcccggcctccgtctatacaaagaggtgctctgaggcctttgtcagggagcc

SEQ ID NO: 76440 - DNA, 201 bp, Homo sapiens
cccaaaatctgagtataatgaccagctcacccgggcaaccaacatgactgtttctgccatccggtttctgaagacactccgggctggccttctggagccaraagtgttccacttgaaccctgcaaaaagtgacactatcaccttcaagagactcatacgctttgtgccttcctctctgtcctggtatggggcctacctggt

SEQ ID NO: 76441 - DNA, 201 bp, Homo sapiens
ggtgccccgcctgctgctgcgcgcctggccccggggccccgcggttggtccgggagcccccagtcggcccctcagcgccggctccgggcccggccagtacytgcagcgcagcatcgtgcccaccatgcactaccaggacagcctgcccaggctgcctattcccaaacttgaagacaccattaggagatacctcagtgcaca

SEQ ID NO: 76442 - DNA, 201 bp, Homo sapiens
gcaaaaagtgacactatcaccttcaagagactcatacgctttgtgccttcctctctgtcctggtatggggcctacctggtcaatgcgtatcccctggataygtcccagtattttcggcttttcaactcaactcgtttacccaaacccagtcgggatgaactcttcactgatgacaaggccagacacctcctggtcctaagg

SEQ ID NO: 76443 - DNA, 201 bp, Homo sapiens
ccttgtccacttgtcccacaatatgctgcatggggatggcacaaaccgctggtttgataaatcctttaacctcattatcgccaaggatggctctactgccrtccactttgagcactcttggggtgatggtgtggcagtgctcagattttttaatgaagtatttaaagacagcactcagacccctgccgtcactccacagag

SEQ ID NO: 76444 - DNA, 201 bp, Homo sapiens
gatatgtacctatctgctcgagactccgttgttctgaactttaatccatttatggctttcaatcctgacccaaaatctgagtataatgaccagctcacccrggcaaccaacatgactgtttctgccatccggtttctgaagacactccgggctggccttctggagccagaagtgttccacttgaaccctgcaaaaagtgac

SEQ ID NO: 76445 - DNA, 201 bp, Homo sapiens
actcaacttcgagctgactgatgccttaaagactggcatcacagctgctaaggaaaagtttgatgccaccatgaaaaccctcactattgactgcgtccagyttcagagaggaggcaaagaattcctgaagaagcaaaagctgagccctgacgcagttgcccagctggcattccagatggccttcctgcggcagtacgggca

SEQ ID NO: 76446 - DNA, 201 bp, Homo sapiens
gaaccttgggggctttgcccctgtggtctctgatggctttggtgttgggtatgctgttcatgacaactggataggctgcaatgtctcttcctacccaggcygcaatgcccgggagtttctccaatgtgtggagaaggccttagaagacatgtttgatgccttagaaggcaaatccatcaaaagttaacttctgggcagatg

SEQ ID NO: 76447 - DNA, 201 bp, Homo sapiens
gcctgagctctacctggaccctgcatacgggcagataaaccacaatgtcctgtccacgagcacactgagcagcccagcagtgaaccttgggggctttgccyctgtggtctctgatggctttggtgttgggtatgctgttcatgacaactggataggctgcaatgtctcttcctacccaggccgcaatgcccgggagtttct

SEQ ID NO: 76448 - DNA, 201 bp, Homo sapiens
gactcggcagtgttctgtctctgcctagatgacttccccattaaggaccttgtccacttgtcccacaatatgctgcatggggatggcacaaaccgctggtktgataaatcctttaacctcattatcgccaaggatggctctactgccgtccactttgagcactcttggggtgatggtgtggcagtgctcagattttttaat

SEQ ID NO: 76449 - DNA, 201 bp, Homo sapiens
caatcctgacccaaaatctgagtataatgaccagctcacccgggcaaccaacatgactgtttctgccatccggtttctgaagacactccgggctggccttytggagccagaagtgttccacttgaaccctgcaaaaagtgacactatcaccttcaagagactcatacgctttgtgccttcctctctgtcctggtatggggc

SEQ ID NO: 76450 - DNA, 201 bp, Homo sapiens
cacttgtttgctctgcggcatctggcagcagccaaagggatcatcttgcctgagctctacctggaccctgcatacgggcagataaaccacaatgtcctgtscacgagcacactgagcagcccagcagtgaaccttgggggctttgcccctgtggtctctgatggctttggtgttgggtatgctgttcatgacaactggata

SEQ ID NO: 76451 - DNA, 201 bp, Homo sapiens
ggtccgggagcccccagtcggcccctcagcgccggctccgggcccggccagtacctgcagcgcagcatcgtgcccaccatgcactaccaggacagcctgcmcaggctgcctattcccaaacttgaagacaccattaggagatacctcagtgcacagaagcctctcttgaatgatggccagttcaggaaaacagaacaattt

SEQ ID NO: 76452 - DNA, 201 bp, Homo sapiens
aaagctgagccctgacgcagttgcccagctggcattccagatggccttcctgcggcagtacgggcagacagtggccacctacgagtcctgtagcactgccrcattcaagcacggccgcactgagaccatccgcccggcctccgtctatacaaagaggtgctctgaggcctttgtcagggagccctccaggcacagtgctgg

SEQ ID NO: 76453 - DNA, 201 bp, Homo sapiens
tttgtcagggagccctccaggcacagtgctggtgagcttcagcagatgatggttgagtgctccaagtaccatggccagctgaccaaagaagcagcaatggrccagggctttgaccgacacttgtttgctctgcggcatctggcagcagccaaagggatcatcttgcctgagctctacctggaccctgcatacgggcagata

SEQ ID NO: 76454 - DNA, 201 bp, Homo sapiens
cgctggtttgataaatcctttaacctcattatcgccaaggatggctctactgccgtccactttgagcactcttggggtgatggtgtggcagtgctcagatwttttaatgaagtatttaaagacagcactcagacccctgccgtcactccacagagccagccagctaccactgactctactgtcacggtgcagaaactcaac

SEQ ID NO: 76455 - DNA, 201 bp, Homo sapiens
gtcagggagccctccaggcacagtgctggtgagcttcagcagatgatggttgagtgctccaagtaccatggccagctgaccaaagaagcagcaatgggccrgggctttgaccgacacttgtttgctctgcggcatctggcagcagccaaagggatcatcttgcctgagctctacctggaccctgcatacgggcagataaac

SEQ ID NO: 76456 - DNA, 201 bp, Homo sapiens
ccagcagtgaaccttgggggctttgcccctgtggtctctgatggctttggtgttgggtatgctgttcatgacaactggataggctgcaatgtctcttcctmcccaggccgcaatgcccgggagtttctccaatgtgtggagaaggccttagaagacatgtttgatgccttagaaggcaaatccatcaaaagttaacttctg

SEQ ID NO: 76457 - DNA, 201 bp, Homo sapiens
ctggcattccagatggccttcctgcggcagtacgggcagacagtggccacctacgagtcctgtagcactgccgcattcaagcacggccgcactgagaccayccgcccggcctccgtctatacaaagaggtgctctgaggcctttgtcagggagccctccaggcacagtgctggtgagcttcagcagatgatggttgagtgc

SEQ ID NO: 76458 - DNA, 201 bp, Homo sapiens
gccctccaggcacagtgctggtgagcttcagcagatgatggttgagtgctccaagtaccatggccagctgaccaaagaagcagcaatgggccagggctttraccgacacttgtttgctctgcggcatctggcagcagccaaagggatcatcttgcctgagctctacctggaccctgcatacgggcagataaaccacaatgt

SEQ ID NO: 76459 - DNA, 201 bp, Homo sapiens
gagtcagggacagccttcagtgacattaatctgcaggagaaggactggactgactatgatgaaaaggcccaggagtctgtgggaatctatgaggtcacccmccagtttgtgaagtgctgatccctcttccttcccagttgcccttaagaactgagaaaggacaaagtactctaagcagcagagcccacagaggctcgttcc

SEQ ID NO: 76460 - DNA, 201 bp, Homo sapiens
aggagtctgtgggaatctatgaggtcacccaccagtttgtgaagtgctgatccctcttccttcccagttgcccttaagaactgagaaaggacaaagtactytaagcagcagagcccacagaggctcgttcctttgacccttgtctcctggtggctatacgaaaccttcacaatctgcatgctggactttattacagcttcc

SEQ ID NO: 76461 - DNA, 201 bp, Homo sapiens
agttgcccttaagaactgagaaaggacaaagtactctaagcagcagagcccacagaggctcgttcctttgacccttgtctcctggtggctatacgaaaccktcacaatctgcatgctggactttattacagcttcccaagccccatcaataaagcccctgttcacgctgcactggtgcatgaaggtgaagtaaggaggcag

SEQ ID NO: 76462 - DNA, 201 bp, Homo sapiens
cttacaataacttcaagacaatagtggagtttgagtgccggggccttgaaccagttgatttccagccgcaggctgggtttgctgctgaaggtgtggagtcmgggacagccttcagtgacattaatctgcaggagaaggactggactgactatgatgaaaaggcccaggagtctgtgggaatctatgaggtcacccaccagt

SEQ ID NO: 76463 - DNA, 201 bp, Homo sapiens
atgagccagaagccaatggtgacgtactgttacctgaacttactgaacttgctgttggaaagatctttgtgaggattaggaattaggttaaaagaaattargaaccatcttcaagcaaaaattaaactttatttctgcttaaacaataaatacacctgagttagttttccaaacctttcctcctgattaaatgcccttaaa

SEQ ID NO: 76464 - DNA, 201 bp, Homo sapiens
ttacagcttcccaagccccatcaataaagcccctgttcacgctgcactggtgcatgaaggtgaagtaaggaggcagctactccctccacaaataagaattygtgcagcagcagttcactccttaggaaaatgaagagtatttttaaggagatggtatctccccagtcaagggcaagtttacagagatgaaaccgcgatccc

SEQ ID NO: 76465 - DNA, 201 bp, Homo sapiens
aaagctcaagcctgtagctggctgcctaggcagcttatgattagtttcacagaatagcacccactggctacacaggccccagtttttttttcttttttgtytttttgagacagtctcgctctgtcgcccaggccggagtgcagtggtgtgatctcagctcactgcaacctccacctcctgggttcaagcaattctgcttca

SEQ ID NO: 76466 - DNA, 201 bp, Homo sapiens
gccagaagccaatggtgacgtactgttacctgaacttactgaacttgctgttggaaagatctttgtgaggattaggaattaggttaaaagaaattaagaamcatcttcaagcaaaaattaaactttatttctgcttaaacaataaatacacctgagttagttttccaaacctttcctcctgattaaatgcccttaaaactt

SEQ ID NO: 76467 - DNA, 201 bp, Homo sapiens; identical to SEQ ID NO: 76459

SEQ ID NO: 76468 - DNA, 201 bp, Homo sapiens; identical to SEQ ID NO: 76460

SEQ ID NO: 76469 - DNA, 201 bp, Homo sapiens; identical to SEQ ID NO: 76461

SEQ ID NO: 76470 - DNA, 201 bp, Homo sapiens
acaatgagaacttcaagacaatagtggagtttgagtgccggggccttgaaccagttgatttccagccgcaggctgggtttgctgctgaaggtgtggagtcmgggacagccttcagtgacattaatctgcaggagaaggactggactgactatgatgaaaaggcccaggagtctgtgggaatctatgaggtcacccaccagt

SEQ ID NO: 76471 - DNA, 201 bp, Homo sapiens; identical to SEQ ID NO: 76463

SEQ ID NO: 76472 - DNA, 201 bp, Homo sapiens; identical to SEQ ID NO: 76464

SEQ ID NO: 76473 - DNA, 201 bp, Homo sapiens; identical to SEQ ID NO: 76465

SEQ ID NO: 76474 - DNA, 201 bp, Homo sapiens; identical to SEQ ID NO: 76466

SEQ ID NO: 76475 - DNA, 201 bp, Homo sapiens
gctgcaactcaaagccacgctggagaacatcaccaacctccggcccgtgggcgaggacttccggtggtacctgaagatgaaatgtggcaactgtggtgagmtttcggacaagtggcagtacatccggctgatggacagtgtggcactgaaggggggccgtggcagtgcttccatggtccagaagtgcaagctgtgtgcaag

SEQ ID NO: 76476 - DNA, 201 bp, Homo sapiens
ctgaagatgaaatgtggcaactgtggtgagatttcggacaagtggcagtacatccggctgatggacagtgtggcactgaaggggggccgtggcagtgcttycatggtccagaagtgcaagctgtgtgcaagagaaaattccatcgagattttaagcagcaccatcaagccttacaatgctgaagacaatgagaacttcaag

SEQ ID NO: 76477 - DNA, 201 bp, Homo sapiens
cagtgtggcactgaaggggggccgtggcagtgcttccatggtccagaagtgcaagctgtgtgcaagagaaaattccatcgagattttaagcagcaccatckagccttacaatgctgaagacaatgagaacttcaagacaatagtggagtttgagtgccggggccttgaaccagttgatttccagccgcaggctgggtttgc

SEQ ID NO: 76478 - DNA, 201 bp, Homo sapiens
cacccacggctgggaatgcgggagggtcgggcaggcgtggggctgcgcaggcacggctgacgcagtcgctctggccctccccctcagaaaatcgcgctgcmactcaaagccacgctggagaacatcaccaacctccggcccgtgggcgaggacttccggtggtacctgaagatgaaatgtggcaactgtggtgagatttcg

SEQ ID NO: 76479 - DNA, 201 bp, Homo sapiens
ctcttccttcccagttgcccttaagaactgagaaaggacaaagtactctaagcagcagagcccacagaggctcgttcctttgacccttgtctcctggtggrtatacgaaaccttcacaatctgcatgctggactttattacagcttcccaagccccatcaataaagcccctgttcacgctgcactggtgcatgaaggtgaa

SEQ ID NO: 76480 - DNA, 201 bp, Homo sapiens
agaacttcaagacaatagtggagtttgagtgccggggccttgaaccagttgatttccagccgcaggctgggtttgctgctgaaggtgtggagtcagggacygccttcagtgacattaatctgcaggagaaggactggactgactatgatgaaaaggcccaggagtctgtgggaatctatgaggtcacccaccagtttgtga

SEQ ID NO: 76481 - DNA, 201 bp, Homo sapiens
ttttaaggagatggtatctccccagtcaagggcaagtttacagagatgaaaccgcgatcccaccatcactcaatgagccagaagccaatggtgacgtactyttacctgaacttactgaacttgctgttggaaagatctttgtgaggattaggaattaggttaaaagaaattaagaaccatcttcaagcaaaaattaaactt

SEQ ID NO: 76482 - DNA, 201 bp, Homo sapiens
tccttcccagttgcccttaagaactgagaaaggacaaagtactctaagcagcagagcccacagaggctcgttcctttgacccttgtctcctggtggctatmcgaaaccttcacaatctgcatgctggactttattacagcttcccaagccccatcaataaagcccctgttcacgctgcactggtgcatgaaggtgaagtaa

SEQ ID NO: 76483 - DNA, 201 bp, Homo sapiens
ttcagtagagacggggtttcaccatgttagccaggatgtccacttttttcttaaatgaacatattgtcttataaccagcaaatgaagttttacttttttartcagaaaaaatttcgtcataaagctatatttttatatttttaaaattgatacagttagataccttcagattacctaagttaagtttttgccaaaatgcta

SEQ ID NO: 76484 - DNA, 201 bp, Homo sapiens
aaagagtgtggaagatgctggcatcacaatcattggtgaattgggattggaccctggtctggatcacatgttagcaatggaaacaatagataaagccaagraagtgggagccacgattgaatcatatatttcctactgtggtgggcttccagcccctgaacattcaaacaatccattgagatataaatttagctggagtcc

SEQ ID NO: 76485 - DNA, 201 bp, Homo sapiens
caaatgaagttttacttttttaatcagaaaaaatttcgtcataaagctatatttttatatttttaaaattgatacagttagataccttcagattacctaakttaagtttttgccaaaatgctattttatgccctttttgtaaagttatgatttattttgtaaatatagttccttatagttttctcttgagtgtttggacat

SEQ ID NO: 76486 - DNA, 201 bp, Homo sapiens
acaatagagcatcccttttgcatgtatgatgcagaccagcatattattcatgacagtgttgaaggctcggggatcctgatgtgttccattgacaatttgcyggcacagctcccaattgaagctacagaatgctttggagacatgctttacccttatgttgaagaaatgatattatcagacgcgacacagcctcttgaaagt

SEQ ID NO: 76487 - DNA, 201 bp, Homo sapiens
tttcttcccaggcaatacacctctgaacatgtgtgtgataaatgggtttgctaatgtgctgttttaaagtataaagcataatatgttttggttaacacaawgtactttttgaactataaatctttattttaatatggaaatgtttggaacaggagatgcaagccactaacagagaactttaataattctaccctgtatttt

SEQ ID NO: 76488 - DNA, 195 bp, Homo sapiens
cctcagatttctcaggagaccagaactgatctgccagccttgctgccttttgttgctctgctctttacattgtctttacagtcaccaggtgtcargatgctgcaagtacataggactggactgggcaggctgggggtcagcctctccaagggtcttcaccacaaagctgtgttggccgtccggagggaggatgtg

SEQ ID NO: 76489 - DNA, 201 bp, Homo sapiens
gaaaggttttggttcttggatctggctacatatctgagcctgtattagaatatttatcaagagatggcaatatagaaataacagtaggatctgacatgaaraatcaaattgaacagttaggcaagaaatataatattaatcctgttagcatggacatttgtaaacaagaagagaagctgggcttcttggtggcaaaacagg

SEQ ID NO: 76490 - DNA, 201 bp, Homo sapiens
ctgctggtgtggaaggctgccctgcattaccacacaaactcgtggcaatatgtgacatttcagctgacacaggagggtctatagagtttatgactgagtgyacaacaatagagcatcccttttgcatgtatgatgcagaccagcatattattcatgacagtgttgaaggctcggggatcctgatgtgttccattgacaatt

SEQ ID NO: 76491 - DNA, 201 bp, Homo sapiens
gttccattgacaatttgccggcacagctcccaattgaagctacagaatgctttggagacatgctttacccttatgttgaagaaatgatattatcagacgcracacagcctcttgaaagtcagaatttttctcctgtggtgagagatgcagtgattacatccaacggtacattacctgataaatataaatatatccagacac

SEQ ID NO: 76492 - DNA, 201 bp, Homo sapiens; identical to SEQ ID NO: 76483

SEQ ID NO: 76493 - DNA, 201 bp, Homo sapiens; identical to SEQ ID NO: 76484

SEQ ID NO: 76494 - DNA, 201 bp, Homo sapiens; identical to SEQ ID NO: 76485

SEQ ID NO: 76495 - DNA, 201 bp, Homo sapiens; identical to SEQ ID NO: 76486

SEQ ID NO: 76496 - DNA, 201 bp, Homo sapiens; identical to SEQ ID NO: 76487

SEQ ID NO: 76497 - DNA, 201 bp, Homo sapiens
tttcttctaggaattcggagcctcccctgcagcgactcggaagattcgaggcggcgggggacaagtcggcgccccagagcggacgagtcaccaggtgtcargatgctgcaagtacataggactggactgggcaggctgggggtcagcctctccaagggtcttcaccacaaagctgtgttggccgtccggagggaggatgtg

SEQ ID NO: 76498 - DNA, 201 bp, Homo sapiens; identical to SEQ ID NO: 76489

SEQ ID NO: 76499 - DNA, 201 bp, Homo sapiens; identical to SEQ ID NO: 76490

SEQ ID NO: 76500 - DNA, 201 bp, Homo sapiens; identical to SEQ ID NO: 76491

SEQ ID NO: 76501 - DNA, 201 bp, Homo sapiens
tcacacacacacacacacacacaaacacacatacgcacgcacgatctcacttcgatctatacactggaggattaaaacaaacaaacaaaaaaaacatttcyttcgctccccctccctctccactctgagaagcagaggagccgcacggcgaggggccgcagaccgtctggaaatgcgaatcctaaagcgtttcctcgcttg

SEQ ID NO: 76502 - DNA, 201 bp, Homo sapiens
accgcggccgccgcagccggcgaaagaggcaaagtcccgcacgccggaggacatgcgcctcggctagcggccccgggccccaccaccgtgcggctttctcsagattattcctctctcgctgtctctgactgtctctctctgtctctgtctctgtctctctctctctcacacacacacacacacacacaaacacacatacgc

SEQ ID NO: 76503 - DNA, 201 bp, Homo sapiens
tgaattgtttcgccatctgcatacagtttctcaaatccttccacaagttacttcagctaccgagagtgataaggtgcccttgcatgcttctctgccagtgsctgggggtgatttgctattagagcccagccttgctcagtattctgatgtgctgtccactactcatgctgcttcagagacgctggaatttggtagtgaatc

SEQ ID NO: 76504 - DNA, 201 bp, Homo sapiens
acttctgagctgagtcatagtgccaaatctgatgccggtttagtgggtggtggtgaagatggtgacactgatgatgatggtgatgatgatgatgacagagrtagtgatggcttatccattcataagtgtatgtcatgctcatcctatagagaatcacaggaaaaggtaatgaatgattcagacacccacgaaaacagtctt

SEQ ID NO: 76505 - DNA, 201 bp, Homo sapiens
cttttcactggggaaaatgcaatatgtcatctgatggatcagagcatagtttagaaggacaaaaatttccacttgagatgcaaatctactgctttgatgcrgaccgattttcaagttttgaggaagcagtcaaaggaaaagggaagttaagagctttatccattttgtttgaggttgggacagaagaaaatttggatttca

SEQ ID NO: 76506 - DNA, 201 bp, Homo sapiens
tgctgtttccttctaaggcaacttctgagctgagtcatagtgccaaatctgatgccggtttagtgggtggtggtgaagatggtgacactgatgatgatggdgatgatgatgatgacagagatagtgatggcttatccattcataagtgtatgtcatgctcatcctatagagaatcacaggaaaaggtaatgaatgattcag

SEQ ID NO: 76507 - DNA, 201 bp, Homo sapiens
tccagactaattacactgagatacgtgttgatgaatctgagaagacaaccaagtccttttctgcaggcccagtgatgtcacagggtccctcagttacagayctggaaatgccacattattctacctttgcctacttcccaactgaggtaacacctcatgcttttaccccatcctccagacaacaggatttggtctccacgg

SEQ ID NO: 76508 - DNA, 201 bp, Homo sapiens
aacaaacaaaaaaaacatttccttcgctccccctccctctccactctgagaagcagaggagccgcacggcgaggggccgcagaccgtctggaaatgcgaakcctaaagcgtttcctcgcttgcattcagctcctctgtgtttgccgcctggattgggctaatggatactacagacaacagagaaaacttgttgaagagatt

SEQ ID NO: 76509 - DNA, 201 bp, Homo sapiens
aaaaaacatttccttcgctccccctccctctccactctgagaagcagaggagccgcacggcgaggggccgcagaccgtctggaaatgcgaatcctaaagcktttcctcgcttgcattcagctcctctgtgtttgccgcctggattgggctaatggatactacagacaacagagaaaacttgttgaagagattggctggtcc

SEQ ID NO: 76510 - DNA, 201 bp, Homo sapiens
gaatccatccacctctctggacagtaatggtgcagcattgcctgatggaaatatagctgagagcttagagtctttagtttaacacagaaaggggtgggggractcacatctgagcattgttttcctcttcctaaaattaggcaggaaaatcagtctagttctgttatctgttgatttcccatcacctgacagtaactttca

SEQ ID NO: 76511 - DNA, 201 bp, Homo sapiens
gctacacctgttttatcaattgatgaaccattaaatacactaataaataagcttatacattccgatgaaattttaacctccaccaaaagttctgttactgrtaaggtatttgctggtattccaacagttgcttctgatacatttgtatctactgatcattctgttcctataggaaatgggcatgttgccattacagctgtt

SEQ ID NO: 76512 - DNA, 201 bp, Homo sapiens
aagcatctggtgacacttcgcttaaacctgtgcttagtgcaaactcagagccagcatcctctgaccctgcttctagtgaaatgttatctccttcaactcarctcttattttatgagacctcagcttcttttagtactgaagtattgctacaaccttcctttcaggcttctgatgttgacaccttgcttaaaactgttcttc

SEQ ID NO: 76513 - DNA, 201 bp, Homo sapiens
cactaatgaaaaagatgctgatgggatcctggcagcaggtgactcagaaataactcctggattcccacagtccccaacatcatctgttactagcgagaackcagaagtgttccacgtttcagaggcagaggccagtaatagtagccatgagtctcgtattggtctagctgaggggttggaatccgagaagaaggcagttat

SEQ ID NO: 76514 - DNA, 201 bp, Homo sapiens
ttctgttactggtaaggtatttgctggtattccaacagttgcttctgatacatttgtatctactgatcattctgttcctataggaaatgggcatgttgccrttacagctgtttctccccacagagatggttctgtaacctcaacaaagttgctgtttccttctaaggcaacttctgagctgagtcatagtgccaaatctga

SEQ ID NO: 76515 - DNA, 201 bp, Homo sapiens
tggtattccaacagttgcttctgatacatttgtatctactgatcattctgttcctataggaaatgggcatgttgccattacagctgtttctccccacagaratggttctgtaacctcaacaaagttgctgtttccttctaaggcaacttctgagctgagtcatagtgccaaatctgatgccggtttagtgggtggtggtga

SEQ ID NO: 76516 - DNA, 201 bp, Homo sapiens
gttcatgatgagcatggaggagtgacggcaggaactttctgtgctctgacaacccttatgcaccaactagaaaaagaaaattccgtggatgtttaccaggkagccaagatgatcaatctgatgaggccaggagtctttgctgacattgagcagtatcagtttctctacaaagtgatcctcagccttgtgagcacaaggcag

SEQ ID NO: 76517 - DNA, 201 bp, Homo sapiens
taataaataagcttatacattccgatgaaattttaacctccaccaaaagttctgttactggtaaggtatttgctggtattccaacagttgcttctgatacrtttgtatctactgatcattctgttcctataggaaatgggcatgttgccattacagctgtttctccccacagagatggttctgtaacctcaacaaagttgc

SEQ ID NO: 76518 - DNA, 201 bp, Homo sapiens
cggccccgggccccaccaccgtgcggctttctccagattattcctctctcgctgtctctgactgtctctctctgtctctgtctctgtctctctctctctcwcacacacacacacacacacaaacacacatacgcacgcacgatctcacttcgatctatacactggaggattaaaacaaacaaacaaaaaaaacatttcctt

SEQ ID NO: 76519 - DNA, 201 bp, Homo sapiens
ttgctgtttccttctaaggcaacttctgagctgagtcatagtgccaaatctgatgccggtttagtgggtggtggtgaagatggtgacactgatgatgatgrtgatgatgatgatgacagagatagtgatggcttatccattcataagtgtatgtcatgctcatcctatagagaatcacaggaaaaggtaatgaatgattca

SEQ ID NO: 76520 - DNA, 201 bp, Homo sapiens
atgcgcctcggctagcggccccgggccccaccaccgtgcggctttctccagattattcctctctcgctgtctctgactgtctctctctgtctctgtctctstctctctctctctcacacacacacacacacacacaaacacacatacgcacgcacgatctcacttcgatctatacactggaggattaaaacaaacaaacaa

SEQ ID NO: 76521 - DNA, 201 bp, Homo sapiens; identical to SEQ ID NO: 76509

SEQ ID NO: 76522 - DNA, 201 bp, Homo sapiens; identical to SEQ ID NO: 76501

SEQ ID NO: 76523 - DNA, 201 bp, Homo sapiens; identical to SEQ ID NO: 76502

SEQ ID NO: 76524 - DNA, 201 bp, Homo sapiens; identical to SEQ ID NO: 76510

SEQ ID NO: 76525 - DNA, 201 bp, Homo sapiens; identical to SEQ ID NO: 76516

SEQ ID NO: 76526 - DNA, 201 bp, Homo sapiens; identical to SEQ ID NO: 76505

SEQ ID NO: 76527 - DNA, 201 bp, Homo sapiens; identical to SEQ ID NO: 76507

SEQ ID NO: 76528 - DNA, 201 bp, Homo sapiens; identical to SEQ ID NO: 76518

SEQ ID NO: 76529 - DNA, 201 bp, Homo sapiens; identical to SEQ ID NO: 76508

SEQ ID NO: 76530 - DNA, 193 bp, Homo sapiens
agagcggcagccgcgcccctccgccccccgcgcgaccccgggtccgaggcacgctcccagcggagcggtcctgcgcccccgccccctccaggmgccgcggcgcgcacagccgggctggagcgcgcacccggcactgaggcttcgctgctctcggagcgctcagaccgcggccgccgcagccggcgaaagaggc

SEQ ID NO: 76531 - DNA, 201 bp, Homo sapiens; identical to SEQ ID NO: 76520

SEQ ID NO: 76532 - DNA, 201 bp, Homo sapiens; identical to SEQ ID NO: 76501

SEQ ID NO: 76533 - DNA, 201 bp, Homo sapiens; identical to SEQ ID NO: 76502

SEQ ID NO: 76534 - DNA, 201 bp, Homo sapiens; identical to SEQ ID NO: 76503

SEQ ID NO: 76535 - DNA, 201 bp, Homo sapiens; identical to SEQ ID NO: 76504

SEQ ID NO: 76536 - DNA, 201 bp, Homo sapiens; identical to SEQ ID NO: 76505

SEQ ID NO: 76537 - DNA, 201 bp, Homo sapiens; identical to SEQ ID NO: 76506

SEQ ID NO: 76538 - DNA, 201 bp, Homo sapiens; identical to SEQ ID NO: 76507

SEQ ID NO: 76539 - DNA, 201 bp, Homo sapiens; identical to SEQ ID NO: 76508

SEQ ID NO: 76540 - DNA, 193 bp, Homo sapiens; identical to SEQ ID NO: 76530

SEQ ID NO: 76541 - DNA, 201 bp, Homo sapiens; identical to SEQ ID NO: 76509

SEQ ID NO: 76542 - DNA, 201 bp, Homo sapiens; identical to SEQ ID NO: 76510

SEQ ID NO: 76543 - DNA, 201 bp, Homo sapiens; identical to SEQ ID NO: 76511

SEQ ID NO: 76544 - DNA, 201 bp, Homo sapiens; identical to SEQ ID NO: 76512

SEQ ID NO: 76545 - DNA, 201 bp, Homo sapiens; identical to SEQ ID NO: 76513

SEQ ID NO: 76546 - DNA, 201 bp, Homo sapiens; identical to SEQ ID NO: 76514

SEQ ID NO: 76547 - DNA, 201 bp, Homo sapiens; identical to SEQ ID NO: 76515

SEQ ID NO: 76548 - DNA, 201 bp, Homo sapiens; identical to SEQ ID NO: 76516

SEQ ID NO: 76549 - DNA, 201 bp, Homo sapiens; identical to SEQ ID NO: 76517

SEQ ID NO: 76550 - DNA, 201 bp, Homo sapiens; identical to SEQ ID NO: 76518

SEQ ID NO: 76551 - DNA, 201 bp, Homo sapiens; identical to SEQ ID NO: 76519

SEQ ID NO: 76552 - DNA, 201 bp, Homo sapiens; identical to SEQ ID NO: 76520

SEQ ID NO: 76553 - DNA, 201 bp, Homo sapiens; identical to SEQ ID NO: 76501

SEQ ID NO: 76554 - DNA, 201 bp, Homo sapiens; identical to SEQ ID NO: 76502

SEQ ID NO: 76555 - DNA, 201 bp, Homo sapiens; identical to SEQ ID NO: 76503

SEQ ID NO: 76556 - DNA, 201 bp, Homo sapiens; identical to SEQ ID NO: 76504

SEQ ID NO: 76557 - DNA, 201 bp, Homo sapiens; identical to SEQ ID NO: 76505

SEQ ID NO: 76558 - DNA, 201 bp, Homo sapiens; identical to SEQ ID NO: 76506

SEQ ID NO: 76559 - DNA, 201 bp, Homo sapiens; identical to SEQ ID NO: 76507

SEQ ID NO: 76560 - DNA, 201 bp, Homo sapiens; identical to SEQ ID NO: 76508

SEQ ID NO: 76561 - DNA, 201 bp, Homo sapiens; identical to SEQ ID NO: 76509

SEQ ID NO: 76562 - DNA, 201 bp, Homo sapiens; identical to SEQ ID NO: 76510

SEQ ID NO: 76563 - DNA, 201 bp, Homo sapiens; identical to SEQ ID NO: 76511

SEQ ID NO: 76564 - DNA, 201 bp, Homo sapiens; identical to SEQ ID NO: 76512

SEQ ID NO: 76565 - DNA, 201 bp, Homo sapiens; identical to SEQ ID NO: 76513

SEQ ID NO: 76566 - DNA, 201 bp, Homo sapiens; identical to SEQ ID NO: 76514

SEQ ID NO: 76567 - DNA, 201 bp, Homo sapiens; identical to SEQ ID NO: 76515

SEQ ID NO: 76568 - DNA, 201 bp, Homo sapiens; identical to SEQ ID NO: 76516

SEQ ID NO: 76569 - DNA, 201 bp, Homo sapiens; identical to SEQ ID NO: 76517

SEQ ID NO: 76570 - DNA, 201 bp, Homo sapiens; identical to SEQ ID NO: 76518

SEQ ID NO: 76571 - DNA, 201 bp, Homo sapiens; identical to SEQ ID NO: 76519

SEQ ID NO: 76572 - DNA, 201 bp, Homo sapiens; identical to SEQ ID NO: 76520

SEQ ID NO: 76573 - DNA, 201 bp, Homo sapiens; identical to SEQ ID NO: 76509

SEQ ID NO: 76574 - DNA, 201 bp, Homo sapiens; identical to SEQ ID NO: 76501

SEQ ID NO: 76575 - DNA, 201 bp, Homo sapiens; identical to SEQ ID NO: 76502

SEQ ID NO: 76576 - DNA, 201 bp, Homo sapiens
aatggactaggtttgaatcttgactccaccatttggttattggttacatgacatacaatatataaattatttaacttaccaatgcttccatttttcttccrtgaaattgacatagtagctgcacctgccttataacattactatggaaattaaatgagggattgacttattactcataaaagtaattgaggagccaggcgc

SEQ ID NO: 76577 - DNA, 201 bp, Homo sapiens
aaaatttaaaaattgcaaaaatttatttaaaatataatattgaaccaaaaggcaatgattatttaaatacattatgatggatattatagatttcacaaaartcatgtttttgaatgatatatatacatataaaaggctcatgataaggtattaatggttttaaaaagaaacatgttaagtggtataaccagtattattttt

SEQ ID NO: 76578 - DNA, 201 bp, Homo sapiens
tgaaattgacatagtagctgcacctgccttataacattactatggaaattaaatgagggattgacttattactcataaaagtaattgaggagccaggcgcrgtggctcatgcctgtaatcccagcacttcgggaggccgagatgggcagatcactagaggtcaggagttccagaccagcctggccaacatggtgaaatgcc

SEQ ID NO: 76579 - DNA, 201 bp, Homo sapiens; identical to SEQ ID NO: 76508

SEQ ID NO: 76580 - DNA, 201 bp, Homo sapiens; identical to SEQ ID NO: 76518

SEQ ID NO: 76581 - DNA, 193 bp, Homo sapiens; identical to SEQ ID NO: 76530

SEQ ID NO: 76582 - DNA, 201 bp, Homo sapiens; identical to SEQ ID NO: 76520

SEQ ID NO: 76583 - DNA, 201 bp, Homo sapiens
gttttcttacatgtctagagaaagtctaaattggtagactttctgggaagcagtttgcttgtttttattaagaattttaaatgatttacactaaatacccwacatttaaatttaaagccatttagtctaaaaatttaaaaattgcaaaaatttatttaaaatataatattgaaccaaaaggcaatgattatttaaatacat

SEQ ID NO: 76584 - DNA, 201 bp, Homo sapiens
agaatggcaaactggggcctgagacgcccctggccatggaccgcttcccatacctggctctgtccaagacatacaatgtggacagacaggtgccagacagygcagccacagccacggcctacctgtgcggggtcaaggccaacttccagaccatcggcttgagtgcagccgcccgctttaaccagtgcaacacgacacgcg

SEQ ID NO: 76585 - DNA, 201 bp, Homo sapiens
gggcgtccgctgctccctgaactgcagatttgtgccatgcggctgcctgcaccccagacaataaagggaccaaaaccacccaacccccaccctgcctctakcctaaggaagaccaagcaggcctggacccagagacgtcccccatcgtgggacacgacacacccagaccgcgtgccccaccgtcttagcttcaatcctggc

SEQ ID NO: 76586 - DNA, 201 bp, Homo sapiens
tcggcttgagtgcagccgcccgctttaaccagtgcaacacgacacgcggcaatgaggtcatctccgtgatgaaccgggccaagcaagcaggaaagtcagtrggagtggtgaccaccacacgggtgcagcacgcctcgccagccggcacctacgcacacacagtgaaccgcaactggtactcagatgctgacatgcctgcct

SEQ ID NO: 76587 - DNA, 201 bp, Homo sapiens
gtgcagccgcccgctttaaccagtgcaacacgacacgcggcaatgaggtcatctccgtgatgaaccgggccaagcaagcaggaaagtcagtaggagtggtraccaccacacgggtgcagcacgcctcgccagccggcacctacgcacacacagtgaaccgcaactggtactcagatgctgacatgcctgcctcagcccgcc

SEQ ID NO: 76588 - DNA, 201 bp, Homo sapiens
cctgggcgatgggttgggggtgcccacggtgacagccaccaggatcctaaaggggcagaagaatggcaaactggggcctgagacgcccctggccatggacygcttcccatacctggctctgtccaagacatacaatgtggacagacaggtgccagacagcgcagccacagccacggcctacctgtgcggggtcaaggccaa

SEQ ID NO: 76589 - DNA, 201 bp, Homo sapiens
tatgtgtggaaccgcactgagctcatgcaggcgtccctggaccagtctgtgacccatctcatgggcctctttgagcccggagacacgaaatatgagatccwccgagaccccacactggacccctccctgatggagatgacagaggctgccctgcgcctgctgagcaggaacccccgcggcttctacctctttgtggagggc

SEQ ID NO: 76590 - DNA, 201 bp, Homo sapiens
tcctggtgtccccacttcgcctccctcctgctgcccccaagacatgcaggggccctgggtgctgctgctgctgggcctgaggctacagctctccctgggcrtcatcccagctgaggaggagaacccggccttctggaaccgccaggcagctgaggccctggatgctgccaagaagctgcagcccatccagaaggtcgccaa

SEQ ID NO: 76591 - DNA, 201 bp, Homo sapiens
ggaggctactggatcggggattcccaggggggctttgacacagtcctctgctgtctccccactaggatcattccacacccctgcacctgaccaagggaccmatgaggcagaggcttgccccaagtcacagccactcagatgcttcctgccccccagtgcccattccaggtcaccagatccaaggagcgcttgaggagctct

SEQ ID NO: 76592 - DNA, 201 bp, Homo sapiens
cccccagcaaggctcaggacagcaaagcctacacgtccatcctgtacggcaatggcccgggctacgtgttcaactcaggcgtgcgaccagacgtgaatgaragcgagagcgggagccccgattaccagcagcaggcggcggtgcccctgtcgtccgagacccacggaggcgaagacgtggcggtgtttgcgcgcggcccgc

SEQ ID NO: 76593 - DNA, 150 bp, Homo sapiens
ttaaacccaggcagcctgcgctgcagccggttcctggtgtccccacttcrcctccctcctgctgcccccaagacatgcaggggccctgggtgctgctgctgctgggcctgaggctacagctctccctgggcgtcatcccagctgaggagg

SEQ ID NO: 76594 - DNA, 201 bp, Homo sapiens
ccacagccacggcctacctgtgcggggtcaaggccaacttccagaccatcggcttgagtgcagccgcccgctttaaccagtgcaacacgacacgcggcaawgaggtcatctccgtgatgaaccgggccaagcaagcaggaaagtcagtaggagtggtgaccaccacacgggtgcagcacgcctcgccagccggcacctacg

SEQ ID NO: 76595 - DNA, 201 bp, Homo sapiens
gacatgcaggggccctgggtgctgctgctgctgggcctgaggctacagctctccctgggcgtcatcccagctgaggaggagaacccggccttctggaacckccaggcagctgaggccctggatgctgccaagaagctgcagcccatccagaaggtcgccaagaacctcatcctcttcctgggcgatgggttgggggtgccc

SEQ ID NO: 76596 - DNA, 201 bp, Homo sapiens
agcgcagccacagccacggcctacctgtgcggggtcaaggccaacttccagaccatcggcttgagtgcagccgcccgctttaaccagtgcaacacgacacrcggcaatgaggtcatctccgtgatgaaccgggccaagcaagcaggaaagtcagtaggagtggtgaccaccacacgggtgcagcacgcctcgccagccggc

SEQ ID NO: 76597 - DNA, 201 bp, Homo sapiens; identical to SEQ ID NO: 76584

SEQ ID NO: 76598 - DNA, 201 bp, Homo sapiens
tcttcctcccaaccccagagactgcagatttgtgccatgcggctgcctgcaccccagacaataaagggaccaaaaccacccaacccccaccctgcctctakcctaaggaagaccaagcaggcctggacccagagacgtcccccatcgtgggacacgacacacccagaccgcgtgccccaccgtcttagcttcaatcctggc

SEQ ID NO: 76599 - DNA, 201 bp, Homo sapiens; identical to SEQ ID NO: 76586

SEQ ID NO: 76600 - DNA, 201 bp, Homo sapiens; identical to SEQ ID NO: 76587

SEQ ID NO: 76601 - DNA, 190 bp, Homo sapiens
ggttgggggtgcccacggtgacagccaccaggatcctaaaggggcagaagaatggcaaactggggcctgagacgcccctggccatggacygcttcccatacctggctctgtccaagacatacaatgtggacagacaggtgccagacagcgcagccacagccacggcctacctgtgcggggtcaaggccaa

SEQ ID NO: 76602 - DNA, 201 bp, Homo sapiens; identical to SEQ ID NO: 76589

SEQ ID NO: 76603 - DNA, 201 bp, Homo sapiens; identical to SEQ ID NO: 76591

SEQ ID NO: 76604 - DNA, 201 bp, Homo sapiens; identical to SEQ ID NO: 76592

SEQ ID NO: 76605 - DNA, 201 bp, Homo sapiens; identical to SEQ ID NO: 76594

SEQ ID NO: 76606 - DNA, 201 bp, Homo sapiens; identical to SEQ ID NO: 76596

SEQ ID NO: 76607 - DNA, 201 bp, Homo sapiens; identical to SEQ ID NO: 76584

SEQ ID NO: 76608 - DNA, 201 bp, Homo sapiens; identical to SEQ ID NO: 76598

SEQ ID NO: 76609 - DNA, 201 bp, Homo sapiens; identical to SEQ ID NO: 76586

SEQ ID NO: 76610 - DNA, 201 bp, Homo sapiens; identical to SEQ ID NO: 76587

SEQ ID NO: 76611 - DNA, 201 bp, Homo sapiens; identical to SEQ ID NO: 76588

SEQ ID NO: 76612 - DNA, 201 bp, Homo sapiens; identical to SEQ ID NO: 76589

SEQ ID NO: 76613 - DNA, 201 bp, Homo sapiens; identical to SEQ ID NO: 76590

SEQ ID NO: 76614 - DNA, 201 bp, Homo sapiens; identical to SEQ ID NO: 76591

SEQ ID NO: 76615 - DNA, 201 bp, Homo sapiens; identical to SEQ ID NO: 76592

SEQ ID NO: 76616 - DNA, 150 bp, Homo sapiens; identical to SEQ ID NO: 76593

SEQ ID NO: 76617 - DNA, 201 bp, Homo sapiens; identical to SEQ ID NO: 76594

SEQ ID NO: 76618 - DNA, 201 bp, Homo sapiens; identical to SEQ ID NO: 76595

SEQ ID NO: 76619 - DNA, 201 bp, Homo sapiens; identical to SEQ ID NO: 76596

SEQ ID NO: 76620 - DNA, 201 bp, Homo sapiens
cgggagcccatgcctacagaatccctgccctgctctacctgcctgggcagcagtccctgctggccttcgcggaacagcgggcaagcaagaaggatgagcaygcagagctgattgtcctgcgcagaggagactacgacgcacccacccaccaggttcagtggcaagctcaggaggtggtggcccaggcccggctggatggcc

SEQ ID NO: 76621 - DNA, 201 bp, Homo sapiens
ctggtggtgcccgcctacgcctaccggaaacttcaccccatccaaaggccgatcccctctgccttctgcttcctcagccatgaccatgggcgcacgtgggsgcgagggcactttgtggcccaggacaccctggagtgccaggtggccgaagtcgagactggggagcagagggtggtgaccctcaacgcgagaagccacctc

SEQ ID NO: 76622 - DNA, 201 bp, Homo sapiens
ctaccgggagtggtccacctttgcagtgggcccggggcattgtttgcagcttcacgacagggcccggagcctggtggtgcccgcctacgcctaccggaaasttcaccccatccaaaggccgatcccctctgccttctgcttcctcagccatgaccatgggcgcacgtgggcgcgagggcactttgtggcccaggacaccct

SEQ ID NO: 76623 - DNA, 201 bp, Homo sapiens
cagaaggagagcgtgttccagtcgggagcccatgcctacagaatccctgccctgctctacctgcctgggcagcagtccctgctggccttcgcggaacagcrggcaagcaagaaggatgagcacgcagagctgattgtcctgcgcagaggagactacgacgcacccacccaccaggttcagtggcaagctcaggaggtggtg

SEQ ID NO: 76624 - DNA, 133 bp, Homo sapiens
atggcgtcccttcctgtcctgcagaaggagagmgtgttccagtcgggagcccatgcctacagaatccctgccctgctctacctgcctgggcagcagtccctgctggccttcgcggaacagcgggcaagcaaga

SEQ ID NO: 76625 - DNA, 201 bp, Homo sapiens
tcaacgcgagaagccacctccgagccagggtccaggcccagagcaccaatgacgggcttgatttccaggagtctcagctggtgaagaagctggtggagccrccgccccagggctgccaggggagcgtcatcagcttccccagcccccgctcggggcctggctccccagcccagtggctgctctacactcaccccacacact

SEQ ID NO: 76626 - DNA, 201 bp, Homo sapiens
ccagcctaccgggagtggtccacctttgcagtgggcccggggcattgtttgcagcttcacgacagggcccggagcctggtggtgcccgcctacgcctaccrgaaacttcaccccatccaaaggccgatcccctctgccttctgcttcctcagccatgaccatgggcgcacgtgggcgcgagggcactttgtggcccaggac

SEQ ID NO: 76627 - DNA, 201 bp, Homo sapiens
gacctggagctcccccagagacctcactgatgcggccatcggcccagcctaccgggagtggtccacctttgcagtgggcccggggcattgtttgcagcttmacgacagggcccggagcctggtggtgcccgcctacgcctaccggaaacttcaccccatccaaaggccgatcccctctgccttctgcttcctcagccatga

SEQ ID NO: 76628 - DNA, 201 bp, Homo sapiens
cctggagctcccccagagacctcactgatgcggccatcggcccagcctaccgggagtggtccacctttgcagtgggcccggggcattgtttgcagcttcaygacagggcccggagcctggtggtgcccgcctacgcctaccggaaacttcaccccatccaaaggccgatcccctctgccttctgcttcctcagccatgacc

SEQ ID NO: 76629 - DNA, 201 bp, Homo sapiens
gcaacagcagctgcagaccagggccaatgtgacgcggctgtgccaagtcaccagcactgaccacgggaggacctggagctcccccagagacctcactgatrcggccatcggcccagcctaccgggagtggtccacctttgcagtgggcccggggcattgtttgcagcttcacgacagggcccggagcctggtggtgcccgc

SEQ ID NO: 76630 - DNA, 201 bp, Homo sapiens
agtgccaggtggccgaagtcgagactggggagcagagggtggtgaccctcaacgcgagaagccacctccgagccagggtccaggcccagagcaccaatgaygggcttgatttccaggagtctcagctggtgaagaagctggtggagccgccgccccagggctgccaggggagcgtcatcagcttccccagcccccgctcgg

SEQ ID NO: 76631 - DNA, 201 bp, Homo sapiens
aggcccggctggatggccaccggtccatgaacccatgccccttgtatgacgcgcagacggggaccctcttcctcttcttcattgccatccctgggcaagtmacggagcaacagcagctgcagaccagggccaatgtgacgcggctgtgccaagtcaccagcactgaccacgggaggacctggagctcccccagagacctca

SEQ ID NO: 76632 - DNA, 201 bp, Homo sapiens
aggttcagtggcaagctcaggaggtggtggcccaggcccggctggatggccaccggtccatgaacccatgccccttgtatgacgcgcagacggggaccctyttcctcttcttcattgccatccctgggcaagtcacggagcaacagcagctgcagaccagggccaatgtgacgcggctgtgccaagtcaccagcactgacc

SEQ ID NO: 76633 - DNA, 201 bp, Homo sapiens
acgcacccacccaccaggttcagtggcaagctcaggaggtggtggcccaggcccggctggatggccaccggtccatgaacccatgccccttgtatgacgcrcagacggggaccctcttcctcttcttcattgccatccctgggcaagtcacggagcaacagcagctgcagaccagggccaatgtgacgcggctgtgccaag

SEQ ID NO: 76634 - DNA, 201 bp, Homo sapiens
tcaagcacaggccttgcacctgcacccactgcatcgggcagcgcaagctctcggcctggttcgatgagaggttcaaccagaccatgcagccgctgctgacygcccagaacgcgctcttggaggacgacacctaccgatggtggctgaggctccagcgggagaagaagcccaataacttgaatgacaccatcaaggagctgt

SEQ ID NO: 76635 - DNA, 201 bp, Homo sapiens
tcgagagacattatcagctctttaaggattgcaggagaataggctactttattttctgaaaaggtaaatatatgcaagcaaagccaacatgccacgaatgrcgttggtctaccacacagccgtgtctgggacacagttgggggtcatcccccagcaggagtgaagtcgagcttagcggcccttgtgtcctcccttggaatt

SEQ ID NO: 76636 - DNA, 201 bp, Homo sapiens
aacaggataagatcctgatctaccacccagccttcatcaagtatgtctttgacaactggctgcaagggcacgggcgatacccatctaccggcatcctctcrgtcatcttctcaatgcatgtctgcgatgaggtggacttgtacggcttcggggcagacagcaaagggaactggcaccactactgggagaacaacccatccg

SEQ ID NO: 76637 - DNA, 201 bp, Homo sapiens
ttcaaccagaccatgcagccgctgctgactgcccagaacgcgctcttggaggacgacacctaccgatggtggctgaggctccagcgggagaagaagcccartaacttgaatgacaccatcaaggagctgttcagagtggtgcctgggaatgtggaccctatgctggagaagaggtcggtgggctgccggcgctgcgccgtt

SEQ ID NO: 76638 - DNA, 201 bp, Homo sapiens
cagccgatgacagacaaccttctgtgccttcatcaagctggttgtgtacccaccatgtccctggcgacaggatgggaaagaaaaagccctaattaaggatmgtcagaaaccacagttggaggaggacggcagagacagtttccctccccgctataccaacacccttccttcgaggtcctcgctcctgagggaccctggact

SEQ ID NO: 76639 - DNA, 201 bp, Homo sapiens
cggcagagacagtttccctccccgctataccaacacccttccttcgaggtcctcgctcctgagggaccctggactgtcacagagattaatgaccccttatyttctttggatgtgaaaggaaatcactggttaaagcttgatcgagagacattatcagctctttaaggattgcaggagaataggctactttattttctgaaa

SEQ ID NO: 76640 - DNA, 201 bp, Homo sapiens
tgtcacagagattaatgaccccttatcttctttggatgtgaaaggaaatcactggttaaagcttgatcgagagacattatcagctctttaaggattgcagragaataggctactttattttctgaaaaggtaaatatatgcaagcaaagccaacatgccacgaatggcgttggtctaccacacagccgtgtctgggacaca

SEQ ID NO: 76641 - DNA, 201 bp, Homo sapiens
ttgcttggcgtgataaccctgtcatcttcccaaagctcatttatgagccaccagaggctcctaccccaaagattttcacagaaacttgaggccaggtgccrtggctcacacctgtaatctgaacactttgggaggccgaggcgggaggatcacttgagcccaggagttcaagaccagcctgggcaacatagtgagactcct

SEQ ID NO: 76642 - DNA, 201 bp, Homo sapiens
acatcccggttcctgcaaagatcagagtgaaacaggataagatcctgatctaccacccagccttcatcaagtatgtctttgacaactggctgcaagggcaygggcgatacccatctaccggcatcctctcggtcatcttctcaatgcatgtctgcgatgaggtggacttgtacggcttcggggcagacagcaaagggaact

SEQ ID NO: 76643 - DNA, 201 bp, Homo sapiens; identical to SEQ ID NO: 76634

SEQ ID NO: 76644 - DNA, 201 bp, Homo sapiens; identical to SEQ ID NO: 76635

SEQ ID NO: 76645 - DNA, 201 bp, Homo sapiens; identical to SEQ ID NO: 76636

SEQ ID NO: 76646 - DNA, 201 bp, Homo sapiens; identical to SEQ ID NO: 76637

SEQ ID NO: 76647 - DNA, 201 bp, Homo sapiens
atggagatgacagacaaccttctgtgccttcatcaagctggttgtgtacccaccatgtccctggcgacaggatgggaaagaaaaagccctaattaaggatmgtcagaaaccacagttggaggaggacggcagagacagtttccctccccgctataccaacacccttccttcgaggtcctcgctcctgagggaccctggact

SEQ ID NO: 76648 - DNA, 201 bp, Homo sapiens; identical to SEQ ID NO: 76639

SEQ ID NO: 76649 - DNA, 201 bp, Homo sapiens; identical to SEQ ID NO: 76640

SEQ ID NO: 76650 - DNA, 201 bp, Homo sapiens; identical to SEQ ID NO: 76641

SEQ ID NO: 76651 - DNA, 201 bp, Homo sapiens; identical to SEQ ID NO: 76642

SEQ ID NO: 76652 - DNA, 201 bp, Homo sapiens; identical to SEQ ID NO: 76634

SEQ ID NO: 76653 - DNA, 201 bp, Homo sapiens; identical to SEQ ID NO: 76635

SEQ ID NO: 76654 - DNA, 201 bp, Homo sapiens; identical to SEQ ID NO: 76636

SEQ ID NO: 76655 - DNA, 201 bp, Homo sapiens; identical to SEQ ID NO: 76637

SEQ ID NO: 76656 - DNA, 201 bp, Homo sapiens; identical to SEQ ID NO: 76638

SEQ ID NO: 76657 - DNA, 201 bp, Homo sapiens; identical to SEQ ID NO: 76639

SEQ ID NO: 76658 - DNA, 201 bp, Homo sapiens; identical to SEQ ID NO: 76640

SEQ ID NO: 76659 - DNA, 201 bp, Homo sapiens; identical to SEQ ID NO: 76641

SEQ ID NO: 76660 - DNA, 201 bp, Homo sapiens; identical to SEQ ID NO: 76642

SEQ ID NO: 76661 - DNA, 201 bp, Homo sapiens; identical to SEQ ID NO: 76634

SEQ ID NO: 76662 - DNA, 201 bp, Homo sapiens; identical to SEQ ID NO: 76636

SEQ ID NO: 76663 - DNA, 201 bp, Homo sapiens; identical to SEQ ID NO: 76637

SEQ ID NO: 76664 - DNA, 201 bp, Homo sapiens; identical to SEQ ID NO: 76647

SEQ ID NO: 76665 - DNA, 201 bp, Homo sapiens; identical to SEQ ID NO: 76639

SEQ ID NO: 76666 - DNA, 201 bp, Homo sapiens
tgtcacagagattaatgaccccttatcttctttggatgtgaaaggaaatcactggttaaagcttgatcgagagacattatcagctctttaaggattgcagragaataggctactttattttctgaaaaggagggagttcctgctacccatcgtgggaggccaccatcaggactgcgaagatggtgaccctgcggaagagga

SEQ ID NO: 76667 - DNA, 201 bp, Homo sapiens; identical to SEQ ID NO: 76641

SEQ ID NO: 76668 - DNA, 201 bp, Homo sapiens; identical to SEQ ID NO: 76642

SEQ ID NO: 76669 - DNA, 201 bp, Homo sapiens
atcacagacaatgagaatgacgagacttttgtcactctggtcggttgcttcaagacctttgagagcatctacctgaaaaccttcctccaagagcaggcccrtttctggaatgtccgtaccttctttgtactcagccaggagagctcctcagagcagcttccctggagttaccaagagaaaacccactttggccacctgggc

SEQ ID NO: 76670 - DNA, 124 bp, Homo sapiens
agagctggtcagctgctgtcggagaaagccattcgcactggtctgtggctcggctgagttcaccaaagacatagccaggtgcttactgtgcgcaggcctcrctgaggactcctatttcctcttc

SEQ ID NO: 76671 - DNA, 201 bp, Homo sapiens
gggcacgggcctggcccccatggtgcctatcctgcagagcatcacagacaatgagaatgacgagacttttgtcactctggtcggttgcttcaagacctttsagagcatctacctgaaaaccttcctccaagagcaggcccgtttctggaatgtccgtaccttctttgtactcagccaggagagctcctcagagcagcttcc

SEQ ID NO: 76672 - DNA, 125 bp, Homo sapiens
atggctgagagggaagaggacgacracactgaggaagcctggatgcagctacggcccacagaacccttgccttcccagtgctgcggcagtggctgctcaccctgtgtgtttgacctctatcaccg

SEQ ID NO: 76673 - DNA, 134 bp, Homo sapiens
acctaattaaagagctggtcagctgctgtcggagaaagccattcgcactggtctgtggctcggctgagttcaccaaagacatagccaggtgcttactgtgygcaggcctcactgaggactcctatttcctcttc

SEQ ID NO: 76674 - DNA, 201 bp, Homo sapiens
gcctggatgcagctacggcccacagaacccttgccttcccagtgctgcggcagtggctgctcaccctgtgtgtttgacctctatcaccgagatctggcaaragggatagtagatgacttagaaattcagagagcctatacgcccatcagccctgccaacgcagaaggatactttgaagtgttaattaagtgctaccagatg

SEQ ID NO: 76675 - DNA, 201 bp, Homo sapiens
tcgctgatatttgtgagaagcacaaactctggatgcatgtggatgcagcttggggaggtggactgctgctatccagaaactattcctataaactcagtggyattgaaagttctgagggaatctttattcattttctcatacctagtgcattatcagctctgctgactggaactgttaacattatctctgcttcagctcctg

SEQ ID NO: 76676 - DNA, 201 bp, Homo sapiens
tattttcacctgtatatcaagcctttatggtattttagtagctcactataaacaatatccagagataaaaacaaaaggcatgactgcacttccatgcattrtattatttgtttctgagcaaggccaaactccattctgtgtctgtgccacagccggaagcacagtgtacggagccttcgaccctctccctgacatcgctga

SEQ ID NO: 76677 - DNA, 201 bp, Homo sapiens
taatatttctccaagtatcatccaaaattccccacagacaaggctttcgtcctcattaggtgttggcctcagcctaaccctctaggactgttctattaaaytgctgccagaattttacatccagttacctccactttctagaacatattctttactaatgttattgaaaccaatttctacttcatactgatgtttttggaa

SEQ ID NO: 76678 - DNA, 201 bp, Homo sapiens
atagatttgttgacttgaggtctggtttggttttgtttttgttttgttttgttttgttttgtttccaatagaattaagaattctaatgttgaaaaactgcmcaaatttttatgggacaaagcctagaaaagagaaatgtagtttgaatcataatctaaatcatcgtatgatagaagagggaaagttttggtgccataattt

SEQ ID NO: 76679 - DNA, 201 bp, Homo sapiens
tattcagataaacatcataaagcagaatacattataaataagtagaatatgaataaatagaataataaaattccaaaatactcaatgggaaatgactagtwatataggctttcaagagttggtaccttttagctatatttgcagattctctgggattttaaggaactgagaaaacagcaaagttgactaaattttatattt

SEQ ID NO: 76680 - DNA, 201 bp, Homo sapiens
gttacctccactttctagaacatattctttactaatgttattgaaaccaatttctacttcatactgatgtttttggaaacagcaattaaagtttttcttcyatgagttgagtccttaagaaaatgattccagttactcattttgcatatttgctattttaacattattggaccctgcatttatagtcctttgatttcttcc

SEQ ID NO: 76681 - DNA, 201 bp, Homo sapiens
tggagcagcatattgtatgggacgtatgaattctgactgttggtacttatatactctggatttcccagagagtcgggtaatcagtcagccagatcaaaccytggaaattctgatgagtgagcttgacccagcagttatggaccagttctacatgaaagatggtgttactgcaaaggatgtcactcgtgagagtggaattcg

SEQ ID NO: 76682 - DNA, 201 bp, Homo sapiens
ttaccagttttgctaagaagcagcaacaacagcagagttgattaagaaaaatgaagaaaaaacgcaaaaagagaacacatgtagaaggtggtggatgcttyctagatgtcgatgctgggggcagtgctttccataaccaccactgtgtagttgcagaaagccctagatgtaatgatagtgtaatcattttgaattgtatgc

SEQ ID NO: 76683 - DNA, 201 bp, Homo sapiens
ttgaagcttgctagggattacagtgggtttgactcaattcaaagcttcttttattctcgtaagaatttcatgaagccttctcaccaagggtacccacaccrgaatttccaggaagaaatagagtttcttaatgcaattttcccaaatggagcagcatattgtatgggacgtatgaattctgactgttggtacttatatact

SEQ ID NO: 76684 - DNA, 201 bp, Homo sapiens
gttgaagcttgctagggattacagtgggtttgactcaattcaaagcttcttttattctcgtaagaatttcatgaagccttctcaccaagggtacccacacyggaatttccaggaagaaatagagtttcttaatgcaattttcccaaatggagcagcatattgtatgggacgtatgaattctgactgttggtacttatatac

SEQ ID NO: 76685 - DNA, 201 bp, Homo sapiens; identical to SEQ ID NO: 76677

SEQ ID NO: 76686 - DNA, 201 bp, Homo sapiens
cgtaaacaatatcccaatagatttgttgacttgaggtctggtttggttttgtttttttttgtttccaatagaattaagaattctaatgttgaaaaactgcmcaaatttttatgggacaaagcctagaaaagagaaatgtagtttgaatcataatctaaatcatcgtatgatagaagagggaaagttttggtgccataattt

SEQ ID NO: 76687 - DNA, 201 bp, Homo sapiens; identical to SEQ ID NO: 76679

SEQ ID NO: 76688 - DNA, 201 bp, Homo sapiens; identical to SEQ ID NO: 76680

SEQ ID NO: 76689 - DNA, 201 bp, Homo sapiens; identical to SEQ ID NO: 76681

SEQ ID NO: 76690 - DNA, 201 bp, Homo sapiens; identical to SEQ ID NO: 76682

SEQ ID NO: 76691 - DNA, 201 bp, Homo sapiens; identical to SEQ ID NO: 76683

SEQ ID NO: 76692 - DNA, 201 bp, Homo sapiens; identical to SEQ ID NO: 76684

SEQ ID NO: 76693 - DNA, 201 bp, Homo sapiens
tgaaatcagaggaccaaagtacagatggaaaccatttcctacatcacaaaaacccaagtttacagcttgtactttactttaatgtgtaatactcaactcamggtacaagacaattgcatttaacattgttataaataaaaggaacatcagatcaatcattaagggctccagagtgaacagcatcttcataacttccatgtt

SEQ ID NO: 76694 - DNA, 201 bp, Homo sapiens
tagaagccatgtccaagctaaagccttactttcttactgatggaacgggaacagtcaccccagccaatgcttcaggaataaatgatggtgctgcagctgtygttcttatgaagaagtcagaagctgataaacgtgggcttacacctttagcacggatagtttcctggtcccaagtgggtgtggagccttccattatgggaa

SEQ ID NO: 76695 - DNA, 201 bp, Homo sapiens
ccaagacgtcaagtcggggaactccaacattggggtgtccagaaacactggggtttcaggcgctctgtaaatgcgtccgaggtccgcggttctgcccgcargcccagaccccggcctcacttccgccccgcgccccgcgccccggcctcacgtcccgcccgcggcaggcctgtgggctgcgaggaggagctttgcctagct

SEQ ID NO: 76696 - DNA, 201 bp, Homo sapiens
ctgatggaacgggaacagtcaccccagccaatgcttcaggaataaatgatggtgctgcagctgtcgttcttatgaagaagtcagaagctgataaacgtggrcttacacctttagcacggatagtttcctggtcccaagtgggtgtggagccttccattatgggaataggaccaattccagccataaagcaagctgttacaa

SEQ ID NO: 76697 - DNA, 201 bp, Homo sapiens
aatattgaaggaggggctatagccttgggccaccctcttggagcatctggctgtcgaattcttgtgaccctgttacacacactggagagaatgggcagaartcgtggtgttgcagccctgtgcattgggggtgggatgggaatagcaatgtgtgttcagagagaatgaattgcttaaactttgaacaacctcaatttcttt

SEQ ID NO: 76698 - DNA, 201 bp, Homo sapiens
cgtgggattccagtcctgagctgaacgagagataagtctttgtcaccccccagtctttactgtttcgagaaaccctaagattttttaaaaaaaagcccaaracgtcaagtcggggaactccaacattggggtgtccagaaacactggggtttcaggcgctctgtaaatgcgtccgaggtccgcggttctgcccgcaagccc

SEQ ID NO: 76699 - DNA, 193 bp, Homo sapiens
ttacagcttgtactttactttaatgtgtaatactcaactcaaggtacaagacaattgcatttaacattgttataaataaaaggaacatcagatcaatcatwaagggctccagagtgaacagcatcttcataacttccatgtttatcatctttactttctggatgtaatttaataagatcatcaattcgaagaa

SEQ ID NO: 76700 - DNA, 201 bp, Homo sapiens
caggacaaggttgcagttctgtcccagaacaggacagagaatgcacagaaagctggccattttgacaaagagattgtaccagttttggtgtcaactagaaraggtcttattgaagttaaaacagatgagtttcctcgccatgggagcaacatagaagccatgtccaagctaaagccttactttcttactgatggaacggga

SEQ ID NO: 76701 - DNA, 194 bp, Homo sapiens
tttacagcttgtactttactttaatgtgtaatactcaactcaaggtacaagacaattgcatttaacattgttataaataaaaggaacatcagatcaatcawtaagggctccagagtgaacagcatcttcataacttccatgtttatcatctttactttctggatgtaatttaataagatcatcaattcgaagaa

SEQ ID NO: 76702 - DNA, 201 bp, Homo sapiens
tacagatggaaaccatttcctacatcacaaaaacccaagtttacagcttgtactttactttaatgtgtaatactcaactcaaggtacaagacaattgcatytaacattgttataaataaaaggaacatcagatcaatcattaagggctccagagtgaacagcatcttcataacttccatgtttatcatctttactttctgg

SEQ ID NO: 76703 - DNA, 201 bp, Homo sapiens
gcccctcacgcgagcgaatgactggcgccaggagaaacgcataggacctcccgaagccgccgagagcaaaaggacccatcagagctgtgctgagacccgcygcgggccgggctcgcactcgagattctcgcccgtgggattccagtcctgagctgaacgagagataagtctttgtcaccccccagtctttactgtttcgag

SEQ ID NO: 76704 - DNA, 201 bp, Homo sapiens; identical to SEQ ID NO: 76693

SEQ ID NO: 76705 - DNA, 201 bp, Homo sapiens; identical to SEQ ID NO: 76694

SEQ ID NO: 76706 - DNA, 201 bp, Homo sapiens; identical to SEQ ID NO: 76695

SEQ ID NO: 76707 - DNA, 201 bp, Homo sapiens; identical to SEQ ID NO: 76696

SEQ ID NO: 76708 - DNA, 201 bp, Homo sapiens; identical to SEQ ID NO: 76697

SEQ ID NO: 76709 - DNA, 201 bp, Homo sapiens; identical to SEQ ID NO: 76698

SEQ ID NO: 76710 - DNA, 201 bp, Homo sapiens
ttacagcttgtactttactttaatgtgtaatactcaactcaaggtacaagacaattgcatttaacattgttataaataaaaggaacatcagatcaatcatwaagggctccagagtgaacagcatcttcataacttccatgtttatcatctttactttctggcattttagatttttacgttctgggttaacctgggcctcat

SEQ ID NO: 76711 - DNA, 201 bp, Homo sapiens; identical to SEQ ID NO: 76700

SEQ ID NO: 76712 - DNA, 201 bp, Homo sapiens
tttacagcttgtactttactttaatgtgtaatactcaactcaaggtacaagacaattgcatttaacattgttataaataaaaggaacatcagatcaatcawtaagggctccagagtgaacagcatcttcataacttccatgtttatcatctttactttctggcattttagatttttacgttctgggttaacctgggcctca

SEQ ID NO: 76713 - DNA, 201 bp, Homo sapiens; identical to SEQ ID NO: 76702

SEQ ID NO: 76714 - DNA, 201 bp, Homo sapiens; identical to SEQ ID NO: 76703

SEQ ID NO: 76715 - DNA, 201 bp, Homo sapiens; identical to SEQ ID NO: 76693

SEQ ID NO: 76716 - DNA, 201 bp, Homo sapiens; identical to SEQ ID NO: 76694

SEQ ID NO: 76717 - DNA, 201 bp, Homo sapiens; identical to SEQ ID NO: 76696

SEQ ID NO: 76718 - DNA, 201 bp, Homo sapiens; identical to SEQ ID NO: 76697

SEQ ID NO: 76719 - DNA, 193 bp, Homo sapiens; identical to SEQ ID NO: 76699

SEQ ID NO: 76720 - DNA, 201 bp, Homo sapiens; identical to SEQ ID NO: 76700

SEQ ID NO: 76721 - DNA, 194 bp, Homo sapiens; identical to SEQ ID NO: 76701

SEQ ID NO: 76722 - DNA, 201 bp, Homo sapiens; identical to SEQ ID NO: 76702

SEQ ID NO: 76723 - DNA, 201 bp, Homo sapiens
ggcagctggctccggttttggggtatctgggctccaggcagaagcacagcctccccgacctgccctacgactacggcgccctggaacctcacatcaacgckcagatcatgcagctgcaccacagcaagcaccacgcggcctacgtgaacaacctgaacgtcaccgaggagaagtaccaggaggcgttggccaagggtaggt

SEQ ID NO: 76724 - DNA, 167 bp, Homo sapiens
tacacatattgccagcactggtgaattgtagggcctgaaaagaaagctctactgtgtcactcgttttttttgcaaattgaaattgttcttgttgtataatrtgctttggggaaatgtttggtctctcaggtaggtgtgccagccgtttgcaggagggctgagagcgc

SEQ ID NO: 76725 - DNA, 201 bp, Homo sapiens
cggcagcggcttcagcagatcggcggcatcagcggtagcaccagcactagcagcatgttgagccgggcagtgtgcggcaccagcaggcagctggctccggytttggggtatctgggctccaggcagaagcacagcctccccgacctgccctacgactacggcgccctggaacctcacatcaacgcgcagatcatgcagctg

SEQ ID NO: 76726 - DNA, 201 bp, Homo sapiens
caacgcgcagatcatgcagctgcaccacagcaagcaccacgcggcctacgtgaacaacctgaacgtcaccgaggagaagtaccaggaggcgttggccaagrgtaggttccaggctgagcggcgggaggcagtccccggcagaggcgaccccagggagccaggccccatacggacgggcctctccgtggaggagaactcgct

SEQ ID NO: 76727 - DNA, 166 bp, Homo sapiens
acacatattgccagcactggtgaattgtagggcctgaaaagaaagctctactgtgtcactcgttttttttgcaaattgaaattgttcttgttgtataataygctttggggaaatgtttggtctctcaggtaggtgtgccagccgtttgcaggagggctgagagcgc

SEQ ID NO: 76728 - DNA, 201 bp, Homo sapiens
ggcagctggctccggttttggggtatctgggctccaggcagaagcacagcctccccgacctgccctacgactacggcgccctggaacctcacatcaacgckcagatcatgcagctgcaccacagcaagcaccacgcggcctacgtgaacaacctgaacgtcaccgaggagaagtaccaggaggcgttggccaagggagatg

SEQ ID NO: 76729 - DNA, 177 bp, Homo sapiens
cctattggaatattttctttatataggcgttttttttttttctttttttttggagacagagtcttgctctgttgcccaggctggagtgcagtggcgcgacyggagctcactgcaacctccacttcccgggttcaagtgattgtcccacctcagcctcctgaatagctgggattacag

SEQ ID NO: 76730 - DNA, 201 bp, Homo sapiens
aatgctttgtgtgattgaatctgattggacattttcttcagagagctaaattacaattgtcatttataaaaccatcaaaaatattccatccatatactttsgggacttgtagggatgcctttctagtcctattctattgcagttatagaaaatctagtcttttgccccagttacttaaaaataaaatattaacactttccc

SEQ ID NO: 76731 - DNA, 201 bp, Homo sapiens; identical to SEQ ID NO: 76725

SEQ ID NO: 76732 - DNA, 201 bp, Homo sapiens
tatttcatttgtttctaattgttactacagataatgctggggtgagcaactctgtgtacataggtttatctcctattggaatattttctttatataggcgttttttttttttctttttttttggagacagagtcttgctctgttgcccaggctggagtgcagtggcgcgaccggagctcactgcaacctccacttcccggg

SEQ ID NO: 76733 - DNA, 201 bp, Homo sapiens
atcgttatgctgagtatgttaagctctttatgactgtttttgtagtggtatagagtactgcagaatacagtaagctgctctattgtagcatttcttgatgytgcttagtcacttatttcataaacaacttaatgttctgaataatttcttactaaacattttgttattgggcaagtgattgaaaatagtaaatgctttgtg

SEQ ID NO: 76734 - DNA, 201 bp, Homo sapiens
caacgcgcagatcatgcagctgcaccacagcaagcaccacgcggcctacgtgaacaacctgaacgtcaccgaggagaagtaccaggaggcgttggccaagrgagatgttacagcccagatagctcttcagcctgcactgaagttcaatggtggtggtcatatcaatcatagcattttctggacaaacctcagccctaacgg

SEQ ID NO: 76735 - DNA, 103 bp, Homo sapiens
cccaggctggagtgcagtggcgcgaccggagctcactgcaacctccacttcccgggttcaagtgattgtcccacctcagcctcctgaatagctgggattayag

SEQ ID NO: 76736 - DNA, 181 bp, Homo sapiens
atctcctattggaatattttctttatataggcgttttttttttttctttttttttggagacagagtcttgctctgttgcccaggctggagtgcagtggcgygaccggagctcactgcaacctccacttcccgggttcaagtgattgtcccacctcagcctcctgaatagctgggattacag

SEQ ID NO: 76737 - DNA, 201 bp, Homo sapiens; identical to SEQ ID NO: 76728

SEQ ID NO: 76738 - DNA, 201 bp, Homo sapiens; identical to SEQ ID NO: 76730

SEQ ID NO: 76739 - DNA, 201 bp, Homo sapiens; identical to SEQ ID NO: 76725

SEQ ID NO: 76740 - DNA, 201 bp, Homo sapiens; identical to SEQ ID NO: 76733

SEQ ID NO: 76741 - DNA, 201 bp, Homo sapiens; identical to SEQ ID NO: 76734

SEQ ID NO: 76742 - DNA, 201 bp, Homo sapiens; identical to SEQ ID NO: 76728

SEQ ID NO: 76743 - DNA, 201 bp, Homo sapiens
cctattggaatattttctttatataggcgttttttttttttctttttttttggagacagagtcttgctctgttgcccaggctggagtgcagtggcgcgacyggagctcactgcaacctccacttcccgggttcaagtgattgtcccacctcagcctcctgaatagctgggattacaggtgtgagccactgcacctggccta

SEQ ID NO: 76744 - DNA, 201 bp, Homo sapiens; identical to SEQ ID NO: 76730

SEQ ID NO: 76745 - DNA, 201 bp, Homo sapiens; identical to SEQ ID NO: 76725

SEQ ID NO: 76746 - DNA, 201 bp, Homo sapiens
ttttgtgactgaatcagcagtgcctgccctagtcatagctgtgcttcaaaaacctcagcatgattagtgttggagcaaaacaaggaagcaaagcaaatacwgtttttgaaattctatctgttgcttgaactattttgtaataattaaactttgatgttgagaaatcacaactttattgtacacttcattgcaacttgaaat

SEQ ID NO: 76747 - DNA, 201 bp, Homo sapiens; identical to SEQ ID NO: 76732

SEQ ID NO: 76748 - DNA, 201 bp, Homo sapiens
ttcccgggttcaagtgattgtcccacctcagcctcctgaatagctgggattacaggtgtgagccactgcacctggcctatataggcttttttcttaaacctatttagtaatgttttcccaagtttattttttatttttaattttttccccaagtttatttttctatttttttttcatggaaaaatggggtaacttagcagt

SEQ ID NO: 76749 - DNA, 201 bp, Homo sapiens; identical to SEQ ID NO: 76733

SEQ ID NO: 76750 - DNA, 201 bp, Homo sapiens; identical to SEQ ID NO: 76734

SEQ ID NO: 76751 - DNA, 201 bp, Homo sapiens
tgtgtatgcatgcttgtggattggaaaaactttggagactgattacttttcattatatatgtgtcacagtgaaacagcttttatgtgtcatgtaagattaytgcttgcctctctaaggaaggtcgtgactgtttaaatagacgggcaaggtggaaccttttgaaagatgagcttttgaatataagttgtctgctagatcat

SEQ ID NO: 76752 - DNA, 201 bp, Homo sapiens
cccaggctggagtgcagtggcgcgaccggagctcactgcaacctccacttcccgggttcaagtgattgtcccacctcagcctcctgaatagctgggattayaggtgtgagccactgcacctggcctatataggcttttttcttaaacctatttagtaatgttttcccaagtttattttttatttttaattttttccccaag

SEQ ID NO: 76753 - DNA, 201 bp, Homo sapiens
ttatttttaattttttccccaagtttatttttctatttttttttcatggaaaaatggggtaacttagcagtttcaatattgaagactgaagtttaaaaaamatttaaattcaaggtacttttaaaattcagttagaaaagtaggctttaaaaattattagagacaagagtaccaaagcggtgtgtgtatgtgtgtgtgtgt

SEQ ID NO: 76754 - DNA, 201 bp, Homo sapiens
atctcctattggaatattttctttatataggcgttttttttttttctttttttttggagacagagtcttgctctgttgcccaggctggagtgcagtggcgygaccggagctcactgcaacctccacttcccgggttcaagtgattgtcccacctcagcctcctgaatagctgggattacaggtgtgagccactgcacctgg

SEQ ID NO: 76755 - DNA, 128 bp, Homo sapiens
agtttccatgcagaccccctgaagagggagtggcctagggagccccaccttgtcttgtaccatcaacaaagtcccctgtgctcagccaaaaaaataaatamataaaatttttttctataaagtttcta

SEQ ID NO: 76756 - DNA, 201 bp, Homo sapiens
aactgtggcatgacggtggtgggactctccagaacatcatccctgcctctactggcactgccaaggctgtgggcaaggtcatccctgagctgaacgggaarctcactggcatggccttctgtgtccccactgccaatgtgtcagtcgtggacctgatctaccatctggaaaaacctaccaaatatcatggcatcaagaagg

SEQ ID NO: 76757 - DNA, 128 bp, Homo sapiens; identical to SEQ ID NO: 76755

SEQ ID NO: 76758 - DNA, 201 bp, Homo sapiens; identical to SEQ ID NO: 76756

SEQ ID NO: 76759 - DNA, 128 bp, Homo sapiens; identical to SEQ ID NO: 76755

SEQ ID NO: 76760 - DNA, 201 bp, Homo sapiens; identical to SEQ ID NO: 76756

SEQ ID NO: 76761 - DNA, 201 bp, Homo sapiens
agggtgatgaaatgaagaaattgggaatacagcctattcctatgatggacagagacaagaaggatgaagtcccccaaggccagcttgggttctacaatgcygtggccattccctgctatacaacccttacccagatcctccctcccacggagcctcttctgaaagcatgcagggataatctcagtcagtgggagaaggtga

SEQ ID NO: 76762 - DNA, 201 bp, Homo sapiens
agaaggcagctgcatctgaagattgagcactggtcaccctgacacgctgtcccacctacagatcctcatcttgcttctttgacattcttttcctttttttkgggggggtggggggaacctgcacctggtaactggggtgcaaacctcttcaagaaggtaacatcaaataaataagtcaagcagaggacttcctgccaatct

SEQ ID NO: 76763 - DNA, 201 bp, Homo sapiens
tcagtaacagctacctgcagaagttcgaccaccctctggccgctctctactccacttccaccatggagcagcaccacttctcccagactgtgtccatcctycagttggaagggcacaatatcttctccactctgagctccagtgaatatgagcaggtgcttgagatcatccgcaaagccatcattgccacagaccttgctt

SEQ ID NO: 76764 - DNA, 201 bp, Homo sapiens
ttcacccccaggtattagatgaatttgtatctgaaagtgttagtgcagagacagtagagaaatggctgaagaggaagaacaacaaatcagaagatgaatcrgctcctaaggaagtcagcaggtaccaagatacgaatatgcagggagttgtatatgaactaaacagctatatagaacaacggttggacacaggaggagaca

SEQ ID NO: 76765 - DNA, 201 bp, Homo sapiens
acgtatcaaaaacatattttgataacatagttgcaatagattctctacttgaacacataatgatatatgcaaaaaacctggtgaatgccgatcgttgtgcrcttttccaggtggaccataagaacaaggagttatattcagacctttttgatattggagaggaaaaggaaggaaaacctgtcttcaagaagaccaaagaga

SEQ ID NO: 76766 - DNA, 201 bp, Homo sapiens
cccgttacaaaattgacggcaaatgatatatatgcagaattctgggctgagggtgatgaaatgaagaaattgggaatacagcctattcctatgatggacaragacaagaaggatgaagtcccccaaggccagcttgggttctacaatgccgtggccattccctgctatacaacccttacccagatcctccctcccacggag

SEQ ID NO: 76767 - DNA, 201 bp, Homo sapiens
ttcccgtgcgtctctgcaaagaaattgaattattccactttgacattggtccttttgaaaacatgtggcctggaatttttgtctacatggttcatcggtcmtgtgggacatcctgctttgagcttgaaaagttgtgtcgttttattatgtctgtgaagaagaactatcggcgggttccttatcacaactggaagcatgcgg

SEQ ID NO: 76768 - DNA, 201 bp, Homo sapiens
agaagagtggcaaggtctcatgcaattcacccttcccgtgcgtctctgcaaagaaattgaattattccactttgacattggtccttttgaaaacatgtggsctggaatttttgtctacatggttcatcggtcctgtgggacatcctgctttgagcttgaaaagttgtgtcgttttattatgtctgtgaagaagaactatcg

SEQ ID NO: 76769 - DNA, 201 bp, Homo sapiens
gaaacagagcagaaagtagtacaatcatgttggaccttctttctgttctctttactcttctcacagatcagatcactccatagaagcctgtgggtttcgayggtttcttctatacacctttttggttgaccagtattactatacaatgtaagtgttttaaaaaatacgaaagtaatactctgcaccccttcctacaaagat

SEQ ID NO: 76770 - DNA, 201 bp, Homo sapiens
caggtttgacagatgaaaaagtgaaggcatatctttctcttcacccccaggtattagatgaatttgtatctgaaagtgttagtgcagagacagtagagaartggctgaagaggaagaacaacaaatcagaagatgaatcagctcctaaggaagtcagcaggtaccaagatacgaatatgcagggagttgtatatgaactaa

SEQ ID NO: 76771 - DNA, 201 bp, Homo sapiens
cgttacaaaattgacggcaaatgatatatatgcagaattctgggctgagggtgatgaaatgaagaaattgggaatacagcctattcctatgatggacagaracaagaaggatgaagtcccccaaggccagcttgggttctacaatgccgtggccattccctgctatacaacccttacccagatcctccctcccacggagcc

SEQ ID NO: 76772 - DNA, 201 bp, Homo sapiens
ttgcaacagcaaatcttgcctgggcttcagtagcaatacatcaggtgcaggtatgcagaggccttgccaaacagacagaattgaatgacttcctactcgaygtatcaaaaacatattttgataacatagttgcaatagattctctacttgaacacataatgatatatgcaaaaaacctggtgaatgccgatcgttgtgcgc

SEQ ID NO: 76773 - DNA, 196 bp, Homo sapiens
ggctcctcctcttcccctccgccgcggcccgccccggcccgcaaacccaaacactccaggcgcccgcccgccgcgcgtgattctcgcctcgccgcmgcccagccctgcgcgccttgcccggcggcccccgcccggccgctccgggcccctggccccgcggagcgatgctgctgctggctgccgccttcctcgtggc

SEQ ID NO: 76774 - DNA, 138 bp, Homo sapiens
gacaaggctgattttgaagagagttgcttttgaaataaaatgatcacctgttctttatgtgactctcccactgaacctgcagacattatttttataccacrtgctaaggaagcccactcatctaactctgtagccctg

SEQ ID NO: 76775 - DNA, 201 bp, Homo sapiens
aacaaggagcttttataactctggttgcacgaaatgaggataagctgctgcaggcaaagaaagaaattgaaatgcactctattaatgacaaacaggtggtrctttgcatatcagttgatgtatctcaagactataaccaagtagagaatgtcataaaacaagcacaggagaaactgggtccagtggacatgctggtaaatt

SEQ ID NO: 76776 - DNA, 201 bp, Homo sapiens
ctttctttctttgtgtattttattcaagatgagttggacccattgccagtgagtctgaatgtcactgacagccctgtgttgtgctcaggactcactctgcygctggtggaaactcatggcttctctctctctttgatcccataaagctacgagggggacgggagagggcagtgcaatgggaagtaaagagatattttccag

SEQ ID NO: 76777 - DNA, 201 bp, Homo sapiens
ctacttgtttttcccatctcttcctttccaattttgcttatactgctgtaatatttttgtaaaaaaaaaaaaaaaggaaaaaaaagaccagctaaaatttycgacttgactttttaacttaactcatgaattaattaaagcaaatgaaaaaattaaaaagtgtgactttttctcggagcatatatgtagcttttaggaaag

SEQ ID NO: 76778 - DNA, 201 bp, Homo sapiens
tttaaaccttccataaaaaaacaattttcggtttctcgggttctctctctctctctctctgtctctctgtctctctgtctctctgtctctctgtctctctstctctctctctctctctctttctttctttgtgtattttattcaagatgagttggacccattgccagtgagtctgaatgtcactgacagccctgtgttgtg

SEQ ID NO: 76779 - DNA, 201 bp, Homo sapiens
cccttggaagaagactgtttccaaataatttgaacagcttgctgctaaatgggacccaatttttggcctatagacacttatgtattgttttcgaatacgtmagattggaccagtgctcttcaggaatgtggctgcaagcaaggggctagaagttcacctcctgacagtattattaatactatgcaaatatggaataggaga

SEQ ID NO: 76780 - DNA, 196 bp, Homo sapiens; identical to SEQ ID NO: 76773

SEQ ID NO: 76781 - DNA, 138 bp, Homo sapiens; identical to SEQ ID NO: 76774

SEQ ID NO: 76782 - DNA, 201 bp, Homo sapiens; identical to SEQ ID NO: 76775

SEQ ID NO: 76783 - DNA, 201 bp, Homo sapiens; identical to SEQ ID NO: 76776

SEQ ID NO: 76784 - DNA, 201 bp, Homo sapiens; identical to SEQ ID NO: 76777

SEQ ID NO: 76785 - DNA, 201 bp, Homo sapiens
aatcttgaggactttgtttaaaccttccataaaaaaacaattttcggtttctcggtctctgtctctctgtctctctgtctctctgtctctctgtctctctstctctctctctctctctctttctttctttgtgtattttattcaagatgagttggacccattgccagtgagtctgaatgtcactgacagccctgtgttgtg

SEQ ID NO: 76786 - DNA, 201 bp, Homo sapiens; identical to SEQ ID NO: 76779

SEQ ID NO: 76787 - DNA, 201 bp, Homo sapiens
ttaaaaaggttcgcggaccttcccgagctgatcctaaccatcttgtagatgatctgctaacaccttgctctccaggtgaccctggtgccattgaaatgacrtggatggatgtccctggagataaacttttggagccagttgtttccatgtcggatatgttgcggtcactatctaacacaaaacctacagtcaatgaacatg

SEQ ID NO: 76788 - DNA, 201 bp, Homo sapiens
aaccgcctgggaactccgccatgtcatccacttcgcccaacctccagaaagcgatagatctggctagcaaagcagcgcaagaagacaaggctgggaactaygaagaagcccttcagctctatcagcatgctgtgcagtattttcttcatgtcgttaaatatgaagcacagggtgataaagccaagcaaagtatcagggcaa

SEQ ID NO: 76789 - DNA, 201 bp, Homo sapiens
tttgcaaagagcatttatattttcttttttttttactaaaatgatatagggtttattttatattttcaaaaaaattgttaaacatcattcttatcaatgtwaaatttacgttattaaaaaattacaaatgatagaatctttactcagggatgggcaataaaacagcaaagagctttgtgattgggtttgaaagattttgaa

SEQ ID NO: 76790 - DNA, 201 bp, Homo sapiens
tttacgttattaaaaaattacaaatgatagaatctttactcagggatgggcaataaaacagcaaagagctttgtgattgggtttgaaagattttgaattayagacagtgctcttaatagtttttaataagttgatatttttttctgtgtagatttaaataatttctttaaaagcgtaagctttggctgggcatggtggctt

SEQ ID NO: 76791 - DNA, 201 bp, Homo sapiens
tccagtaaaactcttttaccacagggaaatacacatctcacttcagagttccattaggttttatattgtacttttcctccattacttattaaatactcctrttaacaaaaggtacaaaataacaggttatgaggaaatgagcgatatatgaacggcataaaaacagaaattacccagtaaaaaggatgtcagaaattgaca

SEQ ID NO: 76792 - DNA, 201 bp, Homo sapiens
aagcccttcagctctatcagcatgctgtgcagtattttcttcatgtcgttaaatatgaagcacagggtgataaagccaagcaaagtatcagggcaaagtgyacagaatatcttgatagagcagaaaaactaaaggagtacctgaaaaataaagagaaaaaagcacagaagccagtgaaagaaggacagccgagtccagcag

SEQ ID NO: 76793 - DNA, 201 bp, Homo sapiens
ggggaatcctattatttgggccgcctggaacaggaaagtcctacttagccaaagctgtagcaacagaagccaacaactcaacatttttttcaatatcttcytctgatcttgtttctaagtggctaggtgaaagtgaaaaactggttaagaatttattccaacttgccagagagaacaagccctccattatcttcattgatg

SEQ ID NO: 76794 - DNA, 201 bp, Homo sapiens; identical to SEQ ID NO: 76787

SEQ ID NO: 76795 - DNA, 201 bp, Homo sapiens; identical to SEQ ID NO: 76788

SEQ ID NO: 76796 - DNA, 201 bp, Homo sapiens; identical to SEQ ID NO: 76789

SEQ ID NO: 76797 - DNA, 201 bp, Homo sapiens; identical to SEQ ID NO: 76790

SEQ ID NO: 76798 - DNA, 201 bp, Homo sapiens; identical to SEQ ID NO: 76791

SEQ ID NO: 76799 - DNA, 201 bp, Homo sapiens; identical to SEQ ID NO: 76792

SEQ ID NO: 76800 - DNA, 201 bp, Homo sapiens; identical to SEQ ID NO: 76793

SEQ ID NO: 76801 - DNA, 201 bp, Homo sapiens
cctttggtgtccgcattgactacgtgctttacaaggcagtttctgggttttacatctcctgtaagagttttgaaaccactacaggctttgaccctcacagkggcacccccctctctgatcatgaagccctgatggctactctgtttgtgaggcacagccccccacagcagaaccccagctctacccacggaccagcagaga

SEQ ID NO: 76802 - DNA, 201 bp, Homo sapiens
gtctggggagaaggcgccgccggccgcccccgtccccaccgcggccgtcgctggagagttcgagccgcctagcgcccctggagctccccaaccatgaagcycaacttctccctgcgactgcggatcttcaacctcaactgctggggcattccgtacttgagcaagcaccgggccgaccgcatgaggcgcctgggagacttt

SEQ ID NO: 76803 - DNA, 201 bp, Homo sapiens
ctccccaaccatgaagcccaacttctccctgcgactgcggatcttcaacctcaactgctggggcattccgtacttgagcaagcaccgggccgaccgcatgmggcgcctgggagactttctgaaccaggagagcttcgacctggctttgctggaggaggtgtggagtgagcaggacttccagtacctgagacagaagctgtc

SEQ ID NO: 76804 - DNA, 201 bp, Homo sapiens
agccggccggttgccgggggaacgcgggagtcgggcccgacctgagccacgcgggcttggtgcccacctgtgcgcgccgcctgcgaagaaggaacggtctrgggagaaggcgccgccggccgcccccgtccccaccgcggccgtcgctggagagttcgagccgcctagcgcccctggagctccccaaccatgaagcccaac

SEQ ID NO: 76805 - DNA, 201 bp, Homo sapiens
gggtcctagcgcgcggcccttaccgagcctgggcgcccggatttcggcagcggatcgcctttccgggttggcggcccgcctgattgggaacagccggccgsttgccgggggaacgcgggagtcgggcccgacctgagccacgcgggcttggtgcccacctgtgcgcgccgcctgcgaagaaggaacggtctggggagaagg

SEQ ID NO: 76806 - DNA, 201 bp, Homo sapiens
tcggcagcggatcgcctttccgggttggcggcccgcctgattgggaacagccggccggttgccgggggaacgcgggagtcgggcccgacctgagccacgcrggcttggtgcccacctgtgcgcgccgcctgcgaagaaggaacggtctggggagaaggcgccgccggccgcccccgtccccaccgcggccgtcgctggaga

SEQ ID NO: 76807 - DNA, 201 bp, Homo sapiens
tggaggaaaaggaaccgggagccgcccacccgggggcgctctccggacccccagggtcctagcgcgcggcccttaccgagcctgggcgcccggatttcggyagcggatcgcctttccgggttggcggcccgcctgattgggaacagccggccggttgccgggggaacgcgggagtcgggcccgacctgagccacgcgggct

SEQ ID NO: 76808 - DNA, 201 bp, Homo sapiens
gtcgggcccgacctgagccacgcgggcttggtgcccacctgtgcgcgccgcctgcgaagaaggaacggtctggggagaaggcgccgccggccgcccccgtycccaccgcggccgtcgctggagagttcgagccgcctagcgcccctggagctccccaaccatgaagcccaacttctccctgcgactgcggatcttcaacct

SEQ ID NO: 76809 - DNA, 201 bp, Homo sapiens
gcggcccagcaacaggcgcaaagttgaggaaaggcccagccgccacgggccgccctcgacccgcccctgggccccgcctcctgcgagcggcggaggcgggsccgcgcggttgccggagcgacgcgcagtgtttggggtcaccgggcgtccccgggcgcggccatggcaaggccgcagccgtgcgggcccccgcacgctagg

SEQ ID NO: 76810 - DNA, 201 bp, Homo sapiens
aggacccgtgttcctatccttgttgtgccacttgacacgtttagcacaagggtccccacagtgttagttcaccgtctccagcaatcacgatgactccctgragggctgtcaaacgaaacaaaggcgcaaactgagacaattccattgtttacgtaactttcgccaaatcggctctttcctacgaaatatccagctcataga

SEQ ID NO: 76811 - DNA, 116 bp, Homo sapiens
tactactgttgattttgccctcggagcaaactgaataaagcaacaagatgaaaactgagtatcttatcccttttcaaaaagtacagttctggccaggtgcrgtagctcacgcctgt

SEQ ID NO: 76812 - DNA, 201 bp, Homo sapiens
atgactccctgaagggctgtcaaacgaaacaaaggcgcaaactgagacaattccattgtttacgtaactttcgccaaatcggctctttcctacgaaatatscagctcatagagcaggctgagatgctttgttgctttaattctctttaagagtcacagctgtccattttccacgtgcggctgaagaatggatttcagagcg

SEQ ID NO: 76813 - DNA, 201 bp, Homo sapiens
tgtggagtccaaaggacccgtgttcctatccttgttgtgccacttgacacgtttagcacaagggtccccacagtgttagttcaccgtctccagcaatcackatgactccctgaagggctgtcaaacgaaacaaaggcgcaaactgagacaattccattgtttacgtaactttcgccaaatcggctctttcctacgaaatat

SEQ ID NO: 76814 - DNA, 106 bp, Homo sapiens
tttgtytgtttatttttctatatagagacgaggtctcactgtgttgcccagcctggtatcgaacctctgggctcaagcgatcctcccgcttcggcctcccgaagta

SEQ ID NO: 76815 - DNA, 201 bp, Homo sapiens
tggtcctgcagcttataatgttccattgccaaagaaatcgattcagtcgggtccactaaaaatctctagtgtatcagaagtaatgaaagaatctaaacagyctgcctcacaactccaaaaacaaaagggagatactccagcttcagcaacagcacctacagaagcggctcaaattatttctgcagcaggtgataccctgtc

SEQ ID NO: 76816 - DNA, 201 bp, Homo sapiens
aggctgagatgctttgttgctttaattctctttaagagtcacagctgtccattttccacgtgcggctgaagaatggatttcagagcgctctccctccggcmgtgttcacctagtaaccccttccggataaggacctgcagcccgggcgcgacccggaaagggaatccgcccttttcgcctccttcgcgccaatcgcctgga

SEQ ID NO: 76817 - DNA, 201 bp, Homo sapiens
tctccagcaatcacgatgactccctgaagggctgtcaaacgaaacaaaggcgcaaactgagacaattccattgtttacgtaactttcgccaaatcggctcyttcctacgaaatatccagctcatagagcaggctgagatgctttgttgctttaattctctttaagagtcacagctgtccattttccacgtgcggctgaaga

SEQ ID NO: 76818 - DNA, 201 bp, Homo sapiens
aattctctttaagagtcacagctgtccattttccacgtgcggctgaagaatggatttcagagcgctctccctccggcagtgttcacctagtaaccccttcsggataaggacctgcagcccgggcgcgacccggaaagggaatccgcccttttcgcctccttcgcgccaatcgcctggagttggcgtttccgcagccgggac

SEQ ID NO: 76819 - DNA, 201 bp, Homo sapiens
cagccgggacacagcccaccctctaagagccgcggagtcggggacggtagaaggggccgcgcgtgcgcagtggcgtccgctgtgcttccggtgcgccgggygcggacgcgggcacgcacacacgcaagcacgcctccacttaactcgcgccgccgcggcagctcgagtccaccagcagcgccgtccgcttgaccgagatgc

SEQ ID NO: 76820 - DNA, 201 bp, Homo sapiens
ttcaacggtgcttctgcattgacttcccattttccaacccatccacaaactgcagccaaaatgatgttactacagtaacaacttggagaaagcagtgtggyttaatctggaaggagcagaagctgtggagtccaaaggacccgtgttcctatccttgttgtgccacttgacacgtttagcacaagggtccccacagtgtta

SEQ ID NO: 76821 - DNA, 201 bp, Homo sapiens
ctgaggctaaggttgtatctcagtatcatgagctggtggtccaagctcgggatgactttaaacgagagctggacagtattactccagaagtccttcctggrtggaaaggaatgaatgctcttttgcttagctgacaagctctctactgatgatctgaactccctcattgctcatgcacatcgtcgtattgatcagctgaac

SEQ ID NO: 76822 - DNA, 201 bp, Homo sapiens
gacaattctgagattgcaggcgagaagaaatctgctcagtggcgcacagtggagggtgcattgaaggaacgcagaaaggcagtagatgaagctgccgatgyccttctcaaagccaaagaagagttagagaagatgaaaagtgtgattgaaaatgcaaagaaaaaagaggttgctggggccaagcctcatataactgctgca

SEQ ID NO: 76823 - DNA, 201 bp, Homo sapiens
ctcatataactgctgcagagggtaaacttcacaacatgatagttgatctggataatgtggtcaaaaaggtccaagcagctcagtctgaggctaaggttgtrtctcagtatcatgagctggtggtccaagctcgggatgactttaaacgagagctggacagtattactccagaagtccttcctgggtggaaaggaatgaatg

SEQ ID NO: 76824 - DNA, 201 bp, Homo sapiens
gagtccctgacccgtggggtgtacagtgaagagacccttagagcccgtttctatgctgttcaaaaactggcccgaagggtagcaatgattgatgaaaccakaaatagcttgtaccagtacttcctctcctacctacagtccctgctcctattcccacctcagcaactgaagccgcccccagagctctgccctgaggatata

SEQ ID NO: 76825 - DNA, 201 bp, Homo sapiens
gatgaagggttcgcagcgagagtcccggacttgtctagaaatgagcaggtttacaagtactgttctaaatgttaacacctgttgcatttatattctttccwtttgctatcatgtcagtgaacgccaggagtgctttctttgcaacttgtgtaacattttctgttttttcaggttttactgatgaggcttgtgaggccaatc

SEQ ID NO: 76826 - DNA, 201 bp, Homo sapiens
gaactccctcattgctcatgcacatcgtcgtattgatcagctgaacagagagctggcagaacagaaggccaccgaaaagcagcacatcacgttagccttgragaaacaaaagctggaagaaaagcgggcatttgactctgcagtagcaaaagcattagaacatcacagaagtgaaatacaggctgaacaggacagaaagat

SEQ ID NO: 76827 - DNA, 201 bp, Homo sapiens
aagccagaaaagcccaccaactctggctttcagtggaggcattaaagtacagcatgaagacctcatctgcagaaacacctactatcccgctgggtagtgcrgttgaggccatcaaagccaactgttctgataatgaattcacccaagctttaaccgcagctatccctccagagtccctgacccgtggggtgtacagtgaag

SEQ ID NO: 76828 - DNA, 201 bp, Homo sapiens; identical to SEQ ID NO: 76810

SEQ ID NO: 76829 - DNA, 116 bp, Homo sapiens; identical to SEQ ID NO: 76811

SEQ ID NO: 76830 - DNA, 201 bp, Homo sapiens; identical to SEQ ID NO: 76812

SEQ ID NO: 76831 - DNA, 201 bp, Homo sapiens; identical to SEQ ID NO: 76813

SEQ ID NO: 76832 - DNA, 106 bp, Homo sapiens; identical to SEQ ID NO: 76814

SEQ ID NO: 76833 - DNA, 201 bp, Homo sapiens; identical to SEQ ID NO: 76817

SEQ ID NO: 76834 - DNA, 201 bp, Homo sapiens; identical to SEQ ID NO: 76816

SEQ ID NO: 76835 - DNA, 201 bp, Homo sapiens; identical to SEQ ID NO: 76815

SEQ ID NO: 76836 - DNA, 201 bp, Homo sapiens; identical to SEQ ID NO: 76818

SEQ ID NO: 76837 - DNA, 201 bp, Homo sapiens; identical to SEQ ID NO: 76820

SEQ ID NO: 76838 - DNA, 201 bp, Homo sapiens; identical to SEQ ID NO: 76819

SEQ ID NO: 76839 - DNA, 201 bp, Homo sapiens
ctgaggctaaggttgtatctcagtatcatgagctggtggtccaagctcgggatgactttaaacgagagctggacagtattactccagaagtccttcctggrtggaaaggaatgactgacaagctctctactgatgatctgaactccctcattgctcatgcacatcgtcgtattgatcagctgaacagagagctggcagaac

SEQ ID NO: 76840 - DNA, 201 bp, Homo sapiens; identical to SEQ ID NO: 76822

SEQ ID NO: 76841 - DNA, 201 bp, Homo sapiens
ctcatataactgctgcagagggtaaacttcacaacatgatagttgatctggataatgtggtcaaaaaggtccaagcagctcagtctgaggctaaggttgtrtctcagtatcatgagctggtggtccaagctcgggatgactttaaacgagagctggacagtattactccagaagtccttcctgggtggaaaggaatgactg

SEQ ID NO: 76842 - DNA, 201 bp, Homo sapiens; identical to SEQ ID NO: 76824

SEQ ID NO: 76843 - DNA, 201 bp, Homo sapiens; identical to SEQ ID NO: 76826

SEQ ID NO: 76844 - DNA, 201 bp, Homo sapiens; identical to SEQ ID NO: 76825

SEQ ID NO: 76845 - DNA, 201 bp, Homo sapiens; identical to SEQ ID NO: 76827

SEQ ID NO: 76846 - DNA, 107 bp, Homo sapiens
ttggatttgagaacccagggcggggattttcttggcacagtcaggtcttgggtccctcttcctgtgctttcttgtctgaggccttagggggaagagctcakcctctg

SEQ ID NO: 76847 - DNA, 201 bp, Homo sapiens
agaatggggacattctgctactgaaccgacagcccacactgcacagaccctccatccaggcccaccgtgcccgcatcctgcctgaagagaaagtgctgcgrctccactatgccaactgcaaggcctataatgccgactttgatggagacgagatgaatgcccatttcccccagagtgagctgggccgggccgaggcctacg

SEQ ID NO: 76848 - DNA, 201 bp, Homo sapiens
ctggctttaaccctgactcgatgtgcgagtcccaggtgatcatcagggaaggggagctgctctgcggagtgctggacaaggcgcactatgggagctccgcytacggcctggtccactgctgctatgagatctatggaggcgagaccagcggcaaggttctaacctgcctggcccgcctcttcaccgcctacctgcagctct

SEQ ID NO: 76849 - DNA, 201 bp, Homo sapiens
ctctcttctggaaggcacatatgaatgctaagcgctgtccccactgcaagaccgggcgatccgttgtccgaaaggaacacaacagcaagttgactatcacrtttccagccatggtgcacaggacagctggccagaaggactctgagcccctgggaattgaggaagctcagataggaaaacgaggatacttaacacccacca

SEQ ID NO: 76850 - DNA, 201 bp, Homo sapiens
gggatctggacaacgctggggagttggggaggagtcggggagagcaggagggtgatgaggaagaggaggggcacattgtggatgctgaagctgaggagggrgacgccgatgcctctgatgccaaacgcaaggagaagcaggaggaggaggttgattatgagagtgaggaagaggaggagagggagggcgaggagaacgacg

SEQ ID NO: 76851 - DNA, 201 bp, Homo sapiens
gaaaaagactctttgattgctattgaccgatcctttttgagtacacttccaggccagtccctcatagacaaactttacaacatttggattcgccttcagarccacgtcaatattgtgtttgatagcgagatggacaaactaatgatggacaagtacccaggcattaggcagatcctggagaagaaagaaggcctgttccga

SEQ ID NO: 76852 - DNA, 201 bp, Homo sapiens
tgtcatgaaggatgtagttctgattcgaaaacttctggcattgatggcccaagaacagaagttgccagaggaagtggccacacccactacagatgaggaaraagactctttgattgctattgaccgatcctttttgagtacacttccaggccagtccctcatagacaaactttacaacatttggattcgccttcagagcca

SEQ ID NO: 76853 - DNA, 201 bp, Homo sapiens
catggacagaaaagacagagaggacttgtacaaaggctttgtaaaaccagaggctagcttctatctttgtctactgttatttcagctcagggcgggtaatwaacatcattggaactagctattaggaaagaaaaaaaacttggttttttttacaacaattttttcccttggtttgcagtttctgcatttggatttgagaac

SEQ ID NO: 76854 - DNA, 201 bp, Homo sapiens
gtcggagacccccgctgatggcgtctggcaagtcactgccctgctttgagccttatgagttcacccccagggctggtggctttgtcactggcaggttcctyaccggcatcaaacctcctgagttcttcttccactgcatggcaggacgagagggcctggtggacactgctgtgaaaaccagccgctcaggctatctccaaa

SEQ ID NO: 76855 - DNA, 201 bp, Homo sapiens
gattcacctcttactctgccagctgagggttctggaagtcggggccctacaagcagtctacgagcttgagagaattctgaacaggtttctggaagaaaatsccgatccctctgcctctgaaattcgggaggaattagaacaatacacaactgaaattgtgcagaacaacctcctggggtcccagggcgcacatgtaaagaa

SEQ ID NO: 76856 - DNA, 201 bp, Homo sapiens
acttcagcaactgttctgggcacctgggccacattgagctcccactcacagtgtataaccctctcctcttcgataagctgtacctgctgcttcggggctcytgtttaaactgccacatgctgacttgtccccgggccgtgattcacctcttactctgccagctgagggttctggaagtcggggccctacaagcagtctacg

SEQ ID NO: 76857 - DNA, 201 bp, Homo sapiens
ccaacgacatccacgccatagccaacacgtatggcattgaggccgcgctgcgggtgatcgagaaggagatcaaggatgtgtttgccgtgtatggcatcgcrgtcgaccctcgccatctctccctggttgctgattatatgtgcttcgagggtgtttacaagccactgaatcgctttgggatccggtcaaactcttccccgc

SEQ ID NO: 76858 - DNA, 201 bp, Homo sapiens
agcttgtgctaaacacagaaggaatcaacctcccagagctattcaagtatgcagaggtcctggatctgcgccgcctctactccaacgacatccacgccatrgccaacacgtatggcattgaggccgcgctgcgggtgatcgagaaggagatcaaggatgtgtttgccgtgtatggcatcgcggtcgaccctcgccatctct

SEQ ID NO: 76859 - DNA, 201 bp, Homo sapiens
tgaaaaccgcaatggccgcagccctgggactcaggagatgctgaggatgtggtatgagttggatgaggaaagccgaaggaaataccagaagaaggcggccrcttgtcctgaccccagtctgtctgtctggcgtcctgacatctactttgcatcagtgtcagaaacatttgaaacaaaggttgatgactacagtcaagagtg

SEQ ID NO: 76860 - DNA, 201 bp, Homo sapiens
gaggagaacgacgatgaagacatgcaggaggaacgaaatccccacagggaaggtgctcgaaagacccaagagcaagatgaagaggtgggcttaggcactgrggaggacccgtcccttcccgccctcctgacgcagccccggaaacccacccacagccaggagccccaggggcccgaggccatggagcgccgggtccaggct

SEQ ID NO: 76861 - DNA, 201 bp, Homo sapiens
aagacccaagagcaagatgaagaggtgggcttaggcactgaggaggacccgtcccttcccgccctcctgacgcagccccggaaacccacccacagccaggrgccccaggggcccgaggccatggagcgccgggtccaggctgtgcgtgagatccacccgttcatagatgactaccagtacgacaccgaggagagcctgtgg

SEQ ID NO: 76862 - DNA, 201 bp, Homo sapiens
agagagtgaaaagcctgaagaagcaactcaccagggtgtgcttgggggaggtgttgcagaaaattgacgtccaggagtccttctgtatggaagaaaaacasaacaaattccaggtgtaccagctgcggtttcagttcctgccacatgcatattaccagcaggagaagtgcctgagacccgaggacatcctgcgcttcatgg

SEQ ID NO: 76863 - DNA, 201 bp, Homo sapiens
ggcccgcctcttcaccgcctacctgcagctctacagaggcttcaccttgggcgtggaagacattttggtgaagccaaaggcagatgtcaagaggcaacgtrtcattgaagaatccacccactgcgggccccaggctgtcagggctgcattaaacctgccagaagccgcatcatatgatgaggtccgaggaaaatggcagga

SEQ ID NO: 76864 - DNA, 201 bp, Homo sapiens
acaggttgaggaccttgctgcagctgaagtggcagcgctcactgtgtgagccgggcgaggctgtgggcctgctggctgcccagagcatcggagagccctcyacccagatgaccctcaacaccttccactttgcaggcagaggcgagatgaacgtcaccctgggcattccaaggttgcgggagattctcatggtggccagcg

SEQ ID NO: 76865 - DNA, 201 bp, Homo sapiens; identical to SEQ ID NO: 76847

SEQ ID NO: 76866 - DNA, 201 bp, Homo sapiens; identical to SEQ ID NO: 76848

SEQ ID NO: 76867 - DNA, 201 bp, Homo sapiens; identical to SEQ ID NO: 76855

SEQ ID NO: 76868 - DNA, 201 bp, Homo sapiens; identical to SEQ ID NO: 76849

SEQ ID NO: 76869 - DNA, 201 bp, Homo sapiens; identical to SEQ ID NO: 76856

SEQ ID NO: 76870 - DNA, 201 bp, Homo sapiens; identical to SEQ ID NO: 76851

SEQ ID NO: 76871 - DNA, 201 bp, Homo sapiens; identical to SEQ ID NO: 76852

SEQ ID NO: 76872 - DNA, 198 bp, Homo sapiens
tgaaaaccgcaatggccgcagccctgggactcaggagatgctgaggatgtggtatgagttggatgaggaaagccgaaggaaataccagaagaaggcggccrcttgtcctgaccccagtctgtctgtctggcgtcctgacatctactttgcatcagtgtcagaaacatttgaaacaaaggttgatgactacagtcaaga

SEQ ID NO: 76873 - DNA, 201 bp, Homo sapiens; identical to SEQ ID NO: 76863

SEQ ID NO: 76874 - DNA, 201 bp, Homo sapiens; identical to SEQ ID NO: 76854

SEQ ID NO: 76875 - DNA, 107 bp, Homo sapiens; identical to SEQ ID NO: 76846

SEQ ID NO: 76876 - DNA, 201 bp, Homo sapiens; identical to SEQ ID NO: 76847

SEQ ID NO: 76877 - DNA, 201 bp, Homo sapiens; identical to SEQ ID NO: 76848

SEQ ID NO: 76878 - DNA, 201 bp, Homo sapiens; identical to SEQ ID NO: 76849

SEQ ID NO: 76879 - DNA, 201 bp, Homo sapiens; identical to SEQ ID NO: 76851

SEQ ID NO: 76880 - DNA, 201 bp, Homo sapiens; identical to SEQ ID NO: 76850

SEQ ID NO: 76881 - DNA, 201 bp, Homo sapiens; identical to SEQ ID NO: 76852

SEQ ID NO: 76882 - DNA, 201 bp, Homo sapiens; identical to SEQ ID NO: 76853

SEQ ID NO: 76883 - DNA, 201 bp, Homo sapiens; identical to SEQ ID NO: 76854

SEQ ID NO: 76884 - DNA, 201 bp, Homo sapiens; identical to SEQ ID NO: 76855

SEQ ID NO: 76885 - DNA, 201 bp, Homo sapiens; identical to SEQ ID NO: 76856

SEQ ID NO: 76886 - DNA, 201 bp, Homo sapiens; identical to SEQ ID NO: 76857

SEQ ID NO: 76887 - DNA, 201 bp, Homo sapiens; identical to SEQ ID NO: 76858

SEQ ID NO: 76888 - DNA, 201 bp, Homo sapiens
ctgggactcaggagctgagacccatccttctgttcagatgctgaggatgtggtatgagttggatgaggaaagccgaaggaaataccagaagaaggcggccrcttgtcctgaccccagtctgtctgtctggcgtcctgacatctactttgcatcagtgtcagaaacatttgaaacaaaggttgatgactacagtcaagagtg

SEQ ID NO: 76889 - DNA, 201 bp, Homo sapiens; identical to SEQ ID NO: 76861

SEQ ID NO: 76890 - DNA, 201 bp, Homo sapiens; identical to SEQ ID NO: 76860

SEQ ID NO: 76891 - DNA, 201 bp, Homo sapiens; identical to SEQ ID NO: 76862

SEQ ID NO: 76892 - DNA, 201 bp, Homo sapiens; identical to SEQ ID NO: 76863

SEQ ID NO: 76893 - DNA, 201 bp, Homo sapiens; identical to SEQ ID NO: 76864

SEQ ID NO: 76894 - DNA, 201 bp, Homo sapiens
ttggatttgagaacccagggcggggattttcttggcacagtcaggtcttgggtccctcttcctgtgctttcttgtctgaggccttagggggaagagctcakcctctgcagcctcctccacctctgcccctggcctgcctctgctgtgacctccttccagagctagctgctggccctgtggccaggagaagcagaggggaga

SEQ ID NO: 76895 - DNA, 201 bp, Homo sapiens
acctggaaagtgacagagttgctcatccttgcccctccctgtctctggatttttatcaaggtttaccaagtcttctgagtccccctgagatggctggggcytcacctgtgctgcaggaggcctctgtggcataacccctaaggagaagtcctgattcacgattcactgagaagaccaaggggaagccatgctttgctgctg

SEQ ID NO: 76896 - DNA, 201 bp, Homo sapiens; identical to SEQ ID NO: 76847

SEQ ID NO: 76897 - DNA, 201 bp, Homo sapiens; identical to SEQ ID NO: 76848

SEQ ID NO: 76898 - DNA, 201 bp, Homo sapiens; identical to SEQ ID NO: 76849

SEQ ID NO: 76899 - DNA, 201 bp, Homo sapiens; identical to SEQ ID NO: 76850

SEQ ID NO: 76900 - DNA, 201 bp, Homo sapiens; identical to SEQ ID NO: 76851

SEQ ID NO: 76901 - DNA, 201 bp, Homo sapiens; identical to SEQ ID NO: 76852

SEQ ID NO: 76902 - DNA, 201 bp, Homo sapiens; identical to SEQ ID NO: 76853

SEQ ID NO: 76903 - DNA, 201 bp, Homo sapiens; identical to SEQ ID NO: 76854

SEQ ID NO: 76904 - DNA, 201 bp, Homo sapiens; identical to SEQ ID NO: 76855

SEQ ID NO: 76905 - DNA, 201 bp, Homo sapiens; identical to SEQ ID NO: 76856

SEQ ID NO: 76906 - DNA, 201 bp, Homo sapiens; identical to SEQ ID NO: 76857

SEQ ID NO: 76907 - DNA, 201 bp, Homo sapiens; identical to SEQ ID NO: 76858

SEQ ID NO: 76908 - DNA, 201 bp, Homo sapiens; identical to SEQ ID NO: 76859

SEQ ID NO: 76909 - DNA, 201 bp, Homo sapiens; identical to SEQ ID NO: 76861

SEQ ID NO: 76910 - DNA, 201 bp, Homo sapiens; identical to SEQ ID NO: 76860

SEQ ID NO: 76911 - DNA, 201 bp, Homo sapiens; identical to SEQ ID NO: 76862

SEQ ID NO: 76912 - DNA, 201 bp, Homo sapiens; identical to SEQ ID NO: 76863

SEQ ID NO: 76913 - DNA, 201 bp, Homo sapiens; identical to SEQ ID NO: 76864

SEQ ID NO: 76914 - DNA, 201 bp, Homo sapiens
ggtgcacccagccaaagacaaagctgcctccacgtgcccaaggattcagatggtgcactggccccgggaggagtctgaccaaaaatggagcccgctctgtggggaagccccgactcccccacgagaaacggtcccacggtgcggatctcccccttcccttgtggggcacagctggcctgggcctccaatcctgcggagctt

SEQ ID NO: 76915 - DNA, 201 bp, Homo sapiens
gcgccgacgggagcgctgccgtgggtccaggcagagagacacaggcaactccggagtccgggaagcaaacgctgaagatctttgatggcgacgacgcggtragaagaagccagttccgcctcgttacggtgtcccgcctggccggtgccgaggaggtgctggaggccgcactgcgggcccaccacatccccgaggaccctg

SEQ ID NO: 76916 - DNA, 201 bp, Homo sapiens
tctctgctcccgccagccttgttttcaggtggtctggaggcagctccacgtccacacagtggccggccctgtggtcggacctggctacagccctgaccacrgcatcttcccagtgacggagcgggacccgccctcatcccattggtgacacatgttggtgtcacagccctcatcccactggagactggtgtgcgggtggca

SEQ ID NO: 76917 - DNA, 201 bp, Homo sapiens
gtccaggcagagagacacaggcaactccggagtccgggaagcaaacgctgaagatctttgatggcgacgacgcggtgagaagaagccagttccgcctcgtyacggtgtcccgcctggccggtgccgaggaggtgctggaggccgcactgcgggcccaccacatccccgaggaccctggccacctggagctgtgccggctgc

SEQ ID NO: 76918 - DNA, 201 bp, Homo sapiens
ccccactgagccccttgagctggacagtgctggatgcaggccgtccaggtgggtctgatctcactttgtgcccctcgggccgtccccctggccagtccttmagagcagcaggctccctggtgtgtccctgccccagcagacacaggctgccagtccctccagcctcacctccccgccctgggcagcaggtgtgggcagcgt

SEQ ID NO: 76919 - DNA, 201 bp, Homo sapiens
cagaagccgaggagggccgggaccaccagggatgcccgggcggatgctgcgcctgcccctgagagcgatcctaggtaggggtggctggggcagcccaaggkctcgagccatctctgctcccgccagccttgttttcaggtggtctggaggcagctccacgtccacacagtggccggccctgtggtcggacctggctacagc

SEQ ID NO: 76920 - DNA, 201 bp, Homo sapiens
tggccttgttatatacagatggcagcttggatctcaggtacagctccaggggcaggcagtgcccagctggacctggtggccctttcctagtgcctctgctkggggaggagaacctctgtccacgtggaggctaggaggtctcaggtgctgccctggcagcaccagagtgtgggccgggcccgagtgtctgcccctcggccc

SEQ ID NO: 76921 - DNA, 201 bp, Homo sapiens
cgttctccgtactgctgtctgtggacgaggccgacgccgtgctcatggaccgctggaccatcctgctggatgcccacgaggctggcagtgcagagaacgayacggcagacgcagagccccccaagatcgtgcagatgagtaactactgtggcattggcatcgacgcggagctgagcctggacttccaccaggcacgggaag

SEQ ID NO: 76922 - DNA, 201 bp, Homo sapiens
gggcagcccaagggctcgagccatctctgctcccgccagccttgttttcaggtggtctggaggcagctccacgtccacacagtggccggccctgtggtcgracctggctacagccctgaccacagcatcttcccagtgacggagcgggacccgccctcatcccattggtgacacatgttggtgtcacagccctcatcccac

SEQ ID NO: 76923 - DNA, 201 bp, Homo sapiens
tgctggatgcccacgaggctggcagtgcagagaacgacacggcagacgcagagccccccaagatcgtgcagatgagtaactactgtggcattggcatcgaygcggagctgagcctggacttccaccaggcacgggaagaggagcctggcaagttcacaagcaggctgcacaacaagggtgtgtacgtgcgggtggggctgc

SEQ ID NO: 76924 - DNA, 201 bp, Homo sapiens
catctctgctcccgccagccttgttttcaggtggtctggaggcagctccacgtccacacagtggccggccctgtggtcggacctggctacagccctgaccrcagcatcttcccagtgacggagcgggacccgccctcatcccattggtgacacatgttggtgtcacagccctcatcccactggagactggtgtgcgggtgg

SEQ ID NO: 76925 - DNA, 201 bp, Homo sapiens
gtaggggtggctggggcagcccaagggctcgagccatctctgctcccgccagccttgttttcaggtggtctggaggcagctccacgtccacacagtggccrgccctgtggtcggacctggctacagccctgaccacagcatcttcccagtgacggagcgggacccgccctcatcccattggtgacacatgttggtgtcaca

SEQ ID NO: 76926 - DNA, 201 bp, Homo sapiens
cgagtgtctgcccctcggccctcagggtggggcacttagcacccagaagggaccaaaagcagggcatggcggtgcagaggagtttgggaggtgtaaacagcccatgcacgtggaggaggagctggctttcagccccagaccccacgctagcactttccacgctgcttgcccgctgttgatgtgcagttcccagtgcctgtg

SEQ ID NO: 76927 - DNA, 201 bp, Homo sapiens
ctggctggctcaaggtgggcgtggcctacgtgtccgtgcgagtgaccccgaagagcacggcccgctctgtggtgctggaggtcctgccgctgctcggccgycaggccgagagtcccgagagcttccagctggtggaggtggcgatgggctgcaggcacgtccagcggacgatgctgatggacgaacagcccctgctggacc

SEQ ID NO: 76928 - DNA, 201 bp, Homo sapiens
gagcacggcccgctctgtggtgctggaggtcctgccgctgctcggccgccaggccgagagtcccgagagcttccagctggtggaggtggcgatgggctgcmggcacgtccagcggacgatgctgatggacgaacagcccctgctggaccggctacaggacatccggcagatgtctgtgcggcaggtgagccagacgcggtt

SEQ ID NO: 76929 - DNA, 201 bp, Homo sapiens
gtggtctggaggcagctccacgtccacacagtggccggccctgtggtcggacctggctacagccctgaccacagcatcttcccagtgacggagcgggaccmgccctcatcccattggtgacacatgttggtgtcacagccctcatcccactggagactggtgtgcgggtggcagtgttaccccgtgtcccgggtgggcgca

SEQ ID NO: 76930 - DNA, 201 bp, Homo sapiens; identical to SEQ ID NO: 76914

SEQ ID NO: 76931 - DNA, 201 bp, Homo sapiens; identical to SEQ ID NO: 76915

SEQ ID NO: 76932 - DNA, 201 bp, Homo sapiens; identical to SEQ ID NO: 76916

SEQ ID NO: 76933 - DNA, 201 bp, Homo sapiens; identical to SEQ ID NO: 76917

SEQ ID NO: 76934 - DNA, 201 bp, Homo sapiens; identical to SEQ ID NO: 76918

SEQ ID NO: 76935 - DNA, 201 bp, Homo sapiens; identical to SEQ ID NO: 76919

SEQ ID NO: 76936 - DNA, 201 bp, Homo sapiens; identical to SEQ ID NO: 76920

SEQ ID NO: 76937 - DNA, 201 bp, Homo sapiens; identical to SEQ ID NO: 76921

SEQ ID NO: 76938 - DNA, 201 bp, Homo sapiens; identical to SEQ ID NO: 76922

SEQ ID NO: 76939 - DNA, 201 bp, Homo sapiens; identical to SEQ ID NO: 76923

SEQ ID NO: 76940 - DNA, 201 bp, Homo sapiens; identical to SEQ ID NO: 76924

SEQ ID NO: 76941 - DNA, 201 bp, Homo sapiens; identical to SEQ ID NO: 76925

SEQ ID NO: 76942 - DNA, 201 bp, Homo sapiens; identical to SEQ ID NO: 76926

SEQ ID NO: 76943 - DNA, 201 bp, Homo sapiens; identical to SEQ ID NO: 76927

SEQ ID NO: 76944 - DNA, 201 bp, Homo sapiens; identical to SEQ ID NO: 76928

SEQ ID NO: 76945 - DNA, 201 bp, Homo sapiens; identical to SEQ ID NO: 76929

SEQ ID NO: 76946 - DNA, 201 bp, Homo sapiens; identical to SEQ ID NO: 76914

SEQ ID NO: 76947 - DNA, 201 bp, Homo sapiens; identical to SEQ ID NO: 76915

SEQ ID NO: 76948 - DNA, 201 bp, Homo sapiens; identical to SEQ ID NO: 76916

SEQ ID NO: 76949 - DNA, 201 bp, Homo sapiens; identical to SEQ ID NO: 76917

SEQ ID NO: 76950 - DNA, 201 bp, Homo sapiens; identical to SEQ ID NO: 76918

SEQ ID NO: 76951 - DNA, 201 bp, Homo sapiens; identical to SEQ ID NO: 76919

SEQ ID NO: 76952 - DNA, 201 bp, Homo sapiens; identical to SEQ ID NO: 76920

SEQ ID NO: 76953 - DNA, 201 bp, Homo sapiens; identical to SEQ ID NO: 76921

SEQ ID NO: 76954 - DNA, 201 bp, Homo sapiens; identical to SEQ ID NO: 76922

SEQ ID NO: 76955 - DNA, 201 bp, Homo sapiens
tgctggatgcccacgaggctggcagtgcagagaacgacacggcagacgcagagccccccaagatcgtgcagatgagtaactactgtggcattggcatcgaygcggagctgagcctggacttccaccaggcacgggaagaggagcctggcaagttcacaagcagctggggctcgggggccgacctgtggggctccgacagcg

SEQ ID NO: 76956 - DNA, 201 bp, Homo sapiens; identical to SEQ ID NO: 76924

SEQ ID NO: 76957 - DNA, 201 bp, Homo sapiens; identical to SEQ ID NO: 76925

SEQ ID NO: 76958 - DNA, 201 bp, Homo sapiens; identical to SEQ ID NO: 76926

SEQ ID NO: 76959 - DNA, 201 bp, Homo sapiens; identical to SEQ ID NO: 76927

SEQ ID NO: 76960 - DNA, 201 bp, Homo sapiens; identical to SEQ ID NO: 76928

SEQ ID NO: 76961 - DNA, 201 bp, Homo sapiens; identical to SEQ ID NO: 76929

SEQ ID NO: 76962 - DNA, 201 bp, Homo sapiens
cccggggtctgcgtgagatgctgaaggccaggctgtggtgcagctgctcgtgcagtgtgctgtgcgtccgggcgctggtgcaggacctgctccccgccacrcgctggctgcgtcagtaccgcccgcgggagtacctggcaggcgacgtcatgtctgggctggtcatcggcatcatcctggtgccgcaggccatcgcctact

SEQ ID NO: 76963 - DNA, 201 bp, Homo sapiens
gtcggccacgggacctgacgcaacaggatggacgagtcccctgagcctctgcagcagggcagagggccggtgccggtccgacggcagcgcccagcaccccrgggtctgcgtgagatgctgaaggccaggctgtggtgcagctgctcgtgcagtgtgctgtgcgtccgggcgctggtgcaggacctgctccccgccacgcgc

SEQ ID NO: 76964 - DNA, 201 bp, Homo sapiens
ctctgcagcagggcagagggccggtgccggtccgacggcagcgcccagcaccccggggtctgcgtgagatgctgaaggccaggctgtggtgcagctgctcrtgcagtgtgctgtgcgtccgggcgctggtgcaggacctgctccccgccacgcgctggctgcgtcagtaccgcccgcgggagtacctggcaggcgacgtca

SEQ ID NO: 76965 - DNA, 201 bp, Homo sapiens
gctttgacccctcccaggacggcctgcagcccggagccaacagcagcaccctcaacggctcggctgccatgctggactgcgggcgtgactgctacgccatycgtgtcgccaccgccctcacgctgatgaccgggctttaccaggtcctcatgggcgtcctccggctgggcttcgtgtccgcctacctctcacagccactgc

SEQ ID NO: 76966 - DNA, 201 bp, Homo sapiens
cagagttcgagggcctcgtccctgagcccggcgtgcgggtgttccgctttggggggccgctgtactatgccaacaaggacttcttcctgcggtcactctayagcctcacggggctggacgcagggtgcatggctgccaggaggaaggaggggggctcagagacgggggtcggtgagggaggccctgcccagggcgaggacc

SEQ ID NO: 76967 - DNA, 201 bp, Homo sapiens
gggtgttccgctttggggggccgctgtactatgccaacaaggacttcttcctgcggtcactctacagcctcacggggctggacgcagggtgcatggctgcsaggaggaaggaggggggctcagagacgggggtcggtgagggaggccctgcccagggcgaggacctgggcccggttagcaccagggctgcgctggtgcccg

SEQ ID NO: 76968 - DNA, 201 bp, Homo sapiens
tgctgctagccgcgaaggagctctcagaccgctaccgacaccgcctgagggtgccgctgcccacggagctgctggtcatcgtggtggccacactcgtgtcrcacttcgggcagctccacaagcgctttggctcgagcgtggctggcgacatccccacgggtttcatgccccctcaggtcccagagcccaggctgatgcagc

SEQ ID NO: 76969 - DNA, 201 bp, Homo sapiens
acacgcaggacccaaacactcagaaatcaagaacctctgcctccgagacaggctggcccacagtgctggctgggccccaatgcaccgtccctcagctcagragggatgggcctgacctgacgctcagggttgacatcttatttgaacaagggtcccccgccatcatgcagcctccaaggtgccaagaggactccctatgcc

SEQ ID NO: 76970 - DNA, 201 bp, Homo sapiens
agccagtgggtccggacctgcttgatgccgcggtgagggacggcgcccacataggcgaggttgagctgctggtcccagctgaggacgtactggtcagcctrgctgtgtggcagcggggggctggggacaacaaaggggcggctcagtcccgagcctcagcatggctggcagcgcggctgacacacacgttcaagcccagga

SEQ ID NO: 76971 - DNA, 201 bp, Homo sapiens
gcttgatgccgcggtgagggacggcgcccacataggcgaggttgagctgctggtcccagctgaggacgtactggtcagcctggctgtgtggcagcgggggkctggggacaacaaaggggcggctcagtcccgagcctcagcatggctggcagcgcggctgacacacacgttcaagcccaggactgcccgggcgcaggatcc

SEQ ID NO: 76972 - DNA, 201 bp, Homo sapiens
gccgcccacctggtggtgacaagctccagcagccagtgggtccggacctgcttgatgccgcggtgagggacggcgcccacataggcgaggttgagctgctrgtcccagctgaggacgtactggtcagcctggctgtgtggcagcggggggctggggacaacaaaggggcggctcagtcccgagcctcagcatggctggcag

SEQ ID NO: 76973 - DNA, 201 bp, Homo sapiens
ggggctctgggacgcccagaccctgcccgccgcccacctggtggtgacaagctccagcagccagtgggtccggacctgcttgatgccgcggtgagggacgrcgcccacataggcgaggttgagctgctggtcccagctgaggacgtactggtcagcctggctgtgtggcagcggggggctggggacaacaaaggggcggct

SEQ ID NO: 76974 - DNA, 201 bp, Homo sapiens
gaggatgccacagagttcgagggcctcgtccctgagcccggcgtgcgggtgttccgctttggggggccgctgtactatgccaacaaggacttcttcctgcrgtcactctacagcctcacggggctggacgcagggtgcatggctgccaggaggaaggaggggggctcagagacgggggtcggtgagggaggccctgcccag

SEQ ID NO: 76975 - DNA, 201 bp, Homo sapiens
gcccagaccctgcccgccgcccacctggtggtgacaagctccagcagccagtgggtccggacctgcttgatgccgcggtgagggacggcgcccacataggbgaggttgagctgctggtcccagctgaggacgtactggtcagcctggctgtgtggcagcggggggctggggacaacaaaggggcggctcagtcccgagcct

SEQ ID NO: 76976 - DNA, 201 bp, Homo sapiens
acctgggcccggttagcaccagggctgcgctggtgcccgcagcggccggcttccacacagtggtcatcgactgcgccccgctgctgttcctagacgcagcyggtgtgagcacgctgcaggacctgcgccgagactacggggccctgggcatcagcctgctgctagcctgctgcagcccgcctgtgagagacattctgagca

SEQ ID NO: 76977 - DNA, 201 bp, Homo sapiens
cctctgtaaggggctctgggacgcccagaccctgcccgccgcccacctggtggtgacaagctccagcagccagtgggtccggacctgcttgatgccgcggkgagggacggcgcccacataggcgaggttgagctgctggtcccagctgaggacgtactggtcagcctggctgtgtggcagcggggggctggggacaacaaa

SEQ ID NO: 76978 - DNA, 201 bp, Homo sapiens
gcccaggctgatgcagcgtgtggctttggatgccgtggccctggccctcgtggctgccgccttctccatctcgctggcggagatgttcgcccgcagtcacrgctactctgtgcgtgccaaccaggagctgctggctgtgggctgctgcaacgtgctacccgccttcctccactgcttcgccaccagcgccgccctggccaa

SEQ ID NO: 76979 - DNA, 201 bp, Homo sapiens
ggtgaccctgcggctgcgcggggtgccccccggcccggcctggtctacgtcacgcgctacctggacaacgggctctgcagccccgaaggcgagtggcggcscctgggccggcccgtcttccccacggcagagcagttccggcgcatgcgcgcggctgaggacccggtggccgcggcgccccgccccttacccgccggcggc

SEQ ID NO: 76980 - DNA, 201 bp, Homo sapiens
gagggtctgcgcgccgccagccccgccctgcggctgggaggccccggcgactccttccacaccccaccgcgatccccgctgagctggggcctcctgcgccrctgccacgacggtaccaacttcttcactggggaggcgggcgtgcggctggactacatctccctccacaggaagggtgcgcgcagctccatctccatcctg

SEQ ID NO: 76981 - DNA, 201 bp, Homo sapiens
cagttccggcgcatgcgcgcggctgaggacccggtggccgcggcgccccgccccttacccgccggcggccgcctgaccctgcgccccgcgctgcggctgcbgtcgcttttgctggtgcacgtgtgtgcgcgccccgagaagccgcccgggcaggcaagtggcagtcccctaacccgcgccgcggcccggactccccttccc

SEQ ID NO: 76982 - DNA, 201 bp, Homo sapiens
cgcggcggcggtcacatggggtgcgcgcccagactccgacccggaggcggaaccggcagtgcagcccgaagccccgcagtccccgagcacgcgtggccatrcgtcccctgcgcccccgcgcagcgctgctggcgctcctggcctcgctcctggccgcacccccggtggccccggccgaggccccgcacctggtgcaggtgg

SEQ ID NO: 76983 - DNA, 201 bp, Homo sapiens
ctggccgcacccccggtggccccggccgaggccccgcacctggtgcaggtggacgcggcccgcgcgctgtggcccctgcggcgcttctggaggagcacagrcttctgccccccgctgccacacagccaggctgaccagtacgtcctcagctgggaccagcagctcaacctcgcctatgtgggcgccgtccctcaccgcggc

SEQ ID NO: 76984 - DNA, 201 bp, Homo sapiens
cgaggccccgcacctggtgcaggtggacgcggcccgcgcgctgtggcccctgcggcgcttctggaggagcacaggcttctgccccccgctgccacacagcyaggctgaccagtacgtcctcagctgggaccagcagctcaacctcgcctatgtgggcgccgtccctcaccgcggcatcaagcaggtccggacccactggct

SEQ ID NO: 76985 - DNA, 201 bp, Homo sapiens
tcagacgcccttcatcaccttgcaccctccctccgtgggagtcactgaggcgagattcacctgtgctggggggacagcaaggctcctctgcaggtaggtamggactggcgcatgtttccaagtggaacttcgagacgtggaatgagccagaccaccacgactttgacaacgtctccatgaccatgcaaggcttcctgaact

SEQ ID NO: 76986 - DNA, 201 bp, Homo sapiens
cacccccggtggccccggccgaggccccgcacctggtgcaggtggacgcggcccgcgcgctgtggcccctgcggcgcttctggaggagcacaggcttctgmcccccgctgccacacagccaggctgaccagtacgtcctcagctgggaccagcagctcaacctcgcctatgtgggcgccgtccctcaccgcggcatcaagc

SEQ ID NO: 76987 - DNA, 201 bp, Homo sapiens
ctcccagggtttgagctgatgggcagcgcctcgggccacttcactgactttgaggacaagcagcaggtgtttgagtggaaggacttggtctccagcctggmcaggagatacatcggtgggcgagcgcaggccctggggccctggccggggcgggggtactcctgggcaggttgcacccctatcacgcaggctgctgcctgg

SEQ ID NO: 76988 - DNA, 201 bp, Homo sapiens
cactgaggcgagattcacctgtgctggggggacagcaaggctcctctgcaggtaggtacggactggcgcatgtttccaagtggaacttcgagacgtggaaygagccagaccaccacgactttgacaacgtctccatgaccatgcaaggcttcctgaactactacgatgcctgctcggagggtctgcgcgccgccagccccg

SEQ ID NO: 76989 - DNA, 201 bp, Homo sapiens
gcgcagctccatctccatcctggagcaggagaaggtcgtcgcgcagcagatccggcagctcttccccaagttcgcggacacccccatttacaacgacgagrcggacccgctggtgggctggtccctgccacagccgtggagggcggacgtgacctacgcggccatggtggtgaaggtcatcgcgcagcatcagaacctgct

SEQ ID NO: 76990 - DNA, 201 bp, Homo sapiens
gcaggtaggtacggactggcgcatgtttccaagtggaacttcgagacgtggaatgagccagaccaccacgactttgacaacgtctccatgaccatgcaagrcttcctgaactactacgatgcctgctcggagggtctgcgcgccgccagccccgccctgcggctgggaggccccggcgactccttccacaccccaccgcga

SEQ ID NO: 76991 - DNA, 201 bp, Homo sapiens
catcaagcaggtccggacccactggctgctggagcttgtcaccaccagggggtccactggacggggcctgagctacaacttcacccacctggacgggtacytggaccttctcagggagaaccagctcctcccagggtttgagctgatgggcagcgcctcgggccacttcactgactttgaggacaagcagcaggtgtttga

SEQ ID NO: 76992 - DNA, 201 bp, Homo sapiens
agggcggacgtgacctacgcggccatggtggtgaaggtcatcgcgcagcatcagaacctgctactggccaacaccacctccgccttcccctacgcgctcckgagcaacgacaatgccttcctgagctaccacccgcaccccttcgcgcagcgcacgctcaccgcgcgcttccaggtcaacaacacccgcccgccgcacgtg

SEQ ID NO: 76993 - DNA, 201 bp, Homo sapiens
gcccctgcggcgcttctggaggagcacaggcttctgccccccgctgccacacagccaggctgaccagtacgtcctcagctgggaccagcagctcaacctcvcctatgtgggcgccgtccctcaccgcggcatcaagcaggtccggacccactggctgctggagcttgtcaccaccagggggtccactggacggggcctgag

SEQ ID NO: 76994 - DNA, 201 bp, Homo sapiens
agcacaggcttctgccccccgctgccacacagccaggctgaccagtacgtcctcagctgggaccagcagctcaacctcgcctatgtgggcgccgtccctcmccgcggcatcaagcaggtccggacccactggctgctggagcttgtcaccaccagggggtccactggacggggcctgagctacaacttcacccacctggac

SEQ ID NO: 76995 - DNA, 201 bp, Homo sapiens
caccacgactttgacaacgtctccatgaccatgcaaggcttcctgaactactacgatgcctgctcggagggtctgcgcgccgccagccccgccctgcggcygggaggccccggcgactccttccacaccccaccgcgatccccgctgagctggggcctcctgcgccactgccacgacggtaccaacttcttcactggggag

SEQ ID NO: 76996 - DNA, 201 bp, Homo sapiens
ctggggtggggggtactcctgggcaggctgcacccctatcacccaggccgcacccctatcacccaggccgccgcccaggtcttggacccccttgagccagsgcttcctgatgtggggcgggaggctggcctgcatggagatggggttcatcttgagtcagacgcccttcatcaccttgcaccctccctccgtgggagtcac

SEQ ID NO: 76997 - DNA, 201 bp, Homo sapiens
cgtgacctacgcggccatggtggtgaaggtcatcgcgcagcatcagaacctgctactggccaacaccacctccgccttcccctacgcgctcctgagcaacdacaatgccttcctgagctaccacccgcaccccttcgcgcagcgcacgctcaccgcgcgcttccaggtcaacaacacccgcccgccgcacgtgcagctgtt

SEQ ID NO: 76998 - DNA, 201 bp, Homo sapiens
ctcttccccaagttcgcggacacccccatttacaacgacgaggcggacccgctggtgggctggtccctgccacagccgtggagggcggacgtgacctacgyggccatggtggtgaaggtcatcgcgcagcatcagaacctgctactggccaacaccacctccgccttcccctacgcgctcctgagcaacgacaatgccttc

SEQ ID NO: 76999 - DNA, 201 bp, Homo sapiens
ccccatttacaacgacgaggcggacccgctggtgggctggtccctgccacagccgtggagggcggacgtgacctacgcggccatggtggtgaaggtcatcscgcagcatcagaacctgctactggccaacaccacctccgccttcccctacgcgctcctgagcaacgacaatgccttcctgagctaccacccgcacccctt

SEQ ID NO: 77000 - DNA, 201 bp, Homo sapiens
cgcgcgcttccaggtcaacaacacccgcccgccgcacgtgcagctgttgcgcaagccggtgctcacggccatggggctgctggcgctgctggatgaggagyagctctgggccgaagtgtcgcaggccgggaccgtcctggacagcaaccacacggtgggcgtcctggccagcgcccaccgcccccagggcccggccgacgc

SEQ ID NO: 77001 - DNA, 201 bp, Homo sapiens
agcaacgacaatgccttcctgagctaccacccgcaccccttcgcgcagcgcacgctcaccgcgcgcttccaggtcaacaacacccgcccgccgcacgtgcrgctgttgcgcaagccggtgctcacggccatggggctgctggcgctgctggatgaggagcagctctgggccgaagtgtcgcaggccgggaccgtcctggac

SEQ ID NO: 77002 - DNA, 201 bp, Homo sapiens
ttccaggtcaacaacacccgcccgccgcacgtgcagctgttgcgcaagccggtgctcacggccatggggctgctggcgctgctggatgaggagcagctctrggccgaagtgtcgcaggccgggaccgtcctggacagcaaccacacggtgggcgtcctggccagcgcccaccgcccccagggcccggccgacgcctggcgc

SEQ ID NO: 77003 - DNA, 201 bp, Homo sapiens
ctcaacctcgcctatgtgggcgccgtccctcaccgcggcatcaagcaggtccggacccactggctgctggagcttgtcaccaccagggggtccactggacrgggcctgagctacaacttcacccacctggacgggtacctggaccttctcagggagaaccagctcctcccagggtttgagctgatgggcagcgcctcgggc

SEQ ID NO: 77004 - DNA, 201 bp, Homo sapiens
aatgccttcctgagctaccacccgcaccccttcgcgcagcgcacgctcaccgcgcgcttccaggtcaacaacacccgcccgccgcacgtgcagctgttgcrcaagccggtgctcacggccatggggctgctggcgctgctggatgaggagcagctctgggccgaagtgtcgcaggccgggaccgtcctggacagcaaccac

SEQ ID NO: 77005 - DNA, 201 bp, Homo sapiens
ggtcaacaacacccgcccgccgcacgtgcagctgttgcgcaagccggtgctcacggccatggggctgctggcgctgctggatgaggagcagctctgggcckaagtgtcgcaggccgggaccgtcctggacagcaaccacacggtgggcgtcctggccagcgcccaccgcccccagggcccggccgacgcctggcgcgccgc

SEQ ID NO: 77006 - DNA, 201 bp, Homo sapiens
tacgtcacgcgctacctggacaacgggctctgcagccccgaaggcgagtggcggcgcctgggccggcccgtcttccccacggcagagcagttccggcgcaygcgcgcggctgaggacccggtggccgcggcgccccgccccttacccgccggcggccgcctgaccctgcgccccgcgctgcggctgccgtcgcttttgctg

SEQ ID NO: 77007 - DNA, 201 bp, Homo sapiens
aacctgctactggccaacaccacctccgccttcccctacgcgctcctgagcaacgacaatgccttcctgagctaccacccgcaccccttcgcgcagcgcaygctcaccgcgcgcttccaggtcaacaacacccgcccgccgcacgtgcagctgttgcgcaagccggtgctcacggccatggggctgctggcgctgctggat

SEQ ID NO: 77008 - DNA, 201 bp, Homo sapiens
ggcccgcgcgctgtggcccctgcggcgcttctggaggagcacaggcttctgccccccgctgccacacagccaggctgaccagtacgtcctcagctgggacyagcagctcaacctcgcctatgtgggcgccgtccctcaccgcggcatcaagcaggtccggacccactggctgctggagcttgtcaccaccagggggtccac

SEQ ID NO: 77009 - DNA, 201 bp, Homo sapiens
gctactggccaacaccacctccgccttcccctacgcgctcctgagcaacgacaatgccttcctgagctaccacccgcaccccttcgcgcagcgcacgctcmccgcgcgcttccaggtcaacaacacccgcccgccgcacgtgcagctgttgcgcaagccggtgctcacggccatggggctgctggcgctgctggatgagga

SEQ ID NO: 77010 - DNA, 201 bp, Homo sapiens
tgcgcgcccagactccgacccggaggcggaaccggcagtgcagcccgaagccccgcagtccccgagcacgcgtggccatgcgtcccctgcgcccccgcgcmgcgctgctggcgctcctggcctcgctcctggccgcacccccggtggccccggccgaggccccgcacctggtgcaggtggacgcggcccgcgcgctgtggc

SEQ ID NO: 77011 - DNA, 201 bp, Homo sapiens
agtgcagcccgaagccccgcagtccccgagcacgcgtggccatgcgtcccctgcgcccccgcgcagcgctgctggcgctcctggcctcgctcctggccgcrcccccggtggccccggccgaggccccgcacctggtgcaggtggacgcggcccgcgcgctgtggcccctgcggcgcttctggaggagcacaggcttctgcc

SEQ ID NO: 77012 - DNA, 201 bp, Homo sapiens
agcagatccggcagctcttccccaagttcgcggacacccccatttacaacgacgaggcggacccgctggtgggctggtccctgccacagccgtggagggcsgacgtgacctacgcggccatggtggtgaaggtcatcgcgcagcatcagaacctgctactggccaacaccacctccgccttcccctacgcgctcctgagca

SEQ ID NO: 77013 - DNA, 201 bp, Homo sapiens
ttctggaggagcacaggcttctgccccccgctgccacacagccaggctgaccagtacgtcctcagctgggaccagcagctcaacctcgcctatgtgggcgycgtccctcaccgcggcatcaagcaggtccggacccactggctgctggagcttgtcaccaccagggggtccactggacggggcctgagctacaacttcacc

SEQ ID NO: 77014 - DNA, 201 bp, Homo sapiens
gcagcatcagaacctgctactggccaacaccacctccgccttcccctacgcgctcctgagcaacgacaatgccttcctgagctaccacccgcaccccttcrcgcagcgcacgctcaccgcgcgcttccaggtcaacaacacccgcccgccgcacgtgcagctgttgcgcaagccggtgctcacggccatggggctgctggc

SEQ ID NO: 77015 - DNA, 201 bp, Homo sapiens
gaaggtcgtcgcgcagcagatccggcagctcttccccaagttcgcggacacccccatttacaacgacgaggcggacccgctggtgggctggtccctgccayagccgtggagggcggacgtgacctacgcggccatggtggtgaaggtcatcgcgcagcatcagaacctgctactggccaacaccacctccgccttccccta

SEQ ID NO: 77016 - DNA, 201 bp, Homo sapiens
agccgtggagggcggacgtgacctacgcggccatggtggtgaaggtcatcgcgcagcatcagaacctgctactggccaacaccacctccgccttcccctavgcgctcctgagcaacgacaatgccttcctgagctaccacccgcaccccttcgcgcagcgcacgctcaccgcgcgcttccaggtcaacaacacccgcccgc

SEQ ID NO: 77017 - DNA, 201 bp, Homo sapiens
gcggctgcgcggggtgccccccggcccggcctggtctacgtcacgcgctacctggacaacgggctctgcagccccgaaggcgagtggcggcgcctgggccsgcccgtcttccccacggcagagcagttccggcgcatgcgcgcggctgaggacccggtggccgcggcgccccgccccttacccgccggcggccgcctgacc

SEQ ID NO: 77018 - DNA, 201 bp, Homo sapiens
gaccctgcggctgcgcggggtgccccccggcccggcctggtctacgtcacgcgctacctggacaacgggctctgcagccccgaaggcgagtggcggcgccygggccggcccgtcttccccacggcagagcagttccggcgcatgcgcgcggctgaggacccggtggccgcggcgccccgccccttacccgccggcggccgc

SEQ ID NO: 77019 - DNA, 201 bp, Homo sapiens; identical to SEQ ID NO: 76980

SEQ ID NO: 77020 - DNA, 201 bp, Homo sapiens
gccggtgctcacggccatggggctgctggcgctgctggatgaggagcagctctgggccgaagtgtcgcaggccgggacctgcgccccgcgctgcggctgcbgtcgcttttgctggtgcacgtgtgtgcgcgccccgagaagccgcccgggcaggcaagtcacgcggctccgcgccctgcccctgacccaagggcagctggt

SEQ ID NO: 77021 - DNA, 201 bp, Homo sapiens; identical to SEQ ID NO: 76982

SEQ ID NO: 77022 - DNA, 201 bp, Homo sapiens; identical to SEQ ID NO: 76983

SEQ ID NO: 77023 - DNA, 201 bp, Homo sapiens; identical to SEQ ID NO: 76984

SEQ ID NO: 77024 - DNA, 201 bp, Homo sapiens
gcagcgcctcgggccacttcactgactttgaggacaagcagcaggtgtttgagtggaaggacttggtctccagcctggccaggagatacatcggtaggtamggactggcgcatgtttccaagtggaacttcgagacgtggaatgagccagaccaccacgactttgacaacgtctccatgaccatgcaaggcttcctgaact

SEQ ID NO: 77025 - DNA, 201 bp, Homo sapiens; identical to SEQ ID NO: 76986

SEQ ID NO: 77026 - DNA, 201 bp, Homo sapiens
caccccggtcagcaggaagccatcgaccttcaacctctttgtgttcagcccagacacaggtgctgtctctggctcctaccgagttcgagccctggactacygggcccgaccaggccccttctcggaccctgtgccgtacctggaggtccctgtgccaagagggcccccatccccgggcaatccatgagcctgtgctgagcc

SEQ ID NO: 77027 - DNA, 201 bp, Homo sapiens
ctcccagggtttgagctgatgggcagcgcctcgggccacttcactgactttgaggacaagcagcaggtgtttgagtggaaggacttggtctccagcctggmcaggagatacatcggtaggtacggactggcgcatgtttccaagtggaacttcgagacgtggaatgagccagaccaccacgactttgacaacgtctccatg

SEQ ID NO: 77028 - DNA, 201 bp, Homo sapiens; identical to SEQ ID NO: 76989

SEQ ID NO: 77029 - DNA, 201 bp, Homo sapiens
aggtgtttgagtggaaggacttggtctccagcctggccaggagatacatcggtaggtacggactggcgcatgtttccaagtggaacttcgagacgtggaaygagccagaccaccacgactttgacaacgtctccatgaccatgcaaggcttcctgaactactacgatgcctgctcggagggtctgcgcgccgccagccccg

SEQ ID NO: 77030 - DNA, 201 bp, Homo sapiens
atcggtaggtacggactggcgcatgtttccaagtggaacttcgagacgtggaatgagccagaccaccacgactttgacaacgtctccatgaccatgcaagrcttcctgaactactacgatgcctgctcggagggtctgcgcgccgccagccccgccctgcggctgggaggccccggcgactccttccacaccccaccgcga

SEQ ID NO: 77031 - DNA, 201 bp, Homo sapiens; identical to SEQ ID NO: 76991

SEQ ID NO: 77032 - DNA, 201 bp, Homo sapiens
tcgagccctggactactgggcccgaccaggccccttctcggaccctgtgccgtacctggaggtccctgtgccaagagggcccccatccccgggcaatccakgagcctgtgctgagccccagtgggttgcacctccaccggcagtcagcgagctggggctgcactgtgcccatgctgccctcccatcaccccctttgcaata

SEQ ID NO: 77033 - DNA, 201 bp, Homo sapiens; identical to SEQ ID NO: 76992

SEQ ID NO: 77034 - DNA, 201 bp, Homo sapiens; identical to SEQ ID NO: 76993

SEQ ID NO: 77035 - DNA, 201 bp, Homo sapiens; identical to SEQ ID NO: 76994

SEQ ID NO: 77036 - DNA, 201 bp, Homo sapiens; identical to SEQ ID NO: 76995

SEQ ID NO: 77037 - DNA, 201 bp, Homo sapiens; identical to SEQ ID NO: 76997

SEQ ID NO: 77038 - DNA, 201 bp, Homo sapiens; identical to SEQ ID NO: 76998

SEQ ID NO: 77039 - DNA, 201 bp, Homo sapiens; identical to SEQ ID NO: 76999

SEQ ID NO: 77040 - DNA, 201 bp, Homo sapiens
cgcgcgcttccaggtcaacaacacccgcccgccgcacgtgcagctgttgcgcaagccggtgctcacggccatggggctgctggcgctgctggatgaggagyagctctgggccgaagtgtcgcaggccgggacctgcgccccgcgctgcggctgccgtcgcttttgctggtgcacgtgtgtgcgcgccccgagaagccgccc

SEQ ID NO: 77041 - DNA, 201 bp, Homo sapiens
ttccaggtcaacaacacccgcccgccgcacgtgcagctgttgcgcaagccggtgctcacggccatggggctgctggcgctgctggatgaggagcagctctrggccgaagtgtcgcaggccgggacctgcgccccgcgctgcggctgccgtcgcttttgctggtgcacgtgtgtgcgcgccccgagaagccgcccgggcagg

SEQ ID NO: 77042 - DNA, 201 bp, Homo sapiens
agcaacgacaatgccttcctgagctaccacccgcaccccttcgcgcagcgcacgctcaccgcgcgcttccaggtcaacaacacccgcccgccgcacgtgcrgctgttgcgcaagccggtgctcacggccatggggctgctggcgctgctggatgaggagcagctctgggccgaagtgtcgcaggccgggacctgcgccccg

SEQ ID NO: 77043 - DNA, 201 bp, Homo sapiens; identical to SEQ ID NO: 77003

SEQ ID NO: 77044 - DNA, 201 bp, Homo sapiens
ggtcaacaacacccgcccgccgcacgtgcagctgttgcgcaagccggtgctcacggccatggggctgctggcgctgctggatgaggagcagctctgggcckaagtgtcgcaggccgggacctgcgccccgcgctgcggctgccgtcgcttttgctggtgcacgtgtgtgcgcgccccgagaagccgcccgggcaggcaagt

SEQ ID NO: 77045 - DNA, 201 bp, Homo sapiens
aatgccttcctgagctaccacccgcaccccttcgcgcagcgcacgctcaccgcgcgcttccaggtcaacaacacccgcccgccgcacgtgcagctgttgcrcaagccggtgctcacggccatggggctgctggcgctgctggatgaggagcagctctgggccgaagtgtcgcaggccgggacctgcgccccgcgctgcggc

SEQ ID NO: 77046 - DNA, 201 bp, Homo sapiens
cggtaaggcgtacaccccggtcagcaggaagccatcgaccttcaacctctttgtgttcagcccagacacaggtgctgtctctggctcctaccgagttcgarccctggactactgggcccgaccaggccccttctcggaccctgtgccgtacctggaggtccctgtgccaagagggcccccatccccgggcaatccatgagc

SEQ ID NO: 77047 - DNA, 201 bp, Homo sapiens
gtccctgtgccaagagggcccccatccccgggcaatccatgagcctgtgctgagccccagtgggttgcacctccaccggcagtcagcgagctggggctgcmctgtgcccatgctgccctcccatcaccccctttgcaatatatttttatattttattattttcttttatatcttggtaccaacgccccctttaaagcggct

SEQ ID NO: 77048 - DNA, 201 bp, Homo sapiens; identical to SEQ ID NO: 77007

SEQ ID NO: 77049 - DNA, 201 bp, Homo sapiens; identical to SEQ ID NO: 77008

SEQ ID NO: 77050 - DNA, 201 bp, Homo sapiens; identical to SEQ ID NO: 77010

SEQ ID NO: 77051 - DNA, 201 bp, Homo sapiens; identical to SEQ ID NO: 77009

SEQ ID NO: 77052 - DNA, 201 bp, Homo sapiens; identical to SEQ ID NO: 77011

SEQ ID NO: 77053 - DNA, 201 bp, Homo sapiens; identical to SEQ ID NO: 77012

SEQ ID NO: 77054 - DNA, 201 bp, Homo sapiens; identical to SEQ ID NO: 77013

SEQ ID NO: 77055 - DNA, 201 bp, Homo sapiens
tcgaccttcaacctctttgtgttcagcccagacacaggtgctgtctctggctcctaccgagttcgagccctggactactgggcccgaccaggccccttctyggaccctgtgccgtacctggaggtccctgtgccaagagggcccccatccccgggcaatccatgagcctgtgctgagccccagtgggttgcacctccaccg

SEQ ID NO: 77056 - DNA, 201 bp, Homo sapiens
ggtcagcaggaagccatcgaccttcaacctctttgtgttcagcccagacacaggtgctgtctctggctcctaccgagttcgagccctggactactgggccygaccaggccccttctcggaccctgtgccgtacctggaggtccctgtgccaagagggcccccatccccgggcaatccatgagcctgtgctgagccccagtg

SEQ ID NO: 77057 - DNA, 201 bp, Homo sapiens; identical to SEQ ID NO: 77014

SEQ ID NO: 77058 - DNA, 201 bp, Homo sapiens; identical to SEQ ID NO: 77015

SEQ ID NO: 77059 - DNA, 201 bp, Homo sapiens; identical to SEQ ID NO: 77016

SEQ ID NO: 77060 - DNA, 201 bp, Homo sapiens; identical to SEQ ID NO: 76980

SEQ ID NO: 77061 - DNA, 201 bp, Homo sapiens
aagccggtgctcacggccatggggctgctggcgctgctggatgaggagcagctctgggccgaagtgtcgcaggccgggacccgccccgcgctgcggctgcbgtcgcttttgctggtgcacgtgtgtgcgcgccccgagaagccgcccgggcaggcaagtcacgcggctccgcgccctgcccctgacccaagggcagctggt

SEQ ID NO: 77062 - DNA, 201 bp, Homo sapiens; identical to SEQ ID NO: 76982

SEQ ID NO: 77063 - DNA, 201 bp, Homo sapiens; identical to SEQ ID NO: 76983

SEQ ID NO: 77064 - DNA, 201 bp, Homo sapiens; identical to SEQ ID NO: 76984

SEQ ID NO: 77065 - DNA, 201 bp, Homo sapiens; identical to SEQ ID NO: 76985

SEQ ID NO: 77066 - DNA, 201 bp, Homo sapiens; identical to SEQ ID NO: 77026

SEQ ID NO: 77067 - DNA, 201 bp, Homo sapiens; identical to SEQ ID NO: 76986

SEQ ID NO: 77068 - DNA, 201 bp, Homo sapiens
ctcccagggtttgagctgatgggcagcgcctcgggccacttcactgactttgaggacaagcagcaggtgtttgagtggaaggacttggtctccagcctggmcaggagatacatcggccgccgcccaggtcttggacccccttgagccagcgcttcctgatgtggggcgggaggctggcctgcatggagatggggttcatct

SEQ ID NO: 77069 - DNA, 201 bp, Homo sapiens; identical to SEQ ID NO: 76988

SEQ ID NO: 77070 - DNA, 201 bp, Homo sapiens; identical to SEQ ID NO: 76989

SEQ ID NO: 77071 - DNA, 201 bp, Homo sapiens; identical to SEQ ID NO: 76990

SEQ ID NO: 77072 - DNA, 201 bp, Homo sapiens; identical to SEQ ID NO: 76991

SEQ ID NO: 77073 - DNA, 201 bp, Homo sapiens; identical to SEQ ID NO: 77032

SEQ ID NO: 77074 - DNA, 201 bp, Homo sapiens; identical to SEQ ID NO: 76992

SEQ ID NO: 77075 - DNA, 201 bp, Homo sapiens; identical to SEQ ID NO: 76993

SEQ ID NO: 77076 - DNA, 201 bp, Homo sapiens; identical to SEQ ID NO: 76994

SEQ ID NO: 77077 - DNA, 201 bp, Homo sapiens; identical to SEQ ID NO: 76995

SEQ ID NO: 77078 - DNA, 201 bp, Homo sapiens
ttgaggacaagcagcaggtgtttgagtggaaggacttggtctccagcctggccaggagatacatcggccgccgcccaggtcttggacccccttgagccagsgcttcctgatgtggggcgggaggctggcctgcatggagatggggttcatcttgagtcagacgcccttcatcaccttgcaccctccctccgtgggagtcac

SEQ ID NO: 77079 - DNA, 201 bp, Homo sapiens; identical to SEQ ID NO: 76997

SEQ ID NO: 77080 - DNA, 201 bp, Homo sapiens; identical to SEQ ID NO: 76998

SEQ ID NO: 77081 - DNA, 201 bp, Homo sapiens; identical to SEQ ID NO: 76999

SEQ ID NO: 77082 - DNA, 201 bp, Homo sapiens
cgcgcgcttccaggtcaacaacacccgcccgccgcacgtgcagctgttgcgcaagccggtgctcacggccatggggctgctggcgctgctggatgaggagyagctctgggccgaagtgtcgcaggccgggacccgccccgcgctgcggctgccgtcgcttttgctggtgcacgtgtgtgcgcgccccgagaagccgcccgg

SEQ ID NO: 77083 - DNA, 201 bp, Homo sapiens
agcaacgacaatgccttcctgagctaccacccgcaccccttcgcgcagcgcacgctcaccgcgcgcttccaggtcaacaacacccgcccgccgcacgtgcrgctgttgcgcaagccggtgctcacggccatggggctgctggcgctgctggatgaggagcagctctgggccgaagtgtcgcaggccgggacccgccccgcg

SEQ ID NO: 77084 - DNA, 201 bp, Homo sapiens
ttccaggtcaacaacacccgcccgccgcacgtgcagctgttgcgcaagccggtgctcacggccatggggctgctggcgctgctggatgaggagcagctctrggccgaagtgtcgcaggccgggacccgccccgcgctgcggctgccgtcgcttttgctggtgcacgtgtgtgcgcgccccgagaagccgcccgggcaggca

SEQ ID NO: 77085 - DNA, 201 bp, Homo sapiens; identical to SEQ ID NO: 77003

SEQ ID NO: 77086 - DNA, 201 bp, Homo sapiens
aatgccttcctgagctaccacccgcaccccttcgcgcagcgcacgctcaccgcgcgcttccaggtcaacaacacccgcccgccgcacgtgcagctgttgcrcaagccggtgctcacggccatggggctgctggcgctgctggatgaggagcagctctgggccgaagtgtcgcaggccgggacccgccccgcgctgcggctg

SEQ ID NO: 77087 - DNA, 201 bp, Homo sapiens
ggtcaacaacacccgcccgccgcacgtgcagctgttgcgcaagccggtgctcacggccatggggctgctggcgctgctggatgaggagcagctctgggcckaagtgtcgcaggccgggacccgccccgcgctgcggctgccgtcgcttttgctggtgcacgtgtgtgcgcgccccgagaagccgcccgggcaggcaagtca

SEQ ID NO: 77088 - DNA, 201 bp, Homo sapiens; identical to SEQ ID NO: 77046

SEQ ID NO: 77089 - DNA, 201 bp, Homo sapiens; identical to SEQ ID NO: 77047

SEQ ID NO: 77090 - DNA, 201 bp, Homo sapiens; identical to SEQ ID NO: 77007

SEQ ID NO: 77091 - DNA, 201 bp, Homo sapiens; identical to SEQ ID NO: 77008

SEQ ID NO: 77092 - DNA, 201 bp, Homo sapiens; identical to SEQ ID NO: 77009

SEQ ID NO: 77093 - DNA, 201 bp, Homo sapiens; identical to SEQ ID NO: 77010

SEQ ID NO: 77094 - DNA, 201 bp, Homo sapiens; identical to SEQ ID NO: 77011

SEQ ID NO: 77095 - DNA, 201 bp, Homo sapiens; identical to SEQ ID NO: 77012

SEQ ID NO: 77096 - DNA, 201 bp, Homo sapiens; identical to SEQ ID NO: 77013

SEQ ID NO: 77097 - DNA, 201 bp, Homo sapiens; identical to SEQ ID NO: 77055

SEQ ID NO: 77098 - DNA, 201 bp, Homo sapiens; identical to SEQ ID NO: 77014

SEQ ID NO: 77099 - DNA, 201 bp, Homo sapiens; identical to SEQ ID NO: 77056

SEQ ID NO: 77100 - DNA, 201 bp, Homo sapiens; identical to SEQ ID NO: 77015

SEQ ID NO: 77101 - DNA, 201 bp, Homo sapiens; identical to SEQ ID NO: 77016

SEQ ID NO: 77102 - DNA, 201 bp, Homo sapiens; identical to SEQ ID NO: 76979

SEQ ID NO: 77103 - DNA, 201 bp, Homo sapiens
gagggtctgcgcgccgccagccccgccctgcggctgggaggccccggcgactccttccacaccccaccgcgatccccgctgagctggggcctcctgcgccrctgccacgacggtaccaacttcttcactggggaggcgggcgtgcggctggactacatctccctccacaggaaggagaaggtcgtcgcgcagcagatccgg

SEQ ID NO: 77104 - DNA, 201 bp, Homo sapiens; identical to SEQ ID NO: 76981

SEQ ID NO: 77105 - DNA, 201 bp, Homo sapiens; identical to SEQ ID NO: 76982

SEQ ID NO: 77106 - DNA, 201 bp, Homo sapiens; identical to SEQ ID NO: 76983

SEQ ID NO: 77107 - DNA, 201 bp, Homo sapiens
cgaggccccgcacctggtgcaggtggacgcggcccgcgcgctgtggcccctgcggcgcttctggaggagcacaggcttctgccccccgctgccacacagcyaggctgaccagtacgtcctcagctgggaccagcagctcaacctcgcctatgtgggcgccgtccctcaccgcggcatcaagcagggggtccactggacggg

SEQ ID NO: 77108 - DNA, 201 bp, Homo sapiens; identical to SEQ ID NO: 76985

SEQ ID NO: 77109 - DNA, 201 bp, Homo sapiens; identical to SEQ ID NO: 76986

SEQ ID NO: 77110 - DNA, 201 bp, Homo sapiens
gttccagggtttgagctgatgggcagcgcctcgggccacttcactgactttgaggacaagcagcaggtgtttgagtggaaggacttggtctccagcctggmcaggagatacatcggtgggcgagcgcaggccctggggccctggccggggcgggggtactcctgggcaggttgcacccctatcacgcaggctgctgcctgg

SEQ ID NO: 77111 - DNA, 201 bp, Homo sapiens; identical to SEQ ID NO: 76988

SEQ ID NO: 77112 - DNA, 201 bp, Homo sapiens
gctggactacatctccctccacaggaaggagaaggtcgtcgcgcagcagatccggcagctcttccccaagttcgcggacacccccatttacaacgacgagrcggacccgctggtgggctggtccctgccacagccgtggagggcggacgtgacctacgcggccatggtggtgaaggtcatcgcgcagcatcagaacctgct

SEQ ID NO: 77113 - DNA, 201 bp, Homo sapiens; identical to SEQ ID NO: 76990

SEQ ID NO: 77114 - DNA, 201 bp, Homo sapiens
ctcaacctcgcctatgtgggcgccgtccctcaccgcggcatcaagcagggggtccactggacggggcctgagctacaacttcacccacctggacgggtacytggaccttctcagggagaaccagctcctcccaggtgagctgtgggctctgccctcccagcccgcctgcacccccttgccctgcccaccctctccctcacc

SEQ ID NO: 77115 - DNA, 201 bp, Homo sapiens; identical to SEQ ID NO: 76992

SEQ ID NO: 77116 - DNA, 201 bp, Homo sapiens
gcccctgcggcgcttctggaggagcacaggcttctgccccccgctgccacacagccaggctgaccagtacgtcctcagctgggaccagcagctcaacctcvcctatgtgggcgccgtccctcaccgcggcatcaagcagggggtccactggacggggcctgagctacaacttcacccacctggacgggtacctggaccttc

SEQ ID NO: 77117 - DNA, 201 bp, Homo sapiens
agcacaggcttctgccccccgctgccacacagccaggctgaccagtacgtcctcagctgggaccagcagctcaacctcgcctatgtgggcgccgtccctcmccgcggcatcaagcagggggtccactggacggggcctgagctacaacttcacccacctggacgggtacctggaccttctcagggagaaccagctcctccc

SEQ ID NO: 77118 - DNA, 201 bp, Homo sapiens; identical to SEQ ID NO: 76995

SEQ ID NO: 77119 - DNA, 201 bp, Homo sapiens; identical to SEQ ID NO: 76996

SEQ ID NO: 77120 - DNA, 201 bp, Homo sapiens; identical to SEQ ID NO: 76998

SEQ ID NO: 77121 - DNA, 201 bp, Homo sapiens; identical to SEQ ID NO: 76997

SEQ ID NO: 77122 - DNA, 201 bp, Homo sapiens; identical to SEQ ID NO: 76999

SEQ ID NO: 77123 - DNA, 201 bp, Homo sapiens; identical to SEQ ID NO: 77000

SEQ ID NO: 77124 - DNA, 201 bp, Homo sapiens; identical to SEQ ID NO: 77002

SEQ ID NO: 77125 - DNA, 201 bp, Homo sapiens; identical to SEQ ID NO: 77001

SEQ ID NO: 77126 - DNA, 201 bp, Homo sapiens
gccaggctgaccagtacgtcctcagctgggaccagcagctcaacctcgcctatgtgggcgccgtccctcaccgcggcatcaagcagggggtccactggacrgggcctgagctacaacttcacccacctggacgggtacctggaccttctcagggagaaccagctcctcccaggtgagctgtgggctctgccctcccagccc

SEQ ID NO: 77127 - DNA, 201 bp, Homo sapiens; identical to SEQ ID NO: 77005

SEQ ID NO: 77128 - DNA, 201 bp, Homo sapiens; identical to SEQ ID NO: 77004

SEQ ID NO: 77129 - DNA, 201 bp, Homo sapiens; identical to SEQ ID NO: 77006

SEQ ID NO: 77130 - DNA, 201 bp, Homo sapiens
ggcccgcgcgctgtggcccctgcggcgcttctggaggagcacaggcttctgccccccgctgccacacagccaggctgaccagtacgtcctcagctgggacyagcagctcaacctcgcctatgtgggcgccgtccctcaccgcggcatcaagcagggggtccactggacggggcctgagctacaacttcacccacctggacg

SEQ ID NO: 77131 - DNA, 201 bp, Homo sapiens; identical to SEQ ID NO: 77007

SEQ ID NO: 77132 - DNA, 201 bp, Homo sapiens; identical to SEQ ID NO: 77010

SEQ ID NO: 77133 - DNA, 201 bp, Homo sapiens; identical to SEQ ID NO: 77009

SEQ ID NO: 77134 - DNA, 201 bp, Homo sapiens; identical to SEQ ID NO: 77012

SEQ ID NO: 77135 - DNA, 201 bp, Homo sapiens; identical to SEQ ID NO: 77011

SEQ ID NO: 77136 - DNA, 201 bp, Homo sapiens
ttctggaggagcacaggcttctgccccccgctgccacacagccaggctgaccagtacgtcctcagctgggaccagcagctcaacctcgcctatgtgggcgycgtccctcaccgcggcatcaagcagggggtccactggacggggcctgagctacaacttcacccacctggacgggtacctggaccttctcagggagaacca

SEQ ID NO: 77137 - DNA, 201 bp, Homo sapiens; identical to SEQ ID NO: 77014

SEQ ID NO: 77138 - DNA, 201 bp, Homo sapiens; identical to SEQ ID NO: 77015

SEQ ID NO: 77139 - DNA, 201 bp, Homo sapiens; identical to SEQ ID NO: 77017

SEQ ID NO: 77140 - DNA, 201 bp, Homo sapiens; identical to SEQ ID NO: 77016

SEQ ID NO: 77141 - DNA, 201 bp, Homo sapiens; identical to SEQ ID NO: 77018

SEQ ID NO: 77142 - DNA, 201 bp, Homo sapiens
ggtgaccctgcggctgcgcggggtgccccccggcccggcctggtctacgtcacgcgctacctggacaacgggctctgcagccccgaaggcgagtggcggcscctgggccggcccgtcttccccacggcagagcagttccggcgcatgcgcgcggctgaggtaggtgggccgcggaggggcgaggggccgggccgggccggg

SEQ ID NO: 77143 - DNA, 201 bp, Homo sapiens; identical to SEQ ID NO: 76980

SEQ ID NO: 77144 - DNA, 201 bp, Homo sapiens
accctgaggaccggccactgcgcccaggacccggtggccgcggcgccccgccccttacccgccggcggccgcctgaccctgcgccccgcgctgcggctgcbgtcgcttttgctggtgcacgtgtgtgcgcgccccgagaagccgcccgggcaggtcacgcggctccgcgccctgcccctgacccaagggcagctggttctg

SEQ ID NO: 77145 - DNA, 201 bp, Homo sapiens; identical to SEQ ID NO: 76982

SEQ ID NO: 77146 - DNA, 201 bp, Homo sapiens; identical to SEQ ID NO: 76983

SEQ ID NO: 77147 - DNA, 201 bp, Homo sapiens; identical to SEQ ID NO: 76984

SEQ ID NO: 77148 - DNA, 201 bp, Homo sapiens; identical to SEQ ID NO: 76985

SEQ ID NO: 77149 - DNA, 201 bp, Homo sapiens; identical to SEQ ID NO: 77026

SEQ ID NO: 77150 - DNA, 201 bp, Homo sapiens; identical to SEQ ID NO: 76986

SEQ ID NO: 77151 - DNA, 201 bp, Homo sapiens; identical to SEQ ID NO: 77110

SEQ ID NO: 77152 - DNA, 201 bp, Homo sapiens; identical to SEQ ID NO: 76988

SEQ ID NO: 77153 - DNA, 201 bp, Homo sapiens; identical to SEQ ID NO: 76989

SEQ ID NO: 77154 - DNA, 201 bp, Homo sapiens; identical to SEQ ID NO: 76990

SEQ ID NO: 77155 - DNA, 201 bp, Homo sapiens
catcaagcaggtccggacccactggctgctggagcttgtcaccaccagggggtccactggacggggcctgagctacaacttcacccacctggacgggtacytggaccttctcagggagaaccagctcctcccaggtgagctgtgggctctgccctcccagcccgcctgcacccccttgccctgcccaccctctccctcacc

SEQ ID NO: 77156 - DNA, 201 bp, Homo sapiens; identical to SEQ ID NO: 77032

SEQ ID NO: 77157 - DNA, 201 bp, Homo sapiens; identical to SEQ ID NO: 76992

SEQ ID NO: 77158 - DNA, 201 bp, Homo sapiens; identical to SEQ ID NO: 76993

SEQ ID NO: 77159 - DNA, 201 bp, Homo sapiens; identical to SEQ ID NO: 76994

SEQ ID NO: 77160 - DNA, 201 bp, Homo sapiens; identical to SEQ ID NO: 76995

SEQ ID NO: 77161 - DNA, 201 bp, Homo sapiens; identical to SEQ ID NO: 76996

SEQ ID NO: 77162 - DNA, 201 bp, Homo sapiens; identical to SEQ ID NO: 76997

SEQ ID NO: 77163 - DNA, 201 bp, Homo sapiens; identical to SEQ ID NO: 76998

SEQ ID NO: 77164 - DNA, 201 bp, Homo sapiens; identical to SEQ ID NO: 76999

SEQ ID NO: 77165 - DNA, 201 bp, Homo sapiens; identical to SEQ ID NO: 77000

SEQ ID NO: 77166 - DNA, 201 bp, Homo sapiens; identical to SEQ ID NO: 77001

SEQ ID NO: 77167 - DNA, 201 bp, Homo sapiens; identical to SEQ ID NO: 77002

SEQ ID NO: 77168 - DNA, 201 bp, Homo sapiens
ctcaacctcgcctatgtgggcgccgtccctcaccgcggcatcaagcaggtccggacccactggctgctggagcttgtcaccaccagggggtccactggacrgggcctgagctacaacttcacccacctggacgggtacctggaccttctcagggagaaccagctcctcccaggtgagctgtgggctctgccctcccagccc

SEQ ID NO: 77169 - DNA, 201 bp, Homo sapiens; identical to SEQ ID NO: 77004

SEQ ID NO: 77170 - DNA, 201 bp, Homo sapiens; identical to SEQ ID NO: 77005

SEQ ID NO: 77171 - DNA, 201 bp, Homo sapiens
tacgtcacgcgctacctggacaacgggctctgcagccccgaaggcgagtggcggcgcctgggccggcccgtcttccccacggcagagcagttccggcgcaygcgcgcggctgaggtaggtgggccgcggaggggcgaggggccgggccgggccggggtcccgggggggtggggtccggggcgggggctccgaggcggtgtg

SEQ ID NO: 77172 - DNA, 201 bp, Homo sapiens; identical to SEQ ID NO: 77046

SEQ ID NO: 77173 - DNA, 201 bp, Homo sapiens; identical to SEQ ID NO: 77047

SEQ ID NO: 77174 - DNA, 201 bp, Homo sapiens; identical to SEQ ID NO: 77007

SEQ ID NO: 77175 - DNA, 201 bp, Homo sapiens; identical to SEQ ID NO: 77008

SEQ ID NO: 77176 - DNA, 201 bp, Homo sapiens; identical to SEQ ID NO: 77009

SEQ ID NO: 77177 - DNA, 201 bp, Homo sapiens; identical to SEQ ID NO: 77010

SEQ ID NO: 77178 - DNA, 201 bp, Homo sapiens; identical to SEQ ID NO: 77011

SEQ ID NO: 77179 - DNA, 201 bp, Homo sapiens; identical to SEQ ID NO: 77012

SEQ ID NO: 77180 - DNA, 201 bp, Homo sapiens; identical to SEQ ID NO: 77013

SEQ ID NO: 77181 - DNA, 201 bp, Homo sapiens; identical to SEQ ID NO: 77055

SEQ ID NO: 77182 - DNA, 201 bp, Homo sapiens; identical to SEQ ID NO: 77014

SEQ ID NO: 77183 - DNA, 201 bp, Homo sapiens; identical to SEQ ID NO: 77056

SEQ ID NO: 77184 - DNA, 201 bp, Homo sapiens; identical to SEQ ID NO: 77015

SEQ ID NO: 77185 - DNA, 201 bp, Homo sapiens
gggggtggggtccggggcgggggctccgaggcggtgtgggtgggaggtggagcggtgggccgggggcgttcgccctgaggtcgggccgagcgtccccagcycccctggagaaccctgaggaccggccactgcgcccaggacccggtggccgcggcgccccgccccttacccgccggcggccgcctgaccctgcgccccgcg

SEQ ID NO: 77186 - DNA, 201 bp, Homo sapiens; identical to SEQ ID NO: 77016

SEQ ID NO: 77187 - DNA, 201 bp, Homo sapiens
gcggctgcgcggggtgccccccggcccggcctggtctacgtcacgcgctacctggacaacgggctctgcagccccgaaggcgagtggcggcgcctgggccsgcccgtcttccccacggcagagcagttccggcgcatgcgcgcggctgaggtaggtgggccgcggaggggcgaggggccgggccgggccggggtcccgggg

SEQ ID NO: 77188 - DNA, 201 bp, Homo sapiens
gaccctgcggctgcgcggggtgccccccggcccggcctggtctacgtcacgcgctacctggacaacgggctctgcagccccgaaggcgagtggcggcgccygggccggcccgtcttccccacggcagagcagttccggcgcatgcgcgcggctgaggtaggtgggccgcggaggggcgaggggccgggccgggccggggtc

SEQ ID NO: 77189 - DNA, 201 bp, Homo sapiens; identical to SEQ ID NO: 76979

SEQ ID NO: 77190 - DNA, 201 bp, Homo sapiens; identical to SEQ ID NO: 76980

SEQ ID NO: 77191 - DNA, 201 bp, Homo sapiens
cagttccggcgcatgcgcgcggctgaggacccggtggccgcggcgccccgccccttacccgccggcggccgcctgaccctgcgccccgcgctgcggctgcbgtcgcttttgctggtgcacgtgtgtgcgcgccccgagaagccgcccgggcaggtcacgcggctccgcgccctgcccctgacccaagggcagctggttctg

SEQ ID NO: 77192 - DNA, 201 bp, Homo sapiens; identical to SEQ ID NO: 76982

SEQ ID NO: 77193 - DNA, 201 bp, Homo sapiens; identical to SEQ ID NO: 76983

SEQ ID NO: 77194 - DNA, 201 bp, Homo sapiens; identical to SEQ ID NO: 76984

SEQ ID NO: 77195 - DNA, 201 bp, Homo sapiens; identical to SEQ ID NO: 77024

SEQ ID NO: 77196 - DNA, 201 bp, Homo sapiens; identical to SEQ ID NO: 77026

SEQ ID NO: 77197 - DNA, 201 bp, Homo sapiens; identical to SEQ ID NO: 76986

SEQ ID NO: 77198 - DNA, 201 bp, Homo sapiens; identical to SEQ ID NO: 77027

SEQ ID NO: 77199 - DNA, 201 bp, Homo sapiens; identical to SEQ ID NO: 76989

SEQ ID NO: 77200 - DNA, 201 bp, Homo sapiens; identical to SEQ ID NO: 77029

SEQ ID NO: 77201 - DNA, 201 bp, Homo sapiens; identical to SEQ ID NO: 77030

SEQ ID NO: 77202 - DNA, 201 bp, Homo sapiens; identical to SEQ ID NO: 76991

SEQ ID NO: 77203 - DNA, 201 bp, Homo sapiens; identical to SEQ ID NO: 77032

SEQ ID NO: 77204 - DNA, 201 bp, Homo sapiens; identical to SEQ ID NO: 76992

SEQ ID NO: 77205 - DNA, 201 bp, Homo sapiens; identical to SEQ ID NO: 76993

SEQ ID NO: 77206 - DNA, 201 bp, Homo sapiens; identical to SEQ ID NO: 76994

SEQ ID NO: 77207 - DNA, 201 bp, Homo sapiens; identical to SEQ ID NO: 76995

SEQ ID NO: 77208 - DNA, 201 bp, Homo sapiens; identical to SEQ ID NO: 76997

SEQ ID NO: 77209 - DNA, 201 bp, Homo sapiens; identical to SEQ ID NO: 76998

SEQ ID NO: 77210 - DNA, 201 bp, Homo sapiens; identical to SEQ ID NO: 76999

SEQ ID NO: 77211 - DNA, 201 bp, Homo sapiens; identical to SEQ ID NO: 77000

SEQ ID NO: 77212 - DNA, 201 bp, Homo sapiens; identical to SEQ ID NO: 77002

SEQ ID NO: 77213 - DNA, 201 bp, Homo sapiens; identical to SEQ ID NO: 77001

SEQ ID NO: 77214 - DNA, 201 bp, Homo sapiens; identical to SEQ ID NO: 77003

SEQ ID NO: 77215 - DNA, 201 bp, Homo sapiens; identical to SEQ ID NO: 77005

SEQ ID NO: 77216 - DNA, 201 bp, Homo sapiens; identical to SEQ ID NO: 77004

SEQ ID NO: 77217 - DNA, 201 bp, Homo sapiens; identical to SEQ ID NO: 77006

SEQ ID NO: 77218 - DNA, 201 bp, Homo sapiens; identical to SEQ ID NO: 77046

SEQ ID NO: 77219 - DNA, 201 bp, Homo sapiens; identical to SEQ ID NO: 77047

SEQ ID NO: 77220 - DNA, 201 bp, Homo sapiens; identical to SEQ ID NO: 77007

SEQ ID NO: 77221 - DNA, 201 bp, Homo sapiens; identical to SEQ ID NO: 77008

SEQ ID NO: 77222 - DNA, 201 bp, Homo sapiens; identical to SEQ ID NO: 77010

SEQ ID NO: 77223 - DNA, 201 bp, Homo sapiens; identical to SEQ ID NO: 77009

SEQ ID NO: 77224 - DNA, 201 bp, Homo sapiens; identical to SEQ ID NO: 77011

SEQ ID NO: 77225 - DNA, 201 bp, Homo sapiens; identical to SEQ ID NO: 77012

SEQ ID NO: 77226 - DNA, 201 bp, Homo sapiens; identical to SEQ ID NO: 77013

SEQ ID NO: 77227 - DNA, 201 bp, Homo sapiens; identical to SEQ ID NO: 77055

SEQ ID NO: 77228 - DNA, 201 bp, Homo sapiens; identical to SEQ ID NO: 77014

SEQ ID NO: 77229 - DNA, 201 bp, Homo sapiens; identical to SEQ ID NO: 77056

SEQ ID NO: 77230 - DNA, 201 bp, Homo sapiens; identical to SEQ ID NO: 77015

SEQ ID NO: 77231 - DNA, 201 bp, Homo sapiens; identical to SEQ ID NO: 77016

SEQ ID NO: 77232 - DNA, 201 bp, Homo sapiens; identical to SEQ ID NO: 77017

SEQ ID NO: 77233 - DNA, 201 bp, Homo sapiens; identical to SEQ ID NO: 77018

SEQ ID NO: 77234 - DNA, 201 bp, Homo sapiens; identical to SEQ ID NO: 76980

SEQ ID NO: 77235 - DNA, 201 bp, Homo sapiens; identical to SEQ ID NO: 77061

SEQ ID NO: 77236 - DNA, 201 bp, Homo sapiens; identical to SEQ ID NO: 76982

SEQ ID NO: 77237 - DNA, 201 bp, Homo sapiens; identical to SEQ ID NO: 76983

SEQ ID NO: 77238 - DNA, 201 bp, Homo sapiens; identical to SEQ ID NO: 76984

SEQ ID NO: 77239 - DNA, 201 bp, Homo sapiens; identical to SEQ ID NO: 77024

SEQ ID NO: 77240 - DNA, 201 bp, Homo sapiens; identical to SEQ ID NO: 77026

SEQ ID NO: 77241 - DNA, 201 bp, Homo sapiens; identical to SEQ ID NO: 76986

SEQ ID NO: 77242 - DNA, 201 bp, Homo sapiens; identical to SEQ ID NO: 77027

SEQ ID NO: 77243 - DNA, 201 bp, Homo sapiens; identical to SEQ ID NO: 76989

SEQ ID NO: 77244 - DNA, 201 bp, Homo sapiens; identical to SEQ ID NO: 77029

SEQ ID NO: 77245 - DNA, 201 bp, Homo sapiens; identical to SEQ ID NO: 77030

SEQ ID NO: 77246 - DNA, 201 bp, Homo sapiens
ctgtcccctcggaatgcaggcctcgtgggaattcagccccatctgcaaggggtccactggacggggcctgagctacaacttcacccacctggacgggtacytggaccttctcagggagaaccagctcctcccagggtttgagctgatgggcagcgcctcgggccacttcactgactttgaggacaagcagcaggtgtttga

SEQ ID NO: 77247 - DNA, 201 bp, Homo sapiens; identical to SEQ ID NO: 77032

SEQ ID NO: 77248 - DNA, 201 bp, Homo sapiens; identical to SEQ ID NO: 76992

SEQ ID NO: 77249 - DNA, 201 bp, Homo sapiens
gcccctgcggcgcttctggaggagcacaggcttctgccccccgctgccacacagccaggctgaccagtacgtcctcagctgggaccagcagctcaacctcvcctatgtgggcgccgtccctcaccgcggcatcaagcaggtccggacccactggctgctggagcttgtcaccaccaggcctcgtgggaattcagcccatct

SEQ ID NO: 77250 - DNA, 201 bp, Homo sapiens
agcacaggcttctgccccccgctgccacacagccaggctgaccagtacgtcctcagctgggaccagcagctcaacctcgcctatgtgggcgccgtccctcmccgcggcatcaagcaggtccggacccactggctgctggagcttgtcaccaccaggcctcgtgggaattcagcccatctgcaagtgcagtggcagggcggc

SEQ ID NO: 77251 - DNA, 201 bp, Homo sapiens; identical to SEQ ID NO: 76995

SEQ ID NO: 77252 - DNA, 201 bp, Homo sapiens; identical to SEQ ID NO: 76997

SEQ ID NO: 77253 - DNA, 201 bp, Homo sapiens; identical to SEQ ID NO: 76998

SEQ ID NO: 77254 - DNA, 201 bp, Homo sapiens; identical to SEQ ID NO: 76999

SEQ ID NO: 77255 - DNA, 201 bp, Homo sapiens; identical to SEQ ID NO: 77082

SEQ ID NO: 77256 - DNA, 201 bp, Homo sapiens; identical to SEQ ID NO: 77084

SEQ ID NO: 77257 - DNA, 201 bp, Homo sapiens; identical to SEQ ID NO: 77083

SEQ ID NO: 77258 - DNA, 201 bp, Homo sapiens
tgcagtggcagggcggcccccttctcccttgaggacgcctgtcccctcggaatgcaggcctcgtgggaattcagccccatctgcaaggggtccactggacrgggcctgagctacaacttcacccacctggacgggtacctggaccttctcagggagaaccagctcctcccagggtttgagctgatgggcagcgcctcgggc

SEQ ID NO: 77259 - DNA, 201 bp, Homo sapiens; identical to SEQ ID NO: 77087

SEQ ID NO: 77260 - DNA, 201 bp, Homo sapiens; identical to SEQ ID NO: 77086

SEQ ID NO: 77261 - DNA, 201 bp, Homo sapiens; identical to SEQ ID NO: 77046

SEQ ID NO: 77262 - DNA, 201 bp, Homo sapiens; identical to SEQ ID NO: 77047

SEQ ID NO: 77263 - DNA, 201 bp, Homo sapiens
ggcccgcgcgctgtggcccctgcggcgcttctggaggagcacaggcttctgccccccgctgccacacagccaggctgaccagtacgtcctcagctgggacyagcagctcaacctcgcctatgtgggcgccgtccctcaccgcggcatcaagcaggtccggacccactggctgctggagcttgtcaccaccaggcctcgtgg

SEQ ID NO: 77264 - DNA, 201 bp, Homo sapiens; identical to SEQ ID NO: 77007

SEQ ID NO: 77265 - DNA, 201 bp, Homo sapiens; identical to SEQ ID NO: 77010

SEQ ID NO: 77266 - DNA, 201 bp, Homo sapiens; identical to SEQ ID NO: 77009

SEQ ID NO: 77267 - DNA, 201 bp, Homo sapiens; identical to SEQ ID NO: 77012

SEQ ID NO: 77268 - DNA, 201 bp, Homo sapiens; identical to SEQ ID NO: 77011

SEQ ID NO: 77269 - DNA, 201 bp, Homo sapiens
ttctggaggagcacaggcttctgccccccgctgccacacagccaggctgaccagtacgtcctcagctgggaccagcagctcaacctcgcctatgtgggcgycgtccctcaccgcggcatcaagcaggtccggacccactggctgctggagcttgtcaccaccaggcctcgtgggaattcagcccatctgcaagtgcagtgg

SEQ ID NO: 77270 - DNA, 201 bp, Homo sapiens; identical to SEQ ID NO: 77055

SEQ ID NO: 77271 - DNA, 201 bp, Homo sapiens; identical to SEQ ID NO: 77014

SEQ ID NO: 77272 - DNA, 201 bp, Homo sapiens; identical to SEQ ID NO: 77056

SEQ ID NO: 77273 - DNA, 201 bp, Homo sapiens; identical to SEQ ID NO: 77015

SEQ ID NO: 77274 - DNA, 201 bp, Homo sapiens; identical to SEQ ID NO: 77016

SEQ ID NO: 77275 - DNA, 201 bp, Homo sapiens; identical to SEQ ID NO: 77142

SEQ ID NO: 77276 - DNA, 201 bp, Homo sapiens; identical to SEQ ID NO: 76980

SEQ ID NO: 77277 - DNA, 153 bp, Homo sapiens
accctgaggaccggccactgcgcccaggacccggtggccgcggcgccccgccccttacccgccggcggccgcctgaccctgcgccccgcgctgcggctgcbgtcgcttttgctggtgcacgtgtgtgcgcgccccgagaagccgcccgggcag

SEQ ID NO: 77278 - DNA, 201 bp, Homo sapiens
ctccacctgagtgggcgccggggcgtgagcctgggccgccccctgcagcccaggccgatgcccgggatcctgctctttgagccccccgctgccacacagcyaggctgaccagtacgtcctcagctgggaccagcagctcaacctcgcctatgtgggcgccgtccctcaccgcggcatcaagcaggtccggacccactggct

SEQ ID NO: 77279 - DNA, 201 bp, Homo sapiens; identical to SEQ ID NO: 77024

SEQ ID NO: 77280 - DNA, 185 bp, Homo sapiens
gtcctccacctgagtgggcgccggggcgtgagcctgggccgccccctgcagcccaggccgatgcccgggatcctgctctttgagmcccccgctgccacacagccaggctgaccagtacgtcctcagctgggaccagcagctcaacctcgcctatgtgggcgccgtccctcaccgcggcatcaagc

SEQ ID NO: 77281 - DNA, 201 bp, Homo sapiens; identical to SEQ ID NO: 77029

SEQ ID NO: 77282 - DNA, 201 bp, Homo sapiens; identical to SEQ ID NO: 76989

SEQ ID NO: 77283 - DNA, 201 bp, Homo sapiens; identical to SEQ ID NO: 77027

SEQ ID NO: 77284 - DNA, 201 bp, Homo sapiens; identical to SEQ ID NO: 77030

SEQ ID NO: 77285 - DNA, 201 bp, Homo sapiens; identical to SEQ ID NO: 76991

SEQ ID NO: 77286 - DNA, 201 bp, Homo sapiens; identical to SEQ ID NO: 76992

SEQ ID NO: 77287 - DNA, 201 bp, Homo sapiens
cagcccaggccgatgcccgggatcctgctctttgagccccccgctgccacacagccaggctgaccagtacgtcctcagctgggaccagcagctcaacctcvcctatgtgggcgccgtccctcaccgcggcatcaagcaggtccggacccactggctgctggagcttgtcaccaccagggggtccactggacggggcctgag

SEQ ID NO: 77288 - DNA, 201 bp, Homo sapiens
tcctgctctttgagccccccgctgccacacagccaggctgaccagtacgtcctcagctgggaccagcagctcaacctcgcctatgtgggcgccgtccctcmccgcggcatcaagcaggtccggacccactggctgctggagcttgtcaccaccagggggtccactggacggggcctgagctacaacttcacccacctggac

SEQ ID NO: 77289 - DNA, 201 bp, Homo sapiens; identical to SEQ ID NO: 76995

SEQ ID NO: 77290 - DNA, 201 bp, Homo sapiens; identical to SEQ ID NO: 76997

SEQ ID NO: 77291 - DNA, 201 bp, Homo sapiens; identical to SEQ ID NO: 76998

SEQ ID NO: 77292 - DNA, 201 bp, Homo sapiens; identical to SEQ ID NO: 76999

SEQ ID NO: 77293 - DNA, 201 bp, Homo sapiens; identical to SEQ ID NO: 77000

SEQ ID NO: 77294 - DNA, 201 bp, Homo sapiens; identical to SEQ ID NO: 77001

SEQ ID NO: 77295 - DNA, 201 bp, Homo sapiens; identical to SEQ ID NO: 77002

SEQ ID NO: 77296 - DNA, 201 bp, Homo sapiens; identical to SEQ ID NO: 77003

SEQ ID NO: 77297 - DNA, 201 bp, Homo sapiens; identical to SEQ ID NO: 77004

SEQ ID NO: 77298 - DNA, 201 bp, Homo sapiens; identical to SEQ ID NO: 77005

SEQ ID NO: 77299 - DNA, 201 bp, Homo sapiens; identical to SEQ ID NO: 77171

SEQ ID NO: 77300 - DNA, 201 bp, Homo sapiens; identical to SEQ ID NO: 77007

SEQ ID NO: 77301 - DNA, 201 bp, Homo sapiens
ctgggccgccccctgcagcccaggccgatgcccgggatcctgctctttgagccccccgctgccacacagccaggctgaccagtacgtcctcagctgggacyagcagctcaacctcgcctatgtgggcgccgtccctcaccgcggcatcaagcaggtccggacccactggctgctggagcttgtcaccaccagggggtccac

SEQ ID NO: 77302 - DNA, 201 bp, Homo sapiens; identical to SEQ ID NO: 77009

SEQ ID NO: 77303 - DNA, 201 bp, Homo sapiens; identical to SEQ ID NO: 77012

SEQ ID NO: 77304 - DNA, 201 bp, Homo sapiens
tgcccgggatcctgctctttgagccccccgctgccacacagccaggctgaccagtacgtcctcagctgggaccagcagctcaacctcgcctatgtgggcgycgtccctcaccgcggcatcaagcaggtccggacccactggctgctggagcttgtcaccaccagggggtccactggacggggcctgagctacaacttcacc

SEQ ID NO: 77305 - DNA, 201 bp, Homo sapiens; identical to SEQ ID NO: 77014

SEQ ID NO: 77306 - DNA, 201 bp, Homo sapiens; identical to SEQ ID NO: 77015

SEQ ID NO: 77307 - DNA, 201 bp, Homo sapiens; identical to SEQ ID NO: 77185

SEQ ID NO: 77308 - DNA, 201 bp, Homo sapiens; identical to SEQ ID NO: 77016

SEQ ID NO: 77309 - DNA, 201 bp, Homo sapiens; identical to SEQ ID NO: 77187

SEQ ID NO: 77310 - DNA, 201 bp, Homo sapiens; identical to SEQ ID NO: 77188

SEQ ID NO: 77311 - DNA, 201 bp, Homo sapiens; identical to SEQ ID NO: 77142

SEQ ID NO: 77312 - DNA, 201 bp, Homo sapiens; identical to SEQ ID NO: 76980

SEQ ID NO: 77313 - DNA, 201 bp, Homo sapiens; identical to SEQ ID NO: 77144

SEQ ID NO: 77314 - DNA, 201 bp, Homo sapiens; identical to SEQ ID NO: 76982

SEQ ID NO: 77315 - DNA, 201 bp, Homo sapiens; identical to SEQ ID NO: 76983

SEQ ID NO: 77316 - DNA, 201 bp, Homo sapiens; identical to SEQ ID NO: 76984

SEQ ID NO: 77317 - DNA, 201 bp, Homo sapiens; identical to SEQ ID NO: 76985

SEQ ID NO: 77318 - DNA, 201 bp, Homo sapiens; identical to SEQ ID NO: 77026

SEQ ID NO: 77319 - DNA, 201 bp, Homo sapiens; identical to SEQ ID NO: 76986

SEQ ID NO: 77320 - DNA, 201 bp, Homo sapiens; identical to SEQ ID NO: 77068

SEQ ID NO: 77321 - DNA, 201 bp, Homo sapiens; identical to SEQ ID NO: 76988

SEQ ID NO: 77322 - DNA, 201 bp, Homo sapiens; identical to SEQ ID NO: 76989

SEQ ID NO: 77323 - DNA, 201 bp, Homo sapiens; identical to SEQ ID NO: 76990

SEQ ID NO: 77324 - DNA, 201 bp, Homo sapiens; identical to SEQ ID NO: 76991

SEQ ID NO: 77325 - DNA, 201 bp, Homo sapiens; identical to SEQ ID NO: 77032

SEQ ID NO: 77326 - DNA, 201 bp, Homo sapiens; identical to SEQ ID NO: 76992

SEQ ID NO: 77327 - DNA, 201 bp, Homo sapiens; identical to SEQ ID NO: 76993

SEQ ID NO: 77328 - DNA, 201 bp, Homo sapiens; identical to SEQ ID NO: 76994

SEQ ID NO: 77329 - DNA, 201 bp, Homo sapiens; identical to SEQ ID NO: 76995

SEQ ID NO: 77330 - DNA, 201 bp, Homo sapiens; identical to SEQ ID NO: 77078

SEQ ID NO: 77331 - DNA, 201 bp, Homo sapiens; identical to SEQ ID NO: 76997

SEQ ID NO: 77332 - DNA, 201 bp, Homo sapiens; identical to SEQ ID NO: 76998

SEQ ID NO: 77333 - DNA, 201 bp, Homo sapiens; identical to SEQ ID NO: 76999

SEQ ID NO: 77334 - DNA, 201 bp, Homo sapiens; identical to SEQ ID NO: 77000

SEQ ID NO: 77335 - DNA, 201 bp, Homo sapiens; identical to SEQ ID NO: 77001

SEQ ID NO: 77336 - DNA, 201 bp, Homo sapiens; identical to SEQ ID NO: 77002

SEQ ID NO: 77337 - DNA, 201 bp, Homo sapiens; identical to SEQ ID NO: 77003

SEQ ID NO: 77338 - DNA, 201 bp, Homo sapiens; identical to SEQ ID NO: 77004

SEQ ID NO: 77339 - DNA, 201 bp, Homo sapiens; identical to SEQ ID NO: 77005

SEQ ID NO: 77340 - DNA, 201 bp, Homo sapiens; identical to SEQ ID NO: 77171

SEQ ID NO: 77341 - DNA, 201 bp, Homo sapiens; identical to SEQ ID NO: 77046

SEQ ID NO: 77342 - DNA, 201 bp, Homo sapiens; identical to SEQ ID NO: 77047

SEQ ID NO: 77343 - DNA, 201 bp, Homo sapiens; identical to SEQ ID NO: 77007

SEQ ID NO: 77344 - DNA, 201 bp, Homo sapiens; identical to SEQ ID NO: 77008

SEQ ID NO: 77345 - DNA, 201 bp, Homo sapiens; identical to SEQ ID NO: 77009

SEQ ID NO: 77346 - DNA, 201 bp, Homo sapiens; identical to SEQ ID NO: 77010

SEQ ID NO: 77347 - DNA, 201 bp, Homo sapiens; identical to SEQ ID NO: 77011

SEQ ID NO: 77348 - DNA, 201 bp, Homo sapiens; identical to SEQ ID NO: 77012

SEQ ID NO: 77349 - DNA, 201 bp, Homo sapiens; identical to SEQ ID NO: 77013

SEQ ID NO: 77350 - DNA, 201 bp, Homo sapiens; identical to SEQ ID NO: 77055

SEQ ID NO: 77351 - DNA, 201 bp, Homo sapiens; identical to SEQ ID NO: 77014

SEQ ID NO: 77352 - DNA, 201 bp, Homo sapiens; identical to SEQ ID NO: 77056

SEQ ID NO: 77353 - DNA, 201 bp, Homo sapiens; identical to SEQ ID NO: 77015

SEQ ID NO: 77354 - DNA, 201 bp, Homo sapiens; identical to SEQ ID NO: 77185

SEQ ID NO: 77355 - DNA, 201 bp, Homo sapiens; identical to SEQ ID NO: 77016

SEQ ID NO: 77356 - DNA, 201 bp, Homo sapiens; identical to SEQ ID NO: 77187

SEQ ID NO: 77357 - DNA, 201 bp, Homo sapiens; identical to SEQ ID NO: 77188

SEQ ID NO: 77358 - DNA, 201 bp, Homo sapiens; identical to SEQ ID NO: 76979

SEQ ID NO: 77359 - DNA, 201 bp, Homo sapiens; identical to SEQ ID NO: 76980

SEQ ID NO: 77360 - DNA, 201 bp, Homo sapiens; identical to SEQ ID NO: 76981

SEQ ID NO: 77361 - DNA, 201 bp, Homo sapiens; identical to SEQ ID NO: 76982

SEQ ID NO: 77362 - DNA, 201 bp, Homo sapiens; identical to SEQ ID NO: 76983

SEQ ID NO: 77363 - DNA, 201 bp, Homo sapiens; identical to SEQ ID NO: 76984

SEQ ID NO: 77364 - DNA, 201 bp, Homo sapiens; identical to SEQ ID NO: 77024

SEQ ID NO: 77365 - DNA, 201 bp, Homo sapiens; identical to SEQ ID NO: 76986

SEQ ID NO: 77366 - DNA, 201 bp, Homo sapiens; identical to SEQ ID NO: 77027

SEQ ID NO: 77367 - DNA, 201 bp, Homo sapiens; identical to SEQ ID NO: 76989

SEQ ID NO: 77368 - DNA, 201 bp, Homo sapiens; identical to SEQ ID NO: 77029

SEQ ID NO: 77369 - DNA, 201 bp, Homo sapiens; identical to SEQ ID NO: 77030

SEQ ID NO: 77370 - DNA, 201 bp, Homo sapiens; identical to SEQ ID NO: 76991

SEQ ID NO: 77371 - DNA, 201 bp, Homo sapiens; identical to SEQ ID NO: 76992

SEQ ID NO: 77372 - DNA, 201 bp, Homo sapiens; identical to SEQ ID NO: 76993

SEQ ID NO: 77373 - DNA, 201 bp, Homo sapiens; identical to SEQ ID NO: 76994

SEQ ID NO: 77374 - DNA, 201 bp, Homo sapiens; identical to SEQ ID NO: 76995

SEQ ID NO: 77375 - DNA, 201 bp, Homo sapiens; identical to SEQ ID NO: 76997

SEQ ID NO: 77376 - DNA, 201 bp, Homo sapiens; identical to SEQ ID NO: 76998

SEQ ID NO: 77377 - DNA, 201 bp, Homo sapiens; identical to SEQ ID NO: 76999

SEQ ID NO: 77378 - DNA, 201 bp, Homo sapiens; identical to SEQ ID NO: 77000

SEQ ID NO: 77379 - DNA, 201 bp, Homo sapiens; identical to SEQ ID NO: 77002

SEQ ID NO: 77380 - DNA, 201 bp, Homo sapiens; identical to SEQ ID NO: 77001

SEQ ID NO: 77381 - DNA, 201 bp, Homo sapiens; identical to SEQ ID NO: 77003

SEQ ID NO: 77382 - DNA, 201 bp, Homo sapiens; identical to SEQ ID NO: 77005

SEQ ID NO: 77383 - DNA, 201 bp, Homo sapiens; identical to SEQ ID NO: 77004

SEQ ID NO: 77384 - DNA, 201 bp, Homo sapiens; identical to SEQ ID NO: 77006

SEQ ID NO: 77385 - DNA, 201 bp, Homo sapiens; identical to SEQ ID NO: 77007

SEQ ID NO: 77386 - DNA, 201 bp, Homo sapiens; identical to SEQ ID NO: 77008

SEQ ID NO: 77387 - DNA, 201 bp, Homo sapiens; identical to SEQ ID NO: 77010

SEQ ID NO: 77388 - DNA, 201 bp, Homo sapiens; identical to SEQ ID NO: 77009

SEQ ID NO: 77389 - DNA, 201 bp, Homo sapiens; identical to SEQ ID NO: 77011

SEQ ID NO: 77390 - DNA, 201 bp, Homo sapiens; identical to SEQ ID NO: 77012

SEQ ID NO: 77391 - DNA, 201 bp, Homo sapiens; identical to SEQ ID NO: 77013

SEQ ID NO: 77392 - DNA, 201 bp, Homo sapiens; identical to SEQ ID NO: 77014

SEQ ID NO: 77393 - DNA, 201 bp, Homo sapiens; identical to SEQ ID NO: 77015

SEQ ID NO: 77394 - DNA, 201 bp, Homo sapiens; identical to SEQ ID NO: 77016

SEQ ID NO: 77395 - DNA, 201 bp, Homo sapiens; identical to SEQ ID NO: 77017

SEQ ID NO: 77396 - DNA, 201 bp, Homo sapiens; identical to SEQ ID NO: 77018

SEQ ID NO: 77397 - DNA, 201 bp, Homo sapiens; identical to SEQ ID NO: 77142

SEQ ID NO: 77398 - DNA, 201 bp, Homo sapiens; identical to SEQ ID NO: 76980

SEQ ID NO: 77399 - DNA, 153 bp, Homo sapiens; identical to SEQ ID NO: 77277

SEQ ID NO: 77400 - DNA, 201 bp, Homo sapiens; identical to SEQ ID NO: 76982

SEQ ID NO: 77401 - DNA, 201 bp, Homo sapiens; identical to SEQ ID NO: 76983

SEQ ID NO: 77402 - DNA, 201 bp, Homo sapiens; identical to SEQ ID NO: 76984

SEQ ID NO: 77403 - DNA, 201 bp, Homo sapiens; identical to SEQ ID NO: 77024

SEQ ID NO: 77404 - DNA, 201 bp, Homo sapiens; identical to SEQ ID NO: 76986

SEQ ID NO: 77405 - DNA, 201 bp, Homo sapiens; identical to SEQ ID NO: 77027

SEQ ID NO: 77406 - DNA, 201 bp, Homo sapiens; identical to SEQ ID NO: 76989

SEQ ID NO: 77407 - DNA, 201 bp, Homo sapiens; identical to SEQ ID NO: 77029

SEQ ID NO: 77408 - DNA, 201 bp, Homo sapiens; identical to SEQ ID NO: 77030

SEQ ID NO: 77409 - DNA, 201 bp, Homo sapiens; identical to SEQ ID NO: 76991

SEQ ID NO: 77410 - DNA, 201 bp, Homo sapiens; identical to SEQ ID NO: 76992

SEQ ID NO: 77411 - DNA, 201 bp, Homo sapiens; identical to SEQ ID NO: 76993

SEQ ID NO: 77412 - DNA, 201 bp, Homo sapiens; identical to SEQ ID NO: 76994

SEQ ID NO: 77413 - DNA, 201 bp, Homo sapiens; identical to SEQ ID NO: 76995

SEQ ID NO: 77414 - DNA, 201 bp, Homo sapiens; identical to SEQ ID NO: 76997

SEQ ID NO: 77415 - DNA, 201 bp, Homo sapiens; identical to SEQ ID NO: 76998

SEQ ID NO: 77416 - DNA, 201 bp, Homo sapiens; identical to SEQ ID NO: 76999

SEQ ID NO: 77417 - DNA, 201 bp, Homo sapiens; identical to SEQ ID NO: 77000

SEQ ID NO: 77418 - DNA, 201 bp, Homo sapiens; identical to SEQ ID NO: 77002

SEQ ID NO: 77419 - DNA, 201 bp, Homo sapiens; identical to SEQ ID NO: 77001

SEQ ID NO: 77420 - DNA, 201 bp, Homo sapiens; identical to SEQ ID NO: 77003

SEQ ID NO: 77421 - DNA, 201 bp, Homo sapiens; identical to SEQ ID NO: 77005

SEQ ID NO: 77422 - DNA, 201 bp, Homo sapiens; identical to SEQ ID NO: 77004

SEQ ID NO: 77423 - DNA, 201 bp, Homo sapiens; identical to SEQ ID NO: 77171

SEQ ID NO: 77424 - DNA, 201 bp, Homo sapiens; identical to SEQ ID NO: 77007

SEQ ID NO: 77425 - DNA, 201 bp, Homo sapiens; identical to SEQ ID NO: 77008

SEQ ID NO: 77426 - DNA, 201 bp, Homo sapiens; identical to SEQ ID NO: 77010

SEQ ID NO: 77427 - DNA, 201 bp, Homo sapiens; identical to SEQ ID NO: 77009

SEQ ID NO: 77428 - DNA, 201 bp, Homo sapiens; identical to SEQ ID NO: 77011

SEQ ID NO: 77429 - DNA, 201 bp, Homo sapiens; identical to SEQ ID NO: 77012

SEQ ID NO: 77430 - DNA, 201 bp, Homo sapiens; identical to SEQ ID NO: 77013

SEQ ID NO: 77431 - DNA, 201 bp, Homo sapiens; identical to SEQ ID NO: 77014

SEQ ID NO: 77432 - DNA, 201 bp, Homo sapiens; identical to SEQ ID NO: 77015

SEQ ID NO: 77433 - DNA, 201 bp, Homo sapiens; identical to SEQ ID NO: 77185

SEQ ID NO: 77434 - DNA, 201 bp, Homo sapiens; identical to SEQ ID NO: 77016

SEQ ID NO: 77435 - DNA, 201 bp, Homo sapiens; identical to SEQ ID NO: 77187

SEQ ID NO: 77436 - DNA, 201 bp, Homo sapiens; identical to SEQ ID NO: 77188

SEQ ID NO: 77437 - DNA, 201 bp, Homo sapiens
cctgagctacctccacaactgcgagacgcgccgcggccaggtgctgctgtggtcggccaacaaggtgtttgaggagctgacggacatcgagaggcagttcmacaaggccttctacacggtgcgggcctacctcaactgcgagcggtactccgtgggcctcctggacatgaccaaggagaaggaattttttgacgtgtggtc

SEQ ID NO: 77438 - DNA, 201 bp, Homo sapiens
gtactacgagctgggcgtggtccgaaagttccagatcccccaggaggtcctggtgcggttcctgttctccatcagcaaagggtaccggagaatcacctacyacaactggcgccacggcttcaacgtggcccagacgatgttcacgctgctcatgaccggcaaactgaagagctactacacggacctggaggccttcgccat

SEQ ID NO: 77439 - DNA, 201 bp, Homo sapiens
ttcctgttctccatcagcaaagggtaccggagaatcacctaccacaactggcgccacggcttcaacgtggcccagacgatgttcacgctgctcatgaccgrcaaactgaagagctactacacggacctggaggccttcgccatggtgacagccggcctgtgccatgacatcgaccaccgcggcaccaacaacctgtaccag

SEQ ID NO: 77440 - DNA, 201 bp, Homo sapiens
acaataggaaagagtggaaggcgctggctgatgagtatgaggccaaagtgaaggctctggaggagaaggaggaggaggagagggtggcagccaagaaagtrggcacagaaatttgcaatggcggcccagcacccaagtcttcaacctgctgtatcctgtgagcactgtcccatgggaccctatggctccctcaatcttcac

SEQ ID NO: 77441 - DNA, 201 bp, Homo sapiens
gcaaggtcgcacttctcgtggctgctgagttctgggagcaaggtgacttggaaaggacagtcttggatcagcagcccattcctatgatggaccggaacaargcggccgagctccccaagctgcaagtgggcttcatcgacttcgtgtgcacattcgtgtacaaggcgattctctcgtttccacgaagagatcctgcccatg

SEQ ID NO: 77442 - DNA, 201 bp, Homo sapiens
cttcaagaagagagcgatgtttcagaagatcgtggatgagtccaagaactaccaggacaagaagagctgggtggagtacctgtccctggagacgacccggwaggagatcgtcatggccatgatgatgacagcctgcgacctgtctgccatcaccaagccctgggaagtccagagcaaggtcgcacttctcgtggctgctga

SEQ ID NO: 77443 - DNA, 201 bp, Homo sapiens
agagggtggcagccaagaaagtaggcacagaaatttgcaatggcggcccagcacccaagtcttcaacctgctgtatcctgtgagcactgtcccatgggacmctatggctccctcaatcttcacccactaggatttgggttctgcctgtggctatttgctacaagaggttaggaagcccaagaaaatgactgaagatcattc

SEQ ID NO: 77444 - DNA, 201 bp, Homo sapiens
tctggaggagaaggaggaggaggagagggtggcagccaagaaagtaggcacagaaatttgcaatggcggcccagcacccaagtcttcaacctgctgtatcstgtgagcactgtcccatgggaccctatggctccctcaatcttcacccactaggatttgggttctgcctgtggctatttgctacaagaggttaggaagccc

SEQ ID NO: 77445 - DNA, 201 bp, Homo sapiens
cccgccggactgcgacagcctccgggacctctgccaggtggaggagagcacggcgctgctggagctggtgcaggatatgcaggagagcatcaacatggagygcgtggtcttcaaggtcctgcggcgcctctgcaccctcctgcaggccgaccgctgcagcctcttcatgtaccgccagcgcaacggcgtggccgagctggc

SEQ ID NO: 77446 - DNA, 201 bp, Homo sapiens
tgtggcatccagatgtactacgagctgggcgtggtccgaaagttccagatcccccaggaggtcctggtgcggttcctgttctccatcagcaaagggtaccrgagaatcacctaccacaactggcgccacggcttcaacgtggcccagacgatgttcacgctgctcatgaccggcaaactgaagagctactacacggacctg

SEQ ID NO: 77447 - DNA, 201 bp, Homo sapiens
gtgacttggaaaggacagtcttggatcagcagcccattcctatgatggaccggaacaaggcggccgagctccccaagctgcaagtgggcttcatcgacttygtgtgcacattcgtgtacaaggcgattctctcgtttccacgaagagatcctgcccatgttcgaccgactgcagaacaataggaaagagtggaaggcgctg

SEQ ID NO: 77448 - DNA, 201 bp, Homo sapiens
cgctggctgatgagtatgaggccaaagtgaaggctctggaggagaaggaggaggaggagagggtggcagccaagaaagtaggcacagaaatttgcaatggyggcccagcacccaagtcttcaacctgctgtatcctgtgagcactgtcccatgggaccctatggctccctcaatcttcacccactaggatttgggttctgc

SEQ ID NO: 77449 - DNA, 201 bp, Homo sapiens
gaggaggagagggtggcagccaagaaagtaggcacagaaatttgcaatggcggcccagcacccaagtcttcaacctgctgtatcctgtgagcactgtcccrtgggaccctatggctccctcaatcttcacccactaggatttgggttctgcctgtggctatttgctacaagaggttaggaagcccaagaaaatgactgaag

SEQ ID NO: 77450 - DNA, 201 bp, Homo sapiens
aggtgctgctgtggtcggccaacaaggtgtttgaggagctgacggacatcgagaggcagttccacaaggccttctacacggtgcgggcctacctcaactgmgagcggtactccgtgggcctcctggacatgaccaaggagaaggaattttttgacgtgtggtctgtgctgatgggagagtcccagccgtactcgggcccac

SEQ ID NO: 77451 - DNA, 201 bp, Homo sapiens
ttttgacgtgtggtctgtgctgatgggagagtcccagccgtactcgggcccacgcacgcctgatggccgggaaattgtcttctacaaagtgatcgactacrtcctccacggcaaggaggagatcaaggtcattcccacaccctcagccgatcactgggccctggccagcggccttccaagctacgtggcagaaagcggctt

SEQ ID NO: 77452 - DNA, 201 bp, Homo sapiens; identical to SEQ ID NO: 77437

SEQ ID NO: 77453 - DNA, 201 bp, Homo sapiens
ggccctggccagcggccttccaagctacgtggcagaaagcggctttgtcctggtgcggttcctgttctccatcagcaaagggtaccggagaatcacctacyacaactggcgccacggcttcaacgtggcccagacgatgttcacgctgctcatgaccggcaaactgaagagctactacacggacctggaggccttcgccat

SEQ ID NO: 77454 - DNA, 201 bp, Homo sapiens
tatgatggaccggaacaaggcggccgagctccccaagctgcaagtgggcttcatcgacttcgtgtgcacattcgtgtacaaggcgagtggttcacgggttrggcacagaaatttgcaatggcggcccagcacccaagtcttcaacctgctgtatcctgtgagcactgtcccatgggaccctatggctccctcaatcttcac

SEQ ID NO: 77455 - DNA, 201 bp, Homo sapiens; identical to SEQ ID NO: 77439

SEQ ID NO: 77456 - DNA, 201 bp, Homo sapiens
gcaaggtcgcacttctcgtggctgctgagttctgggagcaaggtgacttggaaaggacagtcttggatcagcagcccattcctatgatggaccggaacaargcggccgagctccccaagctgcaagtgggcttcatcgacttcgtgtgcacattcgtgtacaaggcgagtggttcacgggttaggcacagaaatttgcaat

SEQ ID NO: 77457 - DNA, 201 bp, Homo sapiens; identical to SEQ ID NO: 77442

SEQ ID NO: 77458 - DNA, 201 bp, Homo sapiens
caaggcgagtggttcacgggttaggcacagaaatttgcaatggcggcccagcacccaagtcttcaacctgctgtatcctgtgagcactgtcccatgggacmctatggctccctcaatcttcacccactaggatttgggttctgcctgtggctatttgctacaagaggttaggaagcccaagaaaatgactgaagatcattc

SEQ ID NO: 77459 - DNA, 201 bp, Homo sapiens
gacttcgtgtgcacattcgtgtacaaggcgagtggttcacgggttaggcacagaaatttgcaatggcggcccagcacccaagtcttcaacctgctgtatcstgtgagcactgtcccatgggaccctatggctccctcaatcttcacccactaggatttgggttctgcctgtggctatttgctacaagaggttaggaagccc

SEQ ID NO: 77460 - DNA, 201 bp, Homo sapiens; identical to SEQ ID NO: 77445

SEQ ID NO: 77461 - DNA, 201 bp, Homo sapiens
tcagccgatcactgggccctggccagcggccttccaagctacgtggcagaaagcggctttgtcctggtgcggttcctgttctccatcagcaaagggtaccrgagaatcacctaccacaactggcgccacggcttcaacgtggcccagacgatgttcacgctgctcatgaccggcaaactgaagagctactacacggacctg

SEQ ID NO: 77462 - DNA, 201 bp, Homo sapiens
gtgacttggaaaggacagtcttggatcagcagcccattcctatgatggaccggaacaaggcggccgagctccccaagctgcaagtgggcttcatcgacttygtgtgcacattcgtgtacaaggcgagtggttcacgggttaggcacagaaatttgcaatggcggcccagcacccaagtcttcaacctgctgtatcctgtga

SEQ ID NO: 77463 - DNA, 201 bp, Homo sapiens
ggccgagctccccaagctgcaagtgggcttcatcgacttcgtgtgcacattcgtgtacaaggcgagtggttcacgggttaggcacagaaatttgcaatggyggcccagcacccaagtcttcaacctgctgtatcctgtgagcactgtcccatgggaccctatggctccctcaatcttcacccactaggatttgggttctgc

SEQ ID NO: 77464 - DNA, 201 bp, Homo sapiens
tcgtgtacaaggcgagtggttcacgggttaggcacagaaatttgcaatggcggcccagcacccaagtcttcaacctgctgtatcctgtgagcactgtcccrtgggaccctatggctccctcaatcttcacccactaggatttgggttctgcctgtggctatttgctacaagaggttaggaagcccaagaaaatgactgaag

SEQ ID NO: 77465 - DNA, 201 bp, Homo sapiens; identical to SEQ ID NO: 77450

SEQ ID NO: 77466 - DNA, 201 bp, Homo sapiens; identical to SEQ ID NO: 77451

SEQ ID NO: 77467 - DNA, 201 bp, Homo sapiens; identical to SEQ ID NO: 77437

SEQ ID NO: 77468 - DNA, 201 bp, Homo sapiens; identical to SEQ ID NO: 77438

SEQ ID NO: 77469 - DNA, 201 bp, Homo sapiens; identical to SEQ ID NO: 77439

SEQ ID NO: 77470 - DNA, 201 bp, Homo sapiens; identical to SEQ ID NO: 77440

SEQ ID NO: 77471 - DNA, 201 bp, Homo sapiens; identical to SEQ ID NO: 77441

SEQ ID NO: 77472 - DNA, 201 bp, Homo sapiens; identical to SEQ ID NO: 77442

SEQ ID NO: 77473 - DNA, 201 bp, Homo sapiens; identical to SEQ ID NO: 77443

SEQ ID NO: 77474 - DNA, 201 bp, Homo sapiens; identical to SEQ ID NO: 77444

SEQ ID NO: 77475 - DNA, 201 bp, Homo sapiens; identical to SEQ ID NO: 77445

SEQ ID NO: 77476 - DNA, 201 bp, Homo sapiens; identical to SEQ ID NO: 77446

SEQ ID NO: 77477 - DNA, 201 bp, Homo sapiens; identical to SEQ ID NO: 77447

SEQ ID NO: 77478 - DNA, 201 bp, Homo sapiens; identical to SEQ ID NO: 77448

SEQ ID NO: 77479 - DNA, 201 bp, Homo sapiens; identical to SEQ ID NO: 77449

SEQ ID NO: 77480 - DNA, 201 bp, Homo sapiens; identical to SEQ ID NO: 77450

SEQ ID NO: 77481 - DNA, 201 bp, Homo sapiens; identical to SEQ ID NO: 77451

SEQ ID NO: 77482 - DNA, 201 bp, Homo sapiens
agcaggcactggatacaccgggggactgccccccaggcaggagagacgaggacgctggggaggggatccagtgctcccaacgcatgctcagcttcagtgaygccctgctgtccatcatcgccaccgtcatggtctgtacggggcccctgcttaggcctgccccaccccgagcctctcgaggcactgcccagcccacctcag

SEQ ID NO: 77483 - DNA, 201 bp, Homo sapiens
aagctccgcaggattggaggcccaggccagctgtgccccacaagggaagggggagatccgcaccgtgggaccgtttctcgtgggggagtcggggcttccccacagagcgggctccatttttggtcagactcctcccggggccagtgcaccatctgaatccttgggcacgtggaggcagctttgtctttggctgggtgcacc

SEQ ID NO: 77484 - DNA, 201 bp, Homo sapiens
tgatgaccatcaccttcctgccttacacgttttcgttaatggtgaccttccctgatgtgcctctgggcatcttcttgttctgtgtgtgtgtgatcgccatyggggtcgtgcaggcactgattgtggggtacgcattccacttcccgcacctgctgagcccgcagatccagcgctctgcccacagggctctgtaccgacgac

SEQ ID NO: 77485 - DNA, 201 bp, Homo sapiens
cctgctgagcaggttcagtgtgggcatcttccacctcatgcagatcgccgtgccctgcgccttcctgttgctgcgcctgctcgtgggcctggccctggccmccctgcgggtcctgcggggcctcgcccggcccgaacaccccccgccagcccccacgggccaggacgacccacagtcccagctcctccctgccccctgcta

SEQ ID NO: 77486 - DNA, 201 bp, Homo sapiens
cacccaatccaacaagcgtctcttgctctcctgcttccttctgtctctttgccccctcagatcctgcctgtgacccacacggagatctccccagaacagcmgttcgacagaagtgtacagaggcttctggcaacacggattgccgtctacctgatgacctttctcatcgtgacagtggcctgggcagcacacacaaggttg

SEQ ID NO: 77487 - DNA, 201 bp, Homo sapiens
tttcgttaatggtgaccttccctgatgtgcctctgggcatcttcttgttctgtgtgtgtgtgatcgccattggggtcgtgcaggcactgattgtggggtaygcattccacttcccgcacctgctgagcccgcagatccagcgctctgcccacagggctctgtaccgacgacacgtcctgggcatcgtcctccaaggcccgg

SEQ ID NO: 77488 - DNA, 201 bp, Homo sapiens
gcagagacaggctcctgggccacagggagccctcggctcacccagtggaagtcttctcgtttgacctccacgagccactcagcaaggagcgcgtggaagcyttcagcgacggagtctacgccatcgtggccacgcttctcatcctggacatctgcgaagacaacgtcccggaccccaaggatgtgaaggagaggttcagcg

SEQ ID NO: 77489 - DNA, 201 bp, Homo sapiens
tcgagtccccagtactgccacacccaatccaacaagcgtctcttgctctcctgcttccttctgtctctttgccccctcagatcctgcctgtgacccacacrgagatctccccagaacagcagttcgacagaagtgtacagaggcttctggcaacacggattgccgtctacctgatgacctttctcatcgtgacagtggcct

SEQ ID NO: 77490 - DNA, 201 bp, Homo sapiens
acttccggctgtcaagctcccggccgggctgactcaagcggaggcgcgcggaacagtcgccgaggcgattcccgcccaggctcctgtaaccgccaggcagyggccccgccatgtcccagccccggaccccagagcaggcactggatacaccgggggactgccccccaggcaggagagacgaggacgctggggaggggatcc

SEQ ID NO: 77491 - DNA, 201 bp, Homo sapiens
gtcctcaccagagatggaccagggaggacaggatgctgggcaggggaagccaagtcacgggcaggccgcagtggttcttgcgtggcctggttttattttcrttgtgaaatatcatgctcttatttcagtcctcaaattgttctccactttttgcggagagaggagtttcacaggaactggaaatgtgctttatggcatttg

SEQ ID NO: 77492 - DNA, 201 bp, Homo sapiens
tcaagcggaggcgcgcggaacagtcgccgaggcgattcccgcccaggctcctgtaaccgccaggcagcggccccgccatgtcccagccccggaccccagarcaggcactggatacaccgggggactgccccccaggcaggagagacgaggacgctggggaggggatccagtgctcccaacgcatgctcagcttcagtgacg

SEQ ID NO: 77493 - DNA, 201 bp, Homo sapiens
tcgtggccacgcttctcatcctggacatctgcgaagacaacgtcccggaccccaaggatgtgaaggagaggttcagcggcagcctcgtggccgccctgagygcgaccgggccgcgcttcctggcgtacttcggctccttcgccacagtgggactgctgtggttcgcccaccactcactcttcctgcatgtgcgcaaggcca

SEQ ID NO: 77494 - DNA, 201 bp, Homo sapiens
cagcagacctcggccttcgcccggcagccccgcgatgagctggagcgcgtgcgtgtcagctgcaccatcatcttcctggccagcatcttccagctggccaygtggaccacggcgctgctgcaccaggcggagacgctgcagccctcggtgtggtttggcggccgggagcatgtgctcatgttcgccaagctggcgctgtac

SEQ ID NO: 77495 - DNA, 201 bp, Homo sapiens
cactcagcaaggagcgcgtggaagccttcagcgacggagtctacgccatcgtggccacgcttctcatcctggacatctgcgaagacaacgtcccggacccyaaggatgtgaaggagaggttcagcggcagcctcgtggccgccctgagtgcgaccgggccgcgcttcctggcgtacttcggctccttcgccacagtgggac

SEQ ID NO: 77496 - DNA, 201 bp, Homo sapiens
agcttcagtgacgccctgctgtccatcatcgccaccgtcatggtctgtacggggcccctgcttaggcctgccccaccccgagcctctcgaggcactgcccrgcccacctcagacctgtctaggtcttgccagcatccttgggtcccccagctcctcaggcagcttaggggggcccagcactgccctcgagtccccagtact

SEQ ID NO: 77497 - DNA, 201 bp, Homo sapiens
agcaggcactggatacaccgggggactgccccccaggcaggagagacgaggacgctggggaggggatccagtgctcccaacgcatgctcagcttcagtgaygccctgctgtccatcatcgccaccgtcatgatcctgcctgtgacccacacggagatctccccagaacagcagttcgacagaagtgtacagaggcttctgg

SEQ ID NO: 77498 - DNA, 201 bp, Homo sapiens; identical to SEQ ID NO: 77483

SEQ ID NO: 77499 - DNA, 201 bp, Homo sapiens; identical to SEQ ID NO: 77484

SEQ ID NO: 77500 - DNA, 201 bp, Homo sapiens; identical to SEQ ID NO: 77485

SEQ ID NO: 77501 - DNA, 201 bp, Homo sapiens
ccagctcccctgccctgagacagcctccggtgcttctgctgtgtcccaggaaacaagcctgaagcaagcactcaccatccctcaagaatgtgccctgaccyaccttcctcaccacggtggcatcagggccaggctcctgtaaccgccaggcagcggccccgccatgtcccagccccggaccccagagcaggcactggatac

SEQ ID NO: 77502 - DNA, 201 bp, Homo sapiens
tgctcccaacgcatgctcagcttcagtgacgccctgctgtccatcatcgccaccgtcatgatcctgcctgtgacccacacggagatctccccagaacagcmgttcgacagaagtgtacagaggcttctggcaacacggattgccgtctacctgatgacctttctcatcgtgacagtggcctgggcagcacacacaaggttg

SEQ ID NO: 77503 - DNA, 201 bp, Homo sapiens; identical to SEQ ID NO: 77487

SEQ ID NO: 77504 - DNA, 201 bp, Homo sapiens; identical to SEQ ID NO: 77488

SEQ ID NO: 77505 - DNA, 201 bp, Homo sapiens
acgctggggaggggatccagtgctcccaacgcatgctcagcttcagtgacgccctgctgtccatcatcgccaccgtcatgatcctgcctgtgacccacacrgagatctccccagaacagcagttcgacagaagtgtacagaggcttctggcaacacggattgccgtctacctgatgacctttctcatcgtgacagtggcct

SEQ ID NO: 77506 - DNA, 201 bp, Homo sapiens
caagcctgaagcaagcactcaccatccctcaagaatgtgccctgacccaccttcctcaccacggtggcatcagggccaggctcctgtaaccgccaggcagyggccccgccatgtcccagccccggaccccagagcaggcactggatacaccgggggactgccccccaggcaggagagacgaggacgctggggaggggatcc

SEQ ID NO: 77507 - DNA, 201 bp, Homo sapiens; identical to SEQ ID NO: 77491

SEQ ID NO: 77508 - DNA, 201 bp, Homo sapiens
aatgtgccctgacccaccttcctcaccacggtggcatcagggccaggctcctgtaaccgccaggcagcggccccgccatgtcccagccccggaccccagarcaggcactggatacaccgggggactgccccccaggcaggagagacgaggacgctggggaggggatccagtgctcccaacgcatgctcagcttcagtgacg

SEQ ID NO: 77509 - DNA, 201 bp, Homo sapiens; identical to SEQ ID NO: 77493

SEQ ID NO: 77510 - DNA, 201 bp, Homo sapiens; identical to SEQ ID NO: 77494

SEQ ID NO: 77511 - DNA, 201 bp, Homo sapiens; identical to SEQ ID NO: 77495

SEQ ID NO: 77512 - DNA, 201 bp, Homo sapiens; identical to SEQ ID NO: 77483

SEQ ID NO: 77513 - DNA, 201 bp, Homo sapiens; identical to SEQ ID NO: 77485

SEQ ID NO: 77514 - DNA, 201 bp, Homo sapiens
cagacgacacacttgccctgctcaacctgttttcgttaatggtgaccttccctgatgtgcctctgggcatcttcttgttctgtgtgtgtgtgatcgccatyggggtcgtgcaggcactgattgtggggtacgcattccacttcccgcacctgctgagcccgcagatccagcgctctgcccacagggctctgtaccgacgac

SEQ ID NO: 77515 - DNA, 201 bp, Homo sapiens
cgtcgccgggcttgcgatgaacttccggctgtcaagctcccggccgggctgactcaagcggaggcgcgcggaacagtcgccgaggcgattcccgcccagcmgttcgacagaagtgtacagaggcttctggcaacacggattgccgtctacctgatgacctttctcatcgtgacagtggcctgggcagcacacacaaggttg

SEQ ID NO: 77516 - DNA, 201 bp, Homo sapiens; identical to SEQ ID NO: 77487

SEQ ID NO: 77517 - DNA, 201 bp, Homo sapiens; identical to SEQ ID NO: 77488

SEQ ID NO: 77518 - DNA, 201 bp, Homo sapiens; identical to SEQ ID NO: 77491

SEQ ID NO: 77519 - DNA, 201 bp, Homo sapiens; identical to SEQ ID NO: 77493

SEQ ID NO: 77520 - DNA, 201 bp, Homo sapiens; identical to SEQ ID NO: 77495

SEQ ID NO: 77521 - DNA, 201 bp, Homo sapiens; identical to SEQ ID NO: 77494

SEQ ID NO: 77522 - DNA, 201 bp, Homo sapiens; identical to SEQ ID NO: 77483

SEQ ID NO: 77523 - DNA, 201 bp, Homo sapiens; identical to SEQ ID NO: 77482

SEQ ID NO: 77524 - DNA, 201 bp, Homo sapiens; identical to SEQ ID NO: 77485

SEQ ID NO: 77525 - DNA, 201 bp, Homo sapiens; identical to SEQ ID NO: 77484

SEQ ID NO: 77526 - DNA, 201 bp, Homo sapiens
cagcaggcaggccccttacgtagctgctctgagtaaacgcggccagcgccccgtctcagcggggacactcccaccccggctgctcctgcaggcctggagcmgttcgacagaagtgtacagaggcttctggcaacacggattgccgtctacctgatgacctttctcatcgtgacagtggcctgggcagcacacacaaggttg

SEQ ID NO: 77527 - DNA, 201 bp, Homo sapiens; identical to SEQ ID NO: 77487

SEQ ID NO: 77528 - DNA, 201 bp, Homo sapiens; identical to SEQ ID NO: 77488

SEQ ID NO: 77529 - DNA, 201 bp, Homo sapiens
tcgagtccccagtactgccacacccaatccaacaagcgtctcttgctctcctgcttccttctgtctctttgccccctcagatcctgcctgtgacccacacrgagatctccccagaacaggtaacggggcaggctgtgctctgcgtggtgtggccctgcgaagatatagggtccccgaggctcgacctggcacagggtgctg

SEQ ID NO: 77530 - DNA, 201 bp, Homo sapiens
cctgcctgtgacccacacggagatctccccagaacaggtaacggggcaggctgtgctctgcgtggtgtggccctgcgaagatatagggtccccgaggctcracctggcacagggtgctgaccctgcacgcctcgaagcttctgaggcttaggaggcagaggcgggaggcgggggcctccttggaaagggagggagccaaca

SEQ ID NO: 77531 - DNA, 201 bp, Homo sapiens; identical to SEQ ID NO: 77490

SEQ ID NO: 77532 - DNA, 201 bp, Homo sapiens; identical to SEQ ID NO: 77491

SEQ ID NO: 77533 - DNA, 201 bp, Homo sapiens; identical to SEQ ID NO: 77492

SEQ ID NO: 77534 - DNA, 201 bp, Homo sapiens; identical to SEQ ID NO: 77493

SEQ ID NO: 77535 - DNA, 201 bp, Homo sapiens; identical to SEQ ID NO: 77495

SEQ ID NO: 77536 - DNA, 201 bp, Homo sapiens; identical to SEQ ID NO: 77494

SEQ ID NO: 77537 - DNA, 201 bp, Homo sapiens; identical to SEQ ID NO: 77496

SEQ ID NO: 77538 - DNA, 201 bp, Homo sapiens; identical to SEQ ID NO: 77497

SEQ ID NO: 77539 - DNA, 201 bp, Homo sapiens; identical to SEQ ID NO: 77483

SEQ ID NO: 77540 - DNA, 201 bp, Homo sapiens; identical to SEQ ID NO: 77484

SEQ ID NO: 77541 - DNA, 201 bp, Homo sapiens; identical to SEQ ID NO: 77485

SEQ ID NO: 77542 - DNA, 201 bp, Homo sapiens; identical to SEQ ID NO: 77502

SEQ ID NO: 77543 - DNA, 201 bp, Homo sapiens; identical to SEQ ID NO: 77487

SEQ ID NO: 77544 - DNA, 201 bp, Homo sapiens; identical to SEQ ID NO: 77488

SEQ ID NO: 77545 - DNA, 201 bp, Homo sapiens; identical to SEQ ID NO: 77505

SEQ ID NO: 77546 - DNA, 201 bp, Homo sapiens; identical to SEQ ID NO: 77490

SEQ ID NO: 77547 - DNA, 201 bp, Homo sapiens; identical to SEQ ID NO: 77491

SEQ ID NO: 77548 - DNA, 201 bp, Homo sapiens; identical to SEQ ID NO: 77492

SEQ ID NO: 77549 - DNA, 201 bp, Homo sapiens; identical to SEQ ID NO: 77493

SEQ ID NO: 77550 - DNA, 201 bp, Homo sapiens; identical to SEQ ID NO: 77494

SEQ ID NO: 77551 - DNA, 201 bp, Homo sapiens; identical to SEQ ID NO: 77495

SEQ ID NO: 77552 - DNA, 201 bp, Homo sapiens
agcaggcactggatacaccgggggactgccccccaggcaggagagacgaggacgctggggaggggatccagtgctcccaacgcatgctcagcttcagtgaygccctgctgtccatcatcgccaccgtcatgatcctgcctgtgacccacacggagatctccccagaacaggtaacggggcaggctgtgctctgcgtggtgt

SEQ ID NO: 77553 - DNA, 201 bp, Homo sapiens; identical to SEQ ID NO: 77483

SEQ ID NO: 77554 - DNA, 201 bp, Homo sapiens; identical to SEQ ID NO: 77484

SEQ ID NO: 77555 - DNA, 201 bp, Homo sapiens; identical to SEQ ID NO: 77485

SEQ ID NO: 77556 - DNA, 201 bp, Homo sapiens; identical to SEQ ID NO: 77526

SEQ ID NO: 77557 - DNA, 201 bp, Homo sapiens; identical to SEQ ID NO: 77487

SEQ ID NO: 77558 - DNA, 201 bp, Homo sapiens; identical to SEQ ID NO: 77488

SEQ ID NO: 77559 - DNA, 201 bp, Homo sapiens; identical to SEQ ID NO: 77530

SEQ ID NO: 77560 - DNA, 201 bp, Homo sapiens
acgctggggaggggatccagtgctcccaacgcatgctcagcttcagtgacgccctgctgtccatcatcgccaccgtcatgatcctgcctgtgacccacacrgagatctccccagaacaggtaacggggcaggctgtgctctgcgtggtgtggccctgcgaagatatagggtccccgaggctcgacctggcacagggtgctg

SEQ ID NO: 77561 - DNA, 201 bp, Homo sapiens; identical to SEQ ID NO: 77490

SEQ ID NO: 77562 - DNA, 201 bp, Homo sapiens; identical to SEQ ID NO: 77491

SEQ ID NO: 77563 - DNA, 201 bp, Homo sapiens; identical to SEQ ID NO: 77492

SEQ ID NO: 77564 - DNA, 201 bp, Homo sapiens; identical to SEQ ID NO: 77493

SEQ ID NO: 77565 - DNA, 201 bp, Homo sapiens; identical to SEQ ID NO: 77494

SEQ ID NO: 77566 - DNA, 201 bp, Homo sapiens; identical to SEQ ID NO: 77495

SEQ ID NO: 77567 - DNA, 201 bp, Homo sapiens
gatatttgggtctccatcaatgaccgcttccagcagaggatttttgaccctcgtgtggacatcgtgcaggccgcttggtcaccctttcagcgcacatcctsggtgcaaccactcttgatggacctgtctccctggagggccaagttacaggaaatcaagagcagcctagacaaccacactgaggtggtcttcattgcagat

SEQ ID NO: 77568 - DNA, 201 bp, Homo sapiens
tgaggcatgagaatcgcttgggcccaggaggtggaggttgcagtgagccgagatcgagccactgcactcctgggcaacagagcaagacttcgtctcaaaawaaataaataaagtggctcttggggaaaagcaatttaatgtaccacgatgaatagctaactgttcccaagtgtttgctatgtgcaacacaccgcgtgagca

SEQ ID NO: 77569 - DNA, 201 bp, Homo sapiens
cagcttttcagcattggtatgttctcctacgtcatgctggccagcagccctctcttctgctcccctgagtggcctcggaagctggtgtcctactgcccccraaggttgcaacaactgttgcccctcaaggcagcccctcagcccagtgtttcctgtgtgtataagaggagccggggcaaaagtggccagaagccagggctg

SEQ ID NO: 77570 - DNA, 201 bp, Homo sapiens
attttctcacccagggctataacaactggacaaatgggctgtatggctattcctgggacatgatggtgcactcccgctcccaccagcacgtgaagatcacytaccgtgatggccgcactggcgaactgggctaccttaaccctggggtatttacacagagtcggcgatggaaggatcatgcagacatgctgaagcaatatg

SEQ ID NO: 77571 - DNA, 201 bp, Homo sapiens
agcagctattcctgccctattctcattttctcacccagggctataacaactggacaaatgggctgtatggctattcctgggacatgatggtgcactcccgytcccaccagcacgtgaagatcacctaccgtgatggccgcactggcgaactgggctaccttaaccctggggtatttacacagagtcggcgatggaaggatc

SEQ ID NO: 77572 - DNA, 201 bp, Homo sapiens
cccaggagcgggggctcagctctctggaccggaaataccttgatgggctggatgtgtgccgcttccccttgctggatgccctacgcccactgccacttgaytggatgtatcttgtctacaccatcatgtttctgggggcactgggcatgatgctgggcctgtgctaccggataagctgtgtgttattcctgctgccatact

SEQ ID NO: 77573 - DNA, 201 bp, Homo sapiens
acaaggctgaactgatctcagggcccaggcaggacagccgaatagggaaactcttgggttttgagtggacagatttgtccagttggcggaggctggtgacmctgctgaatcgaccaacggaccctgcaagcttagctgtctttcgttttctttttgggttcttgatggtgctagacattccccaggagcgggggctcagct

SEQ ID NO: 77574 - DNA, 201 bp, Homo sapiens
ctatgtcaacactacagagcttgcactggagcaagacctggcatatctgcaagaattaaaggaaaaggtggagaatggaagtgaaacagggcctctacccmcagagctgcagcctctgttggaaggggaagtaaaagggggccctgagccaacacctctggttcagacctttcttagacgccaacaaaggctccaggagat

SEQ ID NO: 77575 - DNA, 201 bp, Homo sapiens
ctgaggagctgactagcctgctggtcgtgcactggggtgggctgctgcttgacctctcagctggtttcctgctcttttttgatgtctcaagatccattggmctgttctttgtgtcctacttccactgcatgaattcccagcttttcagcattggtatgttctcctacgtcatgctggccagcagccctctcttctgctccc

SEQ ID NO: 77576 - DNA, 201 bp, Homo sapiens
cccaggagcgggggctcagctctctggaccggaaataccttgatgggctggatgtgtgccgcttccccttgctggatgccctacgcccactgccacttgaytggatgtatcttgtctacaccatcatgtttctgggtgaggggaactgtgggaaatattgactggcctgccagaaacacagaaatagaagcatgctggtga

SEQ ID NO: 77577 - DNA, 201 bp, Homo sapiens; identical to SEQ ID NO: 77573

SEQ ID NO: 77578 - DNA, 201 bp, Homo sapiens
agatggcagcttttaaaagattttttttttttctctcaacaccatgattcctttaacaacatgtttccagcattcccaggtaggccaaggtgtcctacagraaaaccttgggttagacctacagggggtctggctggtgttaacagaagggagggcagagctggtgcggctggccatggagaaagctgacttggctggtgt

SEQ ID NO: 77579 - DNA, 201 bp, Homo sapiens
agcctgacatcaaaaaaggcagttaccattaaaccatctccctggtgcttatgctcttaattgccacctctaacagcaccaaatcaaaatctctccacttycagctgtcttttggaggacgtacgtaataaggttttaatttagtaaaccaatcctatgcatggtttcagcactagccaaacctcaccaactcctagttct

SEQ ID NO: 77580 - DNA, 201 bp, Homo sapiens
cgacccccgcgcaagtggtgcattggcgcgcggcgccgaggggcggggcccgagccgggcgcgcgcgggcgctgctctataaataccgggccgcaccgccsgctgcttcgttcgctccgcgccgcccgcctgctacgagtagaacgctgtccgcagcttgcgcatttcgcagccgctgccgcctcgccgctgctccttcgt

SEQ ID NO: 77581 - DNA, 201 bp, Homo sapiens
gggttagacctacagggggtctggctggtgttaacagaagggagggcagagctggtgcggctggccatggagaaagctgacttggctggtgtggtacagaraagccagcttgtttacatgcttattccatgactgcttgccctaagcagaaagtgcctttcaggatctatttttggaggtttattacgtatgtctggttct

SEQ ID NO: 77582 - DNA, 201 bp, Homo sapiens
tgcctgcgaaataccttgatgaggatacaatctaccacctacagccaagtggcagatttgttattggtgggcctcagggtgatgctggtttgactggacgsaaaatcattgtggacacttatggcggttggggtgctcatggaggaggtgccttttcaggaaaggattataccaaggtcgaccgttcagctgcttatgctg

SEQ ID NO: 77583 - DNA, 201 bp, Homo sapiens
attacgtatgtctggttctcaattccaacagtttaatgaagatctaaataaaatgctaggttctaccttaactgtgtctgttactcatttgttaaagtgcyttggggccataggtacgtgcctataatcccaacactttgaaaggctgaggtaggaggatcactttaacatagaagttggaggctgtagcgaaccattatc

SEQ ID NO: 77584 - DNA, 201 bp, Homo sapiens
caacatgtttccagcattcccaggtaggccaaggtgtcctacagaaaaaccttgggttagacctacagggggtctggctggtgttaacagaagggagggcrgagctggtgcggctggccatggagaaagctgacttggctggtgtggtacagagaagccagcttgtttacatgcttattccatgactgcttgccctaagca

SEQ ID NO: 77585 - DNA, 201 bp, Homo sapiens; identical to SEQ ID NO: 77579

SEQ ID NO: 77586 - DNA, 201 bp, Homo sapiens; identical to SEQ ID NO: 77580

SEQ ID NO: 77587 - DNA, 201 bp, Homo sapiens; identical to SEQ ID NO: 77582

SEQ ID NO: 77588 - DNA, 201 bp, Homo sapiens; identical to SEQ ID NO: 77578

SEQ ID NO: 77589 - DNA, 201 bp, Homo sapiens; identical to SEQ ID NO: 77579

SEQ ID NO: 77590 - DNA, 201 bp, Homo sapiens
aagatccataattttgataatagctaactggaaaaaatagcatttgttttcctatattgtaacttcaggtagagaaacaaatacaaagttattgtttggtrtgatgttctgatgacctgtgttgccttcaaggttactgtgcagtatatgcaggatcgaggtgctgtgcttcccatcagagtccacacaattgttatatct

SEQ ID NO: 77591 - DNA, 201 bp, Homo sapiens; identical to SEQ ID NO: 77581

SEQ ID NO: 77592 - DNA, 201 bp, Homo sapiens
acactctttatataacgaacgattaaaagtcatgtaagtgggagggtatttagtagtaatctacttaactacttgttttataccaacgtattatacaagtrtatgggtctttgcaatcactgattcttacgacatttgaatccttttaggtctcttatgctattggagtttctcatccattatctatctccattttccatt

SEQ ID NO: 77593 - DNA, 201 bp, Homo sapiens
tgaatgaattcagaataggcaacctaatccacttggaaagcactaggcgtaaagtaacttaaatcctgtaatttcagggtgatgctggtttgactggacgsaaaatcattgtggacacttatggcggttggggtgctcatggaggaggtgccttttcaggaaaggattataccaaggtcgaccgttcagctgcttatgctg

SEQ ID NO: 77594 - DNA, 201 bp, Homo sapiens; identical to SEQ ID NO: 77580

SEQ ID NO: 77595 - DNA, 201 bp, Homo sapiens
cagtcaccagatattgctcaaggtgttcatcttgacagaaatgaagaagacattggtgctggagaccaggtatcttggtgtagaggctgttttaatctctyctaacattaaattctggagcttgatcacattggtgacttttctttctttagggcttaatgtttggctatgccactgatgaaactgaggagtgtatgcctt

SEQ ID NO: 77596 - DNA, 201 bp, Homo sapiens; identical to SEQ ID NO: 77583

SEQ ID NO: 77597 - DNA, 201 bp, Homo sapiens
catgtaagtgggagggtatttagtagtaatctacttaactacttgttttataccaacgtattatacaagtatatgggtctttgcaatcactgattcttacracatttgaatccttttaggtctcttatgctattggagtttctcatccattatctatctccattttccattatggtacctctcagaagagtgagagagagc

SEQ ID NO: 77598 - DNA, 201 bp, Homo sapiens; identical to SEQ ID NO: 77584

SEQ ID NO: 77599 - DNA, 201 bp, Homo sapiens; identical to SEQ ID NO: 77578

SEQ ID NO: 77600 - DNA, 201 bp, Homo sapiens; identical to SEQ ID NO: 77579

SEQ ID NO: 77601 - DNA, 201 bp, Homo sapiens; identical to SEQ ID NO: 77580

SEQ ID NO: 77602 - DNA, 201 bp, Homo sapiens; identical to SEQ ID NO: 77581

SEQ ID NO: 77603 - DNA, 201 bp, Homo sapiens; identical to SEQ ID NO: 77582

SEQ ID NO: 77604 - DNA, 201 bp, Homo sapiens; identical to SEQ ID NO: 77584

SEQ ID NO: 77605 - DNA, 201 bp, Homo sapiens
acattgcttgtgtttggagtgtggatcctttatatcctcaagttaaattatactactgaagaatgtgacatgaaaaaaatgcattatgtggaccctgaccrtgtaaagagagctcagaaatatgctcagcaagtcttgcagaaggaatgtcgtcccaagtttgccaagacatcaatggcgctgttatttgagcacaggtat

SEQ ID NO: 77606 - DNA, 201 bp, Homo sapiens; identical to SEQ ID NO: 77605

SEQ ID NO: 77607 - DNA, 201 bp, Homo sapiens
tgtctccaggcaatcagtggagatctgttaaacgagttgaaacaaaagaggacaaggaattgctgtggctttagacgttgccaggacatgtagaaactcaytcaggatttactactgcatccactgtcacttaggcgcaggaggggtcacagtcagaaggtgactactgagaaatgtgccctacccacagtctagaaaatt

SEQ ID NO: 77608 - DNA, 201 bp, Homo sapiens
gagttctgtgtgagctctctacagaaaaagccctgtctccaggcaatcagtggagatctgttaaacgagttgaaacaaaagaggacaaggaattgctgtgrctttagacgttgccaggacatgtagaaactcactcaggatttactactgcatccactgtcacttaggcgcaggaggggtcacagtcagaaggtgactact

SEQ ID NO: 77609 - DNA, 201 bp, Homo sapiens
acattgcttgtgtttggagtgtggatcctttatatcctcaagttaaattatactactgaagaatgtgacatgaaaaaaatgcattatgtggaccctgaccrtgtaaagaccttatctccctgcggatggcattgcgtgcagttaattatggccagatggactcagccgcttcttcatcgtcttctctcggactctgcagac

SEQ ID NO: 77610 - DNA, 201 bp, Homo sapiens; identical to SEQ ID NO: 77605

SEQ ID NO: 77611 - DNA, 201 bp, Homo sapiens
acattgcttgtgtttggagtgtggatcctttatatcctcaagttaaattatactactgaagaatgtgacatgaaaaaaatgcattatgtggaccctgaccrtgtaaagttaattatggccagatggactcagccgcttcttcatcgtcttctctcggactctgcagacctacaccgtgcctttaaaggaagcagggccctc

SEQ ID NO: 77612 - DNA, 201 bp, Homo sapiens
caaatatttattgctcatctacttcgtgccagctttctgcctctgtagtagccctgcacaaagggtggggagtcaggagaccatcccaaaggcatctcccygtcttcctctaccaagcggctctctgcaagagcatggaaatgtgagtggggaaaattttcagcaccaaagcttcactcatacccagttttgtttctgaaa

SEQ ID NO: 77613 - DNA, 201 bp, Homo sapiens
tggggtccagactgaccaggaggagcaactggccaaggagctagaagacaccaacaagtggggacttgatgtgttcaaggtggcggagctaagtgggaacyggcccctcacagctatcatattcagcatttttcaggagcgggacctgctgaagacattccagatcccagcagacacactggccacctacctgctgatgct

SEQ ID NO: 77614 - DNA, 201 bp, Homo sapiens
aaccaggtgtccgagtacatctcccggaccttcctggaccagcagaccgaggtggagctgcccaaggtgaccgctgaggaggccccacagcccatgtcccrgatcagtggcctacatgggctctgccacagtgccagcctctcctcagccactgtcccacgctttggggtccagactgaccaggaggagcaactggccaag

SEQ ID NO: 77615 - DNA, 201 bp, Homo sapiens
ggggtccagactgaccaggaggagcaactggccaaggagctagaagacaccaacaagtggggacttgatgtgttcaaggtggcggagctaagtgggaaccrgcccctcacagctatcatattcagcatttttcaggagcgggacctgctgaagacattccagatcccagcagacacactggccacctacctgctgatgctg

SEQ ID NO: 77616 - DNA, 201 bp, Homo sapiens
ctgcgtgaactgcaggggcaatggatggtaaagccctttggctcttggcaggcagactttccaggaagaggctccatgtggctcctgcttcactttcccayccatttagggagacaatcaagctcttagttataggtggctcccagggtctaattggaggcacctggctggggtccactctgaccctagacttgcctaaaa

SEQ ID NO: 77617 - DNA, 201 bp, Homo sapiens
tggctcttggcaggcagactttccaggaagaggctccatgtggctcctgcttcactttcccacccatttagggagacaatcaagctcttagttataggtgsctcccagggtctaattggaggcacctggctggggtccactctgaccctagacttgcctaaaagagctctctaaggggcagcctcttacgatgccctggtg

SEQ ID NO: 77618 - DNA, 201 bp, Homo sapiens
ccctcacagctatcatattcagcatttttcaggagcgggacctgctgaagacattccagatcccagcagacacactggccacctacctgctgatgctggarggtcactaccacgccaatgtggcctaccacaacagcctacatgccgccgacgtggcccagtccacgcatgtgctgctggctacgcccgccctcgaggctg

SEQ ID NO: 77619 - DNA, 201 bp, Homo sapiens
tcagtggcctacatgggctctgccacagtgccagcctctcctcagccactgtcccacgctttggggtccagactgaccaggaggagcaactggccaaggarctagaagacaccaacaagtggggacttgatgtgttcaaggtggcggagctaagtgggaaccggcccctcacagctatcatattcagcatttttcaggagc

SEQ ID NO: 77620 - DNA, 201 bp, Homo sapiens; identical to SEQ ID NO: 77612

SEQ ID NO: 77621 - DNA, 201 bp, Homo sapiens
tggggtccagactgaccaggaggagcaactggccaaggagctagaagacaccaacaagtggggacttgatgtgttcaaggtggcggagctaagtgggaacyggcccctcacagctatcatattcagcatttttcaggctgtgttcacagacttggaaatcctggctgccctctttgcaagcgccatccacgacgtggacca

SEQ ID NO: 77622 - DNA, 201 bp, Homo sapiens
ctggaccctcagtccagccctggcctgggccggattatgcaggctccagtcccgcacagccagcggcgcgagtccttcctgtaccgctcagatagcgactrtgaactctcgcccaaggccatgtctcggaactcctctgtggccagcgacctacatggagaggacatgattgtgacgccctttgcccaggtcctggccagt

SEQ ID NO: 77623 - DNA, 201 bp, Homo sapiens; identical to SEQ ID NO: 77614

SEQ ID NO: 77624 - DNA, 201 bp, Homo sapiens
ggggtccagactgaccaggaggagcaactggccaaggagctagaagacaccaacaagtggggacttgatgtgttcaaggtggcggagctaagtgggaaccrgcccctcacagctatcatattcagcatttttcaggctgtgttcacagacttggaaatcctggctgccctctttgcaagcgccatccacgacgtggaccat

SEQ ID NO: 77625 - DNA, 201 bp, Homo sapiens; identical to SEQ ID NO: 77616

SEQ ID NO: 77626 - DNA, 201 bp, Homo sapiens; identical to SEQ ID NO: 77617

SEQ ID NO: 77627 - DNA, 201 bp, Homo sapiens
tcagtggcctacatgggctctgccacagtgccagcctctcctcagccactgtcccacgctttggggtccagactgaccaggaggagcaactggccaaggarctagaagacaccaacaagtggggacttgatgtgttcaaggtggcggagctaagtgggaaccggcccctcacagctatcatattcagcatttttcaggctg

SEQ ID NO: 77628 - DNA, 201 bp, Homo sapiens; identical to SEQ ID NO: 77612

SEQ ID NO: 77629 - DNA, 201 bp, Homo sapiens; identical to SEQ ID NO: 77613

SEQ ID NO: 77630 - DNA, 201 bp, Homo sapiens; identical to SEQ ID NO: 77622

SEQ ID NO: 77631 - DNA, 201 bp, Homo sapiens; identical to SEQ ID NO: 77614

SEQ ID NO: 77632 - DNA, 201 bp, Homo sapiens; identical to SEQ ID NO: 77615

SEQ ID NO: 77633 - DNA, 201 bp, Homo sapiens; identical to SEQ ID NO: 77616

SEQ ID NO: 77634 - DNA, 201 bp, Homo sapiens; identical to SEQ ID NO: 77617

SEQ ID NO: 77635 - DNA, 201 bp, Homo sapiens; identical to SEQ ID NO: 77618

SEQ ID NO: 77636 - DNA, 201 bp, Homo sapiens; identical to SEQ ID NO: 77619

SEQ ID NO: 77637 - DNA, 201 bp, Homo sapiens; identical to SEQ ID NO: 77612

SEQ ID NO: 77638 - DNA, 201 bp, Homo sapiens; identical to SEQ ID NO: 77613

SEQ ID NO: 77639 - DNA, 201 bp, Homo sapiens; identical to SEQ ID NO: 77622

SEQ ID NO: 77640 - DNA, 201 bp, Homo sapiens; identical to SEQ ID NO: 77614

SEQ ID NO: 77641 - DNA, 201 bp, Homo sapiens; identical to SEQ ID NO: 77615

SEQ ID NO: 77642 - DNA, 201 bp, Homo sapiens; identical to SEQ ID NO: 77616

SEQ ID NO: 77643 - DNA, 201 bp, Homo sapiens; identical to SEQ ID NO: 77617

SEQ ID NO: 77644 - DNA, 201 bp, Homo sapiens; identical to SEQ ID NO: 77618

SEQ ID NO: 77645 - DNA, 201 bp, Homo sapiens; identical to SEQ ID NO: 77619

SEQ ID NO: 77646 - DNA, 201 bp, Homo sapiens
gatctccaagtcttcacaaaattttatattccccaaggctgccccatcacaatgcctgtgaagcttgactggcagacactgaggcctgaagctgggggctrcagggggtcactggctcacccggtccccccgtaatctgtaaaacatactgggtgagggaggctgctggaggacctgaatctctcccttctccaggcagta

SEQ ID NO: 77647 - DNA, 201 bp, Homo sapiens
gagcagggaagtaagactttgactcaaacgggacggatgcatccacagttggaactctagcacaggcacttctgccattagcagccacaaaaagaagatgsatattttctggagttcctccagccatccagggaagatgctggaacagtaccaggtgggttttgaaggatgtgtaggagttcgccagccagaatattcact

SEQ ID NO: 77648 - DNA, 201 bp, Homo sapiens
cggctggctggagccgtggtccggccagcctgcccacccaccgctcaacctctcggccaagaccgagctggtggcctgggcagtgtccaactgggggccaractccgccagggtgcgctactaccagagcctgcaggcccatctcaaggtggacgtgtacggacgctcccacaagcccctgccccagggaaccatgatgga

SEQ ID NO: 77649 - DNA, 201 bp, Homo sapiens
ggctggagccgtggtccggccagcctgcccacccaccgctcaacctctcggccaagaccgagctggtggcctgggcagtgtccaactgggggccaaactcmgccagggtgcgctactaccagagcctgcaggcccatctcaaggtggacgtgtacggacgctcccacaagcccctgccccagggaaccatgatggagacgc

SEQ ID NO: 77650 - DNA, 201 bp, Homo sapiens
caccgctcaacctctcggccaagaccgagctggtggcctgggcagtgtccaactgggggccaaactccgccagggtgcgctactaccagagcctgcaggcycatctcaaggtggacgtgtacggacgctcccacaagcccctgccccagggaaccatgatggagacgctgtcccggtacaagttctatctggccttcgaga

SEQ ID NO: 77651 - DNA, 201 bp, Homo sapiens
gtccaactgggggccaaactccgccagggtgcgctactaccagagcctgcaggcccatctcaaggtggacgtgtacggacgctcccacaagcccctgcccmagggaaccatgatggagacgctgtcccggtacaagttctatctggccttcgagaactccttgcaccccgactacatcaccgagaagctgtggaggaacgc

SEQ ID NO: 77652 - DNA, 201 bp, Homo sapiens
actgggggccaaactccgccagggtgcgctactaccagagcctgcaggcccatctcaaggtggacgtgtacggacgctcccacaagcccctgccccagggraccatgatggagacgctgtcccggtacaagttctatctggccttcgagaactccttgcaccccgactacatcaccgagaagctgtggaggaacgccctgg

SEQ ID NO: 77653 - DNA, 201 bp, Homo sapiens
ggcttggttcacctgagaggctggtgtggggcctgggctgccaggaacctcattttcctggggcctcacctgagtgggggcctcatctacctaaggactcktttgcctgaagcttcacctgcctgaggactcacctgcctgggacggtcacctgttgcagcttcacctgcctggggattcacctacctgggtcctcacttt

SEQ ID NO: 77654 - DNA, 201 bp, Homo sapiens
agagcctgcaggcccatctcaaggtggacgtgtacggacgctcccacaagcccctgccccagggaaccatgatggagacgctgtcccggtacaagttctayctggccttcgagaactccttgcaccccgactacatcaccgagaagctgtggaggaacgccctggaggcctgggccgtgcccgtggtgctgggccccagca

SEQ ID NO: 77655 - DNA, 201 bp, Homo sapiens
gcccgtggtgctgggccccagcagaagcaactacgagaggttcctgccacccgacgccttcatccacgtggacgacttccagagccccaaggacctggccsggtacctgcaggagctggacaaggaccacgcccgctacctgagctactttcgctggcgggagacgctgcggcctcgctccttcagctgggcactcgcttt

SEQ ID NO: 77656 - DNA, 201 bp, Homo sapiens
ccgacatcttcacgccctacggctggctggagccgtggtccggccagcctgcccacccaccgctcaacctctcggccaagaccgagctggtggcctgggcrgtgtccaactgggggccaaactccgccagggtgcgctactaccagagcctgcaggcccatctcaaggtggacgtgtacggacgctcccacaagcccctgc

SEQ ID NO: 77657 - DNA, 201 bp, Homo sapiens
caacatcactgccgaccgcaaggtgtatccacaggcagacgcggtcatcgtgcaccaccgagaggtcatgtacaaccccagtgcccagctcccacgctccycgaggcggcaggggcagcgatggatctggttcagcatggagtccccaagccactgctggcagctgaaagccatggacggatacttcaatctcaccatgtc

SEQ ID NO: 77658 - DNA, 201 bp, Homo sapiens
actttgggaggccgaggcaggcggatcacaaggtcaggagatcgagaccatcctggccaatatggtgaaacccgtctctactaaaaatacaaaaatttgcygggcgtggtggtgcatgcctgtaatcccagctacttgggaagctgaggcaggagaatggcgtgaacccaagaggcggagcttgcatgagccaagatcgcg

SEQ ID NO: 77659 - DNA, 201 bp, Homo sapiens
gacgacttccagagccccaaggacctggcccggtacctgcaggagctggacaaggaccacgcccgctacctgagctactttcgctggcgggagacgctgcrgcctcgctccttcagctgggcactcgctttctgcaaggcctgctggaaactgcaggaggaatccaggtaccagacacgcggcatagcggcttggttcacc

SEQ ID NO: 77660 - DNA, 201 bp, Homo sapiens
cacgtggacgacttccagagccccaaggacctggcccggtacctgcaggagctggacaaggaccacgcccgctacctgagctactttcgctggcgggagaygctgcggcctcgctccttcagctgggcactcgctttctgcaaggcctgctggaaactgcaggaggaatccaggtaccagacacgcggcatagcggcttgg

SEQ ID NO: 77661 - DNA, 201 bp, Homo sapiens
ccctacggctggctggagccgtggtccggccagcctgcccacccaccgctcaacctctcggccaagaccgagctggtggcctgggcagtgtccaactgggrgccaaactccgccagggtgcgctactaccagagcctgcaggcccatctcaaggtggacgtgtacggacgctcccacaagcccctgccccagggaaccatg

SEQ ID NO: 77662 - DNA, 201 bp, Homo sapiens
cccgactacatcaccgagaagctgtggaggaacgccctggaggcctgggccgtgcccgtggtgctgggccccagcagaagcaactacgagaggttcctgcyacccgacgccttcatccacgtggacgacttccagagccccaaggacctggcccggtacctgcaggagctggacaaggaccacgcccgctacctgagctac

SEQ ID NO: 77663 - DNA, 201 bp, Homo sapiens
agaactccttgcaccccgactacatcaccgagaagctgtggaggaacgccctggaggcctgggccgtgcccgtggtgctgggccccagcagaagcaactaygagaggttcctgccacccgacgccttcatccacgtggacgacttccagagccccaaggacctggcccggtacctgcaggagctggacaaggaccacgccc

SEQ ID NO: 77664 - DNA, 201 bp, Homo sapiens; identical to SEQ ID NO: 20689

SEQ ID NO: 77665 - DNA, 201 bp, Homo sapiens
tggcccggtacctgcaggagctggacaaggaccacgcccgctacctgagctactttcgctggcgggagacgctgcggcctcgctccttcagctgggcactsgctttctgcaaggcctgctggaaactgcaggaggaatccaggtaccagacacgcggcatagcggcttggttcacctgagaggctggtgtggggcctgggc

SEQ ID NO: 77666 - DNA, 201 bp, Homo sapiens
ggcccatctcaaggtggacgtgtacggacgctcccacaagcccctgccccagggaaccatgatggagacgctgtcccggtacaagttctatctggccttcragaactccttgcaccccgactacatcaccgagaagctgtggaggaacgccctggaggcctgggccgtgcccgtggtgctgggccccagcagaagcaacta

SEQ ID NO: 77667 - DNA, 201 bp, Homo sapiens
ggttcctgccacccgacgccttcatccacgtggacgacttccagagccccaaggacctggcccggtacctgcaggagctggacaaggaccacgcccgctamctgagctactttcgctggcgggagacgctgcggcctcgctccttcagctgggcactcgctttctgcaaggcctgctggaaactgcaggaggaatccaggt

SEQ ID NO: 77668 - DNA, 201 bp, Homo sapiens
ggaggaacgccctggaggcctgggccgtgcccgtggtgctgggccccagcagaagcaactacgagaggttcctgccacccgacgccttcatccacgtggaygacttccagagccccaaggacctggcccggtacctgcaggagctggacaaggaccacgcccgctacctgagctactttcgctggcgggagacgctgcggc

SEQ ID NO: 77669 - DNA, 201 bp, Homo sapiens
catggagtccccaagccactgctggcagctgaaagccatggacggatacttcaatctcaccatgtcctaccgcagcgactccgacatcttcacgccctacrgctggctggagccgtggtccggccagcctgcccacccaccgctcaacctctcggccaagaccgagctggtggcctgggcagtgtccaactgggggccaaa

SEQ ID NO: 77670 - DNA, 201 bp, Homo sapiens
tgatttctagaacagggcagtcgtgatacttggaggctgggctttgagctcggtcacctttgcacccagcttgggagtgagagagtttaaggtcatcctcyctcaaaaccagtattccagatcatttctctccattccaggaagtttgcatagctccctggacttctgctttgcactgccctgcaggagtgggtggggaaa

SEQ ID NO: 77671 - DNA, 201 bp, Homo sapiens
tgagtgatggttctggctgatttgtttgtgatgttgttagccgcctgtgaggggtgcagagagataatcaccgcaccgtttccagatgtaatactgcaaaraaaaccgatgatgaggccgggtgcggtggctcacacctgtaatcccagcactttgggaggccgaggcaggcggatcacaaggtcaggagatcgagaccat

SEQ ID NO: 77672 - DNA, 201 bp, Homo sapiens
gagcctgcaggcccatctcaaggtggacgtgtacggacgctcccacaagcccctgccccagggaaccatgatggagacgctgtcccggtacaagttctatstggccttcgagaactccttgcaccccgactacatcaccgagaagctgtggaggaacgccctggaggcctgggccgtgcccgtggtgctgggccccagcag

SEQ ID NO: 77673 - DNA, 201 bp, Homo sapiens
attccaggaagtttgcatagctccctggacttctgctttgcactgccctgcaggagtgggtggggaaaggaagtggctttgaggcacacagaggggcttgktgaggccaccggaggaagcttctgccaccaatatgggacctgtgcccagcctaccagaagagagcatctgaaaacatgtatcgacatggtaacccctctg

SEQ ID NO: 77674 - DNA, 201 bp, Homo sapiens
ctgctgcgtggtgtggcctcttccacgtcctcagaatccagctgttactccgtccgcggcctctcagctctagggccctctgcacactggcccccccagakactctgacccatggatcccctgggcccggccaagccacagtggtcgtggcgctgctgtctgaccacgctgctgtttcagctgctgatggctgtgtgtttc

SEQ ID NO: 77675 - DNA, 201 bp, Homo sapiens
ctcacacctgtaatcccagcactttgggaggccgaggcaggcggatcacaaggtcaggagatcgagaccatcctggccaatatggtgaaacccgtctctaytaaaaatacaaaaatttgctgggcgtggtggtgcatgcctgtaatcccagctacttgggaagctgaggcaggagaatggcgtgaacccaagaggcggagc

SEQ ID NO: 77676 - DNA, 201 bp, Homo sapiens; identical to SEQ ID NO: 77648

SEQ ID NO: 77677 - DNA, 201 bp, Homo sapiens; identical to SEQ ID NO: 77649

SEQ ID NO: 77678 - DNA, 201 bp, Homo sapiens; identical to SEQ ID NO: 77650

SEQ ID NO: 77679 - DNA, 201 bp, Homo sapiens; identical to SEQ ID NO: 77651

SEQ ID NO: 77680 - DNA, 201 bp, Homo sapiens; identical to SEQ ID NO: 77652

SEQ ID NO: 77681 - DNA, 201 bp, Homo sapiens; identical to SEQ ID NO: 77653

SEQ ID NO: 77682 - DNA, 201 bp, Homo sapiens; identical to SEQ ID NO: 77654

SEQ ID NO: 77683 - DNA, 201 bp, Homo sapiens; identical to SEQ ID NO: 77655

SEQ ID NO: 77684 - DNA, 201 bp, Homo sapiens; identical to SEQ ID NO: 77656

SEQ ID NO: 77685 - DNA, 201 bp, Homo sapiens; identical to SEQ ID NO: 77657

SEQ ID NO: 77686 - DNA, 201 bp, Homo sapiens
ggtgtggggcctgggctgccaggaacctcattttcctggggcctcacctgagtgggggcctcatctacctaaggactcgtttgcctgaagcttcacctgcytgaggactcacctgcctgggacggtcacctgttgcagcttcacctgcctggggattcacctacctgggtcctcactttcctggggcctcacctgctggag

SEQ ID NO: 77687 - DNA, 201 bp, Homo sapiens; identical to SEQ ID NO: 77659

SEQ ID NO: 77688 - DNA, 201 bp, Homo sapiens; identical to SEQ ID NO: 77660

SEQ ID NO: 77689 - DNA, 201 bp, Homo sapiens; identical to SEQ ID NO: 77661

SEQ ID NO: 77690 - DNA, 201 bp, Homo sapiens; identical to SEQ ID NO: 77662

SEQ ID NO: 77691 - DNA, 201 bp, Homo sapiens; identical to SEQ ID NO: 77663

SEQ ID NO: 77692 - DNA, 201 bp, Homo sapiens; identical to SEQ ID NO: 20689

SEQ ID NO: 77693 - DNA, 201 bp, Homo sapiens; identical to SEQ ID NO: 77665

SEQ ID NO: 77694 - DNA, 201 bp, Homo sapiens; identical to SEQ ID NO: 77666

SEQ ID NO: 77695 - DNA, 201 bp, Homo sapiens; identical to SEQ ID NO: 77667

SEQ ID NO: 77696 - DNA, 201 bp, Homo sapiens; identical to SEQ ID NO: 77668

SEQ ID NO: 77697 - DNA, 201 bp, Homo sapiens; identical to SEQ ID NO: 77669

SEQ ID NO: 77698 - DNA, 201 bp, Homo sapiens; identical to SEQ ID NO: 77670

SEQ ID NO: 77699 - DNA, 201 bp, Homo sapiens; identical to SEQ ID NO: 77671

SEQ ID NO: 77700 - DNA, 201 bp, Homo sapiens; identical to SEQ ID NO: 77672

SEQ ID NO: 77701 - DNA, 201 bp, Homo sapiens; identical to SEQ ID NO: 77673

SEQ ID NO: 77702 - DNA, 199 bp, Homo sapiens
ctcacacctgtaatcccagcactttgggaggccgaggcaggcggatcacaaggtcaggagatcgagaccatcctggccaatatggtgaaacccgtctctaytaaaaatacaaaaatttgtgggcgtggtattgggcgcctgtagtcccagctacttgggaggctgaggcaggagaatggcgtgaacccaagaggcggag

SEQ ID NO: 77703 - DNA, 201 bp, Homo sapiens; identical to SEQ ID NO: 77648

SEQ ID NO: 77704 - DNA, 201 bp, Homo sapiens; identical to SEQ ID NO: 77649

SEQ ID NO: 77705 - DNA, 201 bp, Homo sapiens; identical to SEQ ID NO: 77650

SEQ ID NO: 77706 - DNA, 201 bp, Homo sapiens; identical to SEQ ID NO: 77651

SEQ ID NO: 77707 - DNA, 201 bp, Homo sapiens; identical to SEQ ID NO: 77652

SEQ ID NO: 77708 - DNA, 126 bp, Homo sapiens
acgctgcggcctcgctccttcagctgggcactcgctttctgcaaggcctgctggaaactgcaggaggaatccagtgggggcctcatctacctaaggactcktttgcctgaagcttcacctgcctga

SEQ ID NO: 77709 - DNA, 201 bp, Homo sapiens; identical to SEQ ID NO: 77654

SEQ ID NO: 77710 - DNA, 201 bp, Homo sapiens; identical to SEQ ID NO: 77655

SEQ ID NO: 77711 - DNA, 201 bp, Homo sapiens; identical to SEQ ID NO: 77657

SEQ ID NO: 77712 - DNA, 201 bp, Homo sapiens; identical to SEQ ID NO: 77656

SEQ ID NO: 77713 - DNA, 201 bp, Homo sapiens; identical to SEQ ID NO: 77661

SEQ ID NO: 77714 - DNA, 201 bp, Homo sapiens
cacgtggacgacttccagagccccaaggacctggcccggtacctgcaggagctggacaaggaccacgcccgctacctgagctactttcgctggcgggagaygctgcggcctcgctccttcagctgggcactcgctttctgcaaggcctgctggaaactgcaggaggaatccagtgggggcctcatctacctaaggactcgt

SEQ ID NO: 77715 - DNA, 201 bp, Homo sapiens
gacgacttccagagccccaaggacctggcccggtacctgcaggagctggacaaggaccacgcccgctacctgagctactttcgctggcgggagacgctgcrgcctcgctccttcagctgggcactcgctttctgcaaggcctgctggaaactgcaggaggaatccagtgggggcctcatctacctaaggactcgtttgcct

SEQ ID NO: 77716 - DNA, 201 bp, Homo sapiens; identical to SEQ ID NO: 77663

SEQ ID NO: 77717 - DNA, 201 bp, Homo sapiens; identical to SEQ ID NO: 77662

SEQ ID NO: 77718 - DNA, 194 bp, Homo sapiens
tggcccggtacctgcaggagctggacaaggaccacgcccgctacctgagctactttcgctggcgggagacgctgcggcctcgctccttcagctgggcactsgctttctgcaaggcctgctggaaactgcaggaggaatccagtgggggcctcatctacctaaggactcgtttgcctgaagcttcacctgcctga

SEQ ID NO: 77719 - DNA, 201 bp, Homo sapiens; identical to SEQ ID NO: 20689

SEQ ID NO: 77720 - DNA, 201 bp, Homo sapiens; identical to SEQ ID NO: 77666

SEQ ID NO: 77721 - DNA, 201 bp, Homo sapiens; identical to SEQ ID NO: 77668

SEQ ID NO: 77722 - DNA, 201 bp, Homo sapiens
ggttcctgccacccgacgccttcatccacgtggacgacttccagagccccaaggacctggcccggtacctgcaggagctggacaaggaccacgcccgctamctgagctactttcgctggcgggagacgctgcggcctcgctccttcagctgggcactcgctttctgcaaggcctgctggaaactgcaggaggaatccagtg

SEQ ID NO: 77723 - DNA, 201 bp, Homo sapiens; identical to SEQ ID NO: 77669

SEQ ID NO: 77724 - DNA, 201 bp, Homo sapiens; identical to SEQ ID NO: 77670

SEQ ID NO: 77725 - DNA, 201 bp, Homo sapiens; identical to SEQ ID NO: 77672

SEQ ID NO: 77726 - DNA, 201 bp, Homo sapiens
ctcagcaagttccaccaaagcctgcttctctcctgggggttccccatgtctctgggtggccccactgccctcctggtcagcatattgaggaagagtctggkgacacaccagaaaaggacaggatcaagatactctgacccatggatcccctgggcccggccaagccacagtggtcgtggcgctgctgtctgaccacgctgc

SEQ ID NO: 77727 - DNA, 201 bp, Homo sapiens; identical to SEQ ID NO: 77673

SEQ ID NO: 77728 - DNA, 201 bp, Homo sapiens
ctcctgggggttccccatgtctctgggtggccccactgccctcctggtcagcatattgaggaagagtctggggacacaccagaaaaggacaggatcaagakactctgacccatggatcccctgggcccggccaagccacagtggtcgtggcgctgctgtctgaccacgctgctgtttcagctgctgatggctgtgtgtttc

SEQ ID NO: 77729 - DNA, 201 bp, Homo sapiens; identical to SEQ ID NO: 77648

SEQ ID NO: 77730 - DNA, 201 bp, Homo sapiens; identical to SEQ ID NO: 77649

SEQ ID NO: 77731 - DNA, 201 bp, Homo sapiens; identical to SEQ ID NO: 77650

SEQ ID NO: 77732 - DNA, 201 bp, Homo sapiens; identical to SEQ ID NO: 77651

SEQ ID NO: 77733 - DNA, 201 bp, Homo sapiens; identical to SEQ ID NO: 77652

SEQ ID NO: 77734 - DNA, 201 bp, Homo sapiens; identical to SEQ ID NO: 77653

SEQ ID NO: 77735 - DNA, 201 bp, Homo sapiens; identical to SEQ ID NO: 77654

SEQ ID NO: 77736 - DNA, 201 bp, Homo sapiens; identical to SEQ ID NO: 77655

SEQ ID NO: 77737 - DNA, 201 bp, Homo sapiens; identical to SEQ ID NO: 77656

SEQ ID NO: 77738 - DNA, 201 bp, Homo sapiens; identical to SEQ ID NO: 77657

SEQ ID NO: 77739 - DNA, 201 bp, Homo sapiens; identical to SEQ ID NO: 77658

SEQ ID NO: 77740 - DNA, 201 bp, Homo sapiens; identical to SEQ ID NO: 77659

SEQ ID NO: 77741 - DNA, 201 bp, Homo sapiens; identical to SEQ ID NO: 77660

SEQ ID NO: 77742 - DNA, 201 bp, Homo sapiens; identical to SEQ ID NO: 77661

SEQ ID NO: 77743 - DNA, 201 bp, Homo sapiens; identical to SEQ ID NO: 77662

SEQ ID NO: 77744 - DNA, 201 bp, Homo sapiens; identical to SEQ ID NO: 77663

SEQ ID NO: 77745 - DNA, 201 bp, Homo sapiens; identical to SEQ ID NO: 20689

SEQ ID NO: 77746 - DNA, 201 bp, Homo sapiens; identical to SEQ ID NO: 77665

SEQ ID NO: 77747 - DNA, 201 bp, Homo sapiens; identical to SEQ ID NO: 77666

SEQ ID NO: 77748 - DNA, 201 bp, Homo sapiens; identical to SEQ ID NO: 77667

SEQ ID NO: 77749 - DNA, 201 bp, Homo sapiens; identical to SEQ ID NO: 77668

SEQ ID NO: 77750 - DNA, 201 bp, Homo sapiens; identical to SEQ ID NO: 77669

SEQ ID NO: 77751 - DNA, 201 bp, Homo sapiens; identical to SEQ ID NO: 77670

SEQ ID NO: 77752 - DNA, 201 bp, Homo sapiens; identical to SEQ ID NO: 77671

SEQ ID NO: 77753 - DNA, 201 bp, Homo sapiens; identical to SEQ ID NO: 77672

SEQ ID NO: 77754 - DNA, 201 bp, Homo sapiens; identical to SEQ ID NO: 77673

SEQ ID NO: 77755 - DNA, 201 bp, Homo sapiens
catcctcttttagaagaaaggcctgtctccagatccccgagtccctctagcatctcccagaaggtgtcagacgcagcagtgtccagggagcggcagcagakactctgacccatggatcccctgggcccggccaagccacagtggtcgtggcgctgctgtctgaccacgctgctgtttcagctgctgatggctgtgtgtttc

SEQ ID NO: 77756 - DNA, 201 bp, Homo sapiens; identical to SEQ ID NO: 77675

SEQ ID NO: 77757 - DNA, 201 bp, Homo sapiens
ctccttccccacgccagcccctcgctccggattggtccttcaggaaacgctgtggggcgtctcggtccccgctgcggagccggcctaggccggagggcggrgtttgccctgggccgctgccggtcaggtcggccgcccctgacagctccgggagcctcaagcgcgacagcggcgccctcacctcgggacatccacacaccg

SEQ ID NO: 77758 - DNA, 201 bp, Homo sapiens
cccctccctcctggctgccatagaaaccagcttacaaggtccaggccggcgtccgggtgcactacaggccccccgtccctccttccccacgccagcccctygctccggattggtccttcaggaaacgctgtggggcgtctcggtccccgctgcggagccggcctaggccggagggcggggtttgccctgggccgctgccgg

SEQ ID NO: 77759 - DNA, 108 bp, Homo sapiens
agggcggrgtttgccctgggccgctgccggtcaggtcggccgcccctgacagctccgggagcctcaagcgcgacagcggcgccctcacctcgggacatccacacaccg

SEQ ID NO: 77760 - DNA, 201 bp, Homo sapiens
ctgctcctgcacaacctgcctcttcgctgagatggagacgtgagcccccgtggacgatgactgcagtgtatatgaatggaggtggcctggtgaacccccaytatgcccggtgggatcggcgcgacagtgtagaaagtggctgtcagaccgagagtagcaaggagggtgaggagggacagccccgccagctgacgcccttcg

SEQ ID NO: 77761 - DNA, 201 bp, Homo sapiens
gtggctgtcagaccgagagtagcaaggagggtgaggagggacagccccgccagctgacgcccttcgagaaactgacacaggacatgtcccaggatgagaargtggtgagggagatcacgctggggaaacggataggcttctaccgaattcgaggggaaatcggaagtggaaacttctcccaagtgaagcttgggattcact

SEQ ID NO: 77762 - DNA, 201 bp, Homo sapiens
ctcctccctacgctgcgcctgaactcttccgggacgagcactacatcggcatttacgtggatatctgggccttgggggtgcttttgtacttcatggtgacyggcaccatgccatttcgggcagaaaccgtggccaaactaaaaaagagcatcctcgagggcacatacagtgtaccgccgcacgtgtcagagccctgccacc

SEQ ID NO: 77763 - DNA, 201 bp, Homo sapiens
catacagtgtaccgccgcacgtgtcagagccctgccaccgactcatccgaggagtccttcagcagatccccacggagaggtacggaatcgactgcatcatraatgatgaatggatgcaaggggtgccataccctacacctttggaacctttccaactggatcccaaacatttgtcggaaaccagcactctcaaggaagaag

SEQ ID NO: 77764 - DNA, 201 bp, Homo sapiens
tctataccagtaatacttgtgtgaaggtgggcgattttggattcagcacagtaagcaaaaaaggtgaaatgctgaacactttctgtgggtctcctccctaygctgcgcctgaactcttccgggacgagcactacatcggcatttacgtggatatctgggccttgggggtgcttttgtacttcatggtgactggcaccatgc

SEQ ID NO: 77765 - DNA, 201 bp, Homo sapiens
acaagaccaagttagaccagaaaacccagaggctactatcccgagaaatctccagcatggaaaagctgcaccatcccaacatcatccgcctttacgaagtrgtggagaccctatccaagctgcacttggtgatggagtatgcagggggtggggagctcttcggaaaaattagcactgaggggaagctctctgaaccagaaa

SEQ ID NO: 77766 - DNA, 201 bp, Homo sapiens; identical to SEQ ID NO: 77762

SEQ ID NO: 77767 - DNA, 108 bp, Homo sapiens; identical to SEQ ID NO: 77759

SEQ ID NO: 77768 - DNA, 201 bp, Homo sapiens; identical to SEQ ID NO: 77763

SEQ ID NO: 77769 - DNA, 201 bp, Homo sapiens; identical to SEQ ID NO: 77764

SEQ ID NO: 77770 - DNA, 201 bp, Homo sapiens; identical to SEQ ID NO: 77765

SEQ ID NO: 77771 - DNA, 201 bp, Homo sapiens
tgtttttaccgctgttattatattactgtgttttcccatgtcattaggtctgtgatccaggcttcagcagacaatccaggctgatgcttttgctgagtgcrctaagggatgctggcctggcgggatggtgaactggaagcagaaacgtcatcctctctcttccttcttgccatgcaggtgtggatgtgtgggggccgcatg

SEQ ID NO: 77772 - DNA, 201 bp, Homo sapiens
aggacatccggcctggagacccccagcacaccaagaagttctgctttgatgccatttcccacaccagccctgtcacgctgtacgactgccacagcatgaarggcaaccagctgtggaaataccgcaaagacaagaccctgtaccaccctgtcagtggcagctgcatggactgcagtgaaagtgaccataggatcttcatga

SEQ ID NO: 77773 - DNA, 201 bp, Homo sapiens
cctgggacctgcccaaattctacccacccgtggagcccccggctgcagcttggggggagatccgaaatgtgggcacagggctgtgtgcagacacaaagcayggggccttgggctccccactaaggctagagggctgcgtccgaggccgtggggaggctgcctggaacaacatgcaggtattcaccttcacctggagagagg

SEQ ID NO: 77774 - DNA, 201 bp, Homo sapiens
caggtattcaccttcacctggagagaggacatccggcctggagacccccagcacaccaagaagttctgctttgatgccatttcccacaccagccctgtcaygctgtacgactgccacagcatgaagggcaaccagctgtggaaataccgcaaagacaagaccctgtaccaccctgtcagtggcagctgcatggactgcagt

SEQ ID NO: 77775 - DNA, 201 bp, Homo sapiens
gtgtgagagagggacaagaagtgcagttctgttctggaattccttattgctttcaacggacactctttgtgaaaaatccaagtaatattttagttcaaacktgatcttgagccaaggcccactgccacctctgggatgggagtcggacctacataccaagtgacaagttcaccttaacatctgcttccagaatggctttga

SEQ ID NO: 77776 - DNA, 201 bp, Homo sapiens
atttgcctgtttggggcagcttttagtatcgatgccactcatctgcagcagaagagaaagaagtcctcttggggctttttagtttctgccgtcctgggggraacattgcagttactgcacagcttctgttctctgtcacaaccccaggtgatttggtccggtcaaaggccatacttggggccctaagagtgttcagtattg

SEQ ID NO: 77777 - DNA, 160 bp, Homo sapiens
aggcagggaatatttgaaaattcagactggaattccaggccaaaagctcaagaccaccagcctctcctcctgcctggaaaaataagcctttgtgaaagacwgatttaccatgtacaattgtgattgtgaacgttgttgagtaaacctccagactttctct

SEQ ID NO: 77778 - DNA, 201 bp, Homo sapiens
cactgccacctctgggatgggagtcggacctacataccaagtgacaagttcaccttaacatctgcttccagaatggctttgattcagccgtgccaggcaamagaacagggtcagactcctgctctgttattggcttgaagactaggatcccaaaggggttggaggcagggaatatttgaaaattcagactggaattccagg

SEQ ID NO: 77779 - DNA, 201 bp, Homo sapiens
ggtgtaaaaggtgctggccaaatggttcagggtgaagagggctcttgattcaggggctggggtctgcctggtccttgagcccctgagttgtgggggtagggtgaagagcatatcccacaagaggccccacagggagcagagactgctttaatccctgctgacatcacggaaaagcaacagagccttttcaactttgtcact

SEQ ID NO: 77780 - DNA, 201 bp, Homo sapiens
cctgctgacatcacggaaaagcaacagagccttttcaactttgtcactatgtccccttgaacattatgtgggagaacaccaaggtagcctaggccacccaraagtgagtcctgcgaggttgcccagccctcagatggctctcctacatgatggtgctttagaaacaaaggtaaaatttgcctgtttggggcagcttttagt

SEQ ID NO: 77781 - DNA, 201 bp, Homo sapiens
tctctcacccagcagtggctgtttgaacacaccaactcaacagtcttggaaaaattcaataggaactgagccctcatgtccccttggcaggccccccagggtctggcactcactgcagacttcctctttcaagggaggcagggcccctgtgggcactaggtgtaaaaggtgctggccaaatggttcagggtgaagagggct

SEQ ID NO: 77782 - DNA, 201 bp, Homo sapiens
tcagaagagggagcccccctagacatttctttgcagctatggacatgcgggatatctccccctgctctctgggtatttgaaatgtcaattttagcactctycaggcacaaggacagcccagcaccagctttacagggcagtgtttcagatggccctgagcccacggaaaaggccaggtagacctccaaactagaaatgctg

SEQ ID NO: 77783 - DNA, 201 bp, Homo sapiens
tgttgggaaagcagggggacatgtgtccctcagctcagcagaggctgtggtacaacatggtccttggtgaagacctgcacccctggaacctcccaccatcrtcacaactgtagtctcatttgcagtggagaaaagaacccgacgtcccacagccagatatacacccagctccatgccagcccttcatgtttaccttttgct

SEQ ID NO: 77784 - DNA, 201 bp, Homo sapiens
agcagcaagccgtcccgggcctgcctttcccatcctttggttctcctttccagtctgggttcacaccctgaaaagggatgggtgtgtcctctgagcactcyggcatttgtcattgctgagcccatatcagtaggtcctgggacttgacaaagtatgtgggaggggaaggaaggacagaacttgactggctccatttcatgg

SEQ ID NO: 77785 - DNA, 129 bp, Homo sapiens
attccaggccaaaagctcaagaccaccagcctctcctcctgcctggaaaaataagcctttgtgaaagactgatttaccatgtacaattgtgattgtgaacrttgttgagtaaacctccagactttctct

SEQ ID NO: 77786 - DNA, 201 bp, Homo sapiens
ctagacatttctttgcagctatggacatgcgggatatctccccctgctctctgggtatttgaaatgtcaattttagcactctccaggcacaaggacagccyagcaccagctttacagggcagtgtttcagatggccctgagcccacggaaaaggccaggtagacctccaaactagaaatgctggctgatttgccctgatcc

SEQ ID NO: 77787 - DNA, 201 bp, Homo sapiens
cctcagctcagcagaggctgtggtacaacatggtccttggtgaagacctgcacccctggaacctcccaccatcatcacaactgtagtctcatttgcagtgragaaaagaacccgacgtcccacagccagatatacacccagctccatgccagcccttcatgtttaccttttgctttgttaattacatgtcagactcctaga

SEQ ID NO: 77788 - DNA, 201 bp, Homo sapiens
gctggcgaggaattacttccacttctggcccagcacaagccctgctttggccacctgtctgcaagagaggcggcccctgtgcttgcaacgcttacgtgttsatcccagtgtccttttccaaatgagtgctgtagctttagaagtggccctctatagaaagaagtcaaaagatgaggccccttctagaatctaggataacaa

SEQ ID NO: 77789 - DNA, 201 bp, Homo sapiens
ttgccatgcaggtgtggatgtgtgggggccgcatggaggacatcccctgctccagggtgggccatatctacaggaagtatgtgccctacaaggtcccggcyggagtcagcctggcccgggtaagaaccttaagcgggtggccgaagtgtggatggatgagtacgcagagtacatttaccagcgccggcctgaataccgcca

SEQ ID NO: 77790 - DNA, 201 bp, Homo sapiens
ggctgtggtacaacatggtccttggtgaagacctgcacccctggaacctcccaccatcatcacaactgtagtctcatttgcagtggagaaaagaacccgaygtcccacagccagatatacacccagctccatgccagcccttcatgtttaccttttgctttgttaattacatgtcagactcctagagggcctccagactaa

SEQ ID NO: 77791 - DNA, 201 bp, Homo sapiens
agaagtcctcttggggctttttagtttctgccgtcctggggggaacattgcagttactgcacagcttctgttctctgtcacaaccccaggtgatttggtcsggtcaaaggccatacttggggccctaagagtgttcagtattgaatgctgatcagctgccaggtgaggagtcagaagagggagcccccctagacatttctt

SEQ ID NO: 77792 - DNA, 201 bp, Homo sapiens
tgtaccaccctgtcagtggcagctgcatggactgcagtgaaagtgaccataggatcttcatgaacacctgcaacccatcctctctcacccagcagtggctrtttgaacacaccaactcaacagtcttggaaaaattcaataggaactgagccctcatgtccccttggcaggccccccagggtctggcactcactgcagact

SEQ ID NO: 77793 - DNA, 201 bp, Homo sapiens
taacacccaaaccttgatgtaatttttcacatactaaatcttcaccacctatgtataaactaaaatactacgttggaggagtctgagagaacctttctaamagcctcctcccaggctacaggccttggtctataatcctcaagaagacttctaaataaaactaactttaattctttaaaagcttcgttttttttctttagt

SEQ ID NO: 77794 - DNA, 201 bp, Homo sapiens
aagatgttggaataaggtcttgcttctactcagatggcaggtctgagattgagatgtccagcaaataagcagtgggccagagaagctaggaaggccaaacrggatacgtaggcctagaggagtcctctcagtcaccccaagttttccctttgtacctgttgctctaggagtttgacaaagaccagtgagcataagctccag

SEQ ID NO: 77795 - DNA, 201 bp, Homo sapiens
aggctaaaaaacacactaggtctgatacaactacaactaaaaattaccaaccttcctaaacaagagcccttctaactacagatggcaatcaacattaattmttaccaacacaaccaaacaatttatgaccaaaaacttcgtgaaacaaagtggcaaatgtaagaggccgtgtttgcccatttccctttgctgggagaattt

SEQ ID NO: 77796 - DNA, 201 bp, Homo sapiens
gaaagaaagagagagagagaaggagtggggagggagagagggagggggaaagggagagagagagacagagagagagacacagcaaataggtttctactccytgccaggccaactctgatccattggtaggggctgccccaggtgggtgttgatatgcattctgaggctgcttccaagcttatcagcaaagagtagtcagtg

SEQ ID NO: 77797 - DNA, 201 bp, Homo sapiens
ccaagaaaaggctaaaaaacacactaggtctgatacaactacaactaaaaattaccaaccttcctaaacaagagcccttctaactacagatggcaatcaayattaattcttaccaacacaaccaaacaatttatgaccaaaaacttcgtgaaacaaagtggcaaatgtaagaggccgtgtttgcccatttccctttgctgg

SEQ ID NO: 77798 - DNA, 201 bp, Homo sapiens
cattttgggaggtcgaggcaggagtattgcttgagcccaaaagttcaagaccagctttgggcaacacagtgagacctcatctctaaaaaaaagttcttttrattagctgggcatggtggtgtgctgcgtgcctgtagtcccagctacttggaaggctaaggtaggaggaggattcctttagcctggaggtcaaggctgcaa

SEQ ID NO: 77799 - DNA, 201 bp, Homo sapiens
tgtgtttcactcaccgccatatcccaagtacctaaagcctggtccaacacagaaaagacactatgagaccaatttttatgagtcataatttttattattgkattaaatcttttctaaaattatatttatataaatatcttataaatattctaaaaatatgtaaaatgtataaaagtctagtagttctgatataacactgtc

SEQ ID NO: 77800 - DNA, 201 bp, Homo sapiens
tgtgtgcccgatgattgatgtaattgaccatgacgactttcggtacgagacacaggcaggggatgccatgcggggagcctttgactgggagatgtactacwagcggatcccgatccctccagaactgcagaaagctgaccccagcgacccatttgagtctcccgtgatggccggtggactgttcgccgtggatcggaagtg

SEQ ID NO: 77801 - DNA, 201 bp, Homo sapiens
tatttttctcacttatttagaattattattctaaattcttctataaaggcatttacaataaattctagtccaacattgcttttcataaaaaagactccaayaaatataagtataaaaaataatacaattaaaagtatacaaatatatattccaattttattaaatatcatattttttccagtctacaacagactttattac

SEQ ID NO: 77802 - DNA, 201 bp, Homo sapiens
gtgcccgatgattgatgtaattgaccatgacgactttcggtacgagacacaggcaggggatgccatgcggggagcctttgactgggagatgtactacaagyggatcccgatccctccagaactgcagaaagctgaccccagcgacccatttgagtctcccgtgatggccggtggactgttcgccgtggatcggaagtggtt

SEQ ID NO: 77803 - DNA, 201 bp, Homo sapiens
gcatcatcatccccttccacaacgagggctggtcctccctcctccgcaccgtccacagtgtgctcaatcgctcgcctccagagctggtcgccgagattgtrctggtcgacgacttcagtgatcgagagcacctgaagaagcctcttgaagactacatggcccttttccccagtgtgaggattcttcgaaccaagaaacggg

SEQ ID NO: 77804 - DNA, 201 bp, Homo sapiens
agcttggaaagactggaggcctcagggttctgtagcccttctgcccatcaggtgaagaagacaggggctcatgggccactctttgttgtggggtggggggrtgtgggagggaaggggagtactctccagctgccaaaggctggtcctcaccacagctctgactggcatttgccttgtgtcttcttaagatgttggaataag

SEQ ID NO: 77805 - DNA, 201 bp, Homo sapiens
tccctgccaggccaactctgatccattggtaggggctgccccaggtgggtgttgatatgcattctgaggctgcttccaagcttatcagcaaagagtagtcmgtgggggagggatctttttgtgtttcactcaccgccatatcccaagtacctaaagcctggtccaacacagaaaagacactatgagaccaatttttatgag

SEQ ID NO: 77806 - DNA, 167 bp, Homo sapiens
gcatcatcatccccttccacaacgagggctggtcctccctcctccgcaccgtccacagtgtgctcaatcgctcgcctccagagctggtcgccgagattgtrctggtcgacgacttcagtgatcgagatctgccgactgcatcaactccctctccctttgtgtgctag

SEQ ID NO: 77807 - DNA, 201 bp, Homo sapiens; identical to SEQ ID NO: 77772

SEQ ID NO: 77808 - DNA, 201 bp, Homo sapiens; identical to SEQ ID NO: 77773

SEQ ID NO: 77809 - DNA, 201 bp, Homo sapiens; identical to SEQ ID NO: 77774

SEQ ID NO: 77810 - DNA, 201 bp, Homo sapiens; identical to SEQ ID NO: 77775

SEQ ID NO: 77811 - DNA, 201 bp, Homo sapiens; identical to SEQ ID NO: 77776

SEQ ID NO: 77812 - DNA, 201 bp, Homo sapiens; identical to SEQ ID NO: 77800

SEQ ID NO: 77813 - DNA, 201 bp, Homo sapiens; identical to SEQ ID NO: 77803

SEQ ID NO: 77814 - DNA, 201 bp, Homo sapiens; identical to SEQ ID NO: 77802

SEQ ID NO: 77815 - DNA, 160 bp, Homo sapiens; identical to SEQ ID NO: 77777

SEQ ID NO: 77816 - DNA, 201 bp, Homo sapiens; identical to SEQ ID NO: 77778

SEQ ID NO: 77817 - DNA, 201 bp, Homo sapiens; identical to SEQ ID NO: 77779

SEQ ID NO: 77818 - DNA, 201 bp, Homo sapiens; identical to SEQ ID NO: 77780

SEQ ID NO: 77819 - DNA, 201 bp, Homo sapiens; identical to SEQ ID NO: 77781

SEQ ID NO: 77820 - DNA, 201 bp, Homo sapiens; identical to SEQ ID NO: 77782

SEQ ID NO: 77821 - DNA, 201 bp, Homo sapiens; identical to SEQ ID NO: 77783

SEQ ID NO: 77822 - DNA, 201 bp, Homo sapiens; identical to SEQ ID NO: 77784

SEQ ID NO: 77823 - DNA, 129 bp, Homo sapiens; identical to SEQ ID NO: 77785

SEQ ID NO: 77824 - DNA, 201 bp, Homo sapiens; identical to SEQ ID NO: 77786

SEQ ID NO: 77825 - DNA, 201 bp, Homo sapiens; identical to SEQ ID NO: 77787

SEQ ID NO: 77826 - DNA, 201 bp, Homo sapiens; identical to SEQ ID NO: 77788

SEQ ID NO: 77827 - DNA, 201 bp, Homo sapiens
tctccttcaaggtgtggatgtgtgggggccgcatggaggacatcccctgctccagggtgggccatatctacaggaagtatgtgccctacaaggtcccggcyggagtcagcctggcccggaaccttaagcgggtggccgaagtgtggatggatgagtacgcagagtacatttaccagcgccggcctgaataccgccacctct

SEQ ID NO: 77828 - DNA, 201 bp, Homo sapiens; identical to SEQ ID NO: 77790

SEQ ID NO: 77829 - DNA, 201 bp, Homo sapiens; identical to SEQ ID NO: 77791

SEQ ID NO: 77830 - DNA, 201 bp, Homo sapiens; identical to SEQ ID NO: 77792

SEQ ID NO: 77831 - DNA, 201 bp, Homo sapiens; identical to SEQ ID NO: 77772

SEQ ID NO: 77832 - DNA, 201 bp, Homo sapiens; identical to SEQ ID NO: 77773

SEQ ID NO: 77833 - DNA, 201 bp, Homo sapiens; identical to SEQ ID NO: 77774

SEQ ID NO: 77834 - DNA, 201 bp, Homo sapiens; identical to SEQ ID NO: 77775

SEQ ID NO: 77835 - DNA, 201 bp, Homo sapiens; identical to SEQ ID NO: 77776

SEQ ID NO: 77836 - DNA, 201 bp, Homo sapiens; identical to SEQ ID NO: 77800

SEQ ID NO: 77837 - DNA, 201 bp, Homo sapiens; identical to SEQ ID NO: 77803

SEQ ID NO: 77838 - DNA, 201 bp, Homo sapiens; identical to SEQ ID NO: 77802

SEQ ID NO: 77839 - DNA, 160 bp, Homo sapiens; identical to SEQ ID NO: 77777

SEQ ID NO: 77840 - DNA, 201 bp, Homo sapiens; identical to SEQ ID NO: 77778

SEQ ID NO: 77841 - DNA, 201 bp, Homo sapiens; identical to SEQ ID NO: 77779

SEQ ID NO: 77842 - DNA, 201 bp, Homo sapiens; identical to SEQ ID NO: 77780

SEQ ID NO: 77843 - DNA, 201 bp, Homo sapiens; identical to SEQ ID NO: 77781

SEQ ID NO: 77844 - DNA, 201 bp, Homo sapiens; identical to SEQ ID NO: 77782

SEQ ID NO: 77845 - DNA, 201 bp, Homo sapiens; identical to SEQ ID NO: 77783

SEQ ID NO: 77846 - DNA, 201 bp, Homo sapiens; identical to SEQ ID NO: 77784

SEQ ID NO: 77847 - DNA, 129 bp, Homo sapiens; identical to SEQ ID NO: 77785

SEQ ID NO: 77848 - DNA, 201 bp, Homo sapiens; identical to SEQ ID NO: 77786

SEQ ID NO: 77849 - DNA, 201 bp, Homo sapiens; identical to SEQ ID NO: 77787

SEQ ID NO: 77850 - DNA, 201 bp, Homo sapiens; identical to SEQ ID NO: 77788

SEQ ID NO: 77851 - DNA, 201 bp, Homo sapiens; identical to SEQ ID NO: 77827

SEQ ID NO: 77852 - DNA, 201 bp, Homo sapiens; identical to SEQ ID NO: 77790

SEQ ID NO: 77853 - DNA, 201 bp, Homo sapiens; identical to SEQ ID NO: 77791

SEQ ID NO: 77854 - DNA, 201 bp, Homo sapiens; identical to SEQ ID NO: 77792

SEQ ID NO: 77855 - DNA, 201 bp, Homo sapiens
cagtgtcatcttgatcagccaaccatcttcataacaagatttgtttacaagtcttggattttctgcaagagcttcattaatttcggttacttctgataaargagaatagagttcactagcagctttcacactttccaaagtaacccttcagaactagatgaacttatgagtgaagaagcctatgagaaatacataaaatct

SEQ ID NO: 77856 - DNA, 201 bp, Homo sapiens
aacccttcagaactagatgaacttatgagtgaagaagcctatgagaaatacataaaatctattgaggagtgaaaatggaactcctaaataaactagtatgaaataacgcaacccagcagagttgtcttaaattaatggtggacagaagacttagaatagcaacttttagcattaccgatggggggcggcggggggaaacta

SEQ ID NO: 77857 - DNA, 201 bp, Homo sapiens
ggcggcggggggaaactactgttaacattgctaatgaaagaaaatgccctttaactttctaatgattatagataaatataataacgcatctttttcacaawatcctatgatttttagactaggctatagtgttcagaattcatgaaattatccatggtaaaaactagtttataaaaattacataattcaaagataacgttg

SEQ ID NO: 77858 - DNA, 201 bp, Homo sapiens
attcatgaaattatccatggtaaaaactagtttataaaaattacataattcaaagataacgttgttattcttaagccttatgtaatattgtaacttgcatrtatccatactggatttgggatgaaatacttaatgatctttccactggaaataactggaagttaagaggtttttgttgcttgtacagtgtcagatgaggaa

SEQ ID NO: 77859 - DNA, 201 bp, Homo sapiens
gaggaggaagaactagatgaacttatgagtgaagaagcctatgagaaatacataaaatctattgaggagtgaaaatggaactcctaaataaactagtatgaaataacgcaacccagcagagttgtcttaaattaatggtggacagaagacttagaatagcaacttttagcattaccgatggggggcggcggggggaaacta

SEQ ID NO: 77860 - DNA, 201 bp, Homo sapiens; identical to SEQ ID NO: 77857

SEQ ID NO: 77861 - DNA, 201 bp, Homo sapiens; identical to SEQ ID NO: 77858

SEQ ID NO: 77862 - DNA, 201 bp, Homo sapiens
cccaagacattgtgctcccagacggccgggtcatccccaaaggcattatctgcctcatcagtgtttttggaacccatcacaacccagccgtgtggccggaycctgaggtctatgacccctttcgctttgacccaaagaacatcaaggagaggtcacctctggcttttattcccttctcagcagggcccaggaactgcatcg

SEQ ID NO: 77863 - DNA, 201 bp, Homo sapiens
ccagaacaggccaatctgaagagatgtatagtggattggtggctttcagcagctgtggggaggtgggactgaggagcgactgctaatcaggatggggtttyctcctgggatggtgaaaatgttccggacctagatagtgatgaaggtagcacgacactgtgagtgcactaaatgctattgaattggacactttagaatggt

SEQ ID NO: 77864 - DNA, 201 bp, Homo sapiens
tgttcatggcagccctattcacagtagccaaacgatgaaaacaaccccaagctatatattaccagatgaaaggataaacaaaatatggtccatccatacamtggagtattacacagccataaaaaggaatgaagcagtgatccccactacactgtggatgaaccttgaatgcatgatactgaatgaaagacatcagatgca

SEQ ID NO: 77865 - DNA, 201 bp, Homo sapiens
atgaggacataagagcagaagctgacacctttatgtttgagggccatgacaccacagccagtggtctctcctgggtcctgtaccaccttgcaaagcacccrgaataccaggagcgctgtcggcaggaggtgcaagagcttctgaaggaccgtgagcctaaagagattgaatgggacgacctggcccagctgcccttcctga

SEQ ID NO: 77866 - DNA, 201 bp, Homo sapiens
tagtggattggtggctttcagcagctgtggggaggtgggactgaggagcgactgctaatcaggatggggtttcctcctgggatggtgaaaatgttccggamctagatagtgatgaaggtagcacgacactgtgagtgcactaaatgctattgaattggacactttagaatggttgaaatagtgatttttatgtgaattcta

SEQ ID NO: 77867 - DNA, 201 bp, Homo sapiens
acctgggcctgattcacagctcggaggaaggtctcctatacacacaaagcctggcatgcaccttcggtgatatgtgctgctggtgggtggggccctggcasgcaatcgtccgcatcttccaccccacctacatcaagcctgtgctctttgctccagctgccattgtaccaaaggacaaggtcttctacagcttcctgaagc

SEQ ID NO: 77868 - DNA, 201 bp, Homo sapiens
ttatgtttgagggccatgacaccacagccagtggtctctcctgggtcctgtaccaccttgcaaagcacccggaataccaggagcgctgtcggcaggaggtrcaagagcttctgaaggaccgtgagcctaaagagattgaatgggacgacctggcccagctgcccttcctgaccatgtgcattaaggagagcctgaggctgc

SEQ ID NO: 77869 - DNA, 201 bp, Homo sapiens
gctcggaggaaggtctcctatacacacaaagcctggcatgcaccttcggtgatatgtgctgctggtgggtggggccctggcacgcaatcgtccgcatcttycaccccacctacatcaagcctgtgctctttgctccagctgccattgtaccaaaggacaaggtcttctacagcttcctgaagccctggctgggggatgggc

SEQ ID NO: 77870 - DNA, 201 bp, Homo sapiens
agtttgatagtttgttatcatgttatacgtacacttagaataatgatccagccatctcattctaacagcaatgagaacttaggctcccctctctactaaartacaaaagttagctggtcatggtggtgcgggcctgtaatcccagctactcgggaggctgatgcgggagaatcacttgaaacccacaggcggaggttgcag

SEQ ID NO: 77871 - DNA, 201 bp, Homo sapiens
tttgatagtttgttatcatgttatacgtacacttagaataatgatccagccatctcattctaacagcaatgagaacttaggctcccctctctactaaaatrcaaaagttagctggtcatggtggtgcgggcctgtaatcccagctactcgggaggctgatgcgggagaatcacttgaaacccacaggcggaggttgcagtg

SEQ ID NO: 77872 - DNA, 201 bp, Homo sapiens
aatcaggatggggtttcctcctgggatggtgaaaatgttccggacctagatagtgatgaaggtagcacgacactgtgagtgcactaaatgctattgaattrgacactttagaatggttgaaatagtgatttttatgtgaattctacctaaacatgctattacagctcatatatactttttccatctggattcttcacaaaa

SEQ ID NO: 77873 - DNA, 201 bp, Homo sapiens
atgttatacgtacacttagaataatgatccagccatctcattctaacagcaatgagaacttaggctcccctctctactaaaatacaaaagttagctggtcrtggtggtgcgggcctgtaatcccagctactcgggaggctgatgcgggagaatcacttgaaacccacaggcggaggttgcagtgagctgaggtggtgccac

SEQ ID NO: 77874 - DNA, 201 bp, Homo sapiens
cgcaacccccgaaacggaattggttcttgggtcacctgggcctgattcacagctcggaggaaggtctcctatacacacaaagcctggcatgcaccttcggkgatatgtgctgctggtgggtggggccctggcacgcaatcgtccgcatcttccaccccacctacatcaagcctgtgctctttgctccagctgccattgtac

SEQ ID NO: 77875 - DNA, 201 bp, Homo sapiens
aatacaaaagttagctggtcatggtggtgcgggcctgtaatcccagctactcgggaggctgatgcgggagaatcacttgaaacccacaggcggaggttgcrgtgagctgaggtggtgccactacgctccagcctgggggagggggacatagcgagactcggtctcaaaaacaaaacaaaacaaaacaaaacaaaacaaaaa

SEQ ID NO: 77876 - DNA, 201 bp, Homo sapiens
atggcagcatccccgtggctgctcctgctgctggttggggcctcctggctcctggcccgcatcctggcctggacctataccttctatgacaactgctgccrcctccggtgtttcccgcaacccccgaaacggaattggttcttgggtcacctgggcctgattcacagctcggaggaaggtctcctatacacacaaagcctg

SEQ ID NO: 77877 - DNA, 201 bp, Homo sapiens
caaaagttagctggtcatggtggtgcgggcctgtaatcccagctactcgggaggctgatgcgggagaatcacttgaaacccacaggcggaggttgcagtgrgctgaggtggtgccactacgctccagcctgggggagggggacatagcgagactcggtctcaaaaacaaaacaaaacaaaacaaaacaaaacaaaaacaaa

SEQ ID NO: 77878 - DNA, 201 bp, Homo sapiens
ggtctcctatacacacaaagcctggcatgcaccttcggtgatatgtgctgctggtgggtggggccctggcacgcaatcgtccgcatcttccaccccacctrcatcaagcctgtgctctttgctccagctgccattgtaccaaaggacaaggtcttctacagcttcctgaagccctggctgggggatgggctcctgctgagt

SEQ ID NO: 77879 - DNA, 201 bp, Homo sapiens
acactgccaaactgtttccaaagcatctgcatcgtgtttaatttccataagtaacgtatgagaattctaggtcctccaaataattagcagtccttcgtagkgtcagtttttgtttcagccttccttatgggtatgctgtggcatatccctgagattttaattcgcattttccagtgactaagggtgttgaaccactcgtgc

SEQ ID NO: 77880 - DNA, 201 bp, Homo sapiens
ctcctacattttcttttaaaagttttatagtttcagagtttacatgtaattccataatctccatttagttaaattttgtatggggtgtgaactgtggtttractgttttcttgtatatggatatccaattgtttcacacaatttttttgaaaagaatatccttggcagggcacggtagctcacacctgtaatcccagcact

SEQ ID NO: 77881 - DNA, 201 bp, Homo sapiens
gtgtgaacatcatgcatgccaagtggcagctcctggcctcagagggtagtgcccgtctggacatgtttgagcacatcagcctcatgaccttggacagtctrcagaaatgtgtcttcagctttgacagccattgccaggagaagcccagtgaatatattgccgccatcttggagctcagtgcccttgtgacaaaaagacacc

SEQ ID NO: 77882 - DNA, 201 bp, Homo sapiens
ccctggctgggggatgggctcctgctgagtgctggtgaaaagtggagccgccaccgtcggatgctgacgcctgccttccatttcaacatcctgaagccctrtatgaagattttcaatgagagtgtgaacatcatgcatgccaagtggcagctcctggcctcagagggtagtgcccgtctggacatgtttgagcacatcagc

SEQ ID NO: 77883 - DNA, 201 bp, Homo sapiens
gccttcttattgttggattttgagagttctatgtacaagtcctttgtcagtcgtgtgatttgcaagtcttcttcctagtctctgaagtttctttctttcayagagcaaacgttttaaatttttatgaagtaagacttctcagttttatttttggtgaattatgtttatactgccatatataggaactctttgcttaactgg

SEQ ID NO: 77884 - DNA, 201 bp, Homo sapiens
caacatcctgaagccctatatgaagattttcaatgagagtgtgaacatcatgcatgccaagtggcagctcctggcctcagagggtagtgcccgtctggacrtgtttgagcacatcagcctcatgaccttggacagtctgcagaaatgtgtcttcagctttgacagccattgccaggagaagcccagtgaatatattgccgc

SEQ ID NO: 77885 - DNA, 201 bp, Homo sapiens
ggcatatccctgagattttaattcgcattttccagtgactaagggtgttgaaccactcgtgccttcctgtgcctatttgacactcctatattttctttggwgaagtgtctgttcaatcatctgctcattaaattttccttcggttgtttgccttcttattgttggattttgagagttctatgtacaagtcctttgtcagtc

SEQ ID NO: 77886 - DNA, 201 bp, Homo sapiens
ctgtggggaggtgggactgaggagcgactgctaatcaggatggggtttcctcctgggatggtgaaaatgttccggacctagatagtgatgaaggtagcacracactgtgagtgcactaaatgctattgaattggacactttagaatggttgaaatagtgatttttatgtgaattctacctaaacatgctattacagctcat

SEQ ID NO: 77887 - DNA, 201 bp, Homo sapiens
gttagctggtcatggtggtgcgggcctgtaatcccagctactcgggaggctgatgcgggagaatcacttgaaacccacaggcggaggttgcagtgagctgrggtggtgccactacgctccagcctgggggagggggacatagcgagactcggtctcaaaaacaaaacaaaacaaaacaaaacaaaacaaaaacaaaacaaa

SEQ ID NO: 77888 - DNA, 201 bp, Homo sapiens
ttgttggattttgagagttctatgtacaagtcctttgtcagtcgtgtgatttgcaagtcttcttcctagtctctgaagtttctttctttcatagagcaaaygttttaaatttttatgaagtaagacttctcagttttatttttggtgaattatgtttatactgccatatataggaactctttgcttaactggaggtcatgg

SEQ ID NO: 77889 - DNA, 201 bp, Homo sapiens
tcaatctgaggagacttaataatgatattgattctcccaattcatgaatatagtatacccctgtatttatttgttttcttgaatttcttttatcattgttytgtagttttcaccatgacagtcttgcacatattttgttaaatgtacagctgagaatttaattttttctggtgtacaatgctaataaaatggtgctttaaa

SEQ ID NO: 77890 - DNA, 201 bp, Homo sapiens
actggaggtcatggagattttctcctacattttcttttaaaagttttatagtttcagagtttacatgtaattccataatctccatttagttaaattttgtrtggggtgtgaactgtggtttgactgttttcttgtatatggatatccaattgtttcacacaatttttttgaaaagaatatccttggcagggcacggtagct

SEQ ID NO: 77891 - DNA, 201 bp, Homo sapiens
atccctgagattttaattcgcattttccagtgactaagggtgttgaaccactcgtgccttcctgtgcctatttgacactcctatattttctttggtgaagwgtctgttcaatcatctgctcattaaattttccttcggttgtttgccttcttattgttggattttgagagttctatgtacaagtcctttgtcagtcgtgtg

SEQ ID NO: 77892 - DNA, 201 bp, Homo sapiens
attttctattctattccatgttggaccaataccacactgccctagtcactgttgcattatagtatatctttaaaggagtaatgggaatccttcaactacatttttttccccaataatttttggctattctgcttcctttgtgtttctatgtaaattttatcatcagtgtgtctatttctacaaatagtcctgatagggttt

SEQ ID NO: 77893 - DNA, 201 bp, Homo sapiens
aactggaggtcatggagattttctcctacattttcttttaaaagttttatagtttcagagtttacatgtaattccataatctccatttagttaaattttgyatggggtgtgaactgtggtttgactgttttcttgtatatggatatccaattgtttcacacaatttttttgaaaagaatatccttggcagggcacggtagc

SEQ ID NO: 77894 - DNA, 201 bp, Homo sapiens
caccagcagatcctcctgtacatagacttcctgtattatctcacccctgatgggcagcgtttccgcagggcctgccgcctggtgcacgacttcacagatgmcgtcatccaggagcggcgccgcaccctccctagccagggtgttgatgacttcctccaagccaaggccaaatccaagactttggacttcattgatgtactc

SEQ ID NO: 77895 - DNA, 201 bp, Homo sapiens
acagcaatgagaacttaggctcccctctctactaaaatacaaaagttagctggtcatggtggtgcgggcctgtaatcccagctactcgggaggctgatgcrggagaatcacttgaaacccacaggcggaggttgcagtgagctgaggtggtgccactacgctccagcctgggggagggggacatagcgagactcggtctca

SEQ ID NO: 77896 - DNA, 201 bp, Homo sapiens
ttaaattttccttcggttgtttgccttcttattgttggattttgagagttctatgtacaagtcctttgtcagtcgtgtgatttgcaagtcttcttcctagwctctgaagtttctttctttcatagagcaaacgttttaaatttttatgaagtaagacttctcagttttatttttggtgaattatgtttatactgccatata

SEQ ID NO: 77897 - DNA, 201 bp, Homo sapiens
actgccctagtcactgttgcattatagtatatctttaaaggagtaatgggaatccttcaactacatttttttccccaataatttttggctattctgcttcytttgtgtttctatgtaaattttatcatcagtgtgtctatttctacaaatagtcctgatagggtttgaattgggatttctgtgaatctatagatcaatctg

SEQ ID NO: 77898 - DNA, 201 bp, Homo sapiens
ggacctataccttctatgacaactgctgccgcctccggtgtttcccgcaacccccgaaacggaattggttcttgggtcacctgggcctgattcacagctcrgaggaaggtctcctatacacacaaagcctggcatgcaccttcggtgatatgtgctgctggtgggtggggccctggcacgcaatcgtccgcatcttccacc

SEQ ID NO: 77899 - DNA, 201 bp, Homo sapiens
ttgtcagtcgtgtgatttgcaagtcttcttcctagtctctgaagtttctttctttcatagagcaaacgttttaaatttttatgaagtaagacttctcagtwttatttttggtgaattatgtttatactgccatatataggaactctttgcttaactggaggtcatggagattttctcctacattttcttttaaaagtttta

SEQ ID NO: 77900 - DNA, 201 bp, Homo sapiens
gaggcaggagaatcgcttgaacccaggagtcagaggtttcagtgagccgagattgtgccactgcactccagcctgggtgaaagagctagattctctctctmaaaaaaaaaaaaaaaaaaaaggaaagaaagaaagaaaagaaaagaaaatcctttttgctttaacttgccttgcaggtttgtagaaaactcaattgttgaa

SEQ ID NO: 77901 - DNA, 201 bp, Homo sapiens
tgaggcaggagaatcgcttgaacccaggagtcagaggtttcagtgagccgagattgtgccactgcactccagcctgggtgaaagagctagattctctctcwcaaaaaaaaaaaaaaaaaaaaggaaagaaagaaagaaaagaaaagaaaatcctttttgctttaacttgccttgcaggtttgtagaaaactcaattgttga

SEQ ID NO: 77902 - DNA, 201 bp, Homo sapiens
atggctgaggcaggagaatcgcttgaacccaggagtcagaggtttcagtgagccgagattgtgccactgcactccagcctgggtgaaagagctagattctstctctcaaaaaaaaaaaaaaaaaaaaggaaagaaagaaagaaaagaaaagaaaatcctttttgctttaacttgccttgcaggtttgtagaaaactcaatt

SEQ ID NO: 77903 - DNA, 201 bp, Homo sapiens
gggtgttgaaccactcgtgccttcctgtgcctatttgacactcctatattttctttggtgaagtgtctgttcaatcatctgctcattaaattttccttcgrttgtttgccttcttattgttggattttgagagttctatgtacaagtcctttgtcagtcgtgtgatttgcaagtcttcttcctagtctctgaagtttcttt

SEQ ID NO: 77904 - DNA, 201 bp, Homo sapiens
aaaaaaaggaaagaaagaaagaaaagaaaagaaaatcctttttgctttaacttgccttgcaggtttgtagaaaactcaattgttgaaatttgggtggatawatttctggattttctattctattccatgttggaccaataccacactgccctagtcactgttgcattatagtatatctttaaaggagtaatgggaatcctt

SEQ ID NO: 77905 - DNA, 201 bp, Homo sapiens; identical to SEQ ID NO: 77862

SEQ ID NO: 77906 - DNA, 106 bp, Homo sapiens
ctgccygtctctgcctctctccactgtccctggagctccctgggcccttccctgggcctcaggacctcactcaccaccccatctgccctgcaggatgccacagctg

SEQ ID NO: 77907 - DNA, 201 bp, Homo sapiens; identical to SEQ ID NO: 77863

SEQ ID NO: 77908 - DNA, 201 bp, Homo sapiens; identical to SEQ ID NO: 77864

SEQ ID NO: 77909 - DNA, 201 bp, Homo sapiens; identical to SEQ ID NO: 77865

SEQ ID NO: 77910 - DNA, 201 bp, Homo sapiens; identical to SEQ ID NO: 77866

SEQ ID NO: 77911 - DNA, 201 bp, Homo sapiens; identical to SEQ ID NO: 77868

SEQ ID NO: 77912 - DNA, 201 bp, Homo sapiens; identical to SEQ ID NO: 77870

SEQ ID NO: 77913 - DNA, 201 bp, Homo sapiens; identical to SEQ ID NO: 77871

SEQ ID NO: 77914 - DNA, 201 bp, Homo sapiens; identical to SEQ ID NO: 77872

SEQ ID NO: 77915 - DNA, 201 bp, Homo sapiens; identical to SEQ ID NO: 77873

SEQ ID NO: 77916 - DNA, 201 bp, Homo sapiens; identical to SEQ ID NO: 77875

SEQ ID NO: 77917 - DNA, 201 bp, Homo sapiens
atggcagcatccccgtggctgctcctgctgctggttggggcctcctggctcctggcccgcatcctggcctggacctataccttctatgacaactgctgccrcctccggtgtttcccgcaacccccgaaacggaattggttcttgggtcacctgggcctggtcacccccacggagcagggcatgagggtcctgactcagctg

SEQ ID NO: 77918 - DNA, 201 bp, Homo sapiens; identical to SEQ ID NO: 77877

SEQ ID NO: 77919 - DNA, 201 bp, Homo sapiens; identical to SEQ ID NO: 77879

SEQ ID NO: 77920 - DNA, 201 bp, Homo sapiens; identical to SEQ ID NO: 77880

SEQ ID NO: 77921 - DNA, 201 bp, Homo sapiens
gtgtgaacatcatgcatgccaagtggcagctcctggcctcagagggtagtgcccgtctggacatgtttgagcacatcagcctcatgaccttggacagtctrcagaaatgtgtcttcagctttgacagccattgccaggagtaacccagtgaatatattgccgccatcttggagctcagtgcccttgtgacaaaaagacacc

SEQ ID NO: 77922 - DNA, 201 bp, Homo sapiens; identical to SEQ ID NO: 77882

SEQ ID NO: 77923 - DNA, 201 bp, Homo sapiens; identical to SEQ ID NO: 77883

SEQ ID NO: 77924 - DNA, 201 bp, Homo sapiens
caacatcctgaagccctatatgaagattttcaatgagagtgtgaacatcatgcatgccaagtggcagctcctggcctcagagggtagtgcccgtctggacrtgtttgagcacatcagcctcatgaccttggacagtctgcagaaatgtgtcttcagctttgacagccattgccaggagtaacccagtgaatatattgccgc

SEQ ID NO: 77925 - DNA, 201 bp, Homo sapiens; identical to SEQ ID NO: 77885

SEQ ID NO: 77926 - DNA, 201 bp, Homo sapiens; identical to SEQ ID NO: 77886

SEQ ID NO: 77927 - DNA, 201 bp, Homo sapiens; identical to SEQ ID NO: 77887

SEQ ID NO: 77928 - DNA, 201 bp, Homo sapiens; identical to SEQ ID NO: 77888

SEQ ID NO: 77929 - DNA, 201 bp, Homo sapiens; identical to SEQ ID NO: 77889

SEQ ID NO: 77930 - DNA, 201 bp, Homo sapiens; identical to SEQ ID NO: 77891

SEQ ID NO: 77931 - DNA, 201 bp, Homo sapiens; identical to SEQ ID NO: 77890

SEQ ID NO: 77932 - DNA, 201 bp, Homo sapiens; identical to SEQ ID NO: 77892

SEQ ID NO: 77933 - DNA, 201 bp, Homo sapiens; identical to SEQ ID NO: 77893

SEQ ID NO: 77934 - DNA, 201 bp, Homo sapiens; identical to SEQ ID NO: 77894

SEQ ID NO: 77935 - DNA, 201 bp, Homo sapiens; identical to SEQ ID NO: 77895

SEQ ID NO: 77936 - DNA, 201 bp, Homo sapiens; identical to SEQ ID NO: 77896

SEQ ID NO: 77937 - DNA, 201 bp, Homo sapiens; identical to SEQ ID NO: 77897

SEQ ID NO: 77938 - DNA, 201 bp, Homo sapiens; identical to SEQ ID NO: 77899

SEQ ID NO: 77939 - DNA, 201 bp, Homo sapiens; identical to SEQ ID NO: 77900

SEQ ID NO: 77940 - DNA, 201 bp, Homo sapiens; identical to SEQ ID NO: 77901

SEQ ID NO: 77941 - DNA, 201 bp, Homo sapiens; identical to SEQ ID NO: 77902

SEQ ID NO: 77942 - DNA, 201 bp, Homo sapiens; identical to SEQ ID NO: 77903

SEQ ID NO: 77943 - DNA, 201 bp, Homo sapiens; identical to SEQ ID NO: 77904

SEQ ID NO: 77944 - DNA, 201 bp, Homo sapiens; identical to SEQ ID NO: 77862

SEQ ID NO: 77945 - DNA, 201 bp, Homo sapiens; identical to SEQ ID NO: 77863

SEQ ID NO: 77946 - DNA, 201 bp, Homo sapiens; identical to SEQ ID NO: 77864

SEQ ID NO: 77947 - DNA, 201 bp, Homo sapiens; identical to SEQ ID NO: 77865

SEQ ID NO: 77948 - DNA, 201 bp, Homo sapiens; identical to SEQ ID NO: 77866

SEQ ID NO: 77949 - DNA, 201 bp, Homo sapiens; identical to SEQ ID NO: 77867

SEQ ID NO: 77950 - DNA, 201 bp, Homo sapiens; identical to SEQ ID NO: 77868

SEQ ID NO: 77951 - DNA, 201 bp, Homo sapiens; identical to SEQ ID NO: 77869

SEQ ID NO: 77952 - DNA, 201 bp, Homo sapiens; identical to SEQ ID NO: 77870

SEQ ID NO: 77953 - DNA, 201 bp, Homo sapiens; identical to SEQ ID NO: 77871

SEQ ID NO: 77954 - DNA, 201 bp, Homo sapiens; identical to SEQ ID NO: 77872

SEQ ID NO: 77955 - DNA, 201 bp, Homo sapiens; identical to SEQ ID NO: 77873

SEQ ID NO: 77956 - DNA, 201 bp, Homo sapiens; identical to SEQ ID NO: 77874

SEQ ID NO: 77957 - DNA, 201 bp, Homo sapiens; identical to SEQ ID NO: 77875

SEQ ID NO: 77958 - DNA, 201 bp, Homo sapiens; identical to SEQ ID NO: 77876

SEQ ID NO: 77959 - DNA, 201 bp, Homo sapiens; identical to SEQ ID NO: 77877

SEQ ID NO: 77960 - DNA, 201 bp, Homo sapiens; identical to SEQ ID NO: 77878

SEQ ID NO: 77961 - DNA, 201 bp, Homo sapiens; identical to SEQ ID NO: 77879

SEQ ID NO: 77962 - DNA, 201 bp, Homo sapiens; identical to SEQ ID NO: 77880

SEQ ID NO: 77963 - DNA, 201 bp, Homo sapiens; identical to SEQ ID NO: 77881

SEQ ID NO: 77964 - DNA, 201 bp, Homo sapiens; identical to SEQ ID NO: 77882

SEQ ID NO: 77965 - DNA, 201 bp, Homo sapiens; identical to SEQ ID NO: 77883

SEQ ID NO: 77966 - DNA, 201 bp, Homo sapiens; identical to SEQ ID NO: 77884

SEQ ID NO: 77967 - DNA, 201 bp, Homo sapiens; identical to SEQ ID NO: 77885

SEQ ID NO: 77968 - DNA, 201 bp, Homo sapiens; identical to SEQ ID NO: 77886

SEQ ID NO: 77969 - DNA, 201 bp, Homo sapiens; identical to SEQ ID NO: 77887

SEQ ID NO: 77970 - DNA, 201 bp, Homo sapiens; identical to SEQ ID NO: 77888

SEQ ID NO: 77971 - DNA, 201 bp, Homo sapiens; identical to SEQ ID NO: 77889

SEQ ID NO: 77972 - DNA, 201 bp, Homo sapiens; identical to SEQ ID NO: 77890

SEQ ID NO: 77973 - DNA, 201 bp, Homo sapiens; identical to SEQ ID NO: 77891

SEQ ID NO: 77974 - DNA, 201 bp, Homo sapiens; identical to SEQ ID NO: 77892

SEQ ID NO: 77975 - DNA, 201 bp, Homo sapiens; identical to SEQ ID NO: 77893

SEQ ID NO: 77976 - DNA, 201 bp, Homo sapiens; identical to SEQ ID NO: 77894

SEQ ID NO: 77977 - DNA, 201 bp, Homo sapiens; identical to SEQ ID NO: 77895

SEQ ID NO: 77978 - DNA, 201 bp, Homo sapiens; identical to SEQ ID NO: 77896

SEQ ID NO: 77979 - DNA, 201 bp, Homo sapiens; identical to SEQ ID NO: 77897

SEQ ID NO: 77980 - DNA, 201 bp, Homo sapiens; identical to SEQ ID NO: 77898

SEQ ID NO: 77981 - DNA, 201 bp, Homo sapiens; identical to SEQ ID NO: 77899

SEQ ID NO: 77982 - DNA, 201 bp, Homo sapiens; identical to SEQ ID NO: 77900

SEQ ID NO: 77983 - DNA, 201 bp, Homo sapiens; identical to SEQ ID NO: 77901

SEQ ID NO: 77984 - DNA, 201 bp, Homo sapiens; identical to SEQ ID NO: 77902

SEQ ID NO: 77985 - DNA, 201 bp, Homo sapiens; identical to SEQ ID NO: 77903

SEQ ID NO: 77986 - DNA, 201 bp, Homo sapiens; identical to SEQ ID NO: 77904

SEQ ID NO: 77987 - DNA, 201 bp, Homo sapiens; identical to SEQ ID NO: 77862

SEQ ID NO: 77988 - DNA, 106 bp, Homo sapiens; identical to SEQ ID NO: 77906

SEQ ID NO: 77989 - DNA, 201 bp, Homo sapiens; identical to SEQ ID NO: 77863

SEQ ID NO: 77990 - DNA, 201 bp, Homo sapiens; identical to SEQ ID NO: 77865

SEQ ID NO: 77991 - DNA, 201 bp, Homo sapiens; identical to SEQ ID NO: 77864

SEQ ID NO: 77992 - DNA, 201 bp, Homo sapiens; identical to SEQ ID NO: 77868

SEQ ID NO: 77993 - DNA, 201 bp, Homo sapiens; identical to SEQ ID NO: 77866

SEQ ID NO: 77994 - DNA, 201 bp, Homo sapiens; identical to SEQ ID NO: 77870

SEQ ID NO: 77995 - DNA, 201 bp, Homo sapiens; identical to SEQ ID NO: 77871

SEQ ID NO: 77996 - DNA, 201 bp, Homo sapiens; identical to SEQ ID NO: 77872

SEQ ID NO: 77997 - DNA, 201 bp, Homo sapiens; identical to SEQ ID NO: 77873

SEQ ID NO: 77998 - DNA, 201 bp, Homo sapiens; identical to SEQ ID NO: 77875

SEQ ID NO: 77999 - DNA, 201 bp, Homo sapiens; identical to SEQ ID NO: 77917

SEQ ID NO: 78000 - DNA, 201 bp, Homo sapiens; identical to SEQ ID NO: 77877

SEQ ID NO: 78001 - DNA, 201 bp, Homo sapiens; identical to SEQ ID NO: 77879

SEQ ID NO: 78002 - DNA, 201 bp, Homo sapiens; identical to SEQ ID NO: 77880

SEQ ID NO: 78003 - DNA, 201 bp, Homo sapiens; identical to SEQ ID NO: 77881

SEQ ID NO: 78004 - DNA, 201 bp, Homo sapiens; identical to SEQ ID NO: 77882

SEQ ID NO: 78005 - DNA, 201 bp, Homo sapiens; identical to SEQ ID NO: 77883

SEQ ID NO: 78006 - DNA, 201 bp, Homo sapiens; identical to SEQ ID NO: 77884

SEQ ID NO: 78007 - DNA, 201 bp, Homo sapiens; identical to SEQ ID NO: 77885

SEQ ID NO: 78008 - DNA, 201 bp, Homo sapiens; identical to SEQ ID NO: 77886

SEQ ID NO: 78009 - DNA, 201 bp, Homo sapiens; identical to SEQ ID NO: 77887

SEQ ID NO: 78010 - DNA, 201 bp, Homo sapiens; identical to SEQ ID NO: 77888

SEQ ID NO: 78011 - DNA, 201 bp, Homo sapiens; identical to SEQ ID NO: 77889

SEQ ID NO: 78012 - DNA, 201 bp, Homo sapiens; identical to SEQ ID NO: 77891

SEQ ID NO: 78013 - DNA, 201 bp, Homo sapiens; identical to SEQ ID NO: 77890

SEQ ID NO: 78014 - DNA, 201 bp, Homo sapiens; identical to SEQ ID NO: 77892

SEQ ID NO: 78015 - DNA, 201 bp, Homo sapiens; identical to SEQ ID NO: 77893

SEQ ID NO: 78016 - DNA, 201 bp, Homo sapiens; identical to SEQ ID NO: 77894

SEQ ID NO: 78017 - DNA, 201 bp, Homo sapiens; identical to SEQ ID NO: 77895

SEQ ID NO: 78018 - DNA, 201 bp, Homo sapiens; identical to SEQ ID NO: 77896

SEQ ID NO: 78019 - DNA, 201 bp, Homo sapiens; identical to SEQ ID NO: 77897

SEQ ID NO: 78020 - DNA, 201 bp, Homo sapiens; identical to SEQ ID NO: 77899

SEQ ID NO: 78021 - DNA, 201 bp, Homo sapiens; identical to SEQ ID NO: 77900

SEQ ID NO: 78022 - DNA, 201 bp, Homo sapiens; identical to SEQ ID NO: 77901

SEQ ID NO: 78023 - DNA, 201 bp, Homo sapiens; identical to SEQ ID NO: 77902

SEQ ID NO: 78024 - DNA, 201 bp, Homo sapiens; identical to SEQ ID NO: 77903

SEQ ID NO: 78025 - DNA, 201 bp, Homo sapiens; identical to SEQ ID NO: 77904

SEQ ID NO: 78026 - DNA, 201 bp, Homo sapiens
cgtcgctttcgggttctctcatcgcttcgtcgttcgccaatgtttgaggagaaggccagcagtccttcagggaagatgggaggcgaggagaagccgattgrtgctggtgaagagaagcaaaaggaaggaggcaaaaagaagaacaaagaaggatctggagatggaggtcgagctgagtcaaggcctggccgacaacaccgt

SEQ ID NO: 78027 - DNA, 201 bp, Homo sapiens
tttgatcatcggccaaggtcctggcgagaactgcctctgcggctagctgattttggggtacttcataggaacgagctgtctggagcactcacaggactcayccgggtacgaagattccaacaggatgatgctcacatattctgtgccatggagcagattgaagatgaaataaaaggttgtttggattttctacgtacggta

SEQ ID NO: 78028 - DNA, 201 bp, Homo sapiens
caaatggcccttttggctgtcccctcgccaggtaatggtagttccagtgggaccaacctgtgatgaatatgcccaaaaggtacgacaacaattccacgatkccaaattcatggcagacattgatctggatccaggctgtacattgaataaaaagattcgaaatgcacagttagcacagtataacttcattttagttgttgg

SEQ ID NO: 78029 - DNA, 201 bp, Homo sapiens
gattggctccatggaaaaggaggaacagcgtttccgtaaaattgactttgtactctgaaaacgtcaatttatattgaacttggaggagtttggcaaagtcygaataggtcaacctgcaggcgtaactatttttgacctagtcagtttttaaacaatgtgcatttgaaggagttaattaaaagagagccaataaaatgattt

SEQ ID NO: 78030 - DNA, 201 bp, Homo sapiens
aacttgaaaacagtctgaatgaatttggtgaaaagtgggagttaaactctggagatggagctttctatggcccaaagattgacatacagattaaagatgcrattgggcggtaccaccagtgtgcaaccatccagctggatttccagttgcccatcagatttaatcttacttatgtaagccatgatggtgatgataagaaaa

SEQ ID NO: 78031 - DNA, 201 bp, Homo sapiens
cctccacgtactgggaaggcaaagcagatatggagactctccagagaatttatggcatttcattcccagatcctaaaatgttgaaagagtgggagaagttycaagaggaagctaaaaaccgagatcataggaaaattggcagggaccaagaactatatttctttcatgaactcagccctggaagttgcttttttctgccaa

SEQ ID NO: 78032 - DNA, 201 bp, Homo sapiens
aaacaggcagaagaagaattttaatgaaaaaattacccagattggctccatggaaaaggaggaacagcgtttccgtaaaattgactttgtactctgaaaaygtcaatttatattgaacttggaggagtttggcaaagtctgaataggtcaacctgcaggcgtaactatttttgacctagtcagtttttaaacaatgtgcat

SEQ ID NO: 78033 - DNA, 201 bp, Homo sapiens
gaggccaagtcccgggcgctagcccacctcccacccgcctcttggctcctctcctctaggccgtcgctttcgggttctctcatcgcttcgtcgttcgccartgtttgaggagaaggccagcagtccttcagggaagatgggaggcgaggagaagccgattggtgctggtgaagagaagcaaaaggaaggaggcaaaaagaa

SEQ ID NO: 78034 - DNA, 201 bp, Homo sapiens
tggagcagattgaagatgaaataaaaggttgtttggattttctacgtacggtatatagcgtatttggattttcttttaaactaaacctttctactcgcccrgaaaaattccttggagatatcgaagtatgggatcaagctgagaaacaacttgaaaacagtctgaatgaatttggtgaaaagtgggagttaaactctggag

SEQ ID NO: 78035 - DNA, 114 bp, Homo sapiens
tttctatagagatggtttcatcatgttgcccaggctggtatcaaactcctggataaaagagacccacctgcctcagtctcccaaagtgctgggattacagktgtgagccaccac

SEQ ID NO: 78036 - DNA, 201 bp, Homo sapiens
ggctgctcgttccgccgcaagttgggggcggggttagggcgcctttcgattgcatcagctggtccagccgaggccaagtcccgggcgctagcccacctccsacccgcctcttggctcctctcctctaggccgtcgctttcgggttctctcatcgcttcgtcgttcgccaatgtttgaggagaaggccagcagtccttcagg

SEQ ID NO: 78037 - DNA, 201 bp, Homo sapiens
aaaaattccttggagatatcgaagtatgggatcaagctgagaaacaacttgaaaacagtctgaatgaatttggtgaaaagtgggagttaaactctggagayggagctttctatggcccaaagattgacatacagattaaagatgcgattgggcggtaccaccagtgtgcaaccatccagctggatttccagttgcccatca

SEQ ID NO: 78038 - DNA, 201 bp, Homo sapiens
tcattttagttgttggtgaaaaagagaaaatcagtggcactgttaatatccgcacaagagacaataaggtccacggggaacgcaccatttctgaaactatsgagcggctacagcagctcaaagagttccgcagcaaacaggcagaagaagaattttaatgaaaaaattacccagattggctccatggaaaaggaggaacag

SEQ ID NO: 78039 - DNA, 201 bp, Homo sapiens
cgtcgctttcgggttctctcatcgcttcgtcgttcgccaatgtttgaggagaaggccagcagtccttcagggaagatgggaggcgaggagaagccgattgrtgctggtgaagagaagcaaaaggaaggaggcaaaaagaagaacaaagaaggatctggagatggaggtcgagctgagttgaatccttggcctgaatatatt

SEQ ID NO: 78040 - DNA, 201 bp, Homo sapiens; identical to SEQ ID NO: 78027

SEQ ID NO: 78041 - DNA, 201 bp, Homo sapiens; identical to SEQ ID NO: 78028

SEQ ID NO: 78042 - DNA, 201 bp, Homo sapiens; identical to SEQ ID NO: 78029

SEQ ID NO: 78043 - DNA, 201 bp, Homo sapiens; identical to SEQ ID NO: 78030

SEQ ID NO: 78044 - DNA, 201 bp, Homo sapiens; identical to SEQ ID NO: 78031

SEQ ID NO: 78045 - DNA, 201 bp, Homo sapiens; identical to SEQ ID NO: 78032

SEQ ID NO: 78046 - DNA, 201 bp, Homo sapiens; identical to SEQ ID NO: 78033

SEQ ID NO: 78047 - DNA, 201 bp, Homo sapiens; identical to SEQ ID NO: 78034

SEQ ID NO: 78048 - DNA, 114 bp, Homo sapiens; identical to SEQ ID NO: 78035

SEQ ID NO: 78049 - DNA, 201 bp, Homo sapiens; identical to SEQ ID NO: 78036

SEQ ID NO: 78050 - DNA, 201 bp, Homo sapiens; identical to SEQ ID NO: 78037

SEQ ID NO: 78051 - DNA, 201 bp, Homo sapiens; identical to SEQ ID NO: 78038

SEQ ID NO: 78052 - DNA, 201 bp, Homo sapiens
gaaggtggttgtgttcatcaagcccacctgcccgtactgcaggagggcccaagagatcctcagtcaattgcccatcaaacaagggcttctggaatttgtckatatcacagccaccaaccacactaacgagattcaagattatttgcaacagctcacgggagcaagaacggtgagtttcattttaaacggctagggaaaggc

SEQ ID NO: 78053 - DNA, 201 bp, Homo sapiens
gccagtgtttttcaactatgtttatccagactccttctccacaatgatgaatccacagttggttatctgctactgcccattagctaaaatcattttgctgyttgactttatggagtttgtattatgaaatcagtgggtattttgaatgtgttctttctaactacatgcatctctccactcaactccaccccatcccatccc

SEQ ID NO: 78054 - DNA, 201 bp, Homo sapiens
cacttgaatgagcggcggcactgcagccaaaggtcttcacggggcagaagagggagtacagctgatgtctgctgtgcggcagggtgcctcgagtctttatyggtaaagattgtataggcggatgcagtgatctagtctctttgcaacagagtggggaactgctgacgcggctaaagcagattggagctctgcagtaaccac

SEQ ID NO: 78055 - DNA, 199 bp, Homo sapiens
taagattgttaatttccttcaatctctagtgacaacacttaatttcttttctaataaaaaaaacctatagatgattcagtgatttttgtccaattcatttscatgttctcaagacattaaggaatgttatgcgaaatacactaacttaaaactgtgtttatatttggccctgccattataaataaagacacgtgctgct

SEQ ID NO: 78056 - DNA, 201 bp, Homo sapiens
gtgaaaggtcacaggacccaattggagaaatcatatgaaaagcatagttggtcttggtgtcatatggatcagaggcacaagtgcagaggctgtggtcatgyggaacactctgttatttaagatggctatccagataatcctgaacactgtgtatttattttatttagactaccagcaaagattaaagcatgaaatgtaaaa

SEQ ID NO: 78057 - DNA, 201 bp, Homo sapiens
gtatttattttatttagactaccagcaaagattaaagcatgaaatgtaaaacatctgataaaacttacagccccctacaccaagagtgtatctgtgaaagrgctcctacactttgaaaacttaagaatcccttatcatgaagtttgcctgttctagaattgtaagattgttaatttccttcaatctctagtgacaacactt

SEQ ID NO: 78058 - DNA, 201 bp, Homo sapiens
gcttttttcctcttttggctcagtatttaaaagtggaccaacttgctcttaatcacagggccaagaaggttgacgggccatcttggttttcttctggatgwgctctttggttttcagaagactgtgacaagttctggcccaggattcgctcactgaccctcaattgtcctctttggcatgcgtttcttactgttctccatg

SEQ ID NO: 78059 - DNA, 201 bp, Homo sapiens
agtttgtattatgaaatcagtgggtattttgaatgtgttctttctaactacatgcatctctccactcaactccaccccatcccatcccaccttgaaaatcrctgctctgaaccagtgttctccaccttgtcctccacagatctcataggaaatgttcaacaattctgtgaaaggtcacaggacccaattggagaaatcata

SEQ ID NO: 78060 - DNA, 201 bp, Homo sapiens
tctttctaactacatgcatctctccactcaactccaccccatcccatcccaccttgaaaatcactgctctgaaccagtgttctccaccttgtcctccacasatctcataggaaatgttcaacaattctgtgaaaggtcacaggacccaattggagaaatcatatgaaaagcatagttggtcttggtgtcatatggatcaga

SEQ ID NO: 78061 - DNA, 201 bp, Homo sapiens
gttcatcaagcccacctgcccgtactgcaggagggcccaagagatcctcagtcaattgcccatcaaacaagggcttctggaatttgtcgatatcacagccrccaaccacactaacgagattcaagattatttgcaacagctcacgggagcaagaacggtgagtttcattttaaacggctagggaaaggctcccggattgcc

SEQ ID NO: 78062 - DNA, 201 bp, Homo sapiens
gaaggtggttgtgttcatcaagcccacctgcccgtactgcaggagggcccaagagatcctcagtcaattgcccatcaaacaagggcttctggaatttgtckatatcacagccaccaaccacactaacgagattcaagattatttgcaacagctcacgggagcaagaacggtgcctcgagtctttatcggtaaagattgtat

SEQ ID NO: 78063 - DNA, 201 bp, Homo sapiens
ttctggaatttgtcgatatcacagccaccaaccacactaacgagattcaagattatttgcaacagctcacgggagcaagaacggtgcctcgagtctttatyggtaaagattgtataggcggatgcagtgatctagtctctttgcaacagagtggggaactgctgacgcggctaaagcagattggagctctgcagtaaccac

SEQ ID NO: 78064 - DNA, 201 bp, Homo sapiens; identical to SEQ ID NO: 78057

SEQ ID NO: 78065 - DNA, 199 bp, Homo sapiens; identical to SEQ ID NO: 78055

SEQ ID NO: 78066 - DNA, 201 bp, Homo sapiens
gttcatcaagcccacctgcccgtactgcaggagggcccaagagatcctcagtcaattgcccatcaaacaagggcttctggaatttgtcgatatcacagccrccaaccacactaacgagattcaagattatttgcaacagctcacgggagcaagaacggtgcctcgagtctttatcggtaaagattgtataggcggatgcag

SEQ ID NO: 78067 - DNA, 201 bp, Homo sapiens; identical to SEQ ID NO: 78056

SEQ ID NO: 78068 - DNA, 101 bp, Homo sapiens
ttccatgttctcaagacattaaggaatgttatgcgaaatacactaacttaaaactgtgtttatatttggccctgccattataaataaagacacgtgctgcs

SEQ ID NO: 78069 - DNA, 201 bp, Homo sapiens; identical to SEQ ID NO: 78062

SEQ ID NO: 78070 - DNA, 201 bp, Homo sapiens; identical to SEQ ID NO: 78053

SEQ ID NO: 78071 - DNA, 201 bp, Homo sapiens; identical to SEQ ID NO: 78063

SEQ ID NO: 78072 - DNA, 199 bp, Homo sapiens; identical to SEQ ID NO: 78055

SEQ ID NO: 78073 - DNA, 201 bp, Homo sapiens; identical to SEQ ID NO: 78056

SEQ ID NO: 78074 - DNA, 201 bp, Homo sapiens; identical to SEQ ID NO: 78057

SEQ ID NO: 78075 - DNA, 201 bp, Homo sapiens; identical to SEQ ID NO: 78058

SEQ ID NO: 78076 - DNA, 201 bp, Homo sapiens; identical to SEQ ID NO: 78059

SEQ ID NO: 78077 - DNA, 201 bp, Homo sapiens; identical to SEQ ID NO: 78060

SEQ ID NO: 78078 - DNA, 201 bp, Homo sapiens; identical to SEQ ID NO: 78066

SEQ ID NO: 78079 - DNA, 201 bp, Homo sapiens
gtgaaatttttaaatccctttgacaagttggacaagctcatgcatagcacacaacttgaaaactcttctggcgtaaaaacattctcgagttaataatgttwccccttataacagaaaggaagtcctgtcctgtgagcatatacataaggaggttttaaagtgatttgaaaagtttggaatcacgggaaatatttagtggta

SEQ ID NO: 78080 - DNA, 201 bp, Homo sapiens
cacgggaaatatttagtggtaggatagaaatgttctgtctaatctagtaatgtagtaatgtcctgggtcgtgtgcttttttaggtgcctcgagtctttatyggtaaagattgtataggcggatgcagtgatctagtctctttgcaacagagtggggaactgctgacgcggctaaagcagattggagctctgcagtaaccac

SEQ ID NO: 78081 - DNA, 201 bp, Homo sapiens
cgtaaaaacattctcgagttaataatgttaccccttataacagaaaggaagtcctgtcctgtgagcatatacataaggaggttttaaagtgatttgaaaastttggaatcacgggaaatatttagtggtaggatagaaatgttctgtctaatctagtaatgtagtaatgtcctgggtcgtgtgcttttttaggtgcctcga

SEQ ID NO: 78082 - DNA, 201 bp, Homo sapiens; identical to SEQ ID NO: 78057

SEQ ID NO: 78083 - DNA, 199 bp, Homo sapiens; identical to SEQ ID NO: 78055

SEQ ID NO: 78084 - DNA, 201 bp, Homo sapiens; identical to SEQ ID NO: 78056

SEQ ID NO: 78085 - DNA, 201 bp, Homo sapiens
acgcggctaaagcagattggagctctgcagtaaccacagatctcataggaaatgttcaacaattctgtgaaaggtcacaggacccaattggagaaatcatstgaaaagcatagttggtcttggtgtcatatggatcagaggcacaagtgcagaggctgtggtcatgcggaacactctgttatttaagatggctatccagat

SEQ ID NO: 78086 - DNA, 201 bp, Homo sapiens
gtatatatagcttacatttgtggatcactacatagccagattcaaaaatattttacttgttccatccacagttctctacagaaagaaccaatgaacccaayaggaacaaattctctgtggaaaacaaagcatagctgtagtagatacgaatccaatcacagaggaaacaggaagagaaaaacatccaagactacagtgaaa

SEQ ID NO: 78087 - DNA, 201 bp, Homo sapiens
atataccatcacctgttttggaatcattttcaaataaaactccccctcacaccacccaactggaagtcattcctgatgtgctgtgagcagaatgggcctgygattttgcaagaatgcaaaaccacatgaaaatttcaagaattcactgatctgatgcaaaataaaaatttatcattacatcttgaacccaggaagcttaca

SEQ ID NO: 78088 - DNA, 201 bp, Homo sapiens
cttcaatccttttcctggaggatatgactatttggttgactttttagatttatccttcccaaaagaaagaccacaacgagaacatccctatgaggaaatcyatagccgggtggatgtcatcagacacgtggtgaagaatggtctactctgggatgagttgtatataggattccaaacacggctccagcgggatcctgacat

SEQ ID NO: 78089 - DNA, 201 bp, Homo sapiens
aaatggatgaaaacaacggacttttgcttttagaactgaatcctcctaacccttgggacttacagcccagatctcctgaagagttggcttttggagaagtrcagataacatatctcactcatgcctgcatggacctcaagttaggagacaagagaatggtgtttgacccttggttaatcggtcctgcttttgcccgtggat

SEQ ID NO: 78090 - DNA, 201 bp, Homo sapiens
atctgaatcagagcggtgtccagttgactaatatcaatgtcgtgccatttggaatatggcagcaggtggacaaaaatcttcgattcatgatcttgatggayggtgttcatcctgagatggacacttgcattattgtggagtacaaaggtcataaaatactcaatatagtagactgcaccagacccaatgggggaaggctgc

SEQ ID NO: 78091 - DNA, 201 bp, Homo sapiens
gcatgcaagaatatgtgcaagcaccaaggaggcctgttcataaaagatatcgaggatttagccggaagttgttgaaatggatgaaaacaacggacttttgmttttagaactgaatcctcctaacccttgggacttacagcccagatctcctgaagagttggcttttggagaagtacagataacatatctcactcatgcctg

SEQ ID NO: 78092 - DNA, 201 bp, Homo sapiens
tacaagaataagagccgactgagggcatgcaagaatatgtgcaagcaccaaggaggcctgttcataaaagatatcgaggatttagccggaagttgttgaartggatgaaaacaacggacttttgcttttagaactgaatcctcctaacccttgggacttacagcccagatctcctgaagagttggcttttggagaagtaca

SEQ ID NO: 78093 - DNA, 201 bp, Homo sapiens
gtttgacccttggttaatcggtcctgcttttgcccgtggatggtggttgctccatgagcctccatctgattggctggagaggctgtgccaggcagacctcrtttacatcagtcatctgcactcagaccacctgagttaccccacactgaaaaagcttgctgggagaagaccagatattcccatttatgttggaaacacaga

SEQ ID NO: 78094 - DNA, 201 bp, Homo sapiens
ttttgctggaggagcatcaggctttccaatgactttcagtggtggaaaatttacggaggaatggaaagcccaattcattaaaacagaaaggaagaagctcytgaactacaaggctcggctggtgaagaacctgcaaccccgaatttattgtccctttgctgggtattttgtggaatctcacccatcagacaagtacatcaa

SEQ ID NO: 78095 - DNA, 201 bp, Homo sapiens
atatttcttcactcatcctggataaaagaatacttcacttgggctggatttaaagattacaaccttgtggtcaggatgattgagacagatgaggacttcartccttttcctggaggatatgactatttggttgactttttagatttatccttcccaaaagaaagaccacaacgagaacatccctatgaggaaatccatagc

SEQ ID NO: 78096 - DNA, 201 bp, Homo sapiens
tctgaagatacaagaattcaatggtggaatttgtctcctgaaatttctagattcataattagaagtgtttattaccaacttctcacttagattaacatcartgatgtttgattattctggttaaccgctcacatgcataacaataatgctagaaattcaggaattataattttgtgatttatactgtgtggtaaattattc

SEQ ID NO: 78097 - DNA, 201 bp, Homo sapiens
cggtcctgcttttgcccgtggatggtggttgctccatgagcctccatctgattggctggagaggctgtgccaggcagacctcatttacatcagtcatctgmactcagaccacctgagttaccccacactgaaaaagcttgctgggagaagaccagatattcccatttatgttggaaacacagaaaggcctgtattttggaa

SEQ ID NO: 78098 - DNA, 201 bp, Homo sapiens
ttggcttttggagaagtacagataacatatctcactcatgcctgcatggacctcaagttaggagacaagagaatggtgtttgacccttggttaatcggtcytgcttttgcccgtggatggtggttgctccatgagcctccatctgattggctggagaggctgtgccaggcagacctcatttacatcagtcatctgcactca

SEQ ID NO: 78099 - DNA, 147 bp, Homo sapiens
gtctacaccagcggtgtcgctgcccgaaagtgagagaaggctgataytgctagctggaatccaggcctgggtgctgcatggtggcgcccctccccgtgaccaccgctgcgttttctcgggctttctctggggagctgctcttgtgct

SEQ ID NO: 78100 - DNA, 201 bp, Homo sapiens
ccaaatgaactcaacaatcttatcaagaaaaactctgatgtgataacatggacccctcgaccgggagccacccttgatctgggaagaatgctgaaggatcsaacagacagcaagggcatcatagagcctccagaggggacaaaaatttacaaggattcctgggattttgaaccttatttggaaatcttgaatgctgctcta

SEQ ID NO: 78101 - DNA, 201 bp, Homo sapiens
atcaggctttccaatgactttcagtggtggaaaatttacggaggaatggaaagcccaattcattaaaacagaaaggaagaagctcctgaactacaaggctyggctggtgaagaacctgcaaccccgaatttattgtccctttgctgggtattttgtggaatctcacccatcagacaagtacatcaaggaaacaaacaccaa

SEQ ID NO: 78102 - DNA, 201 bp, Homo sapiens
atgacgtcagcaatagataattccacgttgcctttgtgatttgtatatatagcttacatttgtggatcactacatagccagattcaaaaatattttacttsttccatccacagttctctacagaaagaaccaatgaacccaataggaacaaattctctgtggaaaacaaagcatagctgtagtagatacgaatccaatcac

SEQ ID NO: 78103 - DNA, 201 bp, Homo sapiens
gtggacaaaaatcttcgattcatgatcttgatggacggtgttcatcctgagatggacacttgcattattgtggagtacaaaggtcataaaatactcaatayagtagactgcaccagacccaatgggggaaggctgcctatgaaggttgctctaatgatgagtgattttgctggaggagcatcaggctttccaatgactttc

SEQ ID NO: 78104 - DNA, 201 bp, Homo sapiens
tgttttggaatcattttcaaataaaactccccctcacaccacccaactggaagtcattcctgatgtgctgtgagcagaatgggcctgcgattttgcaagartgcaaaaccacatgaaaatttcaagaattcactgatctgatgcaaaataaaaatttatcattacatcttgaacccaggaagcttacagcaaagagactat

SEQ ID NO: 78105 - DNA, 201 bp, Homo sapiens
acccaggaagcttacagcaaagagactatgctttatgacgtcagcaatagataattccacgttgcctttgtgatttgtatatatagcttacatttgtggaycactacatagccagattcaaaaatattttacttgttccatccacagttctctacagaaagaaccaatgaacccaataggaacaaattctctgtggaaaac

SEQ ID NO: 78106 - DNA, 201 bp, Homo sapiens; identical to SEQ ID NO: 78086

SEQ ID NO: 78107 - DNA, 201 bp, Homo sapiens; identical to SEQ ID NO: 78087

SEQ ID NO: 78108 - DNA, 201 bp, Homo sapiens; identical to SEQ ID NO: 78088

SEQ ID NO: 78109 - DNA, 201 bp, Homo sapiens; identical to SEQ ID NO: 78089

SEQ ID NO: 78110 - DNA, 201 bp, Homo sapiens; identical to SEQ ID NO: 78090

SEQ ID NO: 78111 - DNA, 201 bp, Homo sapiens; identical to SEQ ID NO: 78091

SEQ ID NO: 78112 - DNA, 201 bp, Homo sapiens; identical to SEQ ID NO: 78092

SEQ ID NO: 78113 - DNA, 201 bp, Homo sapiens; identical to SEQ ID NO: 78093

SEQ ID NO: 78114 - DNA, 201 bp, Homo sapiens; identical to SEQ ID NO: 78094

SEQ ID NO: 78115 - DNA, 201 bp, Homo sapiens; identical to SEQ ID NO: 78095

SEQ ID NO: 78116 - DNA, 201 bp, Homo sapiens; identical to SEQ ID NO: 78096

SEQ ID NO: 78117 - DNA, 201 bp, Homo sapiens; identical to SEQ ID NO: 78097

SEQ ID NO: 78118 - DNA, 201 bp, Homo sapiens; identical to SEQ ID NO: 78098

SEQ ID NO: 78119 - DNA, 201 bp, Homo sapiens; identical to SEQ ID NO: 78100

SEQ ID NO: 78120 - DNA, 201 bp, Homo sapiens; identical to SEQ ID NO: 78101

SEQ ID NO: 78121 - DNA, 201 bp, Homo sapiens; identical to SEQ ID NO: 78102

SEQ ID NO: 78122 - DNA, 201 bp, Homo sapiens; identical to SEQ ID NO: 78103

SEQ ID NO: 78123 - DNA, 201 bp, Homo sapiens; identical to SEQ ID NO: 78104

SEQ ID NO: 78124 - DNA, 201 bp, Homo sapiens; identical to SEQ ID NO: 78105

SEQ ID NO: 78125 - DNA, 201 bp, Homo sapiens; identical to SEQ ID NO: 78086

SEQ ID NO: 78126 - DNA, 201 bp, Homo sapiens; identical to SEQ ID NO: 78087

SEQ ID NO: 78127 - DNA, 201 bp, Homo sapiens; identical to SEQ ID NO: 78088

SEQ ID NO: 78128 - DNA, 201 bp, Homo sapiens; identical to SEQ ID NO: 78089

SEQ ID NO: 78129 - DNA, 201 bp, Homo sapiens; identical to SEQ ID NO: 78090

SEQ ID NO: 78130 - DNA, 201 bp, Homo sapiens; identical to SEQ ID NO: 78091

SEQ ID NO: 78131 - DNA, 201 bp, Homo sapiens; identical to SEQ ID NO: 78092

SEQ ID NO: 78132 - DNA, 201 bp, Homo sapiens; identical to SEQ ID NO: 78093

SEQ ID NO: 78133 - DNA, 201 bp, Homo sapiens; identical to SEQ ID NO: 78094

SEQ ID NO: 78134 - DNA, 201 bp, Homo sapiens; identical to SEQ ID NO: 78095

SEQ ID NO: 78135 - DNA, 201 bp, Homo sapiens; identical to SEQ ID NO: 78096

SEQ ID NO: 78136 - DNA, 201 bp, Homo sapiens; identical to SEQ ID NO: 78097

SEQ ID NO: 78137 - DNA, 201 bp, Homo sapiens; identical to SEQ ID NO: 78098

SEQ ID NO: 78138 - DNA, 201 bp, Homo sapiens; identical to SEQ ID NO: 78100

SEQ ID NO: 78139 - DNA, 201 bp, Homo sapiens; identical to SEQ ID NO: 78101

SEQ ID NO: 78140 - DNA, 201 bp, Homo sapiens; identical to SEQ ID NO: 78102

SEQ ID NO: 78141 - DNA, 201 bp, Homo sapiens; identical to SEQ ID NO: 78103

SEQ ID NO: 78142 - DNA, 201 bp, Homo sapiens; identical to SEQ ID NO: 78104

SEQ ID NO: 78143 - DNA, 201 bp, Homo sapiens; identical to SEQ ID NO: 78105

SEQ ID NO: 78144 - DNA, 201 bp, Homo sapiens
ctggtgtcttgaaatccgagcaattcctaaaaaggcatttttgcgagcccttgtggactataccagtgacagtgctgaaaagcgcaggctacaggagctgygcagtaaacaaggggcagccgattatagccgctttgtacgagatgcctgtgcctgcttgttggatctcctcctcgctttcccttcttgccagccaccact

SEQ ID NO: 78145 - DNA, 201 bp, Homo sapiens
ttcgtgtgcaagctcaagtttatttcacccaggaaagctccattttgtcttcaacattgtggaatttctgtctactgccacaacagaggttctgcggaagrgagtatgtacaggctggctggccttgttggttgcttcagttcttcagccaaacatacatgcatcccatgaagacagcgggaaagccctggctcctaagat

SEQ ID NO: 78146 - DNA, 201 bp, Homo sapiens
attgcctacagagggatttatttttatgatgctggaaatatgaaatgtattttaaaatttcactctggcatatgatttatctatcaccattactttttttwaagtcacaatttcagaattttgggacatttgcattcaatttacaggtaccagtacgtacatattttaatagaaagatacaacctttttattttcactcct

SEQ ID NO: 78147 - DNA, 201 bp, Homo sapiens
gaatgctcatattaatgtacttaaattacacatgtagagcatatctgttatatgtttatgtaactatcaaatggttatttgttactaaagctatatttctrataaaaaatattttaggataattgcctacagagggatttatttttatgatgctggaaatatgaaatgtattttaaaatttcactctggcatatgatttat

SEQ ID NO: 78148 - DNA, 201 bp, Homo sapiens
caaaggcttcctgaaatagggagactgactgagtagctcattcttgtgacttacagtgccaacatttaaaaaagtatgaaaatgatttatttttatatgaygtatacccataaagaatgctcatattaatgtacttaaattacacatgtagagcatatctgttatatgtttatgtaactatcaaatggttatttgttacta

SEQ ID NO: 78149 - DNA, 201 bp, Homo sapiens
catttcaaatacagacttttcctatcagcctggagatgccttcagcgtgatctgccctaacagtgattctgaggtacaaagcctactccaaagactgcagsttgaagataaaagagagcactgcgtccttttgaaaataaaggcagacacaaggaagaaaggagctaccttaccccagcatatacctgcgggatgttctct

SEQ ID NO: 78150 - DNA, 201 bp, Homo sapiens
aaggagctaccttaccccagcatatacctgcgggatgttctctccagttcatttttacctggtgtcttgaaatccgagcaattcctaaaaaggcatttttrcgagcccttgtggactataccagtgacagtgctgaaaagcgcaggctacaggagctgtgcagtaaacaaggggcagccgattatagccgctttgtacgag

SEQ ID NO: 78151 - DNA, 201 bp, Homo sapiens
aaaggcatttttgcgagcccttgtggactataccagtgacagtgctgaaaagcgcaggctacaggagctgtgcagtaaacaaggggcagccgattatagcygctttgtacgagatgcctgtgcctgcttgttggatctcctcctcgctttcccttcttgccagccaccactcagtctcctgctcgaacatcttcctaaact

SEQ ID NO: 78152 - DNA, 201 bp, Homo sapiens
atctaaaggtttccttctcaagagatgctcctgttggggaggaggaagccccagcaaagtatgtgcaagacaacatccagcttcatggccagcaggtggcragaatcctcctccaggagaacggccatatttatgtgtgtggagatgcaaagaatatggccaaggatgtacatgatgcccttgtgcaaataataagcaaag

SEQ ID NO: 78153 - DNA, 201 bp, Homo sapiens
agctcagacatttccttaagcatgggatcttaactcatctaaaggtttccttctcaagagatgctcctgttggggaggaggaagccccagcaaagtatgtrcaagacaacatccagcttcatggccagcaggtggcgagaatcctcctccaggagaacggccatatttatgtgtgtggagatgcaaagaatatggccaagg

SEQ ID NO: 78154 - DNA, 201 bp, Homo sapiens
ggttcctacaacatagagagaaactccaagaacaacacccagatggaaattttggagcaatgtggttgttttttggctgcaggcataaggatagggattayctattcagaaaagagctcagacatttccttaagcatgggatcttaactcatctaaaggtttccttctcaagagatgctcctgttggggaggaggaagccc

SEQ ID NO: 78155 - DNA, 201 bp, Homo sapiens
tgccctaacagtgattctgaggtacaaagcctactccaaagactgcagcttgaagataaaagagagcactgcgtccttttgaaaataaaggcagacacaargaagaaaggagctaccttaccccagcatatacctgcgggatgttctctccagttcatttttacctggtgtcttgaaatccgagcaattcctaaaaaggca

SEQ ID NO: 78156 - DNA, 201 bp, Homo sapiens
acagtgccaacatttaaaaaagtatgaaaatgatttatttttatatgatgtatacccataaagaatgctcatattaatgtacttaaattacacatgtagakcatatctgttatatgtttatgtaactatcaaatggttatttgttactaaagctatatttctgataaaaaatattttaggataattgcctacagagggatt

SEQ ID NO: 78157 - DNA, 201 bp, Homo sapiens
tctggccagccctcagaaagcattttaggtcaagcagaggacaagaggagataagtggcgcactcccggtggcatcacctgcatcctcgaggacagacctygtgaagtcagagctgctacacattgaatctcaagtcgagcttctgagattcgatgattcaggaagaaaggattctgaggttttgaagcaaaatgcagtga

SEQ ID NO: 78158 - DNA, 201 bp, Homo sapiens
actccaagaacaacacccagatggaaattttggagcaatgtggttgttttttggctgcaggcataaggatagggattatctattcagaaaagagctcagayatttccttaagcatgggatcttaactcatctaaaggtttccttctcaagagatgctcctgttggggaggaggaagccccagcaaagtatgtgcaagacaa

SEQ ID NO: 78159 - DNA, 201 bp, Homo sapiens
tggattgctggactctggccagccctcagaaagcattttaggtcaagcagaggacaagaggagataagtggcgcactcccggtggcatcacctgcatcctygaggacagaccttgtgaagtcagagctgctacacattgaatctcaagtcgagcttctgagattcgatgattcaggaagaaaggattctgaggttttgaag

SEQ ID NO: 78160 - DNA, 201 bp, Homo sapiens
ctttgagtcctcacttacccgttcggtacccccactctcacaagcctctctgaatattcctggtttacccccagaatatttacaggtacatctgcaggagwctcttggccaggaggaaagccaagtatctgtgacttcagcagatccagtttttcaagtgccaatttcaaaggcagttcaacttactacgaatgatgccat

SEQ ID NO: 78161 - DNA, 201 bp, Homo sapiens
tctcggtgattcagaatacacctacttttgcaatggggggaagataattgataaacgacttcaagagcttggagcccggcatttctatgacactggacatrcagatgactgtgtaggtttagaacttgtggttgagccgtggattgctggactctggccagccctcagaaagcattttaggtcaagcagaggacaagagga

SEQ ID NO: 78162 - DNA, 201 bp, Homo sapiens
gcctcctttacttcccagagaacttcacagagactctgtccttccatgcaaaggcttcctgaaatagggagactgactgagtagctcattcttgtgacttrcagtgccaacatttaaaaaagtatgaaaatgatttatttttatatgatgtatacccataaagaatgctcatattaatgtacttaaattacacatgtagag

SEQ ID NO: 78163 - DNA, 201 bp, Homo sapiens
atccatctctcctcgaacaacaaattctttccacttaccagatgacccctcaatccccatcataatggtgggtccaggaaccggcatagccccgtttattrggttcctacaacatagagagaaactccaagaacaacacccagatggaaattttggagcaatgtggttgttttttggctgcaggcataaggatagggatta

SEQ ID NO: 78164 - DNA, 201 bp, Homo sapiens
aagtcagctttactagtgccaaacctttaaattttcaaaagaaaattttctttcaacatttcttgaaggacatggagtggagattggatcatttaacaatrtaacaaaacttcctgatttgattttacgtatcttctatctacgcccttcctgtgcctgtgactctccccaaattgccctgttgccttgagctcttctgag

SEQ ID NO: 78165 - DNA, 201 bp, Homo sapiens
agaagaaaaacgctaccttcaggatatttggtcataaaaccagaaattaaagaaagaggattaagcttttttgactgaaagtactaaaagtcagctttacyagtgccaaacctttaaattttcaaaagaaaattttctttcaacatttcttgaaggacatggagtggagattggatcatttaacaatataacaaaacttcc

SEQ ID NO: 78166 - DNA, 201 bp, Homo sapiens
cgcggcgtggtttcactgttacatgccttgaagtgatgaggaggtttctgttactatatgctacacagcagggacaggcaaaggccatcgcagaagaaatrtgtgagcaagctgtggtacatggattttctgcagatcttcactgtattagtgaatccgataagtatgacctaaaaaccgaaacagctcctcttgttgttg

SEQ ID NO: 78167 - DNA, 201 bp, Homo sapiens
gagacccacccgacacagcccgcaagtttgttaaggaaatacagaaccaaacactgccggttgatttctttgctcacctgcggtatgggttactgggtctyggtgattcagaatacacctacttttgcaatggggggaagataattgataaacgacttcaagagcttggagcccggcatttctatgacactggacatgcag

SEQ ID NO: 78168 - DNA, 201 bp, Homo sapiens
tttaatagaaagatacaacctttttattttcactccttttatttctgctgcttggcacatttttgagttttcccacattatttgtctccatgataccactcaagcagtgtgctggacctaaaatactgactttagttagtatccttggatttttagattcccagtgtctaattccctgttataatttgcacaaacaaaaca

SEQ ID NO: 78169 - DNA, 201 bp, Homo sapiens
cctggccactttaaaagaagaaaaacgctaccttcaggatatttggtcataaaaccagaaattaaagaaagaggattaagcttttttgactgaaagtactraaagtcagctttactagtgccaaacctttaaattttcaaaagaaaattttctttcaacatttcttgaaggacatggagtggagattggatcatttaacaa

SEQ ID NO: 78170 - DNA, 201 bp, Homo sapiens
gtgcaagctcaagtttatttcacccaggaaagctccattttgtcttcaacattgtggaatttctgtctactgccacaacagaggttctgcggaagggagtrtgtacaggctggctggccttgttggttgcttcagttcttcagccaaacatacatgcatcccatgaagacagcgggaaagccctggctcctaagatatcca

SEQ ID NO: 78171 - DNA, 201 bp, Homo sapiens
ccacaacagaggttctgcggaagggagtatgtacaggctggctggccttgttggttgcttcagttcttcagccaaacatacatgcatcccatgaagacagygggaaagccctggctcctaagatatccatctctcctcgaacaacaaattctttccacttaccagatgacccctcaatccccatcataatggtgggtccag

SEQ ID NO: 78172 - DNA, 201 bp, Homo sapiens
gtgcccggctggcgcggcgtggtttcactgttacatgccttgaagtgatgaggaggtttctgttactatatgctacacagcagggacaggcaaaggccatygcagaagaaatatgtgagcaagctgtggtacatggattttctgcagatcttcactgtattagtgaatccgataagtatgacctaaaaaccgaaacagctc

SEQ ID NO: 78173 - DNA, 201 bp, Homo sapiens
actgccggttgatttctttgctcacctgcggtatgggttactgggtctcggtgattcagaatacacctacttttgcaatggggggaagataattgataaaygacttcaagagcttggagcccggcatttctatgacactggacatgcagatgactgtgtaggtttagaacttgtggttgagccgtggattgctggactctg

SEQ ID NO: 78174 - DNA, 201 bp, Homo sapiens; identical to SEQ ID NO: 78144

SEQ ID NO: 78175 - DNA, 201 bp, Homo sapiens; identical to SEQ ID NO: 78145

SEQ ID NO: 78176 - DNA, 119 bp, Homo sapiens
ggagctttctattggtccygggtaccgagcatgggcgctgcgtcagtgcgcgctggcgcaaggttggtggaagtcgcgttgtgcagtttcactgttacatgccttgaagtgatgaggag

SEQ ID NO: 78177 - DNA, 201 bp, Homo sapiens; identical to SEQ ID NO: 78146

SEQ ID NO: 78178 - DNA, 201 bp, Homo sapiens; identical to SEQ ID NO: 78147

SEQ ID NO: 78179 - DNA, 201 bp, Homo sapiens; identical to SEQ ID NO: 78148

SEQ ID NO: 78180 - DNA, 201 bp, Homo sapiens; identical to SEQ ID NO: 78149

SEQ ID NO: 78181 - DNA, 201 bp, Homo sapiens; identical to SEQ ID NO: 78150

SEQ ID NO: 78182 - DNA, 201 bp, Homo sapiens; identical to SEQ ID NO: 78151

SEQ ID NO: 78183 - DNA, 201 bp, Homo sapiens; identical to SEQ ID NO: 78152

SEQ ID NO: 78184 - DNA, 201 bp, Homo sapiens; identical to SEQ ID NO: 78153

SEQ ID NO: 78185 - DNA, 201 bp, Homo sapiens; identical to SEQ ID NO: 78154

SEQ ID NO: 78186 - DNA, 201 bp, Homo sapiens; identical to SEQ ID NO: 78155

SEQ ID NO: 78187 - DNA, 201 bp, Homo sapiens; identical to SEQ ID NO: 78156

SEQ ID NO: 78188 - DNA, 201 bp, Homo sapiens; identical to SEQ ID NO: 78157

SEQ ID NO: 78189 - DNA, 201 bp, Homo sapiens; identical to SEQ ID NO: 78158

SEQ ID NO: 78190 - DNA, 201 bp, Homo sapiens; identical to SEQ ID NO: 78159

SEQ ID NO: 78191 - DNA, 201 bp, Homo sapiens; identical to SEQ ID NO: 78160

SEQ ID NO: 78192 - DNA, 201 bp, Homo sapiens; identical to SEQ ID NO: 78161

SEQ ID NO: 78193 - DNA, 201 bp, Homo sapiens; identical to SEQ ID NO: 78162

SEQ ID NO: 78194 - DNA, 201 bp, Homo sapiens; identical to SEQ ID NO: 78163

SEQ ID NO: 78195 - DNA, 201 bp, Homo sapiens; identical to SEQ ID NO: 78164

SEQ ID NO: 78196 - DNA, 201 bp, Homo sapiens; identical to SEQ ID NO: 78165

SEQ ID NO: 78197 - DNA, 201 bp, Homo sapiens
cgttgtgcagtttcactgttacatgccttgaagtgatgaggaggtttctgttactatatgctacacagcagggacaggcaaaggccatcgcagaagaaatrtgtgagcaagctgtggtacatggattttctgcagatcttcactgtattagtgaatccgataagtatgacctaaaaaccgaaacagctcctcttgttgttg

SEQ ID NO: 78198 - DNA, 201 bp, Homo sapiens; identical to SEQ ID NO: 78167

SEQ ID NO: 78199 - DNA, 201 bp, Homo sapiens; identical to SEQ ID NO: 78168

SEQ ID NO: 78200 - DNA, 201 bp, Homo sapiens; identical to SEQ ID NO: 78169

SEQ ID NO: 78201 - DNA, 201 bp, Homo sapiens; identical to SEQ ID NO: 78170

SEQ ID NO: 78202 - DNA, 201 bp, Homo sapiens; identical to SEQ ID NO: 78171

SEQ ID NO: 78203 - DNA, 201 bp, Homo sapiens
tggtggaagtcgcgttgtgcagtttcactgttacatgccttgaagtgatgaggaggtttctgttactatatgctacacagcagggacaggcaaaggccatygcagaagaaatatgtgagcaagctgtggtacatggattttctgcagatcttcactgtattagtgaatccgataagtatgacctaaaaaccgaaacagctc

SEQ ID NO: 78204 - DNA, 201 bp, Homo sapiens; identical to SEQ ID NO: 78173

SEQ ID NO: 78205 - DNA, 201 bp, Homo sapiens
agagattgaatggtacgacctggcccagctgcccttcctgaccatgtgcgtgaaggagagcctgcggttgcatccccctgttccgtacacctcccgccacygcatctgggacattgtgctcccagatggtagggtctacaaccccttccgcttcaactcagagaacagcaaggagaggtcacctctggcttttattccctt

SEQ ID NO: 78206 - DNA, 201 bp, Homo sapiens
atgggaaaatgtccatagaatgggggctgatctgggtgcggttgaggatcccgggccaggtttccggcgtgatggggcccaaatgcggatcctgggcgcaktcacagtccccactcccacccgcaggaactgcatcgggcacgcgttcgccatggcgaagatgaaggtggtcctggcgctgacgctgctgcgcttccgctt

SEQ ID NO: 78207 - DNA, 201 bp, Homo sapiens
gtgtgaacatcatgcacgacaagtggcagcacctggcctcagagggcagcagtcgtctggacatgtttgagcacatcagcctcatgaccttggacagtctrcagaaatgcatcttcagctttgacagccattgtcaggagaggcccagtgaatatattgctaccatcttggagctcagtgcccttgtagaaaaaagaaacc

SEQ ID NO: 78208 - DNA, 201 bp, Homo sapiens
tttattcccttctctgcgggacccagtttatgggaaaatgtccatagaatgggggctgatctgggtgcggttgaggatcccgggccaggtttccggcgtgwtggggcccaaatgcggatcctgggcgcagtcacagtccccactcccacccgcaggaactgcatcgggcacgcgttcgccatggcgaagatgaaggtggtc

SEQ ID NO: 78209 - DNA, 185 bp, Homo sapiens
ccacccgcaggaactgcatcgggcacgcgttcgccatggcgaagatgaaggtggtcctggcgctgacgctgctgcgcttccgcttcctgctggaccacacsgagccccgcaggaagccggagctgatcatgcgcgctgaaggaggactttggctgcgagtggagcccctgaacgcgggcttgcag

SEQ ID NO: 78210 - DNA, 201 bp, Homo sapiens
atatattgctaccatcttggagctcagtgcccttgtagaaaaaagaaaccagcatatcctccagcacatggactttctgtattacctctcccatgacgggyggcgcttccgcagggcctgccgcctgactttggatttcattgatgtgcttctgctgagcaaggatgaagatgggaaggtgttgtcagatgaggatgtaag

SEQ ID NO: 78211 - DNA, 201 bp, Homo sapiens
ggagctcagtgcccttgtagaaaaaagaaaccagcatatcctccagcacatggactttctgtattacctctcccatgacgggcggcgcttccgcagggcckgccgcctgactttggatttcattgatgtgcttctgctgagcaaggatgaagatgggaaggtgttgtcagatgaggatgtaagagcagaggctgacacctt

SEQ ID NO: 78212 - DNA, 201 bp, Homo sapiens
tgggaaggtgttgtcagatgaggatgtaagagcagaggctgacaccttcatgtttgcaggccatgacaccacagccagtggtctctcctgggtcctgtacracctcgcgaggcacccagaataccaggagcactgccggcaggaggtgcaagagcttctgaaggaccgcgatcctaaagagattgaatggtacgacctggc

SEQ ID NO: 78213 - DNA, 201 bp, Homo sapiens
gtagggtctacaaccccttccgcttcaactcagagaacagcaaggagaggtcacctctggcttttattcccttctctgcgggacccagtttatgggaaaaygtccatagaatgggggctgatctgggtgcggttgaggatcccgggccaggtttccggcgtgatggggcccaaatgcggatcctgggcgcagtcacagtcc

SEQ ID NO: 78214 - DNA, 201 bp, Homo sapiens
ttgaggatcccgggccaggtttccggcgtgatggggcccaaatgcggatcctgggcgcagtcacagtccccactcccacccgcaggaactgcatcgggcasgcgttcgccatggcgaagatgaaggtggtcctggcgctgacgctgctgcgcttccgcttcctgctggaccacacggagccccgcaggaagccggagctga

SEQ ID NO: 78215 - DNA, 201 bp, Homo sapiens
tgggaaggtgttgtcagatgaggatgtaagagcagaggctgacaccttcatgtttgcaggccatgacaccacagccagtggtctctcctgggtcctgtacracctcgcgaggcacccagaataccaggagcactgccggcaggaggtgcaagagcttctgaaggaccgcgatcctaaagagattgaatggcattatctgca

SEQ ID NO: 78216 - DNA, 201 bp, Homo sapiens
gaaaccagcatatcctccagcacatggactttctgtattacctctcccatgacgggcggcgcttccgcagggcctgccgcctggtgcacgacttcacagaygccgtcatccaggagcggcgccatacccttcccactcagggtattgtgatttcctcaagaacaaagccaagtcctagactttggatttcattgatgtgct

SEQ ID NO: 78217 - DNA, 201 bp, Homo sapiens; identical to SEQ ID NO: 78207

SEQ ID NO: 78218 - DNA, 185 bp, Homo sapiens
cgggacccaggaactgcatcgggcacgcgttcgccatggcgaagatgaaggtggtcctggcgctgacgctgctgcgcttccgcttcctgctggaccacacsgagccccgcaggaagccggagctgatcatgcgcgctgaaggaggactttggctgcgagtggagcccctgaacgcgggcttgcag

SEQ ID NO: 78219 - DNA, 201 bp, Homo sapiens
atatattgctaccatcttggagctcagtgcccttgtagaaaaaagaaaccagcatatcctccagcacatggactttctgtattacctctcccatgacgggyggcgcttccgcagggcctgccgcctggtgcacgacttcacagacgccgtcatccaggagcggcgccatacccttcccactcagggtattgtgatttcctc

SEQ ID NO: 78220 - DNA, 201 bp, Homo sapiens
ggagctcagtgcccttgtagaaaaaagaaaccagcatatcctccagcacatggactttctgtattacctctcccatgacgggcggcgcttccgcagggcckgccgcctggtgcacgacttcacagacgccgtcatccaggagcggcgccatacccttcccactcagggtattgtgatttcctcaagaacaaagccaagtcc

SEQ ID NO: 78221 - DNA, 201 bp, Homo sapiens
aggtctacaaccccttccgcttcaactcagagaacagcaaggagaggtcacctctggcttttattcccttctctgcgggacccaggaactgcatcgggcasgcgttcgccatggcgaagatgaaggtggtcctggcgctgacgctgctgcgcttccgcttcctgctggaccacacggagccccgcaggaagccggagctga

SEQ ID NO: 78222 - DNA, 201 bp, Homo sapiens
aagaagaaaagaagtcggtcagttatccttctctccttagccacataacttcttctctcatgaatcatccagtcattccaatggcaaataagttctcctcrcctacccttgagctgcaaggtgaattctctccattacagtcatctttgccttgtgacattcatctggttaatttgagaacaatacagtcaaaggtgggca

SEQ ID NO: 78223 - DNA, 201 bp, Homo sapiens
ggaaaagtgcaatccatccacccttatgattaacgtagatgatttttatacctttttctgatgtacctcttgaccttctccttcccttcctaccctttctragtatttccagaaatacctgattttgaatcattcaacagtagaaaaagaggcatattttcattacttgacaatgtgggatgggtgcaatttattccatct

SEQ ID NO: 78224 - DNA, 201 bp, Homo sapiens
gtccctggggagtccccccagaaacaatacatcctggaaatgtccaaagcagggctcggatgctactagatcagtaccgaaagaagtcaaagctttttcgwaccaaagttctcctggctccactaggagatgatttccgctactgtgaatacacggaatgggatttacagtttaagaattatcagcagctttttgattata

SEQ ID NO: 78225 - DNA, 201 bp, Homo sapiens
atgaattgatgcaacaaatgaagaaatatttaaagacagcctctcaacagattgtatctcaggttaaatgctaactaattatgtctgtgttgggggttgcraagagattcttaaaagtatctgtgtgttgatcatcagttttacaaaaacacctatttggctgaaatggaataaaatgtttgtgggtaaaagctaatggcc

SEQ ID NO: 78226 - DNA, 201 bp, Homo sapiens
attctcagtccaagtttaaagttaagatacagtttggaactttatcagatttttttgatgcgctggataaagcagatgaaactcagagagacaagggccartcgatgttccctgttttaagtggagattttttcacttatgccgatcgagatgatcattactggagtggctattttacatccagacccttttacaaacgaa

SEQ ID NO: 78227 - DNA, 201 bp, Homo sapiens
ataccttcctggagatggatttgaaacaaaaatcacaagattctctgccacaaaaaaatataataaggctgagtgcggagccaaggtaccttgtggtctayaatcctttagaacaagaccgaatctcgttggtctcagtctatgtgagttccccgacagtgcaagtgttctctgcttcaggaaaacctgtggaagttcaag

SEQ ID NO: 78228 - DNA, 201 bp, Homo sapiens
ctcggatgctactagatcagtaccgaaagaagtcaaagctttttcgtaccaaagttctcctggctccactaggagatgatttccgctactgtgaatacacrgaatgggatttacagtttaagaattatcagcagctttttgattatatgaattctcagtccaagtttaaagttaagatacagtttggaactttatcagatt

SEQ ID NO: 78229 - DNA, 201 bp, Homo sapiens
ctgccctcgtcgagaaaacttttcctgccgactcagttggggcggcggtggcaggaagtgcgggcagcgacctctcctccgcctgccccgcgcgccctgcsggaggtcggcgctgagcttgcgatcaagtttgtgggggccccccttcccagttgccggcgagtctcgcctcgagaggggcgcccgaccccggggagggcg

SEQ ID NO: 78230 - DNA, 201 bp, Homo sapiens
cactgagcaaattgcctcttcaagcaaatgtctatcccatgaccacaatggcctatatccaggatgccaaacatcgtttgacactgctctctgctcagtcwttaggggtttcgagtttgaatagtggtcagattgaagttatcatggatcgaagactcatgcaagatgataatcgtggccttgagcaaggtatccaggata

SEQ ID NO: 78231 - DNA, 201 bp, Homo sapiens
attctctttgagataattgatttcatattctgtggctttcaacctccatttacctcttgtcattccaacatctttatagagaaataaaaacccaatttctytttcaccatttagtttgattatcatctggattttcactcaagatgcagctcctaagattattgttatgttaaattcataaactccttcacctttaataat

SEQ ID NO: 78232 - DNA, 201 bp, Homo sapiens
aaggattttgtaaaatgcaaaatccagctactgtttccatttcacagtagttaactatattaaagagagaatgctttaaaattgatcttgttttgaaaccyacttttatgtagctcatcatggtttatcttactaaggaatatgtttgttcattcagttctcaacttttgtatgtgctaaccttaaagtgaagttctgagc

SEQ ID NO: 78233 - DNA, 201 bp, Homo sapiens
tgtacagttttgaaaattctctttgagataattgatttcatattctgtggctttcaacctccatttacctcttgtcattccaacatctttatagagaaatraaaacccaatttctctttcaccatttagtttgattatcatctggattttcactcaagatgcagctcctaagattattgttatgttaaattcataaactcc

SEQ ID NO: 78234 - DNA, 201 bp, Homo sapiens
agtgaagttctgagcccatgtgccattacagtgcttttaataaaatttatttgggattattgtttccttaacattaaaataatagcgacatttagactatkcaattttagcatagaaaggagtctttgagtatgtacagttttgaaaattctctttgagataattgatttcatattctgtggctttcaacctccatttacc

SEQ ID NO: 78235 - DNA, 201 bp, Homo sapiens
ctcgcgatcttgttcctttcccctccgcttctctgacctagctgcgcggccccggcccgggagctgccgaacccgcgcctcccctgggtgaggaggacackcctgccctcgtcgagaaaacttttcctgccgactcagttggggcggcggtggcaggaagtgcgggcagcgacctctcctccgcctgccccgcgcgccctg

SEQ ID NO: 78236 - DNA, 201 bp, Homo sapiens
ggaatatgtttgttcattcagttctcaacttttgtatgtgctaaccttaaagtgaagttctgagcccatgtgccattacagtgcttttaataaaatttatwtgggattattgtttccttaacattaaaataatagcgacatttagactattcaattttagcatagaaaggagtctttgagtatgtacagttttgaaaattc

SEQ ID NO: 78237 - DNA, 201 bp, Homo sapiens
ttttatgtagctcatcatggtttatcttactaaggaatatgtttgttcattcagttctcaacttttgtatgtgctaaccttaaagtgaagttctgagcccrtgtgccattacagtgcttttaataaaatttatttgggattattgtttccttaacattaaaataatagcgacatttagactattcaattttagcatagaaa

SEQ ID NO: 78238 - DNA, 201 bp, Homo sapiens
cccggcactcagaatataagtgagatcaacttgagtccaatggaaatcagcacattccgaatccagttgaggtgaacctgactttcacatttggattgagratcattggcttttatacctttcttggtttgacgtgcaataaagaagcacattattttagcttctggctactgtgagaacatgaattctgtgattctgtgg

SEQ ID NO: 78239 - DNA, 201 bp, Homo sapiens
agggtttgattgtcggttctctagcaaaggcacagggctgttttgttctactactcagggaaagatattggtacagaaacttttaaacaagtttattgtcraaagtctcacaccttcatcactatccttgatgcattcacctcccggcactcagaatataagtgagatcaacttgagtccaatggaaatcagcacattccg

SEQ ID NO: 78240 - DNA, 201 bp, Homo sapiens
caagtttattgtcgaaagtctcacaccttcatcactatccttgatgcattcacctcccggcactcagaatataagtgagatcaacttgagtccaatggaartcagcacattccgaatccagttgaggtgaacctgactttcacatttggattgagaatcattggcttttatacctttcttggtttgacgtgcaataaagaa

SEQ ID NO: 78241 - DNA, 201 bp, Homo sapiens
tttgtatgtgctaaccttaaagtgaagttctgagcccatgtgccattacagtgcttttaataaaatttatttgggattattgtttccttaacattaaaatratagcgacatttagactattcaattttagcatagaaaggagtctttgagtatgtacagttttgaaaattctctttgagataattgatttcatattctgtg

SEQ ID NO: 78242 - DNA, 201 bp, Homo sapiens
gagagggtgggtactttctatgacacataaattgtgtaatttttgcctgacaatgctggccacattctgatctgtttcattaaatttgtggtgatgttacwctaaacattttgactatttgaatgtactgagatgtcagaaaacaaaacaaggaaggaaaatattgttaattaaaatgtgctgctgccaaggaaactgcaa

SEQ ID NO: 78243 - DNA, 201 bp, Homo sapiens; identical to SEQ ID NO: 78229

SEQ ID NO: 78244 - DNA, 201 bp, Homo sapiens; identical to SEQ ID NO: 78235

SEQ ID NO: 78245 - DNA, 201 bp, Homo sapiens
ctggtctgtcatcaatgcctcagccaccattgcaccaaaagacgaggccttctacaagttcctgaagccctggctgggggatgggctcctggtaaatgccrgtgacaagtggagctgccaccgtcagatgctgatgcccgccttccatttcaacatgctgaagccctatatgaagtttttcactgacagtgtgaatatcat

SEQ ID NO: 78246 - DNA, 201 bp, Homo sapiens
tgcctcagccaccattgcaccaaaagacgaggccttctacaagttcctgaagccctggctgggggatgggctcctggtaaatgccagtgacaagtggagcygccaccgtcagatgctgatgcccgccttccatttcaacatgctgaagccctatatgaagtttttcactgacagtgtgaatatcatgcacgccaagtggca

SEQ ID NO: 78247 - DNA, 201 bp, Homo sapiens
gccaccattgcaccaaaagacgaggccttctacaagttcctgaagccctggctgggggatgggctcctggtaaatgccagtgacaagtggagctgccaccrtcagatgctgatgcccgccttccatttcaacatgctgaagccctatatgaagtttttcactgacagtgtgaatatcatgcacgccaagtggcagctcctg

SEQ ID NO: 78248 - DNA, 201 bp, Homo sapiens
ccagtgacaagtggagctgccaccgtcagatgctgatgcccgccttccatttcaacatgctgaagccctatatgaagtttttcactgacagtgtgaatatsatgcacgccaagtggcagctcctggcctcagggggcagtgcccatctggacatgtttgagcacaccagcctcatgaccttggacagtgtgcagaaatgtg

SEQ ID NO: 78249 - DNA, 201 bp, Homo sapiens
gattccgccaaccaggccccaactggtccccacatgaaggagggcatgagagttctgactcagctggtggccacttacccccagggctttaagatctggaygaaccccattactcccatcatcaggttgtgccaccccaacatcatctggtctgtcatcaatgcctcagccaccattgcaccaaaagacgaggccttctac

SEQ ID NO: 78250 - DNA, 201 bp, Homo sapiens
gggcatgagagttctgactcagctggtggccacttacccccagggctttaagatctggatgaaccccattactcccatcatcaggttgtgccaccccaacrtcatctggtctgtcatcaatgcctcagccaccattgcaccaaaagacgaggccttctacaagttcctgaagccctggctgggggatgggctcctggtaaa

SEQ ID NO: 78251 - DNA, 201 bp, Homo sapiens
agacgaggccttctacaagttcctgaagccctggctgggggatgggctcctggtaaatgccagtgacaagtggagctgccaccgtcagatgctgatgcccrccttccatttcaacatgctgaagccctatatgaagtttttcactgacagtgtgaatatcatgcacgccaagtggcagctcctggcctcagggggcagtgc

SEQ ID NO: 78252 - DNA, 201 bp, Homo sapiens
gcgcttccgcagggcctgctgcctggttcatgacttcacagaagctatcatccaggagcagcgccacacccttactagccagggtgttgattatttccacsaagtaaaggccaagtccaagactttggacttcactgatgtactcctgctgagcaaggatgaagattggaaggagttgtctgatgaggaaataagagcaga

SEQ ID NO: 78253 - DNA, 201 bp, Homo sapiens
aagtttcagttatctaaaataaatatacacaaatatgaaatataatgtttcagattgcaaggtaatatgtaatagtagtgtttgtaagatactcttgtctratattaactagtagtattttgatttgtacagtcataatttgttaaaatgacttcatttaacattcactgatgtagattaataatgtaagttctgatttaa

SEQ ID NO: 78254 - DNA, 201 bp, Homo sapiens
attgtaatgacctctgaacagagaaacactgccattgaagaggcttctggtatagaaaacatggtacattcaggagctgtgaatatagctctaggtgtgcycctgaatcagttcatggtagattatgctgaacaacagtgagatgttattggaggtgtggatgagggagtttgttgttgcagtccttctttgcaccttatt

SEQ ID NO: 78255 - DNA, 201 bp, Homo sapiens
aacatttctagcttggggaatgtgacaacattccccagtgtggtaaaattggggtaaaatgtggtaaaatgtgatacgcacaaaccctttgaaaatagcawaacaaacatgccctttttctaaaattgataaatcctaaagaggaagaaaagagctgggacaataaaacactggctctggaatctggaatgttaagtccag

SEQ ID NO: 78256 - DNA, 201 bp, Homo sapiens
gtagtattttgatttgtacagtcataatttgttaaaatgacttcatttaacattcactgatgtagattaataatgtaagttctgatttaaagaatggtggsaaaatggtgcatgtaatacttttgcaagtgttggggagatcggtatgttttgaaaagagtaatttaacttttgggtgccaggaaatgggttttctcaaag

SEQ ID NO: 78257 - DNA, 201 bp, Homo sapiens
ctttgaatgcagaagcttgctggccaaaagatgtgggaattgttgcccttgagatctattttccttctcaatatgttgatcaagcagagttggaaaaataygatggtgtagatgctggaaagtataccattggcttgggccaggccaagatgggcttctgcacagatagagaagatattaactctctttgcatgactgtgg

SEQ ID NO: 78258 - DNA, 201 bp, Homo sapiens
atgcctatgatttttacaagcctgatatgctatctgaatatcctatagtagatggaaaactctccatacagtgctacctcagtgcattagaccgctgctaytctgtctactgcaaaaagatccatgcccagtggcagaaagagggaaatgataaagattttaccttgaatgattttggcttcatgatctttcactcaccat

SEQ ID NO: 78259 - DNA, 201 bp, Homo sapiens
atggttcccttgcatctgttctagcacagtactcacctcagcaattagcagggaagagaattggagtgttttcttatggttctggtttggctgccactctrtactctcttaaagtcacacaagatgctacaccggggtctgctcttgataaaataacagcaagtttatgtgatcttaaatcaaggcttgattcaagaactg

SEQ ID NO: 78260 - DNA, 201 bp, Homo sapiens
gctctgtaaaacttcatacctctttggccatttgtatgcatgatgtttggtttttaaacatggtataatgaattgtgtacttctgtcagaagaaagcagakgtactaatctccaattaaaaaattttttaacatgtaagaattttgtactttgaacaacaagattacagaaagtacctgtggtttttggaaaacatttcta

SEQ ID NO: 78261 - DNA, 162 bp, Homo sapiens
ccgcctcccagcgactctcggcggtgccggagtcgggtgggttggcggctataaagctggtrgcgaaggggaggcgccgcggactgtcctttcgtggctcactccctttcctctgctgccgctcggtcacgcttgctctttcaccatgcctggatcacttcc

SEQ ID NO: 78262 - DNA, 201 bp, Homo sapiens; identical to SEQ ID NO: 78253

SEQ ID NO: 78263 - DNA, 201 bp, Homo sapiens; identical to SEQ ID NO: 78254

SEQ ID NO: 78264 - DNA, 201 bp, Homo sapiens; identical to SEQ ID NO: 78255

SEQ ID NO: 78265 - DNA, 201 bp, Homo sapiens; identical to SEQ ID NO: 78256

SEQ ID NO: 78266 - DNA, 201 bp, Homo sapiens; identical to SEQ ID NO: 78257

SEQ ID NO: 78267 - DNA, 201 bp, Homo sapiens; identical to SEQ ID NO: 78259

SEQ ID NO: 78268 - DNA, 201 bp, Homo sapiens; identical to SEQ ID NO: 78258

SEQ ID NO: 78269 - DNA, 201 bp, Homo sapiens; identical to SEQ ID NO: 78260

SEQ ID NO: 78270 - DNA, 162 bp, Homo sapiens; identical to SEQ ID NO: 78261

SEQ ID NO: 78271 - DNA, 201 bp, Homo sapiens; identical to SEQ ID NO: 78253

SEQ ID NO: 78272 - DNA, 201 bp, Homo sapiens; identical to SEQ ID NO: 78254

SEQ ID NO: 78273 - DNA, 201 bp, Homo sapiens; identical to SEQ ID NO: 78255

SEQ ID NO: 78274 - DNA, 201 bp, Homo sapiens; identical to SEQ ID NO: 78256

SEQ ID NO: 78275 - DNA, 201 bp, Homo sapiens; identical to SEQ ID NO: 78257

SEQ ID NO: 78276 - DNA, 201 bp, Homo sapiens; identical to SEQ ID NO: 78259

SEQ ID NO: 78277 - DNA, 201 bp, Homo sapiens; identical to SEQ ID NO: 78258

SEQ ID NO: 78278 - DNA, 201 bp, Homo sapiens; identical to SEQ ID NO: 78260

SEQ ID NO: 78279 - DNA, 135 bp, Homo sapiens
atttagaaaagtacatgatccccagaccacaacaaaccaaaacataaactcatgtctgtgtcccatggtcatagtcaaagattttgtactgctaaaattaycaaataatttaaataaagtggatttgaacacaat

SEQ ID NO: 78280 - DNA, 201 bp, Homo sapiens
ttgtatgttcttaatattggaagataattttgtgaatctgtagattttattttttcagtcttaccttacaaatttcttttctatgaataatagaggaactyacggcactctgccatttgttaatgaaaggaagtgcagaggatttagaaaagtacatgatccccagaccacaacaaaccaaaacataaactcatgtctgtg

SEQ ID NO: 78281 - DNA, 201 bp, Homo sapiens
attggaagataattttgtgaatctgtagattttattttttcagtcttaccttacaaatttcttttctatgaataatagaggaacttacggcactctgccayttgttaatgaaaggaagtgcagaggatttagaaaagtacatgatccccagaccacaacaaaccaaaacataaactcatgtctgtgtcccatggtcatagt

SEQ ID NO: 78282 - DNA, 201 bp, Homo sapiens
ttttattttttcagtcttaccttacaaatttcttttctatgaataatagaggaacttacggcactctgccatttgttaatgaaaggaagtgcagaggattwagaaaagtacatgatccccagaccacaacaaaccaaaacataaactcatgtctgtgtcccatggtcatagtcaaagattttgtactgctaaaattaccaa

SEQ ID NO: 78283 - DNA, 201 bp, Homo sapiens
ttgatacatgccatgcctttgatcaaagaacaggacataaaaacaaagtcacaatgacattccatagtaaatttggaatcagaactccaaatgcaacttcrggctcgctggagaacaactaaggggcaccaaaccctctgaggttttactttaaggttcgctgtatgtttgccttggacaaaaaggctacctaccacgtgc

SEQ ID NO: 78284 - DNA, 201 bp, Homo sapiens
cggagcccacgcgatccctgggacgccggagacaacggggctcttgggaaggcgcggagcccggggaagccggggatgtgcgcgtgagccgtgcccgcagkgtctccccgcctccgccacctttcttgggtggctctccgcctcgtcctccctccgagggccgttggtacattcctagtgactccaagcgcttaaaagggg

SEQ ID NO: 78285 - DNA, 201 bp, Homo sapiens
tgaacctgatttgtgtgtgcaccgcgtctccagcgatcccggatccactgcgctgccaggggcctgggggtgggtctcttgctgtctctgcgacgacatcyttacgtttcggcactctaatgctgggtttgtgcgtgtgtgtctgcttagcggtctagcgggctgttaggctccctcgcccccagctccttggctcgctca

SEQ ID NO: 78286 - DNA, 173 bp, Homo sapiens
gattgcgcggagcccacgcgatccctgggacgccggagacaacggggctcttgggaaggcgcggagcccgggraagccggggatgtgcgcgtgagccgtgcccgcagggtctccccgcctccgccacctttcttgggtggctctccgcctcgtcctccctccgagggccgttg

SEQ ID NO: 78287 - DNA, 201 bp, Homo sapiens
ttttggaaatactttggtctctgaactgtaattagcaagaagtaaaaacagaaacgtcaaacgtcaaatgtttgctttgttacctggaggactaaatgtakatgtctttagtatactttgtatgttcttaatattggaagataattttgtgaatctgtagattttattttttcagtcttaccttacaaatttcttttctat

SEQ ID NO: 78288 - DNA, 201 bp, Homo sapiens
gacattccatagtaaatttggaatcagaactccaaatgcaacttcgggctcgctggagaacaactaaggggcaccaaaccctctgaggttttactttaagkttcgctgtatgtttgccttggacaaaaaggctacctaccacgtgctatccagtaatatacttaaataagccaatacttagatctactgtaaggcagatgc

SEQ ID NO: 78289 - DNA, 201 bp, Homo sapiens
ctctgtgggcaggctggaagtaggcactgagaccatcattgacaagtccaaagctggcatagataccaccaatgcctgctacggtggtactgcctccctcytcaatgctgccaactggatggagtccagttcctgggatggtcgttatgccatggtggtctgtggagacattgccgtctatcccagtggtaatgctcgtcc

SEQ ID NO: 78290 - DNA, 201 bp, Homo sapiens
tgtccccttgcaattccattctatttctgccacatgccaagtgctatgacaggtacaaggcaaataagaacggtagaacacagcttcccccagcccacttycctgttctaaagacaccacatagacagagagcagcagacaggggccagcaggagctgtagttcagatcttcttggtcattccttgccgctgttatttgaa

SEQ ID NO: 78291 - DNA, 201 bp, Homo sapiens
agagagcaattctaccataaggtgaatttctccccacctggtgacacaaacagccttttcccaggtacttggtacctggagcgagtggacgagcagcatcrccgaaagtatgcccggcgtcccgtctaaaggtgttctgcagatccatggaaagcttcctgggaaacgtatgctagcagagcttctccccgtgaatcatat

SEQ ID NO: 78292 - DNA, 201 bp, Homo sapiens
tggatgggaagctttccatccagtgctacttgcgggccttggatcgatgttacacatcataccgtaaaaaaatccagaatcagtggaagcaagctggcagygatcgacccttcacccttgacgatttacagtacatgatctttcatacacccttttgcaagatggtccagaagtctctggctcgcctgatgttcaatgact

SEQ ID NO: 78293 - DNA, 201 bp, Homo sapiens
tggtttagcagcaagtttcttttcatttcgagtatcccaggatgctgctccaggctctcccctggacaagttggtgtccagcacatcagacctgccaaaasgcctagcctcccgaaagtgtgtgtctcctgaggagttcacagaaataatgaaccaaagagagcaattctaccataaggtgaatttctccccacctggtga

SEQ ID NO: 78294 - DNA, 153 bp, Homo sapiens
gcatctctttcaaggtttctgctgggtttctgaactgctgggtttctgcttgytcctctggagatgcagcgtctgttgactccagtgaagcgcattctgcaactgacaagagcggtgcaggaaacctccctcacacctgctcgcctgctccca

SEQ ID NO: 78295 - DNA, 201 bp, Homo sapiens
ctggatggagtccagttcctgggatggtcgttatgccatggtggtctgtggagacattgccgtctatcccagtggtaatgctcgtcccacaggtggggccrgagctgtggctatgctgattgggcccaaggcccctctggccctggagcgagggctgaggggaacccatatggagaatgtgtatgacttctacaaaccaaa

SEQ ID NO: 78296 - DNA, 201 bp, Homo sapiens
ggcctcgcttctgtcccaccactctgcccaagaactggctggctccaggattggtgccttctcttatggctctggtttagcagcaagtttcttttcatttygagtatcccaggatgctgctccaggctctcccctggacaagttggtgtccagcacatcagacctgccaaaacgcctagcctcccgaaagtgtgtgtctcc

SEQ ID NO: 78297 - DNA, 201 bp, Homo sapiens
cctggataaagcacttctaaaggcctctcaggacatgttcgacaagaaaaccaaggcttccctttacctctccactcacaatgggaacatgtacacctcawccctgtacgggtgcctggcctcgcttctgtcccaccactctgcccaagaactggctggctccaggattggtgccttctcttatggctctggtttagcagc

SEQ ID NO: 78298 - DNA, 201 bp, Homo sapiens
acgggtgcctggcctcgcttctgtcccaccactctgcccaagaactggctggctccaggattggtgccttctcttatggctctggtttagcagcaagtttyttttcatttcgagtatcccaggatgctgctccaggctctcccctggacaagttggtgtccagcacatcagacctgccaaaacgcctagcctcccgaaagt

SEQ ID NO: 78299 - DNA, 201 bp, Homo sapiens
gggccttggatcgatgttacacatcataccgtaaaaaaatccagaatcagtggaagcaagctggcagcgatcgacccttcacccttgacgatttacagtayatgatctttcatacacccttttgcaagatggtccagaagtctctggctcgcctgatgttcaatgacttcctgtcagccagcagtgacacacaaaccagct

SEQ ID NO: 78300 - DNA, 201 bp, Homo sapiens
tgtcaaaacagtgctcatggaactcttccaggattcaggcaatactgatattgagggcatagataccaccaatgcctgctacggtggtactgcctccctcytcaatgctgccaactggatggagtccagttcctgggatggtcgttatgccatggtggtctgtggagacattgccgtctatcccagtggtaatgctcgtcc

SEQ ID NO: 78301 - DNA, 201 bp, Homo sapiens; identical to SEQ ID NO: 78290

SEQ ID NO: 78302 - DNA, 201 bp, Homo sapiens; identical to SEQ ID NO: 78291

SEQ ID NO: 78303 - DNA, 201 bp, Homo sapiens; identical to SEQ ID NO: 78292

SEQ ID NO: 78304 - DNA, 201 bp, Homo sapiens; identical to SEQ ID NO: 78293

SEQ ID NO: 78305 - DNA, 153 bp, Homo sapiens; identical to SEQ ID NO: 78294

SEQ ID NO: 78306 - DNA, 201 bp, Homo sapiens; identical to SEQ ID NO: 78295

SEQ ID NO: 78307 - DNA, 201 bp, Homo sapiens; identical to SEQ ID NO: 78296

SEQ ID NO: 78308 - DNA, 201 bp, Homo sapiens; identical to SEQ ID NO: 78297

SEQ ID NO: 78309 - DNA, 201 bp, Homo sapiens; identical to SEQ ID NO: 78298

SEQ ID NO: 78310 - DNA, 201 bp, Homo sapiens; identical to SEQ ID NO: 78299

SEQ ID NO: 78311 - DNA, 201 bp, Homo sapiens
tgacagtagtgataaagtggacttcttcatcctcctggacaacgtggctgccgagcaggcacacaacctcccaagctgccccatgctgaagagatttgcamggatgatcgaacagagagctgtggacacatccttgtacatactgcccaaggaagacagggaaagtcttcagatggcagtaggcccattcctccacatcct

SEQ ID NO: 78312 - DNA, 201 bp, Homo sapiens
tggaagacattccctttctttcaccaaccttcaacccacaggaggtctttattcgttccactaacatttttcggaatctggagtccacccgttgtttgctrgctgggcttttccagtgtcagaaagaaggacccatcatcatccacactgatgaagcagattcagaagtcttgtatcccaactaccaaagctgctggagcc

SEQ ID NO: 78313 - DNA, 201 bp, Homo sapiens
gctgccgccagggaactcagggccggctcctgttccttcaagagtgctggaggccaaacttgaaatacaagtttaatgttcctcgtcgggcaaaagataargatccgatctcccccggcccggtgtgcagcaggagcgaccaaccccgacccgggttaaaactcccagggactcttcgctgctgccacctcttgttctctc

SEQ ID NO: 78314 - DNA, 201 bp, Homo sapiens
tcccagggactcttcgctgctgccacctcttgttctctcccccgttcccactcggggtctccctcagggccgggaggcacagcggtccctgcttgctgagrggctggatgtacgcatccgcaggttcccgcggacttgggggcgcccgctgagccccggcgcccgcagaagacttgtgtttgcctcctgcagcctcaaccc

SEQ ID NO: 78315 - DNA, 201 bp, Homo sapiens
ctcccagggactcttcgctgctgccacctcttgttctctcccccgttcccactcggggtctccctcagggccgggaggcacagcggtccctgcttgctgargggctggatgtacgcatccgcaggttcccgcggacttgggggcgcccgctgagccccggcgcccgcagaagacttgtgtttgcctcctgcagcctcaacc

SEQ ID NO: 78316 - DNA, 201 bp, Homo sapiens
tccacactgatgaagcagattcagaagtcttgtatcccaactaccaaagctgctggagcctgaggcagagaaccagaggccggaggcagactgcctctttrcagccaggaatctcagaggatttgaaaaaggtgaaggacaggatgggcattgacagtagtgataaagtggacttcttcatcctcctggacaacgtggctg

SEQ ID NO: 78317 - DNA, 201 bp, Homo sapiens
ggaaggagcaggtgccgagaggttgccctgatgggctctgcccgctggacatgttcttgaatgccatgtcagtttataccttaagcccagaaaaataccaygcactctgctctcaaactcaggtgatggaagttggaaatgaagagtaactgatttataaaagcaggatgtgttgattttaaaataaagtgcctttataca

SEQ ID NO: 78318 - DNA, 201 bp, Homo sapiens
ggacacatccttgtacatactgcccaaggaagacagggaaagtcttcagatggcagtaggcccattcctccacatcctagagagcaacctgctgaaagccrtggactctgccactgcccccgacaagatcagaaagctgtatctctatgcggctcatgatgtgaccttcataccgctcttaatgaccctggggatttttga

SEQ ID NO: 78319 - DNA, 201 bp, Homo sapiens
gccttcatttaaagaaaataagggtgttttgggtttttctctttgtttttttcaagattcttttaaaggagtactgaagaatactttcctaagtttgtctstaaaatcttagcggtggacctgggagatttgagaagcttccagaaacagtttaaacaagccagcgctactggagaagaggagcaacacctgtgccgcggc

SEQ ID NO: 78320 - DNA, 201 bp, Homo sapiens
aggcgtctgaacgtggccctgaccagagcaaggtatggcgtcatcattgtgggcaacccgaaggcactatcaaagcagccgctctggaaccacctgctgawctactataaggagcagaaggtgctggtggaggggccgctcaacaacctgcgtgagagcctcatgcagttcagcaagccacggaagctggtcaacactatc

SEQ ID NO: 78321 - DNA, 201 bp, Homo sapiens
ggacatcaactgggacagctcgcagtggcagccgctgatccaggaccgctgcttcctgtcctggctggtcaagatcccctccgagcaggagcagctgcggrcacgccagatcacggcacagcagatcaacaagctggaggagctgtggaaggaaaacccttctgccacgctggaggacctggagaagccgggggtggacga

SEQ ID NO: 78322 - DNA, 201 bp, Homo sapiens
cccccggcggccccggcggcccgggcggtggcggcgcgggaggcccgggcggcgcgggcgcgggcgctgcggcgggacagctcgacgcgcaggttgggccygaaggcatcctgcagaacggggctgtggacgacagtgtagccaagaccagccagttgttggctgagttgaacttcgaggaagatgaagaagacacctatt

SEQ ID NO: 78323 - DNA, 201 bp, Homo sapiens
gtgaggccatcgactccccggtgtcttttctggccctgcacaaccagatcaggaacatggacagcatgcctgagctgcagaagctgcagcagctgaaagaygagactggggagctgtcgtctgccgacgagaagcggtaccgggccttgaagcgcaccgcagagagagagctgctgatgaacgcagatgtcatctgctgca

SEQ ID NO: 78324 - DNA, 201 bp, Homo sapiens
tgtcgtctgccgacgagaagcggtaccgggccttgaagcgcaccgcagagagagagctgctgatgaacgcagatgtcatctgctgcacatgtgtgggcgcyggtgacccgaggctggccaagatgcagttccgctccattttaatcgacgaaagcacccaggccaccgagccggagtgcatggttcccgtggtcctcgggg

SEQ ID NO: 78325 - DNA, 201 bp, Homo sapiens; identical to SEQ ID NO: 78319

SEQ ID NO: 78326 - DNA, 201 bp, Homo sapiens; identical to SEQ ID NO: 78320

SEQ ID NO: 78327 - DNA, 201 bp, Homo sapiens; identical to SEQ ID NO: 78321

SEQ ID NO: 78328 - DNA, 201 bp, Homo sapiens; identical to SEQ ID NO: 78322

SEQ ID NO: 78329 - DNA, 201 bp, Homo sapiens; identical to SEQ ID NO: 78323

SEQ ID NO: 78330 - DNA, 201 bp, Homo sapiens; identical to SEQ ID NO: 78324

SEQ ID NO: 78331 - DNA, 201 bp, Homo sapiens; identical to SEQ ID NO: 78319

SEQ ID NO: 78332 - DNA, 201 bp, Homo sapiens; identical to SEQ ID NO: 78320

SEQ ID NO: 78333 - DNA, 201 bp, Homo sapiens; identical to SEQ ID NO: 78321

SEQ ID NO: 78334 - DNA, 201 bp, Homo sapiens; identical to SEQ ID NO: 78322

SEQ ID NO: 78335 - DNA, 201 bp, Homo sapiens
ttccttctggcagggactcttatttattcccattgctctagggctttcggtttccccttcttccggtaggccgcgtagaggcatgcaccgggtaggtttcygcggtgaccccgcggcggcctgagggacgctccctgccccatcccggctgttgggctgggccgctttgcctctgcttcgccctgtgctgtgttctccagc

SEQ ID NO: 78336 - DNA, 201 bp, Homo sapiens
cttccttctggcagggactcttatttattcccattgctctagggctttcggtttccccttcttccggtaggccgcgtagaggcatgcaccgggtaggtttycgcggtgaccccgcggcggcctgagggacgctccctgccccatcccggctgttgggctgggccgctttgcctctgcttcgccctgtgctgtgttctccag

SEQ ID NO: 78337 - DNA, 201 bp, Homo sapiens; identical to SEQ ID NO: 78323

SEQ ID NO: 78338 - DNA, 201 bp, Homo sapiens; identical to SEQ ID NO: 78324

SEQ ID NO: 78339 - DNA, 201 bp, Homo sapiens; identical to SEQ ID NO: 78319

SEQ ID NO: 78340 - DNA, 201 bp, Homo sapiens; identical to SEQ ID NO: 78320

SEQ ID NO: 78341 - DNA, 201 bp, Homo sapiens; identical to SEQ ID NO: 78321

SEQ ID NO: 78342 - DNA, 201 bp, Homo sapiens; identical to SEQ ID NO: 78322

SEQ ID NO: 78343 - DNA, 201 bp, Homo sapiens; identical to SEQ ID NO: 78323

SEQ ID NO: 78344 - DNA, 201 bp, Homo sapiens; identical to SEQ ID NO: 78324

SEQ ID NO: 78345 - DNA, 201 bp, Homo sapiens
gctgatcaaaggacttggactaaagtctgatgaacttcccaatcagatgagcatggatgattggccagaaatgaagaagaagtttgcagatgtatttgcaragaagacgaaggcagagtggtgtcaaatctttgacggcacagatgcctgtgtgactccggttctgacttttgaggaggttgttcatcatgatcacaacaa

SEQ ID NO: 78346 - DNA, 201 bp, Homo sapiens
ggaagcacctcgaggacagaacatgttggatggtggagcacctttctatacgacttacaggacagcagatggggaattcatggctgttggagcaatagaaycccagttctacgagctgctgatcaaaggacttggactaaagtctgatgaacttcccaatcagatgagcatggatgattggccagaaatgaagaagaagtt

SEQ ID NO: 78347 - DNA, 201 bp, Homo sapiens
actgaaaaaaacatatccaaaataatgaggaaatgtgttggctcactacgtagagtccagagggacagtcagttttagggttgcctgtatccagtaactcrgggcctgtttccccgtgggtctctgggctgtcagctttcctttctccatgtgtttgatttctcctcaggctggtagcaagttctggatcttatacccaac

SEQ ID NO: 78348 - DNA, 201 bp, Homo sapiens
gtgactccggttctgacttttgaggaggttgttcatcatgatcacaacaaggaacggggctcgtttatcaccagtgaggagcaggacgtgagcccccgccytgcacctctgctgttaaacaccccagccatcccttctttcaaaagggatcctttcataggagaacacactgaggagatacttgaagaatttggattcagc

SEQ ID NO: 78349 - DNA, 201 bp, Homo sapiens
gttctgtgctatggtcctggctgacttcggggcgcgtgtggtacgcgtggaccggcccggctcccgctacgacgtgagccgcttgggccggggcaagcgcycgctagtgctggacctgaagcagccgcggggagccgccgtgctgcggcgtctgtgcaagcggtcggatgtgctgctggagcccttccgccgcggtgtcat

SEQ ID NO: 78350 - DNA, 201 bp, Homo sapiens
gatgtgctgctggagcccttccgccgcggtgtcatggagaaactccagctgggcccagagattctgcagcgggaaaatccaaggcttatttatgccaggcygagtggatttggccagtcaggaagcttctgccggttagctggccacgatatcaactatttggctttgtcaggtgttctctcaaaaattggcagaagtggt

SEQ ID NO: 78351 - DNA, 201 bp, Homo sapiens
ggggaattcatggctgttggagcaatagaaccccagttctacgagctgctgatcaaaggacttggactaaagtctgatgaacttcccaatcagatgagcayggatgattggccagaaatgaagaagaagtttgcagatgtatttgcaaagaagacgaaggcagagtggtgtcaaatctttgacggcacagatgcctgtgtg

SEQ ID NO: 78352 - DNA, 201 bp, Homo sapiens
ctttttgaccgcacacgcactggcaagggtcaggtcattgatgcaaatatggtggaaggaacagcatatttaagttcttttctgtggaaaactcagaaatygagtctgtgggaagcacctcgaggacagaacatgttggatggtggagcacctttctatacgacttacaggacagcagatggggaattcatggctgttgga

SEQ ID NO: 78353 - DNA, 201 bp, Homo sapiens
cacctcgaggacagaacatgttggatggtggagcacctttctatacgacttacaggacagcagatggggaattcatggctgttggagcaatagaaccccakttctacgagctgctgatcaaaggacttggactaaagtctgatgaacttcccaatcagatgagcatggatgattggccagaaatgaagaagaagtttgcag

SEQ ID NO: 78354 - DNA, 201 bp, Homo sapiens
atggagaaactccagctgggcccagagattctgcagcgggaaaatccaaggcttatttatgccaggctgagtggatttggccagtcaggaagcttctgccrgttagctggccacgatatcaactatttggctttgtcaggtgttctctcaaaaattggcagaagtggtgagaatccgtatgccccgctgaatctcctggct

SEQ ID NO: 78355 - DNA, 201 bp, Homo sapiens
gggagggcttcttgcaggctgctgggctggggctaagggctgctcagtttccttcagcggggcactgggaagcgccatggcactgcagggcatctcggtcrtggagctgtccggcctggccccgggcccgttctgtgctatggtcctggctgacttcggggcgcgtgtggtacgcgtggaccggcccggctcccgctacga

SEQ ID NO: 78356 - DNA, 201 bp, Homo sapiens
cagtatctcaactgccgttcaacaatcgcaagaggaaggtggagcaggtttcttcatcttacagttgagaaaacagagactcagaagggcttcttagttcrtgtttcccttagcgcctcagtgattttttcatggtggcttaggccaaaagaaatatctaaccattcaatttataaataattaggtccccaacgaattaaa

SEQ ID NO: 78357 - DNA, 201 bp, Homo sapiens
ggaagcacctcgaggacagaacatgttggatggtggagcacctttctatacgacttacaggacagcagatggggaattcatggctgttggagcaatagaaycccagttgacttggactaaagtctgatgaacttcccaatcagatgagcatggatgattggccagaaatgaagaagaagtttgcagatgtatttgcaaaga

SEQ ID NO: 78358 - DNA, 201 bp, Homo sapiens; identical to SEQ ID NO: 78347

SEQ ID NO: 78359 - DNA, 201 bp, Homo sapiens
gaaccccagttgacttggactaaagtctgatgaacttcccaatcagatgagcatggatgattggccagaaatgaagaagaagtttgcagatgtatttgcaragaagacgaaggcagagtggtgtcaaatctttgacggcacagatgcctgtgtgactccggttctgacttttgaggaggttgttcatcatgatcacaacaa

SEQ ID NO: 78360 - DNA, 201 bp, Homo sapiens; identical to SEQ ID NO: 78348

SEQ ID NO: 78361 - DNA, 201 bp, Homo sapiens
gttctgtgctatggtcctggctgacttcggggcgcgtgtggtacgcgtggaccggcccggctcccgctacgacgtgagccgcttgggccggggcaagcgcycgctagtgctggacctgaagcagccgcggggagccgccgtgctgcggcgtctgtgcaagcggtcggatgtgctgctggagcccttccgccgcgaaactcc

SEQ ID NO: 78362 - DNA, 201 bp, Homo sapiens
gcaagcggtcggatgtgctgctggagcccttccgccgcgaaactccagctgggcccagagattctgcagcgggaaaatccaaggcttatttatgccaggcygagtggatttggccagtcaggaagcttctgccggttagctggccacgatatcaactatttggctttgtcaggtgttctctcaaaaattggcagaagtggt

SEQ ID NO: 78363 - DNA, 201 bp, Homo sapiens
cgacttacaggacagcagatggggaattcatggctgttggagcaatagaaccccagttgacttggactaaagtctgatgaacttcccaatcagatgagcayggatgattggccagaaatgaagaagaagtttgcagatgtatttgcaaagaagacgaaggcagagtggtgtcaaatctttgacggcacagatgcctgtgtg

SEQ ID NO: 78364 - DNA, 201 bp, Homo sapiens; identical to SEQ ID NO: 78352

SEQ ID NO: 78365 - DNA, 201 bp, Homo sapiens
cacctcgaggacagaacatgttggatggtggagcacctttctatacgacttacaggacagcagatggggaattcatggctgttggagcaatagaaccccakttgacttggactaaagtctgatgaacttcccaatcagatgagcatggatgattggccagaaatgaagaagaagtttgcagatgtatttgcaaagaagacg

SEQ ID NO: 78366 - DNA, 201 bp, Homo sapiens
gccgcgaaactccagctgggcccagagattctgcagcgggaaaatccaaggcttatttatgccaggctgagtggatttggccagtcaggaagcttctgccrgttagctggccacgatatcaactatttggctttgtcaggtgttctctcaaaaattggcagaagtggtgagaatccgtatgccccgctgaatctcctggct

SEQ ID NO: 78367 - DNA, 201 bp, Homo sapiens; identical to SEQ ID NO: 78355

SEQ ID NO: 78368 - DNA, 201 bp, Homo sapiens; identical to SEQ ID NO: 78356

SEQ ID NO: 78369 - DNA, 201 bp, Homo sapiens; identical to SEQ ID NO: 78346

SEQ ID NO: 78370 - DNA, 201 bp, Homo sapiens; identical to SEQ ID NO: 78347

SEQ ID NO: 78371 - DNA, 201 bp, Homo sapiens; identical to SEQ ID NO: 78345

SEQ ID NO: 78372 - DNA, 201 bp, Homo sapiens; identical to SEQ ID NO: 78348

SEQ ID NO: 78373 - DNA, 201 bp, Homo sapiens; identical to SEQ ID NO: 78349

SEQ ID NO: 78374 - DNA, 201 bp, Homo sapiens
gatgtgctgctggagcccttccgccgcggtgtcatggagaaactccagctgggcccagagattctgcagcgggaaaatccaaggcttatttatgccaggcygagtggatttggccagtcaggaagcttctgccggttagctggccacgatatcaactatttggctttgtcaggtggaaggaacagcatatttaagttcttt

SEQ ID NO: 78375 - DNA, 201 bp, Homo sapiens; identical to SEQ ID NO: 78351

SEQ ID NO: 78376 - DNA, 201 bp, Homo sapiens
gaagcttctgccggttagctggccacgatatcaactatttggctttgtcaggtggaaggaacagcatatttaagttcttttctgtggaaaactcagaaatygagtctgtgggaagcacctcgaggacagaacatgttggatggtggagcacctttctatacgacttacaggacagcagatggggaattcatggctgttgga

SEQ ID NO: 78377 - DNA, 201 bp, Homo sapiens; identical to SEQ ID NO: 78353

SEQ ID NO: 78378 - DNA, 201 bp, Homo sapiens
atggagaaactccagctgggcccagagattctgcagcgggaaaatccaaggcttatttatgccaggctgagtggatttggccagtcaggaagcttctgccrgttagctggccacgatatcaactatttggctttgtcaggtggaaggaacagcatatttaagttcttttctgtggaaaactcagaaatcgagtctgtggga

SEQ ID NO: 78379 - DNA, 201 bp, Homo sapiens; identical to SEQ ID NO: 78355

SEQ ID NO: 78380 - DNA, 201 bp, Homo sapiens; identical to SEQ ID NO: 78356

SEQ ID NO: 78381 - DNA, 201 bp, Homo sapiens; identical to SEQ ID NO: 78346

SEQ ID NO: 78382 - DNA, 201 bp, Homo sapiens; identical to SEQ ID NO: 78347

SEQ ID NO: 78383 - DNA, 201 bp, Homo sapiens; identical to SEQ ID NO: 78345

SEQ ID NO: 78384 - DNA, 201 bp, Homo sapiens; identical to SEQ ID NO: 78348

SEQ ID NO: 78385 - DNA, 201 bp, Homo sapiens; identical to SEQ ID NO: 78349

SEQ ID NO: 78386 - DNA, 201 bp, Homo sapiens; identical to SEQ ID NO: 78374

SEQ ID NO: 78387 - DNA, 201 bp, Homo sapiens; identical to SEQ ID NO: 78351

SEQ ID NO: 78388 - DNA, 201 bp, Homo sapiens; identical to SEQ ID NO: 78376

SEQ ID NO: 78389 - DNA, 201 bp, Homo sapiens; identical to SEQ ID NO: 78353

SEQ ID NO: 78390 - DNA, 201 bp, Homo sapiens; identical to SEQ ID NO: 78378

SEQ ID NO: 78391 - DNA, 201 bp, Homo sapiens; identical to SEQ ID NO: 78355

SEQ ID NO: 78392 - DNA, 201 bp, Homo sapiens; identical to SEQ ID NO: 78356

SEQ ID NO: 78393 - DNA, 201 bp, Homo sapiens; identical to SEQ ID NO: 78345

SEQ ID NO: 78394 - DNA, 201 bp, Homo sapiens; identical to SEQ ID NO: 78346

SEQ ID NO: 78395 - DNA, 201 bp, Homo sapiens; identical to SEQ ID NO: 78347

SEQ ID NO: 78396 - DNA, 201 bp, Homo sapiens; identical to SEQ ID NO: 78348

SEQ ID NO: 78397 - DNA, 201 bp, Homo sapiens; identical to SEQ ID NO: 78349

SEQ ID NO: 78398 - DNA, 201 bp, Homo sapiens; identical to SEQ ID NO: 78350

SEQ ID NO: 78399 - DNA, 201 bp, Homo sapiens; identical to SEQ ID NO: 78351

SEQ ID NO: 78400 - DNA, 201 bp, Homo sapiens; identical to SEQ ID NO: 78352

SEQ ID NO: 78401 - DNA, 201 bp, Homo sapiens; identical to SEQ ID NO: 78353

SEQ ID NO: 78402 - DNA, 201 bp, Homo sapiens; identical to SEQ ID NO: 78354

SEQ ID NO: 78403 - DNA, 201 bp, Homo sapiens; identical to SEQ ID NO: 78355

SEQ ID NO: 78404 - DNA, 201 bp, Homo sapiens; identical to SEQ ID NO: 78356

SEQ ID NO: 78405 - DNA, 201 bp, Homo sapiens
aatcgaaacttggtccagttttccaggctgtaagaaaaaagggccaataaccagactgctgaggttgcccacaggaggatcacaaactcacagcacagtgygtgatgctgtccttcctggaccccattctgtccggaggctcatggcccatatttcccacatttctaataccaccacccctgtgcttcaggccctccaaac

SEQ ID NO: 78406 - DNA, 201 bp, Homo sapiens
ctccggcagtgagccaggctttgagtggctgcgtctaaacacttctttccctgaggactggaagacattagaataaggtccagaaatgtccttggtgtgtytgacagactttcaggcccatgcgcgagagcagctgtctaagtcaactcgggattttattgaaggtggagcagatgacagcatcacgcgggatgacaacat

SEQ ID NO: 78407 - DNA, 201 bp, Homo sapiens
gctgcgtctaaacacttctttccctgaggactggaagacattagaataaggtccagaaatgtccttggtgtgtttgacagactttcaggcccatgcgcgaragcagctgtctaagtcaactcgggattttattgaaggtggagcagatgacagcatcacgcgggatgacaacattgcagcatttaaaagaattcgcctccg

SEQ ID NO: 78408 - DNA, 201 bp, Homo sapiens
gtggcaacaggcgacatgacattcgaaaccagttgaggaggaacttaacactaacagatcttcaatcacctaaaaagggaaatgcaataccttatttccaratgactcctatcagcacttctctctgctggaatgatctctcctggtttcagagcataactcgattgcccatcatcctgaaagggattttgacaaaagagg

SEQ ID NO: 78409 - DNA, 201 bp, Homo sapiens
gagattcctgggaactaccagatagtagcatcagttcaccaagaaatgaagctggtgaggcagtgaaaatccagggcctagaaagctgggaatgccatgaygtgggcacattgaaagacaagaggcaggcatgatcagccttgaactttaggaagatcccaggaagctgatggaagacaagatgtggagtgaatgtgaagg

SEQ ID NO: 78410 - DNA, 201 bp, Homo sapiens
aacattgagattcctgggaactaccagatagtagcatcagttcaccaagaaatgaagctggtgaggcagtgaaaatccagggcctagaaagctgggaatgycatgacgtgggcacattgaaagacaagaggcaggcatgatcagccttgaactttaggaagatcccaggaagctgatggaagacaagatgtggagtgaatg

SEQ ID NO: 78411 - DNA, 201 bp, Homo sapiens; identical to SEQ ID NO: 78405

SEQ ID NO: 78412 - DNA, 201 bp, Homo sapiens
ggcaggcatgatcagccttgaactttaggaagatcccaggaagctgatggaagacaagatgtggagtgaatgtgaaggtccagaaatgtccttggtgtgtytgacagactttcaggcccatgcgcgagagcagctgtctaagtcaactcgggattttattgaaggtggagcagatgacagcatcacgcgggatgacaacat

SEQ ID NO: 78413 - DNA, 201 bp, Homo sapiens
ggaagatcccaggaagctgatggaagacaagatgtggagtgaatgtgaaggtccagaaatgtccttggtgtgtttgacagactttcaggcccatgcgcgaragcagctgtctaagtcaactcgggattttattgaaggtggagcagatgacagcatcacgcgggatgacaacattgcagcatttaaaagaattcgcctccg

SEQ ID NO: 78414 - DNA, 201 bp, Homo sapiens
accagatagtagcatcagttcaccaagaaatgaagctggtgaggcagtgaaaatccagggcctagaaagctgggaatgccatgacgtgggcacattgaaaracaagaggcaggcatgatcagccttgaactttaggaagatcccaggaagctgatggaagacaagatgtggagtgaatgtgaaggtccagaaatgtccttg

SEQ ID NO: 78415 - DNA, 201 bp, Homo sapiens; identical to SEQ ID NO: 78408

SEQ ID NO: 78416 - DNA, 201 bp, Homo sapiens
atcgcaggacctaaacttgtgatcgtttgggggaggtcacacacgtttctgagtgggaatggatgggcgtgaatgacgtgccctcttaaaaagcacaacartcctttaagaggagcaaaattgagttttcccattttggccaagattttgaagacagttcaatgtattctacatttgacataagatgagaactttctaaag

SEQ ID NO: 78417 - DNA, 201 bp, Homo sapiens
gtgttaattccacatgtagatgccggtaaaggggctaaaaaccccggagtcttcctgatccatggacccgatgaacatagacacagggaagaggaagaacrtctgagaaataaaattcgagctgatcatgagaaggccttggaagaagcaaaagaaaaattaagaaagtcaagagaggaaattcgagcagaaattcagaca

SEQ ID NO: 78418 - DNA, 201 bp, Homo sapiens
aacacaaacgctttgatttgggtttagaagatgtgttaattccacatgtagatgccggtaaaggggctaaaaaccccggagtcttcctgatccatggaccsgatgaacatagacacagggaagaggaagaacgtctgagaaataaaattcgagctgatcatgagaaggccttggaagaagcaaaagaaaaattaagaaagt

SEQ ID NO: 78419 - DNA, 201 bp, Homo sapiens
ctcaagtctttttcttcttatggaatcatcgaaactgctatttatcataatcaccacttatgagcctgggtttgggattttgtgcatgtagttcagtctastgttggtagcatgacagaaagtggggaaaatgccgcagtttgttgccttgaaacctaagagcaatccttggttttgttgctacattatttttccagacca

SEQ ID NO: 78420 - DNA, 201 bp, Homo sapiens
gtgttggtagcatgacagaaagtggggaaaatgccgcagtttgttgccttgaaacctaagagcaatccttggttttgttgctacattatttttccagaccracacatctaccaagtaaattttattcactttaatttcataataaagttagtagagtcactcaacttacaactttatttatgtggcttggcaaaaatcact

SEQ ID NO: 78421 - DNA, 201 bp, Homo sapiens
catctgcaggtagcagcattctggctgaatttggtacactacatatggagttcatccacctcagctacttgacaggggacctgacttactacaaaaaggtkatgcacattcggaaactacttcagaaaatggatcgtccaaatggtctttatccaaattatttgaaccccagaacagggcgctggggtcagtatcatacat

SEQ ID NO: 78422 - DNA, 201 bp, Homo sapiens; identical to SEQ ID NO: 78416

SEQ ID NO: 78423 - DNA, 201 bp, Homo sapiens; identical to SEQ ID NO: 78417

SEQ ID NO: 78424 - DNA, 201 bp, Homo sapiens
tgaaattattccattttatacctgaccaaaacatgttctgatatgtgtaggacagagacctggatgtgctttgatcgttaatgaggtggtcacatgagaartgatacctgttactactgtattgtttttagagtcctgaagtctggaggctagacttcctgaaagcaagtcaagaatatagagcaccttgcaggagttcaa

SEQ ID NO: 78425 - DNA, 201 bp, Homo sapiens; identical to SEQ ID NO: 78418

SEQ ID NO: 78426 - DNA, 201 bp, Homo sapiens; identical to SEQ ID NO: 78419

SEQ ID NO: 78427 - DNA, 190 bp, Homo sapiens
gtgttggtagcatgacagaaagtggggaaaatgccgcagtttgttgccttgaaacctaagagcaatccttggttttgttgctacattatttttccagaccracacatctaccaagtaaattttattcactttaatttcataataaagttagtagagtcactcaacttacaactttatttatgtggcttgg

SEQ ID NO: 78428 - DNA, 201 bp, Homo sapiens; identical to SEQ ID NO: 78421

SEQ ID NO: 78429 - DNA, 201 bp, Homo sapiens; identical to SEQ ID NO: 78416

SEQ ID NO: 78430 - DNA, 201 bp, Homo sapiens; identical to SEQ ID NO: 78417

SEQ ID NO: 78431 - DNA, 201 bp, Homo sapiens; identical to SEQ ID NO: 78418

SEQ ID NO: 78432 - DNA, 201 bp, Homo sapiens; identical to SEQ ID NO: 78421

SEQ ID NO: 78433 - DNA, 201 bp, Homo sapiens
atggcttgatgcctttaaatggagtcctgaggaaagagcctgtatttaacgatgagctcccagcaagcattctgtgtggcattgtgtccgtaaagcctaaygtgaaggaattcacagagacctcggccatttttgaggatgggaccatatttgagggcattgactgtgtaatctttgcaacagggtatagttttgcctacc

SEQ ID NO: 78434 - DNA, 201 bp, Homo sapiens
agagcctgtatttaacgatgagctcccagcaagcattctgtgtggcattgtgtccgtaaagcctaacgtgaaggaattcacagagacctcggccatttttkaggatgggaccatatttgagggcattgactgtgtaatctttgcaacagggtatagttttgcctaccccttccttgatgagtctatcatcaaaagcagaaa

SEQ ID NO: 78435 - DNA, 201 bp, Homo sapiens
aagaacaatttaccgacagccatctctgactggttgtacgtgaagcagatgaatgcaagattcaagcatgaaaactatggcttgatgcctttaaatggagycctgaggaaagagcctgtatttaacgatgagctcccagcaagcattctgtgtggcattgtgtccgtaaagcctaacgtgaaggaattcacagagacctcg

SEQ ID NO: 78436 - DNA, 201 bp, Homo sapiens
aatggagtcctgaggaaagagcctgtatttaacgatgagctcccagcaagcattctgtgtggcattgtgtccgtaaagcctaacgtgaaggaattcacagrgacctcggccatttttgaggatgggaccatatttgagggcattgactgtgtaatctttgcaacagggtatagttttgcctaccccttccttgatgagtct

SEQ ID NO: 78437 - DNA, 201 bp, Homo sapiens
gatgcctttaaatggagtcctgaggaaagagcctgtatttaacgatgagctcccagcaagcattctgtgtggcattgtgtccgtaaagcctaacgtgaagkaattcacagagacctcggccatttttgaggatgggaccatatttgagggcattgactgtgtaatctttgcaacagggtatagttttgcctaccccttcct

SEQ ID NO: 78438 - DNA, 145 bp, Homo sapiens
gttggacaggacgtagacacacagaagaaaagaagacaaagaacrggttaccatggggaagaaagtggccatcattggagctggtgtgagtggcttggcctccatcaggagctgtctggaagaggggctggagcccacctgcttt

SEQ ID NO: 78439 - DNA, 201 bp, Homo sapiens
aacagggtatagttttgcctaccccttccttgatgagtctatcatcaaaagcagaaacaatgagatcattttatttaaaggagtatttcctcctctacttsagaagtcaaccatagcagtgattggctttgtccagtcccttggggctgccattcccacagttgacctccagtcccgctgggcagcacaagtaataaaggg

SEQ ID NO: 78440 - DNA, 201 bp, Homo sapiens
cccacctgctttgagaagagcaatgacattgggggcctgtggaaattttcagaccatgcagaggagggcagggctagcatttacaaatcagtcttttccarctcttccaaagagatgatgtgtttcccagacttcccatttcccgatgacttccccaactttatgcacaacagcaagatccaggaatatatcattgcattt

SEQ ID NO: 78441 - DNA, 201 bp, Homo sapiens
taccagtttaggctggtgggcccagggcagtggccaggagccagaaatgccatactgacccagtgggaccggtcgttgaaacccatgcagacacgagtggkcgggagacttcagaagccttgcttctttttccattggctgaagctctttgcaattcctattctgttaatcgctgttttccttgtgttgacctaatcatca

SEQ ID NO: 78442 - DNA, 201 bp, Homo sapiens
gagggcagggctagcatttacaaatcagtcttttccaactcttccaaagagatgatgtgtttcccagacttcccatttcccgatgacttccccaactttaygcacaacagcaagatccaggaatatatcattgcatttgccaaagaaaagaacctcctgaagtacatacaatttaagacatttgtatccagtgtaaataaa

SEQ ID NO: 78443 - DNA, 201 bp, Homo sapiens
ctgactggttgtacgtgaagcagatgaatgcaagattcaagcatgaaaactatggcttgatgcctttaaatggagtcctgaggaaagagcctgtatttaaygatgagctcccagcaagcattctgtgtggcattgtgtccgtaaagcctaacgtgaaggaattcacagagacctcggccatttttgaggatgggaccatat

SEQ ID NO: 78444 - DNA, 201 bp, Homo sapiens
ctatggaagacatgatgaatgatattaatgagaaaatggagaaaaagcgcaaatggtttggcaaaagcgagaccatacagacagattacattgtttatatrgatgaactctcctccttcattggggcaaagcccaacatcccatggctgtttctcacagatcccaaattggccatggaagtttattttggcccttgtagtc

SEQ ID NO: 78445 - DNA, 201 bp, Homo sapiens
gtgggatgttaccactgaaagggatggtaaaaaagaatcggctgtctttgatgctgtaatggtttgttccggacatcatgtgtatcccaacctaccaaaaragtcctttccaggactaaaccactttaaaggcaaatgcttccacagcagggactataaagaaccaggtgtattcaatggaaagcgtgtcctggtggttgg

SEQ ID NO: 78446 - DNA, 201 bp, Homo sapiens
ataaacatcctgattttgcaactactggccagtgggatgttaccactgaaagggatggtaaaaaagaatcggctgtctttgatgctgtaatggtttgttcyggacatcatgtgtatcccaacctaccaaaagagtcctttccaggactaaaccactttaaaggcaaatgcttccacagcagggactataaagaaccaggtg

SEQ ID NO: 78447 - DNA, 201 bp, Homo sapiens
cagcagaacaggtcatgatcagttccagaagtggctcctgggtgatgagccgggtctgggacaatggttatccttgggacatgctgctcgtcactcgattyggaaccttcctcaagaacaatttaccgacagccatctctgactggttgtacgtgaagcagatgaatgcaagattcaagcatgaaaactatggcttgatgc

SEQ ID NO: 78448 - DNA, 201 bp, Homo sapiens
ggtctgggacaatggttatccttgggacatgctgctcgtcactcgatttggaaccttcctcaagaacaatttaccgacagccatctctgactggttgtacrtgaagcagatgaatgcaagattcaagcatgaaaactatggcttgatgcctttaaatggagtcctgaggaaagagcctgtatttaacgatgagctcccagc

SEQ ID NO: 78449 - DNA, 201 bp, Homo sapiens
catggaagtttattttggcccttgtagtccctaccagtttaggctggtgggcccagggcagtggccaggagccagaaatgccatactgacccagtgggacyggtcgttgaaacccatgcagacacgagtggtcgggagacttcagaagccttgcttctttttccattggctgaagctctttgcaattcctattctgttaat

SEQ ID NO: 78450 - DNA, 201 bp, Homo sapiens
cagatcccaaattggccatggaagtttattttggcccttgtagtccctaccagtttaggctggtgggcccagggcagtggccaggagccagaaatgccatrctgacccagtgggaccggtcgttgaaacccatgcagacacgagtggtcgggagacttcagaagccttgcttctttttccattggctgaagctctttgcaa

SEQ ID NO: 78451 - DNA, 201 bp, Homo sapiens
agagcaatgacattgggggcctgtggaaattttcagaccatgcagaggagggcagggctagcatttacaaatcagtcttttccaactcttccaaagagatbatgtgtttcccagacttcccatttcccgatgacttccccaactttatgcacaacagcaagatccaggaatatatcattgcatttgccaaagaaaagaacc

SEQ ID NO: 78452 - DNA, 201 bp, Homo sapiens
ggggcaaagcccaacatcccatggctgtttctcacagatcccaaattggccatggaagtttattttggcccttgtagtccctaccagtttaggctggtggrcccagggcagtggccaggagccagaaatgccatactgacccagtgggaccggtcgttgaaacccatgcagacacgagtggtcgggagacttcagaagcct

SEQ ID NO: 78453 - DNA, 201 bp, Homo sapiens; identical to SEQ ID NO: 78433

SEQ ID NO: 78454 - DNA, 201 bp, Homo sapiens; identical to SEQ ID NO: 78434

SEQ ID NO: 78455 - DNA, 201 bp, Homo sapiens; identical to SEQ ID NO: 78435

SEQ ID NO: 78456 - DNA, 201 bp, Homo sapiens; identical to SEQ ID NO: 78436

SEQ ID NO: 78457 - DNA, 201 bp, Homo sapiens; identical to SEQ ID NO: 78437

SEQ ID NO: 78458 - DNA, 187 bp, Homo sapiens
gtaggctcactagaacattttctctttcaaactgcccagacggttggacaggacgtagacacacagaagaaaagaagacaaagaacrggtaggaaaattaaaaaggttaccatggggaagaaagtggccatcattggagctggtgtgagtggcttggcctccatcaggagctgtctggaagaggggc

SEQ ID NO: 78459 - DNA, 201 bp, Homo sapiens; identical to SEQ ID NO: 78439

SEQ ID NO: 78460 - DNA, 201 bp, Homo sapiens; identical to SEQ ID NO: 78440

SEQ ID NO: 78461 - DNA, 201 bp, Homo sapiens; identical to SEQ ID NO: 78441

SEQ ID NO: 78462 - DNA, 201 bp, Homo sapiens; identical to SEQ ID NO: 78442

SEQ ID NO: 78463 - DNA, 201 bp, Homo sapiens; identical to SEQ ID NO: 78443

SEQ ID NO: 78464 - DNA, 201 bp, Homo sapiens; identical to SEQ ID NO: 78444

SEQ ID NO: 78465 - DNA, 201 bp, Homo sapiens; identical to SEQ ID NO: 78445

SEQ ID NO: 78466 - DNA, 201 bp, Homo sapiens; identical to SEQ ID NO: 78446

SEQ ID NO: 78467 - DNA, 201 bp, Homo sapiens; identical to SEQ ID NO: 78447

SEQ ID NO: 78468 - DNA, 201 bp, Homo sapiens; identical to SEQ ID NO: 78448

SEQ ID NO: 78469 - DNA, 201 bp, Homo sapiens; identical to SEQ ID NO: 78449

SEQ ID NO: 78470 - DNA, 201 bp, Homo sapiens; identical to SEQ ID NO: 78450

SEQ ID NO: 78471 - DNA, 201 bp, Homo sapiens; identical to SEQ ID NO: 78451

SEQ ID NO: 78472 - DNA, 201 bp, Homo sapiens; identical to SEQ ID NO: 78452

SEQ ID NO: 78473 - DNA, 201 bp, Homo sapiens
gagccgattcttccagtctacgggaagcctgaaatccacctcctcctccacaggtgcagccgaccaggtggaccctggcgctgcagcggccgcagcgcccscagcgcccgccttcccgccccagctgccgccgcacgtagctacagaaattgacagaagaaagaagagaccattggaaaatgatgggcctgttaaaaagaa

SEQ ID NO: 78474 - DNA, 201 bp, Homo sapiens
atacaagtcatgaaaatttacagaaaactgcttccaaatcagctaacaaacggtccaaaagcatctatacgccgctagaattacaatacatagaaatgaarcagcagcacaaagatgcagttttgtgtgtggaatgtggatataagtatagattctttggggaagatgcagagattgcagcccgagagctcaatatttatt

SEQ ID NO: 78475 - DNA, 201 bp, Homo sapiens
cacctcctcctccacaggtgcagccgaccaggtggaccctggcgctgcagcggccgcagcgcccccagcgcccgccttcccgccccagctgccgccgcacrtagctacagaaattgacagaagaaagaagagaccattggaaaatgatgggcctgttaaaaagaaagtaaagaaagtccaacaaaaggaaggaggaagtga

SEQ ID NO: 78476 - DNA, 201 bp, Homo sapiens
tcctgaactcctcagtccagtggagcattacttaaagatactcaatgaacaagctgccaaagttggggataaaactgaattatttaaagacctttctgacytccctttaataaaaaagaggaaggatgaaattcaaggtgttattgacgagatccgaatgcatttgcaagaaatacgaaaaatactaaaaaatccttctgc

SEQ ID NO: 78477 - DNA, 201 bp, Homo sapiens
ttgatctcagtcagtttggatcatcaaatacaagtcatgaaaatttacagaaaactgcttccaaatcagctaacaaacggtccaaaagcatctatacgccrctagaattacaatacatagaaatgaagcagcagcacaaagatgcagttttgtgtgtggaatgtggatataagtatagattctttggggaagatgcagaga

SEQ ID NO: 78478 - DNA, 201 bp, Homo sapiens
ccaagagttcttcttgattgtcaaaactttatatcacctaaagtcagaatttcaagcaataatacctgctgttaattcccacattcagtcagacttgctcyggaccgttattttagaaattcctgaactcctcagtccagtggagcattacttaaagatactcaatgaacaagctgccaaagttggggataaaactgaatt

SEQ ID NO: 78479 - DNA, 201 bp, Homo sapiens
ttctggcattgttaacttagagaagcctgtgatttgctctttggctgccatcataaaatacctcaaagaattcaacttggaaaagatgctctccaaacctragaattttaaacagctatcaagtaaaatggaatttatgacaattaatggaacaacattaaggaatctggaaatcctacagaatcagactgatatgaaaac

SEQ ID NO: 78480 - DNA, 201 bp, Homo sapiens
ttgtccgagcaaacagaggcgctcatccacagagccacatctgttagtgtgcaggatgacagaattcgagtcgaaaggatggataacatttattttgaatrcagccatgctttccaggcagttacagagttttatgcaaaagatacagttgacatcaaaggttctcaaattatttctggcattgttaacttagagaagcct

SEQ ID NO: 78481 - DNA, 201 bp, Homo sapiens
ttactcacaccaggtggggaattaccacatgggattcttggtcagtgaggatgaaagcaaactggatccaggcgcagcagaacaagtccctgattttgtcrccttcctttaccaaataactagaggaattgcagcaaggagttatggattaaatgtggctaaactagcagatgttcctggagaaattttgaagaaagcagc

SEQ ID NO: 78482 - DNA, 201 bp, Homo sapiens
attcttccagtctacgggaagcctgaaatccacctcctcctccacaggtgcagccgaccaggtggaccctggcgctgcagcggccgcagcgcccccagcgsccgccttcccgccccagctgccgccgcacgtagctacagaaattgacagaagaaagaagagaccattggaaaatgatgggcctgttaaaaagaaagtaaa

SEQ ID NO: 78483 - DNA, 201 bp, Homo sapiens
tccgccagtttgtgaactagaaaaaaattactcacaccaggtggggaattaccacatgggattcttggtcagtgaggatgaaagcaaactggatccaggcrcagcagaacaagtccctgattttgtcaccttcctttaccaaataactagaggaattgcagcaaggagttatggattaaatgtggctaaactagcagatgt

SEQ ID NO: 78484 - DNA, 201 bp, Homo sapiens
tttgagccgattcttccagtctacgggaagcctgaaatccacctcctcctccacaggtgcagccgaccaggtggaccctggcgctgcagcggccgcagcgsccccagcgcccgccttcccgccccagctgccgccgcacgtagctacagaaattgacagaagaaagaagagaccattggaaaatgatgggcctgttaaaaa

SEQ ID NO: 78485 - DNA, 201 bp, Homo sapiens
gctcagattggctcctatgttcctgcagaagaagcgacaattgggattgtggatggcattttcacaaggatgggtgctgcagacaatatatataaaggacrgagtacatttatggaagaactgactgacacagcagaaataatcagaaaagcaacatcacagtccttggttatcttggatgaactaggaagagggacgagc

SEQ ID NO: 78486 - DNA, 201 bp, Homo sapiens
aagcggttttgagccgattcttccagtctacgggaagcctgaaatccacctcctcctccacaggtgcagccgaccaggtggaccctggcgctgcagcggcygcagcgcccccagcgcccgccttcccgccccagctgccgccgcacgtagctacagaaattgacagaagaaagaagagaccattggaaaatgatgggcctg

SEQ ID NO: 78487 - DNA, 201 bp, Homo sapiens
atgggcctgttaaaaagaaagtaaagaaagtccaacaaaaggaaggaggaagtgatctgggaatgtctggcaactctgagccaaagaaatgtctgaggacyaggaatgtttcaaagtctctggaaaaattgaaagaattctgctgcgattctgcccttcctcaaagtagagtccagacagaatctctgcaggagagatttg

SEQ ID NO: 78488 - DNA, 201 bp, Homo sapiens
gttgactgcattttctccctggccaaggtcgctaagcaaggagattactgcagaccaactgtacaagaagaaagaaaaattgtaataaaaaatggaaggcwccctgtgattgatgtgttgctgggagaacaggatcaatatgtcccaaataatacagatttatcagaggactcagagagagtaatgataattaccggacca

SEQ ID NO: 78489 - DNA, 201 bp, Homo sapiens
ttcaagaccagcctggccaacatggcaaaaccccatctttactaaaaatataaagtacatctctactaaaaatacgaaaaaattagctgggcatggtggcrcacacctgtagtcccagctactccggaggctgaggcaggagaatctcttgaacctgggaggcggaggttgcaatgagccgagatcacgtcactgcactcc

SEQ ID NO: 78490 - DNA, 201 bp, Homo sapiens
ggtccgggagcagcctaggctatttcctccaagcgcagactacccagacctgcgcaagcacaacaactgcatggccgagtgcctcacccccgccatttatkccaagcttcgcaacaaggtgacacccaacggctacacgctggaccagtgcatccagactggagtggacaaccctggccaccccttcataaagactgtggg

SEQ ID NO: 78491 - DNA, 201 bp, Homo sapiens
cactgccgcggtcgcagatgtgtacgacatttccaacatagatagaattggtcgatcagaggttgagcttgttcagatagtcatcgatggagtcaattacmtggtggattgtgaaaagaagttggagagaggccaagatattaaggtgccaccccctctgcctcagtttggcaaaaagtaaactttccctttcccaattta

SEQ ID NO: 78492 - DNA, 198 bp, Homo sapiens
ggagagaggccaagatattaaggtgccaccccctctgcctcagtttggcaaaaagtaaactttccctttcccaatttataaataatctgtctgctggtacracagacataaatctctactctgagagtttttatacacttggaaaaatataaaattgtagatcctgcctatctttacaataaaactctccttaatata

SEQ ID NO: 78493 - DNA, 201 bp, Homo sapiens; identical to SEQ ID NO: 78490

SEQ ID NO: 78494 - DNA, 201 bp, Homo sapiens; identical to SEQ ID NO: 78491

SEQ ID NO: 78495 - DNA, 198 bp, Homo sapiens; identical to SEQ ID NO: 78492

SEQ ID NO: 78496 - DNA, 201 bp, Homo sapiens; identical to SEQ ID NO: 78490

SEQ ID NO: 78497 - DNA, 201 bp, Homo sapiens; identical to SEQ ID NO: 78491

SEQ ID NO: 78498 - DNA, 198 bp, Homo sapiens; identical to SEQ ID NO: 78492

SEQ ID NO: 78499 - DNA, 201 bp, Homo sapiens
ggcaccctggtgcccagccgggaactccccatcgcgttttgccagcgataatacgcctcagatggtggtatttgctaacatcatatccaactcagggaagyggactgagtgctgggatccaaggcattctacagggttcactgctggtttacacttcacctgtgtcagcaccatcttcaggtgcttagaatggcctgggag

SEQ ID NO: 78500 - DNA, 201 bp, Homo sapiens
tttgttggattgtccgcaaatacgacatccaggccacagacaatgagcctgttgagatgctacactcaggcaccctggtgcccagccgggaactccccatygcgttttgccagcgataatacgcctcagatggtggtatttgctaacatcatatccaactcagggaagcggactgagtgctgggatccaaggcattctaca

SEQ ID NO: 78501 - DNA, 201 bp, Homo sapiens
gataatacgcctcagatggtggtatttgctaacatcatatccaactcagggaagcggactgagtgctgggatccaaggcattctacagggttcactgctgrtttacacttcacctgtgtcagcaccatcttcaggtgcttagaatggcctgggagcctgttctgtcttgcatcttccatgacatgaaagggaggctggcac

SEQ ID NO: 78502 - DNA, 201 bp, Homo sapiens
tctgcctcgtgttgtatgagaagagatttgggcttctccagaagaatgcaggggatgaagctgtgaacttcatcatggccatcaaaacaatgatgagcacrtttgggaggatgatggtcactccagtcgagctgcacaagagcctcaacaccaaggtctggcaggaccacactctggcctgggacaccattttcaaatcag

SEQ ID NO: 78503 - DNA, 201 bp, Homo sapiens
gcagtacttgatttaggatctgtggtgcagggcaatgtttcaaagtttagtcacagcttaaaaacattcagtgtgactttaatattataaaatgatttccyatgccataatttttctgtctattaaatgggacaagtgtaaagcatgcaaaagttagagatctgttatataacatttgttttgtgatttgaactcctagga

SEQ ID NO: 78504 - DNA, 201 bp, Homo sapiens
aaggggaagactggcagcgggtccggagtgcctttcaaaagaaactaatgaaaccaggggaagtgatgaagctggacaacaaaatcaatgaggtcttggcygattttatgggcagaatagatgagctctgtgatgaaagaggccacgttgaagacttgtacagcgaactgaacaaatggtcgtttgaaagtatctgcctcg

SEQ ID NO: 78505 - DNA, 201 bp, Homo sapiens
cgcgtacccgcagcggctggagatcaaaccgtggaaggcctatcgcgactaccgcaaagaaggctacgggctgctgatcctggaaggggaagactggcagmgggtccggagtgcctttcaaaagaaactaatgaaaccaggggaagtgatgaagctggacaacaaaatcaatgaggtcttggctgattttatgggcagaat

SEQ ID NO: 78506 - DNA, 201 bp, Homo sapiens
aatttatcccgtaatccccaagtgcaacaaaagcttcttaaggaaattcaaagtgtattacctgagaatcaggtgccacgggcagaagatttgaggaataygccgtatttaaaagcctgtctgaaagaatctatgaggcttacgccgagtgtaccatttacaactcggactcttgacaaggcaacagttctgggtgaatat

SEQ ID NO: 78507 - DNA, 201 bp, Homo sapiens
tatcccgtaatccccaagtgcaacaaaagcttcttaaggaaattcaaagtgtattacctgagaatcaggtgccacgggcagaagatttgaggaatatgccrtatttaaaagcctgtctgaaagaatctatgaggcttacgccgagtgtaccatttacaactcggactcttgacaaggcaacagttctgggtgaatatgctt

SEQ ID NO: 78508 - DNA, 158 bp, Homo sapiens
catttatgtctttatattgtaataaatatgtacatatctaggtatatgctttctctctgctgtgaaattatttttagaattataaattcacgtcttgtcakatttcatctgtataccttcaaattctctgaaagtaaaaataaaagtttttaaatatt

SEQ ID NO: 78509 - DNA, 201 bp, Homo sapiens
ctcagggaagcggactgagtgctgggatccaaggcattctacagggttcactgctggtttacacttcacctgtgtcagcaccatcttcaggtgcttagaayggcctgggagcctgttctgtcttgcatcttccatgacatgaaagggaggctggcacttgtcagtcaggtagaggttacaaaccgtttcaggccctgccta

SEQ ID NO: 78510 - DNA, 201 bp, Homo sapiens
agattctgcgctatagccggcagctagtgctgcccgagctgggcgtgcacggacagctgcgcctggggaccgcgtgcgtgctaatcgtgggctgcggtggrctcggctgtccactagcgcagtacttggcagcggccggcgtgggccgccttggccttgtggactatgacgtggtagagatgagcaacctggcccgccaag

SEQ ID NO: 78511 - DNA, 201 bp, Homo sapiens
ttagtttatcccagtcgctaggagacagaagacggaagcggaaatgcctttcacgacaacttccggaagaggtcgccatggcttcccgggaggaggtactmgccttacaagctgaagttgcccaacgtgaggaggaattgaattcgctgaagcagaagctggcgtcggctcttttggctgagcaggaaccgcagccagaac

SEQ ID NO: 78512 - DNA, 201 bp, Homo sapiens
ggcgtgagccaccacaccctcccgagatctttaaagtttaccaaaataaaggaaaccacctttgtagtctgtcagtgtctcttataaattgctactgtttycttaaagttaacttcagggtccaccttatgttgcacacatatcacatcgtttaaattgcatactatggtttgacttgctttggaattttcaagtcaaagt

SEQ ID NO: 78513 - DNA, 201 bp, Homo sapiens
tgcggagccgcaggctcgactgtgcagcttgcggggaacggcccactgtgactgatctgctggactatgaagccttctgtggctcctcagccactgataartgccgctccctgcaactactgagcccagaggagcgtgtttctgtcaccgactataagcgactgctggattctggggcattccacctgttgctggacgtca

SEQ ID NO: 78514 - DNA, 201 bp, Homo sapiens
tttaatctgaaggtttcttcaggaagtaaatatctattcatcaccttttcccaagctccataaagttttttagtttatcccagtcgctaggagacagaagmcggaagcggaaatgcctttcacgacaacttccggaagaggtcgccatggcttcccgggaggaggtactcgccttacaagctgaagttgcccaacgtgagg

SEQ ID NO: 78515 - DNA, 201 bp, Homo sapiens
aagaaactcgagagatcttacatttccactataccacatggcctgactttggagtccctgaatcaccagcctcattcttgaactttcttttcaaagtccgrgagtcagggtcactcagcccggagcacgggcccgttgtggtgcactgcagtgcaggcatcggcaggtctggaaccttctgtctggctgatacctgcctct

SEQ ID NO: 78516 - DNA, 192 bp, Homo sapiens
tctcctacctggctgtgatcgaaggtgccaaattcatcatgggggactcttccgtggatcagtggaaggagctttcccacgaggacctggagcccccaccygagcatatccccccacctccccggccacccaaacgaatcctggagccacacaatgggaaatgcagggagttcttcccaaatcaccagtggg

SEQ ID NO: 78517 - DNA, 201 bp, Homo sapiens
aagagatgatctttgaagacacaaatttgaaattaacattgatctctgaagatatcaagtcatattatacagtgcgacagctagaattggaaaaccttacracccaagaaactcgagagatcttacatttccactataccacatggcctgactttggagtccctgaatcaccagcctcattcttgaactttcttttcaaag

SEQ ID NO: 78518 - DNA, 201 bp, Homo sapiens; identical to SEQ ID NO: 78515

SEQ ID NO: 78519 - DNA, 201 bp, Homo sapiens
agggccttaacctattcaggagtaagtagagaaaatgccaaatacgtctgtttctctctctctttttttttttattcctttgtttttggaaaaaaatagarttacaacacattgttgtttttaacctttataaaaagcagctttttgttatttctggaacaaaaaaaaacaaagtaggcacttatgaaactttctcatacc

SEQ ID NO: 78520 - DNA, 201 bp, Homo sapiens
ggtcccaagaatataagagtctaatctcagggccttaacctattcaggagtaagtagagaaaatgccaaatacgtctgtttctctctctctttttttttttattcctttgtttttggaaaaaaatagagttacaacacattgttgtttttaacctttataaaaagcagctttttgttatttctggaacaaaaaaaaacaaa

SEQ ID NO: 78521 - DNA, 201 bp, Homo sapiens
cctacctggctgtgatcgaaggtgccaaattcatcatgggggactcttccgtgcaggatcagtggaaggagctttcccacgaggacctggagcccccaccygagcatatccccccacctccccggccacccaaacgaatcctggagccacacaatgggaaatgcagggagttcttcccaaatcaccagtgggtgaaggaag

SEQ ID NO: 78522 - DNA, 201 bp, Homo sapiens; identical to SEQ ID NO: 78517

SEQ ID NO: 78523 - DNA, 201 bp, Homo sapiens
ataaaccatttttacaaaaataaaaacaaaaaaagcaaggtgttttggtataataccttttcaggtgtgtgtggatacgtggctgcatgaccgggtgggtkggggggagtgtctcagggtcttctgtgacctcacagaactgtcagactgtacagttttccaacttgccatattcatgatgggtttgcattttagctgcaa

SEQ ID NO: 78524 - DNA, 201 bp, Homo sapiens; identical to SEQ ID NO: 78515

SEQ ID NO: 78525 - DNA, 201 bp, Homo sapiens; identical to SEQ ID NO: 78521

SEQ ID NO: 78526 - DNA, 201 bp, Homo sapiens
gtgtgtatatatagtagcatttcaaaatggacgtactggtttaacctcctatccttggagagcagctggctctccaccttgttacacattatgttagagakgtagcgagctgctctgctatatgccttaagccaatatttactcatcaggtcattattttttacaatggccatggaataaaccatttttacaaaaataaaa

SEQ ID NO: 78527 - DNA, 201 bp, Homo sapiens
gtgggtaacgtgagaagatagaacaatgctataatatataatgaacacgtgggtatttaataagaaacatgatgtgagattactttgtcccgcttattctsctccctgttatctgctagatctagttctcaatcactgctcccccgtgtgtattagaatgcatgtaaggtcttcttgtgtcctgatgaaaaatatgtgctt

SEQ ID NO: 78528 - DNA, 201 bp, Homo sapiens; identical to SEQ ID NO: 78517

SEQ ID NO: 78529 - DNA, 201 bp, Homo sapiens
acatgtgtctcccgcagcgctgtcatggcgtcctgcggcgccggaaggactggaacgtgcgcctgcaggccttcttcaccagtgacacggggcttgaataygaagcccccaagctgtaccctgccattcccgcagcccgaaggcggcccattcgagtcctgtcattgtttgatggcatcgcgacaggctacctagtcctca

SEQ ID NO: 78530 - DNA, 201 bp, Homo sapiens
cggcccattcgagtcctgtcattgtttgatggcatcgcgacaggctacctagtcctcaaagagttgggcataaaggtaggaaagtacgtcgcttctgaagygtgtgaggagtccattgctgttggaaccgtgaagcacgaggggaatatcaaatacgtgaacgacgtgaggaacatcacaaagaaaaatattgaagaatgg

SEQ ID NO: 78531 - DNA, 201 bp, Homo sapiens
gcaacacgagctgctgccggtgtttctgtgtggagtgcctggaggtgctggtgggcacaggcacagcggccgaggccaagcttcaggagccctggagctgytacatgtgtctcccgcagcgctgtcatggcgtcctgcggcgccggaaggactggaacgtgcgcctgcaggccttcttcaccagtgacacggggcttgaat

SEQ ID NO: 78532 - DNA, 201 bp, Homo sapiens
aggatctttggctttcctgtgcactacacagacgtgtccaacatgggccgtggtgcccgccagaagctgctgggaaggtcctggagcgtgcctgtcatccracacctcttcgcccctctgaaggactactttgcatgtgaatagttccagccaggccccaagcccactggggtgtgtggcagagccaggacccaggaggtg

SEQ ID NO: 78533 - DNA, 201 bp, Homo sapiens
cacagacgacacagaggacacacatgggacgccccagagcagcagtaccccctacgcccgcctagcccaggacagccagcaggggggcatggagtccccgyaggtggaggcagacagtggagatggagacagttcagagtatcaggatgggaaggagtttggaataggggacctcgtgtggggaaagatcaagggcttctc

SEQ ID NO: 78534 - DNA, 201 bp, Homo sapiens
tggcttcagatgttgccaacaacaagagcagcctggaagatggctgtttgtcttgtggcaggaaaaaccccgtgtccttccaccctctctttgaggggggrctctgtcagacatgccgggatcgcttccttgagctgttttacatgtatgatgacgatggctatcagtcttactgcactgtgtgctgcgagggccgagagc

SEQ ID NO: 78535 - DNA, 201 bp, Homo sapiens
gagggtacaggccggctcttcttcgaattttaccacctgctgaattactcacgccccaaggagggtgatgaccggccgttcttctggatgtttgagaatgktgtagccatgaaggttggcgacaagagggacatctcacggttcctggagtgtaatccagtgatgattgatgccatcaaagtttctgctgctcacagggcc

SEQ ID NO: 78536 - DNA, 201 bp, Homo sapiens
gtggcaggaaaaaccccgtgtccttccaccctctctttgagggggggctctgtcagacatgccgggatcgcttccttgagctgttttacatgtatgatgaygatggctatcagtcttactgcactgtgtgctgcgagggccgagagctgctgctttgcagcaacacgagctgctgccggtgtttctgtgtggagtgcctgg

SEQ ID NO: 78537 - DNA, 201 bp, Homo sapiens
caaacccaacaacacgcaaccagtggttaataagtcgaaggtgcgtcgtgcaggcagtaggaaattagaatcaaggaaatacgagaacaagactcgaagaygcacagctgacgactcagccacctctgactactgccccgcacccaagcgcctcaagacaaattgctataacaacggcaaagaccgaggggatgaagatca

SEQ ID NO: 78538 - DNA, 201 bp, Homo sapiens
gggacagacatacatttctcataccttccccacatctgagagatgacagggaaaactgcaaagctcggtgctccctttggagattttttaatccttttttwttccataagaagtcgtttttagggagaacgggaattcagacaagctgcatttcagaaatgctgtcataatggtttttaacaccttttactcttcttactg

SEQ ID NO: 78539 - DNA, 201 bp, Homo sapiens
cccacaggaaagcatgaagggagacaccaggcatctcaatggagaggaggacgccggcgggagggaagactcgatcctcgtcaacggggcctgcagcgacyagtcctccgactcgcccccaatcctggaggctatccgcaccccggagatcagaggccgaagatcaagctcgcgactctccaagagggaggtgtccagtct

SEQ ID NO: 78540 - DNA, 201 bp, Homo sapiens
ctcctggtggcccgccatggtggtgtcttggaaggccacctccaagcgacaggctatgtctggcatgcggtgggtccagtggtttggcgatggcaagttcyccgaggtctctgcagacaaactggtggcactggggctgttcagccagcactttaatttggccaccttcaataagctcgtctcctatcgaaaagccatgta

SEQ ID NO: 78541 - DNA, 201 bp, Homo sapiens
ccgatacttctggggcaacctacccgggatgaacaggcccgtgatagcatcaaagaatgataaactcgagctgcaggactgcttggaatacaataggatasccaagttaaagaaagtacagacaataaccaccaagtcgaactcgatcaaacaggggaaaaaccaacttttccctgttgtcatgaatggcaaagaagatgt

SEQ ID NO: 78542 - DNA, 201 bp, Homo sapiens
atcaaacaggggaaaaaccaacttttccctgttgtcatgaatggcaaagaagatgttttgtggtgcactgagctcgaaaggatctttggctttcctgtgcrctacacagacgtgtccaacatgggccgtggtgcccgccagaagctgctgggaaggtcctggagcgtgcctgtcatccgacacctcttcgcccctctgaag

SEQ ID NO: 78543 - DNA, 201 bp, Homo sapiens
agcccgaaggcggcccattcgagtcctgtcattgtttgatggcatcgcgacaggctacctagtcctcaaagagttgggcataaaggtaggaaagtacgtcrcttctgaagtgtgtgaggagtccattgctgttggaaccgtgaagcacgaggggaatatcaaatacgtgaacgacgtgaggaacatcacaaagaaaaatat

SEQ ID NO: 78544 - DNA, 201 bp, Homo sapiens
gatcctcgtcaacggggcctgcagcgaccagtcctccgactcgcccccaatcctggaggctatccgcaccccggagatcagaggccgaagatcaagctcgygactctccaagagggaggtgtccagtctgctaagctacacacaggacttgacaggcgatggcgacggggaagatggggatggctctgacaccccagtcat

SEQ ID NO: 78545 - DNA, 201 bp, Homo sapiens
agtgacacggggcttgaatatgaagcccccaagctgtaccctgccattcccgcagcccgaaggcggcccattcgagtcctgtcattgtttgatggcatcgygacaggctacctagtcctcaaagagttgggcataaaggtaggaaagtacgtcgcttctgaagtgtgtgaggagtccattgctgttggaaccgtgaagcac

SEQ ID NO: 78546 - DNA, 201 bp, Homo sapiens
gaacatcacaaagaaaaatattgaagaatggggcccatttgacttggtgattggcggaagcccatgcaacgatctctcaaatgtgaatccagccaggaaargcctgtatgagggtacaggccggctcttcttcgaattttaccacctgctgaattactcacgccccaaggagggtgatgaccggccgttcttctggatgtt

SEQ ID NO: 78547 - DNA, 201 bp, Homo sapiens
atcacaaagaaaaatattgaagaatggggcccatttgacttggtgattggcggaagcccatgcaacgatctctcaaatgtgaatccagccaggaaaggccygtatgagggtacaggccggctcttcttcgaattttaccacctgctgaattactcacgccccaaggagggtgatgaccggccgttcttctggatgtttgag

SEQ ID NO: 78548 - DNA, 201 bp, Homo sapiens
ggaaatacgagaacaagactcgaagacgcacagctgacgactcagccacctctgactactgccccgcacccaagcgcctcaagacaaattgctataacaayggcaaagaccgaggggatgaagatcagagccgagaacaaatggcttcagatgttgccaacaacaagagcagcctggaagatggctgtttgtcttgtggca

SEQ ID NO: 78549 - DNA, 201 bp, Homo sapiens
tgaaggactactttgcatgtgaatagttccagccaggccccaagcccactggggtgtgtggcagagccaggacccaggaggtgtgattcctgaaggcatcsccaggccctgctcttcctcagctgtgtgggtcataccgtgtacctcagttccctcttgctcagtgggggcagagccacctgactcttgcaggggtagcct

SEQ ID NO: 78550 - DNA, 201 bp, Homo sapiens
cgcggctccgccgcccagccgcgccccagccagccctgcggcagctcccacaggaaagcatgaagggagacaccaggcatctcaatggagaggaggacgcyggcgggagggaagactcgatcctcgtcaacggggcctgcagcgaccagtcctccgactcgcccccaatcctggaggctatccgcaccccggagatcagag

SEQ ID NO: 78551 - DNA, 201 bp, Homo sapiens
cccgtgactgcaatagaaccctctggggagctcaggaaggggtgtgctgagttctataatataagctgccatatattttgtagacaagtatggctcctccrtatctccctcttccctaggagaggagtgtgaagcaaggagcttagataagacaccccctcaaacccattccctctccaggagacctaccctccacaggca

SEQ ID NO: 78552 - DNA, 201 bp, Homo sapiens; identical to SEQ ID NO: 78529

SEQ ID NO: 78553 - DNA, 201 bp, Homo sapiens; identical to SEQ ID NO: 78530

SEQ ID NO: 78554 - DNA, 201 bp, Homo sapiens; identical to SEQ ID NO: 78531

SEQ ID NO: 78555 - DNA, 201 bp, Homo sapiens; identical to SEQ ID NO: 78532

SEQ ID NO: 78556 - DNA, 201 bp, Homo sapiens; identical to SEQ ID NO: 78533

SEQ ID NO: 78557 - DNA, 201 bp, Homo sapiens; identical to SEQ ID NO: 78534

SEQ ID NO: 78558 - DNA, 201 bp, Homo sapiens; identical to SEQ ID NO: 78535

SEQ ID NO: 78559 - DNA, 201 bp, Homo sapiens; identical to SEQ ID NO: 78536

SEQ ID NO: 78560 - DNA, 201 bp, Homo sapiens
gctgaagcccatgttggagtgggcccacgggggcttcaagcccactgggatcgagggcctcaaacccaacaacacgcaaccagagaacaagactcgaagaygcacagctgacgactcagccacctctgactactgccccgcacccaagcgcctcaagacaaattgctataacaacggcaaagaccgaggggatgaagatca

SEQ ID NO: 78561 - DNA, 201 bp, Homo sapiens; identical to SEQ ID NO: 78538

SEQ ID NO: 78562 - DNA, 201 bp, Homo sapiens
aagcttggaaagcatgaagggagacaccaggcatctcaatggagaggaggacgccggcgggagggaagactcgatcctcgtcaacggggcctgcagcgacyagtcctccgactcgcccccaatcctggaggctatccgcaccccggagatcagaggccgaagatcaagctcgcgactctccaagagggaggtgtccagtct

SEQ ID NO: 78563 - DNA, 201 bp, Homo sapiens; identical to SEQ ID NO: 78540

SEQ ID NO: 78564 - DNA, 201 bp, Homo sapiens; identical to SEQ ID NO: 78541

SEQ ID NO: 78565 - DNA, 201 bp, Homo sapiens; identical to SEQ ID NO: 78542

SEQ ID NO: 78566 - DNA, 201 bp, Homo sapiens; identical to SEQ ID NO: 78543

SEQ ID NO: 78567 - DNA, 201 bp, Homo sapiens; identical to SEQ ID NO: 78544

SEQ ID NO: 78568 - DNA, 201 bp, Homo sapiens; identical to SEQ ID NO: 78545

SEQ ID NO: 78569 - DNA, 201 bp, Homo sapiens; identical to SEQ ID NO: 78546

SEQ ID NO: 78570 - DNA, 201 bp, Homo sapiens; identical to SEQ ID NO: 78547

SEQ ID NO: 78571 - DNA, 201 bp, Homo sapiens
cgcaaccagagaacaagactcgaagacgcacagctgacgactcagccacctctgactactgccccgcacccaagcgcctcaagacaaattgctataacaayggcaaagaccgaggggatgaagatcagagccgagaacaaatggcttcagatgttgccaacaacaagagcagcctggaagatggctgtttgtcttgtggca

SEQ ID NO: 78572 - DNA, 201 bp, Homo sapiens; identical to SEQ ID NO: 78549

SEQ ID NO: 78573 - DNA, 178 bp, Homo sapiens
atggaaccaagtcctgagcctccaagcttggaaagcatgaagggagacaccaggcatctcaatggagaggaggacgcyggcgggagggaagactcgatcctcgtcaacggggcctgcagcgaccagtcctccgactcgcccccaatcctggaggctatccgcaccccggagatcagag

SEQ ID NO: 78574 - DNA, 201 bp, Homo sapiens; identical to SEQ ID NO: 78551

SEQ ID NO: 78575 - DNA, 201 bp, Homo sapiens; identical to SEQ ID NO: 78529

SEQ ID NO: 78576 - DNA, 201 bp, Homo sapiens; identical to SEQ ID NO: 78530

SEQ ID NO: 78577 - DNA, 201 bp, Homo sapiens; identical to SEQ ID NO: 78531

SEQ ID NO: 78578 - DNA, 201 bp, Homo sapiens; identical to SEQ ID NO: 78532

SEQ ID NO: 78579 - DNA, 201 bp, Homo sapiens; identical to SEQ ID NO: 78533

SEQ ID NO: 78580 - DNA, 201 bp, Homo sapiens; identical to SEQ ID NO: 78534

SEQ ID NO: 78581 - DNA, 201 bp, Homo sapiens; identical to SEQ ID NO: 78535

SEQ ID NO: 78582 - DNA, 201 bp, Homo sapiens; identical to SEQ ID NO: 78536

SEQ ID NO: 78583 - DNA, 201 bp, Homo sapiens; identical to SEQ ID NO: 78537

SEQ ID NO: 78584 - DNA, 201 bp, Homo sapiens; identical to SEQ ID NO: 78538

SEQ ID NO: 78585 - DNA, 201 bp, Homo sapiens; identical to SEQ ID NO: 78539

SEQ ID NO: 78586 - DNA, 201 bp, Homo sapiens; identical to SEQ ID NO: 78540

SEQ ID NO: 78587 - DNA, 201 bp, Homo sapiens
ccgatacttctggggcaacctacccgggatgaacaggcccgtgatagcatcaaagaatgataaactcgagctgcaggactgcttggaatacaataggatasccaaggatctttggctttcctgtgcactacacagacgtgtccaacatgggccgtggtgcccgccagaagctgctgggaaggtcctggagcgtgcctgtca

SEQ ID NO: 78588 - DNA, 201 bp, Homo sapiens
ggatgaacaggcccgtgatagcatcaaagaatgataaactcgagctgcaggactgcttggaatacaataggatagccaaggatctttggctttcctgtgcrctacacagacgtgtccaacatgggccgtggtgcccgccagaagctgctgggaaggtcctggagcgtgcctgtcatccgacacctcttcgcccctctgaag

SEQ ID NO: 78589 - DNA, 201 bp, Homo sapiens; identical to SEQ ID NO: 78543

SEQ ID NO: 78590 - DNA, 201 bp, Homo sapiens; identical to SEQ ID NO: 78544

SEQ ID NO: 78591 - DNA, 201 bp, Homo sapiens; identical to SEQ ID NO: 78545

SEQ ID NO: 78592 - DNA, 201 bp, Homo sapiens; identical to SEQ ID NO: 78546

SEQ ID NO: 78593 - DNA, 201 bp, Homo sapiens; identical to SEQ ID NO: 78547

SEQ ID NO: 78594 - DNA, 201 bp, Homo sapiens; identical to SEQ ID NO: 78548

SEQ ID NO: 78595 - DNA, 201 bp, Homo sapiens; identical to SEQ ID NO: 78549

SEQ ID NO: 78596 - DNA, 201 bp, Homo sapiens; identical to SEQ ID NO: 78550

SEQ ID NO: 78597 - DNA, 201 bp, Homo sapiens; identical to SEQ ID NO: 78551

SEQ ID NO: 78598 - DNA, 201 bp, Homo sapiens; identical to SEQ ID NO: 78529

SEQ ID NO: 78599 - DNA, 201 bp, Homo sapiens; identical to SEQ ID NO: 78530

SEQ ID NO: 78600 - DNA, 201 bp, Homo sapiens; identical to SEQ ID NO: 78531

SEQ ID NO: 78601 - DNA, 201 bp, Homo sapiens; identical to SEQ ID NO: 78532

SEQ ID NO: 78602 - DNA, 201 bp, Homo sapiens; identical to SEQ ID NO: 78533

SEQ ID NO: 78603 - DNA, 201 bp, Homo sapiens; identical to SEQ ID NO: 78534

SEQ ID NO: 78604 - DNA, 201 bp, Homo sapiens; identical to SEQ ID NO: 78535

SEQ ID NO: 78605 - DNA, 201 bp, Homo sapiens; identical to SEQ ID NO: 78536

SEQ ID NO: 78606 - DNA, 201 bp, Homo sapiens; identical to SEQ ID NO: 78560

SEQ ID NO: 78607 - DNA, 201 bp, Homo sapiens; identical to SEQ ID NO: 78538

SEQ ID NO: 78608 - DNA, 201 bp, Homo sapiens; identical to SEQ ID NO: 78539

SEQ ID NO: 78609 - DNA, 201 bp, Homo sapiens; identical to SEQ ID NO: 78540

SEQ ID NO: 78610 - DNA, 201 bp, Homo sapiens
ccagtgatgattgatgccatcaaagtttctgctgctcacagggcccgatacttctggggcaacctacccgggatgaacaggatctttggctttcctgtgcrctacacagacgtgtccaacatgggccgtggtgcccgccagaagctgctgggaaggtcctggagcgtgcctgtcatccgacacctcttcgcccctctgaag

SEQ ID NO: 78611 - DNA, 201 bp, Homo sapiens; identical to SEQ ID NO: 78543

SEQ ID NO: 78612 - DNA, 201 bp, Homo sapiens; identical to SEQ ID NO: 78544

SEQ ID NO: 78613 - DNA, 201 bp, Homo sapiens; identical to SEQ ID NO: 78545

SEQ ID NO: 78614 - DNA, 201 bp, Homo sapiens; identical to SEQ ID NO: 78546

SEQ ID NO: 78615 - DNA, 201 bp, Homo sapiens; identical to SEQ ID NO: 78547

SEQ ID NO: 78616 - DNA, 201 bp, Homo sapiens; identical to SEQ ID NO: 78571

SEQ ID NO: 78617 - DNA, 201 bp, Homo sapiens; identical to SEQ ID NO: 78549

SEQ ID NO: 78618 - DNA, 201 bp, Homo sapiens; identical to SEQ ID NO: 78550

SEQ ID NO: 78619 - DNA, 201 bp, Homo sapiens; identical to SEQ ID NO: 78551

SEQ ID NO: 78620 - DNA, 201 bp, Homo sapiens; identical to SEQ ID NO: 78529

SEQ ID NO: 78621 - DNA, 201 bp, Homo sapiens; identical to SEQ ID NO: 78530

SEQ ID NO: 78622 - DNA, 201 bp, Homo sapiens; identical to SEQ ID NO: 78531

SEQ ID NO: 78623 - DNA, 201 bp, Homo sapiens; identical to SEQ ID NO: 78532

SEQ ID NO: 78624 - DNA, 201 bp, Homo sapiens; identical to SEQ ID NO: 78533

SEQ ID NO: 78625 - DNA, 201 bp, Homo sapiens; identical to SEQ ID NO: 78534

SEQ ID NO: 78626 - DNA, 201 bp, Homo sapiens; identical to SEQ ID NO: 78535

SEQ ID NO: 78627 - DNA, 201 bp, Homo sapiens; identical to SEQ ID NO: 78536

SEQ ID NO: 78628 - DNA, 201 bp, Homo sapiens; identical to SEQ ID NO: 78537

SEQ ID NO: 78629 - DNA, 201 bp, Homo sapiens; identical to SEQ ID NO: 78538

SEQ ID NO: 78630 - DNA, 201 bp, Homo sapiens
gcggcaggaaagcatgaagggagacaccaggcatctcaatggagaggaggacgccggcgggagggaagactcgatcctcgtcaacggggcctgcagcgacyagtcctccgactcgcccccaatcctggaggctatccgcaccccggagatcagaggccgaagatcaagctcgcgactctccaagagggaggtgtccagtct

SEQ ID NO: 78631 - DNA, 201 bp, Homo sapiens; identical to SEQ ID NO: 78540

SEQ ID NO: 78632 - DNA, 201 bp, Homo sapiens; identical to SEQ ID NO: 78541

SEQ ID NO: 78633 - DNA, 201 bp, Homo sapiens; identical to SEQ ID NO: 78542

SEQ ID NO: 78634 - DNA, 201 bp, Homo sapiens; identical to SEQ ID NO: 78543

SEQ ID NO: 78635 - DNA, 201 bp, Homo sapiens; identical to SEQ ID NO: 78544

SEQ ID NO: 78636 - DNA, 201 bp, Homo sapiens; identical to SEQ ID NO: 78545

SEQ ID NO: 78637 - DNA, 201 bp, Homo sapiens; identical to SEQ ID NO: 78546

SEQ ID NO: 78638 - DNA, 201 bp, Homo sapiens; identical to SEQ ID NO: 78547

SEQ ID NO: 78639 - DNA, 201 bp, Homo sapiens; identical to SEQ ID NO: 78548

SEQ ID NO: 78640 - DNA, 201 bp, Homo sapiens; identical to SEQ ID NO: 78549

SEQ ID NO: 78641 - DNA, 201 bp, Homo sapiens
gccccgacccgcggctccgccgcccagccgcgccccagccagccctgcggcaggaaagcatgaagggagacaccaggcatctcaatggagaggaggacgcyggcgggagggaagactcgatcctcgtcaacggggcctgcagcgaccagtcctccgactcgcccccaatcctggaggctatccgcaccccggagatcagag

SEQ ID NO: 78642 - DNA, 201 bp, Homo sapiens; identical to SEQ ID NO: 78551

SEQ ID NO: 78643 - DNA, 201 bp, Homo sapiens
gtccctctccgaagccttcagcgtggcctctgcagctgctgtgctctcgcataatcgctaccacgtgccagttgtggttgtgcctgagggctctgcttccracactcatgaacaggctatcttgcggttgcaagtcaccaatgttctgtctcagcctctgactcaggccactgttaaactagaacatgctaaatctgttgc

SEQ ID NO: 78644 - DNA, 201 bp, Homo sapiens
aatggcgccgccgggttcaagcactgtcttcctgttggccctgacaatcatagccagcacctgggctctgacgcccactcactacctcaccaagcatgacrtggagagactaaaagcctcgctggatcgccctttcacaaatttggaatctgccttctactccatcgtgggactcagcagccttggtgctcaggtgccaga

SEQ ID NO: 78645 - DNA, 201 bp, Homo sapiens
acactgacctgtgcttagaactcatcctggcccgcagagcctgccgcgagtccctggcgtcccctgtggcgggctcttggagccactttcccgagcggaastcagcccgcggctcggactccggcgggacctgctcggaggaatggcgccgccgggttcaagcactgtcttcctgttggccctgacaatcatagccagcac

SEQ ID NO: 78646 - DNA, 201 bp, Homo sapiens
gagaggcgggtctgtcctcgggaactgcaaggccctgtgagcgggaggactgggatcccggccgcggctgctggaagcgtcgaagctcagcggggccgcgsacactgacctgtgcttagaactcatcctggcccgcagagcctgccgcgagtccctggcgtcccctgtggcgggctcttggagccactttcccgagcggaa

SEQ ID NO: 78647 - DNA, 201 bp, Homo sapiens
tggatacctctgaaagaaagattgaatttgactctgcctctggcacctacactctctacttaatcattggagatgccactttgaagaacccaatcctctggaatgtggctgatgtggtcatcaagttccctgaggaagaagctccctcgactgtcttgtcccagaaccttttcactccaaaacaggaaattcagcacctgt

SEQ ID NO: 78648 - DNA, 201 bp, Homo sapiens
aagaaagattgaatttgactctgcctctggcacctacactctctacttaatcattggagatgccactttgaagaacccaatcctctggaatgtggctgatktggtcatcaagttccctgaggaagaagctccctcgactgtcttgtcccagaaccttttcactccaaaacaggaaattcagcacctgttccgcgagcctga

SEQ ID NO: 78649 - DNA, 201 bp, Homo sapiens
cacgattatatttcacctgggacatgctgctatgctgggactcatgtatgtctactggactcagctcaacatgttccagaccttgaagtacctggccatcytgggcagtgtgacgtttctggctggcaatcggatgctggcccagcaggcagtcaagaggatcgctgcagagcagagcagtagattggcaaaatataggac

SEQ ID NO: 78650 - DNA, 201 bp, Homo sapiens
tggtgccaatgtctccaacttcacttttgctcctagcacgattatatttcacctgggacatgctgctatgctgggactcatgtatgtctactggactcagytcaacatgttccagaccttgaagtacctggccatcttgggcagtgtgacgtttctggctggcaatcggatgctggcccagcaggcagtcaagaggatcgc

SEQ ID NO: 78651 - DNA, 201 bp, Homo sapiens
gaagaaaaatggaaaaaaaaaactttatttaaaaaagaaaaaagtccagattgtagttatacttttgcttgtttttcagtttccccaacacacagcagatmcctggtgagctcagatagtctctttctctgacactgtgtaagaagctgtgaatattcctaacttacccagatgttgcttttgaaaagttgaaatgtgtaa

SEQ ID NO: 78652 - DNA, 201 bp, Homo sapiens; identical to SEQ ID NO: 78643

SEQ ID NO: 78653 - DNA, 200 bp, Homo sapiens
gtttccccccaaggttcaagcactgtcttcctgttggccctgacaatcatagccagcacctgggctctgacgcccactcactacctcaccaagcatgacrtggagagactaaaagcctcgctggatcgccctttcacaaatttggaatctgccttctactccatcgtgggactcagcagccttggtgctcaggtgccaga

SEQ ID NO: 78654 - DNA, 201 bp, Homo sapiens; identical to SEQ ID NO: 78649

SEQ ID NO: 78655 - DNA, 201 bp, Homo sapiens; identical to SEQ ID NO: 78648

SEQ ID NO: 78656 - DNA, 201 bp, Homo sapiens; identical to SEQ ID NO: 78650

SEQ ID NO: 78657 - DNA, 201 bp, Homo sapiens; identical to SEQ ID NO: 78651

SEQ ID NO: 78658 - DNA, 201 bp, Homo sapiens; identical to SEQ ID NO: 78643

SEQ ID NO: 78659 - DNA, 201 bp, Homo sapiens; identical to SEQ ID NO: 78644

SEQ ID NO: 78660 - DNA, 201 bp, Homo sapiens; identical to SEQ ID NO: 78645

SEQ ID NO: 78661 - DNA, 201 bp, Homo sapiens
cacgattatatttcacctgggacatgctgctatgctgggactcatgtatgtctactggactcagctcaacatgttccagaccttgaagtacctggccatcytgggcagtgtgacgtttctggctggcaatcggatgctggcccagcaggcagtcaagagaacagcacattagttccagaagaaagatggaaattctgaaaa

SEQ ID NO: 78662 - DNA, 201 bp, Homo sapiens; identical to SEQ ID NO: 78648

SEQ ID NO: 78663 - DNA, 201 bp, Homo sapiens
tggtgccaatgtctccaacttcacttttgctcctagcacgattatatttcacctgggacatgctgctatgctgggactcatgtatgtctactggactcagytcaacatgttccagaccttgaagtacctggccatcttgggcagtgtgacgtttctggctggcaatcggatgctggcccagcaggcagtcaagagaacagc

SEQ ID NO: 78664 - DNA, 201 bp, Homo sapiens; identical to SEQ ID NO: 78646

SEQ ID NO: 78665 - DNA, 201 bp, Homo sapiens; identical to SEQ ID NO: 78651

SEQ ID NO: 78666 - DNA, 201 bp, Homo sapiens; identical to SEQ ID NO: 78643

SEQ ID NO: 78667 - DNA, 201 bp, Homo sapiens
aacgtcactcgtaggttcaagcactgtcttcctgttggccctgacaatcatagccagcacctgggctctgacgcccactcactacctcaccaagcatgacrtggagagactaaaagcctcgctggatcgccctttcacaaatttggaatctgccttctactccatcgtgggactcagcagccttggtgctcaggtgccaga

SEQ ID NO: 78668 - DNA, 201 bp, Homo sapiens; identical to SEQ ID NO: 78649

SEQ ID NO: 78669 - DNA, 201 bp, Homo sapiens; identical to SEQ ID NO: 78648

SEQ ID NO: 78670 - DNA, 201 bp, Homo sapiens; identical to SEQ ID NO: 78650

SEQ ID NO: 78671 - DNA, 201 bp, Homo sapiens; identical to SEQ ID NO: 78651

SEQ ID NO: 78672 - DNA, 201 bp, Homo sapiens
ccctgcagaacccgctccctgtggccctggaaggctgcaccttcactgtggagggggccggcctgactgaggagcagaagacggtggagatcccagacccygtggaggcaggggaggaagttaaggtgagaatggacctgctgccgctccacatgggcctccacaagctggtggtgaacttcgagagcgacaagctgaagg

SEQ ID NO: 78673 - DNA, 201 bp, Homo sapiens
atcaccatgggaaactgttgtgggcgctgcttccaggataaggagactgaggcttagagagaggaggcagccccctccacaccagtggcctcgtggttatwagcaaggctgggtaatgtgaaggcccaagagcagagtctgggcctctgactctgagtccactgctccatttataaccccagcctgacctgagactgtcgg

SEQ ID NO: 78674 - DNA, 157 bp, Homo sapiens
cacacaattaatcaacatgtatattttctctatacatagagctctatttctctacggttttataaaagccttgggttccaaccaggcagtagatgtgcttytgaaccgcaaggagcaaacactgaaataaaatagtttatttttcacactcaaacta

SEQ ID NO: 78675 - DNA, 201 bp, Homo sapiens
atcattggccccgcctaagggacccctgctcccagcctgctgagagcccccaccttgatcccaatccttatcccaagctagtgagcaaaatatgccccttmttgggccccagaccccagggcagggtgggcagcctatgggggctctcggaaatggaatgtgcccctggcccatctcagcctcctgagcctgtgggtcccc

SEQ ID NO: 78676 - DNA, 201 bp, Homo sapiens
cactgctccatttataaccccagcctgacctgagactgtcggagaggctgtctggggcctttatcaaaaaaagactcagccaagacaaggaggtagagagkggactgggggactgggagtcagagccctggctgggttcaggtcccacgtctggccaggcactgccttctcctctctgggcctttgtttccttgttggtca

SEQ ID NO: 78677 - DNA, 201 bp, Homo sapiens
ttgtcagctttgactttatctcctgctctttctacatgactgggcctcccttgggctggaagaattggggattctctattggaggtgagatcacagcctcyagggccccccaaatcccagggaaggacttggagagaatcatgctgttgcatttagaactttctgctttgcacaggaaagagtcacacaattaatcaacat

SEQ ID NO: 78678 - DNA, 201 bp, Homo sapiens
tctgagtccactgctccatttataaccccagcctgacctgagactgtcggagaggctgtctggggcctttatcaaaaaaagactcagccaagacaaggagktagagaggggactgggggactgggagtcagagccctggctgggttcaggtcccacgtctggccaggcactgccttctcctctctgggcctttgtttcctt

SEQ ID NO: 78679 - DNA, 201 bp, Homo sapiens
tccctacccgcgtcgtgaccaactacaactcggcccatgaccagaacagcaaccttctcatcgagtacttccgcaatgagtttggggagatccagggtgayaagagcgagatgatctggaacttccactgctgggtggagtcgtggatgaccaggccggacctgcagccggggtacgagggctggcaggccctggacccaa

SEQ ID NO: 78680 - DNA, 201 bp, Homo sapiens
gcgtcagccccatgtcctggatcggcagcgtggacatcctgcggcgctggaagaaccacggctgccagcgcgtcaagtatggccagtgctgggtcttcgcygccgtggcctgcacagtgctgaggtgcctgggcatccctacccgcgtcgtgaccaactacaactcggcccatgaccagaacagcaaccttctcatcgagt

SEQ ID NO: 78681 - DNA, 201 bp, Homo sapiens
tttgagggccgcaactacgaggccagtgtagacagtctcaccttcagtgtcgtgaccggcccagcccctagccaggaggccgggaccaaggcccgttttcyactaagagatgctgtggaggagggtgactggacagccaccgtggtggaccagcaagactgcaccctctcgctgcagctcaccaccccggccaacgccccc

SEQ ID NO: 78682 - DNA, 201 bp, Homo sapiens
acctgagcaccaagtacgatgcgccctttgtctttgcggaggtcaatgccgacgtggtagactggatccagcaggacgatgggtctgtgcacaaatccatmaaccgttccctgatcgttgggctgaagatcagcactaagagcgtgggccgagacgagcgggaggatatcacccacacctacaaatacccagaggggtcct

SEQ ID NO: 78683 - DNA, 201 bp, Homo sapiens
agcccaagcagaaacgcaagctggtggctgaggtgtccctgcagaacccgctccctgtggccctggaaggctgcaccttcactgtggagggggccggcctractgaggagcagaagacggtggagatcccagaccccgtggaggcaggggaggaagttaaggtgagaatggacctgctgccgctccacatgggcctccaca

SEQ ID NO: 78684 - DNA, 201 bp, Homo sapiens
tggacatcctgcggcgctggaagaaccacggctgccagcgcgtcaagtatggccagtgctgggtcttcgccgccgtggcctgcacagtgctgaggtgcctrggcatccctacccgcgtcgtgaccaactacaactcggcccatgaccagaacagcaaccttctcatcgagtacttccgcaatgagtttggggagatccagg

SEQ ID NO: 78685 - DNA, 201 bp, Homo sapiens; identical to SEQ ID NO: 78672

SEQ ID NO: 78686 - DNA, 154 bp, Homo sapiens
cacacaattaatcaacatgtatattttctctatacatagagctctatttctctacggttttataaaagccttgggttccaaccaggcagtagatgtgcttytgaaccgcaaggagcaaacactgaaataaaatagtttatttttcacactcaaa

SEQ ID NO: 78687 - DNA, 201 bp, Homo sapiens; identical to SEQ ID NO: 78675

SEQ ID NO: 78688 - DNA, 201 bp, Homo sapiens; identical to SEQ ID NO: 78677

SEQ ID NO: 78689 - DNA, 201 bp, Homo sapiens; identical to SEQ ID NO: 78679

SEQ ID NO: 78690 - DNA, 201 bp, Homo sapiens; identical to SEQ ID NO: 78680

SEQ ID NO: 78691 - DNA, 201 bp, Homo sapiens; identical to SEQ ID NO: 78681

SEQ ID NO: 78692 - DNA, 201 bp, Homo sapiens; identical to SEQ ID NO: 78682

SEQ ID NO: 78693 - DNA, 201 bp, Homo sapiens; identical to SEQ ID NO: 78683

SEQ ID NO: 78694 - DNA, 201 bp, Homo sapiens; identical to SEQ ID NO: 78684

SEQ ID NO: 78695 - DNA, 201 bp, Homo sapiens
gcacaggtgagctgcacgctgggatgtgggtcatgagccctgggagggggcacgaagagcactggagtaggaatcaggacatccctgccctggtcctgccycctgccaccaacactctcaatgcgctatgtggcctagagcctgtgaccaccctctccggtcctttatccaatagccatccctccagtggttgttaggatc

SEQ ID NO: 78696 - DNA, 201 bp, Homo sapiens
gcgtcagccccatgtcctggatcggcagcgtggacatcctgcggcgctggaagaaccacggctgccagcgcgtcaagtatggccagtgctgggtcttcgcygccgtggcctgcacaggtgagctgcacgctgggatgtgggtcatgagccctgggagggggcacgaagagcactggagtaggaatcaggacatccctgccc

SEQ ID NO: 78697 - DNA, 201 bp, Homo sapiens; identical to SEQ ID NO: 78681

SEQ ID NO: 78698 - DNA, 201 bp, Homo sapiens
tcctggagcatttgttgaccgccaactgacaacatgctaggtagtgacctaaccacttagcatgtgtgatttcaccccacagacacttacatggcgctgaytctggggcaggccctgtcctaagcactttataaatatcaacccacttaattcttattgcaagatgaggctggtccaagtcccctgttggaacctccaatg

SEQ ID NO: 78699 - DNA, 201 bp, Homo sapiens; identical to SEQ ID NO: 78679

SEQ ID NO: 78700 - DNA, 201 bp, Homo sapiens; identical to SEQ ID NO: 78680

SEQ ID NO: 78701 - DNA, 201 bp, Homo sapiens; identical to SEQ ID NO: 78681

SEQ ID NO: 78702 - DNA, 201 bp, Homo sapiens; identical to SEQ ID NO: 78684

SEQ ID NO: 78703 - DNA, 201 bp, Homo sapiens; identical to SEQ ID NO: 78682

SEQ ID NO: 78704 - DNA, 201 bp, Homo sapiens; identical to SEQ ID NO: 78672

SEQ ID NO: 78705 - DNA, 201 bp, Homo sapiens; identical to SEQ ID NO: 78673

SEQ ID NO: 78706 - DNA, 157 bp, Homo sapiens; identical to SEQ ID NO: 78674

SEQ ID NO: 78707 - DNA, 201 bp, Homo sapiens; identical to SEQ ID NO: 78675

SEQ ID NO: 78708 - DNA, 201 bp, Homo sapiens; identical to SEQ ID NO: 78676

SEQ ID NO: 78709 - DNA, 201 bp, Homo sapiens; identical to SEQ ID NO: 78677

SEQ ID NO: 78710 - DNA, 201 bp, Homo sapiens; identical to SEQ ID NO: 78678

SEQ ID NO: 78711 - DNA, 201 bp, Homo sapiens; identical to SEQ ID NO: 78679

SEQ ID NO: 78712 - DNA, 201 bp, Homo sapiens; identical to SEQ ID NO: 78680

SEQ ID NO: 78713 - DNA, 201 bp, Homo sapiens; identical to SEQ ID NO: 78681

SEQ ID NO: 78714 - DNA, 201 bp, Homo sapiens; identical to SEQ ID NO: 78682

SEQ ID NO: 78715 - DNA, 201 bp, Homo sapiens; identical to SEQ ID NO: 78683

SEQ ID NO: 78716 - DNA, 201 bp, Homo sapiens; identical to SEQ ID NO: 78684

SEQ ID NO: 78717 - DNA, 201 bp, Homo sapiens; identical to SEQ ID NO: 78672

SEQ ID NO: 78718 - DNA, 201 bp, Homo sapiens; identical to SEQ ID NO: 78673

SEQ ID NO: 78719 - DNA, 157 bp, Homo sapiens; identical to SEQ ID NO: 78674

SEQ ID NO: 78720 - DNA, 201 bp, Homo sapiens; identical to SEQ ID NO: 78675

SEQ ID NO: 78721 - DNA, 201 bp, Homo sapiens; identical to SEQ ID NO: 78676

SEQ ID NO: 78722 - DNA, 201 bp, Homo sapiens
cttttatatggcccagccttgtaaataaccacaaggtccactccctgctccacgaagccttaagccataggcccaggatatttctgagaatcacagcctcyagggccccccaaatcccagggaaggacttggagagaatcatgctgttgcatttagaactttctgctttgcacaggaaagagtcacacaattaatcaacat

SEQ ID NO: 78723 - DNA, 201 bp, Homo sapiens; identical to SEQ ID NO: 78678

SEQ ID NO: 78724 - DNA, 201 bp, Homo sapiens; identical to SEQ ID NO: 78679

SEQ ID NO: 78725 - DNA, 201 bp, Homo sapiens; identical to SEQ ID NO: 78680

SEQ ID NO: 78726 - DNA, 201 bp, Homo sapiens; identical to SEQ ID NO: 78681

SEQ ID NO: 78727 - DNA, 201 bp, Homo sapiens; identical to SEQ ID NO: 78682

SEQ ID NO: 78728 - DNA, 201 bp, Homo sapiens; identical to SEQ ID NO: 78683

SEQ ID NO: 78729 - DNA, 201 bp, Homo sapiens; identical to SEQ ID NO: 78684

SEQ ID NO: 78730 - DNA, 201 bp, Homo sapiens
gacagttcaaagagaattaggaaatctcacaaaagacctaaagacccccaaaacaaagaacgggcttctaccaaagaaagaaccctcaaaaagaaaaaacrgaagttgaccttaactcaaatggtaggaaaacctgaagaactggaagaggaaggagatgtcgaggaaggatatcgtcgagaaataagcagtagcccagaa

SEQ ID NO: 78731 - DNA, 201 bp, Homo sapiens
cgagtcagagaagtataatcctggtccccaagacttcttgttaaaaatgccaggggtgaatgccaaaaactgccgctccttgatgcaccacgttaagaacrtcgcagaattagcagccctgtcacaagacgagctcacgagtattctggggaatgctgcaaatgccaaacagctttatgatttcattcacacctcttttgc

SEQ ID NO: 78732 - DNA, 201 bp, Homo sapiens
acctaaagacccccaaaacaaagaacgggcttctaccaaagaaagaaccctcaaaaagaaaaaacggaagttgaccttaactcaaatggtaggaaaacctraagaactggaagaggaaggagatgtcgaggaaggatatcgtcgagaaataagcagtagcccagaaagctgcccggaagaaattaagcatgaagaatttga

SEQ ID NO: 78733 - DNA, 201 bp, Homo sapiens
ctgtcacaagacgagctcacgagtattctggggaatgctgcaaatgccaaacagctttatgatttcattcacacctcttttgcagaagtcgtatcaaaagraaaagggaaaaagtgaacagtgatggctgttttcttatcccatgcctgtacttttcagcggctccttgccagacatcataggtcattattaattattggt

SEQ ID NO: 78734 - DNA, 201 bp, Homo sapiens
ccgcttctgggttgcagcgacccctatgctctgacaaggggattaaaaatgctgtttttccaacctaaaagttctgtcttaacatgcagggtttactttcytatatacggaggttcaactgaggaacaacgctatctcactgctttgcggaaagaaaaggaagcttttgaaaaactcataagggaaaaagcaagcatggtt

SEQ ID NO: 78735 - DNA, 201 bp, Homo sapiens
tcttccagatgccaaaatgagtaaaaaagaaaaaatatctgaaaaaatggaaattaaagaaggggaagaaacaaaaaaggaactggtcctagaaagcaacycaaagtgggaggcactgactgaagtattaaaagaaattgaggcagaaaataaggagagtgaagctcttggtggtccaggtcaagtactgatttgtgcaag

SEQ ID NO: 78736 - DNA, 201 bp, Homo sapiens
cactgagaagaaacatctctttgccattcctgaccagttctctctaccacattttcttcagctccatacttctgcctgtctgctctaaggaaatttcatgkagccttcctactactaattcaagacagtctcctcaaaaactggttgactactcttctaatgaccctaacatatgtagcatatactataatttcattgttc

SEQ ID NO: 78737 - DNA, 197 bp, Homo sapiens
atggagtcagggcagccggctcgacggattgccatggcgccgctgctggagtacgagcgacagctggtgctggaactgctcgacactgacgggctastagtgtgcgcccgcgggctcggcgcggaccggctcctctaccactttctccagctgcactgccacccagcctgcctggtgctggtgctcaacacgcagcc

SEQ ID NO: 78738 - DNA, 201 bp, Homo sapiens
aaggagctcttagaattctcaatttttgcacatattcagtctcctaatatcagagatccctaagtccagctggctagttacagagttttttcagacttccycgtttctcagctcttatatcctaagacaccagcatcatatgctctagaaatacaacctaattggcagtgagccgagatcgcaccactgcacccctgcctg

SEQ ID NO: 78739 - DNA, 201 bp, Homo sapiens
tgcactgccacccagcctgcctggtgctggtgctcaacacgcagccggccgaggaggagtattttatcaatcagctgaagatagaaggagttgaacacctycctcgccgtgtaacaaatgaaatcacaagcaacagtcgctatgaagtttacacacaaggtggtgttatatttgcgacaagtaggatacttgtggttgact

SEQ ID NO: 78740 - DNA, 201 bp, Homo sapiens
ggtggccaggaacagaatggtacacagcaaagcatagttgtggatatgcgtgaatttcgaagtgagcttccatctctgatccatcgtcggggcattgacaytgaacccgtgactttagaggttggagattacatcctcactccagaaatgtgcgtggagcgcaagagtatcagtgatttaatcggctctttaaataacggc

SEQ ID NO: 78741 - DNA, 201 bp, Homo sapiens
  misc_feature (1)...(201): n = A,T,C or G
gaggcactgactgaagtattaaaagaaattgaggcagaaaataaggagagtgaagctcttggtggtccaggtcaagtactgatttgtgcaagtgatgaccnaacatgttcccagctgagagactatatcactcttggagcggaggccttcttattgaggctctacaggaaaacctttgagaaggatagcaaagctgaagaa

SEQ ID NO: 78742 - DNA, 201 bp, Homo sapiens
acaagaaagctaccatttttaacagtccttgttatctagtgcaacataaataacagtcttaattgcacttatacccatgtcctgtggctctccaaatctgktctttgctgttgtgtctgctggacgcttgaactgatgtttgtgtaggaaatcatgttctgaccctttgtctacaaaggagccttctggaacactgagaag

SEQ ID NO: 78743 - DNA, 201 bp, Homo sapiens
aacctaaaagttctgtcttaacatgcagggtttactttcttatatacggaggttcaactgaggaacaacgctatctcactgctttgcggaaagaaaaggargcttttgaaaaactcataagggaaaaagcaagcatggttgtccctgaagaaagagaaggcagagatgaaacaaacttagacctagtaagaggcacagcat

SEQ ID NO: 78744 - DNA, 201 bp, Homo sapiens
gagagactatatcactcttggagcggaggccttcttattgaggctctacaggaaaacctttgagaaggatagcaaagctgaagaagtctggatgaaatttwggaaggaagacagttcaaagagaattaggaaatctcacaaaagacctaaagacccccaaaacaaagaacgggcttctaccaaagaaagaaccctcaaaaa

SEQ ID NO: 78745 - DNA, 201 bp, Homo sapiens
taccaaagaaagaaccctcaaaaagaaaaaacggaagttgaccttaactcaaatggtaggaaaacctgaagaactggaagaggaaggagatgtcgaggaargatatcgtcgagaaataagcagtagcccagaaagctgcccggaagaaattaagcatgaagaatttgatgtaaatttgtcatcggatgctgctttcggaat

SEQ ID NO: 78746 - DNA, 201 bp, Homo sapiens
aaaaactggttgactactcttctaatgaccctaacatatgtagcatatactataatttcattgttccaaattagtatttttaaagcaaaatgaattacctrtttgcaaaagttaatgatgaaggagctcttagaattctcaatttttgcacatattcagtctcctaatatcagagatccctaagtccagctggctagttac

SEQ ID NO: 78747 - DNA, 201 bp, Homo sapiens
ctggggaatgctgcaaatgccaaacagctttatgatttcattcacacctcttttgcagaagtcgtatcaaaaggaaaagggaaaaagtgaacagtgatggytgttttcttatcccatgcctgtacttttcagcggctccttgccagacatcataggtcattattaattattggtttgctatttcattcttttccaatgctc

SEQ ID NO: 78748 - DNA, 201 bp, Homo sapiens
tgttaaaaatgccaggggtgaatgccaaaaactgccgctccttgatgcaccacgttaagaacatcgcagaattagcagccctgtcacaagacgagctcacragtattctggggaatgctgcaaatgccaaacagctttatgatttcattcacacctcttttgcagaagtcgtatcaaaaggaaaagggaaaaagtgaacag

SEQ ID NO: 78749 - DNA, 201 bp, Homo sapiens
agcttttgaaaaactcataagggaaaaagcaagcatggttgtccctgaagaaagagaaggcagagatgaaacaaacttagacctagtaagaggcacagcayctgcagatgtttccactgacactcggaaagccggtggccaggaacagaatggtacacagcaaagcatagttgtggatatgcgtgaatttcgaagtgagct

SEQ ID NO: 78750 - DNA, 201 bp, Homo sapiens
gcctttctctctcacttcccgaggtgccttgtttcaggagatctccagcaatgacattagttccaaactcactcttcttacacttcacttccccagactayggattctctggtgcccctctcctcatgcaacggcggagttgtttgaggagctgaaacaaagcaagccacagcctgatgcggcgacagcactggccattac

SEQ ID NO: 78751 - DNA, 201 bp, Homo sapiens
tgtggccaaggttccatgtagcagtaaactcatttttagaacagcacaaacctgaagttgtagaaatccatgtttctatgacacctaccatgcttgctatrcagactgctatactggacattttaaatgcatgtctaaaggaactaaaatgccataacccatcgcttgaagtggaagatttatctttagaaaatgctattg

SEQ ID NO: 78752 - DNA, 200 bp, Homo sapiens
atggagtcagggcagccggctcgacggattgccatggcgccgctgctggagtacgagcgacagctggtgctggaactgctcgacactgacgggctagtastgtgcgcccgcgggctcggcgcggaccggctcctctaccactttctccagctgcactgccacccagcctgcctggtgctggtgctcaacacgcagccggc

SEQ ID NO: 78753 - DNA, 201 bp, Homo sapiens
cctcactatcatccatccgcttctgggttgcagcgacccctatgctctgacaaggggattaaaaatgctgtttttccaacctaaaagttctgtcttaacaygcagggtttactttcttatatacggaggttcaactgaggaacaacgctatctcactgctttgcggaaagaaaaggaagcttttgaaaaactcataaggga

SEQ ID NO: 78754 - DNA, 201 bp, Homo sapiens
caaatggtaggaaaacctgaagaactggaagaggaaggagatgtcgaggaaggatatcgtcgagaaataagcagtagcccagaaagctgcccggaagaaaytaagcatgaagaatttgatgtaaatttgtcatcggatgctgctttcggaatcctgaaagaacccctcactatcatccatccgcttctgggttgcagcgac

SEQ ID NO: 78755 - DNA, 201 bp, Homo sapiens
aatttcgaagtgagcttccatctctgatccatcgtcggggcattgacattgaacccgtgactttagaggttggagattacatcctcactccagaaatgtgmgtggagcgcaagagtatcagtgatttaatcggctctttaaataacggccgcctctacagccagtgcatctccatgtcccgctactacaagcgtcccgtgc

SEQ ID NO: 78756 - DNA, 201 bp, Homo sapiens
ccctcactatcatccatccgcttctgggttgcagcgacccctatgctctgacaaggggattaaaaatgctgtttttccaacctaaaagttctgtcttaacytgcagggtttactttcttatatacggaggttcaactgaggaacaacgctatctcactgctttgcggaaagaaaaggaagcttttgaaaaactcataaggg

SEQ ID NO: 78757 - DNA, 201 bp, Homo sapiens
atttgatgtaaatttgtcatcggatgctgctttcggaatcctgaaagaacccctcactatcatccatccgcttctgggttgcagcgacccctatgctctgrcaaggggattaaaaatgctgtttttccaacctaaaagttctgtcttaacatgcagggtttactttcttatatacggaggttcaactgaggaacaacgcta

SEQ ID NO: 78758 - DNA, 201 bp, Homo sapiens
aattagcagccctgtcacaagacgagctcacgagtattctggggaatgctgcaaatgccaaacagctttatgatttcattcacacctcttttgcagaagtygtatcaaaaggaaaagggaaaaagtgaacagtgatggctgttttcttatcccatgcctgtacttttcagcggctccttgccagacatcataggtcattat

SEQ ID NO: 78759 - DNA, 201 bp, Homo sapiens
ggtgcccctctcctcatgcaacggcggagttgtttgaggagctgaaacaaagcaagccacagcctgatgcggcgacagcactggccattacagcagattcygaaacccttcccgagtcagagaagtataatcctggtccccaagacttcttgttaaaaatgccaggggtgaatgccaaaaactgccgctccttgatgcacc

SEQ ID NO: 78760 - DNA, 201 bp, Homo sapiens
gagaagtataatcctggtccccaagacttcttgttaaaaatgccaggggtgaatgccaaaaactgccgctccttgatgcaccacgttaagaacatcgcagrattagcagccctgtcacaagacgagctcacgagtattctggggaatgctgcaaatgccaaacagctttatgatttcattcacacctcttttgcagaagtc

SEQ ID NO: 78761 - DNA, 201 bp, Homo sapiens
acactgagaagaaacatctctttgccattcctgaccagttctctctaccacattttcttcagctccatacttctgcctgtctgctctaaggaaatttcatsgagccttcctactactaattcaagacagtctcctcaaaaactggttgactactcttctaatgaccctaacatatgtagcatatactataatttcattgtt

SEQ ID NO: 78762 - DNA, 201 bp, Homo sapiens
tcctaatatcagagatccctaagtccagctggctagttacagagttttttcagacttcctcgtttctcagctcttatatcctaagacaccagcatcatatsctctagaaatacaacctaattggcagtgagccgagatcgcaccactgcacccctgcctgggcgacagagtgagactttgtctctattacaaaaagaaaag

SEQ ID NO: 78763 - DNA, 201 bp, Homo sapiens
ttttcttcagctccatacttctgcctgtctgctctaaggaaatttcatggagccttcctactactaattcaagacagtctcctcaaaaactggttgactastcttctaatgaccctaacatatgtagcatatactataatttcattgttccaaattagtatttttaaagcaaaatgaattacctatttgcaaaagttaatg

SEQ ID NO: 78764 - DNA, 201 bp, Homo sapiens
ttcaggagatctccagcaatgacattagttccaaactcactcttcttacacttcacttccccagactacggattctctggtgcccctctcctcatgcaacrgcggagttgtttgaggagctgaaacaaagcaagccacagcctgatgcggcgacagcactggccattacagcagattctgaaacccttcccgagtcagaga

SEQ ID NO: 78765 - DNA, 201 bp, Homo sapiens
tcactcttcttacacttcacttccccagactacggattctctggtgcccctctcctcatgcaacggcggagttgtttgaggagctgaaacaaagcaagccrcagcctgatgcggcgacagcactggccattacagcagattctgaaacccttcccgagtcagagaagtataatcctggtccccaagacttcttgttaaaaa

SEQ ID NO: 78766 - DNA, 201 bp, Homo sapiens
agagcccacagaataatcgagtcttgtcaagaagcattcatcttgcgcctctttcgccagaaaaacaaacgtggttttattaaagctttcacagacaatgytgttgcctttgatactggtttttgtcatgtggaaagagtgatgagaaatctttttgtgaggaaactgtatctgtggccaaggttccatgtagcagtaaac

SEQ ID NO: 78767 - DNA, 201 bp, Homo sapiens
gatttcattcacacctcttttgcagaagtcgtatcaaaaggaaaagggaaaaagtgaacagtgatggctgttttcttatcccatgcctgtacttttcagcrgctccttgccagacatcataggtcattattaattattggtttgctatttcattcttttccaatgctcttaatgattgtacggtggaccagaagccaggat

SEQ ID NO: 78768 - DNA, 201 bp, Homo sapiens
agctctcctcggctacgttcggctggctgccgtcctctcggactcggctctcttcggttgagttcggcctactctccactaggagtcggcttccttcggcwgcgttcggctgcgacccggaagagcttccatggagtcagggcagccggctcgacggattgccatggcgccgctgctggagtacgagcgacagctggtgct

SEQ ID NO: 78769 - DNA, 201 bp, Homo sapiens; identical to SEQ ID NO: 78730

SEQ ID NO: 78770 - DNA, 201 bp, Homo sapiens; identical to SEQ ID NO: 78731

SEQ ID NO: 78771 - DNA, 201 bp, Homo sapiens; identical to SEQ ID NO: 78732

SEQ ID NO: 78772 - DNA, 201 bp, Homo sapiens; identical to SEQ ID NO: 78733

SEQ ID NO: 78773 - DNA, 201 bp, Homo sapiens
ccaagatacgtggttctttatgacgcagagctaacctttgttcggcagcttgaaatttacagggcgagtaggcctgggaaacctctgagggtttactttcytatatacggaggttcaactgaggaacaacgctatctcactgctttgcggaaagaaaaggaagcttttgaaaaactcataagggaaaaagcaagcatggtt

SEQ ID NO: 78774 - DNA, 201 bp, Homo sapiens; identical to SEQ ID NO: 78735

SEQ ID NO: 78775 - DNA, 201 bp, Homo sapiens
gctttcggaatcctgaaagaacccctcactatcatccatccgcttctgggttgcagcgacccctatgctctgacaagggtactacatgaagtggagccaasatacgtggttctttatgacgcagagctaacctttgttcggcagcttgaaatttacagggcgagtaggcctgggaaacctctgagggtttactttcttata

SEQ ID NO: 78776 - DNA, 201 bp, Homo sapiens
ttccatggagtcagggcagccggctcgacggattgccatggcgccgctgctggagtacgagcgacagctggtgctggaactgctcgacactgacgggctastagtgtgcgcccgcgggctcggcgcggaccggctcctctaccactttctccagctgcactgccacccagcctgcctggtgctggtgctcaacacgcagcc

SEQ ID NO: 78777 - DNA, 201 bp, Homo sapiens; identical to SEQ ID NO: 78736

SEQ ID NO: 78778 - DNA, 201 bp, Homo sapiens; identical to SEQ ID NO: 78738

SEQ ID NO: 78779 - DNA, 201 bp, Homo sapiens; identical to SEQ ID NO: 78739

SEQ ID NO: 78780 - DNA, 201 bp, Homo sapiens; identical to SEQ ID NO: 78740

SEQ ID NO: 78781 - DNA, 201 bp, Homo sapiens; identical to SEQ ID NO: 78741
  misc_feature (1)...(201): n = A,T,C or G

SEQ ID NO: 78782 - DNA, 201 bp, Homo sapiens; identical to SEQ ID NO: 78742

SEQ ID NO: 78783 - DNA, 201 bp, Homo sapiens
gggcgagtaggcctgggaaacctctgagggtttactttcttatatacggaggttcaactgaggaacaacgctatctcactgctttgcggaaagaaaaggargcttttgaaaaactcataagggaaaaagcaagcatggttgtccctgaagaaagagaaggcagagatgaaacaaacttagacctagtaagaggcacagcat

SEQ ID NO: 78784 - DNA, 201 bp, Homo sapiens; identical to SEQ ID NO: 78744

SEQ ID NO: 78785 - DNA, 201 bp, Homo sapiens; identical to SEQ ID NO: 78746

SEQ ID NO: 78786 - DNA, 201 bp, Homo sapiens; identical to SEQ ID NO: 78745

SEQ ID NO: 78787 - DNA, 201 bp, Homo sapiens; identical to SEQ ID NO: 78747

SEQ ID NO: 78788 - DNA, 201 bp, Homo sapiens; identical to SEQ ID NO: 78748

SEQ ID NO: 78789 - DNA, 201 bp, Homo sapiens; identical to SEQ ID NO: 78749

SEQ ID NO: 78790 - DNA, 201 bp, Homo sapiens; identical to SEQ ID NO: 78750

SEQ ID NO: 78791 - DNA, 201 bp, Homo sapiens; identical to SEQ ID NO: 78751

SEQ ID NO: 78792 - DNA, 201 bp, Homo sapiens
catggagtcagggcagccggctcgacggattgccatggcgccgctgctggagtacgagcgacagctggtgctggaactgctcgacactgacgggctagtastgtgcgcccgcgggctcggcgcggaccggctcctctaccactttctccagctgcactgccacccagcctgcctggtgctggtgctcaacacgcagccggc

SEQ ID NO: 78793 - DNA, 201 bp, Homo sapiens; identical to SEQ ID NO: 78754

SEQ ID NO: 78794 - DNA, 201 bp, Homo sapiens; identical to SEQ ID NO: 78755

SEQ ID NO: 78795 - DNA, 201 bp, Homo sapiens
atttgatgtaaatttgtcatcggatgctgctttcggaatcctgaaagaacccctcactatcatccatccgcttctgggttgcagcgacccctatgctctgrcaagggtactacatgaagtggagccaagatacgtggttctttatgacgcagagctaacctttgttcggcagcttgaaatttacagggcgagtaggcctgg

SEQ ID NO: 78796 - DNA, 201 bp, Homo sapiens; identical to SEQ ID NO: 78758

SEQ ID NO: 78797 - DNA, 201 bp, Homo sapiens; identical to SEQ ID NO: 78759

SEQ ID NO: 78798 - DNA, 201 bp, Homo sapiens; identical to SEQ ID NO: 78760

SEQ ID NO: 78799 - DNA, 201 bp, Homo sapiens; identical to SEQ ID NO: 78761

SEQ ID NO: 78800 - DNA, 201 bp, Homo sapiens; identical to SEQ ID NO: 78762

SEQ ID NO: 78801 - DNA, 201 bp, Homo sapiens; identical to SEQ ID NO: 78763

SEQ ID NO: 78802 - DNA, 201 bp, Homo sapiens; identical to SEQ ID NO: 78764

SEQ ID NO: 78803 - DNA, 201 bp, Homo sapiens; identical to SEQ ID NO: 78765

SEQ ID NO: 78804 - DNA, 201 bp, Homo sapiens; identical to SEQ ID NO: 78766

SEQ ID NO: 78805 - DNA, 201 bp, Homo sapiens; identical to SEQ ID NO: 78767

SEQ ID NO: 78806 - DNA, 201 bp, Homo sapiens
gtgaagcaagatgtccttcagggccgtctgccctgtcccgtcaacactgctgctcagctgggagcgtatgccatccagtcggagcttggagattatgaccyatataaacatactgcaggatatgtatctgagtaccggtttgttcctgatcagaaggaagaacttgaagaagccatagaaaggattcataaaactctaatg

SEQ ID NO: 78807 - DNA, 201 bp, Homo sapiens
ggctggagtgcagcggcaccgtgtcagctcaccgcagcctccacttactgggttaagcgattctcctgtctcaggctaccgagcagctgggattacaggcrtgcaccacaacacccggctaattctttttgtatttttagtagagacagggctttgccatgttggaggctggtctcgaactcctgacctcaagtgatccgc

SEQ ID NO: 78808 - DNA, 201 bp, Homo sapiens
ctcgaactcctgacctcaagtgatccgcctgcctcagcctcccaaagtgctgggattataggccatggtttaactacagcacagttgtgctgaaggacctttttgttttaactggaagaataagtattttgtaaaaattcacttgataccacattttcatttctggaacaggatagcaatcattcatttctatcttgtgtc

SEQ ID NO: 78809 - DNA, 201 bp, Homo sapiens
tcgaactcctgacctcaagtgatccgcctgcctcagcctcccaaagtgctgggattataggccatggtttaactacagcacagttgtgctgaaggacctttttgttttaactggaagaataagtattttgtaaaaattcacttgataccacattttcatttctggaacaggatagcaatcattcatttctatcttgtgtct

SEQ ID NO: 78810 - DNA, 201 bp, Homo sapiens
cgaactcctgacctcaagtgatccgcctgcctcagcctcccaaagtgctgggattataggccatggtttaactacagcacagttgtgctgaaggacctttttgttttaactggaagaataagtattttgtaaaaattcacttgataccacattttcatttctggaacaggatagcaatcattcatttctatcttgtgtctg

SEQ ID NO: 78811 - DNA, 201 bp, Homo sapiens
gaactcctgacctcaagtgatccgcctgcctcagcctcccaaagtgctgggattataggccatggtttaactacagcacagttgtgctgaaggacctttttgttttaactggaagaataagtattttgtaaaaattcacttgataccacattttcatttctggaacaggatagcaatcattcatttctatcttgtgtctgt

SEQ ID NO: 78812 - DNA, 201 bp, Homo sapiens
gggttttccaaggccggggagagcctcgaattcccatcactcctttttctggtctcttgcccccagtgccaggagacttttgtcgtccccaggactgcggraggggccccgcgcccccgccttcggaggagctcgagccgcaggatgcgcggggacgcgccaccgccctccgcgcccagttccgccggcgcttccccggcg

SEQ ID NO: 78813 - DNA, 201 bp, Homo sapiens
taggattaactccggttggtgttgttgtgtacaagaataaaaagcaagtggggaagtatttctggcctcggattacaaaggttcacttcaaggagactcartttgaactcagagtactgggaaaagattgtaacgaaacctcattcttttttgaagctcggagtaaaactgcttgcaagcacctctggaagtgcagtgtgg

SEQ ID NO: 78814 - DNA, 201 bp, Homo sapiens
aactcctgacctcaagtgatccgcctgcctcagcctcccaaagtgctgggattataggccatggtttaactacagcacagttgtgctgaaggacctttttgttttaactggaagaataagtattttgtaaaaattcacttgataccacattttcatttctggaacaggatagcaatcattcatttctatcttgtgtctgtg

SEQ ID NO: 78815 - DNA, 201 bp, Homo sapiens
catcaagaagtcaacgaaaggttccgttgtccttgaccacgtattccatcacgtaaaccttgtggagatagattattttgggctacgttactgtgacagamgccatcagacgtattggctggatcctgcaaaaacccttgctgaacacaaagaactgatcaacactggacctccatatactttgtattttggtattaaatt

SEQ ID NO: 78816 - DNA, 201 bp, Homo sapiens
tagccctgatacccaaagaagcaaatctcatgcaccgtgggaagaaaatggcccccagagtggactctacaattctcccagtgatcgcactaagtcgccaragttcccttacacgcgtcgccgaaacccctcctgtggaagtgacaatgattctgtacagcctgtgaggaggaggaaagcccataacagtggtgaagattc

SEQ ID NO: 78817 - DNA, 201 bp, Homo sapiens
ccagtcggagcttggagattatgacccatataaacatactgcaggatatgtatctgagtaccggtttgttcctgatcagaaggaagaacttgaagaagccrtagaaaggattcataaaactctaatgggtcagattccttctgaggctgagctgaattacttgaggactgccaaatccctggagatgtatggcgttgacct

SEQ ID NO: 78818 - DNA, 201 bp, Homo sapiens
ctatgctgaagatccatgtaaacttaaagaagaaataaccagatatcagtttttcttgcaggtgaagcaagatgtccttcagggccgtctgccctgtcccrtcaacactgctgctcagctgggagcgtatgccatccagtcggagcttggagattatgacccatataaacatactgcaggatatgtatctgagtaccggtt

SEQ ID NO: 78819 - DNA, 201 bp, Homo sapiens
actgtgacagaagccatcagacgtattggctggatcctgcaaaaacccttgctgaacacaaagaactgatcaacactggacctccatatactttgtatttyggtattaaattctatgctgaagatccatgtaaacttaaagaagaaataaccagatatcagtttttcttgcaggtgaagcaagatgtccttcagggccgtc

SEQ ID NO: 78820 - DNA, 201 bp, Homo sapiens
ctttctattcagcttccccggcctgatcagaatgtgacaagaagtcgaagcaagacttaccctaagcgaatagcacaaacacagccagctgaatcaaacascatcagtaggataactgcaaacatggaaaatggagaaaatgaaggaacaattaaaattattgcaccttcaccagtaaaaagctttaagaaagcaaagaat

SEQ ID NO: 78821 - DNA, 201 bp, Homo sapiens
gatgctcagggttctggggatgctacagttcatcagagaagaaatgggtctaaagatagcctgatggaagaaaaacctcagacatctacaaacaacctggytggaaaacacacagcaaaaacaataaaaactatacaagcttcccgcctcaagacagagacttgatcctgatgaagggtcaagggtaggggtgggaaggtt

SEQ ID NO: 78822 - DNA, 201 bp, Homo sapiens
aaaccttgtggagatagattattttgggctacgttactgtgacagaagccatcagacgtattggctggatcctgcaaaaacccttgctgaacacaaagaaytgatcaacactggacctccatatactttgtattttggtattaaattctatgctgaagatccatgtaaacttaaagaagaaataaccagatatcagttttt

SEQ ID NO: 78823 - DNA, 201 bp, Homo sapiens
tcctctaccaccagcagatctcatttatacccatggccttaaggtttatttctgtagtttagactactgagtaatgtgctactgcaaaaagaccatttggrtttctcaaaggtaatttaaaaattcagctgtttaaatgctgctccccagctgaatctagggtcattatgctcatcagtgtgcaagctggacacctagcag

SEQ ID NO: 78824 - DNA, 201 bp, Homo sapiens
gtgtaagtggatctcagttgatctgtcaccccaaacctcaaatgatccatccaccctgcttggccatctaattcacctgctctccccagtgactattttgkacctttcctctccatagatgactttgcaatctacagggaaaatacttatgcaggacatcttatatctcccccttaccacgtacagttctctccacagctg

SEQ ID NO: 78825 - DNA, 201 bp, Homo sapiens
ggctcccgggcgctgactctcccgggcttttccgcctttctcgctcccgccccgccgggcggttcggcggccggtccccggaccccgccgggagctgctcstctcaccctcgccacggcgcggacaataaattaatgcatcgcgcttgagtggagggggcggctgggcgcctcggtggtagctttctctcctggctggaga

SEQ ID NO: 78826 - DNA, 201 bp, Homo sapiens
agatgttatcactctgtcgcccaggctggagtgcagcggcaccgtgtcagctcaccgcagcctccacttactgggttaagcgattctcctgtctcaggctmccgagcagctgggattacaggcgtgcaccacaacacccggctaattctttttgtatttttagtagagacagggctttgccatgttggaggctggtctcga

SEQ ID NO: 78827 - DNA, 201 bp, Homo sapiens
agaaacagaatacggcaggagaatgatatggttgattcagcgcctcagtgggaagctgtattaaggagacaaaaggaaaaaaaccaagccgaccccaacarcaggcgatccagacacagatctcgttcgagaagccccgatatccaagcaaaagaagagttatggaagcacattcaaaaagaacttgtggatccatccgga

SEQ ID NO: 78828 - DNA, 201 bp, Homo sapiens
acggcgcggacaataaattaatgcatcgcgcttgagtggagggggcggctgggcgcctcggtggtagctttctctcctggctggagacgaccacaaccgayatgggctgtttctgcgctgttccggaagaattttactgcgaagttttgctcctggatgaatccaagttaacccttaccacccagcagcagggcatcaaga

SEQ ID NO: 78829 - DNA, 109 bp, Homo sapiens
ctcggcgcytgcggctgggggacggggtagcggacggagcgacgaccttcgcctctgcccctgcgcccatggtcggggcgtcgtgggtgctcctcacacaaaagaaaag

SEQ ID NO: 78830 - DNA, 201 bp, Homo sapiens
taccgccagtatcgcaggtcccagtgttcagatggggagcgatcagttctctcggaagtgaattcaaaaacagatcttgtaccaccacttccggtgacccrttcttcggatgctcagggttctggggatgctacagttcatcagagaagaaatgggtctaaagatagcctgatggaagaaaaacctcagacatctacaaac

SEQ ID NO: 78831 - DNA, 201 bp, Homo sapiens; identical to SEQ ID NO: 78806

SEQ ID NO: 78832 - DNA, 201 bp, Homo sapiens; identical to SEQ ID NO: 78807

SEQ ID NO: 78833 - DNA, 201 bp, Homo sapiens; identical to SEQ ID NO: 78808

SEQ ID NO: 78834 - DNA, 201 bp, Homo sapiens; identical to SEQ ID NO: 78809

SEQ ID NO: 78835 - DNA, 201 bp, Homo sapiens; identical to SEQ ID NO: 78810

SEQ ID NO: 78836 - DNA, 201 bp, Homo sapiens; identical to SEQ ID NO: 78811

SEQ ID NO: 78837 - DNA, 201 bp, Homo sapiens; identical to SEQ ID NO: 78812

SEQ ID NO: 78838 - DNA, 201 bp, Homo sapiens; identical to SEQ ID NO: 78813

SEQ ID NO: 78839 - DNA, 201 bp, Homo sapiens; identical to SEQ ID NO: 78814

SEQ ID NO: 78840 - DNA, 201 bp, Homo sapiens; identical to SEQ ID NO: 78815

SEQ ID NO: 78841 - DNA, 201 bp, Homo sapiens; identical to SEQ ID NO: 78816

SEQ ID NO: 78842 - DNA, 201 bp, Homo sapiens; identical to SEQ ID NO: 78817

SEQ ID NO: 78843 - DNA, 201 bp, Homo sapiens; identical to SEQ ID NO: 78818

SEQ ID NO: 78844 - DNA, 201 bp, Homo sapiens; identical to SEQ ID NO: 78819

SEQ ID NO: 78845 - DNA, 201 bp, Homo sapiens; identical to SEQ ID NO: 78820

SEQ ID NO: 78846 - DNA, 201 bp, Homo sapiens; identical to SEQ ID NO: 78821

SEQ ID NO: 78847 - DNA, 201 bp, Homo sapiens; identical to SEQ ID NO: 78822

SEQ ID NO: 78848 - DNA, 201 bp, Homo sapiens; identical to SEQ ID NO: 78823

SEQ ID NO: 78849 - DNA, 201 bp, Homo sapiens; identical to SEQ ID NO: 78824

SEQ ID NO: 78850 - DNA, 201 bp, Homo sapiens; identical to SEQ ID NO: 78825

SEQ ID NO: 78851 - DNA, 201 bp, Homo sapiens; identical to SEQ ID NO: 78826

SEQ ID NO: 78852 - DNA, 201 bp, Homo sapiens; identical to SEQ ID NO: 78827

SEQ ID NO: 78853 - DNA, 201 bp, Homo sapiens; identical to SEQ ID NO: 78828

SEQ ID NO: 78854 - DNA, 109 bp, Homo sapiens; identical to SEQ ID NO: 78829

SEQ ID NO: 78855 - DNA, 201 bp, Homo sapiens; identical to SEQ ID NO: 78830

SEQ ID NO: 78856 - DNA, 201 bp, Homo sapiens; identical to SEQ ID NO: 78818

SEQ ID NO: 78857 - DNA, 201 bp, Homo sapiens; identical to SEQ ID NO: 78806

SEQ ID NO: 78858 - DNA, 201 bp, Homo sapiens; identical to SEQ ID NO: 78819

SEQ ID NO: 78859 - DNA, 201 bp, Homo sapiens; identical to SEQ ID NO: 78820

SEQ ID NO: 78860 - DNA, 201 bp, Homo sapiens; identical to SEQ ID NO: 78822

SEQ ID NO: 78861 - DNA, 201 bp, Homo sapiens; identical to SEQ ID NO: 78825

SEQ ID NO: 78862 - DNA, 201 bp, Homo sapiens
cagaatcttctcaccaaagctttattagtgcttgtgagtaatccattctaattcttcaattgtgttccagacagtgctttaatttgtctttacattttaamcaaaactaggtgacagtagcgaaagaggaagaaaagtgtgcattaaagctacttattctacactataatcactatcatctcttattagccacctctttgt

SEQ ID NO: 78863 - DNA, 201 bp, Homo sapiens; identical to SEQ ID NO: 78813

SEQ ID NO: 78864 - DNA, 201 bp, Homo sapiens; identical to SEQ ID NO: 78812

SEQ ID NO: 78865 - DNA, 201 bp, Homo sapiens; identical to SEQ ID NO: 78827

SEQ ID NO: 78866 - DNA, 201 bp, Homo sapiens; identical to SEQ ID NO: 78815

SEQ ID NO: 78867 - DNA, 109 bp, Homo sapiens; identical to SEQ ID NO: 78829

SEQ ID NO: 78868 - DNA, 201 bp, Homo sapiens; identical to SEQ ID NO: 78828

SEQ ID NO: 78869 - DNA, 201 bp, Homo sapiens; identical to SEQ ID NO: 78816

SEQ ID NO: 78870 - DNA, 201 bp, Homo sapiens; identical to SEQ ID NO: 78817

SEQ ID NO: 78871 - DNA, 201 bp, Homo sapiens; identical to SEQ ID NO: 78806

SEQ ID NO: 78872 - DNA, 201 bp, Homo sapiens; identical to SEQ ID NO: 78807

SEQ ID NO: 78873 - DNA, 201 bp, Homo sapiens; identical to SEQ ID NO: 78808

SEQ ID NO: 78874 - DNA, 201 bp, Homo sapiens; identical to SEQ ID NO: 78809

SEQ ID NO: 78875 - DNA, 201 bp, Homo sapiens; identical to SEQ ID NO: 78810

SEQ ID NO: 78876 - DNA, 201 bp, Homo sapiens; identical to SEQ ID NO: 78811

SEQ ID NO: 78877 - DNA, 201 bp, Homo sapiens; identical to SEQ ID NO: 78812

SEQ ID NO: 78878 - DNA, 201 bp, Homo sapiens; identical to SEQ ID NO: 78813

SEQ ID NO: 78879 - DNA, 201 bp, Homo sapiens; identical to SEQ ID NO: 78814

SEQ ID NO: 78880 - DNA, 201 bp, Homo sapiens; identical to SEQ ID NO: 78815

SEQ ID NO: 78881 - DNA, 201 bp, Homo sapiens; identical to SEQ ID NO: 78816

SEQ ID NO: 78882 - DNA, 201 bp, Homo sapiens; identical to SEQ ID NO: 78817

SEQ ID NO: 78883 - DNA, 201 bp, Homo sapiens; identical to SEQ ID NO: 78818

SEQ ID NO: 78884 - DNA, 201 bp, Homo sapiens; identical to SEQ ID NO: 78819

SEQ ID NO: 78885 - DNA, 201 bp, Homo sapiens; identical to SEQ ID NO: 78820

SEQ ID NO: 78886 - DNA, 201 bp, Homo sapiens; identical to SEQ ID NO: 78821

SEQ ID NO: 78887 - DNA, 201 bp, Homo sapiens; identical to SEQ ID NO: 78822

SEQ ID NO: 78888 - DNA, 201 bp, Homo sapiens; identical to SEQ ID NO: 78823

SEQ ID NO: 78889 - DNA, 201 bp, Homo sapiens; identical to SEQ ID NO: 78824

SEQ ID NO: 78890 - DNA, 201 bp, Homo sapiens; identical to SEQ ID NO: 78825

SEQ ID NO: 78891 - DNA, 201 bp, Homo sapiens; identical to SEQ ID NO: 78826

SEQ ID NO: 78892 - DNA, 201 bp, Homo sapiens; identical to SEQ ID NO: 78827

SEQ ID NO: 78893 - DNA, 201 bp, Homo sapiens; identical to SEQ ID NO: 78828

SEQ ID NO: 78894 - DNA, 109 bp, Homo sapiens; identical to SEQ ID NO: 78829

SEQ ID NO: 78895 - DNA, 201 bp, Homo sapiens; identical to SEQ ID NO: 78830

SEQ ID NO: 78896 - DNA, 201 bp, Homo sapiens
tctacgaaggatatggacagactgaaacggtgctaatctgtggaaattttaagggaatgaaaattaaacctggctcaatgggaaaaccttctcctgctttygatgttaagattgtagatgtaaatggcaatgttctacctcctggacaagaaggagatattggcattcaagttctacccaaccgaccatttggccttttta

SEQ ID NO: 78897 - DNA, 201 bp, Homo sapiens
aatggaaggttctggctagatttgacaccctcagatgtgatgtggaatacctcagatacgggctgggcaaagtctgcatggagtagtgttttttctccgtrgatccagggagcatgtgtattcacacaccatttaccccgttttgagccgacttctatcttgcaaacactctccaagtaccccatcacagtcttctgttca

SEQ ID NO: 78898 - DNA, 201 bp, Homo sapiens
gaactcaaggttcagggctgctcttctaagaaacaagtctgccataatctccatctgtgttggaatctgttaactaatgaactggtctctgtgcaaatccygagtgctaaagcttccaacaagactgatgctagctcgtgtcaccaggaagatgctacgtcatgccaagtgttttcagcgcctagcaatttttggttctgt

SEQ ID NO: 78899 - DNA, 201 bp, Homo sapiens
tacaatcttcaaaagcaaactgcattatcaccaatgatgttttagccccagcagtagacgctgttgcatccaaatgtgaaaatctgcactccaagctgatygtatcagagaactccagagaggggtgggggaacctcaaggagttgatgaaacatgccagtgacagccacacctgtgtgaagacaaaacacaatgagatca

SEQ ID NO: 78900 - DNA, 201 bp, Homo sapiens
tctgtgcaaatcctgagtgctaaagcttccaacaagactgatgctagctcgtgtcaccaggaagatgctacgtcatgccaagtgttttcagcgcctagcartttttggttctgtgagggcactgcataaagataatagaacagcaacccctcagaatttctccaactatgaatccatgaaacaggacttcaaactggggat

SEQ ID NO: 78901 - DNA, 201 bp, Homo sapiens
aactaataaaggagattcaggagcatgttaaaaaaactacagcaccttacaaatatcccagaaaggtagaatttattcaagagctgccaaagactatcagwgggaagacaaaaagaaatgaactgaggaagaaagaatggaagacaatttaaagttgtttcattaattaccatatctataaaacaaacatagtatctgtca

SEQ ID NO: 78902 - DNA, 201 bp, Homo sapiens
agattgtagatgtaaatggcaatgttctacctcctggacaagaaggagatattggcattcaagttctacccaaccgaccatttggcctttttactcattasgtagataatccttcaaaaacagcttcaactctacgaggcaatttctatatcactggggacagaggatatatggataaagatgggtatttctggtttgttg

SEQ ID NO: 78903 - DNA, 201 bp, Homo sapiens
caatggactgataaggaaaaggctggaaagaaaccttcaaatccagccttctggtggatcaacagaaatggagaagagatgcgatggagttttgaggaacygggatctctgtccagaaaatttgccaatatactttcagaagcctgttccctacaaagaggagatcgggtaattctgattctgcccagggtcccagagtgg

SEQ ID NO: 78904 - DNA, 201 bp, Homo sapiens
ctacccaaccgaccatttggcctttttactcattacgtagataatccttcaaaaacagcttcaactctacgaggcaatttctatatcactggggacagagsatatatggataaagatgggtatttctggtttgttgcaagagcagatgatgtcatattatcctctggctatcgaattggaccatttgaggtagaaaatgcc

SEQ ID NO: 78905 - DNA, 201 bp, Homo sapiens
tacagaatgatataaccagctataagtttaaaagcttaaagcactgtgtgagtgctggggaaccaattacccctgacgtgactgaaaaatggagaaacaasacgggcctggatatctacgaaggatatggacagactgaaacggtgctaatctgtggaaattttaagggaatgaaaattaaacctggctcaatgggaaaac

SEQ ID NO: 78906 - DNA, 190 bp, Homo sapiens
cggattgtcagactgctcctccctcttctttagactgccacgaggaaaaagcagatgtgagaactcaaggttcagggctgctcttctaasaaacaagtctgccataatctccatctgtgttggaatctgttaactaatgaactggtctctgtgcaaatcctgagtgctaaagcttccaacaagactgatg

SEQ ID NO: 78907 - DNA, 201 bp, Homo sapiens
aaacagcttcaactctacgaggcaatttctatatcactggggacagaggatatatggataaagatgggtatttctggtttgttgcaagagcagatgatgtyatattatcctctggctatcgaattggaccatttgaggtagaaaatgccctgaatgaacacccttcagttgcagagtcagctgttgtcagcagcccagacc

SEQ ID NO: 78908 - DNA, 201 bp, Homo sapiens
tctacgaaggatatggacagactgaaacggtgctaatctgtggaaattttaagggaatgaaaattaaacctggctcaatgggaaaaccttctcctgctttygatgttaaggtttgcacatccccttccaggagaatgtttaacaacccaatctgtacactacctacctaccgcttacccccatataaactttctttgttat

SEQ ID NO: 78909 - DNA, 201 bp, Homo sapiens; identical to SEQ ID NO: 78897

SEQ ID NO: 78910 - DNA, 201 bp, Homo sapiens; identical to SEQ ID NO: 78898

SEQ ID NO: 78911 - DNA, 201 bp, Homo sapiens; identical to SEQ ID NO: 78899

SEQ ID NO: 78912 - DNA, 201 bp, Homo sapiens; identical to SEQ ID NO: 78900

SEQ ID NO: 78913 - DNA, 201 bp, Homo sapiens; identical to SEQ ID NO: 78903

SEQ ID NO: 78914 - DNA, 201 bp, Homo sapiens; identical to SEQ ID NO: 78905

SEQ ID NO: 78915 - DNA, 190 bp, Homo sapiens; identical to SEQ ID NO: 78906

SEQ ID NO: 78916 - DNA, 201 bp, Homo sapiens
gtgtttaatggaaaatgtatttatgaaatttttagtaaagaagtttttggtgtaaaggttaagaacttggaatttgggcttcagccccataagattccagrcacagaaactctctgctatgttatgccgtcatccagtgcaagaagtgctcagtttcctcgggcccaagacaaagttcattactacataaaactgaaagac

SEQ ID NO: 78917 - DNA, 201 bp, Homo sapiens
agtctcatttgttagtttttagtggtaactaagggtaaactcagggtttcctgagctatatgcacactcagacctctttgctttaccagtggtgtttgtgrgttgctcagtagtaaaaactggcccttacctgacagagccctggctttgacctgctcagccctgtgtgttaatcctctagtagctagtaactactctggg

SEQ ID NO: 78918 - DNA, 201 bp, Homo sapiens
gaaatttttagtaaagaagtttttggtgtaaaggttaagaacttggaatttgggcttcagccccataagattccagacacagaaactctctgctatgttaygccgtcatccagtgcaagaagtgctcagtttcctcgggcccaagacaaagttcattactacataaaactgaaagacttaagagatcagttgagaggcatt

SEQ ID NO: 78919 - DNA, 201 bp, Homo sapiens
tgtcaaagaggcaaaggtgttgatttttgtatatgaagttaagcctcagcagagtctcatttgttagtttttagtggtaactaagggtaaactcagggttycctgagctatatgcacactcagacctctttgctttaccagtggtgtttgtgggttgctcagtagtaaaaactggcccttacctgacagagccctggcttt

SEQ ID NO: 78920 - DNA, 201 bp, Homo sapiens
atataccattatcccttttatacctaagaagggcatgctaataattaccactgtcaaagaggcaaaggtgttgatttttgtatatgaagttaagcctcagyagagtctcatttgttagtttttagtggtaactaagggtaaactcagggtttcctgagctatatgcacactcagacctctttgctttaccagtggtgtttg

SEQ ID NO: 78921 - DNA, 201 bp, Homo sapiens
atgatgtactgtactgctgtttacatggacgttttgtgcgggtgctttgaagtgccttgcatcagggattaggagcaattaaattattttttcacgggacygtgtaaagcatgtaactaggtattgctttggtatataactgttgtagctttacaagagattgttttatttgaatggggaaaataccgtttaaattatgac

SEQ ID NO: 78922 - DNA, 201 bp, Homo sapiens
atcaagggctgagacttttgaattttgaatattcgttgggtttcatgttaagaagcctgtggtctaggagtgctattcagtgtttcttttcctgataaacmctttgaatattttttttgtgtttttgtttccttttctgaagctgttcctccttttaaatatttttaatcacattgataaaatctatccttcaccacctct

SEQ ID NO: 78923 - DNA, 122 bp, Homo sapiens
cgttgccgggtcgcaggtcccrccagtgcgagcgcaacggaggtcgaaggcgttcagactcttagctgaacgcggagctgcggcggctatgctgtggagcggctgccggcgtttcggggcgc

SEQ ID NO: 78924 - DNA, 201 bp, Homo sapiens
aaaaggtggggtggaactcccagccaacacgagctgtgatcttcgaagactgtgctgtccctgtggccaacagaattgggagcgaggggcagggcttcctyattgccgtgagaggactgaacggagggaggatcaatattgcttcctgctccctgggggctgcccacgcctctgtcatcctcacccgagaccacctcaatg

SEQ ID NO: 78925 - DNA, 201 bp, Homo sapiens
gggtcgcaggtcccgccagtgcgagcgcaacggaggtcgaaggcgttcagactcttagctgaacgcggagctgcggcggctatgctgtggagcggctgccsgcgtttcggggcgcgcctcggctgcctgcccggcggtctccgggtcctcgtccagaccggccaccggagcttgacctcctgcatcgacccttccatggga

SEQ ID NO: 78926 - DNA, 201 bp, Homo sapiens
atttatgcagatctcaatcagaatgactttgccatcagcaaagaggacatgcaggagcttctctcctgtacaaacataatatttcactgtgcagccactgkacgctttgacgacactctcagacatgctgtgcaacttaacgtcactgccacccggcagctcttgcttatggctagtcagatgccaaagctggaagccttt

SEQ ID NO: 78927 - DNA, 201 bp, Homo sapiens
ctcggaatgtctggttcttcattgtaagcttctgttataaattcctctcctactttagagcatccagcacgctcaaagtttaagagcatttagccatcgcyttttatctggaacctctcagatacctctaaaacagcaaactgtgattctcaagattagaaagtaacaaggaatatgcccaaactgtcaaatgtcacctgt

SEQ ID NO: 78928 - DNA, 201 bp, Homo sapiens
gctataaaagaaagggaggaatcatgtccacaattgcagctttctatggcggcaagtccattctcatcacgggggccacaggctttctgggcaaagtgctratggagaagctgtttcgcaccagcccagacctgaaagtcatttacatccttgtgaggcccaaggctggccagacactgcagcagagggttttccagatcc

SEQ ID NO: 78929 - DNA, 201 bp, Homo sapiens
agatcagagctatttatgcagatctcaatcagaatgactttgccatcagcaaagaggacatgcaggagcttctctcctgtacaaacataatatttcactgkgcagccactgtacgctttgacgacactctcagacatgctgtgcaacttaacgtcactgccacccggcagctcttgcttatggctagtcagatgccaaagc

SEQ ID NO: 78930 - DNA, 201 bp, Homo sapiens
aatgactttgccatcagcaaagaggacatgcaggagcttctctcctgtacaaacataatatttcactgtgcagccactgtacgctttgacgacactctcakacatgctgtgcaacttaacgtcactgccacccggcagctcttgcttatggctagtcagatgccaaagctggaagcctttatacatatctctactgcctat

SEQ ID NO: 78931 - DNA, 201 bp, Homo sapiens; identical to SEQ ID NO: 78926

SEQ ID NO: 78932 - DNA, 201 bp, Homo sapiens; identical to SEQ ID NO: 78927

SEQ ID NO: 78933 - DNA, 201 bp, Homo sapiens; identical to SEQ ID NO: 78928

SEQ ID NO: 78934 - DNA, 201 bp, Homo sapiens; identical to SEQ ID NO: 78929

SEQ ID NO: 78935 - DNA, 201 bp, Homo sapiens; identical to SEQ ID NO: 78930

SEQ ID NO: 78936 - DNA, 201 bp, Homo sapiens
agatggggccctgttaggtctggagctccccacagacactgatctcagtttcccccgagagtgtgagtgtaggcctctacaggcagctgcctctggggagytggggagcctaggggttaactctagacccccctcaaccctctggaccaaagtctgtccaggaaaataggatgccggagcccaggagtcgtcagcctagca

SEQ ID NO: 78937 - DNA, 201 bp, Homo sapiens
ttctcctcttccttgattgtgtctggcagctcctccagcagtttccagctgattttgaattctctgagtttttccttcttgctcttcatgacagtgtcagrgttcctgacacccttaccttcctgagaaataccccctgggagcgcggaaagcagagcggacagttaaactcctatacacaagtctacaccccaggatact

SEQ ID NO: 78938 - DNA, 201 bp, Homo sapiens
  misc_feature (1)...(201): n = A,T,C or G
atttatccctgaggagattctgattcatggccgagacttccggctgctcagagttggttttgaggctggaggcctagagcctcaggcttttcaggtgaccntggccattgtccaagccagagctcagagcaatcaagcccaacagtattcggggataaccctgagcaaggctggccagggttctggctccagaaaaccacc

SEQ ID NO: 78939 - DNA, 201 bp, Homo sapiens
gggttctgtctaatcttttttttttttttttgtatctgcacttgcagcctcagctttcacacttcagcccttaagttcactaagaaggtctgagtttctgytgcagatagtggtgttaactgctccaactcttgtcttgcttagtttctacaaatatttttgcttcttgtcatttgaaggattaagaaacaaaaacaatcc

SEQ ID NO: 78940 - DNA, 201 bp, Homo sapiens
gtgtaggcctctacaggcagctgcctctggggagttggggagcctaggggttaactctagacccccctcaaccctctggaccaaagtctgtccaggaaaayaggatgccggagcccaggagtcgtcagcctagcagttgcctggcctccagatgcctcccaggggagcagatcctagcatgggccccaggggtgaggaagg

SEQ ID NO: 78941 - DNA, 201 bp, Homo sapiens
tggaatcaggacactcccttgaacagtgaatacgattttgccctggtcaacattggacgattagaggctgtgagcggcttgtcccgagtccagctcctccrtccagggtccctgcataaatttatccctgaggagattctgattcatggccgagacttccggctgctcagagttggttttgaggctggaggcctagagcct

SEQ ID NO: 78942 - DNA, 201 bp, Homo sapiens
ggacccccaaactctgctccgtgcacgtcaaatgctcctttcccttgtgtccaaccccctacccctctccctaacacccctcttctcaacaagactcagcytctccccgaggtgggtgagcatccttgaggtttcccacccttaactgctgtgtccccggatggagccagagaaatgtggtgggggggccggggccagagt

SEQ ID NO: 78943 - DNA, 201 bp, Homo sapiens
ccagctcctccgtccagggtccctgcataaatttatccctgaggagattctgattcatggccgagacttccggctgctcagagttggttttgaggctggargcctagagcctcaggcttttcaggtgaccatggccattgtccaagccagagctcagagcaatcaagcccaacagtattcggggataaccctgagcaaggc

SEQ ID NO: 78944 - DNA, 201 bp, Homo sapiens
acataccattctcaatcccactgaaattgctggcattctcaaaggcagggcagagggggatctggggtagaggagggttctgtctaatctttttttttttyttttgtatctgcacttgcagcctcagctttcacacttcagcccttaagttcactaagaaggtctgagtttctgctgcagatagtggtgttaactgctcca

SEQ ID NO: 78945 - DNA, 201 bp, Homo sapiens
cattctcaaaggcagggcagagggggatctggggtagaggagggttctgtctaatcttttttttttttttttgtatctgcacttgcagcctcagctttcayacttcagcccttaagttcactaagaaggtctgagtttctgctgcagatagtggtgttaactgctccaactcttgtcttgcttagtttctacaaatatttt

SEQ ID NO: 78946 - DNA, 201 bp, Homo sapiens
agagcaatcaagcccaacagtattcggggataaccctgagcaaggctggccagggttctggctccagaaaaccaccaattcctctcatggagacagcggamgactgggagactgagcggaagaagcaggcagccagaggctggagggtcagcacggtcaacgagaggttcgacgtagccaccagcctcccccgttacttct

SEQ ID NO: 78947 - DNA, 201 bp, Homo sapiens
ggagccagagatggggccctgttaggtctggagctccccacagacactgatctcagtttcccccgagagtgtgagtgtaggcctctacaggcagctgcctytggggagttggggagcctaggggttaactctagacccccctcaaccctctggaccaaagtctgtccaggaaaataggatgccggagcccaggagtcgtca

SEQ ID NO: 78948 - DNA, 167 bp, Homo sapiens
aaatcgcattctcacctcgccttgctgctgctttaattccaagttctatttcttcccttatagttttctatgggaatgaggcggatacaggaaacaccctrtctcctctgtatttttgtagtggaatttctatttaaggggctcattaaagcatagtatttatacac

SEQ ID NO: 78949 - DNA, 201 bp, Homo sapiens
gacaggtcagtgacttctatttttgactcgtgtttttttttccattgagatgtactctctgaagtttggtcttgatttgttttatgagaagtgaggtctgygagtggggagggggagatttattctcattttcaggacgagacttttgccctacatctttcctagaataagaggtgagaatctcatgatttgtctctagat

SEQ ID NO: 78950 - DNA, 201 bp, Homo sapiens; identical to SEQ ID NO: 78936

SEQ ID NO: 78951 - DNA, 201 bp, Homo sapiens
ttctcctcttccttgattgtgtctggcagctcctccagcagtttccagctgattttgaattctctgagtttttccttcttgctcttcatgacagtgtcagrgttcctgacacccttaccttcctgagaaataccccctgggagcgcggaaagcagagcggacaggtcagtgacttctatttttgactcgtgtttttttttc

SEQ ID NO: 78952 - DNA, 201 bp, Homo sapiens; identical to SEQ ID NO: 78938
  misc_feature (1)...(201): n = A,T,C or G

SEQ ID NO: 78953 - DNA, 201 bp, Homo sapiens; identical to SEQ ID NO: 78939

SEQ ID NO: 78954 - DNA, 201 bp, Homo sapiens; identical to SEQ ID NO: 78941

SEQ ID NO: 78955 - DNA, 201 bp, Homo sapiens; identical to SEQ ID NO: 78940

SEQ ID NO: 78956 - DNA, 201 bp, Homo sapiens; identical to SEQ ID NO: 78944

SEQ ID NO: 78957 - DNA, 201 bp, Homo sapiens; identical to SEQ ID NO: 78943

SEQ ID NO: 78958 - DNA, 201 bp, Homo sapiens; identical to SEQ ID NO: 78942

SEQ ID NO: 78959 - DNA, 201 bp, Homo sapiens; identical to SEQ ID NO: 78945

SEQ ID NO: 78960 - DNA, 201 bp, Homo sapiens; identical to SEQ ID NO: 78947

SEQ ID NO: 78961 - DNA, 201 bp, Homo sapiens
agagcaatcaagcccaacagtattcggggataaccctgagcaaggctggccagggttctggctccagaaaaccaccaattcctctcatggagacagcggamgactgggagactgagcggaagaagcaggcagccagaggctggagggtcagcacggtcaacgagaggttcgacgtagccaccaggctccggtgtttctcct

SEQ ID NO: 78962 - DNA, 167 bp, Homo sapiens; identical to SEQ ID NO: 78948

SEQ ID NO: 78963 - DNA, 201 bp, Homo sapiens; identical to SEQ ID NO: 78949

SEQ ID NO: 78964 - DNA, 201 bp, Homo sapiens; identical to SEQ ID NO: 78951

SEQ ID NO: 78965 - DNA, 201 bp, Homo sapiens; identical to SEQ ID NO: 78938
  misc_feature (1)...(201): n = A,T,C or G

SEQ ID NO: 78966 - DNA, 201 bp, Homo sapiens; identical to SEQ ID NO: 78939

SEQ ID NO: 78967 - DNA, 201 bp, Homo sapiens
ccccggatggagccagagaaatgtggtgggggggccggggccagagtttcaacattgccccccagaaggaggagccagagatggggtctgtccaggaaaayaggatgccggagcccaggagtcgtcagcctagcagttgcctggcctccagatgcctcccaggggagcagatcctagcatgggccccaggggtgaggaagg

SEQ ID NO: 78968 - DNA, 201 bp, Homo sapiens; identical to SEQ ID NO: 78941

SEQ ID NO: 78969 - DNA, 201 bp, Homo sapiens; identical to SEQ ID NO: 78943

SEQ ID NO: 78970 - DNA, 201 bp, Homo sapiens; identical to SEQ ID NO: 78942

SEQ ID NO: 78971 - DNA, 201 bp, Homo sapiens; identical to SEQ ID NO: 78944

SEQ ID NO: 78972 - DNA, 201 bp, Homo sapiens; identical to SEQ ID NO: 78945

SEQ ID NO: 78973 - DNA, 201 bp, Homo sapiens; identical to SEQ ID NO: 78961

SEQ ID NO: 78974 - DNA, 167 bp, Homo sapiens; identical to SEQ ID NO: 78948

SEQ ID NO: 78975 - DNA, 164 bp, Homo sapiens
atgtctcacctgcggatgaaactcctgtgcaagaagatacaaaagcggaacctcaaattgcggmagcagaacctaaagttgcagggggcctcaaatctgaccctatcagaaactcaaaatggaaatgtgtctgaagaaacaatgggaggtggaaaggttaaaaa

SEQ ID NO: 78976 - DNA, 201 bp, Homo sapiens
accatgcaaaaaagaaaaacaaataaagcagccgaagaaaccttccaagttgatttggagactgaagaaacagccagttgtggggggccagccttggaaavttcttccatgtctctatcaccagagactctgccaaggagagaggaaggctgcaacatcaagctcttccgcatccccttcaaaactccaggtgagctagag

SEQ ID NO: 78977 - DNA, 201 bp, Homo sapiens
cttccgcatccccttcaaaactccaggtgagctagagcccttaagtgccttcgagaacagcagctgggggtggacgtatttgtcaccccaaaggagcctgsttcctggagcagcccctggagggacacagagagagcctccaccgtctcctgagtcggtcttagagaacgagtctgccagggagctgaagcaatttttcct

SEQ ID NO: 78978 - DNA, 201 bp, Homo sapiens
tgaggatggcaaatactgcctggacctgctcacccaggcgggcgacgacttcataatcttggactcatcccaagggaactcaagtgtatcagatcgccatwgtgcattacatcaaacagaagtaccccaacctccaggaagtgatggcctgcggtcggccccagggcactgctgtgtacaaggtggccaagtatgcccaac

SEQ ID NO: 78979 - DNA, 201 bp, Homo sapiens
agaaagggaagctgcctatcgtcaacgatctcgatgagctggtggccattatcgcctgcaccgacctgaagaagaaccgagactacccgctggcctccaakgattcccacgagcagctgctgtggcatatacatatatatgcagctgtgggcactcatgaggatggcaaatactgcctggacctgctcacccaggcgggcg

SEQ ID NO: 78980 - DNA, 201 bp, Homo sapiens
ctcctcagtgaggtgatgatgccaaggatcgagctggtggtggctccagcaggcgtgatgttgaaagaggcaaatgagatcctgcagcgtagcaagaaagrgaagctgcctatcgtcaacgatctcgatgagctggtggccattatcgcctgcaccgacctgaagaagaaccgagactacccgctggcctccaaggattcc

SEQ ID NO: 78981 - DNA, 201 bp, Homo sapiens
tcgcctgcaccgacctgaagaagaaccgagactacccgctggcctccaaggattcccacgagcagctgctgtggggaactcaagtgtatcagatcgccatwgtgcattacatcaaacagaagtaccccaacctccaggtgattggggggaacatagtgacagcagcccagggaaagaacctgattgatgctggtgtggacg

SEQ ID NO: 78982 - DNA, 201 bp, Homo sapiens
agaaagggaagctgcctatcgtcaacgatctcgatgagctggtggccattatcgcctgcaccgacctgaagaagaaccgagactacccgctggcctccaakgattcccacgagcagctgctgtggggaactcaagtgtatcagatcgccatagtgcattacatcaaacagaagtaccccaacctccaggtgattgggggga

SEQ ID NO: 78983 - DNA, 201 bp, Homo sapiens; identical to SEQ ID NO: 78980

SEQ ID NO: 78984 - DNA, 201 bp, Homo sapiens
ggccagcacagtcccctcacctctggcagggctgctacctcctcagagtttcagaagcccccacatgggggctctaggaatgccggcatgctggtctttcmgacctggtgctcttctgctgggggactgaggctggccctcattcggggtcgggaaccaagggtgtgtctgctctttccctccccatcctctggcagaaat

SEQ ID NO: 78985 - DNA, 201 bp, Homo sapiens
ccccacatgggggctctaggaatgccggcatgctggtctttccgacctggtgctcttctgctgggggactgaggctggccctcattcggggtcgggaaccragggtgtgtctgctctttccctccccatcctctggcagaaatcagctagacgctataccgtggactctccctggtccaccaccatgttgaagcccttggc

SEQ ID NO: 78986 - DNA, 201 bp, Homo sapiens
gcagcgccggggggtcatctcccccaacttcagtttcatggggcagctgctgcagtttgagacccaggtgctgtgtcactgaggtggtgcccctctgcctscctgccccactgtgctggcaggagctgactgtggactggtgggctcccctctgggccagcacagtcccctcacctctggcagggctgctacctcctcaga

SEQ ID NO: 78987 - DNA, 201 bp, Homo sapiens; identical to SEQ ID NO: 78984

SEQ ID NO: 78988 - DNA, 201 bp, Homo sapiens; identical to SEQ ID NO: 78986

SEQ ID NO: 78989 - DNA, 201 bp, Homo sapiens; identical to SEQ ID NO: 78985

SEQ ID NO: 78990 - DNA, 201 bp, Homo sapiens; identical to SEQ ID NO: 78984

SEQ ID NO: 78991 - DNA, 201 bp, Homo sapiens; identical to SEQ ID NO: 78986

SEQ ID NO: 78992 - DNA, 201 bp, Homo sapiens; identical to SEQ ID NO: 78985

SEQ ID NO: 78993 - DNA, 201 bp, Homo sapiens; identical to SEQ ID NO: 78984

SEQ ID NO: 78994 - DNA, 201 bp, Homo sapiens; identical to SEQ ID NO: 78986

SEQ ID NO: 78995 - DNA, 201 bp, Homo sapiens; identical to SEQ ID NO: 78985

SEQ ID NO: 78996 - DNA, 201 bp, Homo sapiens; identical to SEQ ID NO: 78984

SEQ ID NO: 78997 - DNA, 201 bp, Homo sapiens; identical to SEQ ID NO: 78985

SEQ ID NO: 78998 - DNA, 201 bp, Homo sapiens; identical to SEQ ID NO: 78986

SEQ ID NO: 78999 - DNA, 201 bp, Homo sapiens
tgagcgtctgtacgacctgaatcataatgagattggggagcttatccgcatgccaaagatggggaagaccatccacaaatatgtccatctgtttcccaagytggagttgtcagtgcacctgcagcctatcacacgctccaccctgaaggtggagctgaccatcacgccagacttccagtgggatgaaaaggtgcatggttc

SEQ ID NO: 79000 - DNA, 201 bp, Homo sapiens
gatcgtcaccaagaccattgagaacaagcaggatgctgtggactacctcacctggacctttctgtaccgccgcatgacacagaaccccaattactacaacytgcagggtcagctggtggagcagaccctgagtgacctggagcagtccaagtgcatcagcatcgaggacgagatggacgtggcgcctctgaacctaggcat

SEQ ID NO: 79001 - DNA, 201 bp, Homo sapiens
tgtggactacctcacctggacctttctgtaccgccgcatgacacagaaccccaattactacaacttgcagggtcagctggtggagcagaccctgagtgacytggagcagtccaagtgcatcagcatcgaggacgagatggacgtggcgcctctgaacctaggcatgatcgccgcctactattacatcaactacaccaccat

SEQ ID NO: 79002 - DNA, 201 bp, Homo sapiens
atgaggaggaaggtgatgaagacgtatacggggaggttcgagaagaggcatctgatgatgacatggaaggggacgaggctgtcgtgcgctgcaccctctcrgctaatctcgtagcctcaggtgaactgatgagttccaagaagaaggatttgcaccctcgggatattgatgcattttggctgcagcggcagctcagtcgtt

SEQ ID NO: 79003 - DNA, 201 bp, Homo sapiens
acagtgattcagattgagtcctgaggcatttacttttgggtaaaggagagttgagcctgaattaggaatgtgtacattgtaggaatcctggttgtggggascaggtctgtgggcctcaggtctggccagccagggctggtgctgtccccgcctacctccacttcctttcccttgctcactctggatccagtgacagcaggt

SEQ ID NO: 79004 - DNA, 201 bp, Homo sapiens
tgaagttggactttgtggccccagccactggtgcccacaactacactctgtacttcatgagtgacgcttacatgggatgtgaccaggagtacaaattcagygtggatgtgaaagaagctgagacagacagtgattcagattgagtcctgaggcatttacttttgggtaaaggagagttgagcctgaattaggaatgtgtac

SEQ ID NO: 79005 - DNA, 112 bp, Homo sapiens
gcgtctttcctrcgtcgttccggcgcggcgggagcagagatctgcggccgtttgcagcttgcggtagggaggcgtggtggtctgaagcctccgagcagccgcggccatggcg

SEQ ID NO: 79006 - DNA, 201 bp, Homo sapiens; identical to SEQ ID NO: 78999

SEQ ID NO: 79007 - DNA, 201 bp, Homo sapiens
gatcgtcaccaagaccattgagaacaagcaggatgctgtggactacctcacctggacctttctgtaccgccgcatgacacagaaccccaattactacaacytgcagggcatctcccatcgtcacttgtcggaccacttgtcagagctggtggagcagaccctgagtgacctggagcagtccaagtgcatcagcatcgagga

SEQ ID NO: 79008 - DNA, 201 bp, Homo sapiens
ccgcatgacacagaaccccaattactacaacttgcagggcatctcccatcgtcacttgtcggaccacttgtcagagctggtggagcagaccctgagtgacytggagcagtccaagtgcatcagcatcgaggacgagatggacgtggcgcctctgaacctaggcatgatcgccgcctactattacatcaactacaccaccat

SEQ ID NO: 79009 - DNA, 201 bp, Homo sapiens; identical to SEQ ID NO: 79002

SEQ ID NO: 79010 - DNA, 201 bp, Homo sapiens; identical to SEQ ID NO: 79003

SEQ ID NO: 79011 - DNA, 201 bp, Homo sapiens; identical to SEQ ID NO: 79004

SEQ ID NO: 79012 - DNA, 112 bp, Homo sapiens; identical to SEQ ID NO: 79005

SEQ ID NO: 79013 - DNA, 201 bp, Homo sapiens
caaaaccagtatatccaggacaaactctacaaactgagatgtggaaggaaggaaacagaattcattttcaaaccaaggtccaagaaactggagacattgtyatttcaaatgcatatgtggatcttgcaccaacatctggtacttcagctaagacaccctctgagggcgggaagcttcagagtacctttgtatttgaggaaa

SEQ ID NO: 79014 - DNA, 201 bp, Homo sapiens
agtcggcgtccagcggctctgcttgttcgtgtgtgtgtcgttgcaggccttattcatgggctcaccgctgaggttcgacgggcgggtggtactggtcaccrgcgcgggggcaggattgggccgagcctatgccctggcttttgcagaaagaggagcgttagttgttgtgaatgatttgggaggggacttcaaaggagttgg

SEQ ID NO: 79015 - DNA, 201 bp, Homo sapiens
ttttgacaagcccatattacatggattatgtacatttggattttctgccaggcgtgtgttacagcagtttgcagataatgatgtgtcaagattcaaggcarttaaggctcgttttgcaaaaccagtatatccaggacaaactctacaaactgagatgtggaaggaaggaaacagaattcattttcaaaccaaggtccaaga

SEQ ID NO: 79016 - DNA, 201 bp, Homo sapiens
tctgcttgttcgtgtgtgtgtcgttgcaggccttattcatgggctcaccgctgaggttcgacgggcgggtggtactggtcaccggcgcgggggcaggattkggccgagcctatgccctggcttttgcagaaagaggagcgttagttgttgtgaatgatttgggaggggacttcaaaggagttggtaaaggctccttagctg

SEQ ID NO: 79017 - DNA, 201 bp, Homo sapiens
cctttgctaggataagtgatgaagactgggatataatccacagagttcatttgcggggttcattccaagtgacacgggcagcatgggaacacatgaagaawcagaagtatggaaggattattatgacttcatcagcttcaggaatatatggcaactttggccaggccaattatagtgctgcaaagttgggtcttctgggcc

SEQ ID NO: 79018 - DNA, 201 bp, Homo sapiens
agaaggcattctttagtggcaggctgaaggccagagggaacatcatgctgagccagaaacttcagatgattcttaaagactacgccaagctctgaagggcrcactacactattaataaaaatggaatcattaaatactctcttcacccaaatatgcttgattattctgcaaaagtgattagaactaagatgcaggggaaat

SEQ ID NO: 79019 - DNA, 130 bp, Homo sapiens
cactgaccctcgtcccgcccccgccattcsccgcctcctcctgtcccgcagtcggcgtccagcggctctgcttgttcgtgtgtgtgtcgttgcaggccttattcatgggctcaccgctgaggttcgacgg

SEQ ID NO: 79020 - DNA, 201 bp, Homo sapiens
tctacaaactgagatgtggaaggaaggaaacagaattcattttcaaaccaaggtccaagaaactggagacattgtcatttcaaatgcatatgtggatcttkcaccaacatctggtacttcagctaagacaccctctgagggcgggaagcttcagagtacctttgtatttgaggaaataggacgccgcctaaaggatattgg

SEQ ID NO: 79021 - DNA, 201 bp, Homo sapiens
gtcctgggcaagcttgaccctcagaaggcattctttagtggcaggctgaaggccagagggaacatcatgctgagccagaaacttcagatgattcttaaagmctacgccaagctctgaagggcacactacactattaataaaaatggaatcattaaatactctcttcacccaaatatgcttgattattctgcaaaagtgatt

SEQ ID NO: 79022 - DNA, 201 bp, Homo sapiens
ggaaggattattatgacttcatcagcttcaggaatatatggcaactttggccaggccaattatagtgctgcaaagttgggtcttctgggccttgcaaattytcttgcaattgaaggcaggaaaagcaacattcattgtaacaccattgctcctaatgcgggatcacggatgactcagacagttatgcctgaagatcttgtg

SEQ ID NO: 79023 - DNA, 201 bp, Homo sapiens
caaaagaatcacccaatgactcctgaggcagtcaaggctaactggaagaagatctgtgactttgagaatgccagcaagcctcagagtatccaagaatcaastggcagtataattgaagttctgagtaaaatagattcagaaggaggagtttcagcaaatcatactagtcgtgcaacgtctacagcaacatcaggatttgct

SEQ ID NO: 79024 - DNA, 201 bp, Homo sapiens
tgggcaagcttgaccctcagaaggcattctttagtggcaggctgaaggccagagggaacatcatgctgagccagaaacttcagatgattcttaaagactaygccaagctctgaagggcacactacactattaataaaaatggaatcattaaatactctcttcacccaaatatgcttgattattctgcaaaagtgattagaa

SEQ ID NO: 79025 - DNA, 201 bp, Homo sapiens
tatgattcagtggaagaaggagagaaggttgtgaagacagccctggatgcttttggaagaatagatgttgtggtcaacaatgctggaattctgagggatcrttcctttgctaggataagtgatgaagactgggatataatccacagagttcatttgcggggttcattccaagtgacacgggcagcatgggaacacatgaag

SEQ ID NO: 79026 - DNA, 201 bp, Homo sapiens
agtcaaggtagctgtagccatacctaatagacctcctgatgctgtacttacagataccacctctcttaatcaggctgctttgtaccgcctcagtggagacyggaatcccttacacattgatcctaactttgctagtctagcaggttttgacaagcccatattacatggattatgtacatttggattttctgccaggcgtgt

SEQ ID NO: 79027 - DNA, 201 bp, Homo sapiens
tttcatggaggtggtcctgggcaagcttgaccctcagaaggcattctttagtggcaggctgaaggccagagggaacatcatgctgagccagaaacttcagrtgattcttaaagactacgccaagctctgaagggcacactacactattaataaaaatggaatcattaaatactctcttcacccaaatatgcttgattattc

SEQ ID NO: 79028 - DNA, 201 bp, Homo sapiens
tcagttctctctctttcttgttggctctggaggctttggtggaaaacggacatcagacaaagtcaaggtagctgtagccatacctaatagacctcctgatrctgtacttacagataccacctctcttaatcaggctgctttgtaccgcctcagtggagactggaatcccttacacattgatcctaactttgctagtctagc

SEQ ID NO: 79029 - DNA, 201 bp, Homo sapiens
gacggcaaacatgtggtgtttggaaaagtcattgatgggatgacagtggtgcactccatagagctccaagcaactgatgggcatgaccgtccactcaccarctgctcgatcatcaacagtggcaagatagacgtgaaaacgccttttgtggttgagatcgctgattggtgacacaactggcagaaaacaaggatatgcttt

SEQ ID NO: 79030 - DNA, 201 bp, Homo sapiens
atcaacagtggcaagatagacgtgaaaacgccttttgtggttgagatcgctgattggtgacacaactggcagaaaacaaggatatgctttggcatgtgtgtgtgtgtgtgtgtgtgtgtgtgtgtgtgtgtgtgttgtgttgtctttcaattatttgcttttttttttttactttctttttgtattctatcccagatcaca

SEQ ID NO: 79031 - DNA, 201 bp, Homo sapiens
ggtggctcatgcctataatcccagcactttgggaggctgagacaagagaattgcttgagcccaggagtttgagaccagcctgggcaacatagtgagacccygtctctaacaaaactaaaattagctggtcatgttggtgcacatctgtagttccagttactcaggaggctgaggtgggaggattgcttgagtccaggagat

SEQ ID NO: 79032 - DNA, 128 bp, Homo sapiens
aaacagagtgggtcaaaacttctgtgctggtcagtagtgggatcatgcctgtgaattgccactgcactccagtctgggcaacatagcaagaccccatcttaaaaaaaaaaaaaaaaactaatgggaaa

SEQ ID NO: 79033 - DNA, 201 bp, Homo sapiens
ctttatattaaatacttttagatcaactctttttgcaagactttttaaaaatgtaaagttctttaagaaatatacaaaaatacacacactctagcattaayagtgaacagattagaaagattttataaatcaaactacaaacataattagataactcagaaattatgcccatccacatctcatatacttaaggtgattatt

SEQ ID NO: 79034 - DNA, 109 bp, Homo sapiens
aattcctgsaggtgctcccagcctagcccgctgcgcccggctccgcgcctgggcaacccgggctccctcccgtccctggcgccctccgcacccgcctaaggcgcggcgg

SEQ ID NO: 79035 - DNA, 201 bp, Homo sapiens
caacaacaaaacccactcaggctatatttaaactagatgaggccagatgtggtggcacatgtctgtggtcccagctactgaagaggctgaggtgggatgaytacttaagcccaggaattcggggctatagtgagctatactgatggggtatctatactgtttggcatcaatatggtggccactggggagcatggtaccacc

SEQ ID NO: 79036 - DNA, 201 bp, Homo sapiens
ggattgcttgagtccaggagatcaaggctgtagtgagctgtgattgccccaggcaacagagtgagaccctgtctcaaacaacaacgacaacaacaaaaccyactcaggctatatttaaactagatgaggccagatgtggtggcacatgtctgtggtcccagctactgaagaggctgaggtgggatgattacttaagcccag

SEQ ID NO: 79037 - DNA, 201 bp, Homo sapiens
caacagtggcaagatagacgtgaaaacgccttttgtggttgagatcgctgattggtgacacaactggcagaaaacaaggatatgctttggcatgtgtgtgtgtgtgtgtgtgtgtgtgtgtgtgtgtgtgtgttgtgttgtctttcaattatttgcttttttttttttactttctttttgtattctatcccagatcacagg

SEQ ID NO: 79038 - DNA, 201 bp, Homo sapiens
taatgcaatattttttttctgaattcattatgatccccatattgggtaatgctgaacatttatctgaaacagatgaggatattattattttgtatccaaamagaaattcagataaagggaaatttgactagtgtaatctgagatatgtcatagggatttctttctgacaaaagggtgctttgctgttctttatattaaata

SEQ ID NO: 79039 - DNA, 201 bp, Homo sapiens
agaattgtgattggcctctttggaaaagttgtgcccaagacagtggaaaattttgttgctctagcaacaggagagaaaggatatggatataaaggaagcargtttcatcgtgtcatcaaggatttcatgattcaaggaggtgacatcaccactggagatggcactgggggtgtgagcatctatggtgagacatttccagat

SEQ ID NO: 79040 - DNA, 201 bp, Homo sapiens
caacatagtgagaccctgtctctaacaaaactaaaattagctggtcatgttggtgcacatctgtagttccagttactcaggaggctgaggtgggaggattkcttgagtccaggagatcaaggctgtagtgagctgtgattgccccaggcaacagagtgagaccctgtctcaaacaacaacgacaacaacaaaacccactca

SEQ ID NO: 79041 - DNA, 201 bp, Homo sapiens
tcatcaacagtggcaagatagacgtgaaaacgccttttgtggttgagatcgctgattggtgacacaactggcagaaaacaaggatatgctttggcatgtgtgtgtgtgtgtgtgtgtgtgtgtgtgtgtgtgtgtgttgtgttgtctttcaattatttgcttttttttttttactttctttttgtattctatcccagatca

SEQ ID NO: 79042 - DNA, 201 bp, Homo sapiens
ctcaggaggctgaggtgggaggattgcttgagtccaggagatcaaggctgtagtgagctgtgattgccccaggcaacagagtgagaccctgtctcaaacarcaacgacaacaacaaaacccactcaggctatatttaaactagatgaggccagatgtggtggcacatgtctgtggtcccagctactgaagaggctgaggtg

SEQ ID NO: 79043 - DNA, 201 bp, Homo sapiens; identical to SEQ ID NO: 79030

SEQ ID NO: 79044 - DNA, 201 bp, Homo sapiens
gtgttactgacattctagagtggtggaaaaacaactggcattaatgcagaattggagtgactagtcccaggaatcaagtcagaaaaaaagaccaactgacaaatagagttaatacaaaatgaattttaaaatcccaccctaggccaggcgcggtggctcatgcctgtaatcccagcactttgggaggccgaggcgggcgga

SEQ ID NO: 79045 - DNA, 201 bp, Homo sapiens
aaacagagtgggtcaaaacttctgtgctggtcagtagtgggatcatgcctgtgaattgccactgcactccagtctgggcaacatagcaagaccccatcttaaaaaaaaaaaaaaaaactaatgggaaatgcttcattttggaagtgctgaaattctgaacccactagtgcaccagtggtaaattatcatgttacctgttat

SEQ ID NO: 79046 - DNA, 201 bp, Homo sapiens
tactgacattctagagtggtggaaaaacaactggcattaatgcagaattggagtgactagtcccaggaatcaagtcagaaaaaaagaccaactgacaaatagagttaatacaaaatgaattttaaaatcccaccctaggccaggcgcggtggctcatgcctgtaatcccagcactttgggaggccgaggcgggcggatcac

SEQ ID NO: 79047 - DNA, 154 bp, Homo sapiens
aaggaaaaaaaaaattcccaccctagttagattaggatgcagaggactcacagatttggaggatttggaggacccaaattaccaaaaccccttctattacmcacttgtaaagttttattagcagtcaggtacgttttcaggtacgtttccaccc

SEQ ID NO: 79048 - DNA, 109 bp, Homo sapiens; identical to SEQ ID NO: 79034

SEQ ID NO: 79049 - DNA, 201 bp, Homo sapiens; identical to SEQ ID NO: 79039

SEQ ID NO: 79050 - DNA, 201 bp, Homo sapiens; identical to SEQ ID NO: 79038

SEQ ID NO: 79051 - DNA, 201 bp, Homo sapiens
ttagcagggcatggtggcaggcacctgtaatcccagctacttgagaggctaaggcaggagaattgcttgaacccgggaggcggaggttgcagtgagccgakatcccaccactgcactccagcctgggcaacagagcgagactctgtgtcaaaggaaaaaaaaaattcccaccctagttagattaggatgcagaggactcac

SEQ ID NO: 79052 - DNA, 201 bp, Homo sapiens
agccataatttattttgttctcttacaagtgctctttagcagttttctggatcatcaaataagagttcagtaaaatttacttttgggtcaattagttggamtgacacttttggaattatcaattactttatttctgatgaattttgaacaggactcaccaacctcatttcttagtttagccgttttgagttacataaagac

SEQ ID NO: 79053 - DNA, 201 bp, Homo sapiens
ttttttttcaaattaaagaagaattaaaaacagtatttgtaatggaaaattttggtgccattaagtacataatggcttttacttaagtctgtaattcatcytgtggatttaagattttggccaagagtaagttttaggtgtgatataacataagtgcctccaaggtttgctagtgttactgacattctagagtggtggaaa

SEQ ID NO: 79054 - DNA, 201 bp, Homo sapiens; identical to SEQ ID NO: 79042

SEQ ID NO: 79055 - DNA, 201 bp, Homo sapiens
aaggcacttcttttttttttttttcaaattaaagaagaattaaaaacagtatttgtaatggaaaattttggtgccattaagtacataatggcttttacttwagtctgtaattcatcttgtggatttaagattttggccaagagtaagttttaggtgtgatataacataagtgcctccaaggtttgctagtgttactgacat

SEQ ID NO: 79056 - DNA, 201 bp, Homo sapiens; identical to SEQ ID NO: 79029

SEQ ID NO: 79057 - DNA, 201 bp, Homo sapiens; identical to SEQ ID NO: 79031

SEQ ID NO: 79058 - DNA, 201 bp, Homo sapiens; identical to SEQ ID NO: 79033

SEQ ID NO: 79059 - DNA, 201 bp, Homo sapiens; identical to SEQ ID NO: 79035

SEQ ID NO: 79060 - DNA, 201 bp, Homo sapiens; identical to SEQ ID NO: 79037

SEQ ID NO: 79061 - DNA, 201 bp, Homo sapiens; identical to SEQ ID NO: 79036

SEQ ID NO: 79062 - DNA, 201 bp, Homo sapiens; identical to SEQ ID NO: 79040

SEQ ID NO: 79063 - DNA, 201 bp, Homo sapiens
ttgctagtgttactgacattctagagtggtggaaaaacaactggcattaatgcagaattggagtgactagtcccaggaatcaagtcagaaaaaaagaccawctgacaaatagagttaatacaaaatgaattttaaaatcccaccctaggccaggcgcggtggctcatgcctgtaatcccagcactttgggaggccgaggcg

SEQ ID NO: 79064 - DNA, 201 bp, Homo sapiens
tcaaagcccctcaaggcacttcttttttttttttttcaaattaaagaagaattaaaaacagtatttgtaatggaaaattttggtgccattaagtacataayggcttttacttaagtctgtaattcatcttgtggatttaagattttggccaagagtaagttttaggtgtgatataacataagtgcctccaaggtttgctag

SEQ ID NO: 79065 - DNA, 201 bp, Homo sapiens; identical to SEQ ID NO: 79041

SEQ ID NO: 79066 - DNA, 165 bp, Homo sapiens
atgcagaggactcacagatttggaggatttggaggacccaaattaccaaaaccccttctattacmcacttgtaaagttttattagcagtcagagcatgtgaggactttcttcctggagcatggtgggccttcaaagcgctgttaaaactacagccgccatttgtc

SEQ ID NO: 79067 - DNA, 201 bp, Homo sapiens
ttccaagctggctactcgacatctagagcccgcgaagctggcgcctcgcgcgcggagaaccagacagcgccgggagaagttcctgcgctcagtaacctgcrgccgcccagccgcgtggacggcatggtgggcgacgacccttacaacccctacaagtactctgacgacaacccttattacaactactacgatacttatgaa

SEQ ID NO: 79068 - DNA, 201 bp, Homo sapiens
ttactagtaatcattctgcactcactgggtgcatagcatggttagaggggctagagatggacagtcatcaactggcggatatagcggtacatatgatcctkagccaccagggcacaagcttaccagtagacaatacagacagagcttttgttgagctgtaactgagctatggaatagcttctttgatgtacctctttgcct

SEQ ID NO: 79069 - DNA, 201 bp, Homo sapiens
cggaggaaaactgtctggccagtacagcatacagggcagatgtcagagattatgatcacagggtgctgctcagatttccccaaagagtgaaaaaccaaggracatcagatttcttacccagccgaccaagatattcctgggaatggcacagttgtcatcaacattaccacagtatggatgagtttagccactatgacctgc

SEQ ID NO: 79070 - DNA, 201 bp, Homo sapiens
attactagtaatcattctgcactcactgggtgcatagcatggttagaggggctagagatggacagtcatcaactggcggatatagcggtacatatgatccwtagccaccagggcacaagcttaccagtagacaatacagacagagcttttgttgagctgtaactgagctatggaatagcttctttgatgtacctctttgcc

SEQ ID NO: 79071 - DNA, 201 bp, Homo sapiens
tgagtcctggctgttatgatacctatggtgcagacatagactgccagtggattgatattacagatgtaaaacctggaaactatatcctaaaggtcagtgtraaccccagctacctggttcctgaatctgactataccaacaatgttgtgcgctgtgacattcgctacacaggacatcatgcgtatgcctcaggctgcacaa

SEQ ID NO: 79072 - DNA, 201 bp, Homo sapiens
gcggaggaaaactgtctggccagtacagcatacagggcagatgtcagagattatgatcacagggtgctgctcagatttccccaaagagtgaaaaaccaagrgacatcagatttcttacccagccgaccaagatattcctgggaatggcacagttgtcatcaacattaccacagtatggatgagtttagccactatgacctg

SEQ ID NO: 79073 - DNA, 201 bp, Homo sapiens
ggcgccagcagatccaatgggagaacaacgggcaggtgttcagcttgctgagcctgggctcacagtaccagcctcagcgccgccgggacccgggcgccgcsgtccctggtgcagccaacgcctccgcccagcagccccgcactccgatcctgctgatccgcgacaaccgcaccgccgcggcgcgaacgcggacggccggct

SEQ ID NO: 79074 - DNA, 201 bp, Homo sapiens
tctttgatgtacctctttgccttaaattgctttttagttctaagattgtagaatgatcctttcaaattgtaatcttttctaacagagatattttaatatasttgctttcttaaaaaacaaaaaaactactgtcagtattaatactgagccagactggcatctacagatttcagatctatcattttattgattcttaagctt

SEQ ID NO: 79075 - DNA, 201 bp, Homo sapiens
gccagaacggcttgtgtaactttgcaaacgtgccagaaagtttaaaatctctcctccttccttcactccagacactgcccgctctccgggactgccgcgcsgctccccgttgccttccaggactgagaaaggggaaagggaagggtgccacgtccgagcagccgccttgactggggaagggtctgaatcccacccttggca

SEQ ID NO: 79076 - DNA, 201 bp, Homo sapiens
aacgcggacggccggctcatctggagtcaccgctggccgccccaggcccaccgcccgtcactggttccaagctggctactcgacatctagagcccgcgaasctggcgcctcgcgcgcggagaaccagacagcgccgggagaagttcctgcgctcagtaacctgcggccgcccagccgcgtggacggcatggtgggcgacga

SEQ ID NO: 79077 - DNA, 201 bp, Homo sapiens
cagatttcttacccagccgaccaagatattcctgggaatggcacagttgtcatcaacattaccacagtatggatgagtttagccactatgacctgcttgakgccaacacccagaggagagtggctgaaggccacaaagcaagtttctgtcttgaagacacatcctgtgactatggctaccacaggcgatttgcatgtactg

SEQ ID NO: 79078 - DNA, 201 bp, Homo sapiens
ctccaggatttgtgtgctgttgccgaatactcaggacggacctgaattctgattttataccagtctcttcaaaaacttctcgaaccgctgtgtctcctacktaaaaaaagagatgtacaaatcaataataattacacttttagaaactgtatcatcaaagattttcagttaaagtagcattatgtaaaggctcaaaacatt

SEQ ID NO: 79079 - DNA, 201 bp, Homo sapiens
attgttggctaaatagaataggggacatgcatattaaggaaaaggtcatggagaaataatattggtatcaaacaaatacattgatttgtcatgatacacaytgaatttgatccaatagtttaaggaataggtaggaaaatttggtttctatttttcgatttcctgtaaatcagtgacataaataattcttagcttatttta

SEQ ID NO: 79080 - DNA, 201 bp, Homo sapiens
tgaaaataaattatggggatcctatttagctcttagtaccactaatcaaaagttcggcatgtagctcatgatctatgctgtttctatgtcgtggaagcacyggatgggggtagtgagcaaatctgccctgctcagcagtcaccatagcagctgactgaaaatcagcactgcctgagtagttttgatcagtttaacttgaat

SEQ ID NO: 79081 - DNA, 201 bp, Homo sapiens
gactgtcttacccatcccctggatatgctcttgttttttccctctaatagctatggaaagatgcatagaaagagtataatgttttaaaacataaggcattygtctgccatttttcaattacatgctgacttcccttacaattgagatttgcccataggttaaacatggttagaaacaactgaaagcataaaagaaaaatct

SEQ ID NO: 79082 - DNA, 180 bp, Homo sapiens
cggccccagaaaacccgagcgagtagggggcggcgcgcaggagggaggagaactgggggcgcgggaggctggtgggtgtsgggggtggagatgtagaagatgtgacgccgcggcccggcgggtgccagattagcggacgcggtgcccgcggttgcaacgggatcccgggcgctgcagctt

SEQ ID NO: 79083 - DNA, 201 bp, Homo sapiens
aatgccttcatatagacatagtctttcagacctctactgtcagttttcatttctagctgctttcagggttttatgaattttcaggcaaagctttaatttayactaagcttaggaagtatggctaatgccaacggcagtttttttcttcttaattccacatgactgaggcatatatgatctctgggtaggtgagttgttgtg

SEQ ID NO: 79084 - DNA, 201 bp, Homo sapiens
taatggccacatctaatctcatttcacatgaaagaagaagtatattttagaaatttgttaatgagagtaaaagaaaataaatgtgtatagctcagtttggrtaattggtcaaacaattttttatccagtagtaaaatatgtaaccattgtcccagtaaagaaaaataacaaaagttgtaaaatgtatattctcccttttat

SEQ ID NO: 79085 - DNA, 201 bp, Homo sapiens
gtttgatcagttttcaagaaacttggaatataaataattttataattcaacaaaggttttcacattttataaggttgatttttcaattaaatgcaaatttrtgtggcaggatttttattgccattaacatatttttgtggctgctttttctacacatccagatggtccctctaactgggctttctctaattttgtgatgtt

SEQ ID NO: 79086 - DNA, 201 bp, Homo sapiens
tacacaccaatatcttcttcaggctctgacaggcctcctggaaacttccacatatttttcaactgcagtataaagtcagaaaataaagttaacataacttycactaacacacacatatgtagatttcacaaaatccacctataattggtcaaagtggttgagaatatattttttagtaattgcatgcaaaatttttctagc

SEQ ID NO: 79087 - DNA, 201 bp, Homo sapiens
attcagcttcatcattaagaatatcttttgttttatgttgagttagaaatgccttcatatagacatagtctttcagacctctactgtcagttttcatttcyagctgctttcagggttttatgaattttcaggcaaagctttaatttacactaagcttaggaagtatggctaatgccaacggcagtttttttcttcttaatt

SEQ ID NO: 79088 - DNA, 201 bp, Homo sapiens
gccagattagcggacgcggtgcccgcggttgcaacgggatcccgggcgctgcagcttgggaggcggctctccccaggcggcgtccgcggagacacccatcygtgaaccccaggtcccgggccgccggctcgccgcgcaccaggggccggcggacagaagagcggccgagcggctcgaggctgggggaccgcgggcgcggcc

SEQ ID NO: 79089 - DNA, 201 bp, Homo sapiens
gctcagtaagttgtgttaggggattatttctcagttgagactttcttatatgacattttactatgttttgacttcctgactattaaaaataaatagtagawacaattttcataaagtgaagaattatataatcactgctttataactgactttattatatttatttcaaagttcatttaaaggctactattcatcctctgt

SEQ ID NO: 79090 - DNA, 201 bp, Homo sapiens
ttcttcctggcaaaaatttatggtgaatgaatatggctttaggcggcagatgatatacatatctgacttcccaaaagctccaggatttgtgtgctgttgcygaatactcaggacggacctgaattctgattttataccagtctcttcaaaaacttctcgaaccgctgtgtctcctacgtaaaaaaagagatgtacaaatca

SEQ ID NO: 79091 - DNA, 201 bp, Homo sapiens
tttatatttccttgtcttaaatactgagctcagtaagttgtgttaggggattatttctcagttgagactttcttatatgacattttactatgttttgactwcctgactattaaaaataaatagtagatacaattttcataaagtgaagaattatataatcactgctttataactgactttattatatttatttcaaagttc

SEQ ID NO: 79092 - DNA, 201 bp, Homo sapiens
aggaatttgttttctcatagtttaattccaacaacaatattagtcgtatccaaaataacctttaatgctaaactttactgatgtatatccaaagcttctcmttttcagacagattaatccagaagcagtcataaacagaagaataggtggtatgttcctaatgatattatttctactaatggaataaactgtaatattaga

SEQ ID NO: 79093 - DNA, 201 bp, Homo sapiens
gctggggagcccaaggccaagagaccaaaatatactacagataacaaggagcccattccagatgatgggatttattggcaggccaaccttgacagattccrccaacacttccgtgaccaagccattgtgagcgcagttgctaacaggatggaccagacaagcagcgagattgtgcgaaccatgctccgaatgagtgagatt

SEQ ID NO: 79094 - DNA, 201 bp, Homo sapiens
taccactgagaattcagaccctgggccaccaccacctgcccccacacttgtcattaatgaaaaggacatgtacctggttcctaaactcagcttgatagggraaggtaaaaggaggagatcatctgatgaagatgctgctggggagcccaaggccaagagaccaaaatatactacagataacaaggagcccattccagatga

SEQ ID NO: 79095 - DNA, 201 bp, Homo sapiens
tcttacattgagtgcaccatgaagagacagtgatccagaagaagcatcttcctcagaagatctggggggatggaaagcaaaataaaggaggtgcctggatscattatttgcagtgggataagtcgcagagtcttcaactaaacccccctctctatcccctgcagcccaggatacacctgaaagaatttggcatatttagat

SEQ ID NO: 79096 - DNA, 201 bp, Homo sapiens
gacctcctgagctcaagcagtccttccacctcagcctctggagtagctgggactacaggcatgcaccacacatacccagctattttttatttatttatttwtttttttgtagagacagggcctccctgtgttgcccaggctgatgaactgtaatttttaacacacacagtgtagggaatgtgaaagactatcacagagtag

SEQ ID NO: 79097 - DNA, 201 bp, Homo sapiens
tcagaaaatttcatgtcactccaggaaattcccaaaacaccagaccatgccccatccaggaccttctatttatatactgtgaacatcctgtcagctgcccraatgttgttgcacaggtgctacaagagcatagccaacttgatagaaaggaggcaatttgaaaccaaagagaataagcgtctactagaaaaatctcagagg

SEQ ID NO: 79098 - DNA, 201 bp, Homo sapiens
ttctccatggttccttaaaactggcaacgctaaattctctctctcagtatcacggatataatttgtcccagcagctttaattcatttaaagcagttagatkttttataatatcttcagttttctctcaccaatgtgttttctaattgtttaaacacttgagtgtcaaacaattgccagccaccatactaaacacaacatac

SEQ ID NO: 79099 - DNA, 201 bp, Homo sapiens; identical to SEQ ID NO: 79093

SEQ ID NO: 79100 - DNA, 201 bp, Homo sapiens; identical to SEQ ID NO: 79094

SEQ ID NO: 79101 - DNA, 201 bp, Homo sapiens; identical to SEQ ID NO: 79095

SEQ ID NO: 79102 - DNA, 167 bp, Homo sapiens
gacctcctgagctcaagcagtccttccacctcagcctctggagtagctgggactacaggcatgcaccacacatacccagctattttttatttatttatttwtttttttgtagagacagggcctccctgtgttgcccaggctgatgaactgtaatttttaacacacac

SEQ ID NO: 79103 - DNA, 201 bp, Homo sapiens; identical to SEQ ID NO: 79097

SEQ ID NO: 79104 - DNA, 201 bp, Homo sapiens; identical to SEQ ID NO: 79093

SEQ ID NO: 79105 - DNA, 201 bp, Homo sapiens; identical to SEQ ID NO: 79094

SEQ ID NO: 79106 - DNA, 201 bp, Homo sapiens; identical to SEQ ID NO: 79095

SEQ ID NO: 79107 - DNA, 201 bp, Homo sapiens; identical to SEQ ID NO: 79096

SEQ ID NO: 79108 - DNA, 201 bp, Homo sapiens; identical to SEQ ID NO: 79097

SEQ ID NO: 79109 - DNA, 201 bp, Homo sapiens; identical to SEQ ID NO: 79098

SEQ ID NO: 79110 - DNA, 201 bp, Homo sapiens; identical to SEQ ID NO: 79093

SEQ ID NO: 79111 - DNA, 201 bp, Homo sapiens; identical to SEQ ID NO: 79094

SEQ ID NO: 79112 - DNA, 201 bp, Homo sapiens
aacagcaagactgtgcccttcccctcctgacagatgtcatccaaacaaacaaagaagttgccttcaaagacctggatgtggccattctcttgggctctgtrccaagagaggaaagatttactgaaaatgtaaaaatcatcaaatggcagggtgcagccttggagaaatatgacaagaagttcgttaaggttattgttatgg

SEQ ID NO: 79113 - DNA, 201 bp, Homo sapiens
cgggtgacccagcagcacaacaccgtgttcagctaaccctggggacaaagcagcgtctggctcgagtggaagcgtccaaacctgcttttcccatctccccscaagtctgttccgtcagagcttctggctgctcctgaatggtggaatgctgtgtcctctcttctgtctcctgctgcctggaggcttcggggctctcccgcc

SEQ ID NO: 79114 - DNA, 201 bp, Homo sapiens
tgttccgtcagagcttctggctgctcctgaatggtggaatgctgtgtcctctcttctgtctcctgctgcctggaggcttcggggctctcccgcctgccttstcggggcccagacgcaaggcaccgattgggccaacatcagagccctgctgcccagaactcataacctcattgttcaaaccaacacttgcacctttctctt

SEQ ID NO: 79115 - DNA, 201 bp, Homo sapiens
gtccaaacctgcttttcccatctccccccaagtctgttccgtcagagcttctggctgctcctgaatggtggaatgctgtgtcctctcttctgtctcctgcygcctggaggcttcggggctctcccgcctgccttctcggggcccagacgcaaggcaccgattgggccaacatcagagccctgctgcccagaactcataacc

SEQ ID NO: 79116 - DNA, 201 bp, Homo sapiens
aaccctggggacaaagcagcgtctggctcgagtggaagcgtccaaacctgcttttcccatctccccccaagtctgttccgtcagagcttctggctgctccwgaatggtggaatgctgtgtcctctcttctgtctcctgctgcctggaggcttcggggctctcccgcctgccttctcggggcccagacgcaaggcaccgatt

SEQ ID NO: 79117 - DNA, 201 bp, Homo sapiens
gctattatcttaagacttaatggagttgctggagtttgtatttccaggagtcaagttgaatggtttgggatttgttttgctaccttcctagacaggctgayggcaagcctctcccggcgattagcagacaagtcaccttaggaggggcaaggagaggaggacagtgcgggggccaagggtggacaggccggagtcaaagta

SEQ ID NO: 79118 - DNA, 201 bp, Homo sapiens
ccccgcgcaggcgcccccgccccgccgtcgccgccgccgcagccaggagccgctgcaccatgccccgcatagatgcggacctcaagctcgacttcaaggaygtcctgctccgacctaagcggagcagcctcaagagccgagccgaggtggatcttgaacgcaccttcacgtttcgaaattcaaagcagacctactcaggga

SEQ ID NO: 79119 - DNA, 201 bp, Homo sapiens
ctgtacgtgtccaggggatgtcgccaaagcctttgctggagcagattttgtcatgctgggaggaatgttttcgggtcatacggagtgtgctggagaagtgwttgagaggaacggacggaagctcaagctcttctacgggatgagctctgacaccgccatgaacaagcacgcaggaggagttgctgagtacagagcctctga

SEQ ID NO: 79120 - DNA, 201 bp, Homo sapiens
tcgggggactgaggtccacgtgcacctacgtgggggccgccaaactcaaggagctcagcaggagggcaacattcatccgggtgacccagcagcacaacacygtgttcagctaaccctggggacaaagcagcgtctggctcgagtggaagcgtccaaacctgcttttcccatctccccccaagtctgttccgtcagagcttc

SEQ ID NO: 79121 - DNA, 201 bp, Homo sapiens
aagtgggagttggaccaggttctgtgtgcaccacccgcaccaagacgggagtggggtacccccagctgagtgccgtcattgagtgtgccgactctgcccayggcctgaagggccacatcatctctgatggaggctgtacgtgtccaggggatgtcgccaaagcctttgctggagcagattttgtcatgctgggaggaatgt

SEQ ID NO: 79122 - DNA, 201 bp, Homo sapiens; identical to SEQ ID NO: 79113

SEQ ID NO: 79123 - DNA, 201 bp, Homo sapiens; identical to SEQ ID NO: 79114

SEQ ID NO: 79124 - DNA, 201 bp, Homo sapiens; identical to SEQ ID NO: 79115

SEQ ID NO: 79125 - DNA, 201 bp, Homo sapiens; identical to SEQ ID NO: 79116

SEQ ID NO: 79126 - DNA, 201 bp, Homo sapiens; identical to SEQ ID NO: 79117

SEQ ID NO: 79127 - DNA, 201 bp, Homo sapiens; identical to SEQ ID NO: 79118

SEQ ID NO: 79128 - DNA, 201 bp, Homo sapiens
tacgtgtccaggggatgtcgccaaagcctttggagctggagcagattttgtcatgctgggaggaatgttttcgggtcatacggagtgtgctggagaagtgwttgagaggaacggacggaagctcaagctcttctacgggatgagctctgacaccgccatgaacaagcacgcaggaggagttgctgagtacagagcctctga

SEQ ID NO: 79129 - DNA, 201 bp, Homo sapiens; identical to SEQ ID NO: 79120

SEQ ID NO: 79130 - DNA, 201 bp, Homo sapiens
aagtgggagttggaccaggttctgtgtgcaccacccgcaccaagacgggagtggggtacccccagctgagtgccgtcattgagtgtgccgactctgcccayggcctgaagggccacatcatctctgatggaggctgtacgtgtccaggggatgtcgccaaagcctttggagctggagcagattttgtcatgctgggaggaa

SEQ ID NO: 79131 - DNA, 201 bp, Homo sapiens
ttgaaagctgaaaagcatacaagattcttccttttaacttggatttctcgttccagaaattgtgggataatctgtattcttgctttagaaaacattcttakagagggtactagcttactgatgatgtgttaggattgctactgatgctgtcatgtggaaactatttaaaggcactattataaatttatcctataagatgac

SEQ ID NO: 79132 - DNA, 201 bp, Homo sapiens
gaaacccactaactccagcatccgagccccggttttatgaaatcctcaaagtcatgcaggaagctgcggacagacacacccagaccctgccagaggtgccmgatcagttttcatggaacaactttctttggaagccctggcttcagctgtgctgtccttccaccggcctgtcttgccagtgtgatagagaaaaacaggata

SEQ ID NO: 79133 - DNA, 201 bp, Homo sapiens
aattcatggcggaagtaatgggatctataaaggaggaaaagcaaacaactgggaaggaggtatccgggttccaggcatccttcgttggcccagggtgatayaggctggccagaagattgatgagcccactagcaacatggacatatttcctacagtagccaagctggctggagctcccttgcctgaggacaggatcattga

SEQ ID NO: 79134 - DNA, 201 bp, Homo sapiens
ctcaaagtcatgcaggaagctgcggacagacacacccagaccctgccagaggtgcccgatcagttttcatggaacaactttctttggaagccctggcttcmgctgtgctgtccttccaccggcctgtcttgccagtgtgatagagaaaaacaggataagagactgagccgctagcagcgcctggggaccagacagacgcat

SEQ ID NO: 79135 - DNA, 201 bp, Homo sapiens
aggctaacggtggaggcggcccagttcatacagcgggggcagatcttgaaccttctggatgagctgagattggctaatgataccctcatctacttcacatyggaccagggagcacatgtagaagaagtgtcttccaaaggagaaattcatggcggaagtaatgggatctataaaggaggaaaagcaaacaactgggaagga

SEQ ID NO: 79136 - DNA, 201 bp, Homo sapiens
gctggagctcccttgcctgaggacaggatcattgatggacgtgatctgatgcccctgcttgaaggaaaaagccaacgctccgatcatgagtttctcttccrttactgcaacgcctacttaaatgctgtgcgctggcaccctcagaacagcacatccatctggaaggcctttttcttcacccccaacttcaaccccgtgggt

SEQ ID NO: 79137 - DNA, 201 bp, Homo sapiens
acatcacggcttcaattatttctatgggatctctttgaccaatctgagagactgcaagcccggagagggcagtgtcttcaccacgggcttcaagaggctgrtcttcctccccctgcagatcgtcggggtcaccctccttacccttgctgcactcaattgtctggggctactccacgtgcctctaggcgtttttttcagcct

SEQ ID NO: 79138 - DNA, 201 bp, Homo sapiens
gctcccttgcctgaggacaggatcattgatggacgtgatctgatgcccctgcttgaaggaaaaagccaacgctccgatcatgagtttctcttccattactrcaacgcctacttaaatgctgtgcgctggcaccctcagaacagcacatccatctggaaggcctttttcttcacccccaacttcaaccccgtgggttccaac

SEQ ID NO: 79139 - DNA, 201 bp, Homo sapiens
ggtggaggcggcccagttcatacagcgggggcagatcttgaaccttctggatgagctgagattggctaatgataccctcatctacttcacatcggaccagkgagcacatgtagaagaagtgtcttccaaaggagaaattcatggcggaagtaatgggatctataaaggaggaaaagcaaacaactgggaaggaggtatccg

SEQ ID NO: 79140 - DNA, 201 bp, Homo sapiens
tagcaagaacacctaacccccccatatctgttcaacctcagtatctgatcaggctcctcagcctccaccatcccccaggtgatgtctggtcaactggcctrccttcagctagaatcctgttaggtcggtttagatgaatgctccctgatatttcctcttggtaatcttccatccactgcccctgaccctgttccctgtcta

SEQ ID NO: 79141 - DNA, 201 bp, Homo sapiens
tgtagaagaagtgtcttccaaaggagaaattcatggcggaagtaatgggatctataaaggaggaaaagcaaacaactgggaaggaggtatccgggttccasgcatccttcgttggcccagggtgatacaggctggccagaagattgatgagcccactagcaacatggacatatttcctacagtagccaagctggctggagc

SEQ ID NO: 79142 - DNA, 201 bp, Homo sapiens
tctatggtactaaggaagtcctgtttttcaaaaatggaagcccacttctcagatttttctgaagggcatacaatgaaaagtgaaggggaaacacacacacrcaaaaaaacaagtatttggcttgtcacaggaatctgattgcattaagtgaaaggattatttagaatatgttaatgcaaagctaaaataaaattttccttg

SEQ ID NO: 79143 - DNA, 201 bp, Homo sapiens
ggtcagtaatgctgcaggaaaagcaaaattgcaatctacgtatctatggtactaaggaagtcctgtttttcaaaaatggaagcccacttctcagatttttytgaagggcatacaatgaaaagtgaaggggaaacacacacacacaaaaaaacaagtatttggcttgtcacaggaatctgattgcattaagtgaaaggatta

SEQ ID NO: 79144 - DNA, 201 bp, Homo sapiens
gtgtgggtgttcagttctgtgtctggtgggtatggacagacagtaatctcctgtgatctgtgctagctgtgaggcagctctggaacgtgaagagctgtttkgtttgaaccgtgaacaaaactgtgttttgagtttagctgacattaaagaaaaaagttcatcacgtgactgttaatgtaaacctggttattaaaataacta

SEQ ID NO: 79145 - DNA, 201 bp, Homo sapiens
caggtgagtggaaggggtgttgtatattgtgttgatgacgtacgttatttccatggaagatagccgctgtggcagctgtcacatcaccacagctccctagrgtctgccgagaaggcaggcagtctttgggttctgttctttgtcacgtcccctacaagtaaattttgtttctttgaacgtttattaaaatgccaagaccca

SEQ ID NO: 79146 - DNA, 201 bp, Homo sapiens
cgggaggggggcggaggcgggcggaggcggcggcgcggccagcgcaccattcactccacctgatctcggggcgctgtgcgctgaggaaggcgcgggcgagycggagcagaagaaggagggagggagccagccgctgcagccaccaccgccaccatgtcctaccaaggcaagaagaacatcccgcggatcacgagtgaccgt

SEQ ID NO: 79147 - DNA, 201 bp, Homo sapiens
aagactatttccccttagaatagggaagcttgctattttaaagctcttgtagtgcttttcttttaagggagatgtagtaaaagggaaaatgtagctcttartttacacttcaaagatgtgggggtctttcagagaactaagaataacagttttatgtgcagagagagtttgccagatctgaagcatatacctcattgacta

SEQ ID NO: 79148 - DNA, 201 bp, Homo sapiens
gtgcccactgcaccttcagcactgcccagaaagcaattgggaaggacaacttcacagccattcctgagggcaccaatggtgtggaggagcggatgtctgtyatctgggacaaggctgtggccacagggaaaatggacgaaaaccagttcgtggctgtgacaagcacaaacgctgccaagatcttcaacctgtatccccgca

SEQ ID NO: 79149 - DNA, 201 bp, Homo sapiens
agcatatacctcattgactaggctgttactttgggataggttgcagtaccagccacagccagcagatagaggaaaagacacacataaactcgcttctgagsgtccacttctgcactctctgctctgctgttactcagcccctgagtctgactcatctctgcacaacctctctgtgccatgaagataagtcttccatggcca

SEQ ID NO: 79150 - DNA, 201 bp, Homo sapiens
ccaaaggtggcacccccgcaggctctgctcggggctctcctactcggccgaacccacctgtgaggaatcttcatcagtcgggatttagcctgtcaggcacycaagtggatgagggggttcgctcagccagcaagcgcatcgtggcgcccccaggcggccgttctaatatcacatctctgagttaagcaagccttcctcaaa

SEQ ID NO: 79151 - DNA, 201 bp, Homo sapiens
tggccacagggaaaatggacgaaaaccagttcgtggctgtgacaagcacaaacgctgccaagatcttcaacctgtatccccgcaagggaagaatatctgtsggttctgacagcgacctcgtcatctgggatccagatgctgtgaagatcgtctctgccaagaaccaccagtctgcggcagagtacaacatctttgaaggga

SEQ ID NO: 79152 - DNA, 201 bp, Homo sapiens
ctaacacagagctctatgagatcttcacctgcctgggagagctgggggccattgctcaagttcatgctgagaatggggatatcattgcccaggagcaaacscgcatgttggaaatggggataactggcccagaaggccatgtactgagcaggccagaagagctggaagctgaggctgtgttccgtgccatcaccattgcca

SEQ ID NO: 79153 - DNA, 201 bp, Homo sapiens
agatcttcacctgcctgggagagctgggggccattgctcaagttcatgctgagaatggggatatcattgcccaggagcaaacccgcatgttggaaatgggrataactggcccagaaggccatgtactgagcaggccagaagagctggaagctgaggctgtgttccgtgccatcaccattgccagccaaaccaattgccctc

SEQ ID NO: 79154 - DNA, 201 bp, Homo sapiens
cctcgtcatctgggatccagatgctgtgaagatcgtctctgccaagaaccaccagtctgcggcagagtacaacatctttgaagggatggagctgcgcgggkctcctctggttgtcatctgccagggcaagatcatgctggaagatggcaacctgcacgtgacccagggggctggccgcttcataccctgcagcccgttctc

SEQ ID NO: 79155 - DNA, 201 bp, Homo sapiens
gtggcagctgtcacatcaccacagctccctagggtctgccgagaaggcaggcagtctttgggttctgttctttgtcacgtcccctacaagtaaattttgtytctttgaacgtttattaaaatgccaagacccaaccatttcttccacctgcttgattgtgccagtgtttgctcaggcctctttcttagtgttgctttcaaa

SEQ ID NO: 79156 - DNA, 201 bp, Homo sapiens
cagtagggtgggcaattcccaacttccttgccacaagcttcccaggctttctcccctggaaaactccagcttgagtcccagatacactcatgggctgcccygggcagccagcattcattgtaagttccctctttgaaaactggtgtgtgggtgttcagttctgtgtctggtgggtatggacagacagtaatctcctgtgat

SEQ ID NO: 79157 - DNA, 201 bp, Homo sapiens
gcacggaggaagatggcagacctgcatgccgtcccaaggggcatgtacgatgggcctgtgtttgacctgaccaccacccccaaaggtggcacccccgcagkctctgctcggggctctcctactcggccgaacccacctgtgaggaatcttcatcagtcgggatttagcctgtcaggcacccaagtggatgagggggttcgc

SEQ ID NO: 79158 - DNA, 201 bp, Homo sapiens
gtttacttcaaaatccctcagccttgttcttcacgactgtctatactgagagtgtcatgtttccacaaagggctgacacctgagcctggattttcactcayccctgagaagccctttccagtagggtgggcaattcccaacttccttgccacaagcttcccaggctttctcccctggaaaactccagcttgagtcccagat

SEQ ID NO: 79159 - DNA, 201 bp, Homo sapiens
tatacaaaaggtttaggaaaagaaaacaatggtgagtcccggccctcttcgaattcactggcacctcatgcaagtgtaggaaggcacgctggatcgtctakctgattccaaagctgtcctttgccatctcatcccttggcctgccccccaaccctgaggatgcccctgccatccccccaacctcctcatattgcctctgaa

SEQ ID NO: 79160 - DNA, 201 bp, Homo sapiens
tatttccatggaagatagccgctgtggcagctgtcacatcaccacagctccctagggtctgccgagaaggcaggcagtctttgggttctgttctttgtcaygtcccctacaagtaaattttgtttctttgaacgtttattaaaatgccaagacccaaccatttcttccacctgcttgattgtgccagtgtttgctcaggcc

SEQ ID NO: 79161 - DNA, 201 bp, Homo sapiens
ctggggaatccaagtggtagcacctgtaaccctgtgtactaagtgctttgaagagaagagcaggcctcagacaccttttaattgcttaggagaaaccattrtctctgactgcaggtttgaataagttgaagaccagagaaaagtacacactgggctacaaaggaatttggagatagccaaggaacaggatttcccctagca

SEQ ID NO: 79162 - DNA, 201 bp, Homo sapiens; identical to SEQ ID NO: 79144

SEQ ID NO: 79163 - DNA, 201 bp, Homo sapiens; identical to SEQ ID NO: 79145

SEQ ID NO: 79164 - DNA, 201 bp, Homo sapiens; identical to SEQ ID NO: 79146

SEQ ID NO: 79165 - DNA, 201 bp, Homo sapiens; identical to SEQ ID NO: 79147

SEQ ID NO: 79166 - DNA, 201 bp, Homo sapiens; identical to SEQ ID NO: 79148

SEQ ID NO: 79167 - DNA, 201 bp, Homo sapiens; identical to SEQ ID NO: 79149

SEQ ID NO: 79168 - DNA, 201 bp, Homo sapiens; identical to SEQ ID NO: 79150

SEQ ID NO: 79169 - DNA, 201 bp, Homo sapiens; identical to SEQ ID NO: 79151

SEQ ID NO: 79170 - DNA, 201 bp, Homo sapiens; identical to SEQ ID NO: 79152

SEQ ID NO: 79171 - DNA, 201 bp, Homo sapiens; identical to SEQ ID NO: 79153

SEQ ID NO: 79172 - DNA, 201 bp, Homo sapiens; identical to SEQ ID NO: 79154

SEQ ID NO: 79173 - DNA, 201 bp, Homo sapiens; identical to SEQ ID NO: 79155

SEQ ID NO: 79174 - DNA, 201 bp, Homo sapiens; identical to SEQ ID NO: 79156

SEQ ID NO: 79175 - DNA, 201 bp, Homo sapiens; identical to SEQ ID NO: 79157

SEQ ID NO: 79176 - DNA, 201 bp, Homo sapiens; identical to SEQ ID NO: 79158

SEQ ID NO: 79177 - DNA, 201 bp, Homo sapiens; identical to SEQ ID NO: 79159

SEQ ID NO: 79178 - DNA, 201 bp, Homo sapiens; identical to SEQ ID NO: 79160

SEQ ID NO: 79179 - DNA, 201 bp, Homo sapiens; identical to SEQ ID NO: 79161

SEQ ID NO: 79180 - DNA, 201 bp, Homo sapiens; identical to SEQ ID NO: 79144

SEQ ID NO: 79181 - DNA, 201 bp, Homo sapiens; identical to SEQ ID NO: 79154

SEQ ID NO: 79182 - DNA, 201 bp, Homo sapiens
acagtgagtggaaggggtgttgtatattgtgttgatgacgtacgttatttccatggaagatagccgctgtggcagctgtcacatcaccacagctccctagrgtctgccgagaaggcaggcagtctttgggttctgttctttgtcacgtcccctacaagtaaattttgtttctttgaacgtttattaaaatgccaagaccca

SEQ ID NO: 79183 - DNA, 201 bp, Homo sapiens; identical to SEQ ID NO: 79146

SEQ ID NO: 79184 - DNA, 201 bp, Homo sapiens; identical to SEQ ID NO: 79148

SEQ ID NO: 79185 - DNA, 201 bp, Homo sapiens; identical to SEQ ID NO: 79155

SEQ ID NO: 79186 - DNA, 201 bp, Homo sapiens; identical to SEQ ID NO: 79150

SEQ ID NO: 79187 - DNA, 201 bp, Homo sapiens; identical to SEQ ID NO: 79151

SEQ ID NO: 79188 - DNA, 201 bp, Homo sapiens; identical to SEQ ID NO: 79157

SEQ ID NO: 79189 - DNA, 201 bp, Homo sapiens; identical to SEQ ID NO: 79152

SEQ ID NO: 79190 - DNA, 201 bp, Homo sapiens; identical to SEQ ID NO: 79153

SEQ ID NO: 79191 - DNA, 201 bp, Homo sapiens; identical to SEQ ID NO: 79160

SEQ ID NO: 79192 - DNA, 201 bp, Homo sapiens; identical to SEQ ID NO: 79154

SEQ ID NO: 79193 - DNA, 201 bp, Homo sapiens; identical to SEQ ID NO: 79145

SEQ ID NO: 79194 - DNA, 201 bp, Homo sapiens; identical to SEQ ID NO: 79146

SEQ ID NO: 79195 - DNA, 126 bp, Homo sapiens
aagactatttccccttagaatagggaagcttgctattttaaagctcttgtagtgcttttcttttaagggagatgtagtaaaagggaaaatgtagctcttartttacacttcaaagatgtgggggtc

SEQ ID NO: 79196 - DNA, 201 bp, Homo sapiens; identical to SEQ ID NO: 79148

SEQ ID NO: 79197 - DNA, 201 bp, Homo sapiens; identical to SEQ ID NO: 79155

SEQ ID NO: 79198 - DNA, 201 bp, Homo sapiens; identical to SEQ ID NO: 79150

SEQ ID NO: 79199 - DNA, 201 bp, Homo sapiens; identical to SEQ ID NO: 79151

SEQ ID NO: 79200 - DNA, 201 bp, Homo sapiens; identical to SEQ ID NO: 79157

SEQ ID NO: 79201 - DNA, 201 bp, Homo sapiens; identical to SEQ ID NO: 79152

SEQ ID NO: 79202 - DNA, 201 bp, Homo sapiens; identical to SEQ ID NO: 79160

SEQ ID NO: 79203 - DNA, 201 bp, Homo sapiens; identical to SEQ ID NO: 79153

SEQ ID NO: 79204 - DNA, 201 bp, Homo sapiens; identical to SEQ ID NO: 79161

SEQ ID NO: 79205 - DNA, 201 bp, Homo sapiens
gaggctatagcaatcgctaacgcagctgatgttgggttagcaggttatttttactctcaagacccagcccagatctggagagtggcagagcagctggaagwgggcatggttggcgtcaacgaaggattaatttcctctgtggagtgcccttttggtggagtgaagcagtccggccttgggcgagaggggtccaagtatggc

SEQ ID NO: 79206 - DNA, 201 bp, Homo sapiens
ttctccgccctggccctggctgagcttgcaagccaggctgggattccttcaggtgtatacaatgttattccctgttctcgaaagaatgccaaggaagtagrggaggcaatttgtactgatcctctggtgtccaaaatttcctttactggttcaacaactacaggaaagatcctgttgcaccacgcagcaaactctgtgaaa

SEQ ID NO: 79207 - DNA, 201 bp, Homo sapiens
gaaggaactactcagggcccattaattaatgaaaaagcggtagaaaaggtggagaaacaggtgaatgatgccgtttctaaaggtgccaccgttgtgacagrtggaaaacgacaccaacttggaaaaaatttctttgagcctaccctgctgtgcaatgtcacccaggacatgctgtgcactcatgaagagactttcgggcct

SEQ ID NO: 79208 - DNA, 201 bp, Homo sapiens
cccgccgtgtttacggagacattatccacaccccggcaaaggacaggcgggccctggtcctcaagcagcccataggcgtggctgcagtcatcaccccgtgraatttccccagtgccatgatcacccggaaggtgggggccgccctggcagccggctgtactgtcgtggtgaagcctgccgaagacacgcccttctccgccc

SEQ ID NO: 79209 - DNA, 201 bp, Homo sapiens
tggaaagccactgaaggaggcacatggagaaattctctattccgcctttttcctagagtggttctctgaggaagcccgccgtgtttacggagacattatcyacaccccggcaaaggacaggcgggccctggtcctcaagcagcccataggcgtggctgcagtcatcaccccgtggaatttccccagtgccatgatcacccg

SEQ ID NO: 79210 - DNA, 201 bp, Homo sapiens
gagactttcgggcctctggcaccagttatcaagttcgatacagaggaggaggctatagcaatcgctaacgcagctgatgttgggttagcaggttatttttmctctcaagacccagcccagatctggagagtggcagagcagctggaagtgggcatggttggcgtcaacgaaggattaatttcctctgtggagtgccctttt

SEQ ID NO: 79211 - DNA, 201 bp, Homo sapiens
aggacatgctgtgcactcatgaagagactttcgggcctctggcaccagttatcaagttcgatacagaggaggaggctatagcaatcgctaacgcagctgaygttgggttagcaggttatttttactctcaagacccagcccagatctggagagtggcagagcagctggaagtgggcatggttggcgtcaacgaaggattaa

SEQ ID NO: 79212 - DNA, 201 bp, Homo sapiens
gttattagagcatagccacacccattcatttatggtattgtctgggactgctttcttggcagagttgaatagttgggacagggacagtatagcctgcaaarcctaaaagatttactacttgtctccttaaagaaaaagtttgccagctcctgatctagaccaagagggagatattgaccttacttgcatttatccggcatt

SEQ ID NO: 79213 - DNA, 201 bp, Homo sapiens
atggcgtgaacccaggaggcggagcttgcagtgagcagagatcacgccactgcactccagcctggatgacagagcgagactccgcctcaaaaaaagaatayaaatgctccaacattattttttataactctggattaccgatgctgagatgtgtgcaggaatacttccaaataaatttttaacattgtaagccagtagatt

SEQ ID NO: 79214 - DNA, 201 bp, Homo sapiens
tactcagggcccattaattaatgaaaaagcggtagaaaaggtggagaaacaggtgaatgatgccgtttctaaaggtgccaccgttgtgacaggtggaaaaygacaccaacttggaaaaaatttctttgagcctaccctgctgtgcaatgtcacccaggacatgctgtgcactcatgaagagactttcgggcctctggcacc

SEQ ID NO: 79215 - DNA, 201 bp, Homo sapiens
tacccctgcccttaatgtaactagggaccaatatgtgccacgtgcctgtggctgcagactcccagagaaccagcactgggtttacagaatgaggccctggmtccccaccacagccccagctgcctcagagcaggcacagcacaaggcaggcccagccccatgggccgtcacaaaggcttgatcactgcctgggcagtggca

SEQ ID NO: 79216 - DNA, 201 bp, Homo sapiens
cggatgtggtggcaggtgcctgtagtcccagctactctggaggctgaggcaggagaatggcgtgaacccaggaggcggagcttgcagtgagcagagatcaygccactgcactccagcctggatgacagagcgagactccgcctcaaaaaaagaatacaaatgctccaacattattttttataactctggattaccgatgct

SEQ ID NO: 79217 - DNA, 201 bp, Homo sapiens
ccactgaaggaggcacatggagaaattctctattccgcctttttcctagagtggttctctgaggaagcccgccgtgtttacggagacattatccacacccyggcaaaggacaggcgggccctggtcctcaagcagcccataggcgtggctgcagtcatcaccccgtggaatttccccagtgccatgatcacccggaaggtg

SEQ ID NO: 79218 - DNA, 201 bp, Homo sapiens
tttaggtggttttatataacattttaattacttgtgatttagatgtatccatcctttttctattaagaatacaaatgctgggctgggcacagtggctcacrcctgtaatcccaacaccttgggaggccaaggcaggcagatcacgacatcaggagatcgagaccatcctggctaacacggtgaaaccccgtctctactaaa

SEQ ID NO: 79219 - DNA, 201 bp, Homo sapiens; identical to SEQ ID NO: 79205

SEQ ID NO: 79220 - DNA, 201 bp, Homo sapiens; identical to SEQ ID NO: 79206

SEQ ID NO: 79221 - DNA, 201 bp, Homo sapiens; identical to SEQ ID NO: 79207

SEQ ID NO: 79222 - DNA, 201 bp, Homo sapiens; identical to SEQ ID NO: 79208

SEQ ID NO: 79223 - DNA, 201 bp, Homo sapiens; identical to SEQ ID NO: 79209

SEQ ID NO: 79224 - DNA, 201 bp, Homo sapiens; identical to SEQ ID NO: 79210

SEQ ID NO: 79225 - DNA, 201 bp, Homo sapiens; identical to SEQ ID NO: 79211

SEQ ID NO: 79226 - DNA, 201 bp, Homo sapiens; identical to SEQ ID NO: 79212

SEQ ID NO: 79227 - DNA, 201 bp, Homo sapiens; identical to SEQ ID NO: 79213

SEQ ID NO: 79228 - DNA, 201 bp, Homo sapiens; identical to SEQ ID NO: 79214

SEQ ID NO: 79229 - DNA, 201 bp, Homo sapiens; identical to SEQ ID NO: 79215

SEQ ID NO: 79230 - DNA, 201 bp, Homo sapiens; identical to SEQ ID NO: 79216

SEQ ID NO: 79231 - DNA, 201 bp, Homo sapiens; identical to SEQ ID NO: 79217

SEQ ID NO: 79232 - DNA, 201 bp, Homo sapiens; identical to SEQ ID NO: 79218

SEQ ID NO: 79233 - DNA, 201 bp, Homo sapiens
ctgtactgacatcgtggagaaccgcttcactggaatgaagtcccgaggtatctatgagaccccagcaggcaccatcctttaccacactcatttagacatcraggccttcaccatggactgggaggtgtgcaaaatcaaacaaggcctgggcttgaaatttgctgagctggtgtacaccgctttctggcatagccctgagtg

SEQ ID NO: 79234 - DNA, 201 bp, Homo sapiens
cgctggtcccccagataaagggcactgctccctggaggatgcccgagttctacaaccggttcaagggccgtaatgacctgatggaatacgcaaagcagcaygggattcctatcccggtcactcccaagaacccgtggaacatggacgagaacctcatgcacatcagctacgaggctggaatcctggagaaccccaagaacc

SEQ ID NO: 79235 - DNA, 201 bp, Homo sapiens
attgcctacctggccaacactggccagaaggaagacttcgaggaagccaggaagaaggcactgaaacttggggccaaaaaggtgttcattgaggatgtcakcagggagtttgtggaagagttcatctggccggccatccagtccagcacactgtatgaggaccgctacctcctgggcacctttctcgccaggccctgcatt

SEQ ID NO: 79236 - DNA, 201 bp, Homo sapiens; identical to SEQ ID NO: 79233

SEQ ID NO: 79237 - DNA, 201 bp, Homo sapiens; identical to SEQ ID NO: 79235

SEQ ID NO: 79238 - DNA, 201 bp, Homo sapiens; identical to SEQ ID NO: 79234

SEQ ID NO: 79239 - DNA, 112 bp, Homo sapiens
ccaggccccagctttgttccctggtcccctgaagcctgcaaacgtcgtcattaaagggaagggtggggggcagctgtggtgggtagctattaaatgacaaytaaaagataca

SEQ ID NO: 79240 - DNA, 122 bp, Homo sapiens
agtggggctaccaggccccagctttgttccctggtcccctgaagcctgcaaacgtcgtcattaaagggaagggtggggggcagctgtggtgggtagctatwaaatgacaattaaaagataca

SEQ ID NO: 79241 - DNA, 201 bp, Homo sapiens
cggtgagcatgaacgtgtagggtgattatgagccaattgatgccaccgggttcatcaacatcaattccctcaggctgaaggaataggaatatcatcgtctscagagcaaggtcactgccaaatagacccctgtacaatgaggagctggagcctcctcaatttgcagatcccccaagtacaggcgctaattgttgtgataat

SEQ ID NO: 79242 - DNA, 201 bp, Homo sapiens
tgcacttgagtgacctggatgatgatggcttagatgaaatcatcatggcagcccccctgaggatagcagatgtaacctctggactgattgggggagaagayggccgagtatatgtatataatggcaaagagaccacccttggtgacatgactggcaaatgcaaatcatggataactccatgtccagaagaaaaggcccaat

SEQ ID NO: 79243 - DNA, 201 bp, Homo sapiens
gtgctgctggttggagcccctacgtacgatgacgtgtctaaggtggcattcctgaccgtgaccctacaccaaggcggagccactcgcatgtacgcactcayatctgacgcgcagcctctgctgctcagcaccttcagcggagaccgccgcttctcccgatttggtggcgttctgcacttgagtgacctggatgatgatggc

SEQ ID NO: 79244 - DNA, 201 bp, Homo sapiens
gtgacctggatgatgatggcttagatgaaatcatcatggcagcccccctgaggatagcagatgtaacctctggactgattgggggagaagacggccgagtwtatgtatataatggcaaagagaccacccttggtgacatgactggcaaatgcaaatcatggataactccatgtccagaagaaaaggcccaatatgtattga

SEQ ID NO: 79245 - DNA, 201 bp, Homo sapiens
cagatgtaacctctggactgattgggggagaagacggccgagtatatgtatataatggcaaagagaccacccttggtgacatgactggcaaatgcaaatcrtggataactccatgtccagaagaaaaggcccaatatgtattgatttctcctgaagccagctcaaggtttgggagctccctcatcaccgtgaggtccaagg

SEQ ID NO: 79246 - DNA, 201 bp, Homo sapiens
tcaaccaggatgggcacggtgacctcgtggtgggcgcaccaggctacagccgccccggccacatccacatcgggcgcgtgtacctcatctacggcaatgamctgggcctgccacctgttgacctggacctggacaaggaggcccacaggatccttgaaggcttccagccctcaggtcggtttggctcggccttggctgtgt

SEQ ID NO: 79247 - DNA, 201 bp, Homo sapiens
ccttatgcgaggcttggctgggcaatgacctcagctgacctcaaccaggatgggcacggtgacctcgtggtgggcgcaccaggctacagccgccccggccrcatccacatcgggcgcgtgtacctcatctacggcaatgacctgggcctgccacctgttgacctggacctggacaaggaggcccacaggatccttgaaggc

SEQ ID NO: 79248 - DNA, 201 bp, Homo sapiens
catttccttatgcgaggcttggctgggcaatgacctcagctgacctcaaccaggatgggcacggtgacctcgtggtgggcgcaccaggctacagccgcccyggccacatccacatcgggcgcgtgtacctcatctacggcaatgacctgggcctgccacctgttgacctggacctggacaaggaggcccacaggatccttg

SEQ ID NO: 79249 - DNA, 201 bp, Homo sapiens
cgtgtacctcatctacggcaatgacctgggcctgccacctgttgacctggacctggacaaggaggcccacaggatccttgaaggcttccagccctcaggtyggtttggctcggccttggctgtgttggactttaacgtggacggcgtgcctgacctggccgtgggagctccctcggtgggctccgagcagctcacctacaa

SEQ ID NO: 79250 - DNA, 201 bp, Homo sapiens
ttagtgtaaattcctggaccccggattccatgtcctttatctacaaggctttggaaaggaacataaggacaatgttcataggtggctctcagttgtcacaraagcacgtctccagccccttagcatcttacttcttgtcatttccttatgcgaggcttggctgggcaatgacctcagctgacctcaaccaggatgggcacg

SEQ ID NO: 79251 - DNA, 201 bp, Homo sapiens
acggccaaagctggtttaccatttctggagacaaggcaatggggaaactgggtacttccctttccagtggccacgtactgatgaatgggactctgaaacargtgctgctggttggagcccctacgtacgatgacgtgtctaaggtggcattcctgaccgtgaccctacaccaaggcggagccactcgcatgtacgcactca

SEQ ID NO: 79252 - DNA, 201 bp, Homo sapiens
agcaaaaccacacccagggctcaaaaatgcagaaaaatgattttcacagaaatttgactacatccctaactgaaagtgttgacaggaatataaactatacygaaagaggagtgttctttagtgtaaattcctggaccccggattccatgtcctttatctacaaggctttggaaaggaacataaggacaatgttcataggtg

SEQ ID NO: 79253 - DNA, 201 bp, Homo sapiens
acttcccaccaaacggccaaagctggtttaccatttctggagacaaggcaatggggaaactgggtacttccctttccagtggccacgtactgatgaatggractctgaaacaagtgctgctggttggagcccctacgtacgatgacgtgtctaaggtggcattcctgaccgtgaccctacaccaaggcggagccactcgca

SEQ ID NO: 79254 - DNA, 201 bp, Homo sapiens
ctctgttcattgcatgtggcggccagcaaaaccacacccagggctcaaaaatgcagaaaaatgattttcacagaaatttgactacatccctaactgaaagygttgacaggaatataaactatactgaaagaggagtgttctttagtgtaaattcctggaccccggattccatgtcctttatctacaaggctttggaaagga

SEQ ID NO: 79255 - DNA, 201 bp, Homo sapiens
ttgacctggacctggacaaggaggcccacaggatccttgaaggcttccagccctcaggtcggtttggctcggccttggctgtgttggactttaacgtggayggcgtgcctgacctggccgtgggagctccctcggtgggctccgagcagctcacctacaaaggtgccgtgtatgtctactttggttccaaacaaggaggaa

SEQ ID NO: 79256 - DNA, 201 bp, Homo sapiens
acctgttgacctggacctggacaaggaggcccacaggatccttgaaggcttccagccctcaggtcggtttggctcggccttggctgtgttggactttaacrtggacggcgtgcctgacctggccgtgggagctccctcggtgggctccgagcagctcacctacaaaggtgccgtgtatgtctactttggttccaaacaagg

SEQ ID NO: 79257 - DNA, 201 bp, Homo sapiens
aggctggaatcgtgtttcctgattgtttttaccctagcatctgcaaaggaggaaaattccatgatgtgtctgagagcactcactggactccgtttcttaaygcaagcgttcattatatccgagagaactatccccttccctgggagaaggacacagagaaactggtagctttcttgtttggaattacttctcacatggcgg

SEQ ID NO: 79258 - DNA, 201 bp, Homo sapiens
cgtgcctgacctggccgtgggagctccctcggtgggctccgagcagctcacctacaaaggtgccgtgtatgtctactttggttccaaacaaggaggaatgwcttcttcccctaacatcaccatttcttgccaggacatctactgtaacttgggctggactctcttggctgcagatgtgaatggagacagtgaacccgatct

SEQ ID NO: 79259 - DNA, 201 bp, Homo sapiens
ctaaggtggcattcctgaccgtgaccctacaccaaggcggagccactcgcatgtacgcactcatatctgacgcgcagcctctgctgctcagcaccttcagyggagaccgccgcttctcccgatttggtggcgttctgcacttgagtgacctggatgatgatggcttagatgaaatcatcatggcagcccccctgaggatag

SEQ ID NO: 79260 - DNA, 201 bp, Homo sapiens
ttggagcccctacgtacgatgacgtgtctaaggtggcattcctgaccgtgaccctacaccaaggcggagccactcgcatgtacgcactcatatctgacgcrcagcctctgctgctcagcaccttcagcggagaccgccgcttctcccgatttggtggcgttctgcacttgagtgacctggatgatgatggcttagatgaaa

SEQ ID NO: 79261 - DNA, 201 bp, Homo sapiens
tcgctccctttgcatctaaacctttcttctttcccaacttattgcctgtagtcagacctgctgtacaacctatttcctcttcctcttgaatgtctttccartggctggaaaggtccctctgtggttatctgttagaacagtctctgtacacaattcctcctaaaaacatccttttttaaaaaaagaattgttcagccataa

SEQ ID NO: 79262 - DNA, 201 bp, Homo sapiens
ggcacatccagtggagcggtggtagatcctgatagacatggggctcctgggagtagagagacacactaacagccacaccctctggaaatctgatacagtawatatatgactgcaccagaaatatgtgaaatagcagacattctgcttactcatgtctccttccacagtttacttcctcgctccctttgcatctaaaccttt

SEQ ID NO: 79263 - DNA, 201 bp, Homo sapiens
aaagtggcacatccagtggagcggtggtagatcctgatagacatggggctcctgggagtagagagacacactaacagccacaccctctggaaatctgatayagtaaatatatgactgcaccagaaatatgtgaaatagcagacattctgcttactcatgtctccttccacagtttacttcctcgctccctttgcatctaaa

SEQ ID NO: 79264 - DNA, 201 bp, Homo sapiens
ctatagccttggctcagattgaagatttcactgcatttccccactctgcccacctctctcatgctgaatcacatccatggtgagcattttgatggacaaartggcacatccagtggagcggtggtagatcctgatagacatggggctcctgggagtagagagacacactaacagccacaccctctggaaatctgatacagt

SEQ ID NO: 79265 - DNA, 201 bp, Homo sapiens
tcacatccatggtgagcattttgatggacaaagtggcacatccagtggagcggtggtagatcctgatagacatggggctcctgggagtagagagacacacyaacagccacaccctctggaaatctgatacagtaaatatatgactgcaccagaaatatgtgaaatagcagacattctgcttactcatgtctccttccacag

SEQ ID NO: 79266 - DNA, 201 bp, Homo sapiens
gaaccaagtcgtcattgctgctggaaggagttctttgggagcccgactctccggggcacttcacgtctatagccttggctcagattgaagatttcactgcrtttccccactctgcccacctctctcatgctgaatcacatccatggtgagcattttgatggacaaagtggcacatccagtggagcggtggtagatcctgat

SEQ ID NO: 79267 - DNA, 201 bp, Homo sapiens
cccctacgtacgatgacgtgtctaaggtggcattcctgaccgtgaccctacaccaaggcggagccactcgcatgtacgcactcatatctgacgcgcagccwctgctgctcagcaccttcagcggagaccgccgcttctcccgatttggtggcgttctgcacttgagtgacctggatgatgatggcttagatgaaatcatca

SEQ ID NO: 79268 - DNA, 201 bp, Homo sapiens
aatggggaaactgggtacttccctttccagtggccacgtactgatgaatgggactctgaaacaagtgctgctggttggagcccctacgtacgatgacgtgwctaaggtggcattcctgaccgtgaccctacaccaaggcggagccactcgcatgtacgcactcatatctgacgcgcagcctctgctgctcagcaccttcag

SEQ ID NO: 79269 - DNA, 201 bp, Homo sapiens
tgctggttggagcccctacgtacgatgacgtgtctaaggtggcattcctgaccgtgaccctacaccaaggcggagccactcgcatgtacgcactcatatcygacgcgcagcctctgctgctcagcaccttcagcggagaccgccgcttctcccgatttggtggcgttctgcacttgagtgacctggatgatgatggcttag

SEQ ID NO: 79270 - DNA, 201 bp, Homo sapiens
ggagggtgtatggctacttcccaccaaacggccaaagctggtttaccatttctggagacaaggcaatggggaaactgggtacttccctttccagtggccaygtactgatgaatgggactctgaaacaagtgctgctggttggagcccctacgtacgatgacgtgtctaaggtggcattcctgaccgtgaccctacaccaag

SEQ ID NO: 79271 - DNA, 201 bp, Homo sapiens
aacaagtgctgctggttggagcccctacgtacgatgacgtgtctaaggtggcattcctgaccgtgaccctacaccaaggcggagccactcgcatgtacgcrctcatatctgacgcgcagcctctgctgctcagcaccttcagcggagaccgccgcttctcccgatttggtggcgttctgcacttgagtgacctggatgatg

SEQ ID NO: 79272 - DNA, 201 bp, Homo sapiens
tgcagctctgagcattcccacgtcaccagagaagccggtgggcaatgagagcatgtctgctttcaggttgtggcctggcctgctgatcatgttgggttctstctgccatagaggttcaccgtgtggcctttcaacacacatagaaataggacacagagctctggagtttcttcagcttcacaatgggcgtgttaactacag

SEQ ID NO: 79273 - DNA, 201 bp, Homo sapiens
ccgtgaccctacaccaaggcggagccactcgcatgtacgcactcatatctgacgcgcagcctctgctgctcagcaccttcagcggagaccgccgcttctcycgatttggtggcgttctgcacttgagtgacctggatgatgatggcttagatgaaatcatcatggcagcccccctgaggatagcagatgtaacctctggac

SEQ ID NO: 79274 - DNA, 201 bp, Homo sapiens
cacaaaagcacgtctccagccccttagcatcttacttcttgtcatttccttatgcgaggcttggctgggcaatgacctcagctgacctcaaccaggatggkcacggtgacctcgtggtgggcgcaccaggctacagccgccccggccacatccacatcgggcgcgtgtacctcatctacggcaatgacctgggcctgccac

SEQ ID NO: 79275 - DNA, 201 bp, Homo sapiens
cccgatttggtggcgttctgcacttgagtgacctggatgatgatggcttagatgaaatcatcatggcagcccccctgaggatagcagatgtaacctctggrctgattgggggagaagacggccgagtatatgtatataatggcaaagagaccacccttggtgacatgactggcaaatgcaaatcatggataactccatgtc

SEQ ID NO: 79276 - DNA, 201 bp, Homo sapiens
caaacggccaaagctggtttaccatttctggagacaaggcaatggggaaactgggtacttccctttccagtggccacgtactgatgaatgggactctgaamcaagtgctgctggttggagcccctacgtacgatgacgtgtctaaggtggcattcctgaccgtgaccctacaccaaggcggagccactcgcatgtacgcac

SEQ ID NO: 79277 - DNA, 201 bp, Homo sapiens
ccaaacggccaaagctggtttaccatttctggagacaaggcaatggggaaactgggtacttccctttccagtggccacgtactgatgaatgggactctgamacaagtgctgctggttggagcccctacgtacgatgacgtgtctaaggtggcattcctgaccgtgaccctacaccaaggcggagccactcgcatgtacgca

SEQ ID NO: 79278 - DNA, 201 bp, Homo sapiens
cctggaccccggattccatgtcctttatctacaaggctttggaaaggaacataaggacaatgttcataggtggctctcagttgtcacaaaagcacgtctcyagccccttagcatcttacttcttgtcatttccttatgcgaggcttggctgggcaatgacctcagctgacctcaaccaggatgggcacggtgacctcgtgg

SEQ ID NO: 79279 - DNA, 201 bp, Homo sapiens
tgacctgggcctgccacctgttgacctggacctggacaaggaggcccacaggatccttgaaggcttccagccctcaggtcggtttggctcggccttggctrtgttggactttaacgtggacggcgtgcctgacctggccgtgggagctccctcggtgggctccgagcagctcacctacaaaggtgccgtgtatgtctactt

SEQ ID NO: 79280 - DNA, 201 bp, Homo sapiens
aaattcctggaccccggattccatgtcctttatctacaaggctttggaaaggaacataaggacaatgttcataggtggctctcagttgtcacaaaagcacrtctccagccccttagcatcttacttcttgtcatttccttatgcgaggcttggctgggcaatgacctcagctgacctcaaccaggatgggcacggtgacct

SEQ ID NO: 79281 - DNA, 201 bp, Homo sapiens
tgacaggaatataaactatactgaaagaggagtgttctttagtgtaaattcctggaccccggattccatgtcctttatctacaaggctttggaaaggaacrtaaggacaatgttcataggtggctctcagttgtcacaaaagcacgtctccagccccttagcatcttacttcttgtcatttccttatgcgaggcttggctg

SEQ ID NO: 79282 - DNA, 201 bp, Homo sapiens
ggcacggtgacctcgtggtgggcgcaccaggctacagccgccccggccacatccacatcgggcgcgtgtacctcatctacggcaatgacctgggcctgccrcctgttgacctggacctggacaaggaggcccacaggatccttgaaggcttccagccctcaggtcggtttggctcggccttggctgtgttggactttaacg

SEQ ID NO: 79283 - DNA, 201 bp, Homo sapiens
aggatgggcacggtgacctcgtggtgggcgcaccaggctacagccgccccggccacatccacatcgggcgcgtgtacctcatctacggcaatgacctgggyctgccacctgttgacctggacctggacaaggaggcccacaggatccttgaaggcttccagccctcaggtcggtttggctcggccttggctgtgttggact

SEQ ID NO: 79284 - DNA, 201 bp, Homo sapiens
caacctgcctgagaaccctctgttcattgcatgtggcggccagcaaaaccacacccagggctcaaaaatgcagaaaaatgattttcacagaaatttgactwcatccctaactgaaagtgttgacaggaatataaactatactgaaagaggagtgttctttagtgtaaattcctggaccccggattccatgtcctttatcta

SEQ ID NO: 79285 - DNA, 201 bp, Homo sapiens
atgtattgatttctcctgaagccagctcaaggtttgggagctccctcatcaccgtgaggtccaaggcaaagaaccaagtcgtcattgctgctggaaggagytctttgggagcccgactctccggggcacttcacgtctatagccttggctcagattgaagatttcactgcatttccccactctgcccacctctctcatgct

SEQ ID NO: 79286 - DNA, 201 bp, Homo sapiens
gggtgtatggctacttcccaccaaacggccaaagctggtttaccatttctggagacaaggcaatggggaaactgggtacttccctttccagtggccacgtrctgatgaatgggactctgaaacaagtgctgctggttggagcccctacgtacgatgacgtgtctaaggtggcattcctgaccgtgaccctacaccaaggcg

SEQ ID NO: 79287 - DNA, 201 bp, Homo sapiens
aaaagagccttgggagggtgtatggctacttcccaccaaacggccaaagctggtttaccatttctggagacaaggcaatggggaaactgggtacttccctktccagtggccacgtactgatgaatgggactctgaaacaagtgctgctggttggagcccctacgtacgatgacgtgtctaaggtggcattcctgaccgtga

SEQ ID NO: 79288 - DNA, 201 bp, Homo sapiens
tgctgaatcacatccatggtgagcattttgatggacaaagtggcacatccagtggagcggtggtagatcctgatagacatggggctcctgggagtagagasacacactaacagccacaccctctggaaatctgatacagtaaatatatgactgcaccagaaatatgtgaaatagcagacattctgcttactcatgtctcct

SEQ ID NO: 79289 - DNA, 201 bp, Homo sapiens
cccactctgcccacctctctcatgctgaatcacatccatggtgagcattttgatggacaaagtggcacatccagtggagcggtggtagatcctgatagacrtggggctcctgggagtagagagacacactaacagccacaccctctggaaatctgatacagtaaatatatgactgcaccagaaatatgtgaaatagcagac

SEQ ID NO: 79290 - DNA, 201 bp, Homo sapiens
ccccactctgcccacctctctcatgctgaatcacatccatggtgagcattttgatggacaaagtggcacatccagtggagcggtggtagatcctgatagayatggggctcctgggagtagagagacacactaacagccacaccctctggaaatctgatacagtaaatatatgactgcaccagaaatatgtgaaatagcaga

SEQ ID NO: 79291 - DNA, 201 bp, Homo sapiens
aagaaccaagtcgtcattgctgctggaaggagttctttgggagcccgactctccggggcacttcacgtctatagccttggctcagattgaagatttcactrcatttccccactctgcccacctctctcatgctgaatcacatccatggtgagcattttgatggacaaagtggcacatccagtggagcggtggtagatcctg

SEQ ID NO: 79292 - DNA, 201 bp, Homo sapiens
gcatttccccactctgcccacctctctcatgctgaatcacatccatggtgagcattttgatggacaaagtggcacatccagtggagcggtggtagatcctratagacatggggctcctgggagtagagagacacactaacagccacaccctctggaaatctgatacagtaaatatatgactgcaccagaaatatgtgaaat

SEQ ID NO: 79293 - DNA, 201 bp, Homo sapiens
atttcactgcatttccccactctgcccacctctctcatgctgaatcacatccatggtgagcattttgatggacaaagtggcacatccagtggagcggtggyagatcctgatagacatggggctcctgggagtagagagacacactaacagccacaccctctggaaatctgatacagtaaatatatgactgcaccagaaata

SEQ ID NO: 79294 - DNA, 201 bp, Homo sapiens
tgaagatttcactgcatttccccactctgcccacctctctcatgctgaatcacatccatggtgagcattttgatggacaaagtggcacatccagtggagckgtggtagatcctgatagacatggggctcctgggagtagagagacacactaacagccacaccctctggaaatctgatacagtaaatatatgactgcaccag

SEQ ID NO: 79295 - DNA, 201 bp, Homo sapiens
cccctaacatcaccatttcttgccaggacatctactgtaacttgggctggactctcttggctgcagatgtgaatggagacagtgaacccgatctggtcatyggctccccttttgcaccaggtggagggaagcagaagggaattgtggctgcgttttattctggccccagcctgagcgacaaagaaaaactgaacgtggagg

SEQ ID NO: 79296 - DNA, 201 bp, Homo sapiens
gggcaatgagagcatgtctgctttcaggttgtggcctggcctgctgatcatgttgggttctctctgccatagaggttcaccgtgtggcctttcaacacacrtagaaataggacacagagctctggagtttcttcagcttcacaatgggcgtgttaactacagagagctgttactagaacaccaggatgcgtatcaggctgg

SEQ ID NO: 79297 - DNA, 188 bp, Homo sapiens
gtgggtctgcacctggattttggagtcccagtgctgctgcagctctgagcattcccacgtcaccagagaagccggtgggcaatgagakcatgtctgctttcaggttgtggcctggcctgctgatcatgttgggttctctctgccatagaggttcaccgtgtggcctttcaacacacatagaaatagga

SEQ ID NO: 79298 - DNA, 201 bp, Homo sapiens
aaagcacgtctccagccccttagcatcttacttcttgtcatttccttatgcgaggcttggctgggcaatgacctcagctgacctcaaccaggatgggcacrgtgacctcgtggtgggcgcaccaggctacagccgccccggccacatccacatcgggcgcgtgtacctcatctacggcaatgacctgggcctgccacctgt

SEQ ID NO: 79299 - DNA, 201 bp, Homo sapiens
gactctgaaacaagtgctgctggttggagcccctacgtacgatgacgtgtctaaggtggcattcctgaccgtgaccctacaccaaggcggagccactcgcrtgtacgcactcatatctgacgcgcagcctctgctgctcagcaccttcagcggagaccgccgcttctcccgatttggtggcgttctgcacttgagtgacct

SEQ ID NO: 79300 - DNA, 201 bp, Homo sapiens; identical to SEQ ID NO: 79296

SEQ ID NO: 79301 - DNA, 201 bp, Homo sapiens; identical to SEQ ID NO: 79272

SEQ ID NO: 79302 - DNA, 188 bp, Homo sapiens; identical to SEQ ID NO: 79297

SEQ ID NO: 79303 - DNA, 201 bp, Homo sapiens; identical to SEQ ID NO: 79257

SEQ ID NO: 79304 - DNA, 201 bp, Homo sapiens; identical to SEQ ID NO: 79242

SEQ ID NO: 79305 - DNA, 201 bp, Homo sapiens; identical to SEQ ID NO: 79243

SEQ ID NO: 79306 - DNA, 201 bp, Homo sapiens; identical to SEQ ID NO: 79244

SEQ ID NO: 79307 - DNA, 201 bp, Homo sapiens; identical to SEQ ID NO: 79245

SEQ ID NO: 79308 - DNA, 201 bp, Homo sapiens; identical to SEQ ID NO: 79246

SEQ ID NO: 79309 - DNA, 201 bp, Homo sapiens; identical to SEQ ID NO: 79247

SEQ ID NO: 79310 - DNA, 201 bp, Homo sapiens; identical to SEQ ID NO: 79248

SEQ ID NO: 79311 - DNA, 201 bp, Homo sapiens; identical to SEQ ID NO: 79249

SEQ ID NO: 79312 - DNA, 201 bp, Homo sapiens; identical to SEQ ID NO: 79250

SEQ ID NO: 79313 - DNA, 201 bp, Homo sapiens; identical to SEQ ID NO: 79251

SEQ ID NO: 79314 - DNA, 201 bp, Homo sapiens; identical to SEQ ID NO: 79252

SEQ ID NO: 79315 - DNA, 201 bp, Homo sapiens; identical to SEQ ID NO: 79253

SEQ ID NO: 79316 - DNA, 201 bp, Homo sapiens; identical to SEQ ID NO: 79254

SEQ ID NO: 79317 - DNA, 201 bp, Homo sapiens; identical to SEQ ID NO: 79255

SEQ ID NO: 79318 - DNA, 201 bp, Homo sapiens; identical to SEQ ID NO: 79256

SEQ ID NO: 79319 - DNA, 201 bp, Homo sapiens; identical to SEQ ID NO: 79257

SEQ ID NO: 79320 - DNA, 201 bp, Homo sapiens; identical to SEQ ID NO: 79258

SEQ ID NO: 79321 - DNA, 201 bp, Homo sapiens; identical to SEQ ID NO: 79259

SEQ ID NO: 79322 - DNA, 201 bp, Homo sapiens; identical to SEQ ID NO: 79260

SEQ ID NO: 79323 - DNA, 201 bp, Homo sapiens
gaaccaagtcgtcattgctgctggaaggagttctttgggagcccgactctccggggcacttcacgtctatagccttggctcagattgaagatttcactgcrtttccccactctgcccacctctctcatgctgaatcacatccatgcttccctctaatggcttcccatgaccacacacaggagtggggaaaccttacttgta

SEQ ID NO: 79324 - DNA, 201 bp, Homo sapiens; identical to SEQ ID NO: 79267

SEQ ID NO: 79325 - DNA, 201 bp, Homo sapiens; identical to SEQ ID NO: 79268

SEQ ID NO: 79326 - DNA, 201 bp, Homo sapiens; identical to SEQ ID NO: 79269

SEQ ID NO: 79327 - DNA, 201 bp, Homo sapiens; identical to SEQ ID NO: 79270

SEQ ID NO: 79328 - DNA, 201 bp, Homo sapiens; identical to SEQ ID NO: 79271

SEQ ID NO: 79329 - DNA, 201 bp, Homo sapiens; identical to SEQ ID NO: 79272

SEQ ID NO: 79330 - DNA, 201 bp, Homo sapiens; identical to SEQ ID NO: 79273

SEQ ID NO: 79331 - DNA, 201 bp, Homo sapiens; identical to SEQ ID NO: 79274

SEQ ID NO: 79332 - DNA, 201 bp, Homo sapiens; identical to SEQ ID NO: 79275

SEQ ID NO: 79333 - DNA, 201 bp, Homo sapiens; identical to SEQ ID NO: 79276

SEQ ID NO: 79334 - DNA, 201 bp, Homo sapiens; identical to SEQ ID NO: 79277

SEQ ID NO: 79335 - DNA, 201 bp, Homo sapiens; identical to SEQ ID NO: 79278

SEQ ID NO: 79336 - DNA, 201 bp, Homo sapiens; identical to SEQ ID NO: 79281

SEQ ID NO: 79337 - DNA, 201 bp, Homo sapiens; identical to SEQ ID NO: 79280

SEQ ID NO: 79338 - DNA, 201 bp, Homo sapiens; identical to SEQ ID NO: 79279

SEQ ID NO: 79339 - DNA, 201 bp, Homo sapiens
tgaatcacatccatgcttccctctaatggcttcccatgaccacacacaggagtggggaaaccttacttgtacttcatcggttttcttccaaatcagcgacrggagtaacatttttattcctatcaccaaaccacctgaaaaatggactcctaaacttcctcatatgacatcacattaggctaatcatgtaccctcaatatc

SEQ ID NO: 79340 - DNA, 201 bp, Homo sapiens; identical to SEQ ID NO: 79282

SEQ ID NO: 79341 - DNA, 201 bp, Homo sapiens; identical to SEQ ID NO: 79283

SEQ ID NO: 79342 - DNA, 201 bp, Homo sapiens; identical to SEQ ID NO: 79284

SEQ ID NO: 79343 - DNA, 201 bp, Homo sapiens
atcatcagggtaagtgtatttattctgttattattacatttgtagtgcaagagctggacactctagaatcttccatgcacactactttgggaggcttaacwaatgttctagtgcctaactgtacttaacctccagaaaatattttaaaaggtaggtaggatgttaaagaggatggcagctttcaggcttacaaatattagc

SEQ ID NO: 79344 - DNA, 201 bp, Homo sapiens; identical to SEQ ID NO: 79285

SEQ ID NO: 79345 - DNA, 201 bp, Homo sapiens; identical to SEQ ID NO: 79286

SEQ ID NO: 79346 - DNA, 201 bp, Homo sapiens; identical to SEQ ID NO: 79287

SEQ ID NO: 79347 - DNA, 201 bp, Homo sapiens
aagaaccaagtcgtcattgctgctggaaggagttctttgggagcccgactctccggggcacttcacgtctatagccttggctcagattgaagatttcactrcatttccccactctgcccacctctctcatgctgaatcacatccatgcttccctctaatggcttcccatgaccacacacaggagtggggaaaccttacttg

SEQ ID NO: 79348 - DNA, 201 bp, Homo sapiens; identical to SEQ ID NO: 79295

SEQ ID NO: 79349 - DNA, 201 bp, Homo sapiens; identical to SEQ ID NO: 79296

SEQ ID NO: 79350 - DNA, 188 bp, Homo sapiens; identical to SEQ ID NO: 79297

SEQ ID NO: 79351 - DNA, 201 bp, Homo sapiens; identical to SEQ ID NO: 79298

SEQ ID NO: 79352 - DNA, 201 bp, Homo sapiens; identical to SEQ ID NO: 79299

SEQ ID NO: 79353 - DNA, 201 bp, Homo sapiens; identical to SEQ ID NO: 79242

SEQ ID NO: 79354 - DNA, 201 bp, Homo sapiens; identical to SEQ ID NO: 79243

SEQ ID NO: 79355 - DNA, 201 bp, Homo sapiens; identical to SEQ ID NO: 79244

SEQ ID NO: 79356 - DNA, 201 bp, Homo sapiens; identical to SEQ ID NO: 79245

SEQ ID NO: 79357 - DNA, 201 bp, Homo sapiens; identical to SEQ ID NO: 79246

SEQ ID NO: 79358 - DNA, 201 bp, Homo sapiens; identical to SEQ ID NO: 79247

SEQ ID NO: 79359 - DNA, 201 bp, Homo sapiens; identical to SEQ ID NO: 79248

SEQ ID NO: 79360 - DNA, 201 bp, Homo sapiens; identical to SEQ ID NO: 79249

SEQ ID NO: 79361 - DNA, 201 bp, Homo sapiens; identical to SEQ ID NO: 79250

SEQ ID NO: 79362 - DNA, 201 bp, Homo sapiens; identical to SEQ ID NO: 79251

SEQ ID NO: 79363 - DNA, 201 bp, Homo sapiens; identical to SEQ ID NO: 79252

SEQ ID NO: 79364 - DNA, 201 bp, Homo sapiens; identical to SEQ ID NO: 79253

SEQ ID NO: 79365 - DNA, 201 bp, Homo sapiens; identical to SEQ ID NO: 79254

SEQ ID NO: 79366 - DNA, 201 bp, Homo sapiens; identical to SEQ ID NO: 79255

SEQ ID NO: 79367 - DNA, 201 bp, Homo sapiens; identical to SEQ ID NO: 79256

SEQ ID NO: 79368 - DNA, 201 bp, Homo sapiens; identical to SEQ ID NO: 79257

SEQ ID NO: 79369 - DNA, 201 bp, Homo sapiens; identical to SEQ ID NO: 79258

SEQ ID NO: 79370 - DNA, 201 bp, Homo sapiens; identical to SEQ ID NO: 79259

SEQ ID NO: 79371 - DNA, 201 bp, Homo sapiens; identical to SEQ ID NO: 79260

SEQ ID NO: 79372 - DNA, 201 bp, Homo sapiens; identical to SEQ ID NO: 79267

SEQ ID NO: 79373 - DNA, 201 bp, Homo sapiens; identical to SEQ ID NO: 79268

SEQ ID NO: 79374 - DNA, 201 bp, Homo sapiens; identical to SEQ ID NO: 79269

SEQ ID NO: 79375 - DNA, 201 bp, Homo sapiens; identical to SEQ ID NO: 79270

SEQ ID NO: 79376 - DNA, 201 bp, Homo sapiens; identical to SEQ ID NO: 79271

SEQ ID NO: 79377 - DNA, 201 bp, Homo sapiens
ggccccacagctccgcagccaaatgcaggtcgccatggcccgggcaacgacggcgacaggaaacaggttgtggcctggcctgctgatcatgttgggttctstctgccatagaggttcaccgtgtggcctttcaacacacatagaaataggacacagagctctggagtttcttcagcttcacaatgggcgtgttaactacag

SEQ ID NO: 79378 - DNA, 201 bp, Homo sapiens; identical to SEQ ID NO: 79273

SEQ ID NO: 79379 - DNA, 201 bp, Homo sapiens; identical to SEQ ID NO: 79274

SEQ ID NO: 79380 - DNA, 201 bp, Homo sapiens; identical to SEQ ID NO: 79275

SEQ ID NO: 79381 - DNA, 201 bp, Homo sapiens; identical to SEQ ID NO: 79276

SEQ ID NO: 79382 - DNA, 201 bp, Homo sapiens; identical to SEQ ID NO: 79277

SEQ ID NO: 79383 - DNA, 201 bp, Homo sapiens; identical to SEQ ID NO: 79278

SEQ ID NO: 79384 - DNA, 201 bp, Homo sapiens; identical to SEQ ID NO: 79281

SEQ ID NO: 79385 - DNA, 201 bp, Homo sapiens; identical to SEQ ID NO: 79280

SEQ ID NO: 79386 - DNA, 201 bp, Homo sapiens; identical to SEQ ID NO: 79279

SEQ ID NO: 79387 - DNA, 201 bp, Homo sapiens
tagccttggctcagacttccctctaatggcttcccatgaccacacacaggagtggggaaaccttacttgtacttcatcggttttcttccaaatcagcgacrggagtaacatttttattcctatcaccaaaccacctgaaaaatggactcctaaacttcctcatatgacatcacattaggctaatcatgtaccctcaatatc

SEQ ID NO: 79388 - DNA, 201 bp, Homo sapiens; identical to SEQ ID NO: 79282

SEQ ID NO: 79389 - DNA, 201 bp, Homo sapiens; identical to SEQ ID NO: 79283

SEQ ID NO: 79390 - DNA, 201 bp, Homo sapiens; identical to SEQ ID NO: 79284

SEQ ID NO: 79391 - DNA, 201 bp, Homo sapiens; identical to SEQ ID NO: 79343

SEQ ID NO: 79392 - DNA, 201 bp, Homo sapiens
atgtattgatttctcctgaagccagctcaaggtttgggagctccctcatcaccgtgaggtccaaggcaaagaaccaagtcgtcattgctgctggaaggagytctttgggagcccgactctccggggcacttcacgtctatagccttggctcagacttccctctaatggcttcccatgaccacacacaggagtggggaaacc

SEQ ID NO: 79393 - DNA, 201 bp, Homo sapiens; identical to SEQ ID NO: 79286

SEQ ID NO: 79394 - DNA, 201 bp, Homo sapiens; identical to SEQ ID NO: 79287

SEQ ID NO: 79395 - DNA, 201 bp, Homo sapiens; identical to SEQ ID NO: 79295

SEQ ID NO: 79396 - DNA, 201 bp, Homo sapiens
ccgggcaacgacggcgacaggaaacaggttgtggcctggcctgctgatcatgttgggttctctctgccatagaggttcaccgtgtggcctttcaacacacrtagaaataggacacagagctctggagtttcttcagcttcacaatgggcgtgttaactacagagagctgttactagaacaccaggatgcgtatcaggctgg

SEQ ID NO: 79397 - DNA, 201 bp, Homo sapiens; identical to SEQ ID NO: 79298

SEQ ID NO: 79398 - DNA, 201 bp, Homo sapiens; identical to SEQ ID NO: 79299

SEQ ID NO: 79399 - DNA, 201 bp, Homo sapiens
gggcttttgcttcggtccaagcagataaaacgcatggtctcttcatatgtgggagaaaatgcagaatttgaacgacagtacttatctggtgaattagaagwggagctgacaccacagggcacacttgcagagaggatccgtgcaggcggggctggagttcctgcattttacaccccaacagggtatgggaccctggtacaa

SEQ ID NO: 79400 - DNA, 201 bp, Homo sapiens
gatattggagcatttgctccagaagacatccatattcctcagatttatgtacatcgccttataaagggagaaaaatatgagaaaagaattgagcgtttatsaatccggaaagagggagatggggaagccaaatctgctaaacctggagatgacgtaagggaacgaatcatcaagagggccgctcttgagtttgaggatggc

SEQ ID NO: 79401 - DNA, 201 bp, Homo sapiens
tgacagaagggctgtagcggcaagtgtgcgccaacacagctgcacacgcccagacacctgaggcgctgagaggaacttccccgcgatccgccccggctgcrcagagcctcttctccccgccggggccccgcccagcctcacttcttttaaaagcagcagccagcagcgcgccggtggcgtgcggctcgaaaggccgggagg

SEQ ID NO: 79402 - DNA, 201 bp, Homo sapiens
tggaggaagcaattacaggggattttgctttggtgaaagcctggaaggcggaccgagcaggaaacgtgattttcaggaaaagtgcaaggaatttcaacttrccaatgtgcaaagctgcagaaaccacagtggtagaggttgaagaaattgtggatattggagcatttgctccagaagacatccatattcctcagatttatg

SEQ ID NO: 79403 - DNA, 201 bp, Homo sapiens
tcctggccagcaattttatcagcccaaatataactgttcatcttcaaagtgaaaatggagttctgggtttgggtccatatccacgacaacatgaagctgaygcagatctcatcaatgcaggcaaggaaacagttactattcttccaggagcctcttttttctccagcgatgaatcatttgcaatgattagaggtggacacg

SEQ ID NO: 79404 - DNA, 201 bp, Homo sapiens
tatctggtgaattagaagtggagctgacaccacagggcacacttgcagagaggatccgtgcaggcggggctggagttcctgcattttacaccccaacaggktatgggaccctggtacaagaaggaggatcgcccatcaaatacaacaaagatggcagtgttgccattgccagtaagccaagagaggtgagggagttcaatg

SEQ ID NO: 79405 - DNA, 176 bp, Homo sapiens
cttggcgggagatcctcccgcggccggagggccctgaaccctaggccaagactcatccacaacctagggggaggcrgccaccagcgccccatcgaagctaaagggctgacagaagggctgtagcggcaagtgtgcgccaacacagctgcacacgcccagacacctgaggcgctgag

SEQ ID NO: 79406 - DNA, 162 bp, Homo sapiens
tttgaaaagaattgttgatagttacatcttcaaacttatcattccagtatgcatctttaagataatgtgattctaagtagatgactttatattcttgattraagagtgctatacatgttaagaaatgcattaaggaatacaataaatattctaaagtgatgt

SEQ ID NO: 79407 - DNA, 201 bp, Homo sapiens
tagagaaaggacaggctttttatgagtaacacacaccatatataaaacagcctttctggctgaccacatggttaaatgcataccttcccagtactgggggkaaaaaatgacccttcttagaatgtgcaagttccatgagagtaatatattgatatgattttgaaaagaattgttgatagttacatcttcaaacttatcatt

SEQ ID NO: 79408 - DNA, 201 bp, Homo sapiens; identical to SEQ ID NO: 79399

SEQ ID NO: 79409 - DNA, 201 bp, Homo sapiens; identical to SEQ ID NO: 79400

SEQ ID NO: 79410 - DNA, 201 bp, Homo sapiens; identical to SEQ ID NO: 79401

SEQ ID NO: 79411 - DNA, 201 bp, Homo sapiens; identical to SEQ ID NO: 79402

SEQ ID NO: 79412 - DNA, 201 bp, Homo sapiens; identical to SEQ ID NO: 79403

SEQ ID NO: 79413 - DNA, 201 bp, Homo sapiens; identical to SEQ ID NO: 79404

SEQ ID NO: 79414 - DNA, 176 bp, Homo sapiens; identical to SEQ ID NO: 79405

SEQ ID NO: 79415 - DNA, 162 bp, Homo sapiens; identical to SEQ ID NO: 79406

SEQ ID NO: 79416 - DNA, 201 bp, Homo sapiens; identical to SEQ ID NO: 79407

SEQ ID NO: 79417 - DNA, 201 bp, Homo sapiens
gccaggcctctcctggaaccacctctctgcttggtctgaccccttggcctatccagttttcctggttccctcacaggtttctccagaaagtactccctcastaaagcatttgcacaagaatccttgtctcaggctctgcttctaaggaaagagactgaagagggacaactttttcctatgaggactcccaatctgccattt

SEQ ID NO: 79418 - DNA, 201 bp, Homo sapiens
cccacatactaggtgctcaattcatgcctgtgaatggcgtgagcccataatggatacacagaggttgcagcagatggtgtgggtacctcacccagatatcwtccaggcccaaggcccctctccctgagtgaggccaggtgttggcagccaactgctccaatctgcctccttcccctaaatactgccctggtctagtgggag

SEQ ID NO: 79419 - DNA, 201 bp, Homo sapiens
cccctgccccacctctcccaccaagaggccacctgtcactcatggccaggagagtgacaccatggagggtacaattgccagctcccccgtgtctgtgcagsattgtctgggttgaatgacactctcaaattgttcctgggatcgggctgaggccaggcctctcctggaaccacctctctgcttggtctgaccccttggcct

SEQ ID NO: 79420 - DNA, 201 bp, Homo sapiens
ttttgctgtgaacctaaaactgccatataaagataaagtctaggccaggcatggtggctcatgcctgtaatcccaacacttagggtggctgaggcaggcaratcacctggggtcaggagttcaagaccagcctgcccaacatggcaaaacctcgtctctactaaaaatacaaaaattagccaggcatcgtggtgggtgcct

SEQ ID NO: 79421 - DNA, 201 bp, Homo sapiens
ttctgcctgaagcgcaacctggacacctaccagaagcgactgcgtttctactggcggccccactgccgggggcagacccctgggtgctagaagcccacacyctctaccctgttcctcagcatggagctctggcatccccacctcagtatctaacctgaaccagcctggcttttcaaacactccggggggaggtagtcccag

SEQ ID NO: 79422 - DNA, 201 bp, Homo sapiens
taacctgaaccagcctggcttttcaaacactccggggggaggtagtcccagcctcccccggaaccctctaccaatgccttctgaccttctgaagctttccraatcctcccagttgaggcagtagctgtgtcctctgagggtggatgggaatcttgggagaagcccaagcaagggagccctcagaggtggtgtttggaccaa

SEQ ID NO: 79423 - DNA, 201 bp, Homo sapiens
tcactgcggactaggtggcagaggccaacccaaagatgccacggactggtgctgccagacccatgactgctgctatgaccacctgaagacccaggggtgcrgcatctacaaggactattacagatacaacttttcccaggggaacatccactgctctgacaagggaagctggtgtgagcagcagctgtgtgcctgtgacaa

SEQ ID NO: 79424 - DNA, 201 bp, Homo sapiens
ccccacctcagtatctaacctgaaccagcctggcttttcaaacactccggggggaggtagtcccagcctcccccggaaccctctaccaatgccttctgacyttctgaagctttccgaatcctcccagttgaggcagtagctgtgtcctctgagggtggatgggaatcttgggagaagcccaagcaagggagccctcagagg

SEQ ID NO: 79425 - DNA, 201 bp, Homo sapiens
caccaagagattatttaatgggctatttaattaaggggtaggaaggtgctgtgggctggtcccacacatccaggaaagaggccagtagagaattctgcccmctttttataaaaacttacagcgatggccccaccaaggcctagacacggcactggcctcccaggagggcaggggcattgggaatgggtgggtgccctccag

SEQ ID NO: 79426 - DNA, 201 bp, Homo sapiens
gagcctcaggtgccgccgctgtgtggtcgtggggaacgggcaccggctgcggaacagctcactgggagatgccatcaacaagtacgatgtggtcatcagaytgaacaatgccccagtggctggctatgagggtgacgtgggctccaagaccaccatgcgtctcttctaccctgaatctgcccacttcgaccccaaagtaga

SEQ ID NO: 79427 - DNA, 201 bp, Homo sapiens
tccccaagaacatccagagcctcaggtgccgccgctgtgtggtcgtggggaacgggcaccggctgcggaacagctcactgggagatgccatcaacaagtaygatgtggtcatcagattgaacaatgccccagtggctggctatgagggtgacgtgggctccaagaccaccatgcgtctcttctaccctgaatctgcccact

SEQ ID NO: 79428 - DNA, 201 bp, Homo sapiens
cagagagcaaggcctctaagctctttggcaactactcccgggatcagcccatcttcctgcggcttgaggattatttctgggtcaagacgccatctgcttaygagctgccctatgggaccaaggggagtgaggatctgctcctccgggtgctagccatcaccagctcctccatccccaagaacatccagagcctcaggtgcc

SEQ ID NO: 79429 - DNA, 201 bp, Homo sapiens
actttttataaaaacttacagcgatggccccaccaaggcctagacacggcactggcctcccaggagggcaggggcattgggaatgggtgggtgccctccaragaggggctgctacctcccagcaggcatgggaagagcactggtgtgggggttccaccgagaaggggacctcatctagaaaagaggttacaaacctaccat

SEQ ID NO: 79430 - DNA, 201 bp, Homo sapiens; identical to SEQ ID NO: 79425

SEQ ID NO: 79431 - DNA, 201 bp, Homo sapiens
gtgcctcaggtgccgccgctgtgtggtcgtggggaacgggcaccggctgcggaacagctcactgggagatgccatcaacaagtacgatgtggtcatcagaytgaacaatgccccagtggctggctatgagggtgacgtgggctccaagaccaccatgcgtctcttctaccctgaatctgcccacttcgaccccaaagtaga

SEQ ID NO: 79432 - DNA, 201 bp, Homo sapiens
tatgggaccaaggggagtgcctcaggtgccgccgctgtgtggtcgtggggaacgggcaccggctgcggaacagctcactgggagatgccatcaacaagtaygatgtggtcatcagattgaacaatgccccagtggctggctatgagggtgacgtgggctccaagaccaccatgcgtctcttctaccctgaatctgcccact

SEQ ID NO: 79433 - DNA, 201 bp, Homo sapiens
agctctttggcaagctttcacctctgtgcagctactcccgggatcagcccatcttcctgcggcttgaggattatttctgggtcaagacgccatctgcttaygagctgccctatgggaccaaggggagtgcctcaggtgccgccgctgtgtggtcgtggggaacgggcaccggctgcggaacagctcactgggagatgccat

SEQ ID NO: 79434 - DNA, 201 bp, Homo sapiens; identical to SEQ ID NO: 79429

SEQ ID NO: 79435 - DNA, 201 bp, Homo sapiens; identical to SEQ ID NO: 79425

SEQ ID NO: 79436 - DNA, 201 bp, Homo sapiens; identical to SEQ ID NO: 79426

SEQ ID NO: 79437 - DNA, 201 bp, Homo sapiens; identical to SEQ ID NO: 79427

SEQ ID NO: 79438 - DNA, 201 bp, Homo sapiens; identical to SEQ ID NO: 79428

SEQ ID NO: 79439 - DNA, 201 bp, Homo sapiens; identical to SEQ ID NO: 79429

SEQ ID NO: 79440 - DNA, 201 bp, Homo sapiens; identical to SEQ ID NO: 79425

SEQ ID NO: 79441 - DNA, 201 bp, Homo sapiens; identical to SEQ ID NO: 79426

SEQ ID NO: 79442 - DNA, 201 bp, Homo sapiens; identical to SEQ ID NO: 79427

SEQ ID NO: 79443 - DNA, 201 bp, Homo sapiens; identical to SEQ ID NO: 79428

SEQ ID NO: 79444 - DNA, 201 bp, Homo sapiens; identical to SEQ ID NO: 79429

SEQ ID NO: 79445 - DNA, 201 bp, Homo sapiens; identical to SEQ ID NO: 79425

SEQ ID NO: 79446 - DNA, 201 bp, Homo sapiens; identical to SEQ ID NO: 79426

SEQ ID NO: 79447 - DNA, 201 bp, Homo sapiens; identical to SEQ ID NO: 79427

SEQ ID NO: 79448 - DNA, 201 bp, Homo sapiens; identical to SEQ ID NO: 79428

SEQ ID NO: 79449 - DNA, 201 bp, Homo sapiens; identical to SEQ ID NO: 79429

SEQ ID NO: 79450 - DNA, 201 bp, Homo sapiens
atctgcttacgagctgccctatgggaccaaggggagtgaggatctgctcctccgggtgctagccatcaccagctcctccatccccaagaacatccagagaytgaacaatgccccagtggctggctatgagggtgacgtgggctccaagaccaccatgcgtctcttctaccctgaatctgcccacttcgaccccaaagtaga

SEQ ID NO: 79451 - DNA, 201 bp, Homo sapiens
tggagattgcagctgacaaactgctgagcctgccaatgcaacagccacggaagattaagcaggatgcggaatttggtcagagccgttcatgtcagagctcrgcagaatggcagctgaaccctgggagagcactgcctgttctgagaaaggcctgcaattgtgtcttcacgatgcttttccaagacagccaaggcaggtata

SEQ ID NO: 79452 - DNA, 201 bp, Homo sapiens
aagacagccaaggcaggtataattttcctcagcaagaaagaggaacctcggaggtgtgcaccgcctggctggccacccaggtattggcaaaagtgactgtygggctgctggcccggcccccgcccgccgtccctggagcactcacgatgcggtccggcggcggcgtgctccggatgaagcacttgatctggcccttctcgc

SEQ ID NO: 79453 - DNA, 201 bp, Homo sapiens
cagagagcaaggcctctaagctctttggcaactactcccgggatcagcccatcttcctgcggcttgaggattatttctgggtcaagacgccatctgcttaygagctgccctatgggaccaaggggagtgaggatctgctcctccgggtgctagccatcaccagctcctccatccccaagaacatccagagattgaacaatg

SEQ ID NO: 79454 - DNA, 201 bp, Homo sapiens
aatcctaaacagattcggattctcaaccccttcttcatggagattgcagctgacaaactgctgagcctgccaatgcaacagccacggaagattaagcaggwtgcggaatttggtcagagccgttcatgtcagagctcagcagaatggcagctgaaccctgggagagcactgcctgttctgagaaaggcctgcaattgtgtc

SEQ ID NO: 79455 - DNA, 201 bp, Homo sapiens
gcaacagccacggaagattaagcaggatgcggaatttggtcagagccgttcatgtcagagctcagcagaatggcagctgaaccctgggagagcactgcctrttctgagaaaggcctgcaattgtgtcttcacgatgcttttccaagacagccaaggcaggtataattttcctcagcaagaaagaggaacctcggaggtgtg

SEQ ID NO: 79456 - DNA, 201 bp, Homo sapiens
ggcaggtataattttcctcagcaagaaagaggaacctcggaggtgtgcaccgcctggctggccacccaggtattggcaaaagtgactgttgggctgctggmccggcccccgcccgccgtccctggagcactcacgatgcggtccggcggcggcgtgctccggatgaagcacttgatctggcccttctcgccgtggagggcg

SEQ ID NO: 79457 - DNA, 201 bp, Homo sapiens
catgcagagctagcccacctcatgtccagctgtccactttccatcctggagaaagaacagtgtgcctcaaactcctgccctccccaggcctctggggcccrctggaaagggctctgaccccctggcccggccgggctctctagtggtgatccggctcattctcctgcaagttggaagcacaattttccccccaagtggagg

SEQ ID NO: 79458 - DNA, 201 bp, Homo sapiens
cctttctattctgggggcttctgagagagcccagcctgatgccagaacaaaggacagagaatttaagcacagaaatcccagacctgttgttctctccatcyagcgtgaccagggcccgagagacctgatggccagggtggggtgtccagcaccagccaagctggtgctccagcgcacctccccagagctccccgcactgac

SEQ ID NO: 79459 - DNA, 201 bp, Homo sapiens
gcagaaggccgagctgacgcgcatggccaacacgctgctgcacgtgcccaacctccactggctggtggtggaggatgcgccgcgccggacgccgctgaccrcgcgcctgctgcgcgacaccggcctcaactacacgcacctgcacgtggagacgccccgcaactacaagctgcgcggagacgcccgcgacccacgcatccc

SEQ ID NO: 79460 - DNA, 201 bp, Homo sapiens
cagtgggcaaggcggtgggtggtgggcaaggtgggacctcctgcagcctggaaagaggagggaggccaaggccattccctaactccctcctgcccctggtytgaggaggagggactctggagtagcagaggggctgggaaagagggggcaggggctgctgggacactgagcaggagggaggcctgagcacactgctttgga

SEQ ID NO: 79461 - DNA, 201 bp, Homo sapiens
gctgtccactttccatcctggagaaagaacagtgtgcctcaaactcctgccctccccaggcctctggggcccgctggaaagggctctgaccccctggcccrgccgggctctctagtggtgatccggctcattctcctgcaagttggaagcacaattttccccccaagtggaggaaaaggaaagggccccagcctactgaag

SEQ ID NO: 79462 - DNA, 201 bp, Homo sapiens; identical to SEQ ID NO: 79457

SEQ ID NO: 79463 - DNA, 201 bp, Homo sapiens; identical to SEQ ID NO: 79458

SEQ ID NO: 79464 - DNA, 201 bp, Homo sapiens; identical to SEQ ID NO: 79459

SEQ ID NO: 79465 - DNA, 201 bp, Homo sapiens; identical to SEQ ID NO: 79460

SEQ ID NO: 79466 - DNA, 201 bp, Homo sapiens; identical to SEQ ID NO: 79461

SEQ ID NO: 79467 - DNA, 201 bp, Homo sapiens; identical to SEQ ID NO: 79457

SEQ ID NO: 79468 - DNA, 201 bp, Homo sapiens; identical to SEQ ID NO: 79458

SEQ ID NO: 79469 - DNA, 201 bp, Homo sapiens; identical to SEQ ID NO: 79459

SEQ ID NO: 79470 - DNA, 201 bp, Homo sapiens; identical to SEQ ID NO: 79460

SEQ ID NO: 79471 - DNA, 201 bp, Homo sapiens; identical to SEQ ID NO: 79461

SEQ ID NO: 79472 - DNA, 201 bp, Homo sapiens; identical to SEQ ID NO: 79457

SEQ ID NO: 79473 - DNA, 201 bp, Homo sapiens; identical to SEQ ID NO: 79458

SEQ ID NO: 79474 - DNA, 201 bp, Homo sapiens; identical to SEQ ID NO: 79459

SEQ ID NO: 79475 - DNA, 201 bp, Homo sapiens; identical to SEQ ID NO: 79460

SEQ ID NO: 79476 - DNA, 201 bp, Homo sapiens; identical to SEQ ID NO: 79461

SEQ ID NO: 79477 - DNA, 201 bp, Homo sapiens; identical to SEQ ID NO: 79457

SEQ ID NO: 79478 - DNA, 201 bp, Homo sapiens; identical to SEQ ID NO: 79458

SEQ ID NO: 79479 - DNA, 201 bp, Homo sapiens; identical to SEQ ID NO: 79459

SEQ ID NO: 79480 - DNA, 201 bp, Homo sapiens; identical to SEQ ID NO: 79460

SEQ ID NO: 79481 - DNA, 201 bp, Homo sapiens; identical to SEQ ID NO: 79461

SEQ ID NO: 79482 - DNA, 201 bp, Homo sapiens; identical to SEQ ID NO: 79457

SEQ ID NO: 79483 - DNA, 201 bp, Homo sapiens; identical to SEQ ID NO: 79458

SEQ ID NO: 79484 - DNA, 201 bp, Homo sapiens; identical to SEQ ID NO: 79459

SEQ ID NO: 79485 - DNA, 201 bp, Homo sapiens; identical to SEQ ID NO: 79460

SEQ ID NO: 79486 - DNA, 201 bp, Homo sapiens; identical to SEQ ID NO: 79461

SEQ ID NO: 79487 - DNA, 201 bp, Homo sapiens
tggacacagagctggtgctcttccagtagagtagagacggggtttcaccatgttggccaagctgatctcgaactcctgacctcaagtgatccaccctcctyggcctcccaaagtgctggaatcacaggcgtgagccaccgtgcccaaccagtgaggccacgtttcgaaaagaagaaagaaacgacaaactaaaatacatga

SEQ ID NO: 79488 - DNA, 201 bp, Homo sapiens
ctctgaccctgcaatgctgcctaccatgattggcctcctggcagaggcaggcgtgcggctgctgtcctaccagacttcactggtgtcagatggggagaccwggcacgtcatgggcatctcctccttgctgcccagcctggaagcgtggaagcagcatgtgactgaagccttccagttccacttctaaccttggagctcact

SEQ ID NO: 79489 - DNA, 201 bp, Homo sapiens
gaacgctaagctgctggtgaaagaggctggcctcaatgtcaccacctcccacagccctgctgcaccaggggagcaaggcttcggggaatgcctcctggccrtggccctggcaggcgccccttaccaggctgtgggcttggtccaaggcactacgcctgtactgcaggggctcaatggagctgtcttcaggccagaagtgcc

SEQ ID NO: 79490 - DNA, 170 bp, Homo sapiens
cttctacaaaactcagagggactcttcaggagccacatgctctcatcaagcagaaactttttaagaggtrgacaacaacccagagtggacacagagctggtgctcttccagtagagtagagacggggtttcaccatgttggccaagctgatctcgaactcctgacctcaa

SEQ ID NO: 79491 - DNA, 201 bp, Homo sapiens
tgaacgctaagctgctggtgaaagaggctggcctcaatgtcaccacctcccacagccctgctgcaccaggggagcaaggcttcggggaatgcctcctggcygtggccctggcaggcgccccttaccaggctgtgggcttggtccaaggcactacgcctgtactgcaggggctcaatggagctgtcttcaggccagaagtgc

SEQ ID NO: 79492 - DNA, 201 bp, Homo sapiens
tcctccttgctgcccagcctggaagcgtggaagcagcatgtgactgaagccttccagttccacttctaaccttggagctcactggtccctgcctctggggyttttctgaagaaacccacccactgtgatcaatagggagagaaaatccacattcttgggctgaacgcgggcctctgacactgcttacactgcactctgacc

SEQ ID NO: 79493 - DNA, 201 bp, Homo sapiens
agtgcctctccgcagggacctgcccctgctcctattccggactcagacctctgaccctgcaatgctgcctaccatgattggcctcctggcagaggcaggcrtgcggctgctgtcctaccagacttcactggtgtcagatggggagacctggcacgtcatgggcatctcctccttgctgcccagcctggaagcgtggaagca

SEQ ID NO: 79494 - DNA, 201 bp, Homo sapiens
gcccagcctggaagcgtggaagcagcatgtgactgaagccttccagttccacttctaaccttggagctcactggtccctgcctctggggcttttctgaagmaacccacccactgtgatcaatagggagagaaaatccacattcttgggctgaacgcgggcctctgacactgcttacactgcactctgaccctgtagtacag

SEQ ID NO: 79495 - DNA, 201 bp, Homo sapiens
gccctgctgcaccaggggagcaaggcttcggggaatgcctcctggccgtggccctggcaggcgccccttaccaggctgtgggcttggtccaaggcactacrcctgtactgcaggggctcaatggagctgtcttcaggccagaagtgcctctccgcagggacctgcccctgctcctattccggactcagacctctgaccctg

SEQ ID NO: 79496 - DNA, 201 bp, Homo sapiens; identical to SEQ ID NO: 79488

SEQ ID NO: 79497 - DNA, 201 bp, Homo sapiens; identical to SEQ ID NO: 79489

SEQ ID NO: 79498 - DNA, 201 bp, Homo sapiens; identical to SEQ ID NO: 79491

SEQ ID NO: 79499 - DNA, 201 bp, Homo sapiens
cgaggaggaggcggagtcgcggagagtttgagtatttccgtccaatcaaaaggagactgtaggaggaggaggaggaggagatgactggggagcgggagctsgagaatactgcccagttactctagcgcgccaggccgaaccgcagcttcttggcttaggtacttctactcacagcggccgattccgaggccaactccagca

SEQ ID NO: 79500 - DNA, 201 bp, Homo sapiens; identical to SEQ ID NO: 79492

SEQ ID NO: 79501 - DNA, 201 bp, Homo sapiens
gataataaagcgggcagggatttggcaacctcagagccgcgaggaggaggcggagtcgcggagagtttgagtatttccgtccaatcaaaaggagactgtargaggaggaggaggaggagatgactggggagcgggagctcgagaatactgcccagttactctagcgcgccaggccgaaccgcagcttcttggcttaggtac

SEQ ID NO: 79502 - DNA, 201 bp, Homo sapiens
ccgtccaatcaaaaggagactgtaggaggaggaggaggaggagatgactggggagcgggagctcgagaatactgcccagttactctagcgcgccaggccgmaccgcagcttcttggcttaggtacttctactcacagcggccgattccgaggccaactccagcaatggcttttgcaaatctgcggaaagtgctcatcagtg

SEQ ID NO: 79503 - DNA, 201 bp, Homo sapiens; identical to SEQ ID NO: 79493

SEQ ID NO: 79504 - DNA, 201 bp, Homo sapiens
tcagagccgcgaggaggaggcggagtcgcggagagtttgagtatttccgtccaatcaaaaggagactgtaggaggaggaggaggaggagatgactggggarcgggagctcgagaatactgcccagttactctagcgcgccaggccgaaccgcagcttcttggcttaggtacttctactcacagcggccgattccgaggcca

SEQ ID NO: 79505 - DNA, 201 bp, Homo sapiens; identical to SEQ ID NO: 79494

SEQ ID NO: 79506 - DNA, 201 bp, Homo sapiens; identical to SEQ ID NO: 79495

SEQ ID NO: 79507 - DNA, 167 bp, Homo sapiens
ttggccatgacaggctggagctgccttgtgacaggagcaggagggtttctgggttagagtatcatcygcctcttggtggaggagaaggagctgaaggagatcagggccttggacaaggccttcagaccggaattgaggaaggaattttctgagctccagaacaagac

SEQ ID NO: 79508 - DNA, 201 bp, Homo sapiens
cagcgatttaaggatgacagagatgtgcatgtgggtattgttaggtgatgtcatcaagctccatcctcctggcttcatacagaaggtgacaatggcacaakcccaggtcctgttgtctccctttcacacaatgcccaacttattgtcttcctcatgtcatcaaaacctgcccattccctggctcaaccaggagctttctgt

SEQ ID NO: 79509 - DNA, 201 bp, Homo sapiens
ccgcatggctcccctgtgccccagcccctggctccctctgttgatcccggcccctgctccaggcctcactgtgcaactgctgctgtcactgctgcttctgrtgcctgtccatccccagaggttgccccggatgcaggaggattcccccttgggaggaggctcttctggggaagatgacccactgggcgaggaggatctgcc

SEQ ID NO: 79510 - DNA, 201 bp, Homo sapiens
tgagcagttgctgtctcgcttggaagaaatcgctgaggaaggctcagagactcaggtcccaggactggacatatctgcactcctgccctctgacttcagcygctacttccaatatgaggggtctctgactacaccgccctgtgcccagggtgtcatctggactgtgtttaaccagacagtgatgctgagtgctaagcagct

SEQ ID NO: 79511 - DNA, 134 bp, Homo sapiens
gaggctggatcttggagaatgtgagaagccagccagaggcatctgagggggagccggtaactgtcctgtcctgctcattatgccacttccttttaactgcmaagaaattttttaaaataaatatttataataaa

SEQ ID NO: 79512 - DNA, 201 bp, Homo sapiens
ctgtctcgcttggaagaaatcgctgaggaaggctcagagactcaggtcccaggactggacatatctgcactcctgccctctgacttcagccgctacttccratatgaggggtctctgactacaccgccctgtgcccagggtgtcatctggactgtgtttaaccagacagtgatgctgagtgctaagcagctccacaccctc

SEQ ID NO: 79513 - DNA, 201 bp, Homo sapiens
atggaggcgacccgccctggccccgggtgtccccagcctgcgcgggccgcttccagtccccggtggatatccgcccccagctcgccgccttctgcccggcsctgcgccccctggaactcctgggcttccagctcccgccgctcccagaactgcgcctgcgcaacaatggccacagtgtgcaactgaccctgcctcctgggc

SEQ ID NO: 79514 - DNA, 201 bp, Homo sapiens
ggcccctgctccaggcctcactgtgcaactgctgctgtcactgctgcttctggtgcctgtccatccccagaggttgccccggatgcaggaggattcccccytgggaggaggctcttctggggaagatgacccactgggcgaggaggatctgcccagtgaagaggattcacccagagaggaggatccacccggagaggagga

SEQ ID NO: 79515 - DNA, 201 bp, Homo sapiens
agggcattgccaaggactaaaaccagtagagcaacctctggccatgtcacccctgcagtacagctttatggcggtcatccactttgcggggctcaaggccrtgggcgagtcggtgcagaagcctctggattattacagagttaacctgaccgggaccatccagcttctggagatcatgaaggcccacggggtgaagaacct

SEQ ID NO: 79516 - DNA, 201 bp, Homo sapiens
tggtgaggatccccagggcatacccaacaacctcatgccttatgtctcccaggtggcgatcgggcgacgggaggccctgaatgtctttggcaatgactatkacacagaggatggcacaggtgtccgggattacatccatgtcgtggatctggccaagggccacattgcagccttaaggaagctgaaagaacagtgtggctg

SEQ ID NO: 79517 - DNA, 201 bp, Homo sapiens
gatctacaacctgggcacgggcacaggctattcaggttgttgggtatgccttgaggatcctcaccaaggcctcagaggcatggatcccgtacaaggtggtkgcacggcgggaaggtgatgtggcagcctgttacgccaaccccagcctggcccaagaggagctggggtggacagcagccttagggctggacaggatgtgtg

SEQ ID NO: 79518 - DNA, 201 bp, Homo sapiens
ggggccaagccaaggcctcccctacctcaaaccccagctgggcccgcttagcccaccaggcatgaggccaagggctccactgaccaggaggccgaggtctytaactcttatcttccacagggtccaagagttcatcaggacccccaagagtgagtgagggggcaaggctctggcacaaaacctcctcctcccaggcactca

SEQ ID NO: 79519 - DNA, 201 bp, Homo sapiens
gagcaacctctggccatgtcacccctgcagtacagctttatggcggtcatccactttgcggggctcaaggccgtgggcgagtcggtgcagaagcctctggrttattacagagttaacctgaccgggaccatccagcttctggagatcatgaaggcccacggggtgaagaacctggtgttcagcagctcagccactgtgtac

SEQ ID NO: 79520 - DNA, 201 bp, Homo sapiens
ggcacggcgggaaggtgatgtggcagcctgttacgccaaccccagcctggcccaagaggagctggggtggacagcagccttagggctggacaggatgtgtkaggatctctggcgctggcagaagcagaatccttcaggctttggcacgcaagcctgaggaccctcccctaccaaggaccaggaaaagcagcagctgcctgc

SEQ ID NO: 79521 - DNA, 201 bp, Homo sapiens
atggcagagaaggtgctggtaacaggtggggctggctacattggcagccacacggtgctggagctgctggaggctggctacttgcctgtggtcatcgatarcttccataatgccttccgtggagggggctccctgcctgagagcctgcggcgggtccaggagctgacaggccgctctgtggagtttgaggagatggacatt

SEQ ID NO: 79522 - DNA, 201 bp, Homo sapiens
ccaaggcctcagaggcatggatcccgtacaaggtggtggcacggcgggaaggtgatgtggcagcctgttacgccaaccccagcctggcccaagaggagctkgggtggacagcagccttagggctggacaggatgtgtgaggatctctggcgctggcagaagcagaatccttcaggctttggcacgcaagcctgaggaccct

SEQ ID NO: 79523 - DNA, 201 bp, Homo sapiens
gctgctgcgctatttcaaccccacaggtgcccatgcctctggctgcattggtgaggatccccagggcatacccaacaacctcatgccttatgtctcccagktggcgatcgggcgacgggaggccctgaatgtctttggcaatgactatgacacagaggatggcacaggtgtccgggattacatccatgtcgtggatctggc

SEQ ID NO: 79524 - DNA, 201 bp, Homo sapiens
accccacaggtgcccatgcctctggctgcattggtgaggatccccagggcatacccaacaacctcatgccttatgtctcccaggtggcgatcgggcgacgkgaggccctgaatgtctttggcaatgactatgacacagaggatggcacaggtgtccgggattacatccatgtcgtggatctggccaagggccacattgcag

SEQ ID NO: 79525 - DNA, 201 bp, Homo sapiens
acgggtggttgtaccaacccttacggcaagtccaagttcttcatcgaggaaatgatccgggacctgtgccaggcagacaagacttggaacgcagtgctgcygcgctatttcaaccccacaggtgcccatgcctctggctgcattggtgaggatccccagggcatacccaacaacctcatgccttatgtctcccaggtggcg

SEQ ID NO: 79526 - DNA, 201 bp, Homo sapiens
tctggctgcattggtgaggatccccagggcatacccaacaacctcatgccttatgtctcccaggtggcgatcgggcgacgggaggccctgaatgtctttgscaatgactatgacacagaggatggcacaggtgtccgggattacatccatgtcgtggatctggccaagggccacattgcagccttaaggaagctgaaagaa

SEQ ID NO: 79527 - DNA, 201 bp, Homo sapiens
agctgctggggccaagccaaggcctcccctacctcaaaccccagctgggcccgcttagcccaccaggcatgaggccaagggctccactgaccaggaggcckaggtctctaactcttatcttccacagggtccaagagttcatcaggacccccaagagtgagtgagggggcaaggctctggcacaaaacctcctcctcccag

SEQ ID NO: 79528 - DNA, 197 bp, Homo sapiens
aagggctccactgaccaggaggccgaggtctctaactcttatcttccacagggtccaagagttcatcaggacccccaagagtgagtgagggggcaaggctytggcacaaaacctcctcctcccaggcactcatttatattgctctgaaagagctttccaaagtatttaaaaataaaaacaagttttcttacactggg

SEQ ID NO: 79529 - DNA, 201 bp, Homo sapiens
ctacaacctgggcacgggcacaggctattcaggttgttgggtatgccttgaggatcctcaccaaggcctcagaggcatggatcccgtacaaggtggtggcmcggcgggaaggtgatgtggcagcctgttacgccaaccccagcctggcccaagaggagctggggtggacagcagccttagggctggacaggatgtgtgagg

SEQ ID NO: 79530 - DNA, 201 bp, Homo sapiens
tgccttgaggatcctcaccaaggcctcagaggcatggatcccgtacaaggtggtggcacggcgggaaggtgatgtggcagcctgttacgccaaccccagchtggcccaagaggagctggggtggacagcagccttagggctggacaggatgtgtgaggatctctggcgctggcagaagcagaatccttcaggctttggcac

SEQ ID NO: 79531 - DNA, 201 bp, Homo sapiens
cagggcatacccaacaacctcatgccttatgtctcccaggtggcgatcgggcgacgggaggccctgaatgtctttggcaatgactatgacacagaggatgscacaggtgtccgggattacatccatgtcgtggatctggccaagggccacattgcagccttaaggaagctgaaagaacagtgtggctgccggatctacaac

SEQ ID NO: 79532 - DNA, 201 bp, Homo sapiens
ggtatgccttgaggatcctcaccaaggcctcagaggcatggatcccgtacaaggtggtggcacggcgggaaggtgatgtggcagcctgttacgccaacccmagcctggcccaagaggagctggggtggacagcagccttagggctggacaggatgtgtgaggatctctggcgctggcagaagcagaatccttcaggctttg

SEQ ID NO: 79533 - DNA, 201 bp, Homo sapiens
ggagtttgaggagatggacattttggaccagggagccctacagcgtctcttcaaaaagtacagctttatggcggtcatccactttgcggggctcaaggccrtgggcgagtcggtgcagaagcctctggattattacagagttaacctgaccgggaccatccagcttctggagatcatgaaggcccacggggtgaagaacct

SEQ ID NO: 79534 - DNA, 201 bp, Homo sapiens; identical to SEQ ID NO: 79516

SEQ ID NO: 79535 - DNA, 201 bp, Homo sapiens; identical to SEQ ID NO: 79517

SEQ ID NO: 79536 - DNA, 201 bp, Homo sapiens; identical to SEQ ID NO: 79518

SEQ ID NO: 79537 - DNA, 201 bp, Homo sapiens
cagggagccctacagcgtctcttcaaaaagtacagctttatggcggtcatccactttgcggggctcaaggccgtgggcgagtcggtgcagaagcctctggrttattacagagttaacctgaccgggaccatccagcttctggagatcatgaaggcccacggggtgaagaacctggtgttcagcagctcagccactgtgtac

SEQ ID NO: 79538 - DNA, 201 bp, Homo sapiens; identical to SEQ ID NO: 79520

SEQ ID NO: 79539 - DNA, 201 bp, Homo sapiens; identical to SEQ ID NO: 79521

SEQ ID NO: 79540 - DNA, 201 bp, Homo sapiens; identical to SEQ ID NO: 79522

SEQ ID NO: 79541 - DNA, 201 bp, Homo sapiens; identical to SEQ ID NO: 79523

SEQ ID NO: 79542 - DNA, 201 bp, Homo sapiens; identical to SEQ ID NO: 79524

SEQ ID NO: 79543 - DNA, 201 bp, Homo sapiens; identical to SEQ ID NO: 79525

SEQ ID NO: 79544 - DNA, 201 bp, Homo sapiens; identical to SEQ ID NO: 79526

SEQ ID NO: 79545 - DNA, 201 bp, Homo sapiens; identical to SEQ ID NO: 79527

SEQ ID NO: 79546 - DNA, 197 bp, Homo sapiens; identical to SEQ ID NO: 79528

SEQ ID NO: 79547 - DNA, 201 bp, Homo sapiens; identical to SEQ ID NO: 79529

SEQ ID NO: 79548 - DNA, 201 bp, Homo sapiens; identical to SEQ ID NO: 79530

SEQ ID NO: 79549 - DNA, 201 bp, Homo sapiens; identical to SEQ ID NO: 79531

SEQ ID NO: 79550 - DNA, 201 bp, Homo sapiens; identical to SEQ ID NO: 79532

SEQ ID NO: 79551 - DNA, 201 bp, Homo sapiens; identical to SEQ ID NO: 79533

SEQ ID NO: 79552 - DNA, 201 bp, Homo sapiens; identical to SEQ ID NO: 79516

SEQ ID NO: 79553 - DNA, 201 bp, Homo sapiens; identical to SEQ ID NO: 79517

SEQ ID NO: 79554 - DNA, 201 bp, Homo sapiens; identical to SEQ ID NO: 79518

SEQ ID NO: 79555 - DNA, 201 bp, Homo sapiens; identical to SEQ ID NO: 79537

SEQ ID NO: 79556 - DNA, 201 bp, Homo sapiens; identical to SEQ ID NO: 79520

SEQ ID NO: 79557 - DNA, 201 bp, Homo sapiens; identical to SEQ ID NO: 79521

SEQ ID NO: 79558 - DNA, 201 bp, Homo sapiens; identical to SEQ ID NO: 79522

SEQ ID NO: 79559 - DNA, 201 bp, Homo sapiens; identical to SEQ ID NO: 79523

SEQ ID NO: 79560 - DNA, 201 bp, Homo sapiens; identical to SEQ ID NO: 79524

SEQ ID NO: 79561 - DNA, 201 bp, Homo sapiens; identical to SEQ ID NO: 79525

SEQ ID NO: 79562 - DNA, 201 bp, Homo sapiens; identical to SEQ ID NO: 79526

SEQ ID NO: 79563 - DNA, 201 bp, Homo sapiens; identical to SEQ ID NO: 79527

SEQ ID NO: 79564 - DNA, 197 bp, Homo sapiens; identical to SEQ ID NO: 79528

SEQ ID NO: 79565 - DNA, 201 bp, Homo sapiens; identical to SEQ ID NO: 79529

SEQ ID NO: 79566 - DNA, 201 bp, Homo sapiens; identical to SEQ ID NO: 79530

SEQ ID NO: 79567 - DNA, 201 bp, Homo sapiens; identical to SEQ ID NO: 79531

SEQ ID NO: 79568 - DNA, 201 bp, Homo sapiens; identical to SEQ ID NO: 79532

SEQ ID NO: 79569 - DNA, 201 bp, Homo sapiens; identical to SEQ ID NO: 79533

SEQ ID NO: 79570 - DNA, 201 bp, Homo sapiens; identical to SEQ ID NO: 79516

SEQ ID NO: 79571 - DNA, 201 bp, Homo sapiens; identical to SEQ ID NO: 79517

SEQ ID NO: 79572 - DNA, 201 bp, Homo sapiens; identical to SEQ ID NO: 79518

SEQ ID NO: 79573 - DNA, 201 bp, Homo sapiens; identical to SEQ ID NO: 79537

SEQ ID NO: 79574 - DNA, 201 bp, Homo sapiens; identical to SEQ ID NO: 79520

SEQ ID NO: 79575 - DNA, 201 bp, Homo sapiens; identical to SEQ ID NO: 79521

SEQ ID NO: 79576 - DNA, 201 bp, Homo sapiens; identical to SEQ ID NO: 79522

SEQ ID NO: 79577 - DNA, 201 bp, Homo sapiens; identical to SEQ ID NO: 79523

SEQ ID NO: 79578 - DNA, 201 bp, Homo sapiens; identical to SEQ ID NO: 79524

SEQ ID NO: 79579 - DNA, 201 bp, Homo sapiens; identical to SEQ ID NO: 79525

SEQ ID NO: 79580 - DNA, 201 bp, Homo sapiens; identical to SEQ ID NO: 79526

SEQ ID NO: 79581 - DNA, 201 bp, Homo sapiens; identical to SEQ ID NO: 79527

SEQ ID NO: 79582 - DNA, 197 bp, Homo sapiens; identical to SEQ ID NO: 79528

SEQ ID NO: 79583 - DNA, 201 bp, Homo sapiens; identical to SEQ ID NO: 79529

SEQ ID NO: 79584 - DNA, 201 bp, Homo sapiens; identical to SEQ ID NO: 79530

SEQ ID NO: 79585 - DNA, 201 bp, Homo sapiens; identical to SEQ ID NO: 79531

SEQ ID NO: 79586 - DNA, 201 bp, Homo sapiens; identical to SEQ ID NO: 79532

SEQ ID NO: 79587 - DNA, 201 bp, Homo sapiens; identical to SEQ ID NO: 79516

SEQ ID NO: 79588 - DNA, 201 bp, Homo sapiens; identical to SEQ ID NO: 79518

SEQ ID NO: 79589 - DNA, 201 bp, Homo sapiens; identical to SEQ ID NO: 79537

SEQ ID NO: 79590 - DNA, 201 bp, Homo sapiens; identical to SEQ ID NO: 79520

SEQ ID NO: 79591 - DNA, 201 bp, Homo sapiens; identical to SEQ ID NO: 79524

SEQ ID NO: 79592 - DNA, 201 bp, Homo sapiens; identical to SEQ ID NO: 79525

SEQ ID NO: 79593 - DNA, 201 bp, Homo sapiens; identical to SEQ ID NO: 79526

SEQ ID NO: 79594 - DNA, 201 bp, Homo sapiens; identical to SEQ ID NO: 79532

SEQ ID NO: 79595 - DNA, 201 bp, Homo sapiens; identical to SEQ ID NO: 79530

SEQ ID NO: 79596 - DNA, 201 bp, Homo sapiens; identical to SEQ ID NO: 79533

SEQ ID NO: 79597 - DNA, 201 bp, Homo sapiens; identical to SEQ ID NO: 79517

SEQ ID NO: 79598 - DNA, 201 bp, Homo sapiens; identical to SEQ ID NO: 79523

SEQ ID NO: 79599 - DNA, 201 bp, Homo sapiens; identical to SEQ ID NO: 79522

SEQ ID NO: 79600 - DNA, 201 bp, Homo sapiens; identical to SEQ ID NO: 79529

SEQ ID NO: 79601 - DNA, 201 bp, Homo sapiens; identical to SEQ ID NO: 79531

SEQ ID NO: 79602 - DNA, 197 bp, Homo sapiens; identical to SEQ ID NO: 79528

SEQ ID NO: 79603 - DNA, 201 bp, Homo sapiens; identical to SEQ ID NO: 79527

SEQ ID NO: 79604 - DNA, 201 bp, Homo sapiens; identical to SEQ ID NO: 79516

SEQ ID NO: 79605 - DNA, 201 bp, Homo sapiens; identical to SEQ ID NO: 79518

SEQ ID NO: 79606 - DNA, 201 bp, Homo sapiens; identical to SEQ ID NO: 79537

SEQ ID NO: 79607 - DNA, 201 bp, Homo sapiens; identical to SEQ ID NO: 79520

SEQ ID NO: 79608 - DNA, 201 bp, Homo sapiens; identical to SEQ ID NO: 79524

SEQ ID NO: 79609 - DNA, 201 bp, Homo sapiens; identical to SEQ ID NO: 79525

SEQ ID NO: 79610 - DNA, 201 bp, Homo sapiens; identical to SEQ ID NO: 79526

SEQ ID NO: 79611 - DNA, 201 bp, Homo sapiens; identical to SEQ ID NO: 79532

SEQ ID NO: 79612 - DNA, 201 bp, Homo sapiens; identical to SEQ ID NO: 79530

SEQ ID NO: 79613 - DNA, 201 bp, Homo sapiens; identical to SEQ ID NO: 79533

SEQ ID NO: 79614 - DNA, 201 bp, Homo sapiens; identical to SEQ ID NO: 79517

SEQ ID NO: 79615 - DNA, 201 bp, Homo sapiens; identical to SEQ ID NO: 79523

SEQ ID NO: 79616 - DNA, 201 bp, Homo sapiens; identical to SEQ ID NO: 79522

SEQ ID NO: 79617 - DNA, 201 bp, Homo sapiens; identical to SEQ ID NO: 79529

SEQ ID NO: 79618 - DNA, 201 bp, Homo sapiens; identical to SEQ ID NO: 79531

SEQ ID NO: 79619 - DNA, 197 bp, Homo sapiens; identical to SEQ ID NO: 79528

SEQ ID NO: 79620 - DNA, 201 bp, Homo sapiens; identical to SEQ ID NO: 79527

SEQ ID NO: 79621 - DNA, 201 bp, Homo sapiens
gctctccagcctctggcaggaactcagggccctggagctgctggggccaagccaaggccgcatgaggccaagggctccactgaccaggaggccgaggtctytaactcttatcttccacagggtccaagagttcatcaggacccccaagagtgagtgagggggcaaggctctggcacaaaacctcctcctcccaggcactca

SEQ ID NO: 79622 - DNA, 201 bp, Homo sapiens; identical to SEQ ID NO: 79520

SEQ ID NO: 79623 - DNA, 201 bp, Homo sapiens; identical to SEQ ID NO: 79521

SEQ ID NO: 79624 - DNA, 201 bp, Homo sapiens; identical to SEQ ID NO: 79524

SEQ ID NO: 79625 - DNA, 201 bp, Homo sapiens; identical to SEQ ID NO: 79525

SEQ ID NO: 79626 - DNA, 201 bp, Homo sapiens; identical to SEQ ID NO: 79526

SEQ ID NO: 79627 - DNA, 201 bp, Homo sapiens
caggctattcagctaagctccaactacctcctgtcttgcagatcccgtacaaggtggtggcacggcgggaaggtgatgtggcagcctgttacgccaacccmagcctggcccaagaggagctggggtggacagcagccttagggctggacaggatgtgtgaggatctctggcgctggcagaagcagaatccttcaggctttg

SEQ ID NO: 79628 - DNA, 201 bp, Homo sapiens
aagaacagtgtggctgccggatctacaacctgggcacgggcacaggctattcagctaagctccaactacctcctgtcttgcagatcccgtacaaggtggtkgcacggcgggaaggtgatgtggcagcctgttacgccaaccccagcctggcccaagaggagctggggtggacagcagccttagggctggacaggatgtgtg

SEQ ID NO: 79629 - DNA, 201 bp, Homo sapiens; identical to SEQ ID NO: 79531

SEQ ID NO: 79630 - DNA, 201 bp, Homo sapiens; identical to SEQ ID NO: 79516

SEQ ID NO: 79631 - DNA, 201 bp, Homo sapiens; identical to SEQ ID NO: 79537

SEQ ID NO: 79632 - DNA, 201 bp, Homo sapiens
ggaacccgagcagtatctgtatctgtaaagtgccagtgataacacctgtctcaccgagatgctgggggaattcaggaaaatcatgcaaaagtgcctggtayggagcctggcacgcagagggctcttggtcaagtgggttggagctgcgtgagcccagaaggggatagaggcagcgtggaggaaggcggcagcgggcccggt

SEQ ID NO: 79633 - DNA, 201 bp, Homo sapiens
ctattcagctaagctccaactacctcctgtcttgcagatcccgtacaaggtggtggcacggcgggaaggtgatgtggcagcctgttacgccaaccccagchtggcccaagaggagctggggtggacagcagccttagggctggacaggatgtgtgaggatctctggcgctggcagaagcagaatccttcaggctttggcac

SEQ ID NO: 79634 - DNA, 201 bp, Homo sapiens; identical to SEQ ID NO: 79533

SEQ ID NO: 79635 - DNA, 201 bp, Homo sapiens
aactacctcctgtcttgcagatcccgtacaaggtggtggcacggcgggaaggtgatgtggcagcctgttacgccaaccccagcctggcccaagaggagctkgggtggacagcagccttagggctggacaggatgtgtgaggatctctggcgctggcagaagcagaatccttcaggctttggcacgcaagcctgaggaccct

SEQ ID NO: 79636 - DNA, 201 bp, Homo sapiens; identical to SEQ ID NO: 79523

SEQ ID NO: 79637 - DNA, 201 bp, Homo sapiens
aacagtgtggctgccggatctacaacctgggcacgggcacaggctattcagctaagctccaactacctcctgtcttgcagatcccgtacaaggtggtggcmcggcgggaaggtgatgtggcagcctgttacgccaaccccagcctggcccaagaggagctggggtggacagcagccttagggctggacaggatgtgtgagg

SEQ ID NO: 79638 - DNA, 195 bp, Homo sapiens
aagggctccactgaccaggaggccgaggtctctaactcttatcttccacagggtccaagagttcatcaggacccccaagagtgagtgagggggcaaggctytggcacaaaacctcctcctcccaggcactcatttatattgctctgaaagagctttccaaagtatttaaaaataaaaacaagttttcttacactg

SEQ ID NO: 79639 - DNA, 201 bp, Homo sapiens
gctgcctgctctccagcctctggcaggaactcagggccctggagctgctggggccaagccaaggccgcatgaggccaagggctccactgaccaggaggcckaggtctctaactcttatcttccacagggtccaagagttcatcaggacccccaagagtgagtgagggggcaaggctctggcacaaaacctcctcctcccag

SEQ ID NO: 79640 - DNA, 201 bp, Homo sapiens; identical to SEQ ID NO: 79533

SEQ ID NO: 79641 - DNA, 201 bp, Homo sapiens; identical to SEQ ID NO: 79516

SEQ ID NO: 79642 - DNA, 201 bp, Homo sapiens; identical to SEQ ID NO: 79517

SEQ ID NO: 79643 - DNA, 201 bp, Homo sapiens; identical to SEQ ID NO: 79518

SEQ ID NO: 79644 - DNA, 201 bp, Homo sapiens; identical to SEQ ID NO: 79537

SEQ ID NO: 79645 - DNA, 201 bp, Homo sapiens; identical to SEQ ID NO: 79520

SEQ ID NO: 79646 - DNA, 201 bp, Homo sapiens; identical to SEQ ID NO: 79632

SEQ ID NO: 79647 - DNA, 201 bp, Homo sapiens; identical to SEQ ID NO: 79521

SEQ ID NO: 79648 - DNA, 201 bp, Homo sapiens; identical to SEQ ID NO: 79522

SEQ ID NO: 79649 - DNA, 201 bp, Homo sapiens; identical to SEQ ID NO: 79523

SEQ ID NO: 79650 - DNA, 201 bp, Homo sapiens; identical to SEQ ID NO: 79524

SEQ ID NO: 79651 - DNA, 201 bp, Homo sapiens; identical to SEQ ID NO: 79525

SEQ ID NO: 79652 - DNA, 201 bp, Homo sapiens; identical to SEQ ID NO: 79526

SEQ ID NO: 79653 - DNA, 201 bp, Homo sapiens; identical to SEQ ID NO: 79527

SEQ ID NO: 79654 - DNA, 197 bp, Homo sapiens; identical to SEQ ID NO: 79528

SEQ ID NO: 79655 - DNA, 201 bp, Homo sapiens; identical to SEQ ID NO: 79529

SEQ ID NO: 79656 - DNA, 201 bp, Homo sapiens; identical to SEQ ID NO: 79530

SEQ ID NO: 79657 - DNA, 201 bp, Homo sapiens; identical to SEQ ID NO: 79531

SEQ ID NO: 79658 - DNA, 201 bp, Homo sapiens; identical to SEQ ID NO: 79532

SEQ ID NO: 79659 - DNA, 142 bp, Homo sapiens
cggaggcattggacaagcctgggtctgagcagacagaacccyttcctgcgaccctggagtcccaatcgtgctgccattttccttctgcccaggactctccagtcctcagtcaccttggacaaagaagtgtggatcctcagat

SEQ ID NO: 79660 - DNA, 201 bp, Homo sapiens; identical to SEQ ID NO: 79533

SEQ ID NO: 79661 - DNA, 201 bp, Homo sapiens; identical to SEQ ID NO: 79516

SEQ ID NO: 79662 - DNA, 201 bp, Homo sapiens; identical to SEQ ID NO: 79517

SEQ ID NO: 79663 - DNA, 201 bp, Homo sapiens; identical to SEQ ID NO: 79518

SEQ ID NO: 79664 - DNA, 201 bp, Homo sapiens; identical to SEQ ID NO: 79537

SEQ ID NO: 79665 - DNA, 201 bp, Homo sapiens; identical to SEQ ID NO: 79520

SEQ ID NO: 79666 - DNA, 201 bp, Homo sapiens; identical to SEQ ID NO: 79521

SEQ ID NO: 79667 - DNA, 201 bp, Homo sapiens; identical to SEQ ID NO: 79522

SEQ ID NO: 79668 - DNA, 201 bp, Homo sapiens; identical to SEQ ID NO: 79523

SEQ ID NO: 79669 - DNA, 201 bp, Homo sapiens; identical to SEQ ID NO: 79524

SEQ ID NO: 79670 - DNA, 201 bp, Homo sapiens; identical to SEQ ID NO: 79525

SEQ ID NO: 79671 - DNA, 201 bp, Homo sapiens; identical to SEQ ID NO: 79526

SEQ ID NO: 79672 - DNA, 201 bp, Homo sapiens; identical to SEQ ID NO: 79527

SEQ ID NO: 79673 - DNA, 197 bp, Homo sapiens; identical to SEQ ID NO: 79528

SEQ ID NO: 79674 - DNA, 201 bp, Homo sapiens; identical to SEQ ID NO: 79529

SEQ ID NO: 79675 - DNA, 201 bp, Homo sapiens; identical to SEQ ID NO: 79530

SEQ ID NO: 79676 - DNA, 201 bp, Homo sapiens; identical to SEQ ID NO: 79531

SEQ ID NO: 79677 - DNA, 201 bp, Homo sapiens; identical to SEQ ID NO: 79532

SEQ ID NO: 79678 - DNA, 184 bp, Homo sapiens
attagtcactgcgcccaggagccagtttacacctagcgaaggcggaggcattggacaagcctgggtctgagcagacagaacccyttcctgcgaccctggagtcccaatcgtgctgccattttccttctgcccaggactctccagtcctcagtcaccttggacaaagaagtgtggatcctcagat

SEQ ID NO: 79679 - DNA, 201 bp, Homo sapiens; identical to SEQ ID NO: 79533

SEQ ID NO: 79680 - DNA, 201 bp, Homo sapiens; identical to SEQ ID NO: 79516

SEQ ID NO: 79681 - DNA, 201 bp, Homo sapiens; identical to SEQ ID NO: 79517

SEQ ID NO: 79682 - DNA, 201 bp, Homo sapiens; identical to SEQ ID NO: 79518

SEQ ID NO: 79683 - DNA, 201 bp, Homo sapiens; identical to SEQ ID NO: 79537

SEQ ID NO: 79684 - DNA, 201 bp, Homo sapiens; identical to SEQ ID NO: 79520

SEQ ID NO: 79685 - DNA, 201 bp, Homo sapiens; identical to SEQ ID NO: 79521

SEQ ID NO: 79686 - DNA, 201 bp, Homo sapiens; identical to SEQ ID NO: 79522

SEQ ID NO: 79687 - DNA, 201 bp, Homo sapiens; identical to SEQ ID NO: 79523

SEQ ID NO: 79688 - DNA, 201 bp, Homo sapiens; identical to SEQ ID NO: 79524

SEQ ID NO: 79689 - DNA, 201 bp, Homo sapiens; identical to SEQ ID NO: 79525

SEQ ID NO: 79690 - DNA, 201 bp, Homo sapiens; identical to SEQ ID NO: 79526

SEQ ID NO: 79691 - DNA, 201 bp, Homo sapiens; identical to SEQ ID NO: 79527

SEQ ID NO: 79692 - DNA, 197 bp, Homo sapiens; identical to SEQ ID NO: 79528

SEQ ID NO: 79693 - DNA, 201 bp, Homo sapiens; identical to SEQ ID NO: 79529

SEQ ID NO: 79694 - DNA, 201 bp, Homo sapiens; identical to SEQ ID NO: 79530

SEQ ID NO: 79695 - DNA, 201 bp, Homo sapiens; identical to SEQ ID NO: 79531

SEQ ID NO: 79696 - DNA, 201 bp, Homo sapiens; identical to SEQ ID NO: 79532

SEQ ID NO: 79697 - DNA, 201 bp, Homo sapiens; identical to SEQ ID NO: 79533

SEQ ID NO: 79698 - DNA, 201 bp, Homo sapiens; identical to SEQ ID NO: 79516

SEQ ID NO: 79699 - DNA, 201 bp, Homo sapiens; identical to SEQ ID NO: 79517

SEQ ID NO: 79700 - DNA, 201 bp, Homo sapiens; identical to SEQ ID NO: 79518

SEQ ID NO: 79701 - DNA, 201 bp, Homo sapiens; identical to SEQ ID NO: 79537

SEQ ID NO: 79702 - DNA, 201 bp, Homo sapiens; identical to SEQ ID NO: 79520

SEQ ID NO: 79703 - DNA, 201 bp, Homo sapiens; identical to SEQ ID NO: 79521

SEQ ID NO: 79704 - DNA, 201 bp, Homo sapiens; identical to SEQ ID NO: 79522

SEQ ID NO: 79705 - DNA, 201 bp, Homo sapiens; identical to SEQ ID NO: 79523

SEQ ID NO: 79706 - DNA, 201 bp, Homo sapiens; identical to SEQ ID NO: 79524

SEQ ID NO: 79707 - DNA, 201 bp, Homo sapiens; identical to SEQ ID NO: 79525

SEQ ID NO: 79708 - DNA, 201 bp, Homo sapiens; identical to SEQ ID NO: 79526

SEQ ID NO: 79709 - DNA, 201 bp, Homo sapiens; identical to SEQ ID NO: 79527

SEQ ID NO: 79710 - DNA, 197 bp, Homo sapiens; identical to SEQ ID NO: 79528

SEQ ID NO: 79711 - DNA, 201 bp, Homo sapiens; identical to SEQ ID NO: 79529

SEQ ID NO: 79712 - DNA, 201 bp, Homo sapiens; identical to SEQ ID NO: 79530

SEQ ID NO: 79713 - DNA, 201 bp, Homo sapiens; identical to SEQ ID NO: 79531

SEQ ID NO: 79714 - DNA, 201 bp, Homo sapiens; identical to SEQ ID NO: 79532

SEQ ID NO: 79715 - DNA, 201 bp, Homo sapiens; identical to SEQ ID NO: 79533

SEQ ID NO: 79716 - DNA, 201 bp, Homo sapiens; identical to SEQ ID NO: 79516

SEQ ID NO: 79717 - DNA, 201 bp, Homo sapiens; identical to SEQ ID NO: 79517

SEQ ID NO: 79718 - DNA, 201 bp, Homo sapiens; identical to SEQ ID NO: 79518

SEQ ID NO: 79719 - DNA, 201 bp, Homo sapiens; identical to SEQ ID NO: 79537

SEQ ID NO: 79720 - DNA, 201 bp, Homo sapiens; identical to SEQ ID NO: 79520

SEQ ID NO: 79721 - DNA, 201 bp, Homo sapiens; identical to SEQ ID NO: 79521

SEQ ID NO: 79722 - DNA, 201 bp, Homo sapiens; identical to SEQ ID NO: 79522

SEQ ID NO: 79723 - DNA, 201 bp, Homo sapiens; identical to SEQ ID NO: 79523

SEQ ID NO: 79724 - DNA, 201 bp, Homo sapiens; identical to SEQ ID NO: 79524

SEQ ID NO: 79725 - DNA, 201 bp, Homo sapiens; identical to SEQ ID NO: 79525

SEQ ID NO: 79726 - DNA, 201 bp, Homo sapiens; identical to SEQ ID NO: 79526

SEQ ID NO: 79727 - DNA, 201 bp, Homo sapiens; identical to SEQ ID NO: 79527

SEQ ID NO: 79728 - DNA, 197 bp, Homo sapiens; identical to SEQ ID NO: 79528

SEQ ID NO: 79729 - DNA, 201 bp, Homo sapiens; identical to SEQ ID NO: 79529

SEQ ID NO: 79730 - DNA, 201 bp, Homo sapiens; identical to SEQ ID NO: 79530

SEQ ID NO: 79731 - DNA, 201 bp, Homo sapiens; identical to SEQ ID NO: 79531

SEQ ID NO: 79732 - DNA, 201 bp, Homo sapiens; identical to SEQ ID NO: 79532

SEQ ID NO: 79733 - DNA, 201 bp, Homo sapiens
ttcctggcatcaactacccagtcctgaccccaaatttgaaaggcttcgaggcagcggttgctgctggagccaaggaagtagtcatctttggagctgcctcrgagctctccaccctgccatggccgtggggcccttgctctctgacttctcaggacacaggtcatggaggttcttcccaagctggcagaggccatttgtgga

SEQ ID NO: 79734 - DNA, 201 bp, Homo sapiens
ggaagttggtccccgagatggactacaaaatgaaaagaatatcgtatctactccagtgaaaatcaagctgatagacatgctttctgaagcaggactctctsttatagaaaccaccagctttgtgtctcctaagtgggttccccagatgggtgaccacactgaagtcttgaagggcattcagaagtttcctggcatcaacta

SEQ ID NO: 79735 - DNA, 179 bp, Homo sapiens
ttctcaggacacaggtcatggaggttcttcccaagctggcagaggccatttgtggaaagtggagagctacgtggtggccatctgccaactccagcatctcyggaaaatctccacgctgaatgtgatttttgaaaacagcttatgtaattaaaggttgaatggcacatcataattccagc

SEQ ID NO: 79736 - DNA, 201 bp, Homo sapiens
ttcctccactgatgtgctcctctccatgtccggctacctgtcagcacctcatctatgggcactttaccaaagcgggtgaaaattgtggaagttggtccccragatggactacaaaatgaaaagaatatcgtatctactccagtgaaaatcaagctgatagacatgctttctgaagcaggactctctgttatagaaaccacc

SEQ ID NO: 79737 - DNA, 201 bp, Homo sapiens
tccactgatgtgctcctctccatgtccggctacctgtcagcacctcatctatgggcactttaccaaagcgggtgaaaattgtggaagttggtccccgagakggactacaaaatgaaaagaatatcgtatctactccagtgaaaatcaagctgatagacatgctttctgaagcaggactctctgttatagaaaccaccagct

SEQ ID NO: 79738 - DNA, 201 bp, Homo sapiens
ctccactgatgtgctcctctccatgtccggctacctgtcagcacctcatctatgggcactttaccaaagcgggtgaaaattgtggaagttggtccccgagrtggactacaaaatgaaaagaatatcgtatctactccagtgaaaatcaagctgatagacatgctttctgaagcaggactctctgttatagaaaccaccagc

SEQ ID NO: 79739 - DNA, 201 bp, Homo sapiens
cctccactgatgtgctcctctccatgtccggctacctgtcagcacctcatctatgggcactttaccaaagcgggtgaaaattgtggaagttggtccccgasatggactacaaaatgaaaagaatatcgtatctactccagtgaaaatcaagctgatagacatgctttctgaagcaggactctctgttatagaaaccaccag

SEQ ID NO: 79740 - DNA, 201 bp, Homo sapiens
ccaccctgccatggccgtggggcccttgctctctgacttctcaggacacaggtcatggaggttcttcccaagctggcagaggccatttgtggaaagtggaragctacgtggtggccatctgccaactccagcatctctggaaaatctccacgctgaatgtgatttttgaaaacagcttatgtaattaaaggttgaatggca

SEQ ID NO: 79741 - DNA, 180 bp, Homo sapiens
cttctcaggacacaggtcatggaggttcttcccaagctggcagaggccatttgtggaaagtggagagctacgtggtggccatctgccaactccagcatctytggaaaatctccacgctgaatgtgatttttgaaaacagcttatgtaattaaaggttgaatggcacatcataattccagc

SEQ ID NO: 79742 - DNA, 200 bp, Homo sapiens
gtggggcccttgctctctgacttctcaggacacaggtcatggaggttcttcccaagctggcagaggccatttgtggaaagtggagagctacgtggtggccrtctgccaactccagcatctctggaaaatctccacgctgaatgtgatttttgaaaacagcttatgtaattaaaggttgaatggcacatcataattccagc

SEQ ID NO: 79743 - DNA, 201 bp, Homo sapiens
ttcctggcatcaactacccagtcctgaccccaaatttgaaaggcttcgaggcagcggttgctgctggagccaaggaagtagtcatctttggagctgcctcrgagctcttcaccaagaagaacatcaattgttccatagaggagagttttcagaggtttgacgcaatcctgaaggcagcgcagtcagccaatatttctgtgc

SEQ ID NO: 79744 - DNA, 201 bp, Homo sapiens; identical to SEQ ID NO: 79734

SEQ ID NO: 79745 - DNA, 201 bp, Homo sapiens
ttgaatgcctgaggacgtgtgggaaccccgttccctacttagcatgatccttgagtctcctctctggatggaatccgcgagctggccacctggccaccctytacacggctccaccctgccatggccgtggggcccttgctctctgacttctcaggacacaggtcatggaggttcttcccaagctggcagaggccatttgtg

SEQ ID NO: 79746 - DNA, 179 bp, Homo sapiens; identical to SEQ ID NO: 79735

SEQ ID NO: 79747 - DNA, 201 bp, Homo sapiens
tagctgaggtcaccaagaagttctactcaatgggctgctacgagatctccctgggggacaccattggtgtgggcaccccagggatcatgaaagacatgctrtctgctgtcatgcaggaagtgcctctggctgccctggctgtccactgccatgacacctatggtcaagccctggccaacaccttgatggccctgcagatgg

SEQ ID NO: 79748 - DNA, 201 bp, Homo sapiens
cttccgcggcgactggtgggcttggcgtccctccgggctgtcagcacctcatctatgggcactttaccaaagcgggtgaaaattgtggaagttggtccccragatggactacaaaatgaaaagaatatcgtatctactccagtgaaaatcaagctgatagacatgctttctgaagcaggactctctgttatagaaaccacc

SEQ ID NO: 79749 - DNA, 201 bp, Homo sapiens
ttgacgcaatcctgaaggcagcgcagtcagccaatatttctgtgcgggggtacgtctcctgtgctcttggctgcccttatgaagggaagatctccccagcwaaagtagctgaggtcaccaagaagttctactcaatgggctgctacgagatctccctgggggacaccattggtgtgggcaccccagggatcatgaaagaca

SEQ ID NO: 79750 - DNA, 201 bp, Homo sapiens
cgcggcgactggtgggcttggcgtccctccgggctgtcagcacctcatctatgggcactttaccaaagcgggtgaaaattgtggaagttggtccccgagakggactacaaaatgaaaagaatatcgtatctactccagtgaaaatcaagctgatagacatgctttctgaagcaggactctctgttatagaaaccaccagct

SEQ ID NO: 79751 - DNA, 201 bp, Homo sapiens
ccgcggcgactggtgggcttggcgtccctccgggctgtcagcacctcatctatgggcactttaccaaagcgggtgaaaattgtggaagttggtccccgagrtggactacaaaatgaaaagaatatcgtatctactccagtgaaaatcaagctgatagacatgctttctgaagcaggactctctgttatagaaaccaccagc

SEQ ID NO: 79752 - DNA, 201 bp, Homo sapiens
tccgcggcgactggtgggcttggcgtccctccgggctgtcagcacctcatctatgggcactttaccaaagcgggtgaaaattgtggaagttggtccccgasatggactacaaaatgaaaagaatatcgtatctactccagtgaaaatcaagctgatagacatgctttctgaagcaggactctctgttatagaaaccaccag

SEQ ID NO: 79753 - DNA, 201 bp, Homo sapiens
cttgatggccctgcagatgggagtgagtgtcgtggactcttctgtggcaggacttggaggctgtccctacgcacagggggcatcaggaaacttggccacaraagacctggtctacatgctagagggcttgggcattcacacgggtgtgaatctccagaagcttctggaagctggaaactttatctgtcaagccctgaacag

SEQ ID NO: 79754 - DNA, 201 bp, Homo sapiens; identical to SEQ ID NO: 79740

SEQ ID NO: 79755 - DNA, 201 bp, Homo sapiens
aaacttggccacagaagacctggtctacatgctagagggcttgggcattcacacgggtgtgaatctccagaagcttctggaagctggaaactttatctgtyaagccctgaacagaaaaactagctccaaagtggctcaggctacctgtaaactctgagccccttgcccacctgaagccctggggatgatgtggaaataggg

SEQ ID NO: 79756 - DNA, 180 bp, Homo sapiens; identical to SEQ ID NO: 79741

SEQ ID NO: 79757 - DNA, 200 bp, Homo sapiens; identical to SEQ ID NO: 79742

SEQ ID NO: 79758 - DNA, 201 bp, Homo sapiens
tttgtggcatccagataggtggaatggtaacagtagcaactgtttcttgagagcagctgccctgctccaggtcttagcctcagttgccacaatccttgccrtatgaccaaagggtcatcaccatttttcagaagcagaaattgaagctcagaaaagtgaagttgcttgccaaggcccacagctagtgaacagcagaactag

SEQ ID NO: 79759 - DNA, 201 bp, Homo sapiens; identical to SEQ ID NO: 79743

SEQ ID NO: 79760 - DNA, 201 bp, Homo sapiens; identical to SEQ ID NO: 79734

SEQ ID NO: 79761 - DNA, 201 bp, Homo sapiens; identical to SEQ ID NO: 79748

SEQ ID NO: 79762 - DNA, 201 bp, Homo sapiens
ttgacgcaatcctgaaggcagcgcagtcagccaatatttctgtgcgggggtacgtctcctgtgctcttggctgcccttatgaagggaagatctccccagcwaaagtagctgaggtgtgtgcatgtgtcagggcggggggtttggtgagggttggccaccttgtctgcccctgagcgcataggttcctctccccaccctttc

SEQ ID NO: 79763 - DNA, 201 bp, Homo sapiens; identical to SEQ ID NO: 79750

SEQ ID NO: 79764 - DNA, 201 bp, Homo sapiens; identical to SEQ ID NO: 79751

SEQ ID NO: 79765 - DNA, 201 bp, Homo sapiens; identical to SEQ ID NO: 79752

SEQ ID NO: 79766 - DNA, 201 bp, Homo sapiens
tggacttactcttcaccagagcctagcaatagcaagatatttgaccaaaaacacagatttggctggaaacacagaaatggaacaatgtcatgttgatgctrttgtggacactctggatgatttcatgtcatgttttccttgggcagagaaaaagcaagatgtgaaagagcagatgttcaatgagctgctcacgtataatgc

SEQ ID NO: 79767 - DNA, 201 bp, Homo sapiens
ctggatgatttcatgtcatgttttccttgggcagagaaaaagcaagatgtgaaagagcagatgttcaatgagctgctcacgtataatgcgcctcatcttaygcaagacttggacacatatttaggggggagagaatggcttattggtaactctgtaacttgggcagacttctactgggagatttgcagtaccacacttttg

SEQ ID NO: 79768 - DNA, 201 bp, Homo sapiens
atttactgacatgaataaagttgttgtgatgagaaaaatgtagataccccagagatcaagagaaggagaagacaagccacagacttggagaaaatacttgyaaaacatgtatctgacaaaagactattattcaaaattatatagaactcataaaactcggctgactctcttttcggactcagcccacctgcacccaggtga

SEQ ID NO: 79769 - DNA, 201 bp, Homo sapiens
atgaataaagttgttgtgatgagaaaaatgtagataccccagagatcaagagaaggagaagacaagccacagacttggagaaaatacttgtaaaacatgtrtctgacaaaagactattattcaaaattatatagaactcataaaactcggctgactctcttttcggactcagcccacctgcacccaggtgaaataaacagc

SEQ ID NO: 79770 - DNA, 201 bp, Homo sapiens; identical to SEQ ID NO: 79766

SEQ ID NO: 79771 - DNA, 201 bp, Homo sapiens; identical to SEQ ID NO: 79767

SEQ ID NO: 79772 - DNA, 201 bp, Homo sapiens; identical to SEQ ID NO: 79768

SEQ ID NO: 79773 - DNA, 201 bp, Homo sapiens; identical to SEQ ID NO: 79769

SEQ ID NO: 79774 - DNA, 201 bp, Homo sapiens
gtgacagccagagaatgcccactgcctgtaacagccacctggagaacttcataaagatgtctcacagccctggggacacctgcccagtgggccccagcccyacagggactgggcaaagatgatgtttccagattacactccagcctgagtcagcacccctcctagcaacctgccttgggacttagaacaccgccgccccct

SEQ ID NO: 79775 - DNA, 201 bp, Homo sapiens
ggtccaggagctgctgccctcctcctttgggcctgaggacctgcagaagacccagtgacagccagagaatgcccactgcctgtaacagccacctggagaayttcataaagatgtctcacagccctggggacacctgcccagtgggccccagccctacagggactgggcaaagatgatgtttccagattacactccagcctg

SEQ ID NO: 79776 - DNA, 201 bp, Homo sapiens
actggcccgtgtacatgaccaagccggatggtacgtatattgtcatgacggtccaggagctgctgccctcctcctttgggcctgaggacctgcagaagacycagtgacagccagagaatgcccactgcctgtaacagccacctggagaacttcataaagatgtctcacagccctggggacacctgcccagtgggccccagc

SEQ ID NO: 79777 - DNA, 178 bp, Homo sapiens
gaggctcctctcctagaccctgcatcctgaaagctgcgtacctgagagcctgcggtctggctgcagggacacacccarggggaggagctgcaatcgtgtctggggccccagcccaggctggccggagctcctgtttccgctgctctgctgcctgcccggggtaccaacatggcccaga

SEQ ID NO: 79778 - DNA, 201 bp, Homo sapiens
gctgcctgcccggggtaccaacatggcccagaagcgtcctgcctgcaccctgaagcctgagtgtgtccagcagctgctggtttgctcccaggaggccaagmagtcagcctactgcccctacagtcactttcctgtgggggctgccctgctcacccaggaggggagaatcttcaaagggtgcaacatagaaaatgcctgcta

SEQ ID NO: 79779 - DNA, 154 bp, Homo sapiens
gaggctcctctcctagaccctgcatcctgaaagctgcgtacctgagagcctgckgtctggctgcagggacacacccaaggggaggagctgcaatcgtgtctggggccccagcccaggctggccggagctcctgtttccgctgctctgctgcctg

SEQ ID NO: 79780 - DNA, 201 bp, Homo sapiens
cagaagacccagtgacagccagagaatgcccactgcctgtaacagccacctggagaacttcataaagatgtctcacagccctggggacacctgcccagtgsgccccagccctacagggactgggcaaagatgatgtttccagattacactccagcctgagtcagcacccctcctagcaacctgccttgggacttagaacac

SEQ ID NO: 79781 - DNA, 182 bp, Homo sapiens
gaggctcctctcctagaccctgcatcctgaaagctgcgtacctgagagcctgcggtctggctgcagggacacacccaagggraggagctgcaatcgtgtctggggccccagcccaggctggccggagctcctgtttccgctgctctgctgcctgcccggggtaccaacatggcccagaagcg

SEQ ID NO: 79782 - DNA, 201 bp, Homo sapiens
cagcctactgcccctacagtcactttcctgtgggggctgccctgctcacccaggaggggagaatcttcaaagggtgcaacatagaaaatgcctgctacccrctgggcatctgtgctgaacggaccgctatccagaaggccgtctcagaagggtacaaggatttcagggcaattgctatcgccagtttggcaccaactggcc

SEQ ID NO: 79783 - DNA, 201 bp, Homo sapiens; identical to SEQ ID NO: 79774

SEQ ID NO: 79784 - DNA, 201 bp, Homo sapiens; identical to SEQ ID NO: 79775

SEQ ID NO: 79785 - DNA, 201 bp, Homo sapiens; identical to SEQ ID NO: 79776

SEQ ID NO: 79786 - DNA, 178 bp, Homo sapiens; identical to SEQ ID NO: 79777

SEQ ID NO: 79787 - DNA, 201 bp, Homo sapiens; identical to SEQ ID NO: 79778

SEQ ID NO: 79788 - DNA, 154 bp, Homo sapiens; identical to SEQ ID NO: 79779

SEQ ID NO: 79789 - DNA, 201 bp, Homo sapiens; identical to SEQ ID NO: 79780

SEQ ID NO: 79790 - DNA, 182 bp, Homo sapiens; identical to SEQ ID NO: 79781

SEQ ID NO: 79791 - DNA, 201 bp, Homo sapiens
cagcctactgcccctacagtcactttcctgtgggggctgccctgctcacccaggaggggagaatcttcaaagggtgcaacatagaaaatgcctgctacccrctgggcatctgtgctgaacggaccgctatccagaaggccgtctcagaagggtacaaggatttcagggcaattgctatcgccagtgacatgcaagatgatt

SEQ ID NO: 79792 - DNA, 201 bp, Homo sapiens
ggctagtatcaaagttgtggatttcctcactccctagccaagagtggcaaaattgggctttttagtggtgttggagttgacaagattgtacccatcatggwgttaatcaataatgttgccaaagcccatggtgcttaatctgggtttgctggtgtttttgagaggacctgtaagggcaatgacttatattatgaaatgact

SEQ ID NO: 79793 - DNA, 116 bp, Homo sapiens
taaaggatttcagcagattttgataggtgaacatgaccatctctcagaacgggccttcagtgatggaacccattgaagaaggtttggcagaagctgatacrctggctgaagagcac

SEQ ID NO: 79794 - DNA, 201 bp, Homo sapiens
cgggactgggtctgccccaacaggccgtgcattatccgcaacgctctgcagcactggccggccctccagaagtggtccctcccctatttcaggtgggagcygccctggggtcaggtgtgagcagtgattactggcatctgggcatgggctgagtgtccattcctctagagccacagtgggctccacagaggtgagtgtggc

SEQ ID NO: 79795 - DNA, 201 bp, Homo sapiens
aacctctactgcgtggtctcaggagagaagcatttcctgttccatccgcccagcgaccggcccttcatcccctatgagctgtacacgccggcaacctaccrgctaactgaagagggcacctttaaggtggtggatgaagaggccatggagaaggtgccctggatcccactggaccccttggcgccagacctagcacggtac

SEQ ID NO: 79796 - DNA, 201 bp, Homo sapiens
tgccctacctggacaaacccccaactccgctccacttctaccgggactgggtctgccccaacaggccgtgcattatccgcaacgctctgcagcactggccrgccctccagaagtggtccctcccctatttcaggtgggagctgccctggggtcaggtgtgagcagtgattactggcatctgggcatgggctgagtgtccat

SEQ ID NO: 79797 - DNA, 201 bp, Homo sapiens
ccgtgcgactgggcttcgggccctgtgcagaggagcaggccttcctgagcaggaggaagcaggtggtggccgcggccttgaggcaggccctgcagctggayggagacctgcaggaggatgagatcccagtggtagctattatggccactggtggtgggatccgggcaatgacttccctgtatgggcagctggctggcctga

SEQ ID NO: 79798 - DNA, 201 bp, Homo sapiens
cctgccccggagcccctgcggtgctgcactttcctctggtcagcgactccttccgggagtactcggcccctggggtccggcggacacccgaggaggcggcrgctggggaggtgaacctgtcttcatcggactctccctaccactacacgaaggtgacctacagccaggaggacgtggacaagctgctgcacctgacacatt

SEQ ID NO: 79799 - DNA, 201 bp, Homo sapiens
tgcaggatgcccccgaggagcaactaaaggcgccactgagtgccctgccctctggtcaagtggtgaggcttgtcttccccacgtcccaggagcccctgatragagtggagctgaaaaaagaagcaggactgagggagctggccgtgcgactgggcttcgggccctgtgcagaggagcaggccttcctgagcaggaggaagc

SEQ ID NO: 79800 - DNA, 201 bp, Homo sapiens
tgccctacctggacaaacccccaactccgctccacttctaccgggactgggtctgccccaacaggccgtgcattatccgcaacgctctgcagcactggccrgccctccagaagtggtccctcccctatttcagagccacagtgggctccacagaggtgagtgtggccgtgaccccagatggttacgcggatgccgtgagag

SEQ ID NO: 79801 - DNA, 201 bp, Homo sapiens
cccagtggtagctattatggccactggtggtgggatccgggcaatgacttccctgtatgggcagctggctggcctgaaggagctgggcctcttggattgcrtctcctacatcaccggggcctcgggctccacctgggccttggccaacctttatgaggacccagagtggtctcagaaggacctggcagggcccactgagtt

SEQ ID NO: 79802 - DNA, 201 bp, Homo sapiens
cccactgagttgctgaagacccaggtgaccaagaacaagctgggtgtgctggcccccagccagctgcagcggtaccggcaggagctggccgagcgtgcccrcttgggctacccaagctgcttcaccaacctgtgggccctcatcaacgaggcgctgctgcatgatgagccccatgatcacaagctctcagatcaacgggag

SEQ ID NO: 79803 - DNA, 201 bp, Homo sapiens
ccccagccagctgcagcggtaccggcaggagctggccgagcgtgcccgcttgggctacccaagctgcttcaccaacctgtgggccctcatcaacgaggcgytgctgcatgatgagccccatgatcacaagctctcagatcaacgggaggccctgagtcatggccagaaccctctgcccatctactgtgccctcaacaccaa

SEQ ID NO: 79804 - DNA, 201 bp, Homo sapiens
aacctctactgcgtggtctcaggagagaagcatttcctgttccatccgcccagcgaccggcccttcatcccctatgagctgtacacgccggcaacctaccrgctaactgaagagggcacctttaaggtggtggatgaagaggccatggagaaggcagaggtgtccaggacctgcctgctcacggttcgtgtcctgcaggcc

SEQ ID NO: 79805 - DNA, 201 bp, Homo sapiens
agagcctgaccacttttgaatttggggagtggtgcgagttctctccctacgaggtcggcttccccaagtacggggccttcatcccctctgagctctttggstccgagttctttatggggcagctgatgaagaggcttcctgagtcccgcatctgcttcttagaaggtatctggagcaacctgtatgcagccaacctccagg

SEQ ID NO: 79806 - DNA, 201 bp, Homo sapiens
gtgagggtccgcaggaggcctctgtgggcactggcaccttccgcttccactgcccagcctgctgggagcaggagctgagtattcgcctgcaggatgccccygaggagcaactaaaggcgccactgagtgccctgccctctggtcaagtggtgaggcttgtcttccccacgtcccaggagcccctgatgagagtggagctga

SEQ ID NO: 79807 - DNA, 201 bp, Homo sapiens
accgatcttctgacgtggcgtccactggcccaggccacacataatttcctgcgtggcctccatttccacaaagactactttcagcatcctcacttctccayatggaaagctaccactctggatgggctccccaaccagctgacaccctcggagccccacctgtgcctgctggatgttggctacctcatcaataccagctgc

SEQ ID NO: 79808 - DNA, 201 bp, Homo sapiens
ccgatcttctgacgtggcgtccactggcccaggccacacataatttcctgcgtggcctccatttccacaaagactactttcagcatcctcacttctccacmtggaaagctaccactctggatgggctccccaaccagctgacaccctcggagccccacctgtgcctgctggatgttggctacctcatcaataccagctgcc

SEQ ID NO: 79809 - DNA, 201 bp, Homo sapiens
ggcccctgccacccctaactctcattcattccctggctgctgagttgcaggtgggaactgtcatcacgcagtgcttcagagcctcgggctcaggtggcackgtcccagggtccaggctgagggctgggagctcccttgcgcctcagcagtttgcagtggggtaaggaggccaagcccatttgtgtaatcacccaaaacccc

SEQ ID NO: 79810 - DNA, 201 bp, Homo sapiens
acctggtgaccggagatgaccctgtgttgtcagtactgtttgatgcggggactctgcgggctggggagttccggcgcgagagcttctcactgagccctcargcaaggcgggtgaggggcgcctggaagttgaatttcgcctgcagagtctggctgaccgtggcgagtggctcgtcagcaatggcgttctggtggcccggga

SEQ ID NO: 79811 - DNA, 201 bp, Homo sapiens
ggagacaggagaccagaagtcctcagagcacagagttcagcttgtggttcctgggtcctgtgagggtccgcaggaggcctctgtgggcactggcaccttcygcttccactgcccagcctgctgggagcaggagctgagtattcgcctgcaggatgcccccgaggagcaactaaaggcgccactgagtgccctgccctctgg

SEQ ID NO: 79812 - DNA, 201 bp, Homo sapiens
agctcctgggccggttctgccaggagcaggggatcccgttcccacccatctcgcccagccccgaagagcagctccagcctcgggagtgccacaccttctcygaccccacctgccccggagcccctgcggtgctgcactttcctctggtcagcgactccttccgggagtactcggcccctggggtccggcggacacccgagg

SEQ ID NO: 79813 - DNA, 201 bp, Homo sapiens
ccagccagttctgggaccgctgggtcaggaaccaggccaacctggacaaggagcaggtcccccttctgaagatagaagaaccaccctcaacagccggcagratagctgagtttttcaccgatcttctgacgtggcgtccactggcccaggccacacataatttcctgcgtggcctccatttccacaaagactactttcagc

SEQ ID NO: 79814 - DNA, 201 bp, Homo sapiens; identical to SEQ ID NO: 79797

SEQ ID NO: 79815 - DNA, 201 bp, Homo sapiens; identical to SEQ ID NO: 79798

SEQ ID NO: 79816 - DNA, 201 bp, Homo sapiens; identical to SEQ ID NO: 79799

SEQ ID NO: 79817 - DNA, 201 bp, Homo sapiens; identical to SEQ ID NO: 79800

SEQ ID NO: 79818 - DNA, 201 bp, Homo sapiens; identical to SEQ ID NO: 79801

SEQ ID NO: 79819 - DNA, 201 bp, Homo sapiens; identical to SEQ ID NO: 79802

SEQ ID NO: 79820 - DNA, 201 bp, Homo sapiens; identical to SEQ ID NO: 79803

SEQ ID NO: 79821 - DNA, 201 bp, Homo sapiens; identical to SEQ ID NO: 79804

SEQ ID NO: 79822 - DNA, 201 bp, Homo sapiens; identical to SEQ ID NO: 79805

SEQ ID NO: 79823 - DNA, 201 bp, Homo sapiens; identical to SEQ ID NO: 79807

SEQ ID NO: 79824 - DNA, 201 bp, Homo sapiens; identical to SEQ ID NO: 79806

SEQ ID NO: 79825 - DNA, 201 bp, Homo sapiens; identical to SEQ ID NO: 79808

SEQ ID NO: 79826 - DNA, 201 bp, Homo sapiens; identical to SEQ ID NO: 79809

SEQ ID NO: 79827 - DNA, 201 bp, Homo sapiens
acctggtgaccggagatgaccctgtgttgtcagtactgtttgatgcggggactctgcgggctggggagttccggcgcgagagcttctcactgagccctcarggtgaggggcgcctggaagttgaatttcgcctgcagagtctggctgaccgtggcgagtggctcgtcagcaatggcgttctggtggcccgggagctctcct

SEQ ID NO: 79828 - DNA, 201 bp, Homo sapiens; identical to SEQ ID NO: 79811

SEQ ID NO: 79829 - DNA, 201 bp, Homo sapiens; identical to SEQ ID NO: 79812

SEQ ID NO: 79830 - DNA, 201 bp, Homo sapiens; identical to SEQ ID NO: 79813

SEQ ID NO: 79831 - DNA, 201 bp, Homo sapiens
gagtattacagcaaagtgtgctgcaaggaggctactccagcacaatggcaggcactgcttcccaggcatatggacaattctgggaggtggccagggtcagyacctgataactagtaagtgtctcaatctcagcatacaaaatttagcagtgactacaaaagaagttggaattttctaaaatgtttgtattcaagaaggaaa

SEQ ID NO: 79832 - DNA, 150 bp, Homo sapiens
accgggcgggcggccggcgctggggcccgggacggggtcggggcccgggmccgggccgaagcggcggcggcggcggcgctggcagtcctctccggcgggagtccgccgcccgcaccgggccagccagcgagcccggcggcggcggcggcg

SEQ ID NO: 79833 - DNA, 201 bp, Homo sapiens
tatctacttttggaaatgcaggaagttcccaccttgactatcccaaagattctgatttgatggaagcatttcattgtaatcagacccaagtcaacagatayaagatttccttactgaaaccctctacaaaggcattagtcctatcttgtaaggtatctattcggacagataacagaggcttcctttcattacagtatatga

SEQ ID NO: 79834 - DNA, 201 bp, Homo sapiens
atacaaaaaattagccggacgtggtggcacatgcctgtaatgccagctactcgggaggctgaggcaggagaattgcttgaacccgggaggcggaggttgtrgtgagctgagatgacgccattgcactccagcctaggcaataagagcaaaactctgcctcaaaaaaaaaaaaaaaaaaagtctaaaggcttaaagtttgat

SEQ ID NO: 79835 - DNA, 201 bp, Homo sapiens
tctactaaaaatacaaaaaattagccggacgtggtggcacatgcctgtaatgccagctactcgggaggctgaggcaggagaattgcttgaacccgggaggyggaggttgtggtgagctgagatgacgccattgcactccagcctaggcaataagagcaaaactctgcctcaaaaaaaaaaaaaaaaaaagtctaaaggctt

SEQ ID NO: 79836 - DNA, 201 bp, Homo sapiens
cggcacgcgcggctctctaggcctccttcagctctgtggtgacggtggccgaggtggagggccggtctgaagagtggcgggactggcttcacttcctccgyggttcctcggagccgcctcgctcctcttcagggactttgctgagaagggctctcgggcgtccagaccccaccgcaaaggtgtttggcgatccgccgagaa

SEQ ID NO: 79837 - DNA, 201 bp, Homo sapiens
ataattgtgagtcagcgtaacatttcaagagtctaaaggtggccgggtgtggtggctttaatcccagcactttgggaagccgaggtgggcggatcacctgrggtcaggagttcgagaccagcctgaccaacgtggagaaaccccatctctactaaaaatacaaaaaattagccggacgtggtggcacatgcctgtaatgcc

SEQ ID NO: 79838 - DNA, 201 bp, Homo sapiens
aattctagagactagatcttaaagtagtggttctcaaagtgttgtgcccgcaccaacatcagaatggcctgcaaacttgtagcaaactctggggaggaggscagcattctgtattttaacaagcttccctcaggagattctgatgcctgctaaattttgggaaccactgttttaaaggaaactttttttttctttaatagc

SEQ ID NO: 79839 - DNA, 201 bp, Homo sapiens
aactaaaaatggtatcaaagtaacagtggaaaatgcaaagtgtgtgcaagcaaatgcttttattcagggactttaactgcacttcgaatgtgttaccaagrttatggttaccctttgatgctgttcctggaagaaggaggagtggtgacagtctgcaaaatcaatacacaggaacctgaggagaccctggactttgatttc

SEQ ID NO: 79840 - DNA, 201 bp, Homo sapiens
tcatttccgagaacatgccacgtgtttcgcaactaaaaatggtatcaaagtaacagtggaaaatgcaaagtgtgtgcaagcaaatgcttttattcagggastttaactgcacttcgaatgtgttaccaaggttatggttaccctttgatgctgttcctggaagaaggaggagtggtgacagtctgcaaaatcaatacacag

SEQ ID NO: 79841 - DNA, 201 bp, Homo sapiens
acgatgccccttctgacccaacagatccaagacgaggatgatcagtacagccttgtggccagccttgacaacgttaggaatctctccactatcttgaaagstattcatttccgagaacatgccacgtgtttcgcaactaaaaatggtatcaaagtaacagtggaaaatgcaaagtgtgtgcaagcaaatgcttttattcag

SEQ ID NO: 79842 - DNA, 201 bp, Homo sapiens
atgccacgtgtttcgcaactaaaaatggtatcaaagtaacagtggaaaatgcaaagtgtgtgcaagcaaatgcttttattcagggactttaactgcacttygaatgtgttaccaaggttatggttaccctttgatgctgttcctggaagaaggaggagtggtgacagtctgcaaaatcaatacacaggaacctgaggagac

SEQ ID NO: 79843 - DNA, 201 bp, Homo sapiens
actgatatttatgtgtacatttatgatagatgaagttcttattctgagtacagtactctttgtcatttcatattggattttctatagagaagaagcacaayggggaagataggagcaaggtcatgtaccctaatagttactatgttttgtaaatccattttgtagagggcatgtaaataaatgttttcctgtagtcataga

SEQ ID NO: 79844 - DNA, 201 bp, Homo sapiens
agaggcttcctttcattacagtatatgattagaaatgaagatggacaaatatgttttgtggaatattactgctgccctgatgaagaagttcctgaatctgrgtcttgagtatgacaattcactgatatttatgtgtacatttatgatagatgaagttcttattctgagtacagtactctttgtcatttcatattggatttt

SEQ ID NO: 79845 - DNA, 201 bp, Homo sapiens
gaagcatttcattgtaatcagacccaagtcaacagatacaagatttccttactgaaaccctctacaaaggcattagtcctatcttgtaaggtatctattcsgacagataacagaggcttcctttcattacagtatatgattagaaatgaagatggacaaatatgttttgtggaatattactgctgccctgatgaagaagtt

SEQ ID NO: 79846 - DNA, 201 bp, Homo sapiens; identical to SEQ ID NO: 79831

SEQ ID NO: 79847 - DNA, 201 bp, Homo sapiens; identical to SEQ ID NO: 79833

SEQ ID NO: 79848 - DNA, 201 bp, Homo sapiens; identical to SEQ ID NO: 79834

SEQ ID NO: 79849 - DNA, 201 bp, Homo sapiens; identical to SEQ ID NO: 79835

SEQ ID NO: 79850 - DNA, 201 bp, Homo sapiens; identical to SEQ ID NO: 79836

SEQ ID NO: 79851 - DNA, 201 bp, Homo sapiens; identical to SEQ ID NO: 79837

SEQ ID NO: 79852 - DNA, 201 bp, Homo sapiens; identical to SEQ ID NO: 79838

SEQ ID NO: 79853 - DNA, 201 bp, Homo sapiens
acttttcgaattaatttaactgtccttttagactgtttatctatttttggatcaagtcctatgccagggactttaactgcacttcgaatgtgttaccaagrttatggttaccctttgatgctgttcctggaagaaggaggagtggtgacagtctgcaaaatcaatacacaggaacctgaggagaccctggactttgatttc

SEQ ID NO: 79854 - DNA, 201 bp, Homo sapiens
caggagtttaaagttcaggaagagtctgttacttttcgaattaatttaactgtccttttagactgtttatctatttttggatcaagtcctatgccagggastttaactgcacttcgaatgtgttaccaaggttatggttaccctttgatgctgttcctggaagaaggaggagtggtgacagtctgcaaaatcaatacacag

SEQ ID NO: 79855 - DNA, 201 bp, Homo sapiens; identical to SEQ ID NO: 79841

SEQ ID NO: 79856 - DNA, 201 bp, Homo sapiens
tcaggaagagtctgttacttttcgaattaatttaactgtccttttagactgtttatctatttttggatcaagtcctatgccagggactttaactgcacttygaatgtgttaccaaggttatggttaccctttgatgctgttcctggaagaaggaggagtggtgacagtctgcaaaatcaatacacaggaacctgaggagac

SEQ ID NO: 79857 - DNA, 201 bp, Homo sapiens; identical to SEQ ID NO: 79843

SEQ ID NO: 79858 - DNA, 201 bp, Homo sapiens; identical to SEQ ID NO: 79844

SEQ ID NO: 79859 - DNA, 201 bp, Homo sapiens; identical to SEQ ID NO: 79845

SEQ ID NO: 79860 - DNA, 146 bp, Homo sapiens
ggcgggcggccggcgctggggcccgggacggggtcggggcccgggmccgggccgaagcggcggcggcggcggcgctggcagtcctctccggcgggagtccgccgcccgcaccgggccagccagcgagcccggcggcggcggcggcg

SEQ ID NO: 79861 - DNA, 201 bp, Homo sapiens; identical to SEQ ID NO: 79833

SEQ ID NO: 79862 - DNA, 201 bp, Homo sapiens
tagattgtctctcctttcattgcactgagaatgctattccagaacttaaatttcatgttattatttcttcatgttttctcttacactagaatgttgtcccyttaagattaatgaccatgttttatttatctttattaccacctgcagctctaactgcacctggcacttagtaggtgctcaaaaaatgtttgttaaaggaat

SEQ ID NO: 79863 - DNA, 201 bp, Homo sapiens; identical to SEQ ID NO: 79853

SEQ ID NO: 79864 - DNA, 201 bp, Homo sapiens; identical to SEQ ID NO: 79854

SEQ ID NO: 79865 - DNA, 201 bp, Homo sapiens; identical to SEQ ID NO: 79841

SEQ ID NO: 79866 - DNA, 201 bp, Homo sapiens; identical to SEQ ID NO: 79856

SEQ ID NO: 79867 - DNA, 201 bp, Homo sapiens
agaggcttcctttcattacagtatatgattagaaatgaagatggacaaatatgttttgtggaatattactgctgccctgatgaagaagttcctgaatctgrgtcttgagagacagtcttgctctgttgcccaggctgtagtgcagtggcacaatctcggctcactgcaacctccacctcccaggtcaagcaattctcctgc

SEQ ID NO: 79868 - DNA, 201 bp, Homo sapiens; identical to SEQ ID NO: 79845

SEQ ID NO: 79869 - DNA, 201 bp, Homo sapiens; identical to SEQ ID NO: 79831

SEQ ID NO: 79870 - DNA, 150 bp, Homo sapiens; identical to SEQ ID NO: 79832

SEQ ID NO: 79871 - DNA, 201 bp, Homo sapiens; identical to SEQ ID NO: 79833

SEQ ID NO: 79872 - DNA, 201 bp, Homo sapiens; identical to SEQ ID NO: 79834

SEQ ID NO: 79873 - DNA, 201 bp, Homo sapiens; identical to SEQ ID NO: 79835

SEQ ID NO: 79874 - DNA, 201 bp, Homo sapiens; identical to SEQ ID NO: 79836

SEQ ID NO: 79875 - DNA, 201 bp, Homo sapiens; identical to SEQ ID NO: 79837

SEQ ID NO: 79876 - DNA, 201 bp, Homo sapiens; identical to SEQ ID NO: 79838

SEQ ID NO: 79877 - DNA, 201 bp, Homo sapiens; identical to SEQ ID NO: 79843

SEQ ID NO: 79878 - DNA, 201 bp, Homo sapiens; identical to SEQ ID NO: 79844

SEQ ID NO: 79879 - DNA, 201 bp, Homo sapiens; identical to SEQ ID NO: 79845

SEQ ID NO: 79880 - DNA, 146 bp, Homo sapiens; identical to SEQ ID NO: 79860

SEQ ID NO: 79881 - DNA, 201 bp, Homo sapiens; identical to SEQ ID NO: 79833

SEQ ID NO: 79882 - DNA, 201 bp, Homo sapiens; identical to SEQ ID NO: 79862

SEQ ID NO: 79883 - DNA, 201 bp, Homo sapiens; identical to SEQ ID NO: 79853

SEQ ID NO: 79884 - DNA, 201 bp, Homo sapiens; identical to SEQ ID NO: 79854

SEQ ID NO: 79885 - DNA, 201 bp, Homo sapiens; identical to SEQ ID NO: 79841

SEQ ID NO: 79886 - DNA, 201 bp, Homo sapiens; identical to SEQ ID NO: 79856

SEQ ID NO: 79887 - DNA, 201 bp, Homo sapiens; identical to SEQ ID NO: 79867

SEQ ID NO: 79888 - DNA, 201 bp, Homo sapiens; identical to SEQ ID NO: 79845

SEQ ID NO: 79889 - DNA, 201 bp, Homo sapiens; identical to SEQ ID NO: 79834

SEQ ID NO: 79890 - DNA, 201 bp, Homo sapiens; identical to SEQ ID NO: 79835

SEQ ID NO: 79891 - DNA, 201 bp, Homo sapiens; identical to SEQ ID NO: 79853

SEQ ID NO: 79892 - DNA, 201 bp, Homo sapiens; identical to SEQ ID NO: 79841

SEQ ID NO: 79893 - DNA, 201 bp, Homo sapiens; identical to SEQ ID NO: 79843

SEQ ID NO: 79894 - DNA, 201 bp, Homo sapiens; identical to SEQ ID NO: 79856

SEQ ID NO: 79895 - DNA, 201 bp, Homo sapiens; identical to SEQ ID NO: 79844

SEQ ID NO: 79896 - DNA, 201 bp, Homo sapiens; identical to SEQ ID NO: 79831

SEQ ID NO: 79897 - DNA, 201 bp, Homo sapiens; identical to SEQ ID NO: 79833

SEQ ID NO: 79898 - DNA, 201 bp, Homo sapiens; identical to SEQ ID NO: 79836

SEQ ID NO: 79899 - DNA, 137 bp, Homo sapiens
cgatctctatggttcggcggctctaagcgctcagctycgcggtcgtcctccaggtctgtgccgcctccttccggtctcggtggcgcggcacgcgcggctctctaggcctccttcagctctgtggtgacggtggccga

SEQ ID NO: 79900 - DNA, 136 bp, Homo sapiens
cgatctctatggttcggcggctctaagcgctcagcyccgcggtcgtcctccaggtctgtgccgcctccttccggtctcggtggcgcggcacgcgcggctctctaggcctccttcagctctgtggtgacggtggccg

SEQ ID NO: 79901 - DNA, 201 bp, Homo sapiens; identical to SEQ ID NO: 79854

SEQ ID NO: 79902 - DNA, 201 bp, Homo sapiens; identical to SEQ ID NO: 79838

SEQ ID NO: 79903 - DNA, 201 bp, Homo sapiens; identical to SEQ ID NO: 79837

SEQ ID NO: 79904 - DNA, 201 bp, Homo sapiens; identical to SEQ ID NO: 79845

SEQ ID NO: 79905 - DNA, 201 bp, Homo sapiens; identical to SEQ ID NO: 79831

SEQ ID NO: 79906 - DNA, 150 bp, Homo sapiens; identical to SEQ ID NO: 79832

SEQ ID NO: 79907 - DNA, 201 bp, Homo sapiens; identical to SEQ ID NO: 79833

SEQ ID NO: 79908 - DNA, 201 bp, Homo sapiens; identical to SEQ ID NO: 79834

SEQ ID NO: 79909 - DNA, 201 bp, Homo sapiens; identical to SEQ ID NO: 79835

SEQ ID NO: 79910 - DNA, 201 bp, Homo sapiens; identical to SEQ ID NO: 79836

SEQ ID NO: 79911 - DNA, 201 bp, Homo sapiens; identical to SEQ ID NO: 79837

SEQ ID NO: 79912 - DNA, 201 bp, Homo sapiens; identical to SEQ ID NO: 79838

SEQ ID NO: 79913 - DNA, 201 bp, Homo sapiens; identical to SEQ ID NO: 79853

SEQ ID NO: 79914 - DNA, 201 bp, Homo sapiens; identical to SEQ ID NO: 79854

SEQ ID NO: 79915 - DNA, 201 bp, Homo sapiens; identical to SEQ ID NO: 79841

SEQ ID NO: 79916 - DNA, 201 bp, Homo sapiens; identical to SEQ ID NO: 79856

SEQ ID NO: 79917 - DNA, 201 bp, Homo sapiens; identical to SEQ ID NO: 79843

SEQ ID NO: 79918 - DNA, 201 bp, Homo sapiens; identical to SEQ ID NO: 79844

SEQ ID NO: 79919 - DNA, 201 bp, Homo sapiens; identical to SEQ ID NO: 79845

SEQ ID NO: 79920 - DNA, 201 bp, Homo sapiens; identical to SEQ ID NO: 79831

SEQ ID NO: 79921 - DNA, 201 bp, Homo sapiens; identical to SEQ ID NO: 79833

SEQ ID NO: 79922 - DNA, 201 bp, Homo sapiens; identical to SEQ ID NO: 79834

SEQ ID NO: 79923 - DNA, 201 bp, Homo sapiens; identical to SEQ ID NO: 79835

SEQ ID NO: 79924 - DNA, 201 bp, Homo sapiens; identical to SEQ ID NO: 79836

SEQ ID NO: 79925 - DNA, 201 bp, Homo sapiens; identical to SEQ ID NO: 79837

SEQ ID NO: 79926 - DNA, 201 bp, Homo sapiens; identical to SEQ ID NO: 79838

SEQ ID NO: 79927 - DNA, 201 bp, Homo sapiens; identical to SEQ ID NO: 79839

SEQ ID NO: 79928 - DNA, 201 bp, Homo sapiens; identical to SEQ ID NO: 79840

SEQ ID NO: 79929 - DNA, 201 bp, Homo sapiens; identical to SEQ ID NO: 79841

SEQ ID NO: 79930 - DNA, 201 bp, Homo sapiens; identical to SEQ ID NO: 79842

SEQ ID NO: 79931 - DNA, 201 bp, Homo sapiens; identical to SEQ ID NO: 79843

SEQ ID NO: 79932 - DNA, 201 bp, Homo sapiens; identical to SEQ ID NO: 79844

SEQ ID NO: 79933 - DNA, 201 bp, Homo sapiens; identical to SEQ ID NO: 79845

SEQ ID NO: 79934 - DNA, 201 bp, Homo sapiens
ggcagtaatagcagcaatattcagtgaccacttcctgttcactttttttttttttttttttttttttttttgagctgcggggcatgatggggattgctgcrtatcagcagttggatgttcttgcctctgacagtagcttatttgctctgggggccaggaattggattcagtttacactatcattaaaaaagagggagagag

SEQ ID NO: 79935 - DNA, 201 bp, Homo sapiens
aaatgatgtacaaactaaggactatttattgataatgttttgctactcttgtcagacaatggctataaactgaattaggcagtcttaaaaaaaaaaaaaaacagaaaaagaaaaaaaagaacgttgcaaatttgttaaaatgccaaaaaggacagtttaattttgtacagattatgcttacctcaggtttctttagtgtgc

SEQ ID NO: 79936 - DNA, 201 bp, Homo sapiens
caatggcagtaatagcagcaatattcagtgaccacttcctgttcactttttttttttttttttttttttttttttgagctgcggggcatgatggggattgytgcatatcagcagttggatgttcttgcctctgacagtagcttatttgctctgggggccaggaattggattcagtttacactatcattaaaaaagagggag

SEQ ID NO: 79937 - DNA, 201 bp, Homo sapiens
ttatgaaggagggaaggctggaagagagtgttgcattgagaataataacagagggtgcatcaattcttcgacaggaaaaaaatttgctggatattgatgcrccagtcactgtttgtggggacattcatggacaattctttgatttgatgaagctctttgaagtcgggggatctcctgccaacactcgctacctcttcttag

SEQ ID NO: 79938 - DNA, 183 bp, Homo sapiens
caacttactagagtgatgatgtgaaagaaatggtgattctggtatcatggtgtttattttctttcttataactgcagagaaaatatcctgactaaaaaaawttcatttttttggattcctttcttttacaaattgtgctgaggcaactatggcatagaaataaacatttgacattaaaataag

SEQ ID NO: 79939 - DNA, 201 bp, Homo sapiens
ttctaggtgctggcccaccaccacacatcacaggctgatttccacaggcttcttcctaggggcctcgtgatctgaggggtggtgcctacttccactgtaaraaagaatcttggtggatttgtgtctcaaatcagataagagaagcctgtttaaagagcagatgccatcttctggcttcctcaaggagccagttaaaaaacc

SEQ ID NO: 79940 - DNA, 201 bp, Homo sapiens
tactactcaataaaatgtgcatgaacttacagaattctcatccttccactgagtccgctgaagggatttatgtgcacaaccaccatgtgtcttctaggtgstggcccaccaccacacatcacaggctgatttccacaggcttcttcctaggggcctcgtgatctgaggggtggtgcctacttccactgtaagaaagaatct

SEQ ID NO: 79941 - DNA, 201 bp, Homo sapiens; identical to SEQ ID NO: 79934

SEQ ID NO: 79942 - DNA, 201 bp, Homo sapiens; identical to SEQ ID NO: 79935

SEQ ID NO: 79943 - DNA, 201 bp, Homo sapiens; identical to SEQ ID NO: 79936

SEQ ID NO: 79944 - DNA, 201 bp, Homo sapiens; identical to SEQ ID NO: 79937

SEQ ID NO: 79945 - DNA, 183 bp, Homo sapiens; identical to SEQ ID NO: 79938

SEQ ID NO: 79946 - DNA, 201 bp, Homo sapiens; identical to SEQ ID NO: 79939

SEQ ID NO: 79947 - DNA, 201 bp, Homo sapiens; identical to SEQ ID NO: 79940

SEQ ID NO: 79948 - DNA, 201 bp, Homo sapiens; identical to SEQ ID NO: 79937

SEQ ID NO: 79949 - DNA, 201 bp, Homo sapiens
ggttaccagcactgtggaaaagataaaaatatatactctggaagagcatgatgttttatctgtttgggttgaaaagcacgtgggaagtccagcacatttgrcttatcgtctcttgtctgactttacaaagcgacctttgtgggacccccattttgtgtcctgtgaagtcatagactgggtgagtgaagatgatcagctgta

SEQ ID NO: 79950 - DNA, 201 bp, Homo sapiens
caatacatttcagacctgtgttgaagttggagttcgcgtggaggcctttgactgtcaggaatgggccgagggccgagggcgtcacatcaacagtgcttttstcatttacaatgctgctgatgataaggaaaatctcatcacgtttcccagaatccaacccatttcaaaggatgatttcagacgctatcggggagctattgc

SEQ ID NO: 79951 - DNA, 201 bp, Homo sapiens
gatttggattagcattaaaagagctttagaattctgttgtaagtcatctgtggctctgcctcttccaggggcacagatagtggaaaattgcctgtatgcartactatgtgttctataaaatggcatgaatttagtttaaattatcgtaaacatttttaggttacagaggtgaaacatgcattctgtgtgaaattccaaaaa

SEQ ID NO: 79952 - DNA, 201 bp, Homo sapiens
tcacggaaatacatttggtggccagattatggcgtggatggagacagtggctactatttctgcaagccgcctgtgttgggctcatccctttctgaagtccrtagatatgtttaagttccggggaccatctacagttggagatcgtcttgtcttcactgccattgtcaacaatacatttcagacctgtgttgaagttggagt

SEQ ID NO: 79953 - DNA, 201 bp, Homo sapiens; identical to SEQ ID NO: 79949

SEQ ID NO: 79954 - DNA, 201 bp, Homo sapiens; identical to SEQ ID NO: 79950

SEQ ID NO: 79955 - DNA, 201 bp, Homo sapiens; identical to SEQ ID NO: 79951

SEQ ID NO: 79956 - DNA, 201 bp, Homo sapiens; identical to SEQ ID NO: 79952

SEQ ID NO: 79957 - DNA, 201 bp, Homo sapiens
gtggtcctgctggagaaatcagagctcacggctggatctacctggcacgcagcaggtttaacaacttactttcatcctggaataaacttgaagaaaatacrttatgatagcatcaaactttatgagaaactggaagaagaaactgggcaggtggtgggattccatcagccaggtagtatcagacttgctaccacccctgta

SEQ ID NO: 79958 - DNA, 201 bp, Homo sapiens
gttatcctaaagaagaacggtttgctgggaggccgactcaacgagtcagtgggctctatcaaaggctggagtctaagtgttccatggggttccatgctggytgggagcagccgcactggttctacaaaccaggccaggacactcagtacaggccaagttttcgccgcacaaactggtttgagcctgtgggctcggagtata

SEQ ID NO: 79959 - DNA, 201 bp, Homo sapiens
gaatgctgcaggattttgggctcgtgaagtaggtaaaatgattggactagaacatcctctcattccggttcaacatcaatatgttgttacatcgactatayctgaagtgaaagctttgaaacgagaactccctgtgctccgtgacctggaaggatcatattatctccgacaggaaagggatgggcttttgtttggtccata

SEQ ID NO: 79960 - DNA, 201 bp, Homo sapiens
taggtaaaatgattggactagaacatcctctcattccggttcaacatcaatatgttgttacatcgactatacctgaagtgaaagctttgaaacgagaactscctgtgctccgtgacctggaaggatcatattatctccgacaggaaagggatgggcttttgtttggtccatatgaaagtcaagagaaaatgaaagttcagg

SEQ ID NO: 79961 - DNA, 201 bp, Homo sapiens
tacaaaccaggccaggacactcagtacaggccaagttttcgccgcacaaactggtttgagcctgtgggctcggagtataaacaggttatgcaaagagtagsggtaactgacctatcaccatttggcaagtttaacatcaaaggccaagattccattagactactggaccatctctttgcaaatgtcattccaaaggtgggt

SEQ ID NO: 79962 - DNA, 201 bp, Homo sapiens
acgcagcaggtttaacaacttactttcatcctggaataaacttgaagaaaatacattatgatagcatcaaactttatgagaaactggaagaagaaactggkcaggtggtgggattccatcagccaggtagtatcagacttgctaccacccctgtaagggtagatgaatttaaatatcaaatgactcggactggctggcatg

SEQ ID NO: 79963 - DNA, 201 bp, Homo sapiens
gtctggctttcgcatatgtccctgtacaactaagtgaagtgggacagcaagtggaagttgaactattaggcaaaaattacccagcagtcatcatacaagarcctttggtattgaccgaaccaaccagaaaccggcttcagaaaaaaggtggaaaggacaaaacttgaaaaaagaccttcagcagtcaactgaattagagtt

SEQ ID NO: 79964 - DNA, 201 bp, Homo sapiens
caaaggtggatatgatgttgaaattaaaaacataactgatgagcttggagttcttggagttgctgggccacaggcaagaaaggtccttcagaaactgaccyctgaagatcttagtgatgatgttttcaagtttcttcaaaccaagtccttaaaggtttccaacattcctgtcactgctattaggatatcttatactggtga

SEQ ID NO: 79965 - DNA, 201 bp, Homo sapiens; identical to SEQ ID NO: 79961

SEQ ID NO: 79966 - DNA, 201 bp, Homo sapiens; identical to SEQ ID NO: 79957

SEQ ID NO: 79967 - DNA, 201 bp, Homo sapiens; identical to SEQ ID NO: 79958

SEQ ID NO: 79968 - DNA, 201 bp, Homo sapiens; identical to SEQ ID NO: 79959

SEQ ID NO: 79969 - DNA, 201 bp, Homo sapiens; identical to SEQ ID NO: 79960

SEQ ID NO: 79970 - DNA, 201 bp, Homo sapiens; identical to SEQ ID NO: 79962

SEQ ID NO: 79971 - DNA, 201 bp, Homo sapiens; identical to SEQ ID NO: 79964

SEQ ID NO: 79972 - DNA, 201 bp, Homo sapiens
actggttccctccaccgtctcaatacaatgtttctgagataccctcatcagacccaccaaccaagaccctctggctctttgatattgatcgggaccctgargaaagacatgacctgtccagagaatatcctcacatcgtcacaaagctcctgtcccgcctacagttctaccataaacactcagtccccgtgtacttccctg

SEQ ID NO: 79973 - DNA, 201 bp, Homo sapiens
cgcaaatgaagggagcagacagtgattaatggttctgttggccaaggcttctccctgtcggtgaaggatcatgttcaggcactccaagtgaaccacccctyttggttcaccccttactcacttatctcatcacagagcataaggcccattttgttgttcaggtcaacagcaaaatgcctgcaccatgactgtggcttttaa

SEQ ID NO: 79974 - DNA, 201 bp, Homo sapiens
ccgccgaggatttgatacctactttggatatctcctgggtagtgaagattattattcccatgaacgctgtacattaattgacgctctgaatgtcacacgaygtgctcttgattttcgagatggcgaagaagttgcaacaggatataaaaatatgtattcaacaaacatattcaccaaaagggctatagccctcataactaa

SEQ ID NO: 79975 - DNA, 201 bp, Homo sapiens
cagatccgtacaggtttacagcaccaaataatctggccctgtcagcccagctgtgttcctctggatgaaaaactcctgccccagctcctaaaagaagcagkttatactacccatatggtcggaaaatggcacctgggaatgtaccggaaagaatgccttccaacccgccgaggatttgatacctactttggatatctcctg

SEQ ID NO: 79976 - DNA, 201 bp, Homo sapiens
ttggcgccgccgggctcgggcgccggggccagccggccgccccacctggtcttcttgctggcagacgacctaggctggaacgacgtcggcttccacggctyccgcatccgcacgccgcacctggacgcgctggcggccggcggggtgctcctggacaactactacacgcagccgctgtgcacgccgtcgcggagccagctg

SEQ ID NO: 79977 - DNA, 201 bp, Homo sapiens
aaactcctgccccagctcctaaaagaagcaggttatactacccatatggtcggaaaatggcacctgggaatgtaccggaaagaatgccttccaacccgccraggatttgatacctactttggatatctcctgggtagtgaagattattattcccatgaacgctgtacattaattgacgctctgaatgtcacacgatgtgct

SEQ ID NO: 79978 - DNA, 201 bp, Homo sapiens
gccggggccagccggccgccccacctggtcttcttgctggcagacgacctaggctggaacgacgtcggcttccacggctcccgcatccgcacgccgcaccwggacgcgctggcggccggcggggtgctcctggacaactactacacgcagccgctgtgcacgccgtcgcggagccagctgctcactggccgctaccagatc

SEQ ID NO: 79979 - DNA, 201 bp, Homo sapiens
gcagctttaaaaagcagtgggctctggaacaacacggtgttcatcttttctacagataacggagggcagactttggcagggggtaataactggccccttcraggaagaaaatggagcctgtgggaaggaggcgtccgaggggtgggctttgtggcaagccccttgctgaagcagaagggcgtgaagaaccgggagctcatc

SEQ ID NO: 79980 - DNA, 201 bp, Homo sapiens
aaaactcctgccccagctcctaaaagaagcaggttatactacccatatggtcggaaaatggcacctgggaatgtaccggaaagaatgccttccaacccgcygaggatttgatacctactttggatatctcctgggtagtgaagattattattcccatgaacgctgtacattaattgacgctctgaatgtcacacgatgtgc

SEQ ID NO: 79981 - DNA, 201 bp, Homo sapiens
caagaccctctggctctttgatattgatcgggaccctgaagaaagacatgacctgtccagagaatatcctcacatcgtcacaaagctcctgtcccgcctayagttctaccataaacactcagtccccgtgtacttccctgcacaggacccccgctgtgatcccaaggccactggggtgtggggcccttggatgtaggattt

SEQ ID NO: 79982 - DNA, 201 bp, Homo sapiens
aggcgtccgaggggtgggctttgtggcaagccccttgctgaagcagaagggcgtgaagaaccgggagctcatccacatctctgactggctgccaacactcrtgaagctggccaggggacacaccaatggcacaaagcctctggatggcttcgacgtgtggaaaaccatcagtgaaggaagcccatcccccagaattgagct

SEQ ID NO: 79983 - DNA, 201 bp, Homo sapiens
gtgatcccaaggccactggggtgtggggcccttggatgtaggatttcagggaggctagaaaacctttcaattggaagttggacctcaggccttttctcacractcttgtctcatttgttatcccaacctgggttcacttggcccttctcttgctcttaaaccacaccgaggtgtctaatttcaacccctaatgcatttaag

SEQ ID NO: 79984 - DNA, 201 bp, Homo sapiens
ccgcctacagttctaccataaacactcagtccccgtgtacttccctgcacaggacccccgctgtgatcccaaggccactggggtgtggggcccttggatgyaggatttcagggaggctagaaaacctttcaattggaagttggacctcaggccttttctcacgactcttgtctcatttgttatcccaacctgggttcactt

SEQ ID NO: 79985 - DNA, 201 bp, Homo sapiens
cgaggggtgggctttgtggcaagccccttgctgaagcagaagggcgtgaagaaccgggagctcatccacatctctgactggctgccaacactcgtgaagcyggccaggggacacaccaatggcacaaagcctctggatggcttcgacgtgtggaaaaccatcagtgaaggaagcccatcccccagaattgagctgctgcat

SEQ ID NO: 79986 - DNA, 201 bp, Homo sapiens
cagaattgagctgctgcataatattgacccgaacttcgtggactcttcaccgtgtcccaggaacagcatggctccagcaaaggatgactcttctcttccakaatattcagcctttaacacatctgtccatgctgcaattagacatggaaattggaaactcctcacgggctacccaggctgtggttactggttccctccacc

SEQ ID NO: 79987 - DNA, 201 bp, Homo sapiens
tccagagaatatcctcacatcgtcacaaagctcctgtcccgcctacagttctaccataaacactcagtccccgtgtacttccctgcacaggacccccgctrtgatcccaaggccactggggtgtggggcccttggatgtaggatttcagggaggctagaaaacctttcaattggaagttggacctcaggccttttctcacg

SEQ ID NO: 79988 - DNA, 201 bp, Homo sapiens
ataatctggccctgtcagcccagctgtgttcctctggatgaaaaactcctgccccagctcctaaaagaagcaggttatactacccatatggtcggaaaatkgcacctgggaatgtaccggaaagaatgccttccaacccgccgaggatttgatacctactttggatatctcctgggtagtgaagattattattcccatgaa

SEQ ID NO: 79989 - DNA, 201 bp, Homo sapiens
tctgactggctgccaacactcgtgaagctggccaggggacacaccaatggcacaaagcctctggatggcttcgacgtgtggaaaaccatcagtgaaggaarcccatcccccagaattgagctgctgcataatattgacccgaacttcgtggactcttcaccgtgtcccaggaacagcatggctccagcaaaggatgactct

SEQ ID NO: 79990 - DNA, 201 bp, Homo sapiens
aatattcagcctttaacacatctgtccatgctgcaattagacatggaaattggaaactcctcacgggctacccaggctgtggttactggttccctccaccrtctcaatacaatgtttctgagataccctcatcagacccaccaaccaagaccctctggctctttgatattgatcgggaccctgaagaaagacatgacctgt

SEQ ID NO: 79991 - DNA, 201 bp, Homo sapiens
tgttggcgccgccgggctcgggcgccggggccagccggccgccccacctggtcttcttgctggcagacgacctaggctggaacgacgtcggcttccacggstcccgcatccgcacgccgcacctggacgcgctggcggccggcggggtgctcctggacaactactacacgcagccgctgtgcacgccgtcgcggagccagc

SEQ ID NO: 79992 - DNA, 201 bp, Homo sapiens
tacagcaccaaataatctggccctgtcagcccagctgtgttcctctggatgaaaaactcctgccccagctcctaaaagaagcaggttatactacccatatsgtcggaaaatggcacctgggaatgtaccggaaagaatgccttccaacccgccgaggatttgatacctactttggatatctcctgggtagtgaagattatt

SEQ ID NO: 79993 - DNA, 154 bp, Homo sapiens
cttgaaagtaaccgcaccttccaaagggcaccgtgcaatcagactgaaaccacrgtgcaaatttaattgccggggaagataacgggccttggtgccctccaagcgtcagctgagtttccaagaagccgggcagcgggcgcccgcgggttcgtct

SEQ ID NO: 79994 - DNA, 201 bp, Homo sapiens
taatctggccctgtcagcccagctgtgttcctctggatgaaaaactcctgccccagctcctaaaagaagcaggttatactacccatatggtcggaaaatgrcacctgggaatgtaccggaaagaatgccttccaacccgccgaggatttgatacctactttggatatctcctgggtagtgaagattattattcccatgaac

SEQ ID NO: 79995 - DNA, 201 bp, Homo sapiens
tgcagctttaaaaagcagtgggctctggaacaacacggtgttcatcttttctacagataacggagggcagactttggcagggggtaataactggccccttygaggaagaaaatggagcctgtgggaaggaggcgtccgaggggtgggctttgtggcaagccccttgctgaagcagaagggcgtgaagaaccgggagctcat

SEQ ID NO: 79996 - DNA, 201 bp, Homo sapiens
gtgggctctggaacaacacggtgttcatcttttctacagataacggagggcagactttggcagggggtaataactggccccttcgaggaagaaaatggagsctgtgggaaggaggcgtccgaggggtgggctttgtggcaagccccttgctgaagcagaagggcgtgaagaaccgggagctcatccacatctctgactggc

SEQ ID NO: 79997 - DNA, 201 bp, Homo sapiens
accctgaagaaagacatgacctgtccagagaatatcctcacatcgtcacaaagctcctgtcccgcctacagttctaccataaacactcagtccccgtgtasttccctgcacaggacccccgctgtgatcccaaggccactggggtgtggggcccttggatgtaggatttcagggaggctagaaaacctttcaattggaagt

SEQ ID NO: 79998 - DNA, 201 bp, Homo sapiens
acaccaatggcacaaagcctctggatggcttcgacgtgtggaaaaccatcagtgaaggaagcccatcccccagaattgagctgctgcataatattgacccraacttcgtggactcttcaccgtgtcccaggaacagcatggctccagcaaaggatgactcttctcttccagaatattcagcctttaacacatctgtccatg

SEQ ID NO: 79999 - DNA, 201 bp, Homo sapiens
gcccagctgtgttcctctggatgaaaaactcctgccccagctcctaaaagaagcaggttatactacccatatggtcggaaaatggcacctgggaatgtacyggaaagaatgccttccaacccgccgaggatttgatacctactttggatatctcctgggtagtgaagattattattcccatgaacgctgtacattaattga

SEQ ID NO: 80000 - DNA, 201 bp, Homo sapiens
tcagacccaccaaccaagaccctctggctctttgatattgatcgggaccctgaagaaagacatgacctgtccagagaatatcctcacatcgtcacaaagcycctgtcccgcctacagttctaccataaacactcagtccccgtgtacttccctgcacaggacccccgctgtgatcccaaggccactggggtgtggggccct

SEQ ID NO: 80001 - DNA, 201 bp, Homo sapiens
tcccatgaacgctgtacattaattgacgctctgaatgtcacacgatgtgctcttgattttcgagatggcgaagaagttgcaacaggatataaaaatatgtrttcaacaaacatattcaccaaaagggctatagccctcataactaaccatccaccagagaagcctctgtttctctaccttgctctccagtctgtgcatgag

SEQ ID NO: 80002 - DNA, 201 bp, Homo sapiens
gggctctggaacaacacggtgttcatcttttctacagataacggagggcagactttggcagggggtaataactggccccttcgaggaagaaaatggagccygtgggaaggaggcgtccgaggggtgggctttgtggcaagccccttgctgaagcagaagggcgtgaagaaccgggagctcatccacatctctgactggctg

SEQ ID NO: 80003 - DNA, 201 bp, Homo sapiens
ctcctgtcccgcctacagttctaccataaacactcagtccccgtgtacttccctgcacaggacccccgctgtgatcccaaggccactggggtgtggggccsttggatgtaggatttcagggaggctagaaaacctttcaattggaagttggacctcaggccttttctcacgactcttgtctcatttgttatcccaacctgg

SEQ ID NO: 80004 - DNA, 201 bp, Homo sapiens; identical to SEQ ID NO: 79972

SEQ ID NO: 80005 - DNA, 201 bp, Homo sapiens; identical to SEQ ID NO: 79973

SEQ ID NO: 80006 - DNA, 201 bp, Homo sapiens; identical to SEQ ID NO: 79974

SEQ ID NO: 80007 - DNA, 201 bp, Homo sapiens; identical to SEQ ID NO: 79975

SEQ ID NO: 80008 - DNA, 201 bp, Homo sapiens; identical to SEQ ID NO: 79977

SEQ ID NO: 80009 - DNA, 201 bp, Homo sapiens; identical to SEQ ID NO: 79976

SEQ ID NO: 80010 - DNA, 201 bp, Homo sapiens; identical to SEQ ID NO: 79979

SEQ ID NO: 80011 - DNA, 201 bp, Homo sapiens; identical to SEQ ID NO: 79978

SEQ ID NO: 80012 - DNA, 201 bp, Homo sapiens; identical to SEQ ID NO: 79980

SEQ ID NO: 80013 - DNA, 201 bp, Homo sapiens; identical to SEQ ID NO: 79981

SEQ ID NO: 80014 - DNA, 201 bp, Homo sapiens; identical to SEQ ID NO: 79982

SEQ ID NO: 80015 - DNA, 201 bp, Homo sapiens; identical to SEQ ID NO: 79984

SEQ ID NO: 80016 - DNA, 201 bp, Homo sapiens; identical to SEQ ID NO: 79983

SEQ ID NO: 80017 - DNA, 201 bp, Homo sapiens; identical to SEQ ID NO: 79985

SEQ ID NO: 80018 - DNA, 201 bp, Homo sapiens; identical to SEQ ID NO: 79986

SEQ ID NO: 80019 - DNA, 201 bp, Homo sapiens; identical to SEQ ID NO: 79987

SEQ ID NO: 80020 - DNA, 201 bp, Homo sapiens; identical to SEQ ID NO: 79988

SEQ ID NO: 80021 - DNA, 201 bp, Homo sapiens; identical to SEQ ID NO: 79989

SEQ ID NO: 80022 - DNA, 201 bp, Homo sapiens; identical to SEQ ID NO: 79990

SEQ ID NO: 80023 - DNA, 201 bp, Homo sapiens; identical to SEQ ID NO: 79991

SEQ ID NO: 80024 - DNA, 201 bp, Homo sapiens; identical to SEQ ID NO: 79992

SEQ ID NO: 80025 - DNA, 201 bp, Homo sapiens
cagagttgttgcaggctttacaggagacgcgggctgtgaagatgctttgtaaattgtgaagcgttattaaagaacacatcttttttttttaggaaaccacrgtgcaaatttaattgccggggaagataacgggccttggtgccctccaagcgtcagctgagtttccaagaagccgggcagcgggcgcccgcgggttcgtct

SEQ ID NO: 80026 - DNA, 201 bp, Homo sapiens
atacatgattttatttaactcattaataaggaaattggtaaggtgttaaaaccaattcaaaggacaatccaaagaacagatcaggaatactaaaataaatrtgcaagcggaggtgaaactgttttccttggtagtggtggaggggaaggattgctactccgctggataaagttcatttgtgtatatataaataagaattat

SEQ ID NO: 80027 - DNA, 201 bp, Homo sapiens; identical to SEQ ID NO: 79994

SEQ ID NO: 80028 - DNA, 201 bp, Homo sapiens; identical to SEQ ID NO: 79995

SEQ ID NO: 80029 - DNA, 201 bp, Homo sapiens; identical to SEQ ID NO: 79996

SEQ ID NO: 80030 - DNA, 201 bp, Homo sapiens; identical to SEQ ID NO: 79997

SEQ ID NO: 80031 - DNA, 201 bp, Homo sapiens; identical to SEQ ID NO: 79998

SEQ ID NO: 80032 - DNA, 201 bp, Homo sapiens
agagtagacagaaagtctggatggcaacgggaatctactggtcatacggctaacttcctaattcaataagcacgtgactaaaggattttttccttccactcacagatatttcaggctaactagatactgtgtgcttcttagtgtcactgcttagtgggggagccagctctgagtggggtcatatccggacaagcgaatgag

SEQ ID NO: 80033 - DNA, 201 bp, Homo sapiens
gagtagacagaaagtctggatggcaacgggaatctactggtcatacggctaacttcctaattcaataagcacgtgactaaaggattttttccttccactcacagatatttcaggctaactagatactgtgtgcttcttagtgtcactgcttagtgggggagccagctctgagtggggtcatatccggacaagcgaatgagc

SEQ ID NO: 80034 - DNA, 201 bp, Homo sapiens; identical to SEQ ID NO: 79999

SEQ ID NO: 80035 - DNA, 201 bp, Homo sapiens; identical to SEQ ID NO: 80000

SEQ ID NO: 80036 - DNA, 201 bp, Homo sapiens; identical to SEQ ID NO: 80001

SEQ ID NO: 80037 - DNA, 201 bp, Homo sapiens; identical to SEQ ID NO: 80002

SEQ ID NO: 80038 - DNA, 201 bp, Homo sapiens; identical to SEQ ID NO: 80003

SEQ ID NO: 80039 - DNA, 201 bp, Homo sapiens
tttattgtatctgttttctactttatgtgagcaaggtttgctgtccaaggtgtaaatattcaacgggaataaaactggcatggtaattttttttttttttkttttttttgttttttggctctttcaaaggtaatggcccatcgatgagcatttttaacatactccatagtcttttcctgtggtgttaggtctttattttta

SEQ ID NO: 80040 - DNA, 201 bp, Homo sapiens
tattgtatctgttttctactttatgtgagcaaggtttgctgtccaaggtgtaaatattcaacgggaataaaactggcatggtaattttttttttttttttkttttttgttttttggctctttcaaaggtaatggcccatcgatgagcatttttaacatactccatagtcttttcctgtggtgttaggtctttatttttatt

SEQ ID NO: 80041 - DNA, 201 bp, Homo sapiens
tttttttttttttttgttttttggctctttcaaaggtaatggcccatcgatgagcatttttaacatactccatagtcttttcctgtggtgttaggtctttwtttttatttttttcctgggggctggggtgggggtttgtcatgggggaactgccctttaaattttaagtgacactacagaaaaacacaaaaaggtgatggg

SEQ ID NO: 80042 - DNA, 173 bp, Homo sapiens
tattttgaactttataaaaagcaatgcagtaccccatagactggtgttaaatgttgtctacagtgcaaaatccatgttctaacatatgtaataattgccakgagtacagtgctcttgttgatcttgtattcagtcaggttaaaacaacggacaataaaagaatgaacacattc

SEQ ID NO: 80043 - DNA, 201 bp, Homo sapiens
ttttaagtgacactacagaaaaacacaaaaaggtgatgggttgtgttatgcttgtattgaatgctgtcttgacatctcttgccttgtcctccggtatgttytaaagctgtgtctgagatctggatctgcccatcactttggctagtgacagggctaattaatttgctttatacattttcttttactttccttttttccttt

SEQ ID NO: 80044 - DNA, 139 bp, Homo sapiens
aattcctcggctcctggcgggagtgccggtggcgccccscagtccgcttgtccgtccttccctctctgactctcctaccccgggcctgtctctgcagaggtcaggggaggcgggggcccagcacacgtccccagtggca

SEQ ID NO: 80045 - DNA, 140 bp, Homo sapiens
aattcctcggctcctggcgggagtgccggtggcgccccgsagtccgcttgtccgtccttccctctctgactctcctaccccgggcctgtctctgcagaggtcaggggaggcgggggcccagcacacgtccccagtggcag

SEQ ID NO: 80046 - DNA, 201 bp, Homo sapiens
cgccaggattaacacagattcctcagatccagaagactgaaatttcctttcgtcctaatgatcccaagagctatgaggcatatgtactgaacatagttagrttcctggaaaagtacaaagattcagcccagagggatgacatgatttttgaagattgtggcgatgtgcccagtgaaccgaaagaacgaggagactttaatc

SEQ ID NO: 80047 - DNA, 201 bp, Homo sapiens
gtagcaatagcaacaaaatatttattctactgtaaatgacaaaagaaaaagaaaaattgagccttgggacgtgcccatttttactgtaaattatgattccrtaactgacttgtagtaagcagtgtttctggcccctaagtattgctgccttgtgtattttatttagtgtacagtactacaggtgcatactctggtcatttt

SEQ ID NO: 80048 - DNA, 106 bp, Homo sapiens
aaatccatgttctaacatatgtaataattgccaggagtacagtgctcttgttgatcttgtattcagtcaggttaaaacaacggacaataaaagaatgaacmcattc

SEQ ID NO: 80049 - DNA, 126 bp, Homo sapiens
taaatgttgtctacagtgcaaaatccatgttctaacatatgtaataattgccaggagtacagtgctcttgttgatcttgtattcagtcaggttaaaacaayggacaataaaagaatgaacacattc

SEQ ID NO: 80050 - DNA, 201 bp, Homo sapiens
cgtacggtgagaacattgggtacagtgagaaagaccgttttcagggacgttttgatgtaaaaattgaagttaagagctgatcacaagcacaaatctttccmactagccatttaataagttaaaaaaagatacaaaaacaaaaacctactagtcttgaacaaactgtcatacgtatgggacctacacttaatctatatgctt

SEQ ID NO: 80051 - DNA, 201 bp, Homo sapiens
tttttttttgttttttggctctttcaaaggtaatggcccatcgatgagcatttttaacatactccatagtcttttcctgtggtgttaggtctttatttttwtttttttcctgggggctggggtgggggtttgtcatgggggaactgccctttaaattttaagtgacactacagaaaaacacaaaaaggtgatgggttgtgt

SEQ ID NO: 80052 - DNA, 201 bp, Homo sapiens
tttattgtatctgttttctactttatgtgagcaaggtttgctgtccaaggtgtaaatattcaacgggaataaaactggcatggtaattttttttttttttkttttttttgttttttggaactgccctttaaattttaagtgacactacagaaaaacacaaaaaggtgatgggttgtgttatgcttgtattgaatgctgtct

SEQ ID NO: 80053 - DNA, 201 bp, Homo sapiens
tattgtatctgttttctactttatgtgagcaaggtttgctgtccaaggtgtaaatattcaacgggaataaaactggcatggtaattttttttttttttttkttttttgttttttggaactgccctttaaattttaagtgacactacagaaaaacacaaaaaggtgatgggttgtgttatgcttgtattgaatgctgtcttg

SEQ ID NO: 80054 - DNA, 148 bp, Homo sapiens
ttttaagtgacactacagaaaaacacaaaaaggtgatgggttgtgttatgcttgtattgaatgctgtcttgacatctcttgccttgtcctccggtatgttytaaagctgtgtctgagatctggatctgcccatcactttggctagtga

SEQ ID NO: 80055 - DNA, 139 bp, Homo sapiens; identical to SEQ ID NO: 80044

SEQ ID NO: 80056 - DNA, 140 bp, Homo sapiens; identical to SEQ ID NO: 80045

SEQ ID NO: 80057 - DNA, 201 bp, Homo sapiens; identical to SEQ ID NO: 80047

SEQ ID NO: 80058 - DNA, 201 bp, Homo sapiens; identical to SEQ ID NO: 80046

SEQ ID NO: 80059 - DNA, 201 bp, Homo sapiens; identical to SEQ ID NO: 80050

SEQ ID NO: 80060 - DNA, 201 bp, Homo sapiens
tcacaggttgggacatttagacaagagtgaatcacacacgaggaatgtgttcattcttttattcctgactgaatacaagatcaacaagagcactgtactcmtggcaattattacatatgttagaacatggattttgcactaccagtctatggggtactgcattgctttttataaagttcaaaataaagatttattttcaaa

SEQ ID NO: 80061 - DNA, 201 bp, Homo sapiens
gttcaatacttcttcaagatcttggataattagtggtgtggaaagtaaagaagtcacaggttgggacatttagacaagagtgaatcacacacgaggaatgkgttcattcttttattcctgactgaatacaagatcaacaagagcactgtactcctggcaattattacatatgttagaacatggattttgcactaccagtct

SEQ ID NO: 80062 - DNA, 174 bp, Homo sapiens
cccatcacctttttgtgtttttctgtagtgtcacttaaaatttaaagggcagttcccccatgacaaacccccaccccagcccccaggaaaaaaataaaaawaaagacctaacaccacaggaaaagactatggagtatgttaaaaatgctcatcgatgggccattacctttgaaa

SEQ ID NO: 80063 - DNA, 201 bp, Homo sapiens
atttagacaagagtgaatcacacacgaggaatgtgttcattcttttattgtccgttgttttaacctgactgaatacaagatcaacaagagcactgtactcmtggcaattattacatatgttagaacatggattttgcactgtagacaacatttaacaccagtctatggggtactgcattgctttttataaagttcaaaata

SEQ ID NO: 80064 - DNA, 201 bp, Homo sapiens
aaaggaaaaaaggaaagtaaaagaaaatgtataaagcaaattaattagccctgtcactagccaaagtgatgggcagatccagatctcagacacagctttaraacataccggaggacaaggcaagagatgtcaagacagcattcaatacaagcataacacaacccatcacctttttgtgtttttctgtagtgtcacttaaaa

SEQ ID NO: 80065 - DNA, 201 bp, Homo sapiens
cttggataattagtggtgtggaaagtaaagaagtcacaggttgggacatttagacaagagtgaatcacacacgaggaatgtgttcattcttttattgtccrttgttttaacctgactgaatacaagatcaacaagagcactgtactcctggcaattattacatatgttagaacatggattttgcactgtagacaacattta

SEQ ID NO: 80066 - DNA, 201 bp, Homo sapiens
gttcaatacttcttcaagatcttggataattagtggtgtggaaagtaaagaagtcacaggttgggacatttagacaagagtgaatcacacacgaggaatgkgttcattcttttattgtccgttgttttaacctgactgaatacaagatcaacaagagcactgtactcctggcaattattacatatgttagaacatggattt

SEQ ID NO: 80067 - DNA, 201 bp, Homo sapiens
cccaggcgacagcgtggaggggcgggtctgtcgattggatgaacgcagctgagattactcccagccactaaggacgaagaggtggggcggtggcgtcccaygcctcgtgcgacagtgggcggggctttgttgcctgagtaaccgtatgatggtggtggtggtggtgtcttcctgtctcaacgatacctattttctagtgct

SEQ ID NO: 80068 - DNA, 180 bp, Homo sapiens
acacaacccatcacctttttgtgtttttctgtagtgtcacttaaaatttaaagggcagttcccccatgacaaacccccaccccagcccccaggaaaaaaawaaaaataaagacctaacaccacaggaaaagactatggagtatgttaaaaatgctcatcgatgggccattacctttgaaa

SEQ ID NO: 80069 - DNA, 201 bp, Homo sapiens
gtgtggtgatccagcagctgtgcagtgtttgtgtttttgtggttatctggtggtatatggatgagggtcttctggccccccattggcttttagggactggyctggcttcttcactgattgggtatgttttgtttgatctcattgatggaggtgaagggcggaagaagagtgggcagacccggtgggctgacctgaagagtg

SEQ ID NO: 80070 - DNA, 201 bp, Homo sapiens
tcttccccggtccctgcatgccttcatcatggtgacatttgccattcagatttttgccctgtggcccatgttgcagaagaaactaaaggcatgtactcccyggagctatgtgggggtcacactgctttttgcattttcagccgtgggaggcctactgtccattagtgctgtgggagccgtactctttgcccttctgctgat

SEQ ID NO: 80071 - DNA, 201 bp, Homo sapiens
gatagattagcctcctaactagtatagaacttaaagacagagttccattctggaagcagcatgtcattgtggtaagagaatagagatcaaaaccaaaaaawatgaaccaaaggcttgggtggtgagggtgcttatcctttctgttattttgtagatgaaaaaactttctggggacctcttgaattacatgctgtaacatat

SEQ ID NO: 80072 - DNA, 201 bp, Homo sapiens
gggccttgggatgaagctgaaatcaaggaagacttgtccaggttcctcagttaaattaggacatccattacattattaaagcaagctgatagattagcctyctaactagtatagaacttaaagacagagttccattctggaagcagcatgtcattgtggtaagagaatagagatcaaaaccaaaaaaaatgaaccaaaggc

SEQ ID NO: 80073 - DNA, 201 bp, Homo sapiens
actgctttttgcattttcagccgtgggaggcctactgtccattagtgctgtgggagccgtactctttgcccttctgctgatgtctatctcatgtctgtgtycattctacctcattcgcttgcagctttttaaagaaaacattcatgggccttgggatgaagctgaaatcaaggaagacttgtccaggttcctcagttaaat

SEQ ID NO: 80074 - DNA, 201 bp, Homo sapiens
tggaatttccagggaggtctcatttcaaaacttcataaagaacaagaaccacctggacttctgtgagggcgatgattaaactggcctgagtttgaatgaarggataatgtatgctcaacctgtgactaacaccaaggaggtcaagtggcagaaggtcttgtatgagcgacagccctttcctgataactatgtggaccggcg

SEQ ID NO: 80075 - DNA, 201 bp, Homo sapiens; identical to SEQ ID NO: 80069

SEQ ID NO: 80076 - DNA, 201 bp, Homo sapiens; identical to SEQ ID NO: 80070

SEQ ID NO: 80077 - DNA, 201 bp, Homo sapiens; identical to SEQ ID NO: 80071

SEQ ID NO: 80078 - DNA, 201 bp, Homo sapiens; identical to SEQ ID NO: 80072

SEQ ID NO: 80079 - DNA, 201 bp, Homo sapiens; identical to SEQ ID NO: 80073

SEQ ID NO: 80080 - DNA, 201 bp, Homo sapiens; identical to SEQ ID NO: 80074

SEQ ID NO: 80081 - DNA, 201 bp, Homo sapiens
gaggatatttatttaatgaacatcaattccttttaaattttcttagagaaatttctctgtggctcagttttaccacccataaagcggagacagtaatttayggttatcctttctgacccacaaagtatgaaaagttctgtaatctgtaaactcagttctgtaatctgtattattgagatgattaatataaagttgtatttt

SEQ ID NO: 80082 - DNA, 117 bp, Homo sapiens
gagttaaggttcaaacktggcaaagcaagcctccaccagcagaggtggtgagaaagcccgagcacttcacatatcaagaggaaaactattgcccagagaaagaattgacaatctcat

SEQ ID NO: 80083 - DNA, 201 bp, Homo sapiens
attttcactatcccctgaatttccccacttatttttgtctttcactatcgcaggccttagaagaggtctacctgcctccagtcttacctagtccagtctaycccctggagttagaatggccatcctgaagtgaaaagtaatgtcacattactcccttcagtgatttcttgtagaagtgccaatccctgaatgccaccaaga

SEQ ID NO: 80084 - DNA, 201 bp, Homo sapiens
tatggagccggaaactatgggatgtgtggcagagcgtatagcccaagatttctctacatttggccaaatgctcgtatctcagtgatgggaggagagcaggsagccaatgtgttggccacgataacaaaggaccaaagagcccgggaaggaaagcagttctccagtgctgatgaagcggctttaaaagagcccatcattaag

SEQ ID NO: 80085 - DNA, 201 bp, Homo sapiens
cagaggtggtgagaaagcccgagcacttcacatatcaagaggaaaactattgcccagagaaagaattgacaatctcatagacccagggtctccatttctgsaattatcccagtttgcaggttaccagttatatgacaatgaggaggtgccaggaggtggcattattacaggcattggaagagtatcaggagtagaatgcat

SEQ ID NO: 80086 - DNA, 201 bp, Homo sapiens
tgccatgcaaaacaggctcccctgcatctacttagttgattcgggaggagcatacttacctcgacaagcagatgtgtttccagatcgagaccactttggcygtacattctataatcaggcaattatgtcttctaaaaatattgcacagatcgcagtggtcatgggctcctgcaccgcaggaggagcctatgtgcctgccat

SEQ ID NO: 80087 - DNA, 201 bp, Homo sapiens
tattgccaatgatgccaccgtcaaaggaggtgcctactacccagtgactgtgaaaaaacaattacgggcccaagaaattgccatgcaaaacaggctccccygcatctacttagttgattcgggaggagcatacttacctcgacaagcagatgtgtttccagatcgagaccactttggccgtacattctataatcaggcaat

SEQ ID NO: 80088 - DNA, 201 bp, Homo sapiens
ggcattggaagagtatcaggagtagaatgcatgattattgccaatgatgccaccgtcaaaggaggtgcctactacccagtgactgtgaaaaaacaattacrggcccaagaaattgccatgcaaaacaggctcccctgcatctacttagttgattcgggaggagcatacttacctcgacaagcagatgtgtttccagatcga

SEQ ID NO: 80089 - DNA, 201 bp, Homo sapiens
gtcaaaggaggtgcctactacccagtgactgtgaaaaaacaattacgggcccaagaaattgccatgcaaaacaggctcccctgcatctacttagttgattygggaggagcatacttacctcgacaagcagatgtgtttccagatcgagaccactttggccgtacattctataatcaggcaattatgtcttctaaaaatatt

SEQ ID NO: 80090 - DNA, 201 bp, Homo sapiens
ccaagatggtggccgctgtggcctgtgcccaagtgcctaagataaccctcatcattgggggctcctatggagccggaaactatgggatgtgtggcagagcrtatagcccaagatttctctacatttggccaaatgctcgtatctcagtgatgggaggagagcaggcagccaatgtgttggccacgataacaaaggaccaaa

SEQ ID NO: 80091 - DNA, 201 bp, Homo sapiens
caagcagatgtgtttccagatcgagaccactttggccgtacattctataatcaggcaattatgtcttctaaaaatattgcacagatcgcagtggtcatggsctcctgcaccgcaggaggagcctatgtgcctgccatggctgatgaaaacatcattgtacgcaagcagggtaccattttcttggcaggaccccccttggtt

SEQ ID NO: 80092 - DNA, 201 bp, Homo sapiens
caggaggagcctatgtgcctgccatggctgatgaaaacatcattgtacgcaagcagggtaccattttcttggcaggaccccccttggttaaagcggcaacyggggaagaagtatctgctgaggatcttggaggtgctgatcttcattgcagaaagtctggagtaagtgaccactgggctttggatgatcatcatgcccttc

SEQ ID NO: 80093 - DNA, 201 bp, Homo sapiens; identical to SEQ ID NO: 80081

SEQ ID NO: 80094 - DNA, 201 bp, Homo sapiens; identical to SEQ ID NO: 80083

SEQ ID NO: 80095 - DNA, 201 bp, Homo sapiens; identical to SEQ ID NO: 80084

SEQ ID NO: 80096 - DNA, 201 bp, Homo sapiens
aggaggtggtgagaaagcccgagcacttcacatatcaagaggaaaactattgcccagagaaagaattgacaatctcatagacccagggtctccatttctgsaattatcccagtttgcaggttaccagttatatgacaatgaggaggtgccaggaggtggcattattacaggcattggaagagtatcaggagtagaatgcat

SEQ ID NO: 80097 - DNA, 201 bp, Homo sapiens; identical to SEQ ID NO: 80086

SEQ ID NO: 80098 - DNA, 201 bp, Homo sapiens; identical to SEQ ID NO: 80087

SEQ ID NO: 80099 - DNA, 201 bp, Homo sapiens; identical to SEQ ID NO: 80088

SEQ ID NO: 80100 - DNA, 201 bp, Homo sapiens; identical to SEQ ID NO: 80089

SEQ ID NO: 80101 - DNA, 201 bp, Homo sapiens; identical to SEQ ID NO: 80090

SEQ ID NO: 80102 - DNA, 201 bp, Homo sapiens; identical to SEQ ID NO: 80091

SEQ ID NO: 80103 - DNA, 201 bp, Homo sapiens; identical to SEQ ID NO: 80092

SEQ ID NO: 80104 - DNA, 201 bp, Homo sapiens
cgcccataggctacatccccaaggaggatgccctgaacctgaaaggcctggggcacatcaacatgatggagcttttcagcatctccaaggaattctgggasaaggaggtggaagacatcgagaagtatctggaggatcaagtcaatgccgacctcccctgtgaaatcgagagagagatccttgccttgaagcaaagaataa

SEQ ID NO: 80105 - DNA, 201 bp, Homo sapiens
ttaaggttactcaggcattgatcttttcagtgttttttcactttagctatgtggattagctagaatgcacaccaaaaaaatacttgagctgtatatatatwgtgtgtgtgtgtgtgtgtgtgtgtgtgtgtgtgcatgtatgtgcacatgtgtctgtgtggtatatttgtgtatgtgtatttgtatgtactgttattgaaa

SEQ ID NO: 80106 - DNA, 201 bp, Homo sapiens
ctgaacctgaaaggcctggggcacatcaacatgatggagcttttcagcatctccaaggaattctgggagaaggaggtggaagacatcgagaagtatctggwggatcaagtcaatgccgacctcccctgtgaaatcgagagagagatccttgccttgaagcaaagaataagccagatgtaatcagggcctgagtgctttacc

SEQ ID NO: 80107 - DNA, 201 bp, Homo sapiens
gatttttttaaggataagaaccacagaacactgggtagtagctaatgaaattgagaagggaaatcttagcatgcctccaaaaattcacatccaatgcatastttgttcaaatttaaggttactcaggcattgatcttttcagtgttttttcactttagctatgtggattagctagaatgcacaccaaaaaaatacttgagc

SEQ ID NO: 80108 - DNA, 163 bp, Homo sapiens
tgcagctggttggctctcactgaccccagggatgtggccaggatcgaaagcaagacggttatygtcacccaagagcaaagagacacagtgcccatccccaaaacaggcctcagccagctcgcctccccgggtggaaggttgagtgcgtcggggatgacattgc

SEQ ID NO: 80109 - DNA, 201 bp, Homo sapiens
tggaaaagccagcaccaagctcacgcccataggctacatccccaaggaggatgccctgaacctgaaaggcctggggcacatcaacatgatggagcttttcmgcatctccaaggaattctgggagaaggaggtggaagacatcgagaagtatctggaggatcaagtcaatgccgacctcccctgtgaaatcgagagagagat

SEQ ID NO: 80110 - DNA, 201 bp, Homo sapiens
cctttaaaatcattccctttcccatccataaggtgcagtaggagcaagagagggcaagtgttcccaaattgacgccaccataataatcatcaccacaccgkgagcagatctgaaaggcacactttgatttttttaaggataagaaccacagaacactgggtagtagctaatgaaattgagaagggaaatcttagcatgcct

SEQ ID NO: 80111 - DNA, 201 bp, Homo sapiens
tgtcgctcctgggacttcagtgaagaccaaccccaatgccatcaagaccatccagaagaacacaatctttaccaatgtggccgagaccagcgacgggggcrtttactgggaaggcattgatgagccgctagcttcaggtgtcaccatcacgtcctggaagaataaggagtggagctcagaggatggggaaccttgtgccca

SEQ ID NO: 80112 - DNA, 201 bp, Homo sapiens
ccatcaagaccatccagaagaacacaatctttaccaatgtggccgagaccagcgacgggggcgtttactgggaaggcattgatgagccgctagcttcaggygtcaccatcacgtcctggaagaataaggagtggagctcagaggatggggaaccttgtgcccaccccaactcgaggttctgcacccctgccagccagtgcc

SEQ ID NO: 80113 - DNA, 201 bp, Homo sapiens; identical to SEQ ID NO: 80105

SEQ ID NO: 80114 - DNA, 201 bp, Homo sapiens
tacaaaagcctttggtcaacaactggccctgcaacccggagctgacgctcatcgcccacctgcctgaccgcagagagatcatctcctttggcagtgggtayggcgggaactcgctgctcgggaagaagtgctttgctctcaggatggccagccggctggccaaggaggaagggtggctggcagagcacatgctgattctgg

SEQ ID NO: 80115 - DNA, 201 bp, Homo sapiens; identical to SEQ ID NO: 80109

SEQ ID NO: 80116 - DNA, 201 bp, Homo sapiens
acattcgtgccccttagcagcactctgcagaaatgcctcctcagctgcaaaacggcctgaacctctcggccaaagttgtccagggaagcctggacagcctrccccaggcagtgagggagtttctcgagaataacgctgagctgtgtcagcctgatcacatccacatctgtgacggctctgaggaggagaatgggcggcttc

SEQ ID NO: 80117 - DNA, 201 bp, Homo sapiens; identical to SEQ ID NO: 80110

SEQ ID NO: 80118 - DNA, 201 bp, Homo sapiens; identical to SEQ ID NO: 80111

SEQ ID NO: 80119 - DNA, 201 bp, Homo sapiens
tgggtacggcgggaactcgctgctcgggaagaagtgctttgctctcaggatggccagccggctggccaaggaggaagggtggctggcagagcacatgctgrttctgggtataaccaaccctgagggtgagaagaagtacctggcggccgcatttcccagcgcctgcgggaagaccaacctggccatgatgaaccccagcct

SEQ ID NO: 80120 - DNA, 201 bp, Homo sapiens; identical to SEQ ID NO: 80112

SEQ ID NO: 80121 - DNA, 201 bp, Homo sapiens
ctcgcctctgtcaaagatcggcatcgagctgacggattcaccctacgtggtggccagcatgcggatcatgacgcggatgggcacgcccgtcctggaagcastgggcgatggggagtttgtcaaatgcctccattctgtggggtgccctctgcctttacaaaagcctttggtcaacaactggccctgcaacccggagctgac

SEQ ID NO: 80122 - DNA, 201 bp, Homo sapiens
gaagaagtgctttgctctcaggatggccagccggctggccaaggaggaagggtggctggcagagcacatgctgattctgggtataaccaaccctgagggtragaagaagtacctggcggccgcatttcccagcgcctgcgggaagaccaacctggccatgatgaaccccagcctccccgggtggaaggttgagtgcgtcgg

SEQ ID NO: 80123 - DNA, 201 bp, Homo sapiens
tcccagggtgcatgaaaggtcgcaccatgtacgtcatcccattcagcatggggccgctgggctcgcctctgtcaaagatcggcatcgagctgacggattcrccctacgtggtggccagcatgcggatcatgacgcggatgggcacgcccgtcctggaagcactgggcgatggggagtttgtcaaatgcctccattctgtgg

SEQ ID NO: 80124 - DNA, 201 bp, Homo sapiens
tcaggatggccagccggctggccaaggaggaagggtggctggcagagcacatgctgattctgggtataaccaaccctgagggtgagaagaagtacctggcrgccgcatttcccagcgcctgcgggaagaccaacctggccatgatgaaccccagcctccccgggtggaaggttgagtgcgtcggggatgacattgcctgga

SEQ ID NO: 80125 - DNA, 201 bp, Homo sapiens
attttgagaaagcgttcaatgccaggttcccagggtgcatgaaaggtcgcaccatgtacgtcatcccattcagcatggggccgctgggctcgcctctgtcraagatcggcatcgagctgacggattcaccctacgtggtggccagcatgcggatcatgacgcggatgggcacgcccgtcctggaagcactgggcgatgggg

SEQ ID NO: 80126 - DNA, 201 bp, Homo sapiens
aagggtggctggcagagcacatgctgattctgggtataaccaaccctgagggtgagaagaagtacctggcggccgcatttcccagcgcctgcgggaagacyaacctggccatgatgaaccccagcctccccgggtggaaggttgagtgcgtcggggatgacattgcctggatgaagtttgacgcacaaggtcatttaaggg

SEQ ID NO: 80127 - DNA, 201 bp, Homo sapiens; identical to SEQ ID NO: 80104

SEQ ID NO: 80128 - DNA, 201 bp, Homo sapiens
cagaggaggattttgagaaagcgttcaatgccaggttcccagggtgcatgaaaggtcgcaccatgtacgtcatcccattcagcatggggccgctgggctcrcctctgtcaaagatcggcatcgagctgacggattcaccctacgtggtggccagcatgcggatcatgacgcggatgggcacgcccgtcctggaagcactgg

SEQ ID NO: 80129 - DNA, 201 bp, Homo sapiens; identical to SEQ ID NO: 80106

SEQ ID NO: 80130 - DNA, 201 bp, Homo sapiens
aggaagagggcatcctcaggcggctgaagaagtatgacaactgctggttggctctcactgaccccagggatgtggccaggatcgaaagcaagacggttatygtcacccaagagcaaagagacacagtgcccatccccaaaacaggcctcagccagctcggtcgctggatgtcagaggaggattttgagaaagcgttcaatg

SEQ ID NO: 80131 - DNA, 201 bp, Homo sapiens; identical to SEQ ID NO: 80107

SEQ ID NO: 80132 - DNA, 201 bp, Homo sapiens
ggaaagaaacctgtggatctcccttcgagatcatccaaagagaagaaaggtgacctcacattcgtgccccttagcagcactctgcagaaatgcctcctcarctgcaaaacggcctgaacctctcggccaaagttgtccagggaagcctggacagcctgccccaggcagtgagggagtttctcgagaataacgctgagctgt

SEQ ID NO: 80133 - DNA, 201 bp, Homo sapiens
ggacctgcaggaggacgcagacggatttggtgtggatgactacagctcagagtctgatgtgattattataccttcagccctggactttgtctcacaagatraaatgttgacgcccctggggagattggacaagtatgctgcaagtgagaacatatttaacagacaaatggtggcccggagtttgctcgataccttgaggga

SEQ ID NO: 80134 - DNA, 201 bp, Homo sapiens
gcgcagcatattgctgtacacatttacagaatggttgctgagtgtctgtgtctgattttttcatgctggtcatgacctgaaggaaatttattagacgtatwatgtatgtctggtgtttttaacttgatcatgatcagctctgaggtgcaacttcttcacatactgtacatacctgtgaccactcttgggagtgctgcagtc

SEQ ID NO: 80135 - DNA, 201 bp, Homo sapiens
agaggttggcaccacttcacaagattcagctctcttagatcaggaattgtataactccttccatttctggaggactcctcttcctgaaatagatctagacrtagagcttgaacagaactctgggggaaaacccagcccagagggaccagaggaagaatctgagggccctgtgcccagttctccaaacatcaccatggccac

SEQ ID NO: 80136 - DNA, 201 bp, Homo sapiens
ataaatgagctaccaaattgtaaaataaatcaagaagattctgtgcctttaatcagcgatgctgttgagaatatggactccactcttcactatattcacarcgattcagacttgagcaacaatagcagttttagccctgatgaggaaaggagaactaaagtacaagatgttgtacctcaggcgttgttagatcagtattta

SEQ ID NO: 80137 - DNA, 201 bp, Homo sapiens
cgctcggcgtgagggcggctcgggaggagggtacctctcgctgcttcaggaggacctgcaggaggacgcagacggatccctggactttgtctcacaagatraaatgttgacgcccctggggagattggacaagtatgctgcaagtgagaacatatttaacagacaaatggtggcccggagtttgctcgataccttgaggga

SEQ ID NO: 80138 - DNA, 201 bp, Homo sapiens; identical to SEQ ID NO: 80134

SEQ ID NO: 80139 - DNA, 201 bp, Homo sapiens; identical to SEQ ID NO: 80135

SEQ ID NO: 80140 - DNA, 201 bp, Homo sapiens; identical to SEQ ID NO: 80136

SEQ ID NO: 80141 - DNA, 201 bp, Homo sapiens
ccgcggaggagggggcgaccacaagatggcggacctctcgctgcttcaggaggacctgcaggaggacgcagacggatccctggactttgtctcacaagatraaatgttgacgcccctggggagattggacaagtatgctgcaagtgagaacatatttaacagacaaatggtggcccggagtttgctcgataccttgaggga

SEQ ID NO: 80142 - DNA, 201 bp, Homo sapiens; identical to SEQ ID NO: 80134

SEQ ID NO: 80143 - DNA, 201 bp, Homo sapiens; identical to SEQ ID NO: 80135

SEQ ID NO: 80144 - DNA, 201 bp, Homo sapiens; identical to SEQ ID NO: 80136

SEQ ID NO: 80145 - DNA, 201 bp, Homo sapiens
caagctttattccaagctttttctgaatggcctccagtatgctgtcagagtttggaagcatgcagggtgtagtagtgcaggcctgaatgtgatactttccractggctttcgattatacattgtataaaaagttgctacttcatatactcttattggaggtacttgtaaaacttctgcaaccttgttcatagcagagatgg

SEQ ID NO: 80146 - DNA, 201 bp, Homo sapiens
cccaagctttattccaagctttttctgaatggcctccagtatgctgtcagagtttggaagcatgcagggtgtagtagtgcaggcctgaatgtgatactttycgactggctttcgattatacattgtataaaaagttgctacttcatatactcttattggaggtacttgtaaaacttctgcaaccttgttcatagcagagat

SEQ ID NO: 80147 - DNA, 201 bp, Homo sapiens
tttgtcaggtgtagtctccccaagctttattccaagctttttctgaatggcctccagtatgctgtcagagtttggaagcatgcagggtgtagtagtgcagrcctgaatgtgatactttccgactggctttcgattatacattgtataaaaagttgctacttcatatactcttattggaggtacttgtaaaacttctgcaac

SEQ ID NO: 80148 - DNA, 201 bp, Homo sapiens
caaatcctcatagtaattgtcatttatttgaaccattggtgcgttcacacaggcccctaaacattccacttctacaagagtgaaaagtttgtcaggtgtastctccccaagctttattccaagctttttctgaatggcctccagtatgctgtcagagtttggaagcatgcagggtgtagtagtgcaggcctgaatgtgata

SEQ ID NO: 80149 - DNA, 201 bp, Homo sapiens
ccttgttcatagcagagatgggcaaccacccattctgcctttgggctaaatccaggactggaagaacagctgctgctttatggccttctggatagtttttwacaattgcctctatcctcttatagttttctggtgtgaaatcaaatggagtatcagggttattctcaggagtatctctgtgcacaaataaagctcctccag

SEQ ID NO: 80150 - DNA, 201 bp, Homo sapiens
ctggctcacaagagaagcgtccactccttggcccaggttttgggattttgccagccttgagctcatcaataatttcttcaatatccttagctgtcaaatcytcatagtaattgtcatttatttgaaccattggtgcgttcacacaggcccctaaacattccacttctacaagagtgaaaagtttgtcaggtgtagtctccc

SEQ ID NO: 80151 - DNA, 128 bp, Homo sapiens
tcaggagtatctctgtgcacaaataaagctcctccagctccattttgcatagctgtcttatgcaattcctcacatgtcttccgtgggcggtaaggccagcsgcccgggcccggagcgccgcggagaag

SEQ ID NO: 80152 - DNA, 155 bp, Homo sapiens
aaatcaaatggagtatcagggttattctcaggagtatctctgtgcacaaataaagctcctccagctccattttgcatagctgtcttatgcaattcctcacatgtcttccgtgggcggtaaggccagcggcccgggcccggagcgccgcggagaag

SEQ ID NO: 80153 - DNA, 201 bp, Homo sapiens
atattttatttctctagtgacatatttacagttcaatataaattaaaggcctgcttgtatgccaaatccaggtcccttgggtggttcagtcaaaggggtargacctccagctggctcacaagagaagcgtccactccttggcccaggttttgggattttgccagccttgagctcatcaataatttcttcaatatccttagc

SEQ ID NO: 80154 - DNA, 201 bp, Homo sapiens
atttacagttcaatataaattaaaggcctgcttgtatgccaaatccaggtcccttgggtggttcagtcaaaggggtaggacctccagctggctcacaagaraagcgtccactccttggcccaggttttgggattttgccagccttgagctcatcaataatttcttcaatatccttagctgtcaaatcctcatagtaattgt

SEQ ID NO: 80155 - DNA, 154 bp, Homo sapiens
aatcaaatggagtatcagggttattctcaggagtatctctgtgcacaaataaagctcctccagctccattttgcatagctgtcttatgcaattcctcacatgtcttccgtgggcggtaaggccagcggcccgggcccggagcgccgcggagaag

SEQ ID NO: 80156 - DNA, 137 bp, Homo sapiens
gggttattctcaggagtatctctgtgcacaaataaagctcctccagctccattttgcatagctgtcttatgcaattcctcacatgtcttccgtgggcggtraggccagcggcccgggcccggagcgccgcggagaag

SEQ ID NO: 80157 - DNA, 201 bp, Homo sapiens
ggtaggacctccagctggctcacaagagaagcgtccactccttggcccaggttttgggattttgccagccttgagctcatcaataatttcttcaatatccytagctgtcaaatcctcatagtaattgtcatttatttgaaccattggtgcgttcacacaggcccctaaacattccacttctacaagagtgaaaagtttgtc

SEQ ID NO: 80158 - DNA, 201 bp, Homo sapiens
ttggaagcatgcagggtgtagtagtgcaggcctgaatgtgatactttccgactggctttcgattatacattgtataaaaagttgctacttcatatactctyattggaggtacttgtaaaacttctgcaaccttgttcatagcagagatgggcaaccacccattctgcctttgggctaaatccaggactggaagaacagctg

SEQ ID NO: 80159 - DNA, 201 bp, Homo sapiens
tgtgtatgtgtgtgggttagggcttttttcgttgcatgtgatggttctgtggacatatgatccccacaaactgtgggagtgattggccaggccttgttttktttgtttgtttgtttgtgtttttgttcttttgaagaatagagtggtatttagaaaataaattgcattgcaaagctcttatcggctcatatgagagagcag

SEQ ID NO: 80160 - DNA, 201 bp, Homo sapiens
caggagccacatggattgattgtatccactcaccattgacgatggcattgagcgtagctagcttatttccatcactacgtgtttttgagcttgctcttacrttttaagaggtgccaggggtacatttttgcactgaaatctaaagatgttttaaaaaacacttttcacaaaaatagtcctttgtcattacattatttactc

SEQ ID NO: 80161 - DNA, 201 bp, Homo sapiens
tgctccagcgccagcgcctgcagtttgcattttatgtggttgaacaagttggtacccaaccctttaatcgagccatgcttttcaacgttggctttcaagargcaatgaaagacttggattgggactgtttgatttttcatgatgtagatcacataccggaaagtgatcgcaactattatggatgtggacagatgccgaggc

SEQ ID NO: 80162 - DNA, 201 bp, Homo sapiens
agctggctccaattcaaattgaggatttatgtattaggccacttacttggttggcaagtgcaggaactcagttaaaatgcagttgaagaatgtcatctccmgaattgctgtcactttggcgagggagtggatatagggcatgtcacaaaagaacaaaataacccgacctttattgctgggagctggcttctgtccctttct

SEQ ID NO: 80163 - DNA, 201 bp, Homo sapiens
atcaagtacacactgttggcaaaaggctaacacctgactttagaaaatgctgatttgagaacaaaaggaaaggtcttttttcactgcttaaagtggggtcrctttgatacctttgcggtcatgtctgtgtctgatgagtgtagaatctctggatgtgcactgtcagtcatgtgtccaccaggcctcgaatatcatatggga

SEQ ID NO: 80164 - DNA, 201 bp, Homo sapiens
tcttggaaggtatgctctgctgaggaagtcaaaagaacggcaagggctggatggcctcaacaacctgaactactttgcaaacatcacatacgacgccttgkataaaaacataactgtcaacctgacacccgagctggctcaggtgaacgagtactgagaggagagaatgtacgtttgctttacccaccgccaccaagaaag

SEQ ID NO: 80165 - DNA, 201 bp, Homo sapiens
gaggcaaacccaccacagggcagctgcgttttaggaagagcaaatgaaactccacaccattcttctagatctctggtgttctctttggtttcatttttttwaaaaattaccttctttgggtggggattgagggtggaggggagggtgtttgggaaagataaatagacataaatatataacaatcacttcttgaagaagtat

SEQ ID NO: 80166 - DNA, 201 bp, Homo sapiens
cctaggctcaagccattttcccacctcagcctcccgagtagctgggactacaggtgcacaccaccacacctggctaattttttgtatttttagtagagacrggggtttcttccatgttgcccaggctggtctcgaactcctggactcaagcaatccgcccaccttgacttcccaaagtgctgggattatgggcgggtgtga

SEQ ID NO: 80167 - DNA, 201 bp, Homo sapiens
tcagcctcccgagtagctgggactacaggtgcacaccaccacacctggctaattttttgtatttttagtagagacgggggtttcttccatgttgcccaggstggtctcgaactcctggactcaagcaatccgcccaccttgacttcccaaagtgctgggattatgggcgggtgtgagccattgcgcccagccttgaagtca

SEQ ID NO: 80168 - DNA, 201 bp, Homo sapiens
accaggcctcgaatatcatatgggaaatgtcatagttaaaaacgtacagccaggcccgtgtgctgttaatagtgtgaaattgtcatgttaaaaaaaaaaamaaaacaggaaccaaatgtgaccttgtgcatatattggtagctgaaaatcttcaaggctactgatgggtggccccttaatcttgtctttgattgctgtgtg

SEQ ID NO: 80169 - DNA, 128 bp, Homo sapiens
tgttttaaaaaacacttttcacaaaaatagtcctttgtcattacattatttactcatgtgtttgtacatttttgtatgttaatttatgaatgattttttcrgtaaaaaatacatattcaagaaccaaa

SEQ ID NO: 80170 - DNA, 201 bp, Homo sapiens
gcctcggtggaaggtggcgatccttatccccttccggaaccgccacgagcacctcccagtcctgttcagacacctgcttcccatgctccagcgccagcgcytgcagtttgcattttatgtggttgaacaagttggtacccaaccctttaatcgagccatgcttttcaacgttggctttcaagaagcaatgaaagacttgga

SEQ ID NO: 80171 - DNA, 201 bp, Homo sapiens
agtccagtttcttggaaggtatgctctgctgaggaagtcaaaagaacggcaagggctggatggcctcaacaacctgaactactttgcaaacatcacatacracgccttgtataaaaacataactgtcaacctgacacccgagctggctcaggtgaacgagtactgagaggagagaatgtacgtttgctttacccaccgcca

SEQ ID NO: 80172 - DNA, 201 bp, Homo sapiens
gtgacaacactatgatgtcatttggaaggatttgccaggacagactgattctgagtcctgggtgccgtatgtgtatgcggcagtgttgtcaggcgatcttktttgaagctctatgttgccataattaccatcaagtacacactgttggcaaaaggctaacacctgactttagaaaatgctgatttgagaacaaaaggaaag

SEQ ID NO: 80173 - DNA, 201 bp, Homo sapiens
aaagtgatcgcaactattatggatgtggacagatgccgaggcattttgcaaccaaattggataagtatatgtatctgcttccttataccgagttctttggyggagtgagtggcttaacagtggaacaatttcggaaaatcaatggctttcctaatgctttctggggttggggtggagaagatgacgacctctggaacagag

SEQ ID NO: 80174 - DNA, 201 bp, Homo sapiens
cctacctcttcatgatgcaagcccaaggcattctgatccgggacaacgtgagaacaatcggtgctcaggtttatgagcaggtgcttcggagtgcttatgcyaagaggaacagcagtgtaaatgactcagattatcctcttgacttgaaccacagtgaaaccttcctgcaaactacaacatttcttcctgaagacttcacct

SEQ ID NO: 80175 - DNA, 201 bp, Homo sapiens
gctgctgtacttcgtctatgtggcgcccggcatagtgaacacctacctcttcatgatgcaagcccaaggcattctgatccgggacaacgtgagaacaatcrgtgctcaggtttatgagcaggtgcttcggagtgcttatgccaagaggaacagcagtgtaaatgactcagattatcctcttgacttgaaccacagtgaaac

SEQ ID NO: 80176 - DNA, 201 bp, Homo sapiens
ttcgttgcatgtgatggttctgtggacatatgatccccacaaactgtgggagtgattggccaggccttgttttttttgtttgtttgtttgtgtttttgttyttttgaagaatagagtggtatttagaaaataaattgcattgcaaagctcttatcggctcatatgagagagcaggttcctgcccttgaaaatgccggtaag

SEQ ID NO: 80177 - DNA, 201 bp, Homo sapiens; identical to SEQ ID NO: 80161

SEQ ID NO: 80178 - DNA, 201 bp, Homo sapiens; identical to SEQ ID NO: 80170

SEQ ID NO: 80179 - DNA, 201 bp, Homo sapiens; identical to SEQ ID NO: 80162

SEQ ID NO: 80180 - DNA, 201 bp, Homo sapiens; identical to SEQ ID NO: 80171

SEQ ID NO: 80181 - DNA, 201 bp, Homo sapiens; identical to SEQ ID NO: 80174

SEQ ID NO: 80182 - DNA, 201 bp, Homo sapiens; identical to SEQ ID NO: 80173

SEQ ID NO: 80183 - DNA, 201 bp, Homo sapiens; identical to SEQ ID NO: 80175

SEQ ID NO: 80184 - DNA, 201 bp, Homo sapiens; identical to SEQ ID NO: 80164

SEQ ID NO: 80185 - DNA, 201 bp, Homo sapiens; identical to SEQ ID NO: 80165

SEQ ID NO: 80186 - DNA, 201 bp, Homo sapiens
ctgctgtcgatccagtggccactattgccattttcaatgcacttcatgtggaccccgtgctcaacatgctggtctttggagaaagtattctcaacgatgcrgtctccattgttctgaccaacacagctgaaggtttaacaagaaaaaatatgtcagatgtcagtgggtggcaaacatttttacaagcccttgactacttcc

SEQ ID NO: 80187 - DNA, 201 bp, Homo sapiens
tcctcctgcttccccctattatctttgagtctggatattcattacacaagggtaacttctttcaaaatattggttccatcaccctgtttgctgtttttggracggcaatctccgcttttgtagtaggtggaggaatttattttctgggtcaggctgatgtaatctctaaactcaacatgacagacagttttgcgtttggct

SEQ ID NO: 80188 - DNA, 201 bp, Homo sapiens
ggaaaacgccttccttggagtttggcatgatgatcatttttgcttatctgccttatgggcttgcagaaggaatctcactctcaggcatcatggccatcctkttctcaggcatcgtgatgtcccactacacgcaccataacctctccccagtcacccagatcctcatgcagcagaccctccgcaccgtggccttcttatgtg

SEQ ID NO: 80189 - DNA, 201 bp, Homo sapiens
agacacactgtccagaggcagaactgaagccctctcggcccctaccctaagccagccacccctcttcacagtgggtgagctgggctgggctggctggcatraggccaaggggtaggcctgagcgccagagtcgcccaggttagcccacaggattcctttgtgtgccatggaatgctgaaagatgggtgactggggaccctt

SEQ ID NO: 80190 - DNA, 201 bp, Homo sapiens
ccatttccttttagtggagaagagaggaagtcagagggtagggacctttgcctgcccctgggcgagtgcgggcagggatctgagaccagattgttctcgcrcccctgccagaactcactctcccctgaagtttagggtcccatctcccagatgtaagttgttttgcaaactcagtttgccaggatttctttctttcctaat

SEQ ID NO: 80191 - DNA, 155 bp, Homo sapiens
gaactcggtggtcctggaagctccgcaggatgggggagaagatggcggaagaggmgaggttccccaatacaactcatgagggtttcaatgtcaccctccacaccaccctggttgtcacgacgaaactggtgctcccgacccctggcaagcccatc

SEQ ID NO: 80192 - DNA, 201 bp, Homo sapiens
gaagtcagagcaggccagccaagcaggaagcacactgtttactttttgcatgaaaagtaaatgtgtacttgatagagctaaaatatgatcttttttaattyctcaaccccataatttgagccattgccttgcttaattttggtttccaccatttccttttagtggagaagagaggaagtcagagggtagggacctttgcct

SEQ ID NO: 80193 - DNA, 201 bp, Homo sapiens
ggaggccactgtgctgaggccctgcagtgtctgctcactgctgccatcttcgctgctagtcagggttccatcctctttcccctctcccagttccctaccaygttggatcccattcgtcacccatgctagggtccccaaagcactggggcaggggccagagcagcagcacccagtgctccctcctctactctgacctggggc

SEQ ID NO: 80194 - DNA, 155 bp, Homo sapiens; identical to SEQ ID NO: 80191

SEQ ID NO: 80195 - DNA, 201 bp, Homo sapiens; identical to SEQ ID NO: 80187

SEQ ID NO: 80196 - DNA, 201 bp, Homo sapiens; identical to SEQ ID NO: 80186

SEQ ID NO: 80197 - DNA, 201 bp, Homo sapiens; identical to SEQ ID NO: 80188

SEQ ID NO: 80198 - DNA, 201 bp, Homo sapiens; identical to SEQ ID NO: 80189

SEQ ID NO: 80199 - DNA, 201 bp, Homo sapiens; identical to SEQ ID NO: 80190

SEQ ID NO: 80200 - DNA, 201 bp, Homo sapiens; identical to SEQ ID NO: 80193

SEQ ID NO: 80201 - DNA, 201 bp, Homo sapiens; identical to SEQ ID NO: 80192

SEQ ID NO: 80202 - DNA, 155 bp, Homo sapiens; identical to SEQ ID NO: 80191

SEQ ID NO: 80203 - DNA, 155 bp, Homo sapiens; identical to SEQ ID NO: 80191

SEQ ID NO: 80204 - DNA, 155 bp, Homo sapiens; identical to SEQ ID NO: 80191

SEQ ID NO: 80205 - DNA, 201 bp, Homo sapiens
gccagctcgaccggctgctccccaaactggcccgtggctccctgtcagtgggggacaaggaccacatgtgcagtgtcaaaagtcgcctgtggaagctgctrtccccagccaggctggccaggcgggcccaccggagcaaatggctggagagttacctgctgcacctggaggagatgggtgtgtcagaggagatgcaggcac

SEQ ID NO: 80206 - DNA, 201 bp, Homo sapiens
cagtgggggacaaggaccacatgtgcagtgtcaaaagtcgcctgtggaagctgctatccccagccaggctggccaggcgggcccaccggagcaaatggctrgagagttacctgctgcacctggaggagatgggtgtgtcagaggagatgcaggcacgggccctggtgctgcagctgtgggccacacaggggaatatgggtc

SEQ ID NO: 80207 - DNA, 201 bp, Homo sapiens
tccccagccaggctggccaggcgggcccaccggagcaaatggctggagagttacctgctgcacctggaggagatgggtgtgtcagaggagatgcaggcacrggccctggtgctgcagctgtgggccacacaggggaatatgggtcccgctgccttctggctcctgctcttccttctcaagaatcctgaagccctggctgct

SEQ ID NO: 80208 - DNA, 201 bp, Homo sapiens
ccggtttccgtggcaaccctcagctgcctcatcgtggctgggaagggaaggaagcaagccggcagaaatagctatggaaggtcttgcgcaggctgcaaccytggtgtgctgggcgaaaacccttatgactccccccttccaaatcaggctgggttgtcactgagactagattctcacctgccttcaaagaagggccaattc

SEQ ID NO: 80209 - DNA, 201 bp, Homo sapiens
ataaaatactcttaagttgatctaatgaagtgtttccttaccattgtgattattgttactattatttgctatattttaatattgttgtttaccaaatattytcctttaaacagactcgctttttaaacttttttttttttttttgagacggagtttcacgcttattgcccaggctggagtgcaatggcacgatctcagctc

SEQ ID NO: 80210 - DNA, 201 bp, Homo sapiens
agactagattctcacctgccttcaaagaagggccaattccctttaaaggtcgcacctccttggaaccacagtcattagtgaattacactcaaggaaaagaygtgctcccaccaggcagctccagctgttacctgagatactgaagtgcagctcaggagacgattatttaaacctgcccttgttttaatcgttatttttctc

SEQ ID NO: 80211 - DNA, 201 bp, Homo sapiens
tgctatttttattaatataaagtcctgtttattgagaccctttaaatgcctgcgagagaccctacagacagtatgtctactcctcacagcatctctatgargagaaggagggttgtgcccacttcatagatgagaaaactgagaggtgaggtgacttgcctggggccacatagctcataagctgtagaactctgcaggcag

SEQ ID NO: 80212 - DNA, 201 bp, Homo sapiens
gccaaaaatagaaagtgaccatgaaaaataaattcgctggggaagggggctccatgctggtgtggccaaggctgagagctctctcttctctgttacaaaaygagataagcaagtgttagaattgccttaaggccacactggcatctccctgaccttctccagggacagaagcaggagtaagtttctcatcccatgggcgac

SEQ ID NO: 80213 - DNA, 201 bp, Homo sapiens
gaggtgggcggatcacttgaggtcgggagttcaagaccagcctggccaacatggcgaaaccccgtctctactaaacataaaaaaattagtcaggtgtggcrgtgcgtgcctgtaatcccagctattcaggaggctgaggcaccagaattgcttgaacccaggaggtggaggttgcagtgaactgagactgcgccacggcac

SEQ ID NO: 80214 - DNA, 201 bp, Homo sapiens
tgtttttaaaatgaactttttttccccccaattgctgccaatagtggataacatgtatcactcactgccaaaaatagaaagtgaccatgaaaaataaattygctggggaagggggctccatgctggtgtggccaaggctgagagctctctcttctctgttacaaaacgagataagcaagtgttagaattgccttaaggcca

SEQ ID NO: 80215 - DNA, 201 bp, Homo sapiens
agtgggccaggccgccagccccgccagccccgccagccccgccagccccgcgatggcttgggccgcgctcctcggcctcctggccgcactgttgctgctgytgctactgagccgccgccgcacgcggcgacctggtgagcctcccctggacctgggcagcatcccctggttggggtatgccttggactttggaaaagatgc

SEQ ID NO: 80216 - DNA, 201 bp, Homo sapiens
cggtggtgtgggagcctcgcaccaggctcgacttccatgcctatgccatcttcctcatggagaggatttttgatgtgcagcttccacattacagccccagwgatgaaaaggccaggatgaaactgactcttctccacagagagctccaggcactcacagaagccatgtataccaacctccatgcagtgctgttgggcgatg

SEQ ID NO: 80217 - DNA, 201 bp, Homo sapiens
cacagggagctggcaatgccctacctgcctgttctccagatggagaaacaggctctgagatttcacaggtcttgcccaaagtcattgattttgatgattaraaagaataaacacagtgtttcctgagtagcagtgattgttatgccttgctattttaataaagattctattttcgtataacattgtcaagtggaaacatgc

SEQ ID NO: 80218 - DNA, 201 bp, Homo sapiens
aaggccaggatgaaactgactcttctccacagagagctccaggcactcacagaagccatgtataccaacctccatgcagtgctgttgggcgatgctacagmagcaggcagtggctggcacgagatgggtctcctcgacttctcctacagcttcctgctcagagccggctacctgactctttacggaattgaggcgctgcca

SEQ ID NO: 80219 - DNA, 201 bp, Homo sapiens
agaagccatgtataccaacctccatgcagtgctgttgggcgatgctacagaagcaggcagtggctggcacgagatgggtctcctcgacttctcctacagcytcctgctcagagccggctacctgactctttacggaattgaggcgctgccacgcacccatgaaagccaggcccaggaccgcgtccactcagctgatgtctt

SEQ ID NO: 80220 - DNA, 201 bp, Homo sapiens
tttgccccggcttgcctgtaatcccagcactttgggaggccgaggtgggcggatcacttgaggtcgggagttcaagaccagcctggccaacatggcgaaaycccgtctctactaaacataaaaaaattagtcaggtgtggcggtgcgtgcctgtaatcccagctattcaggaggctgaggcaccagaattgcttgaaccca

SEQ ID NO: 80221 - DNA, 201 bp, Homo sapiens
tgtaatcccagcactttgggaggccgaggtgggcggatcacttgaggtcgggagttcaagaccagcctggccaacatggcgaaaccccgtctctactaaamataaaaaaattagtcaggtgtggcggtgcgtgcctgtaatcccagctattcaggaggctgaggcaccagaattgcttgaacccaggaggtggaggttgca

SEQ ID NO: 80222 - DNA, 201 bp, Homo sapiens
gatcaacgcagatgtggagatccctgagtttgacctcagcaggtacggcttcggtctgatgcagccggaacacgacgtgcccgtccgctaccgcatccgcycatgacacagggagcagatggatccacgtgctcgcctctgcccagcctgccccagcctgccccagcctcccagctttctgtgtgcacagttggcccgggt

SEQ ID NO: 80223 - DNA, 201 bp, Homo sapiens
tcctcgacttctcctacagcttcctgctcagagccggctacctgactctttacggaattgaggcgctgccacgcacccatgaaagccaggcccaggaccgygtccactcagctgatgtcttccacacctttcgccagctcgaccggctgctccccaaactggcccgtggctccctgtcagtgggggacaaggaccacatgt

SEQ ID NO: 80224 - DNA, 201 bp, Homo sapiens
ggatgggctttctcagtgtcagcactcaggtagggagctaaggaagacacagcccagacaagatggctggaaggagccagccaggactccttagactgatmaagccaaaaaagaaggtgccgatttcatgcattctagtgcagaagccccaactgtgatcacgatccagtctgcagacgtgttttgtttggacttcactta

SEQ ID NO: 80225 - DNA, 201 bp, Homo sapiens
gccccagcctcccagctttctgtgtgcacagttggcccgggtgcaggtgctagcattaccacttccctgcttttctcccagaaggctgggtccaggggagkgaaaagctaagagggtgaacaaagaaaagacattgaaagctctatggattatccactgcaaagttttctttccaaaatcaggctttgtctgctcccaatt

SEQ ID NO: 80226 - DNA, 201 bp, Homo sapiens
taactcttggccagagctgagtggcagccgcctcccttatgcaggacatgtgctctcggcttcaccagggttctgaccgggtctgcttctgcattcacagygcctcctggacctgaaggcatctgagtgtgagaccctgttctaactcttagaagtgacattgtaagaggtggtggggaccagctaattggtccaacccag

SEQ ID NO: 80227 - DNA, 201 bp, Homo sapiens
caggggagggaaaagctaagagggtgaacaaagaaaagacattgaaagctctatggattatccactgcaaagttttctttccaaaatcaggctttgtctgytcccaattcacctcgttactctcacctcgtgatatccacaaatgctattcagataaggcagaactaggagtcttcactgctctgcccccaactcccggag

SEQ ID NO: 80228 - DNA, 201 bp, Homo sapiens
ggattatccactgcaaagttttctttccaaaatcaggctttgtctgctcccaattcacctcgttactctcacctcgtgatatccacaaatgctattcagayaaggcagaactaggagtcttcactgctctgcccccaactcccggaggtgtcaccttcctagttcttatgagctagcatggcccgggccttatccagtcaa

SEQ ID NO: 80229 - DNA, 201 bp, Homo sapiens
cttcactgctctgcccccaactcccggaggtgtcaccttcctagttcttatgagctagcatggcccgggccttatccagtcaaagcggatgctggccacakaaaggccactcaggatgtcctttgtgtccattgatgtcattcagcagtcagtcccccaataatccttaaactagctaaaaccaaaggagtcccttagaag

SEQ ID NO: 80230 - DNA, 201 bp, Homo sapiens
cgacagagcaagactctgtctcaataaataaataattaattaaaataaaaaacagcttaaagagaaaaatggcctgcaaaccttttttatgatgctatttktattaatataaagtcctgtttattgagaccctttaaatgcctgcgagagaccctacagacagtatgtctactcctcacagcatctctatgaagagaagga

SEQ ID NO: 80231 - DNA, 201 bp, Homo sapiens
tccatgcagtgctgttgggcgatgctacagaagcaggcagtggctggcacgagatgggtctcctcgacttctcctacagcttcctgctcagagccggctayctgactctttacggaattgaggcgctgccacgcacccatgaaagccaggcccaggaccgcgtccactcagctgatgtcttccacacctttcgccagctcg

SEQ ID NO: 80232 - DNA, 201 bp, Homo sapiens
gatccacgtgctcgcctctgcccagcctgccccagcctgccccagcctcccagctttctgtgtgcacagttggcccgggtgcaggtgctagcattaccacytccctgcttttctcccagaaggctgggtccaggggagggaaaagctaagagggtgaacaaagaaaagacattgaaagctctatggattatccactgcaaa

SEQ ID NO: 80233 - DNA, 201 bp, Homo sapiens
tgtctcaataaataaataattaattaaaataaaaaacagcttaaagagaaaaatggcctgcaaaccttttttatgatgctatttttattaatataaagtcytgtttattgagaccctttaaatgcctgcgagagaccctacagacagtatgtctactcctcacagcatctctatgaagagaaggagggttgtgcccacttc

SEQ ID NO: 80234 - DNA, 201 bp, Homo sapiens
tgtgcttgatagcgtgctgagtgagagcctcaggcttacagctgcccccttcatcacccgcgaggttgtggtggacctggccatgcccatggcagacgggmgagaattcaacctgcgacgtggtgaccgcctcctcctcttccccttcctgagcccccagagagacccagaaatctacacagacccagaggtatttaaata

SEQ ID NO: 80235 - DNA, 126 bp, Homo sapiens
ggagtgggccaggccgccagccccgycagccccgccagccccgccagccccgcgatggcttgggccgcgctcctcggcctcctggccgcactgttgctgctgctgctactgagccgccgccgcacg

SEQ ID NO: 80236 - DNA, 201 bp, Homo sapiens
atcccagcactttgggaggccgaggtgggcggatcacttgaggtcgggagttcaagaccagcctggccaacatggcgaaaccccgtctctactaaacatamaaaaattagtcaggtgtggcggtgcgtgcctgtaatcccagctattcaggaggctgaggcaccagaattgcttgaacccaggaggtggaggttgcagtga

SEQ ID NO: 80237 - DNA, 201 bp, Homo sapiens
cttcatcccttgcttaagaatcaaaattactggacatatgttaggaatactctttctttctttctttctttttaagctcagtggcaagaatgaaatactctttttttttttttttttttgagatggagtctcgctctgctgcccaggctagagtgcagtggcgtgatctcggctcactgcaagctctgcctcccgtgttca

SEQ ID NO: 80238 - DNA, 201 bp, Homo sapiens
aagctcagtggcaagaatgaaatactctttttttttttttttttttgagatggagtctcgctctgctgcccaggctagagtgcagtggcgtgatctcggcycactgcaagctctgcctcccgtgttcacaccattctcctgcctcagcctcctgagtagctgggactacaggcacccgccaccacacccggctaatttttg

SEQ ID NO: 80239 - DNA, 201 bp, Homo sapiens
cattctcctgcctcagcctcctgagtagctgggactacaggcacccgccaccacacccggctaatttttggatttttagtagagatgggatttcaccgtaytagccaggatggtcttgatctcctgagctcgtgatctgcccgcctcggcctcccaaagtgctgggattacaggtgtgagccaccgcgcccagccaagaat

SEQ ID NO: 80240 - DNA, 201 bp, Homo sapiens
ccaggatggtcttgatctcctgagctcgtgatctgcccgcctcggcctcccaaagtgctgggattacaggtgtgagccaccgcgcccagccaagaataaamtactcttaagttgatctaatgaagtgtttccttaccattgtgattattgttactattatttgctatattttaatattgttgtttaccaaatattctcctt

SEQ ID NO: 80241 - DNA, 201 bp, Homo sapiens
agtagagatgggatttcaccgtattagccaggatggtcttgatctcctgagctcgtgatctgcccgcctcggcctcccaaagtgctgggattacaggtgtragccaccgcgcccagccaagaataaaatactcttaagttgatctaatgaagtgtttccttaccattgtgattattgttactattatttgctatattttaa

SEQ ID NO: 80242 - DNA, 201 bp, Homo sapiens
attgttgtttaccaaatattctcctttaaacagactcgctttttaaacttttttttttttttttgagacggagtttcacgcttattgcccaggctggagtrcaatggcacgatctcagctcaccacaacctccacctcctgggtttaagcaatgcttctgcctcagcttcccaagtagctgagattacaggcgcacaccac

SEQ ID NO: 80243 - DNA, 201 bp, Homo sapiens
tcctcacgaggatgaaggagaagcacggtgacatctttactatactggttgggggcaggtatgtcaccgttctcctggacccacactcctacgacgcggtkgtgtgggagcctcgcaccaggctcgacttccatgcctatgccatcttcctcatggagaggatttttgatgtgcagcttccacattacagccccagtgatg

SEQ ID NO: 80244 - DNA, 201 bp, Homo sapiens
tgtcttccacacctttcgccagctcgaccggctgctccccaaactggcccgtggctccctgtcagtgggggacaaggaccacatgtgcagtgtcaaaagtygcctgtggaagctgctatccccagccaggctggccaggcgggcccaccggagcaaatggctggagagttacctgctgcacctggaggagatgggtgtgtc

SEQ ID NO: 80245 - DNA, 201 bp, Homo sapiens
accacaacctccacctcctgggtttaagcaatgcttctgcctcagcttcccaagtagctgagattacaggcgcacaccaccacgcccaactgatttttgtwtttttagtagagacggggtttccccatgttggtcaggctggtctcgaactcctgacctcgtgatttgcctgcctgggcctcccaaagtgctaggattaca

SEQ ID NO: 80246 - DNA, 201 bp, Homo sapiens
ctgctctgcccccaactcccggaggtgtcaccttcctagttcttatgagctagcatggcccgggccttatccagtcaaagcggatgctggccacagaaagrccactcaggatgtcctttgtgtccattgatgtcattcagcagtcagtcccccaataatccttaaactagctaaaaccaaaggagtcccttagaagatctg

SEQ ID NO: 80247 - DNA, 201 bp, Homo sapiens
accaccacgcccaactgatttttgtatttttagtagagacggggtttccccatgttggtcaggctggtctcgaactcctgacctcgtgatttgcctgcctkggcctcccaaagtgctaggattacaggcatgagccaccatgcccggcctaaactttgtttttaaaatgaactttttttccccccaattgctgccaatagt

SEQ ID NO: 80248 - DNA, 201 bp, Homo sapiens
gtgaccgcctcctcctcttccccttcctgagcccccagagagacccagaaatctacacagacccagaggtatttaaatacaaccgattcctgaaccctgayggatcagagaagaaagacttttacaaggatgggaaacggctgaagaattacaacatgccctggggggcggggcacaatcactgcctggggaggagttatg

SEQ ID NO: 80249 - DNA, 201 bp, Homo sapiens
tagagacggggtttccccatgttggtcaggctggtctcgaactcctgacctcgtgatttgcctgcctgggcctcccaaagtgctaggattacaggcatgarccaccatgcccggcctaaactttgtttttaaaatgaactttttttccccccaattgctgccaatagtggataacatgtatcactcactgccaaaaataga

SEQ ID NO: 80250 - DNA, 201 bp, Homo sapiens
ttccccatgttggtcaggctggtctcgaactcctgacctcgtgatttgcctgcctgggcctcccaaagtgctaggattacaggcatgagccaccatgcccrgcctaaactttgtttttaaaatgaactttttttccccccaattgctgccaatagtggataacatgtatcactcactgccaaaaatagaaagtgaccatga

SEQ ID NO: 80251 - DNA, 201 bp, Homo sapiens
gaagcaaatgtgaatcgtattattttaaaaagtggcagagtgacttaactgatcatgcatgatccctcatccctgaaattgagtttatgtagtcattttasttattttattcattagctaactttgtctatgtatatttctagatattgattagtgtaatcgattataaaggatatttatcaaatccagggattgcatttt

SEQ ID NO: 80252 - DNA, 201 bp, Homo sapiens
ccatcttgcctggataaatacaccaagaaagaatggtggtttgggccacatgaacatcgcactcttgtcagacttaactaagcagatttcccgagactackgtgtgctgttagaaggttctggtcttgcactaagaggtctcttcataattgaccccaatggagtcatcaagcatttgagcgtcaacgatctcccagtggg

SEQ ID NO: 80253 - DNA, 201 bp, Homo sapiens
acacattgaaagcttctgatcaacggtcctgaaattttcatcttgaatgtctttgtattaaactgaattttcttttaagctaacaaagatcataattttcmatgattagccgtgtaactcctgcaatgaatgtttatgtgattgaagcaaatgtgaatcgtattattttaaaaagtggcagagtgacttaactgatcatgc

SEQ ID NO: 80254 - DNA, 201 bp, Homo sapiens
accaattatgcttgtattcataagtattactctaaatgttttgtttttgtaattctggctaagaccttttaaacatggttagttgctagtacaaggaatcstttattggtaacatcttggtggctggctagctagtttctacagaacataatttgcctctatagaaggctattcttagatcatgtctcaatggaaacactc

SEQ ID NO: 80255 - DNA, 201 bp, Homo sapiens
aggggaaatatttggtgcttttcttctatcctttggatttcacctttgtgtgtcctacagaaattgttgcttttagtgacaaagctaacgaatttcacgaygtgaactgtgaagttgtcgcagtctcagtggattcccactttagccatcttgcctggataaatacaccaagaaagaatggtggtttgggccacatgaaca

SEQ ID NO: 80256 - DNA, 201 bp, Homo sapiens; identical to SEQ ID NO: 80251

SEQ ID NO: 80257 - DNA, 201 bp, Homo sapiens; identical to SEQ ID NO: 80252

SEQ ID NO: 80258 - DNA, 201 bp, Homo sapiens
aacactcttctttcttagccttacttgaatcttgctttcatcttgaatgtctttgtattaaactgaattttcttttaagctaacaaagatcataattttcmatgattagccgtgtaactcctgcaatgaatgtttatgtgattgaagcaaatgtgaatcgtattattttaaaaagtggcagagtgacttaactgatcatgc

SEQ ID NO: 80259 - DNA, 201 bp, Homo sapiens
aacctgcttttatcattttcaagatggtactctaaatgttttgtttttgtaattctggctaagaccttttaaacatggttagttgctagtacaaggaatcstttattggtaacatcttggtggctggctagctagtttctacagaacataatttgcctctatagaaggctattcttagatcatgtctcaatggaaacactc

SEQ ID NO: 80260 - DNA, 201 bp, Homo sapiens; identical to SEQ ID NO: 80255

SEQ ID NO: 80261 - DNA, 201 bp, Homo sapiens; identical to SEQ ID NO: 80251

SEQ ID NO: 80262 - DNA, 201 bp, Homo sapiens; identical to SEQ ID NO: 80252

SEQ ID NO: 80263 - DNA, 201 bp, Homo sapiens; identical to SEQ ID NO: 80253

SEQ ID NO: 80264 - DNA, 201 bp, Homo sapiens; identical to SEQ ID NO: 80254

SEQ ID NO: 80265 - DNA, 201 bp, Homo sapiens; identical to SEQ ID NO: 80255

SEQ ID NO: 80266 - DNA, 201 bp, Homo sapiens
tagctccctccacttggctcccctggtcccgctcgctcggccgggagctgctctgtgcttttctctctgattctccagcgacaggacccggcgccgggcamtgagcaccgccaccatggggaagggggttggacgtgataagtatgagcctgcagctgtttcagaacaaggtgataaaaagggcaaaaagggcaaaaaaga

SEQ ID NO: 80267 - DNA, 201 bp, Homo sapiens
ccgcggcagccctagctccctccacttggctcccctggtcccgctcgctcggccgggagctgctctgtgcttttctctctgattctccagcgacaggaccyggcgccgggcactgagcaccgccaccatggggaagggggttggacgtgataagtatgagcctgcagctgtttcagaacaaggtgataaaaagggcaaaaa

SEQ ID NO: 80268 - DNA, 201 bp, Homo sapiens
gcatcggcccgagccgccggccgccctcccaccctcccgccccgcggcagccctagctccctccacttggctcccctggtcccgctcgctcggccgggagmtgctctgtgcttttctctctgattctccagcgacaggacccggcgccgggcactgagcaccgccaccatggggaagggggttggacgtgataagtatgag

SEQ ID NO: 80269 - DNA, 201 bp, Homo sapiens
ataactcctcgctcactggtgaatcagaaccccagactaggtctccagatttcacaaatgaaaaccccctggagacgaggaacattgccttcttttcaacmaattgtgttgaaggcaccgcacgtggtattgttgtctacactggggatcgcactgtgatgggaagaattgccacacttgcttctgggctggaaggaggcc

SEQ ID NO: 80270 - DNA, 201 bp, Homo sapiens
gcgacgccctggcggctgggtggagaaggaaacctactattagccccccgtcctgcacgccgtggagcatcaggccacacactctgcatccgacacccacmccctctttgtgtacttcagtcttggagtttggaactctaccctggtaggaaagcaccgcagcatgtggggaagcaagacgtcctggaatgaagcatgtag

SEQ ID NO: 80271 - DNA, 201 bp, Homo sapiens
ctatggggggaggggggagggctgcctgaaaaccatccatctgtggaaatgacagcggggaaggtttttatgtgcctttttgtttttgtaaaaaaggaacmcccggaaagactgaaagaatacattttatatctggatttttacaaataaagatggctattataatggaatttgtctgtgccctcgtcgcttctttggtac

SEQ ID NO: 80272 - DNA, 201 bp, Homo sapiens
cctggtggttctgtgccttcccctactctcttctcatcttcgtatatgacgaagtcagaaaactcatcatcaggcgacgccctggcggctgggtggagaargaaacctactattagccccccgtcctgcacgccgtggagcatcaggccacacactctgcatccgacacccaccccctctttgtgtacttcagtcttggag

SEQ ID NO: 80273 - DNA, 201 bp, Homo sapiens
agaaaactcatcatcaggcgacgccctggcggctgggtggagaaggaaacctactattagccccccgtcctgcacgccgtggagcatcaggccacacactytgcatccgacacccaccccctctttgtgtacttcagtcttggagtttggaactctaccctggtaggaaagcaccgcagcatgtggggaagcaagacgtcc

SEQ ID NO: 80274 - DNA, 201 bp, Homo sapiens
cgccgtggagcatcaggccacacactctgcatccgacacccaccccctctttgtgtacttcagtcttggagtttggaactctaccctggtaggaaagcacmgcagcatgtggggaagcaagacgtcctggaatgaagcatgtagctctatggggggaggggggagggctgcctgaaaaccatccatctgtggaaatgacag

SEQ ID NO: 80275 - DNA, 201 bp, Homo sapiens
tcatcttcgtatatgacgaagtcagaaaactcatcatcaggcgacgccctggcggctgggtggagaaggaaacctactattagccccccgtcctgcacgcygtggagcatcaggccacacactctgcatccgacacccaccccctctttgtgtacttcagtcttggagtttggaactctaccctggtaggaaagcaccgca

SEQ ID NO: 80276 - DNA, 201 bp, Homo sapiens
gagtttggaactctaccctggtaggaaagcaccgcagcatgtggggaagcaagacgtcctggaatgaagcatgtagctctatggggggaggggggagggcygcctgaaaaccatccatctgtggaaatgacagcggggaaggtttttatgtgcctttttgtttttgtaaaaaaggaacacccggaaagactgaaagaatac

SEQ ID NO: 80277 - DNA, 201 bp, Homo sapiens
tggccactgtcacggtctgtctgacacttactgccaaacgcatggcaaggaaaaactgcttagtgaagaacttagaagctgtggagaccttggggtccacrtccaccatctgctctgataaaactggaactctgactcagaaccggatgacagtggcccacatgtggtttgacaatcaaatccatgaagctgatacgacag

SEQ ID NO: 80278 - DNA, 201 bp, Homo sapiens
ggtgacgtttcgcggcgtgggcggggccagcacgcaggttgcatattttaggaagtgaggaggaggcgcgggctggagctgcggcggggtctggggcgcaragcagcggcgggaggaggcggacacgtggcaacagcggtagcagcccgggcggcggcagcaacagcggcggcggcatcggcccgagccgccggccgccct

SEQ ID NO: 80279 - DNA, 201 bp, Homo sapiens; identical to SEQ ID NO: 80269

SEQ ID NO: 80280 - DNA, 201 bp, Homo sapiens
gcgacgccctggcggctgggtggagaaggaaacctactattagccccccgtcctgcacgccgtggagcatcaggccacacactctgcatccgacacccacmccctctttgtgtacttcagtcttggagtttggaactctaccctggtaggaaagcaccgcagcatgtggggaagcaagacggctgcctgaaaaccatccat

SEQ ID NO: 80281 - DNA, 201 bp, Homo sapiens
gcatgtggggaagcaagacggctgcctgaaaaccatccatctgtggaaatgacagcggggaaggtttttatgtgcctttttgtttttgtaaaaaaggaacmcccggaaagactgaaagaatacattttatatctggatttttacaaataaagatggctattataatggaatttgtctgtgccctcgtcgcttctttggtac

SEQ ID NO: 80282 - DNA, 201 bp, Homo sapiens; identical to SEQ ID NO: 80272

SEQ ID NO: 80283 - DNA, 201 bp, Homo sapiens
agaaaactcatcatcaggcgacgccctggcggctgggtggagaaggaaacctactattagccccccgtcctgcacgccgtggagcatcaggccacacactytgcatccgacacccaccccctctttgtgtacttcagtcttggagtttggaactctaccctggtaggaaagcaccgcagcatgtggggaagcaagacggct

SEQ ID NO: 80284 - DNA, 201 bp, Homo sapiens
cgccgtggagcatcaggccacacactctgcatccgacacccaccccctctttgtgtacttcagtcttggagtttggaactctaccctggtaggaaagcacmgcagcatgtggggaagcaagacggctgcctgaaaaccatccatctgtggaaatgacagcggggaaggtttttatgtgcctttttgtttttgtaaaaaagg

SEQ ID NO: 80285 - DNA, 201 bp, Homo sapiens; identical to SEQ ID NO: 80275

SEQ ID NO: 80286 - DNA, 201 bp, Homo sapiens
ctgcatccgacacccaccccctctttgtgtacttcagtcttggagtttggaactctaccctggtaggaaagcaccgcagcatgtggggaagcaagacggcygcctgaaaaccatccatctgtggaaatgacagcggggaaggtttttatgtgcctttttgtttttgtaaaaaaggaacacccggaaagactgaaagaatac

SEQ ID NO: 80287 - DNA, 201 bp, Homo sapiens; identical to SEQ ID NO: 80277

SEQ ID NO: 80288 - DNA, 201 bp, Homo sapiens; identical to SEQ ID NO: 80266

SEQ ID NO: 80289 - DNA, 201 bp, Homo sapiens; identical to SEQ ID NO: 80267

SEQ ID NO: 80290 - DNA, 201 bp, Homo sapiens; identical to SEQ ID NO: 80268

SEQ ID NO: 80291 - DNA, 201 bp, Homo sapiens; identical to SEQ ID NO: 80269

SEQ ID NO: 80292 - DNA, 201 bp, Homo sapiens; identical to SEQ ID NO: 80270

SEQ ID NO: 80293 - DNA, 201 bp, Homo sapiens; identical to SEQ ID NO: 80271

SEQ ID NO: 80294 - DNA, 201 bp, Homo sapiens; identical to SEQ ID NO: 80272

SEQ ID NO: 80295 - DNA, 201 bp, Homo sapiens; identical to SEQ ID NO: 80273

SEQ ID NO: 80296 - DNA, 201 bp, Homo sapiens; identical to SEQ ID NO: 80274

SEQ ID NO: 80297 - DNA, 201 bp, Homo sapiens; identical to SEQ ID NO: 80275

SEQ ID NO: 80298 - DNA, 201 bp, Homo sapiens; identical to SEQ ID NO: 80276

SEQ ID NO: 80299 - DNA, 201 bp, Homo sapiens; identical to SEQ ID NO: 80277

SEQ ID NO: 80300 - DNA, 201 bp, Homo sapiens; identical to SEQ ID NO: 80278

SEQ ID NO: 80301 - DNA, 201 bp, Homo sapiens; identical to SEQ ID NO: 80266

SEQ ID NO: 80302 - DNA, 201 bp, Homo sapiens; identical to SEQ ID NO: 80267

SEQ ID NO: 80303 - DNA, 201 bp, Homo sapiens; identical to SEQ ID NO: 80268

SEQ ID NO: 80304 - DNA, 201 bp, Homo sapiens; identical to SEQ ID NO: 80269

SEQ ID NO: 80305 - DNA, 201 bp, Homo sapiens; identical to SEQ ID NO: 80270

SEQ ID NO: 80306 - DNA, 201 bp, Homo sapiens; identical to SEQ ID NO: 80271

SEQ ID NO: 80307 - DNA, 201 bp, Homo sapiens
ttcaggctaaccaggaaaacctaccttctcttctcatcttcgtatatgacgaagtcagaaaactcatcatcaggcgacgccctggcggctgggtggagaargaaacctactattagccccccgtcctgcacgccgtggagcatcaggccacacactctgcatccgacacccaccccctctttgtgtacttcagtcttggag

SEQ ID NO: 80308 - DNA, 201 bp, Homo sapiens; identical to SEQ ID NO: 80273

SEQ ID NO: 80309 - DNA, 201 bp, Homo sapiens; identical to SEQ ID NO: 80274

SEQ ID NO: 80310 - DNA, 201 bp, Homo sapiens; identical to SEQ ID NO: 80275

SEQ ID NO: 80311 - DNA, 201 bp, Homo sapiens; identical to SEQ ID NO: 80276

SEQ ID NO: 80312 - DNA, 201 bp, Homo sapiens; identical to SEQ ID NO: 80277

SEQ ID NO: 80313 - DNA, 201 bp, Homo sapiens; identical to SEQ ID NO: 80278

SEQ ID NO: 80314 - DNA, 201 bp, Homo sapiens; identical to SEQ ID NO: 80266

SEQ ID NO: 80315 - DNA, 201 bp, Homo sapiens; identical to SEQ ID NO: 80267

SEQ ID NO: 80316 - DNA, 201 bp, Homo sapiens; identical to SEQ ID NO: 80268

SEQ ID NO: 80317 - DNA, 201 bp, Homo sapiens; identical to SEQ ID NO: 80269

SEQ ID NO: 80318 - DNA, 201 bp, Homo sapiens; identical to SEQ ID NO: 80270

SEQ ID NO: 80319 - DNA, 201 bp, Homo sapiens; identical to SEQ ID NO: 80271

SEQ ID NO: 80320 - DNA, 201 bp, Homo sapiens; identical to SEQ ID NO: 80272

SEQ ID NO: 80321 - DNA, 201 bp, Homo sapiens; identical to SEQ ID NO: 80273

SEQ ID NO: 80322 - DNA, 201 bp, Homo sapiens; identical to SEQ ID NO: 80274

SEQ ID NO: 80323 - DNA, 201 bp, Homo sapiens; identical to SEQ ID NO: 80275

SEQ ID NO: 80324 - DNA, 201 bp, Homo sapiens; identical to SEQ ID NO: 80276

SEQ ID NO: 80325 - DNA, 201 bp, Homo sapiens; identical to SEQ ID NO: 80277

SEQ ID NO: 80326 - DNA, 201 bp, Homo sapiens; identical to SEQ ID NO: 80278

SEQ ID NO: 80327 - DNA, 201 bp, Homo sapiens
gcgcagccccgagctgggcagtgtccccagccgccatggatagcgacgacgagatggtggaggaggcggtggaagggcacctggacgatgacggattaccrcacgggttctgcacagtcacctactcctccacagacagatttgaggggaactttgttcacggagaaaagaacggacgggggaagttcttcttctttgatg

SEQ ID NO: 80328 - DNA, 201 bp, Homo sapiens
acattcgtcatggagtgtgctggatatattacccagatggaggaagccttgtaggagaagtaaatgaagatggggagatgactggagagaagatagcctaygtgtaccctgatgagaggaccgcactttatgggaaatttattgatggagagatgatagaaggcaaactggctacccttatgtccactgaagaagggaggc

SEQ ID NO: 80329 - DNA, 201 bp, Homo sapiens
acatctgtttaatcggctatttacagtcgccctttaccgccacctgtaagaggcagcgccataacgacactaagtggccgggccggaagccgggtgcccartggttttctccacttgaggacgcctgaatctgtgaagtggttggcacttggagaaacagagagacagctggggacatcacacgtacagggcgggaggcgc

SEQ ID NO: 80330 - DNA, 201 bp, Homo sapiens
accctgatgagaggaccgcactttatgggaaatttattgatggagagatgatagaaggcaaactggctacccttatgtccactgaagaagggaggcctcaytttgaactgatgcctggaaattcagtgtaccactttgataagtcgacttcatcttgcatttctaccaatgctcttcttccagatccttatgaatcagaaa

SEQ ID NO: 80331 - DNA, 201 bp, Homo sapiens
gcgcgggaaagaggcgcgccagacggagggtccttccttcctcgttagctccactcggcggctccttttccattaccacagcagcaaggaggaacctgcckagccttcggtgcggcttgtttcctgcctgacagagagcccgctgccatttggatttgatgaatttctgaatcacccgagggcctggcgacccgaaggagg

SEQ ID NO: 80332 - DNA, 201 bp, Homo sapiens
ggctccttttccattaccacagcagcaaggaggaacctgccgagccttcggtgcggcttgtttcctgcctgacagagagcccgctgccatttggatttgaygaatttctgaatcacccgagggcctggcgacccgaaggagggcggggagtgggggcgctggggtggacccgccatcctgcggaatccgggccagataaca

SEQ ID NO: 80333 - DNA, 201 bp, Homo sapiens
tggaggggtattatgtggatgatgccttgcagggccagggagtttacacttacgaagatgggggagttctccagggcacgtatgtagacggagagctgaayggtccagcccaggaatatgacacagatgggagactgatcttcaaggggcagtataaagataacattcgtcatggagtgtgctggatatattacccagatg

SEQ ID NO: 80334 - DNA, 201 bp, Homo sapiens
aaggtagctgtgggacctaatactgttatgtctttttataatggagttcgaattacacaccaagaggttgacagcagggactgggcccttaatgggaacaycctctcccttgatgaagaaacggtcattgatgtgcctgagccctataaccacgtatccaagtactgtgcctccttgggacacaaggcaaatcactccttc

SEQ ID NO: 80335 - DNA, 201 bp, Homo sapiens
acaagtacaagtacccagaaggctctgaccaggaaagacaagtgttccaaaaggctttggggaaacttaaacccaacacgccatttgccgcgacgtcttcratgggtttggaaacagaggaacaggagcccagcatcatcgggaagctgaaggtcgctggcatgctggcagtaggcaaagaagtcaacctggtcctactgc

SEQ ID NO: 80336 - DNA, 201 bp, Homo sapiens
cacggagcagggagagctcaccatggaatgaaccccccgcccatgctgtccggcctgggaaaccctctccatctcccaaggctgccagacatggacctccrggctccagcacatccccctctcctctcccccaggttggggctgggtccaccctgtcctatgacttgatcacttttgcacattccctggccgcttctcccc

SEQ ID NO: 80337 - DNA, 201 bp, Homo sapiens
actggatgagccggtgagggactgcgtgctgatggtggagggaagcggcctgctgttgggtaacctgaagatcgacgtgccgaccctagggcccaaggagsggtcccgggtccgttttgatatcctgccctcccggagtggcaccaagcaactgctcgccgacttctcctgcaacaagttccctgcaatcaaggccatgtt

SEQ ID NO: 80338 - DNA, 201 bp, Homo sapiens
tccgttttgatatcctgccctcccggagtggcaccaagcaactgctcgccgacttctcctgcaacaagttccctgcaatcaaggccatgttgtccatcgaygtagccgaatgaagggcgctggtggcctcccgtacaaacttggacaacacggagcagggagagctcaccatggaatgaaccccccgcccatgctgtccgg

SEQ ID NO: 80339 - DNA, 201 bp, Homo sapiens
cagtaggcaaagaagtcaacctggtcctactgctcaaaaacctgagcagggatacgaagacagtgacagtgaacatgacagcctggaccatcatctacaayggcacgcttgtacatgaagtgtggaaggactctgccacaatgtccctggaccctgaggaagaggcagaacatcccataaagatctcgtacgctcagtatg

SEQ ID NO: 80340 - DNA, 201 bp, Homo sapiens
atgccgaccgcatcacctggctgtacgacaacaccactggcaaacagtggaagaattccgtgaacagtcacaccattggcaggtacatcagcaccaaggckgtgggcagcaatgctcgcatggacgtcacggacaagtacaagtacccagaaggctctgaccaggaaagacaagtgttccaaaaggctttggggaaactta

SEQ ID NO: 80341 - DNA, 201 bp, Homo sapiens
gttggccgggtgctgagtgccatgatcaatagcaatgatgacaatggtgtgcttgctgggaattggagcggcacttacaccggtggccgggacccaaggarctggaacggcagcgtggagatcctcaaaaattggaaaaaatctggcttcagcccagtccgatatggccagtgctgggtctttgctgggaccctcaacaca

SEQ ID NO: 80342 - DNA, 131 bp, Homo sapiens
ctctaggagtccagagtatcaactggcagamggccttcaaccgacaagcgcatcacacagacaagttctccagccaggagctcatcttgcggagaggccaaaacttccaggtcttaatgatcatgaacaaa

SEQ ID NO: 80343 - DNA, 161 bp, Homo sapiens
tacaggagagaagctggtctagactgtttgctgatccccaacctgcacggggcattcctgcttctctctcaggccaccacagagggcaggggatggttagycacctgccccagcactcacaccctaactcaaaataaatgttaaataagtgcgatcacaca

SEQ ID NO: 80344 - DNA, 201 bp, Homo sapiens
gacgttcatactgctttttaacccctggctgaatgtggatagcgtctttatgggtaaccacgctgagagagaagagtatgttcaggaagatgccggcatcmtctttgtgggaagcacaaaccgaattggcatgattggctggaactttggacagtttgaagaagacattctcagcatctgcctctcaatcttggataggag

SEQ ID NO: 80345 - DNA, 201 bp, Homo sapiens
ggacctccgggctccagcacatccccctctcctctcccccaggttggggctgggtccaccctgtcctatgacttgatcacttttgcacattccctggccgyttctccccagagctgcctgctctgtgagccccacagccctgctcattcctcacgcccttcaatgctgcaggatggactggcccctgacccagggactctc

SEQ ID NO: 80346 - DNA, 201 bp, Homo sapiens
acgcttgtacatgaagtgtggaaggactctgccacaatgtccctggaccctgaggaagaggcagaacatcccataaagatctcgtacgctcagtatgagargtacctgaagtcagacaacatgatccggatcacagcggtgtgcaaggtcccagatgagtctgaggtggtggtggagcgggacatcatcctggacaacccc

SEQ ID NO: 80347 - DNA, 201 bp, Homo sapiens; identical to SEQ ID NO: 80335

SEQ ID NO: 80348 - DNA, 201 bp, Homo sapiens
cacggagcagggagagctcaccatggaatgaaccccccgcccatgctgtccggcctgggaaaccctctccatctcccaaggctgccagacatggacctccrggctccagcacatccccctctcctctcccccagagctgcctgctctgtgagccccacagccctgctcattcctcacgcccttcaatgctgcaggatggac

SEQ ID NO: 80349 - DNA, 201 bp, Homo sapiens; identical to SEQ ID NO: 80337

SEQ ID NO: 80350 - DNA, 201 bp, Homo sapiens; identical to SEQ ID NO: 80338

SEQ ID NO: 80351 - DNA, 201 bp, Homo sapiens; identical to SEQ ID NO: 80339

SEQ ID NO: 80352 - DNA, 201 bp, Homo sapiens; identical to SEQ ID NO: 80340

SEQ ID NO: 80353 - DNA, 201 bp, Homo sapiens; identical to SEQ ID NO: 80341

SEQ ID NO: 80354 - DNA, 201 bp, Homo sapiens
gtctgtcagcactgtccgtgccattcccagaggagcctgagaagaggcagaggaaggcgaaacatggctgctctaggagtccagagtatcaactggcagamggccttcaaccgacaagcgcatcacacagacaagttctccagccaggagctcatcttgcggagaggccaaaacttccaggtcttaatgatcatgaacaaa

SEQ ID NO: 80355 - DNA, 161 bp, Homo sapiens; identical to SEQ ID NO: 80343

SEQ ID NO: 80356 - DNA, 201 bp, Homo sapiens; identical to SEQ ID NO: 80344

SEQ ID NO: 80357 - DNA, 201 bp, Homo sapiens; identical to SEQ ID NO: 80346

SEQ ID NO: 80358 - DNA, 201 bp, Homo sapiens; identical to SEQ ID NO: 80335

SEQ ID NO: 80359 - DNA, 201 bp, Homo sapiens; identical to SEQ ID NO: 80336

SEQ ID NO: 80360 - DNA, 201 bp, Homo sapiens; identical to SEQ ID NO: 80337

SEQ ID NO: 80361 - DNA, 201 bp, Homo sapiens; identical to SEQ ID NO: 80338

SEQ ID NO: 80362 - DNA, 201 bp, Homo sapiens; identical to SEQ ID NO: 80339

SEQ ID NO: 80363 - DNA, 201 bp, Homo sapiens; identical to SEQ ID NO: 80340

SEQ ID NO: 80364 - DNA, 201 bp, Homo sapiens; identical to SEQ ID NO: 80341

SEQ ID NO: 80365 - DNA, 201 bp, Homo sapiens; identical to SEQ ID NO: 80354

SEQ ID NO: 80366 - DNA, 161 bp, Homo sapiens; identical to SEQ ID NO: 80343

SEQ ID NO: 80367 - DNA, 201 bp, Homo sapiens; identical to SEQ ID NO: 80344

SEQ ID NO: 80368 - DNA, 201 bp, Homo sapiens; identical to SEQ ID NO: 80345

SEQ ID NO: 80369 - DNA, 201 bp, Homo sapiens; identical to SEQ ID NO: 80346

SEQ ID NO: 80370 - DNA, 201 bp, Homo sapiens
ttcagatgtagaaggcctttttgacagccccccaggttcagatgatgcaaagcttattgatatattttatcccggagatcagcagtctgtgacatttggamccaagtctagagtgggaatgggtggcatggaagccaaggtgaaagcagccctctgggctttgcaaggtggcacttctgttgttattgccaatggaaccca

SEQ ID NO: 80371 - DNA, 201 bp, Homo sapiens
gtcatcacagacattgtggaggggaagaaagttggtaccttcttttcagaagtaaagcctgcaggccctactgttgagcagcagggagaaatggcgcgatmtggaggaaggatgttggccaccttggaacctgagcagagagcagaaattatccatcatctggctgatctgttgacggaccagcgtgatgagatcctgtta

SEQ ID NO: 80372 - DNA, 201 bp, Homo sapiens
tgcttctgggctccgtttggcaatagcagtcttggctgatgtgcacagtctggctcccagctcaccctttttttttaaagtaagaaaatagttgctaccgrtagggactttgccaagtccaattatcttctaggattgaaaggtgcattttccccataaaaaaggcgaggaaaacccatggctgctttgtgtcacctcagt

SEQ ID NO: 80373 - DNA, 201 bp, Homo sapiens
gctgtgttccccgtgatgcagctggaacccaagctgcagcaggagatgcaagtttcaggatgttccccactgagctggaggaatatctacagcagtgatgyttgaaatttttgtatgaattattttgtcgtcctacccttttcctccaaaacaaaaattagaggattattttaatactttggattcttcccccttttttga

SEQ ID NO: 80374 - DNA, 201 bp, Homo sapiens
gtacccctcagtcgtacacatggcaagtccttcgcccaccgcagtgagctgaagcatgccaagagaatcgtggtgaagctcggcagtgccgtggtgacccraggggatgaatgtggcctggccctggggcgcttggcatctattgttgagcaggtatcagtgctgcagaatcagggcagagagatgatgctggtgaccagt

SEQ ID NO: 80375 - DNA, 201 bp, Homo sapiens
ggacaccattatttgaccagatcattgatatgctgagagtggaacaggtaaaaattcatgcaggccccaaatttgcctcctatctgaccttcagcccctcygaagtgaagtcactccgaactgagtatggggacctggaattatgcattgaagtagtggacaacgttcaggatgccattgaccacatccacaagtatggca

SEQ ID NO: 80376 - DNA, 201 bp, Homo sapiens
tcagatgtagaaggcctttttgacagccccccaggttcagatgatgcaaagcttattgatatattttatcccggagatcagcagtctgtgacatttggaaycaagtctagagtgggaatgggtggcatggaagccaaggtgaaagcagccctctgggctttgcaaggtggcacttctgttgttattgccaatggaacccac

SEQ ID NO: 80377 - DNA, 201 bp, Homo sapiens
tttgtgtcacctcagtgacttacagtcccccttggcatttagttggtactagagccagtcatccttaacaaatcttttcacattttatttctttcacatgyagtcatcttcaaaaaggaaagatttggaattttagaaaaggggcaactcttctttttagcattctcatcagaaatggggtaaattaataagcattccaga

SEQ ID NO: 80378 - DNA, 201 bp, Homo sapiens
ttatctcaggagagagcccgctcttgtctcccagttcctggtagggtctgcctgttggaaagtgtacctggatgcttctgggctccgtttggcaatagcartcttggctgatgtgcacagtctggctcccagctcaccctttttttttaaagtaagaaaatagttgctaccgatagggactttgccaagtccaattatctt

SEQ ID NO: 80379 - DNA, 201 bp, Homo sapiens; identical to SEQ ID NO: 80370

SEQ ID NO: 80380 - DNA, 201 bp, Homo sapiens; identical to SEQ ID NO: 80371

SEQ ID NO: 80381 - DNA, 201 bp, Homo sapiens; identical to SEQ ID NO: 80372

SEQ ID NO: 80382 - DNA, 201 bp, Homo sapiens; identical to SEQ ID NO: 80373

SEQ ID NO: 80383 - DNA, 201 bp, Homo sapiens; identical to SEQ ID NO: 80374

SEQ ID NO: 80384 - DNA, 201 bp, Homo sapiens; identical to SEQ ID NO: 80375

SEQ ID NO: 80385 - DNA, 201 bp, Homo sapiens; identical to SEQ ID NO: 80376

SEQ ID NO: 80386 - DNA, 201 bp, Homo sapiens; identical to SEQ ID NO: 80377

SEQ ID NO: 80387 - DNA, 201 bp, Homo sapiens; identical to SEQ ID NO: 80378

SEQ ID NO: 80388 - DNA, 201 bp, Homo sapiens; identical to SEQ ID NO: 80370

SEQ ID NO: 80389 - DNA, 201 bp, Homo sapiens; identical to SEQ ID NO: 80371

SEQ ID NO: 80390 - DNA, 201 bp, Homo sapiens; identical to SEQ ID NO: 80372

SEQ ID NO: 80391 - DNA, 201 bp, Homo sapiens; identical to SEQ ID NO: 80373

SEQ ID NO: 80392 - DNA, 201 bp, Homo sapiens; identical to SEQ ID NO: 80374

SEQ ID NO: 80393 - DNA, 201 bp, Homo sapiens; identical to SEQ ID NO: 80375

SEQ ID NO: 80394 - DNA, 201 bp, Homo sapiens; identical to SEQ ID NO: 80376

SEQ ID NO: 80395 - DNA, 201 bp, Homo sapiens
tttgtgtcacctcagtgacttacagtcccccttggcatttagttggtactagagccagtcatccttaacaaatcttttcacattttatttctttcacatgyagtcatcttcaaaaaggaaagatttggaattttagaaaaggggcaactcttctttttagcattctcatcagaaagtcacaaaaatcgatggaatcatttc

SEQ ID NO: 80396 - DNA, 201 bp, Homo sapiens; identical to SEQ ID NO: 80378

SEQ ID NO: 80397 - DNA, 201 bp, Homo sapiens
agcttgtggccaccacaacgtatcaagctatctccagggttgggctcaggactcagagctgacgcagctggggtgccccttggttctggaggatgaggctyctccgcagacgccacatgcccctgcgcctggccatggtgggctgcgcctttgtgctcttcctcttcctcctgcatagggatgtgagcagcagagaggagg

SEQ ID NO: 80398 - DNA, 201 bp, Homo sapiens
ggtgtggcagtgtgggggccagctggagatcatcccctgctctgtcgtaggccatgtgttccggaccaagagcccccacaccttccccaagggcactagtrtcattgctcgcaatcaagtgcgcctggcagaggtctggatggacagctacaagaagattttctataggagaaatctgcaggcagcaaagatggcccaaga

SEQ ID NO: 80399 - DNA, 131 bp, Homo sapiens
gagacattggccagccaaaaggaaaggagtggccagggtacgacctggagtagggaagggaaaaagttcccggaaagaagagaattggatgagaggtctcrgtggaaataaaggttttctggcattggtca

SEQ ID NO: 80400 - DNA, 201 bp, Homo sapiens
caccagatgagggtgctatgggaccacagctgtctttgttcccattgcaactcaaccctgcgggaggccgcctgcatccctgagagccttctggagcctamagaggagacattggccagccaaaaggaaaggagtggccagggtacgacctggagtagggaagggaaaaagttcccggaaagaagagaattggatgagagg

SEQ ID NO: 80401 - DNA, 201 bp, Homo sapiens
ttcttttgactgtcagtagcaggatgtcaccagatgagggtgctatgggaccacagctgtctttgttcccattgcaactcaaccctgcgggaggccgcctrcatccctgagagccttctggagcctacagaggagacattggccagccaaaaggaaaggagtggccagggtacgacctggagtagggaagggaaaaagttc

SEQ ID NO: 80402 - DNA, 201 bp, Homo sapiens
atctgggaaggcttcttttgactgtcagtagcaggatgtcaccagatgagggtgctatgggaccacagctgtctttgttcccattgcaactcaaccctgcrggaggccgcctgcatccctgagagccttctggagcctacagaggagacattggccagccaaaaggaaaggagtggccagggtacgacctggagtagggaa

SEQ ID NO: 80403 - DNA, 201 bp, Homo sapiens
aggtttgtcccagaacccttttttctaagccccatataaaaggtagattaaaaaaacaaagtagcatgagtgaaattgagagagggacaggtaatgccttycagcccctaacttctaacaatctggaagcacaacgtgaaaatcacgtagcccaaccctatcattttcatattatgaaactgagtccaggtaagtgaatct

SEQ ID NO: 80404 - DNA, 201 bp, Homo sapiens
aatgtgggagaatggcttgagcccaggagttcaagaccggcctgagcaacatagtgaggatcccatctctacgcccaccctccccccggcaaaaaaaaaaagctgggtatggtggcttatgcctgtagtcgcagctactcagaaggctgaggtgggaggattgcttgttccccggaggttgaagctacagtgagccttgat

SEQ ID NO: 80405 - DNA, 201 bp, Homo sapiens
cccaggaggcagaggttgcagtgagccaagacagcaccattgcaccccagcctgagcaacaagagcgaaactccatctcaggaaaaaaaaaaaaaaaaaaagtatattctaacagacagatcagaggtctaagagatcctcccttgctattattacctgaagtctgtagaactgtttacagatatctccttgacaggtgtc

SEQ ID NO: 80406 - DNA, 201 bp, Homo sapiens
tggaggatgaggctcctccgcagacgccacatgcccctgcgcctggccatggtgggctgcgcctttgtgctcttcctcttcctcctgcatagggatgtgarcagcagagaggaggccacagagaagccgtggctgaagtccctggtgagccggaaggatcacgtcctggacctcatgctggaggccatgaacaaccttaga

SEQ ID NO: 80407 - DNA, 201 bp, Homo sapiens
acccaggaggcagaggttgcagtgagccaagacagcaccattgcaccccagcctgagcaacaagagcgaaactccatctcaggaaaaaaaaaaaaaaaaaaagtatattctaacagacagatcagaggtctaagagatcctcccttgctattattacctgaagtctgtagaactgtttacagatatctccttgacaggtgt

SEQ ID NO: 80408 - DNA, 201 bp, Homo sapiens
ttcaatgcctttgccagcgaccggatctccctgcagaggtccctggggccagacacccgaccacctgagtgtgtggaccagaagttccggcgctgcccccmactggccaccaccagcgtgatcattgtgttccacaacgaagcctggtccacactgctgcgaacagtgtacagcgtcctacacaccacccctgccatcttg

SEQ ID NO: 80409 - DNA, 201 bp, Homo sapiens
aacccaggaggcagaggttgcagtgagccaagacagcaccattgcaccccagcctgagcaacaagagcgaaactccatctcaggaaaaaaaaaaaaaaaaaaagtatattctaacagacagatcagaggtctaagagatcctcccttgctattattacctgaagtctgtagaactgtttacagatatctccttgacaggtg

SEQ ID NO: 80410 - DNA, 201 bp, Homo sapiens
tgctcaaggagatcatactggtggatgatgccagcacagaggagcacctaaaggagaagctggagcagtacgtgaagcagctgcaggtggtgagggtggtrcggcaggaggagcggaaggggctgatcaccgcccggctgctgggggccagcgtggcacaggcggaggtgctcacgttcctggatgcccactgtgagtgct

SEQ ID NO: 80411 - DNA, 201 bp, Homo sapiens
agaagttccggcgctgccccccactggccaccaccagcgtgatcattgtgttccacaacgaagcctggtccacactgctgcgaacagtgtacagcgtcctrcacaccacccctgccatcttgctcaaggagatcatactggtggatgatgccagcacagaggagcacctaaaggagaagctggagcagtacgtgaagcagc

SEQ ID NO: 80412 - DNA, 201 bp, Homo sapiens
tgcaacaacattgggcccattttctttccttcacaccgatggaagagaccattaggacatatatttagcctagcgttttcctgttctagaaatagaggctyccaaagtagggaaggcagctgggggagggttcagggcagcaatgctgagttcaagaaaagtacttcaggctgggcacagtggctcatgcctgaaatccta

SEQ ID NO: 80413 - DNA, 201 bp, Homo sapiens; identical to SEQ ID NO: 80397

SEQ ID NO: 80414 - DNA, 201 bp, Homo sapiens; identical to SEQ ID NO: 80398

SEQ ID NO: 80415 - DNA, 131 bp, Homo sapiens; identical to SEQ ID NO: 80399

SEQ ID NO: 80416 - DNA, 201 bp, Homo sapiens; identical to SEQ ID NO: 80400

SEQ ID NO: 80417 - DNA, 201 bp, Homo sapiens; identical to SEQ ID NO: 80401

SEQ ID NO: 80418 - DNA, 181 bp, Homo sapiens
ccctcctgccttcgctctctgctggtcgcggtggcctgtagctcctccctcggtaggacccccctccaccttggcgcttamgagatgaatgaggagcccagacctctggaacttggagggttgttcagattcccaggctgacaaaaaggagaaacagcttttacttgcatccagggccaat

SEQ ID NO: 80419 - DNA, 201 bp, Homo sapiens; identical to SEQ ID NO: 80402

SEQ ID NO: 80420 - DNA, 201 bp, Homo sapiens; identical to SEQ ID NO: 80403

SEQ ID NO: 80421 - DNA, 201 bp, Homo sapiens; identical to SEQ ID NO: 80404

SEQ ID NO: 80422 - DNA, 201 bp, Homo sapiens; identical to SEQ ID NO: 80405

SEQ ID NO: 80423 - DNA, 201 bp, Homo sapiens; identical to SEQ ID NO: 80406

SEQ ID NO: 80424 - DNA, 201 bp, Homo sapiens; identical to SEQ ID NO: 80407

SEQ ID NO: 80425 - DNA, 201 bp, Homo sapiens; identical to SEQ ID NO: 80408

SEQ ID NO: 80426 - DNA, 201 bp, Homo sapiens; identical to SEQ ID NO: 80409

SEQ ID NO: 80427 - DNA, 201 bp, Homo sapiens; identical to SEQ ID NO: 80410

SEQ ID NO: 80428 - DNA, 201 bp, Homo sapiens; identical to SEQ ID NO: 80411

SEQ ID NO: 80429 - DNA, 201 bp, Homo sapiens; identical to SEQ ID NO: 80412

SEQ ID NO: 80430 - DNA, 201 bp, Homo sapiens
gttcaaagggctgatcaaattaccctcagcggagaacatgatggcagatattgcccagaggaaaagggctatggaaaaacggagatatgtaaagacacccygccacacaatccaagtggatcacattgagtacatggatgagattgccatgccagcaggggtgaaacccaacctgctcttcctctttctctcagatccaaa

SEQ ID NO: 80431 - DNA, 201 bp, Homo sapiens
ggaattagcggactgggggccatcaagtgctgcctggatgaagatctggagcccacctgctttgaaagaaatgatgatattggacatctctggaaatttcraaaaaatacttcagagaaaatgcctagtatctacaaatctgtgaccatcaatacttccaaggagatgatgtgcttcagtgacttccctgtccctgatcat

SEQ ID NO: 80432 - DNA, 201 bp, Homo sapiens
ttctggaaaagtccaagtaaagcccagcgtgaaggagttcacagaaacagatgccatttttgaagacagcactgtagaggagaatattgatgttgtcatckttgctacaggatacagtttttctttttctttccttgatggtctgatcaaggttactaacaatgaagtatctctgtataagcttatgttccctcctgacct

SEQ ID NO: 80433 - DNA, 201 bp, Homo sapiens
tacattcgttttaagactgaagtgcaaagtgtgaggaagcacccagatttttctatcaatggacaatgggatgttgttgtggagactgaagagaaacaagrgactttggtctttgatggggtcttagtttgcagtggacaccacacagatccctacttaccacttcagtccttcccaggcattgagaaatttgaaggctgt

SEQ ID NO: 80434 - DNA, 172 bp, Homo sapiens
agaccagcctggccaacatggtgataccctgtctctcctaaaaatacaaaaattagccgggtgtggtggtgyacgcctgtaaacccagctacttgggagactgaggcaggagaatcacttgaacccaggaggcggaagttgcagtgagccgagatcacatcactgcattcca

SEQ ID NO: 80435 - DNA, 201 bp, Homo sapiens
attaccctcagcggagaacatgatggcagatattgcccagaggaaaagggctatggaaaaacggagatatgtaaagacaccccgccacacaatccaagtgratcacattgagtacatggatgagattgccatgccagcaggggtgaaacccaacctgctcttcctctttctctcagatccaaagctggccatggaggtttt

SEQ ID NO: 80436 - DNA, 201 bp, Homo sapiens
gtgagactctgtctcaaaaaaacaaaaacaacaacaacaaacaaaaaaccagttaagtgaaatgaggaaatttctttggtgaaagagaaggctagataagrtgacagttgtctcaaagtcatcatacggaaaacagaatagaagcacagaacaaggactattgtatataagagaagcaggtgttaatgtaagttgctgtgg

SEQ ID NO: 80437 - DNA, 168 bp, Homo sapiens
gagaaatgggatggggcccggagagctaacctgacccagagagagaggatcatcaagcccctgagcactcgcattactagtgaggacagccacccatcctmacagctctcttggataaagatggccccagtgagcctggcatttctggctgctggcttggcatacttt

SEQ ID NO: 80438 - DNA, 201 bp, Homo sapiens
tgtggagactgaagagaaacaagagactttggtctttgatggggtcttagtttgcagtggacaccacacagatccctacttaccacttcagtccttcccaygcattgagaaatttgaaggctgttatttccatagtcgggaatacaaaagtcccgaggacttttcagggaaaagaatcatagtgatcggcattggaaattc

SEQ ID NO: 80439 - DNA, 201 bp, Homo sapiens
cctgcaccccataccagtaccacctccatgggcccgagaaatgggatggggcccggagagctaacctgacccagagagagaggatcatcaagcccctgagsactcgcattactagtgaggacagccacccatcctcacagctctcttggataaagatggccccagtgagcctggcatttctggctgctggcttggcatact

SEQ ID NO: 80440 - DNA, 201 bp, Homo sapiens
agacagcactgtagaggagaatattgatgttgtcatctttgctacaggatacagtttttctttttctttccttgatggtctgatcaaggttactaacaatkaagtatctctgtataagcttatgttccctcctgacctggagaagccaaccttggctgtcatcggtcttatccaaccactgggcatcatcttacctattgc

SEQ ID NO: 80441 - DNA, 201 bp, Homo sapiens
ggaatgactgttttcaagaagagagaaggagccaatatatctactttcattaagaagctgaaattaaatttggatttccttctttccaaagctgagacacratggccaaaaagcgattgctgtgattggagctggaattagcggactgggggccatcaagtgctgcctggatgaagatctggagcccacctgctttgaaag

SEQ ID NO: 80442 - DNA, 201 bp, Homo sapiens
ctgggggccatcaagtgctgcctggatgaagatctggagcccacctgctttgaaagaaatgatgatattggacatctctggaaatttcaaaaaaatacttmagagaaaatgcctagtatctacaaatctgtgaccatcaatacttccaaggagatgatgtgcttcagtgacttccctgtccctgatcattttcccaactac

SEQ ID NO: 80443 - DNA, 201 bp, Homo sapiens
tgtatgccacacactttggcctcctgaattacattcgttttaagactgaagtgcaaagtgtgaggaagcacccagatttttctatcaatggacaatgggaygttgttgtggagactgaagagaaacaagagactttggtctttgatggggtcttagtttgcagtggacaccacacagatccctacttaccacttcagtcct

SEQ ID NO: 80444 - DNA, 201 bp, Homo sapiens
attaagaagctgaaattaaatttggatttccttctttccaaagctgagacacaatggccaaaaagcgattgctgtgattggagctggaattagcggactgrgggccatcaagtgctgcctggatgaagatctggagcccacctgctttgaaagaaatgatgatattggacatctctggaaatttcaaaaaaatacttcaga

SEQ ID NO: 80445 - DNA, 201 bp, Homo sapiens
tccctgatcattttcccaactacatgcacaactccaaactcatggactacttcgggatgtatgccacacactttggcctcctgaattacattcgttttaakactgaagtgcaaagtgtgaggaagcacccagatttttctatcaatggacaatgggatgttgttgtggagactgaagagaaacaagagactttggtctttg

SEQ ID NO: 80446 - DNA, 201 bp, Homo sapiens
ctcagcctgagttaattcacaaaattatgccatgctggggcttgagcttgagcttgggcttaggcttgggctcagcttttgaccctcaggcatctcctttyccttcctgtcttcctctcccttctcctctgctgcagcatgattttcttaatcttcagacactcactattttcatgaacagttaccctctgtccccacaac

SEQ ID NO: 80447 - DNA, 201 bp, Homo sapiens
ccacagccctcctgctcagtgccgtgatgatgctgcgccacatgggactttttgaccatgctgcaagaattgaggctgcgtgttttgctacaattaaggayggaaagagcttgacaaaagatttgggaggcaatgcaaaatgctcagacttcacagaggaaatctgtcgccgagtaaaagatttagattaacacttctaca

SEQ ID NO: 80448 - DNA, 201 bp, Homo sapiens
aactggcatttacatcagtcactctaaatggacaccacatgaacctctgtttagaatacctacgtatgtatgcattggtttgcttgtttcttgacagtacrtttttagatctggccttttcttaacaaaatctgtgcaaaagatgcaggtggatgtccctaggtctgttttcaaagaactttttccaagtgcttgttttat

SEQ ID NO: 80449 - DNA, 201 bp, Homo sapiens; identical to SEQ ID NO: 80446

SEQ ID NO: 80450 - DNA, 201 bp, Homo sapiens; identical to SEQ ID NO: 80447

SEQ ID NO: 80451 - DNA, 201 bp, Homo sapiens; identical to SEQ ID NO: 80448

SEQ ID NO: 80452 - DNA, 201 bp, Homo sapiens
aaccaaactaagtgaattttagcctggtagcctctctaaggaaacagtaataataacttctgataagagttaaaagaacttgtagcatacctggatataaygggaaagggcctgggtgttacccatgtactgaaaatgaacttttaccaacatggctaaaaaattaaaactgactgcttctgtgtcctttgtacaagttta

SEQ ID NO: 80453 - DNA, 201 bp, Homo sapiens
ccttcctctgccagccggaaacgtctggacaagaaacgttcagtgcctgtagccactgtagaactggaagaaaagaggttcagaactctgcctttagtgcyaagccccctacaaggcctgaccaatcaggatttacaagagggagaagattgggagcaagaagatgaggacatggaccccagattagaacacagttcctca

SEQ ID NO: 80454 - DNA, 201 bp, Homo sapiens
cagggagcgcctcattatttgggcagccatggattctatcccagccccatcatcagttcagggacacaacctgactgaagatgccagacatcctgagagtyggcagaacacaggaggctattctgaaggagatgcagtatcacagccacagatggcactagaggaggtgtcagtgtcagatccactggcaagcaaccaagg

SEQ ID NO: 80455 - DNA, 201 bp, Homo sapiens
cgccgagaggaggtggcggtggtggccctcgcctgtggcccccgtgctgcttgcactcgaactcgtcgccatggaggagctccaggagcctctgagaggasagctccggctctgcttcacgcaagctgcccggactagcctcttactgctcaggctcaacgacgctgccctgcgggcgctgcaagagtgtcagcggcaaca

SEQ ID NO: 80456 - DNA, 201 bp, Homo sapiens
tgtagcatacctggatataatgggaaagggcctgggtgttacccatgtactgaaaatgaacttttaccaacatggctaaaaaattaaaactgactgcttckgtgtcctttgtacaagtttatatgtttcccttaaatcttccaaggcagatggttcttaaccctggctttacatctgagccacttttggggctctctaaac

SEQ ID NO: 80457 - DNA, 201 bp, Homo sapiens; identical to SEQ ID NO: 80452

SEQ ID NO: 80458 - DNA, 201 bp, Homo sapiens; identical to SEQ ID NO: 80453

SEQ ID NO: 80459 - DNA, 201 bp, Homo sapiens; identical to SEQ ID NO: 80454

SEQ ID NO: 80460 - DNA, 201 bp, Homo sapiens
tgaacagaggaggtggcggtggtggccctcgcctgtggcccccgtgctgcttgcactcgaactcgtcgccatggaggagctccaggagcctctgagaggasagctccggctctgcttcacgcaagctgcccggactagcctcttactgctcaggctcaacgacgctgccctgcgggcgctgcaagagtgtcagcggcaaca

SEQ ID NO: 80461 - DNA, 201 bp, Homo sapiens; identical to SEQ ID NO: 80456

SEQ ID NO: 80462 - DNA, 201 bp, Homo sapiens
tcgccgctgcctccgacgtgctagaactcacggacgacaacttcgagagtcgcatctccgacacgggctctgcgggcctcatgctcgtcgagttcttcgcyccctggtgtggacactgcaagagacttgcacctgagtatgaagctgcagctaccagattaaaaggaatagtcccattagcaaaggttgattgcactgcca

SEQ ID NO: 80463 - DNA, 201 bp, Homo sapiens
ttgagaaccagatgttctctacacactatcactgttcaatagagctttcttcagtgatggaaatgctctgtaatctacactgttcagtacaggtagctacrgagcatctgaaatatggctagaaactacatttttgttttgattaatttaaatagccatacagttgctaccatactggtcacggcagctgtagactgactg

SEQ ID NO: 80464 - DNA, 116 bp, Homo sapiens
gtttagagagccccaaaagtggctcagatgtaaagccagggttaagaaccatctgccttggaagatttaagggaaacatataaacttgtacaaaggacacmgaagcagtcagtttt

SEQ ID NO: 80465 - DNA, 201 bp, Homo sapiens
actaggacccatatgggaattattacctctcagggccgagaggacagaatggatataatctgaatcctgttaaattttctctaaactgtttcttagctgcmctgtttatggaaataccaggaccagtttatgtttgtggttttgggaaaaattatttgtgttgggggaaatgttgtgggggtggggttgagttgggggtat

SEQ ID NO: 80466 - DNA, 201 bp, Homo sapiens
tatacttctctccagccaacaagaagctaaatccaaagaaatatgaaggtggccgtgaattaagtgattttattagctatctacaaagagaagctacaaayccccctgtaattcaagaagaaaaacccaagaagaagaagaaggcacaggaggatctctaaagcagtagccaaacaccactttgtaaaaggactcttccat

SEQ ID NO: 80467 - DNA, 167 bp, Homo sapiens
ccgggtttgggggttgggacctccggctgcaggtccgcctgggccagacgcgcgagcgcaagcagcsggttagtggtcgcgcgcccgacctccgcagtcccagccgagccgcgacccttccggccgtccccaccccacctcgccgccatgcgcctccgccgcctagc

SEQ ID NO: 80468 - DNA, 201 bp, Homo sapiens
ttggggaggactaggacccatatgggaattattacctctcagggccgagaggacagaatggatataatctgaatcctgttaaattttctctaaactgtttyttagctgcactgtttatggaaataccaggaccagtttatgtttgtggttttgggaaaaattatttgtgttgggggaaatgttgtgggggtggggttgagt

SEQ ID NO: 80469 - DNA, 201 bp, Homo sapiens
tttatggaaataccaggaccagtttatgtttgtggttttgggaaaaattatttgtgttgggggaaatgttgtgggggtggggttgagttgggggtattttytaattttttttgtacatttggaacagtgacaataaatgagacccctttaaactgtcttattttccaccagattgagaaccagatgttctctacacactat

SEQ ID NO: 80470 - DNA, 201 bp, Homo sapiens
aaaggactcttccatcagagatgggaaaaccattggggaggactaggacccatatgggaattattacctctcagggccgagaggacagaatggatataatytgaatcctgttaaattttctctaaactgtttcttagctgcactgtttatggaaataccaggaccagtttatgtttgtggttttgggaaaaattatttgtg

SEQ ID NO: 80471 - DNA, 201 bp, Homo sapiens
atgggcctgtgaaggtagtggtagcagagaattttgatgaaatagtgaataatgaaaataaagatgtgctgattgaattttatgccccttggtgtggtcaytgtaagaacctggagcccaagtataaagaacttggcgagaagctcagcaaagacccaaatatcgtcatagccaagatggatgccacagccaatgatgtgc

SEQ ID NO: 80472 - DNA, 201 bp, Homo sapiens
ggcgagaagctcagcaaagacccaaatatcgtcatagccaagatggatgccacagccaatgatgtgccttctccatatgaagtcagaggttttcctaccakatacttctctccagccaacaagaagctaaatccaaagaaatatgaaggtggccgtgaattaagtgattttattagctatctacaaagagaagctacaaac

SEQ ID NO: 80473 - DNA, 172 bp, Homo sapiens
ccgggtttgggggttgggacctccggctgcaggtccgcctgggccagacgcgcgagcgcaagcagcgggttwgtggtcgcgcgcccgacctccgcagtcccagccgagccgcgacccttccggccgtccccaccccacctcgccgccatgcgcctccgccgcctagcgctgt

SEQ ID NO: 80474 - DNA, 201 bp, Homo sapiens
cgcctagcgctgttcccgggtgtggcgctgcttcttgccgcggcccgcctcgccgctgcctccgacgtgctagaactcacggacgacaacttcgagagtckcatctccgacacgggctctgcgggcctcatgctcgtcgagttcttcgccccctggtgtggacactgcaagagacttgcacctgagtatgaagctgcagct

SEQ ID NO: 80475 - DNA, 201 bp, Homo sapiens
gctgttcccgggtgtggcgctgcttcttgccgcggcccgcctcgccgctgcctccgacgtgctagaactcacggacgacaacttcgagagtcgcatctcckacacgggctctgcgggcctcatgctcgtcgagttcttcgccccctggtgtggacactgcaagagacttgcacctgagtatgaagctgcagctaccagatt

SEQ ID NO: 80476 - DNA, 201 bp, Homo sapiens
cccgcctcgccgctgcctccgacgtgctagaactcacggacgacaacttcgagagtcgcatctccgacacgggctctgcgggcctcatgctcgtcgagttyttcgccccctggtgtggacactgcaagagacttgcacctgagtatgaagctgcagctaccagattaaaaggaatagtcccattagcaaaggttgattgca

SEQ ID NO: 80477 - DNA, 154 bp, Homo sapiens
ctcctaatatgctgtttccattatgacacagcagctcctttgtaagtaccaggtcatgtccatcccttggtacatatatgcatttgcttttaaaccatttyttttgtttaaataaataaataagtaaataaagctagttctattgaaatgcaaa

SEQ ID NO: 80478 - DNA, 179 bp, Homo sapiens
agacagcacacgaaatactatttttctcctaatatgctgtttccattatgacacagcagctcctttgtaagtaccaggtcatgtccatcccttggtacatrtatgcatttgcttttaaaccatttcttttgtttaaataaataaataagtaaataaagctagttctattgaaatgcaaa

SEQ ID NO: 80479 - DNA, 140 bp, Homo sapiens
ctcctaatatgctgtttccattatgacacagcagctcctttgtaagtaccaggtcatgtccatcccttggtacatatatgcatttgcttttaaaccatttyttttgtttaaataaataaataagtaaataaagctagttc

SEQ ID NO: 80480 - DNA, 165 bp, Homo sapiens
agacagcacacgaaatactatttttctcctaatatgctgtttccattatgacacagcagctcctttgtaagtaccaggtcatgtccatcccttggtacatrtatgcatttgcttttaaaccatttcttttgtttaaataaataaataagtaaataaagctagttc

SEQ ID NO: 80481 - DNA, 201 bp, Homo sapiens
atgtggtgagcacgactgaaaatgtagctgtttatatctgggacaacctccagaaagttcttcctgtaggagttctttataaagtaaaagtatacgaaacygacaataatattgtggtttataaaggagaatagctattggggttagcattgcacaaagcccagtttctttctgtgtttgaaaaagattttgatccccttg

SEQ ID NO: 80482 - DNA, 144 bp, Homo sapiens
aaaaaaaaaaaagaaaaaagaaaaagagaaacgagggtcttgcyctattgccgaggttggactcctgggctgaagtgatccctctccttctcaatagctggggctacaggagtgcgtcaccacgcccgcctggctcaattcctg

SEQ ID NO: 80483 - DNA, 201 bp, Homo sapiens
taagaatctggatatggatgtgccatactttgcagatgtggtgagcacgactgaaaatgtagctgtttatatctgggacaacctccagaaagttcttcctktaggagttctttataaagtaaaagtatacgaaactgacaataatattgtggtttataaaggagaatagctattggggttagcattgcacaaagcccagtt

SEQ ID NO: 80484 - DNA, 201 bp, Homo sapiens
gttataaatttaagtctatttaaaactaaacttgtaatatacatcctgaaaatcatttagagagtcttttatttataaattaaaaatcacttcattttcamaaaatgttttggtgtgggattatttgaaagcaaaagaaatctaattttgttttctccattacctcattttagtattaatttttacttggtataatataca

SEQ ID NO: 80485 - DNA, 201 bp, Homo sapiens
agcacggaaggtggtggccgtcgctgccaggcacaagtgtcccgccgcatctccttcagcgcgagccaccgattgtacagtaaatttctaagtgatgaagraaacttgaaactgtttgggaaatgcaacaatccaaatggccatgggcacaattataaagttgtggtgacagtacatggagagattgaccctgctacggga

SEQ ID NO: 80486 - DNA, 201 bp, Homo sapiens
gagccaccgattgtacagtaaatttctaagtgatgaagaaaacttgaaactgtttgggaaatgcaacaatccaaatggccatgggcacaattataaagttrtggtgacagtacatggagagattgaccctgctacgggaatggttatgaatctggctgatctcaaaaaatatatggaggaggcgattatgcagccccttga

SEQ ID NO: 80487 - DNA, 201 bp, Homo sapiens
aaagttgtggtgacagtacatggagagattgaccctgctacgggaatggttatgaatctggctgatctcaaaaaatatatggaggaggcgattatgcagcyccttgatcataagaatctggatatggatgtgccatactttgcagatgtggtgagcacgactgaaaatgtagctgtttatatctgggacaacctccagaaa

SEQ ID NO: 80488 - DNA, 201 bp, Homo sapiens
taaagttgtggtgacagtacatggagagattgaccctgctacgggaatggttatgaatctggctgatctcaaaaaatatatggaggaggcgattatgcagycccttgatcataagaatctggatatggatgtgccatactttgcagatgtggtgagcacgactgaaaatgtagctgtttatatctgggacaacctccagaa

SEQ ID NO: 80489 - DNA, 201 bp, Homo sapiens
gctacgggaatggttatgaatctggctgatctcaaaaaatatatggaggaggcgattatgcagccccttgatcataagaatctggatatggatgtgccatrctttgcagatgtggtgagcacgactgaaaatgtagctgtttatatctgggacaacctccagaaagttcttcctgtaggagttctttataaagtaaaagta

SEQ ID NO: 80490 - DNA, 201 bp, Homo sapiens
ccgagcaccgcagacagcgccgggaagatgagcacggaaggtggtggccgtcgctgccaggcacaagtgtcccgccgcatctccttcagcgcgagccaccrattgtacagtaaatttctaagtgatgaagaaaacttgaaactgtttgggaaatgcaacaatccaaatggccatgggcacaattataaagttgtggtgaca

SEQ ID NO: 80491 - DNA, 201 bp, Homo sapiens
tacgggaatggttatgaatctggctgatctcaaaaaatatatggaggaggcgattatgcagccccttgatcataagaatctggatatggatgtgccatackttgcagatgtggtgagcacgactgaaaatgtagctgtttatatctgggacaacctccagaaagttcttcctgtaggagttctttataaagtaaaagtata

SEQ ID NO: 80492 - DNA, 201 bp, Homo sapiens
gccgagcaccgcagacagcgccgggaagatgagcacggaaggtggtggccgtcgctgccaggcacaagtgtcccgccgcatctccttcagcgcgagccacsgattgtacagtaaatttctaagtgatgaagaaaacttgaaactgtttgggaaatgcaacaatccaaatggccatgggcacaattataaagttgtggtgac

SEQ ID NO: 80493 - DNA, 201 bp, Homo sapiens
ctggctgatctcaaaaaatatatggaggaggcgattatgcagccccttgatcataagaatctggatatggatgtgccatactttgcagatgtggtgagcaygactgaaaatgtagctgtttatatctgggacaacctccagaaagttcttcctgtaggagttctttataaagtaaaagtatacgaaactgacaataatatt

SEQ ID NO: 80494 - DNA, 201 bp, Homo sapiens
gcaccgcagacagcgccgggaagatgagcacggaaggtggtggccgtcgctgccaggcacaagtgtcccgccgcatctccttcagcgcgagccaccgattktacagtaaatttctaagtgatgaagaaaacttgaaactgtttgggaaatgcaacaatccaaatggccatgggcacaattataaagttgtggtgacagtac

SEQ ID NO: 80495 - DNA, 201 bp, Homo sapiens
agctgtttatatctgggacaacctccagaaagttcttcctgtaggagttctttataaagtaaaagtatacgaaactgacaataatattgtggtttataaasgagaatagctattggggttagcattgcacaaagcccagtttctttctgtgtttgaaaaagattttgatccccttggaatattaagaggtcaacacgtgat

SEQ ID NO: 80496 - DNA, 153 bp, Homo sapiens
aaaaaaaaaaaagaaaaaagaaaaagagaaacgagggtcttgccctattgccsaggttggactcctgggctgaagtgatccctctccttctcaatagctggggctacaggagtgcgtcaccacgcccgcctggctcaattcctgctccttttg

SEQ ID NO: 80497 - DNA, 201 bp, Homo sapiens
ggatgtgccatactttgcagatgtggtgagcacgactgaaaatgtagctgtttatatctgggacaacctccagaaagttcttcctgtaggagttctttatraagtaaaagtatacgaaactgacaataatattgtggtttataaaggagaatagctattggggttagcattgcacaaagcccagtttctttctgtgtttga

SEQ ID NO: 80498 - DNA, 201 bp, Homo sapiens
gtggtgagcacgactgaaaatgtagctgtttatatctgggacaacctccagaaagttcttcctgtaggagttctttataaagtaaaagtatacgaaactgdcaataatattgtggtttataaaggagaatagctattggggttagcattgcacaaagcccagtttctttctgtgtttgaaaaagattttgatccccttgga

SEQ ID NO: 80499 - DNA, 201 bp, Homo sapiens
gcgccggcatgtggctgtgggaggaccagggcggcctcctgggccctttctccttcctgctgctagtgctgctgctggtgacgcggagcccggtcaatgcstgcctcctcaccggcagcctcttcgttctactgcgcgtcttcagctttgagccggtgccctcttgcagggccctgcaggtgctcaagccccgggaccgca

SEQ ID NO: 80500 - DNA, 201 bp, Homo sapiens
gctctaaagaaaatgtatatggaatttcctcaactgtataataatagtgtggtctgttctttcttgccagaagttatctacaagatgagacaaacagatcrggatgtaataacagcattaactcacagaccttggagcctaagccatacaggagatgggaaaccacgctatgatactttctggaaacattttatatttgtt

SEQ ID NO: 80501 - DNA, 201 bp, Homo sapiens
ccaggttgttggttggactgttaatacctttgatgaaaagagttactacgaatcccatcttggttccagctatatcactgacagcatggtagaagactgcraacctcacttctagactttcacggtgggacgaaacgggttcagaaactgccaggggcctcatacagggatatcaaaataccctttgtgctagcccaggcc

SEQ ID NO: 80502 - DNA, 201 bp, Homo sapiens
cgtctgtctcctctagcttaccgcttctcacctttcaaccccatctgtggcctttgtccaggcccacagcttagccatggcttccctcctgcatccctgcygtgggttgctggcctcacacttgcagcagctggacagtgattttagaaggccaccagtccccatagctatgtgacaatgagaagcaaacttttttgtgac

SEQ ID NO: 80503 - DNA, 201 bp, Homo sapiens
aagctgaggcaggaggattacttgaggccagactgggcaatatagcaagaccccatctctaaaaaattaggcatggtggtgcatgcctgtattcccagctrctcaggaggttgaggtgggaggatcacttgagcccagaagttcaaggctgcaatgagccatgattacaccacggcactacaaccttggtggcacagtgag

SEQ ID NO: 80504 - DNA, 201 bp, Homo sapiens
ccacagcttagccatggcttccctcctgcatccctgccgtgggttgctggcctcacacttgcagcagctggacagtgattttagaaggccaccagtccccrtagctatgtgacaatgagaagcaaacttttttgtgacagattgtattggcataggcatgatagatggggattggtacgttttgaatcagcatttgcaaaa

SEQ ID NO: 80505 - DNA, 201 bp, Homo sapiens
tgaggcaggaggattacttgaggccagactgggcaatatagcaagaccccatctctaaaaaattaggcatggtggtgcatgcctgtattcccagctactcrggaggttgaggtgggaggatcacttgagcccagaagttcaaggctgcaatgagccatgattacaccacggcactacaaccttggtggcacagtgagaacc

SEQ ID NO: 80506 - DNA, 201 bp, Homo sapiens
tgaaaatctgggtctgaaaaaacgcacaagagcccctgccctgccctagctgaggcacacagggagacccagtgaggataagcacagattgaattgtacartttgcagatgcagatgtaaatgcatgggacatgcatgataactcagagttgacattttaaaacttgccacacttatttcaaatatttgtactcagctatg

SEQ ID NO: 80507 - DNA, 201 bp, Homo sapiens
cagtgtacagcaaccaaaatggtagggaggtcttgaagccaatgagggatttatagcatcttgaatagagagctgcaaaccaccagggggcagagttgcayttttccaggctttttaggaagctctgcaacagatgtgatctgatcataggcaattagaactggaagaaacttccaaaaatatctaggtttgtcctcattt

SEQ ID NO: 80508 - DNA, 201 bp, Homo sapiens
ccatgaccccaaactgctctttccaatttgaacttccagggattttattgtgaacttacatagcaacattaaaatgaagttgaattgtttttaatggcaaygccgtctgtctcctctagcttaccgcttctcacctttcaaccccatctgtggcctttgtccaggcccacagcttagccatggcttccctcctgcatccct

SEQ ID NO: 80509 - DNA, 201 bp, Homo sapiens
aaaagtcacagcttagctgggcacagtggctcatgccgataatcccagcaattcagaaagctgaggcaggaggattacttgaggccagactgggcaatatrgcaagaccccatctctaaaaaattaggcatggtggtgcatgcctgtattcccagctactcaggaggttgaggtgggaggatcacttgagcccagaagttc

SEQ ID NO: 80510 - DNA, 201 bp, Homo sapiens
tttacagaagacagcagatatgtatatagtttctgtgcgcctgacgctaaggttacatacagccaggaacaaggtcaaaagtgtccctggtttacagagtrtacatcggaatgggggaggcaagccttaaacaagtaaacacataaatgagataactttaagagagtgaaaggtgcaatgaagaaatcgggggaactcgaa

SEQ ID NO: 80511 - DNA, 201 bp, Homo sapiens; identical to SEQ ID NO: 80500

SEQ ID NO: 80512 - DNA, 201 bp, Homo sapiens; identical to SEQ ID NO: 80501

SEQ ID NO: 80513 - DNA, 201 bp, Homo sapiens; identical to SEQ ID NO: 80502

SEQ ID NO: 80514 - DNA, 201 bp, Homo sapiens
aatgggggaggcaagccttaaacaagtaaacacataaatgagataactttaagagagtgaaaggtgcaatgaagaaatcgggggaactcgaaggaaagagktacgctattttatttagatggaatagtcaagagaaatcgtctccgaagaagcaacatttgaacagaaaccggaattataaggagccaggcagctaagaat

SEQ ID NO: 80515 - DNA, 201 bp, Homo sapiens; identical to SEQ ID NO: 80503

SEQ ID NO: 80516 - DNA, 201 bp, Homo sapiens; identical to SEQ ID NO: 80504

SEQ ID NO: 80517 - DNA, 201 bp, Homo sapiens; identical to SEQ ID NO: 80505

SEQ ID NO: 80518 - DNA, 201 bp, Homo sapiens; identical to SEQ ID NO: 80506

SEQ ID NO: 80519 - DNA, 201 bp, Homo sapiens; identical to SEQ ID NO: 80507

SEQ ID NO: 80520 - DNA, 201 bp, Homo sapiens; identical to SEQ ID NO: 80508

SEQ ID NO: 80521 - DNA, 201 bp, Homo sapiens
agagtgaaaggtgcaatgaagaaatcgggggaactcgaaggaaagagttacgctattttatttagatggaatagtcaagagaaatcgtctccgaagaagcracatttgaacagaaaccggaattataaggagccaggcagctaagaatggagcaacaggcgtggagttggacattgagtttacttctgacgggattcctgt

SEQ ID NO: 80522 - DNA, 201 bp, Homo sapiens; identical to SEQ ID NO: 80509

SEQ ID NO: 80523 - DNA, 201 bp, Homo sapiens; identical to SEQ ID NO: 80499

SEQ ID NO: 80524 - DNA, 201 bp, Homo sapiens
atccctaccctaagggaagctgttgcagagtgcctaaaccataacctcacaatcttctttgatgtcaaaggccatgcacacaagatgagacaaacagatcrggatgtaataacagcattaactcacagaccttggagcctaagccatacaggagatgggaaaccacgctatgatactttctggaaacattttatatttgtt

SEQ ID NO: 80525 - DNA, 201 bp, Homo sapiens; identical to SEQ ID NO: 80501

SEQ ID NO: 80526 - DNA, 201 bp, Homo sapiens; identical to SEQ ID NO: 80502

SEQ ID NO: 80527 - DNA, 201 bp, Homo sapiens; identical to SEQ ID NO: 80503

SEQ ID NO: 80528 - DNA, 201 bp, Homo sapiens; identical to SEQ ID NO: 80504

SEQ ID NO: 80529 - DNA, 201 bp, Homo sapiens; identical to SEQ ID NO: 80505

SEQ ID NO: 80530 - DNA, 201 bp, Homo sapiens; identical to SEQ ID NO: 80506

SEQ ID NO: 80531 - DNA, 201 bp, Homo sapiens; identical to SEQ ID NO: 80507

SEQ ID NO: 80532 - DNA, 201 bp, Homo sapiens; identical to SEQ ID NO: 80508

SEQ ID NO: 80533 - DNA, 201 bp, Homo sapiens; identical to SEQ ID NO: 80509

SEQ ID NO: 80534 - DNA, 201 bp, Homo sapiens
caggggccatggtgcgcggcaggatctcccggctctcggtccgggacgtgcgcttccccacgtcgcttgggggccacggcgcggacgccatgcacacggamcctgactactcggctgcctatgtcgtcatagaaactgatgcagaagatggaatcaaggggtgtggaattaccttcactctgggaaaaggcactgaagttg

SEQ ID NO: 80535 - DNA, 201 bp, Homo sapiens
gagctttgggaaaggtctgggttctcgctgaagctaaaaacaaaataaggccattattttgccataattgtacgacctgttgtaattgctcctcatgtccrtgaaacaagtacacaggatgtgatcaacaaagttctattttacaggagtatgatcctgtcgataccttgccgtaggttatgtaacatgattggagcgcaa

SEQ ID NO: 80536 - DNA, 201 bp, Homo sapiens
agttcagctagaagtcataccaccctcaggaatcagctaaagcaaaaagaacttttacctcggcatccagcccaacccctaaagactgacaatatccttcragctcctttgaaagcaccctaaacagccatttccattttaatagttggatgcggattgtacccttcaatctgaaagtcttcagctttgaagtcatcaatt

SEQ ID NO: 80537 - DNA, 201 bp, Homo sapiens
ttctcttgcacagatcgagagtgaggggtattttgtgacattacacagcatcaggagcctggtgcctcatcaggtagctgggagtggagtgtgaccctggyactgcgcttcacagcagcgccacctacagcacgctgtggctcagcctcgaaagggagattaaagccacaacaaagcaatgggggcattttgtcccttgtc

SEQ ID NO: 80538 - DNA, 201 bp, Homo sapiens
acatgcctcccaaggatcccggctactcaacagaaatgaaggaggaatctgtaaagaaacaccagtatccagatggtgaagtttggaagaaactccttccygctcaagaaaattaagtgctcagccccaacaacttttttctttctgaagtgaaagggcttaaaatttcttggaaatagttttacaaaaatggatttaaaa

SEQ ID NO: 80539 - DNA, 201 bp, Homo sapiens
cacctggcgacagcggccgtcctaaacgcggtgtgggacttgtgggccaagcaggagggaaagcctgtctggaagttacttgtggacatggatcccaggaygctggtatcctgcatagatttcaggtacatcactgatgtcctgactgaggaggatgccctagaaatactgcagaaaggtcaaattggtaaaaaagaaaga

SEQ ID NO: 80540 - DNA, 201 bp, Homo sapiens
gtacgacctgttgtaattgctcctcatgtccgtgaaacaagtacacaggatgtgatcaacaaagttctattttacaggagtatgatcctgtcgataccttsccgtaggttatgtaacatgattggagcgcaaccagctgttctcttgcacagatcgagagtgaggggtattttgtgacattacacagcatcaggagcctgg

SEQ ID NO: 80541 - DNA, 201 bp, Homo sapiens
tacgacctgttgtaattgctcctcatgtccgtgaaacaagtacacaggatgtgatcaacaaagttctattttacaggagtatgatcctgtcgataccttgscgtaggttatgtaacatgattggagcgcaaccagctgttctcttgcacagatcgagagtgaggggtattttgtgacattacacagcatcaggagcctggt

SEQ ID NO: 80542 - DNA, 201 bp, Homo sapiens
gccaaatcatccgagacatgattggaccggaaaagactttgatgatggatgccaaccagcgctgggatgtgcctgaggcggtggagtggatgtccaagctsgccaagttcaagccattgtggattgaggagccaacctcccctgatgacattctggggcacgccaccatttccaaggcactggtcccattaggaattggca

SEQ ID NO: 80543 - DNA, 180 bp, Homo sapiens
cgctcgggatcccgaccagtcctgaccgcacgggggccgcggccacggggcgcaggggccatggtgcgcggcaggatctyccggctctcggtccgggacgtgcgcttccccacgtcgcttgggggccacggcgcggacgccatgcacacggaccctgactactcggctgcctatgtcgtc

SEQ ID NO: 80544 - DNA, 201 bp, Homo sapiens
ttcaagtatcccgtgatgatccagcgggcttcctacatgcctcccaaggatcccggctactcaacagaaatgaaggaggaatctgtaaagaaacaccagtmtccagatggtgaagtttggaagaaactccttcctgctcaagaaaattaagtgctcagccccaacaacttttttctttctgaagtgaaagggcttaaaatt

SEQ ID NO: 80545 - DNA, 201 bp, Homo sapiens
cagaaaagggcgtggtgcacctggcgacagcggccgtcctaaacgcggtgtgggacttgtgggccaagcaggagggaaagcctgtctggaagttacttgtrgacatggatcccaggacgctggtatcctgcatagatttcaggtacatcactgatgtcctgactgaggaggatgccctagaaatactgcagaaaggtcaaa

SEQ ID NO: 80546 - DNA, 201 bp, Homo sapiens
tcagctttgaagtcatcaattttctcaacttttcgaagaatcctgagctttgggaaaggtctgggttctcgctgaagctaaaaacaaaataaggccattaytttgccataattgtacgacctgttgtaattgctcctcatgtccgtgaaacaagtacacaggatgtgatcaacaaagttctattttacaggagtatgatcc

SEQ ID NO: 80547 - DNA, 201 bp, Homo sapiens; identical to SEQ ID NO: 80534

SEQ ID NO: 80548 - DNA, 201 bp, Homo sapiens; identical to SEQ ID NO: 80535

SEQ ID NO: 80549 - DNA, 201 bp, Homo sapiens; identical to SEQ ID NO: 80536

SEQ ID NO: 80550 - DNA, 201 bp, Homo sapiens; identical to SEQ ID NO: 80537

SEQ ID NO: 80551 - DNA, 201 bp, Homo sapiens; identical to SEQ ID NO: 80538

SEQ ID NO: 80552 - DNA, 201 bp, Homo sapiens; identical to SEQ ID NO: 80539

SEQ ID NO: 80553 - DNA, 201 bp, Homo sapiens; identical to SEQ ID NO: 80540

SEQ ID NO: 80554 - DNA, 201 bp, Homo sapiens; identical to SEQ ID NO: 80541

SEQ ID NO: 80555 - DNA, 201 bp, Homo sapiens; identical to SEQ ID NO: 80542

SEQ ID NO: 80556 - DNA, 180 bp, Homo sapiens; identical to SEQ ID NO: 80543

SEQ ID NO: 80557 - DNA, 201 bp, Homo sapiens; identical to SEQ ID NO: 80544

SEQ ID NO: 80558 - DNA, 201 bp, Homo sapiens; identical to SEQ ID NO: 80545

SEQ ID NO: 80559 - DNA, 201 bp, Homo sapiens; identical to SEQ ID NO: 80546

SEQ ID NO: 80560 - DNA, 201 bp, Homo sapiens
ttgttaccaagcagcatttgataagaggtccactggttttggtaaacaataaacatttttataacaattgttgtacagtcggctggtgctctgagaacaayagaacacatattggctcaaaccagagtttggggaggttgggttgagataatgacctaaacgaagtgacctcaagatcacaaaatatatttttttgttaag

SEQ ID NO: 80561 - DNA, 201 bp, Homo sapiens
aactaactaactaactgtctatggctccagctacactataacaacagcaaagctaaggagctgcagcactttatagcctgcaaagcctgaaataatttacwatcaatcatcaatcaatcatcatctatctatctatctatctatctaatctatctatcttgtccattacagaaaatgtttgtttgccaactttaaaagaaa

SEQ ID NO: 80562 - DNA, 201 bp, Homo sapiens
aactaactgtctatggctccagctacactataacaacagcaaagctaaggagctgcagcactttatagcctgcaaagcctgaaataatttactatcaatchtcaatcaatcatcatctatctatctatctatctatctaatctatctatcttgtccattacagaaaatgtttgtttgccaactttaaaagaaatgaagtct

SEQ ID NO: 80563 - DNA, 201 bp, Homo sapiens
ctaaattctaattgttaaattcatgtcctcaataaaattgttctgaccaaatgagacaatgaataaaaaagactttgcaaagttacaagcatcatacaaawatacatgaatcattataattttcatggtctcatcctgcccattctattcttaatcccctccacaaagtagaaagtattgattgccaagtcaaagtttagg

SEQ ID NO: 80564 - DNA, 201 bp, Homo sapiens
atacctcatatgcttggtattttctactatcactttaaaatcactaaaattctgaaacagacattaagatttgggaattttttctttttttttttgagacagagtctctctgtcacccaggctggagtgcagtggtgtgatctcagctcactgcaacttctgccttccaggttcaagcaattctcccacctcagcctccca

SEQ ID NO: 80565 - DNA, 201 bp, Homo sapiens
tacctcatatgcttggtattttctactatcactttaaaatcactaaaattctgaaacagacattaagatttgggaattttttctttttttttttgagacagagtctctctgtcacccaggctggagtgcagtggtgtgatctcagctcactgcaacttctgccttccaggttcaagcaattctcccacctcagcctcccaa

SEQ ID NO: 80566 - DNA, 201 bp, Homo sapiens
aatctgactgataacatcactgcattcagcatccaaagaaatccattacttttacaactttgtatttctttttaaaatacaggcaggcaaagaagataacaaatatttttaaatggatgcttaacagcacagtgttaataaccatcttcagaaattgtacagtattaaacatgtcttcagccaagctccaacactcagaag

SEQ ID NO: 80567 - DNA, 201 bp, Homo sapiens
aaaaattgcctgacctctcaagacttttaatcacttcagggattcttgtgacattcaactgagatatatgtgaacacaccctatacacagcaaagcactargtagtagtagcagaagacagtaccaccgacttttcttgttcccacataagcatttccctttagggctctaagatgaggtcatcatcgtttttaatcctga

SEQ ID NO: 80568 - DNA, 201 bp, Homo sapiens
atctgactgataacatcactgcattcagcatccaaagaaatccattacttttacaactttgtatttctttttaaaatacaggcaggcaaagaagataacaaatatttttaaatggatgcttaacagcacagtgttaataaccatcttcagaaattgtacagtattaaacatgtcttcagccaagctccaacactcagaaga

SEQ ID NO: 80569 - DNA, 201 bp, Homo sapiens
tcactgttttcaatacaaatgagcaggaaagcaccctgggtcagaagcacactgaagatagagaagaaggaatggatgtagaagaaggcgaaatgggagaygaggaagctccaacaacgtgctctattccaattgattacaacctgtatcgaaaattctggtcacttcaggattacttcaggaaccctgtgcaatgctatg

SEQ ID NO: 80570 - DNA, 201 bp, Homo sapiens
ctggcaagatcaagagggagttcatgcaacacctgagaatctgattaatgcactgaataagtctggattaagtgaccttgcagaaagtctaactaatgacmatgagacaaatagttagcttcttttttttttctttttattaaaactgtgatagattttgttaccaagcagcatttgataagaggtccactggttttggta

SEQ ID NO: 80571 - DNA, 201 bp, Homo sapiens
tcttctgtggacggattcagctctttttggccaggcttttccctctgtctgagaaatcaggtcttaacttgcagagtcagtttaatctggaaaatgtcacwgttttcaatacaaatgagcaggaaagcaccctgggtcagaagcacactgaagatagagaagaaggaatggatgtagaagaaggcgaaatgggagatgagg

SEQ ID NO: 80572 - DNA, 201 bp, Homo sapiens
ttttttgttaagtagatgtatttataatgaagttaaataagcactatttagggatatgtcgtttcttataccaaattagtttcctgtgtgttgtttgttastagttttacaaaatttatcctgaaatcccagaataacactttctgaaaccatatgactgctctgttctcacttattcgtgctttcaagcagaggatcaac

SEQ ID NO: 80573 - DNA, 201 bp, Homo sapiens
atatgagatgttatgataatccccaaactttattataaataactcaaaatcagagccaaactggctggtattctatgctttatcctttccctagcatcagkcaagggtcctggaacaaagatgagtaactattaaaatgtaagaagcctatcatattgaaatacctcatatgcttggtattttctactatcactttaaaat

SEQ ID NO: 80574 - DNA, 201 bp, Homo sapiens
aagaaatgaagtctaaaacctcacttttccttctagccttacaaaaattgcctgacctctcaagacttttaatcacttcagggattcttgtgacattcaaytgagatatatgtgaacacaccctatacacagcaaagcactaagtagtagtagcagaagacagtaccaccgacttttcttgttcccacataagcatttccc

SEQ ID NO: 80575 - DNA, 201 bp, Homo sapiens
actgattattacaaagccattccaaagttaaatgtacaatccacagtacatcagagagagacacaataataaatgtataatcaaaggtactattattgatyacaatttattttaaagtcaggaaaagcctgcaataggctggacaaatacttgattgtgcccatgtttccatgggatggacagcagcactgagtcacacaa

SEQ ID NO: 80576 - DNA, 201 bp, Homo sapiens; identical to SEQ ID NO: 80560

SEQ ID NO: 80577 - DNA, 201 bp, Homo sapiens; identical to SEQ ID NO: 80561

SEQ ID NO: 80578 - DNA, 201 bp, Homo sapiens; identical to SEQ ID NO: 80562

SEQ ID NO: 80579 - DNA, 201 bp, Homo sapiens; identical to SEQ ID NO: 80563

SEQ ID NO: 80580 - DNA, 201 bp, Homo sapiens; identical to SEQ ID NO: 80564

SEQ ID NO: 80581 - DNA, 201 bp, Homo sapiens; identical to SEQ ID NO: 80565

SEQ ID NO: 80582 - DNA, 201 bp, Homo sapiens; identical to SEQ ID NO: 80566

SEQ ID NO: 80583 - DNA, 201 bp, Homo sapiens; identical to SEQ ID NO: 80567

SEQ ID NO: 80584 - DNA, 201 bp, Homo sapiens; identical to SEQ ID NO: 80568

SEQ ID NO: 80585 - DNA, 201 bp, Homo sapiens; identical to SEQ ID NO: 80569

SEQ ID NO: 80586 - DNA, 201 bp, Homo sapiens; identical to SEQ ID NO: 80570

SEQ ID NO: 80587 - DNA, 201 bp, Homo sapiens; identical to SEQ ID NO: 80571

SEQ ID NO: 80588 - DNA, 201 bp, Homo sapiens; identical to SEQ ID NO: 80572

SEQ ID NO: 80589 - DNA, 201 bp, Homo sapiens; identical to SEQ ID NO: 80573

SEQ ID NO: 80590 - DNA, 201 bp, Homo sapiens; identical to SEQ ID NO: 80574

SEQ ID NO: 80591 - DNA, 201 bp, Homo sapiens; identical to SEQ ID NO: 80575

SEQ ID NO: 80592 - DNA, 201 bp, Homo sapiens; identical to SEQ ID NO: 80560

SEQ ID NO: 80593 - DNA, 201 bp, Homo sapiens; identical to SEQ ID NO: 80561

SEQ ID NO: 80594 - DNA, 201 bp, Homo sapiens; identical to SEQ ID NO: 80562

SEQ ID NO: 80595 - DNA, 201 bp, Homo sapiens; identical to SEQ ID NO: 80563

SEQ ID NO: 80596 - DNA, 201 bp, Homo sapiens; identical to SEQ ID NO: 80564

SEQ ID NO: 80597 - DNA, 201 bp, Homo sapiens; identical to SEQ ID NO: 80565

SEQ ID NO: 80598 - DNA, 201 bp, Homo sapiens; identical to SEQ ID NO: 80566

SEQ ID NO: 80599 - DNA, 201 bp, Homo sapiens; identical to SEQ ID NO: 80567

SEQ ID NO: 80600 - DNA, 201 bp, Homo sapiens; identical to SEQ ID NO: 80568

SEQ ID NO: 80601 - DNA, 201 bp, Homo sapiens; identical to SEQ ID NO: 80569

SEQ ID NO: 80602 - DNA, 201 bp, Homo sapiens; identical to SEQ ID NO: 80570

SEQ ID NO: 80603 - DNA, 201 bp, Homo sapiens; identical to SEQ ID NO: 80571

SEQ ID NO: 80604 - DNA, 201 bp, Homo sapiens; identical to SEQ ID NO: 80572

SEQ ID NO: 80605 - DNA, 201 bp, Homo sapiens; identical to SEQ ID NO: 80573

SEQ ID NO: 80606 - DNA, 201 bp, Homo sapiens; identical to SEQ ID NO: 80574

SEQ ID NO: 80607 - DNA, 201 bp, Homo sapiens; identical to SEQ ID NO: 80575

SEQ ID NO: 80608 - DNA, 201 bp, Homo sapiens; identical to SEQ ID NO: 80560

SEQ ID NO: 80609 - DNA, 201 bp, Homo sapiens; identical to SEQ ID NO: 80561

SEQ ID NO: 80610 - DNA, 201 bp, Homo sapiens; identical to SEQ ID NO: 80562

SEQ ID NO: 80611 - DNA, 201 bp, Homo sapiens; identical to SEQ ID NO: 80563

SEQ ID NO: 80612 - DNA, 201 bp, Homo sapiens; identical to SEQ ID NO: 80564

SEQ ID NO: 80613 - DNA, 201 bp, Homo sapiens; identical to SEQ ID NO: 80565

SEQ ID NO: 80614 - DNA, 201 bp, Homo sapiens; identical to SEQ ID NO: 80566

SEQ ID NO: 80615 - DNA, 201 bp, Homo sapiens; identical to SEQ ID NO: 80567

SEQ ID NO: 80616 - DNA, 201 bp, Homo sapiens; identical to SEQ ID NO: 80568

SEQ ID NO: 80617 - DNA, 201 bp, Homo sapiens; identical to SEQ ID NO: 80569

SEQ ID NO: 80618 - DNA, 201 bp, Homo sapiens; identical to SEQ ID NO: 80570

SEQ ID NO: 80619 - DNA, 201 bp, Homo sapiens; identical to SEQ ID NO: 80571

SEQ ID NO: 80620 - DNA, 201 bp, Homo sapiens; identical to SEQ ID NO: 80572

SEQ ID NO: 80621 - DNA, 201 bp, Homo sapiens; identical to SEQ ID NO: 80573

SEQ ID NO: 80622 - DNA, 201 bp, Homo sapiens; identical to SEQ ID NO: 80574

SEQ ID NO: 80623 - DNA, 201 bp, Homo sapiens; identical to SEQ ID NO: 80575

SEQ ID NO: 80624 - DNA, 201 bp, Homo sapiens
atgagctctgccagtttataatgactacatttgataccctgaaaaacctgaaacatccctgcatccagcgatcagcaggagaattactgctaactttggcraaaaatacagagtcccaatttgagaaggtgccagaaattatgggagttatctgtgcccagttatccataatcagccagcctagagtccgccaacaaatca

SEQ ID NO: 80625 - DNA, 201 bp, Homo sapiens
ccagcgatcagcaggagaattactgctaactttggcgaaaaatacagagtcccaatttgagaaggtgccagaaattatgggagttatctgtgcccagttayccataatcagccagcctagagtccgccaacaaatcataaataccgtgagtttatttatatccagacccaagtacacagatatagtgctcagcttccttct

SEQ ID NO: 80626 - DNA, 201 bp, Homo sapiens
cccgcgggcgacagccctctccccaaagccacgcgcaactcctcacccggcggcgccattcctccgagcaggtcccgccggagtccgagccgcgggctgasttccgctcgggaaagtggctccaagagcccgccacaggggacgccagggactcgcggcaggctctgcgggccaggatgagttctaagcacaggtactggt

SEQ ID NO: 80627 - DNA, 184 bp, Homo sapiens
aaacaggcttcgagcagctacgttccgactctttcctcagcttctcatgacactgcttatccagattcatcacagcatcggcctcaccatgtctgatgtcracatcccaagtggcctgtacacagaacaggaagtgccttcagaggtcacccctttgtggtactgcccatcattatttcattga

SEQ ID NO: 80628 - DNA, 201 bp, Homo sapiens
aatcagccagcctagagtccgccaacaaatcataaataccgtgagtttatttatatccagacccaagtacacagatatagtgctcagcttccttctgtgtyatccagtgccgtataacaggcacctggctgaggtgtggagaatgctgtcggtggagcttcccagcacgacctggattctgtggaggctcctgaggaagct

SEQ ID NO: 80629 - DNA, 201 bp, Homo sapiens
ttctacaactgtcccttcagaattgcccaggtctttgaaggttttcttgattcaaatgagctctgccagtttataatgactacatttgataccctgaaaamcctgaaacatccctgcatccagcgatcagcaggagaattactgctaactttggcgaaaaatacagagtcccaatttgagaaggtgccagaaattatggga

SEQ ID NO: 80630 - DNA, 201 bp, Homo sapiens
gaaaatcttgacaccattattaagcacttggtcccctggttacagtcagtcaaagaccatgagcgggaacgggccacggccagcatggctcaagttctgargtgcctatccaaacatctcaacttgaagcttccactgcgattccaaagacttggacacctagtggctctgatggcactgctctgtggggacccacaggaa

SEQ ID NO: 80631 - DNA, 201 bp, Homo sapiens; identical to SEQ ID NO: 80624

SEQ ID NO: 80632 - DNA, 201 bp, Homo sapiens; identical to SEQ ID NO: 80625

SEQ ID NO: 80633 - DNA, 124 bp, Homo sapiens
ccggagtccgagccgcgggctgasttccgctcgggaaagtggctccaagagcccgccacaggggacgccagggactcgcggcaggctctgcgggccaggatgagttctaagcacagacttggac

SEQ ID NO: 80634 - DNA, 201 bp, Homo sapiens
acttgaaaagctgaaattcctaggagatctgtcttctctcagccaagctttaccttatgatgaaaccgcaaaatcattcattcacagccacatagcagacrttgtgcataccttaaatgtactggtacaagaggaacgcccgcattctctgtccagttccatgcgccaggaggtctttgtcaccatcgctgatctcagtta

SEQ ID NO: 80635 - DNA, 201 bp, Homo sapiens; identical to SEQ ID NO: 80628

SEQ ID NO: 80636 - DNA, 201 bp, Homo sapiens; identical to SEQ ID NO: 80629

SEQ ID NO: 80637 - DNA, 201 bp, Homo sapiens; identical to SEQ ID NO: 80630

SEQ ID NO: 80638 - DNA, 201 bp, Homo sapiens; identical to SEQ ID NO: 80624

SEQ ID NO: 80639 - DNA, 201 bp, Homo sapiens; identical to SEQ ID NO: 80625

SEQ ID NO: 80640 - DNA, 201 bp, Homo sapiens
cccgcgggcgacagccctctccccaaagccacgcgcaactcctcacccggcggcgccattcctccgagcaggtcccgccggagtccgagccgcgggctgasttccgctcgggaaagtggctccaagagcccgccacaggggacgccagggactcgcggcaggctctgcgggccaggatgagttctaagcacaggatctgta

SEQ ID NO: 80641 - DNA, 201 bp, Homo sapiens; identical to SEQ ID NO: 80629

SEQ ID NO: 80642 - DNA, 201 bp, Homo sapiens; identical to SEQ ID NO: 80634

SEQ ID NO: 80643 - DNA, 184 bp, Homo sapiens; identical to SEQ ID NO: 80627

SEQ ID NO: 80644 - DNA, 201 bp, Homo sapiens; identical to SEQ ID NO: 80628

SEQ ID NO: 80645 - DNA, 201 bp, Homo sapiens; identical to SEQ ID NO: 80624

SEQ ID NO: 80646 - DNA, 201 bp, Homo sapiens; identical to SEQ ID NO: 80625

SEQ ID NO: 80647 - DNA, 201 bp, Homo sapiens; identical to SEQ ID NO: 80626

SEQ ID NO: 80648 - DNA, 201 bp, Homo sapiens; identical to SEQ ID NO: 80628

SEQ ID NO: 80649 - DNA, 201 bp, Homo sapiens; identical to SEQ ID NO: 80629

SEQ ID NO: 80650 - DNA, 201 bp, Homo sapiens; identical to SEQ ID NO: 80630

SEQ ID NO: 80651 - DNA, 201 bp, Homo sapiens; identical to SEQ ID NO: 80624

SEQ ID NO: 80652 - DNA, 201 bp, Homo sapiens; identical to SEQ ID NO: 80625

SEQ ID NO: 80653 - DNA, 124 bp, Homo sapiens; identical to SEQ ID NO: 80633

SEQ ID NO: 80654 - DNA, 201 bp, Homo sapiens; identical to SEQ ID NO: 80629

SEQ ID NO: 80655 - DNA, 201 bp, Homo sapiens; identical to SEQ ID NO: 80634

SEQ ID NO: 80656 - DNA, 184 bp, Homo sapiens; identical to SEQ ID NO: 80627

SEQ ID NO: 80657 - DNA, 201 bp, Homo sapiens; identical to SEQ ID NO: 80628

SEQ ID NO: 80658 - DNA, 201 bp, Homo sapiens
acaacccttatgctgccctttccatagagcagcagaggcagaagctgccggtattcaagcttaggaatcatattttatacttgatagaaaattatcagacrgtggtgattgttggtgaaacaggatgtgggaagagcacacagattcctcagtaccttgcagaagccggctggacagctgaaggaagagtggtaggagtga

SEQ ID NO: 80659 - DNA, 201 bp, Homo sapiens
actgccattgaatcggcctggctgttggagctggctccacacttttatcaacaaggaacgcacctgtctctgaaagccaaaagggccaaggtccaggaccygtgagaggagcccacagctacagctgcagggactgctggcgtcctctcctccatgctgctgcccctggtcccaggtggggtgagctggcaccagctcctg

SEQ ID NO: 80660 - DNA, 201 bp, Homo sapiens
atgtcctcaggttccacttcatgtcgccccctccagcacagtcgatggttcaagccttggagttactgtatgctctgggaggtctggacaaagactgtcgyctaactgaaccgcttggcatgagaattgcagagtttcctttgaatcccatgtttgccaaaatgctgcttgaatcaggaaacttcggctgttctcaggaaa

SEQ ID NO: 80661 - DNA, 201 bp, Homo sapiens
aggtgcattgtctccggcttcttcgccaatgcagcgaggtttcattctactggagcttataggaccatccgtgatgaccatgagctgcacatacaccctgygtcagtcctctatgcagagaagccgcctcgctgggtcatctataacgaagttatacagacctccaagtactacatgagagatgtgactgccattgaatcg

SEQ ID NO: 80662 - DNA, 201 bp, Homo sapiens
gaagagtggctgctgttacagttgcagggagagtagctgaagaaaggggtgcagtgctgggccacgaggtgggctactgcatccgctttgatgactgcacygaccagctggccacgagaattaagtttcttactgatggaatgctggtcagggaaatgatggttgatccgttgttaacaaaatatagtgtcatcatgctgg

SEQ ID NO: 80663 - DNA, 199 bp, Homo sapiens
tgtttcaatgacctttattttaaaaacacatagcttgaaaatttatttttatactgatattagtttggatgtgccacttttggcaccaaacgtgtatgtcrtttttatttccattttataaacatgtaaataatagtgataacttgttaataatagtaaacctttatacctaaagtaaatgtcttccctcccacacctg

SEQ ID NO: 80664 - DNA, 201 bp, Homo sapiens
acttttatcaacaaggaacgcacctgtctctgaaagccaaaagggccaaggtccaggacccgtgagaggagcccacagctacagctgcagggactgctggygtcctctcctccatgctgctgcccctggtcccaggtggggtgagctggcaccagctcctgtggaatgtttggttgctctgaagtgggctgcggcctgttc

SEQ ID NO: 80665 - DNA, 201 bp, Homo sapiens
atgctggtcagggaaatgatggttgatccgttgttaacaaaatatagtgtcatcatgctggatgaagcccacgagaggaccttgtacactgacattgccaytggcttgctaaaaaagattcagaaaaagcgaggggatcttcgattgattgtagcttcagccactctggatgcagacaaattccgggatttctttaatcaa

SEQ ID NO: 80666 - DNA, 201 bp, Homo sapiens
tcatgtcgccccctccagcacagtcgatggttcaagccttggagttactgtatgctctgggaggtctggacaaagactgtcgcctaactgaaccgcttggyatgagaattgcagagtttcctttgaatcccatgtttgccaaaatgctgcttgaatcaggaaacttcggctgttctcaggaaattctaagcatcgctgcca

SEQ ID NO: 80667 - DNA, 106 bp, Homo sapiens
gtatgtcatttttatttccattttataaacatgtaaataatagtgataacttgttaataatagtaaacctttatacctaaagtaaatgtcttccctcccamacctg

SEQ ID NO: 80668 - DNA, 201 bp, Homo sapiens; identical to SEQ ID NO: 80659

SEQ ID NO: 80669 - DNA, 201 bp, Homo sapiens; identical to SEQ ID NO: 80658

SEQ ID NO: 80670 - DNA, 201 bp, Homo sapiens; identical to SEQ ID NO: 80660

SEQ ID NO: 80671 - DNA, 201 bp, Homo sapiens
cctttgcctcccagtttcaagcgattctcctgcctcagcctccggagtagctgggattacaggaccatccgtgatgaccatgagctgcacatacaccctgygtcagtcctctatgcagagaagccgcctcgctgggtcatctataacgaagttatacagacctccaagtactacatgagagatgtgactgccattgaatcg

SEQ ID NO: 80672 - DNA, 201 bp, Homo sapiens
catgatctttcttcccaaaggttgcagggagagtagctgaagaaaggggtgcagtgctgggccacgaggtgggctactgcatccgctttgatgactgcacygaccagctggccacgagaattaagtttcttactgatggaatgctggtcagggaaatgatggttgatccgttgttaacaaaatatagtgtcatcatgctgg

SEQ ID NO: 80673 - DNA, 199 bp, Homo sapiens; identical to SEQ ID NO: 80663

SEQ ID NO: 80674 - DNA, 201 bp, Homo sapiens; identical to SEQ ID NO: 80664

SEQ ID NO: 80675 - DNA, 201 bp, Homo sapiens; identical to SEQ ID NO: 80665

SEQ ID NO: 80676 - DNA, 201 bp, Homo sapiens; identical to SEQ ID NO: 80666

SEQ ID NO: 80677 - DNA, 106 bp, Homo sapiens; identical to SEQ ID NO: 80667

SEQ ID NO: 80678 - DNA, 201 bp, Homo sapiens
ctcgaagagtggctgctgttacagtgaggagagtagctgaagaaaggggtgcagtgctgggccacgaggtgggctactgcatccgctttgatgactgcacygaccagctggccacgagaattaagtttcttactgatggaatgctggtcagggaaatgatggttgatccgttgttaacaaaatataggctcactgagagct

SEQ ID NO: 80679 - DNA, 201 bp, Homo sapiens; identical to SEQ ID NO: 80658

SEQ ID NO: 80680 - DNA, 109 bp, Homo sapiens
agttatacagacctccaagtactacatgagagatgtgactgccattgaatcggcctggctgttggagctggctccacacttttatcaacaaggaacggtargaatgaac

SEQ ID NO: 80681 - DNA, 201 bp, Homo sapiens
ttgttaacaaaatataggctcactgagagcttctctttgattcttagtgtcatcatgctggatgaagcccacgagaggaccttgtacactgacattgccaytggcttgctaaaaaagattcagaaaaagcgaggggatcttcgattgattgtagcttcagccactctggatgcagacaaattccgggatttctttaatcaa

SEQ ID NO: 80682 - DNA, 201 bp, Homo sapiens; identical to SEQ ID NO: 80666

SEQ ID NO: 80683 - DNA, 201 bp, Homo sapiens; identical to SEQ ID NO: 80660

SEQ ID NO: 80684 - DNA, 201 bp, Homo sapiens; identical to SEQ ID NO: 80661

SEQ ID NO: 80685 - DNA, 201 bp, Homo sapiens
ctgggcagaatctttcgctggcttggacctaaaggatcagactgtggcactgtaaatgtcaacattccaacaagtggggctgagattggaggtgcctttgkaggagaaaagcacactggtggtggcagggaatctggcagtgatgcctggaaacagtacatgagaaggtctacttgtactatcaactacagtaaagacttt

SEQ ID NO: 80686 - DNA, 201 bp, Homo sapiens
gaagaaactgtaaagaaagcaacagaagcatggaaaatctgggcagatattcctgctccaaaacgaggagaaatagtaagacagattgacgatgccttgtrggagaagatccaagtactaggaagcttggtgtctttggagatggggaaaatcttagtggaaggtgtgggtgaagttcaggagtatgtggatatctgtgac

SEQ ID NO: 80687 - DNA, 201 bp, Homo sapiens
gaacttggaggaaacagtaccattattgcctttgaagatgcagacctcagcttagttgttccatcagctctcttcactgctgtgggaatagctggccagargtgtaccactgcgaggcgactgtttgtacatgaaagcatccatcatgaggttgtaaacagacttaaaaaggcctacgcacagatccgagttgggaaccca

SEQ ID NO: 80688 - DNA, 201 bp, Homo sapiens
ctttcctctggcccaaggaatcaagtttcagtaaaggtgttttagatgaacatcccttaatttgaggtgttcggcagctgtttttgaagaagacaaagaarattaaagttttccttgaataaatgcattattatgactgtgacagtgactaatccccctatgaccccaaagccctgattaaatcaaaagactcctttttta

SEQ ID NO: 80689 - DNA, 201 bp, Homo sapiens
agagttgggacttcaacatctttgaattggaagccattacgcataaaaggccattggtttatctgggcttaaaggtcttctctcggtttggagtatgtgartttttaaactgttctgaaaccactcttcgggcctggttccaagtgatcgaagccaactaccactcttccaatgcctaccacaactccacccatgctgccg

SEQ ID NO: 80690 - DNA, 201 bp, Homo sapiens
atgcaaagaaatgtatctaaattatttttgttagatgataagagaacttgcttggtcaggacagcagccagctttgtattgtaatgctatattatgtaaawgtgatgaaaatgtttttgtgaagtacttgtaactaaattcctacagccatttttcactcccaacagctgtttttattttacctctttggcctaaagtttt

SEQ ID NO: 80691 - DNA, 201 bp, Homo sapiens
cctgcgacagagctggttatagatgcaatattgctcggactccagagtcagcccttgaatgctttcttgataagcatcatgaaattattgtaattgatcayagacaaactcagaacttcgatgcagaagcagtgtgcaggtcgatccgggccacaaatccctccgagcacacggtgatcctcgcagtggtttcgcgagtat

SEQ ID NO: 80692 - DNA, 201 bp, Homo sapiens
tggctcacagaggcagccacgaggcactacaccaagtattatataaaagccattaaatttgaatgcccttggacaagcttttcttaaaaaaaaaaaaaaagtttatatacatgtttaaaatttttattaaaatccaaattttctgggtgtaagcccatgcagtatgttgtgccatgcaccatctatacgtaatattttggg

SEQ ID NO: 80693 - DNA, 201 bp, Homo sapiens
tcatcattgctgtttagcttgactgttttcctcaagaacatcgatctgaaggattcataaggagcttatctgaacagatttatctaagaaaaaaaaaaaamgacataaaataagcgaaacaactaggaccaaattacagataaactagttagcttcacagcctctatggctacatggttcttctggccgatggtatgacac

SEQ ID NO: 80694 - DNA, 201 bp, Homo sapiens
aaagtgcaaaagtttgaggcttccatctgacagctaaagccaagccacagagggggcctcttgaccgacaaaggacactgtgaatcacagtagcgtaaacragaggccttcctttctaatgacaatgacaggtattggtgaaggagctaatgtttaatatttgaccttgaatcattcaagtccccaaatttcattcttaga

SEQ ID NO: 80695 - DNA, 201 bp, Homo sapiens
atctcccaggatggtgactaagtagcttagctagtgatcagctcatcctttaccataaaagtcatcattgctgtttagcttgactgttttcctcaagaacrtcgatctgaaggattcataaggagcttatctgaacagatttatctaagaaaaaaaaaaaaagacataaaataagcgaaacaactaggaccaaattacaga

SEQ ID NO: 80696 - DNA, 201 bp, Homo sapiens
gattcacaagattcatcgtgattcaggagacaattctcagacagagcctcattcattcagatataagaacaggaggaaagagtccattgacgtgaaatcgrtatcatctcgaggcagtgatgcaccaagcctgcagaatcgtcgctatccgtccatggcgaggatccactccatgaccatcgaggctcccatcacaaaggt

SEQ ID NO: 80697 - DNA, 201 bp, Homo sapiens
caggctttcagatgatatgtgtatcagatagtttatattatataaactattataactgcctcttacacagagttgtttacttaaatgtcatgtgctgaggrgggccgtattaggaaaatgcaacactctctaataatttccgtgactagtaagagaaggaagccagttataaaacactgctggaccagaatgaccctataa

SEQ ID NO: 80698 - DNA, 201 bp, Homo sapiens
taacagacatgtttgatgcttgggatgcctttgcacatctgccagccctgatgcaacatttggctgacaactacaaacactggaagacactagatgacctraagtgcaaaagtttgaggcttccatctgacagctaaagccaagccacagagggggcctcttgaccgacaaaggacactgtgaatcacagtagcgtaaaca

SEQ ID NO: 80699 - DNA, 201 bp, Homo sapiens
ttgactgttttcctcaagaacatcgatctgaaggattcataaggagcttatctgaacagatttatctaagaaaaaaaaaaaaagacataaaataagcgaarcaactaggaccaaattacagataaactagttagcttcacagcctctatggctacatggttcttctggccgatggtatgacacctaagttagaacacagcc

SEQ ID NO: 80700 - DNA, 201 bp, Homo sapiens
acagcccagtcacagtagcggaagccttggacagagttctagagattttacggaccacagaactgtactcccctcagctgggtaccaaagatgaagatccycacaccagtgatcttgttggaggcctgatgactgacggcttgagaagactgtcaggaaacgagtatgtgtttactaagaatgtgcaccagagtcacagtc

SEQ ID NO: 80701 - DNA, 201 bp, Homo sapiens
tagcttgactgttttcctcaagaacatcgatctgaaggattcataaggagcttatctgaacagatttatctaagaaaaaaaaaaaaagacataaaataagygaaacaactaggaccaaattacagataaactagttagcttcacagcctctatggctacatggttcttctggccgatggtatgacacctaagttagaacac

SEQ ID NO: 80702 - DNA, 201 bp, Homo sapiens
taaagtgcaaaagtttgaggcttccatctgacagctaaagccaagccacagagggggcctcttgaccgacaaaggacactgtgaatcacagtagcgtaaayaagaggccttcctttctaatgacaatgacaggtattggtgaaggagctaatgtttaatatttgaccttgaatcattcaagtccccaaatttcattcttag

SEQ ID NO: 80703 - DNA, 201 bp, Homo sapiens; identical to SEQ ID NO: 80689

SEQ ID NO: 80704 - DNA, 201 bp, Homo sapiens; identical to SEQ ID NO: 80696

SEQ ID NO: 80705 - DNA, 201 bp, Homo sapiens
taacagacatgtttgatgcttgggatgcctttgcacatctgccagccctgatgcaacatttggctgacaactacaaacactggaagacactagatgacctraagtgcaaaagtttgaggcttccatctgacagctaaagccttcctttctaatgacaatgacaggtattggtgaaggagctaatgtttaatatttgacctt

SEQ ID NO: 80706 - DNA, 201 bp, Homo sapiens; identical to SEQ ID NO: 80691

SEQ ID NO: 80707 - DNA, 201 bp, Homo sapiens; identical to SEQ ID NO: 80700

SEQ ID NO: 80708 - DNA, 201 bp, Homo sapiens
tcatcatctgtggagatgtttctatactttgaagatcatggactagtgacgtgctccgctgatcatctcattattttgtggaaaaatggagagcgagaatytggattgcgcagtttaagattatttcaaaaattagaggagaatggtgacttataccttgctgtctagtttaaggaattaaaaatacacatgcatgaacct

SEQ ID NO: 80709 - DNA, 201 bp, Homo sapiens
caaacccagaatccctacactgaactgctagtactgaaggctcatcatgatattgtacgatttctggtacagttagatgactacagatttgcatctgctgrtgatgatggaattgtagttgtgtggaatgcccagacaggggaaaaacttttagaactgaatggacacactcaaaagataacagctattattacatttcct

SEQ ID NO: 80710 - DNA, 201 bp, Homo sapiens
aagcgactgcccaaactaagcctccgtggctgggtacgggagcgctttggggacaaaaattctccctcaactgtggtctgcattccttcggcccgtgggcygatctggggcgggaagtattagcgtctcagttgcgctgcagccggggaggaaggaggaggccgagcctggggcggagtttgggctgactggggctggacc

SEQ ID NO: 80711 - DNA, 201 bp, Homo sapiens
gtgattgcctgccagaaaactgcacatgactccaatgtcctgcacattgccagacttccaaacaggcagttaatctcatgctcagaagatggcagtgtacrcatttgggagttaagagaaaaacagcagcttgcagctgagcctgtaccaacaggtttttttaacatgtggggatttggaagagtcagcaaacaagccagc

SEQ ID NO: 80712 - DNA, 201 bp, Homo sapiens
gacaagttcagagaatatcatgcttccagtctactgtaaagtgtttaactgttcttcagagactagatgtttggctttctggtgggaatgacctgtgtgtrtggaaccgaaaattagatctcctgtgtaagactagccacctttctgatacaggtattagtgctttggttgaaatacctaagaactgtgttgtggcagcag

SEQ ID NO: 80713 - DNA, 201 bp, Homo sapiens
tcctccaaagaatataccacaagtttttccatttgactttgagctgctgttgaagtgataaatctgttcagataagctccttatgaatccttcagatcgaygttcttgaggaaaacagtcaagctaaacagcaatgatgacttttatgagttttcctccaacgacagaaaaacactgcagtaagctttggcagcgtgtcct

SEQ ID NO: 80714 - DNA, 201 bp, Homo sapiens
aacagcaatgatgacttttatgagttttcctccaacgacagaaaaacactgcagtaagctttggcagcgtgtcctttgaagaggcagagactcgtttatcyagctatcaaaaatccatcaagtcttctgcacacaagcttctgtgccagctgctggggatgcaaagaatgcaccccaccccacttggccacaaaaagctga

SEQ ID NO: 80715 - DNA, 201 bp, Homo sapiens
tgtatttgctgcagttggaaggggtttatacgtgtatagccttcaaatgaagcgtgtgattgcctgccagaaaactgcacatgactccaatgtcctgcacrttgccagacttccaaacaggcagttaatctcatgctcagaagatggcagtgtacgcatttgggagttaagagaaaaacagcagcttgcagctgagcctgt

SEQ ID NO: 80716 - DNA, 201 bp, Homo sapiens
tgcatgaaccttgaacatcaaatatcgggtactactctgaaaaccattaatatattgatcacttaaattggtaattttttttgtcagtccataaaattctrcatgtttaaattttttgtggacctaccaaccaggaacatgttgcttctcaggtcctagtatatcctccaaagaatataccacaagtttttccatttgact

SEQ ID NO: 80717 - DNA, 201 bp, Homo sapiens
ccatgagcagccgcgtgcacgaagccgtgaaggccatcgcgctctgccacaacgtgactcccgtgtatgagtccaacggtgtgactgatcaggctgaggcygagaagcagtacgaagactcctgccgcgtataccaggcatccagccccgatgaggtggccctggtacagtggacggaaagtgtgggcttaaccctggtgg

SEQ ID NO: 80718 - DNA, 201 bp, Homo sapiens
cttggcgcttccctgatggacagagctcaagttccatttatattaaccgccacctgtggattttgcagtaattgctaacacatgcagttttaatgggaagyggctctgcgcctaaacggagtcctaacgctgcatcaacgggagggagggtcctgaaagagacccatctgggcctgtctgaacccctcgttcttcatgttt

SEQ ID NO: 80719 - DNA, 201 bp, Homo sapiens
tgtgttttcaaaggtggaggagaaatttgtgctggaagtttttaagcctccgttttcttggaaatcagtctgtaacactggcaagtcttaagatagtcccrtttagactttgcagatgctgaacctggctctgtaacgctgggaagtcttaagatagtcctgtttagactttgcaaaccctgtacctggctttgctcggag

SEQ ID NO: 80720 - DNA, 201 bp, Homo sapiens
agagccaagtgtggttgagatcttggatttgcgtttacttcttgatgaatacatatccttcaaaccctctgcctggcgctacttctgtgtgcttcagagakgtacatcacagcctggtttctgatgcctactaactcctgctcttggagagctggagacacgaggatcagatagtcccttgcctttggagcactcttgata

SEQ ID NO: 80721 - DNA, 201 bp, Homo sapiens
agccaacgcttaagatactgattgacatcttcaagggagaatgctcccaggaggggctgaagaagccatagttggaagtggaaggtactcgtcagtgttcwccacaaacctttttactctgttgtctcagccgcactggggcggaggcggtcaagggtgagaagtaccgacactcaagtgcaaactgccacgtcgttggcc

SEQ ID NO: 80722 - DNA, 201 bp, Homo sapiens
tctctttttttttctctaagaaaatcaccagactagtttttccatcttgagtaatttcttatgtgggacagttttgatcctcattttgaaagcatgcgtgygcacatgtgtgttgcctgtggtgccaggtgagacaggtggcactaactccagctgcttggaaggcatcccaagggcgcatcttaaagttggagcagacct

SEQ ID NO: 80723 - DNA, 201 bp, Homo sapiens
tcatggtggcgctgaccatccagacctggcactggctcatgacagtggcggagctgctcagcctggcctgctacatcgcctccctggtgttcttacacgarttcatcgatgtgtacttcatcgccaccttgtcattcttgtggaaagtctccgtcatcactctggtcagctgcctccccctctatgtcctcaagtacctgc

SEQ ID NO: 80724 - DNA, 201 bp, Homo sapiens
cgctggtcatggttgcccttcagcactttgcaggccgttggtacctgcagatcatccgcttcctcctcttgttttccaacatcatccccattagtttgcgygtgaacctggacatgggcaagatcgtgtacagctgggtgattcgaagggactcgaaaatccccgggaccgtggttcgctccagcacgattcctgagcagc

SEQ ID NO: 80725 - DNA, 201 bp, Homo sapiens
catatgtcttttgatgatggttgtgtgacagggggaagcaggatctatttggtttcttccccctccccccaccccttcctttttgtctctctttttttttytctaagaaaatcaccagactagtttttccatcttgagtaatttcttatgtgggacagttttgatcctcattttgaaagcatgcgtgtgcacatgtgtgtt

SEQ ID NO: 80726 - DNA, 201 bp, Homo sapiens
ggatgctgacaggggacaagctggagacagctacgtgcacagcgaagaatgcacatctggtgaccagaaaccaagacatccacgtttttcggctggtgacyaaccgcggggaggctcacctcgagctgaacgccttccgcaggaagcatgattgtgccctggtcatctcgggagactccctggaggtttgcctcaagtact

SEQ ID NO: 80727 - DNA, 201 bp, Homo sapiens
ggatctgggatctgttccactgccggcagatttcaaggggaacttgctgaaaggcagccagtggtgaagatttctcccctcccaggatggactacatgccrgcatgtttcttataaagctgtggctgcttgtttcagaggaagggagtttgcagtcgcgggacgtggtagagcaaggcattcttgggttttcaagttgctt

SEQ ID NO: 80728 - DNA, 201 bp, Homo sapiens
gctgggagatttatatgggtcactgtgcgagcttccttatgacttgaattttgttgtcacatgataaaagtttctgtgtagctgaaggttgtagaaggcttgtgtgtgtgtgtgtgtgtgtgtgtgtgtgtgtgtgtgtttttaaagagtcctaatgtgtatgtactctttatgtctttcttgctcttacaaagaggtgtc

SEQ ID NO: 80729 - DNA, 201 bp, Homo sapiens
ctgggagatttatatgggtcactgtgcgagcttccttatgacttgaattttgttgtcacatgataaaagtttctgtgtagctgaaggttgtagaaggcttgtgtgtgtgtgtgtgtgtgtgtgtgtgtgtgtgtgtgtttttaaagagtcctaatgtgtatgtactctttatgtctttcttgctcttacaaagaggtgtca

SEQ ID NO: 80730 - DNA, 201 bp, Homo sapiens
tccgcttcctcctcttgttttccaacatcatccccattagtttgcgtgtgaacctggacatgggcaagatcgtgtacagctgggtgattcgaagggactcraaaatccccgggaccgtggttcgctccagcacgattcctgagcagctgggcaggatttcgtacttactcacagacaagacaggcactcttacccagaacg

SEQ ID NO: 80731 - DNA, 201 bp, Homo sapiens
tctgccacaacgtgactcccgtgtatgagtccaacggtgtgactgatcaggctgaggccgagaagcagtacgaagactcctgccgcgtataccaggcatcyagccccgatgaggtggccctggtacagtggacggaaagtgtgggcttaaccctggtgggccgagaccagtcttccatgcagctgaggacccctggcgacc

SEQ ID NO: 80732 - DNA, 201 bp, Homo sapiens
tgcaaagcatcctgcagcgtgagcagctcctccacctggagctccgaagcatcttctcaggccaaagcggcattacccgtgaatctgtcttctccgccacrgcatggtttgaggcgcagtctgttaatatagctgggccatgtcagtgactgttgtgtttgtggggtcaggtggggggcatggtatttgcaaaaaaaacaa

SEQ ID NO: 80733 - DNA, 201 bp, Homo sapiens
gggggcatggtatttgcaaaaaaaacaaattatggctaatttattattttgttgcagtggggttaactgtaaactcatgtaagagtctgtgatttcctcaytggttgatctctctctctgtaatcctcattgcaaattttcaccaggacagcgttttttgattagaggggagctctggcacagtatgctttaatttagcag

SEQ ID NO: 80734 - DNA, 201 bp, Homo sapiens
gctcgttgctgttgcccaataaagcttgtgtacgttctgccttgggggattattttaatttgtacagaaacatgaattctggtatcaaaatgaggactttytattataacgctcctattttttctttatttcatggtacatgaaatgtaaagaaaactctttccagttcagaaaattattttgattttggcaaaaaaaacc

SEQ ID NO: 80735 - DNA, 201 bp, Homo sapiens
tagaggggagctctggcacagtatgctttaatttagcaggaacttccagatgatttaaattctcgatgctgtgatgacacacatatgatctttcgtgtttytgagcgactctactttcattgtttgccagcgtggctcgttgctgttgcccaataaagcttgtgtacgttctgccttgggggattattttaatttgtacag

SEQ ID NO: 80736 - DNA, 201 bp, Homo sapiens
agctggatggggagacggactggaagctgcggcttcccgtggcctgcacgcagaggctccccacggccgccgaccttcttcagattcgatcgtatgtgtaygcagaagagccaaatattgacattcacaacttcgtgggaacttttacccgagaagacagcgaccccccgatcagcgagagcctgagcatagagaacacgc

SEQ ID NO: 80737 - DNA, 201 bp, Homo sapiens; identical to SEQ ID NO: 80717

SEQ ID NO: 80738 - DNA, 201 bp, Homo sapiens; identical to SEQ ID NO: 80718

SEQ ID NO: 80739 - DNA, 201 bp, Homo sapiens; identical to SEQ ID NO: 80719

SEQ ID NO: 80740 - DNA, 201 bp, Homo sapiens; identical to SEQ ID NO: 80720

SEQ ID NO: 80741 - DNA, 201 bp, Homo sapiens; identical to SEQ ID NO: 80721

SEQ ID NO: 80742 - DNA, 201 bp, Homo sapiens; identical to SEQ ID NO: 80723

SEQ ID NO: 80743 - DNA, 201 bp, Homo sapiens; identical to SEQ ID NO: 80724

SEQ ID NO: 80744 - DNA, 201 bp, Homo sapiens; identical to SEQ ID NO: 80726

SEQ ID NO: 80745 - DNA, 201 bp, Homo sapiens; identical to SEQ ID NO: 80727

SEQ ID NO: 80746 - DNA, 201 bp, Homo sapiens; identical to SEQ ID NO: 80728

SEQ ID NO: 80747 - DNA, 201 bp, Homo sapiens; identical to SEQ ID NO: 80729

SEQ ID NO: 80748 - DNA, 201 bp, Homo sapiens; identical to SEQ ID NO: 80730

SEQ ID NO: 80749 - DNA, 201 bp, Homo sapiens; identical to SEQ ID NO: 80731

SEQ ID NO: 80750 - DNA, 201 bp, Homo sapiens; identical to SEQ ID NO: 80732

SEQ ID NO: 80751 - DNA, 201 bp, Homo sapiens
tcttcctgaggacatcagaaaaaaacgggtcatgcttcttgcggacggatcagctggatggggagacggactggaagctgcggcttcccgtggcctgcacrcagaggctccccacggccgccgaccttcttcagattcgatcgtatgtgtacgcagaagagccaaatattgacattcacaacttcgtgggaacttttaccc

SEQ ID NO: 80752 - DNA, 201 bp, Homo sapiens; identical to SEQ ID NO: 80733

SEQ ID NO: 80753 - DNA, 201 bp, Homo sapiens
ggacatcagaaaaaaacgggtcatgcttcttgcggacggatcagctggatggggagacggactggaagctgcggcttcccgtggcctgcacgcagaggctycccacggccgccgaccttcttcagattcgatcgtatgtgtacgcagaagagccaaatattgacattcacaacttcgtgggaacttttacccgagaagaca

SEQ ID NO: 80754 - DNA, 201 bp, Homo sapiens; identical to SEQ ID NO: 80736

SEQ ID NO: 80755 - DNA, 201 bp, Homo sapiens; identical to SEQ ID NO: 80717

SEQ ID NO: 80756 - DNA, 201 bp, Homo sapiens; identical to SEQ ID NO: 80718

SEQ ID NO: 80757 - DNA, 201 bp, Homo sapiens; identical to SEQ ID NO: 80719

SEQ ID NO: 80758 - DNA, 201 bp, Homo sapiens; identical to SEQ ID NO: 80720

SEQ ID NO: 80759 - DNA, 201 bp, Homo sapiens; identical to SEQ ID NO: 80721

SEQ ID NO: 80760 - DNA, 201 bp, Homo sapiens; identical to SEQ ID NO: 80723

SEQ ID NO: 80761 - DNA, 201 bp, Homo sapiens; identical to SEQ ID NO: 80722

SEQ ID NO: 80762 - DNA, 201 bp, Homo sapiens; identical to SEQ ID NO: 80724

SEQ ID NO: 80763 - DNA, 201 bp, Homo sapiens; identical to SEQ ID NO: 80725

SEQ ID NO: 80764 - DNA, 201 bp, Homo sapiens; identical to SEQ ID NO: 80726

SEQ ID NO: 80765 - DNA, 201 bp, Homo sapiens; identical to SEQ ID NO: 80727

SEQ ID NO: 80766 - DNA, 201 bp, Homo sapiens; identical to SEQ ID NO: 80728

SEQ ID NO: 80767 - DNA, 201 bp, Homo sapiens; identical to SEQ ID NO: 80729

SEQ ID NO: 80768 - DNA, 201 bp, Homo sapiens; identical to SEQ ID NO: 80730

SEQ ID NO: 80769 - DNA, 201 bp, Homo sapiens; identical to SEQ ID NO: 80731

SEQ ID NO: 80770 - DNA, 201 bp, Homo sapiens; identical to SEQ ID NO: 80732

SEQ ID NO: 80771 - DNA, 201 bp, Homo sapiens; identical to SEQ ID NO: 80751

SEQ ID NO: 80772 - DNA, 201 bp, Homo sapiens; identical to SEQ ID NO: 80733

SEQ ID NO: 80773 - DNA, 201 bp, Homo sapiens; identical to SEQ ID NO: 80734

SEQ ID NO: 80774 - DNA, 201 bp, Homo sapiens; identical to SEQ ID NO: 80753

SEQ ID NO: 80775 - DNA, 201 bp, Homo sapiens; identical to SEQ ID NO: 80735

SEQ ID NO: 80776 - DNA, 201 bp, Homo sapiens; identical to SEQ ID NO: 80726

SEQ ID NO: 80777 - DNA, 201 bp, Homo sapiens; identical to SEQ ID NO: 80717

SEQ ID NO: 80778 - DNA, 201 bp, Homo sapiens; identical to SEQ ID NO: 80718

SEQ ID NO: 80779 - DNA, 201 bp, Homo sapiens; identical to SEQ ID NO: 80719

SEQ ID NO: 80780 - DNA, 201 bp, Homo sapiens; identical to SEQ ID NO: 80728

SEQ ID NO: 80781 - DNA, 201 bp, Homo sapiens; identical to SEQ ID NO: 80727

SEQ ID NO: 80782 - DNA, 201 bp, Homo sapiens; identical to SEQ ID NO: 80729

SEQ ID NO: 80783 - DNA, 201 bp, Homo sapiens; identical to SEQ ID NO: 80720

SEQ ID NO: 80784 - DNA, 201 bp, Homo sapiens; identical to SEQ ID NO: 80730

SEQ ID NO: 80785 - DNA, 201 bp, Homo sapiens; identical to SEQ ID NO: 80721

SEQ ID NO: 80786 - DNA, 201 bp, Homo sapiens; identical to SEQ ID NO: 80723

SEQ ID NO: 80787 - DNA, 201 bp, Homo sapiens; identical to SEQ ID NO: 80731

SEQ ID NO: 80788 - DNA, 201 bp, Homo sapiens; identical to SEQ ID NO: 80724

SEQ ID NO: 80789 - DNA, 201 bp, Homo sapiens; identical to SEQ ID NO: 80732

SEQ ID NO: 80790 - DNA, 201 bp, Homo sapiens; identical to SEQ ID NO: 80733

SEQ ID NO: 80791 - DNA, 201 bp, Homo sapiens
gtcaaggcccggtccatcctgtgctgcatgcgccaccagcccaactggtcccccaaggtggtggagctgtgtaagaagtaccagcagcagaccgtggtagmcattgacctggctggagatgagaccatcccaggaagcagcctcttgcctggacatgtccaggcctaccaggaggctgtgaagagcggcattcaccgtact

SEQ ID NO: 80792 - DNA, 201 bp, Homo sapiens
taacacagcagaggggctgctgaacgtcattggcatggacaagccgctcacccttccagacttcctggccaagtttgactactacatgcctgctatcgcgkgctgccgggaggctatcaaaaggatcgcctatgagtttgtagagatgaaggccaaagagggcgtggtgtatgtggaggtgcggtacagtccgcacctgct

SEQ ID NO: 80793 - DNA, 201 bp, Homo sapiens
tcggccgaagtagtaaaagaggctgtggacatactcaagacagagcggctgggacacggctaccacaccctggaagaccaggccctttataacaggctgcsgcaggaaaacatgcacttcgagatctgcccctggtccagctacctcactggtgcctggaagccggacacggagcatgcagtcattcggctcaaaaatgac

SEQ ID NO: 80794 - DNA, 201 bp, Homo sapiens
aacacagcagaggggctgctgaacgtcattggcatggacaagccgctcacccttccagacttcctggccaagtttgactactacatgcctgctatcgcggkctgccgggaggctatcaaaaggatcgcctatgagtttgtagagatgaaggccaaagagggcgtggtgtatgtggaggtgcggtacagtccgcacctgctg

SEQ ID NO: 80795 - DNA, 201 bp, Homo sapiens
ggccgaagtagtaaaagaggctgtggacatactcaagacagagcggctgggacacggctaccacaccctggaagaccaggccctttataacaggctgcggyaggaaaacatgcacttcgagatctgcccctggtccagctacctcactggtgcctggaagccggacacggagcatgcagtcattcggctcaaaaatgacca

SEQ ID NO: 80796 - DNA, 201 bp, Homo sapiens
gacccgctcatcttcaagtccaccctggacactgattaccagatgaccaaacgggacatgggctttactgaagaggagtttaaaaggctgaacatcaatgyggccaaatctagtttcctcccagaagatgaaaagagggagcttctcgacctgctctataaagcctatgggatgccaccttcagcctctgcaggtagaacc

SEQ ID NO: 80797 - DNA, 201 bp, Homo sapiens
gtttgtagagatgaaggccaaagagggcgtggtgtatgtggaggtgcggtacagtccgcacctgctggccaactccaaagtggagccaatcccctggaacyaggctgaaggggacctcaccccagacgaggtggtggccctagtgggccagggcctgcaggagggggagcgagacttcggggtcaaggcccggtccatcct

SEQ ID NO: 80798 - DNA, 201 bp, Homo sapiens
gagggcgtggtgtatgtggaggtgcggtacagtccgcacctgctggccaactccaaagtggagccaatcccctggaaccaggctgaaggggacctcacccmagacgaggtggtggccctagtgggccagggcctgcaggagggggagcgagacttcggggtcaaggcccggtccatcctgtgctgcatgcgccaccagccc

SEQ ID NO: 80799 - DNA, 201 bp, Homo sapiens
cgcgggctgccgggaggctatcaaaaggatcgcctatgagtttgtagagatgaaggccaaagagggcgtggtgtatgtggaggtgcggtacagtccgcacstgctggccaactccaaagtggagccaatcccctggaaccaggctgaaggggacctcaccccagacgaggtggtggccctagtgggccagggcctgcagga

SEQ ID NO: 80800 - DNA, 201 bp, Homo sapiens
ggacctcaccccagacgaggtggtggccctagtgggccagggcctgcaggagggggagcgagacttcggggtcaaggcccggtccatcctgtgctgcatgygccaccagcccaactggtcccccaaggtggtggagctgtgtaagaagtaccagcagcagaccgtggtagccattgacctggctggagatgagaccatccc

SEQ ID NO: 80801 - DNA, 201 bp, Homo sapiens
gacctcaccccagacgaggtggtggccctagtgggccagggcctgcaggagggggagcgagacttcggggtcaaggcccggtccatcctgtgctgcatgcrccaccagcccaactggtcccccaaggtggtggagctgtgtaagaagtaccagcagcagaccgtggtagccattgacctggctggagatgagaccatccca

SEQ ID NO: 80802 - DNA, 201 bp, Homo sapiens
gtggagctgtgtaagaagtaccagcagcagaccgtggtagccattgacctggctggagatgagaccatcccaggaagcagcctcttgcctggacatgtccmggcctaccaggaggctgtgaagagcggcattcaccgtactgtccacgccggggaggtgggctcggccgaagtagtaaaagaggctgtggacatactcaag

SEQ ID NO: 80803 - DNA, 201 bp, Homo sapiens
ttattccttccaagaagaccatgatctcaatagtcagttactgatgctcctgaaccctatgtgtccatttctgcacacacgtatacctcggcatggccgcstcacttctctgattatgtgccctggccagggaccagcgcccttgcacatgggcatggttgaatctgaaaccctccttctgtggcaacttgtactgaaaat

SEQ ID NO: 80804 - DNA, 201 bp, Homo sapiens
gcctaccaggaggctgtgaagagcggcattcaccgtactgtccacgccggggaggtgggctcggccgaagtagtaaaagaggctgtggacatactcaagayagagcggctgggacacggctaccacaccctggaagaccaggccctttataacaggctgcggcaggaaaacatgcacttcgagatctgcccctggtccagc

SEQ ID NO: 80805 - DNA, 201 bp, Homo sapiens
ggctgccgggaggctatcaaaaggatcgcctatgagtttgtagagatgaaggccaaagagggcgtggtgtatgtggaggtgcggtacagtccgcacctgcyggccaactccaaagtggagccaatcccctggaaccaggctgaaggggacctcaccccagacgaggtggtggccctagtgggccagggcctgcaggagggg

SEQ ID NO: 80806 - DNA, 201 bp, Homo sapiens
accgagccggcagagacccaccgagcggcggcggagggagcagcgccggggcgcacgagggcaccatggcccagacgcccgccttcgacaagcccaaagtrgaactgcatgtccacctagacggatccatcaagcctgaaaccatcttatactatggcaggaggagagggatcgccctcccagctaacacagcagaggggc

SEQ ID NO: 80807 - DNA, 201 bp, Homo sapiens
aagtttgactactacatgcctgctatcgcgggctgccgggaggctatcaaaaggatcgcctatgagtttgtagagatgaaggccaaagagggcgtggtgtrtgtggaggtgcggtacagtccgcacctgctggccaactccaaagtggagccaatcccctggaaccaggctgaaggggacctcaccccagacgaggtggtg

SEQ ID NO: 80808 - DNA, 201 bp, Homo sapiens
caactccaaagtggagccaatcccctggaaccaggctgaaggggacctcaccccagacgaggtggtggccctagtgggccagggcctgcaggagggggagygagacttcggggtcaaggcccggtccatcctgtgctgcatgcgccaccagcccaactggtcccccaaggtggtggagctgtgtaagaagtaccagcagca

SEQ ID NO: 80809 - DNA, 201 bp, Homo sapiens
gggtcaaggcccggtccatcctgtgctgcatgcgccaccagcccaactggtcccccaaggtggtggagctgtgtaagaagtaccagcagcagaccgtggtrgccattgacctggctggagatgagaccatcccaggaagcagcctcttgcctggacatgtccaggcctaccaggaggctgtgaagagcggcattcaccgta

SEQ ID NO: 80810 - DNA, 201 bp, Homo sapiens
tggtccagctacctcactggtgcctggaagccggacacggagcatgcagtcattcggctcaaaaatgaccaggctaactactcgctcaacacagatgaccmgctcatcttcaagtccaccctggacactgattaccagatgaccaaacgggacatgggctttactgaagaggagtttaaaaggctgaacatcaatgcggcc

SEQ ID NO: 80811 - DNA, 201 bp, Homo sapiens
atgtggaggtgcggtacagtccgcacctgctggccaactccaaagtggagccaatcccctggaaccaggctgaaggggacctcaccccagacgaggtggtrgccctagtgggccagggcctgcaggagggggagcgagacttcggggtcaaggcccggtccatcctgtgctgcatgcgccaccagcccaactggtccccca

SEQ ID NO: 80812 - DNA, 201 bp, Homo sapiens
gctatcgcgggctgccgggaggctatcaaaaggatcgcctatgagtttgtagagatgaaggccaaagagggcgtggtgtatgtggaggtgcggtacagtcygcacctgctggccaactccaaagtggagccaatcccctggaaccaggctgaaggggacctcaccccagacgaggtggtggccctagtgggccagggcctg

SEQ ID NO: 80813 - DNA, 201 bp, Homo sapiens
tacatgcctgctatcgcgggctgccgggaggctatcaaaaggatcgcctatgagtttgtagagatgaaggccaaagagggcgtggtgtatgtggaggtgcdgtacagtccgcacctgctggccaactccaaagtggagccaatcccctggaaccaggctgaaggggacctcaccccagacgaggtggtggccctagtgggc

SEQ ID NO: 80814 - DNA, 201 bp, Homo sapiens
cttcggggtcaaggcccggtccatcctgtgctgcatgcgccaccagcccaactggtcccccaaggtggtggagctgtgtaagaagtaccagcagcagaccrtggtagccattgacctggctggagatgagaccatcccaggaagcagcctcttgcctggacatgtccaggcctaccaggaggctgtgaagagcggcattca

SEQ ID NO: 80815 - DNA, 201 bp, Homo sapiens
gcctggaagccggacacggagcatgcagtcattcggctcaaaaatgaccaggctaactactcgctcaacacagatgacccgctcatcttcaagtccaccckggacactgattaccagatgaccaaacgggacatgggctttactgaagaggagtttaaaaggctgaacatcaatgcggccaaatctagtttcctcccagaa

SEQ ID NO: 80816 - DNA, 201 bp, Homo sapiens
gaaaagagggagcttctcgacctgctctataaagcctatgggatgccaccttcagcctctgcaggtagaacctctgaagacgccactcctccaagccttcrccctgtggagtcaccccaactctgtggggctgagcaacatttttacatttattccttccaagaagaccatgatctcaatagtcagttactgatgctcctg

SEQ ID NO: 80817 - DNA, 201 bp, Homo sapiens
ctggccaactccaaagtggagccaatcccctggaaccaggctgaaggggacctcaccccagacgaggtggtggccctagtgggccagggcctgcaggaggrggagcgagacttcggggtcaaggcccggtccatcctgtgctgcatgcgccaccagcccaactggtcccccaaggtggtggagctgtgtaagaagtaccag

SEQ ID NO: 80818 - DNA, 201 bp, Homo sapiens
ctacatgcctgctatcgcgggctgccgggaggctatcaaaaggatcgcctatgagtttgtagagatgaaggccaaagagggcgtggtgtatgtggaggtgyggtacagtccgcacctgctggccaactccaaagtggagccaatcccctggaaccaggctgaaggggacctcaccccagacgaggtggtggccctagtggg

SEQ ID NO: 80819 - DNA, 201 bp, Homo sapiens
aactccaaagtggagccaatcccctggaaccaggctgaaggggacctcaccccagacgaggtggtggccctagtgggccagggcctgcaggagggggagcragacttcggggtcaaggcccggtccatcctgtgctgcatgcgccaccagcccaactggtcccccaaggtggtggagctgtgtaagaagtaccagcagcag

SEQ ID NO: 80820 - DNA, 201 bp, Homo sapiens; identical to SEQ ID NO: 80791

SEQ ID NO: 80821 - DNA, 201 bp, Homo sapiens; identical to SEQ ID NO: 80792

SEQ ID NO: 80822 - DNA, 201 bp, Homo sapiens; identical to SEQ ID NO: 80793

SEQ ID NO: 80823 - DNA, 201 bp, Homo sapiens; identical to SEQ ID NO: 80794

SEQ ID NO: 80824 - DNA, 201 bp, Homo sapiens; identical to SEQ ID NO: 80795

SEQ ID NO: 80825 - DNA, 201 bp, Homo sapiens
gacccgctcatcttcaagtccaccctggacactgattaccagatgaccaaacgggacatgggctttactgaagaggagtttaaaaggctgaacatcaatgyggccaaatctagtttcctcccagaagatgaaaagagggagcttctcgacctgctctataaagcctatgggatgccaccttcagcctctgcagggcagaac

SEQ ID NO: 80826 - DNA, 201 bp, Homo sapiens; identical to SEQ ID NO: 80797

SEQ ID NO: 80827 - DNA, 201 bp, Homo sapiens; identical to SEQ ID NO: 80798

SEQ ID NO: 80828 - DNA, 201 bp, Homo sapiens; identical to SEQ ID NO: 80799

SEQ ID NO: 80829 - DNA, 201 bp, Homo sapiens; identical to SEQ ID NO: 80800

SEQ ID NO: 80830 - DNA, 201 bp, Homo sapiens; identical to SEQ ID NO: 80801

SEQ ID NO: 80831 - DNA, 201 bp, Homo sapiens; identical to SEQ ID NO: 80802

SEQ ID NO: 80832 - DNA, 201 bp, Homo sapiens; identical to SEQ ID NO: 80804

SEQ ID NO: 80833 - DNA, 201 bp, Homo sapiens; identical to SEQ ID NO: 80803

SEQ ID NO: 80834 - DNA, 201 bp, Homo sapiens; identical to SEQ ID NO: 80805

SEQ ID NO: 80835 - DNA, 201 bp, Homo sapiens; identical to SEQ ID NO: 80806

SEQ ID NO: 80836 - DNA, 201 bp, Homo sapiens; identical to SEQ ID NO: 80807

SEQ ID NO: 80837 - DNA, 201 bp, Homo sapiens; identical to SEQ ID NO: 80808

SEQ ID NO: 80838 - DNA, 201 bp, Homo sapiens; identical to SEQ ID NO: 80809

SEQ ID NO: 80839 - DNA, 201 bp, Homo sapiens; identical to SEQ ID NO: 80810

SEQ ID NO: 80840 - DNA, 201 bp, Homo sapiens; identical to SEQ ID NO: 80811

SEQ ID NO: 80841 - DNA, 201 bp, Homo sapiens; identical to SEQ ID NO: 80812

SEQ ID NO: 80842 - DNA, 201 bp, Homo sapiens; identical to SEQ ID NO: 80813

SEQ ID NO: 80843 - DNA, 201 bp, Homo sapiens; identical to SEQ ID NO: 80814

SEQ ID NO: 80844 - DNA, 201 bp, Homo sapiens; identical to SEQ ID NO: 80815

SEQ ID NO: 80845 - DNA, 201 bp, Homo sapiens
aaaagagggagcttctcgacctgctctataaagcctatgggatgccaccttcagcctctgcagggcagaacctctgaagacgccactcctccaagccttcrccctgtggagtcaccccaactctgtggggctgagcaacatttttacatttattccttccaagaagaccatgatctcaatagtcagttactgatgctcctg

SEQ ID NO: 80846 - DNA, 201 bp, Homo sapiens; identical to SEQ ID NO: 80817

SEQ ID NO: 80847 - DNA, 201 bp, Homo sapiens; identical to SEQ ID NO: 80818

SEQ ID NO: 80848 - DNA, 201 bp, Homo sapiens; identical to SEQ ID NO: 80819

SEQ ID NO: 80849 - DNA, 201 bp, Homo sapiens
atgtaactcgttgccacagttataatctcactgtccactactgttaccaagttggaggacaagaacaagtgcgagaagaagtaagctgggatacagaaaaytcacaccctcaacacacgatcactaacctgtcaccatacaccaatgtcagtgtgaaactgatcctcatgaacccagagggccggaaggaaagccaagaac

SEQ ID NO: 80850 - DNA, 201 bp, Homo sapiens
ctgcaggcgacggccaactaacaggagctgccactccgaaaccagtcccagaacccgagaaacagacagaccatacagttaaaattgctggagtcatcgcrggcatcttgctgttcgtgattatatttcttggagttgtgttggtaatgaagaaaaggaaactggccaagaagcggaaagagaccatgagcagcacccgac

SEQ ID NO: 80851 - DNA, 201 bp, Homo sapiens
tggaagaggacatcatcagcaggatattccgcatttacaatgccgccagaccccaagatggatatcggatggtgcagcaattccagttcctgggctggccratgtacagggacacaccagtgtctaagcgctccttcttgaagctcattcgccaggtggacaagtggcaagaggaatacaatggcggggaaggccgcaccg

SEQ ID NO: 80852 - DNA, 201 bp, Homo sapiens
cgatgtacagggacacaccagtgtctaagcgctccttcttgaagctcattcgccaggtggacaagtggcaagaggaatacaatggcggggaaggccgcacsgttgtgcactgcttgaacgggggaggccgcagtgggacgttctgcgccatcagcatcgtatgtgagatgctccggcaccagagaaccgtggatgtctttc

SEQ ID NO: 80853 - DNA, 201 bp, Homo sapiens
agcaattccagttcctgggctggccgatgtacagggacacaccagtgtctaagcgctccttcttgaagctcattcgccaggtggacaagtggcaagaggartacaatggcggggaaggccgcaccgttgtgcactgcttgaacgggggaggccgcagtgggacgttctgcgccatcagcatcgtatgtgagatgctccggc

SEQ ID NO: 80854 - DNA, 201 bp, Homo sapiens
cgcttcattgcttcatttaatgttgtgaataccaccaaacgagatgctggaaagtaccgctgcatgattcgcactgaaggaggtgttggaatatcaaactrtgcagagttggtagttaaagaaccacccgttcctattgccccacctcagctcgcctctgtaggagccacctacctgtggatacagctcaacgccaactcc

SEQ ID NO: 80855 - DNA, 201 bp, Homo sapiens
cttgcctggcgactttggccggacttttgctaactgcggcgggcgagacgttctcaggtggctgcctctttgatgagccgtatagcacatgtggatatagwcaatctgaaggtgatgacttcaattgggagcaagtgaacaccttgactaaaccgacttctgatccatggatgccatcaggttctttcatgctggtgaatg

SEQ ID NO: 80856 - DNA, 201 bp, Homo sapiens
agaatatgtgataagaacatttgctgttgaaaagagaggtgtgcatgaaatccgagagatcagacagtttcacttcactggctggccggatcatggggtcscctaccatgccaccggcctgctgggattcgtgcggcaagtcaagtccaagagcccgcccagtgcaggcccactggtggtgcactgcagtgctggtgcagg

SEQ ID NO: 80857 - DNA, 201 bp, Homo sapiens
tagtcacccagcatcctttgccaaacacagtgaaagacttttggagactggtcctggattatcactgcacatccgtagttatgctaaatgatgtggatccygcccagttgtgtccacagtactggccagaaaacggagtacacagacacggccccatccaggtggaatttgtctctgctgacctggaagaggacatcatca

SEQ ID NO: 80858 - DNA, 201 bp, Homo sapiens
tacagctcaacgccaactccatcaatggggatgggcccattgtggcccgagaggtggagtactgcacggccagtgggagctggaatgaccggcagccagtygattccacgagctataaaattggacaccttgacccagatacagaatatgagattagtgtgctcctgaccaggccaggggagggtggcactggctctcctg

SEQ ID NO: 80859 - DNA, 201 bp, Homo sapiens
acgatgcgatcctggaagcctgtctttgtggggacacctctgtgcctgcttcccaagttaggtctctgtattatgacatgaacaaactggatccacagacraactcaagccagattaaagaggaattccggacgctaaacatggtgacaccaacgctgcgagtagaggactgcagcatcgcactgttgccccggaaccatg

SEQ ID NO: 80860 - DNA, 201 bp, Homo sapiens
atagcacatgtggatatagtcaatctgaaggtgatgacttcaattgggagcaagtgaacaccttgactaaaccgacttctgatccatggatgccatcaggytctttcatgctggtgaatgcctctgggagacctgaggggcagagagcccacctgctcttaccccaacttaaagaaaatgacacccactgcatcgattttc

SEQ ID NO: 80861 - DNA, 201 bp, Homo sapiens
ttaatgctggccagtttgctaccttccagtgcagtgccatcggcaggaccgtggcaggagacaggctctggttacagggcattgatgtgcgagatgctccyctgaaggaaatcaaggtgaccagctcccgacgcttcattgcttcatttaatgttgtgaataccaccaaacgagatgctggaaagtaccgctgcatgattc

SEQ ID NO: 80862 - DNA, 201 bp, Homo sapiens
aagaacgtcctcgaagaactaaaaagacgacagaaatcttaaagtgctacccagtgccaattcacttccagaatgcttctctgctgaactcacagtactaytttgctgcagaatttcctgcagacagcctccaagctgcgcagccttttacaattggtgataataagacatataatggatactggaacactccccttctcc

SEQ ID NO: 80863 - DNA, 201 bp, Homo sapiens; identical to SEQ ID NO: 80849

SEQ ID NO: 80864 - DNA, 201 bp, Homo sapiens
actgtgtccaagtggccacaaaaggagctgccactccgaaaccagtcccagaacccgagaaacagacagaccatacagttaaaattgctggagtcatcgcrggcatcttgctgttcgtgattatatttcttggagttgtgttggtaatgaagaaaaggaaactggccaagaagcggaaagagaccatgagcagcacccgac

SEQ ID NO: 80865 - DNA, 201 bp, Homo sapiens; identical to SEQ ID NO: 80851

SEQ ID NO: 80866 - DNA, 201 bp, Homo sapiens; identical to SEQ ID NO: 80852

SEQ ID NO: 80867 - DNA, 201 bp, Homo sapiens; identical to SEQ ID NO: 80853

SEQ ID NO: 80868 - DNA, 201 bp, Homo sapiens; identical to SEQ ID NO: 80854

SEQ ID NO: 80869 - DNA, 201 bp, Homo sapiens; identical to SEQ ID NO: 80855

SEQ ID NO: 80870 - DNA, 201 bp, Homo sapiens; identical to SEQ ID NO: 80856

SEQ ID NO: 80871 - DNA, 201 bp, Homo sapiens; identical to SEQ ID NO: 80857

SEQ ID NO: 80872 - DNA, 201 bp, Homo sapiens; identical to SEQ ID NO: 80858

SEQ ID NO: 80873 - DNA, 201 bp, Homo sapiens; identical to SEQ ID NO: 80859

SEQ ID NO: 80874 - DNA, 201 bp, Homo sapiens; identical to SEQ ID NO: 80860

SEQ ID NO: 80875 - DNA, 201 bp, Homo sapiens; identical to SEQ ID NO: 80861

SEQ ID NO: 80876 - DNA, 201 bp, Homo sapiens; identical to SEQ ID NO: 80862

SEQ ID NO: 80877 - DNA, 201 bp, Homo sapiens; identical to SEQ ID NO: 80860

SEQ ID NO: 80878 - DNA, 201 bp, Homo sapiens; identical to SEQ ID NO: 80855

SEQ ID NO: 80879 - DNA, 201 bp, Homo sapiens; identical to SEQ ID NO: 80849

SEQ ID NO: 80880 - DNA, 201 bp, Homo sapiens; identical to SEQ ID NO: 80864

SEQ ID NO: 80881 - DNA, 201 bp, Homo sapiens; identical to SEQ ID NO: 80851

SEQ ID NO: 80882 - DNA, 201 bp, Homo sapiens; identical to SEQ ID NO: 80852

SEQ ID NO: 80883 - DNA, 201 bp, Homo sapiens; identical to SEQ ID NO: 80853

SEQ ID NO: 80884 - DNA, 201 bp, Homo sapiens; identical to SEQ ID NO: 80854

SEQ ID NO: 80885 - DNA, 201 bp, Homo sapiens; identical to SEQ ID NO: 80855

SEQ ID NO: 80886 - DNA, 201 bp, Homo sapiens; identical to SEQ ID NO: 80856

SEQ ID NO: 80887 - DNA, 201 bp, Homo sapiens; identical to SEQ ID NO: 80857

SEQ ID NO: 80888 - DNA, 201 bp, Homo sapiens; identical to SEQ ID NO: 80858

SEQ ID NO: 80889 - DNA, 201 bp, Homo sapiens; identical to SEQ ID NO: 80859

SEQ ID NO: 80890 - DNA, 201 bp, Homo sapiens; identical to SEQ ID NO: 80860

SEQ ID NO: 80891 - DNA, 201 bp, Homo sapiens; identical to SEQ ID NO: 80861

SEQ ID NO: 80892 - DNA, 201 bp, Homo sapiens; identical to SEQ ID NO: 80862

SEQ ID NO: 80893 - DNA, 201 bp, Homo sapiens
ctgtgaaggtagcaatcaacactgtataccgccacatcgactgcagccacgtgcaccagaacaaggaccaggagcagctcaaggagcaggtggtgaggcgygagtggctcttcatcatcagcaagccatggggcatatgccacaggaagtgcctgaggaacttggtggtgacccccacatctgtgacactggatcgcattg

SEQ ID NO: 80894 - DNA, 201 bp, Homo sapiens
tcgactgcagccacgtgcaccagaacaaggaccaggagcagctcaaggagcaggtggtgaggcgtgagtggctcttcatcatcagcaagccatggggcatrtgccacaggaagtgcctgaggaacttggtggtgacccccacatctgtgacactggatcgcattgctgagaacttcaaggtctttgactttgaactgagca

SEQ ID NO: 80895 - DNA, 201 bp, Homo sapiens
ctgtgaaggtagcaatcaacactgtataccgccacatcgactgcagccacgtgcaccagaacaaggaccaggagcagctcaaggagcaggtggtgaggcgygagtggctcttcatcatcagcaagccatggggcatatgccacaggaagtgcctggtgagaggatcctgccgaaaggtgctcagtggcctggagctggact

SEQ ID NO: 80896 - DNA, 136 bp, Homo sapiens
tgagaacttcaaggtctttgactttgaactgagcagccaggatatgacctccttactcagctgcaacaggaactgaagggtctgtgccttggtaagctgarccgcccccaaggatcacccattccatgaagagttt

SEQ ID NO: 80897 - DNA, 201 bp, Homo sapiens
tcgactgcagccacgtgcaccagaacaaggaccaggagcagctcaaggagcaggtggtgaggcgtgagtggctcttcatcatcagcaagccatggggcatrtgccacaggaagtgcctggtgagaggatcctgccgaaaggtgctcagtggcctggagctggactacctggacctccaccttattcactggccaacaggct

SEQ ID NO: 80898 - DNA, 201 bp, Homo sapiens
ggctaagttcctgaatgtggaagcagctatggtctttgggatgggattcgcaactaactcaatgaatatcccagcattagttggaaagggatgcctcattktaagtgatgagttaaaccacacatcgcttgtgcttggggcccgactctcaggtgcaaccataagaatcttcaaacacaacactctcccctccatcctcca

SEQ ID NO: 80899 - DNA, 201 bp, Homo sapiens
atcttcaaacacaacactctcccctccatcctccaagaagacacacaaagcctagagaagctcctgagagatgctgtcatctatggccagcctcgaacccrcagagcttggaaaaagattctcatcctggtggagggtgtctacagcatggaaggttccatcgtgcatctgccccagatcatagctctaaagaagaaatac

SEQ ID NO: 80900 - DNA, 201 bp, Homo sapiens
ccttgcctcacaaggaatataaatggatttctcccccttcctcaggacaattttggttcccagaccagcttgattgaactgagggagacgttgttgttttwaatgtctccagcttggactgcagagacaaaaacatgattccagatttaagtctctcttcttccaagtattctactagaaatacacacacacacacacaca

SEQ ID NO: 80901 - DNA, 201 bp, Homo sapiens
taaagactttgcgagaaagacctccctccttgcctcacaaggaatataaatggatttctcccccttcctcaggacaattttggttcccagaccagcttgaytgaactgagggagacgttgttgtttttaatgtctccagcttggactgcagagacaaaaacatgattccagatttaagtctctcttcttccaagtattcta

SEQ ID NO: 80902 - DNA, 201 bp, Homo sapiens
tctgcttctttatatgcctggtaaagtagcggcttttgcaaggcatatgctagagaaaaaaattggagtggtggtcgtgggatttccagccactcccctcrcagaagctcgggctcggttttgtgtttcagcggcacatacccgggagatgttagacacggttttagaagctcttgatgaaatgggtgatctcttgcaact

SEQ ID NO: 80903 - DNA, 201 bp, Homo sapiens
tgtttgtttcataagaaaaggggcagaaagcaagcacaagacacttttaggtctagactaaaatggtagttacaacaatttgaaccttgttggtgcagtgyacggtgaatgcttaccctgcacagcctctattaccttaaggaattagttgtcattttcctattgaattttgagtaaatggtgaaattcagtgtcctttag

SEQ ID NO: 80904 - DNA, 201 bp, Homo sapiens
aaactttcaggaaaggcaccttggataagcacaaggagttggaggaccttgtggctaagttcctgaatgtggaagcagctatggtctttgggatgggattygcaactaactcaatgaatatcccagcattagttggaaagggatgcctcattttaagtgatgagttaaaccacacatcgcttgtgcttggggcccgactct

SEQ ID NO: 80905 - DNA, 201 bp, Homo sapiens
tctccagcttggactgcagagacaaaaacatgattccagatttaagtctctcttcttccaagtattctactagaaatacacacacacacacacacacacacttctgagaatatttttaatggcaataagcctgtgttttagctgctactgtgcagaccctttcagggattccaaccaaatgcaaatgagagaatttaaaat

SEQ ID NO: 80906 - DNA, 201 bp, Homo sapiens
gtctccagcttggactgcagagacaaaaacatgattccagatttaagtctctcttcttccaagtattctactagaaatacacacacacacacacacacacacttctgagaatatttttaatggcaataagcctgtgttttagctgctactgtgcagaccctttcagggattccaaccaaatgcaaatgagagaatttaaaa

SEQ ID NO: 80907 - DNA, 201 bp, Homo sapiens
aacttgcgaaaaacacaagatacttcagacaaagactgcaggaaatgggattcattatctatggcaatgagaatgcttctgttgttcctctgcttctttayatgcctggtaaagtagcggcttttgcaaggcatatgctagagaaaaaaattggagtggtggtcgtgggatttccagccactcccctcgcagaagctcggg

SEQ ID NO: 80908 - DNA, 201 bp, Homo sapiens
acatgggcttatattgtgagcgtgtaggagccttcactgtagtatgcaaagatgcgatgaaaccaaaagggtagagtcacagttgaagatcttgatccatyccatgtatgccaaccgtccccacaatggggcccagattgcttctaccattctgaacaccccagattcatgaaaacaatggttgcaagaagtgaaaggcat

SEQ ID NO: 80909 - DNA, 201 bp, Homo sapiens
gggcttatattgtgagcgtgtaggagccttcactgtagtatgcaaagatgcgatgaaaccaaaagggtagagtcacagttgaagatcttgatccatcccaygtatgccaaccgtccccacaatggggcccagattgcttctaccattctgaacaccccagattcatgaaaacaatggttgcaagaagtgaaaggcatggcc

SEQ ID NO: 80910 - DNA, 201 bp, Homo sapiens
ctaccgggatgataacggaaagccttggacgtgctgcctagcgtccccaaggcagaggcccagattgccacaaaaagtttggacaaggaatacctgtccaytgggggactggctgaattttgcaaggcatctgcagaactagcccttggtgagaacagcgaagtcttgaaaagtggccggtttgtcattgtgcagaccatt

SEQ ID NO: 80911 - DNA, 106 bp, Homo sapiens
gccgcygccgccgccgccgccgcctcctgggaaccaggggactgaagagcctgcgagagcggaacactgccggaccccgggtgggggggcgcagcagctgcgcctg

SEQ ID NO: 80912 - DNA, 201 bp, Homo sapiens
tgactgacctggagatacttgcattgctgattgctgcactaagccacgatttggatcaccgtggtgtgaataactcttacatacagcgaagtgaacatccmcttgcccagctttactgccattcaatcatggaacaccatcattttgaccagtgcctgatgattcttaatagtccaggcaatcagattctcagtggcctct

SEQ ID NO: 80913 - DNA, 201 bp, Homo sapiens
gaagatctctctaagagtttttttccttctgagcttccttttcaaaataaaagtgacaattgtagcattgacttgaagtgagacatggttatagataagasagtacaaaatgactctttttcctgtcaattgaaatttaaagaaaagttttaattatataaatagcaaagggctattgccaatactagggtcaaaaatgaa

SEQ ID NO: 80914 - DNA, 201 bp, Homo sapiens
ctagtgtgtttcacatggagtgtgaggaattagaaaaatcatctgatacattaacaagggaacatgatgcaaacaaaatcaattacatgtatgctcagtaygtcaaaaatactatggaaccacttaatatcccagatgtcagtaaggataaaagatttccctggacaactgaaaatacaggaaatgtaaaccagcagtgca

SEQ ID NO: 80915 - DNA, 201 bp, Homo sapiens
agaggactgtttccctttgctagatggctgcagaaagaacaggcagaaatggcaggcccttgcagaacagcaggagaagatgctgattaatggggaaagcrgccaggccaagcggaactgagtggcctatttcatgcagagttgaagtttacagagatggtgtgttctgcaatatgcctagtttcttacacactgtctgta

SEQ ID NO: 80916 - DNA, 201 bp, Homo sapiens
  misc_feature (1)...(201): n = A,T,C or G
gagagagttcacaccatccctgtgtgcaaggaaggtatcagaggccacaccgaatcttgctcttgtcccttgcagcagagtcctcgtgcagataacagtgnccctggaacaccaaccaggaaaatctctgcctctgaatttgaccggcctcttagacccattgttgtcaaggattctgagggaactgtgagcttcctctct

SEQ ID NO: 80917 - DNA, 201 bp, Homo sapiens
ccagtgctcaagactcttggaattagtgaaggatatttctagtcatttggatgtcacagccttatgtcacaaaattttcttgcatatccatggactgatakctgctgaccgctattccctgttccttgtctgtgaagacagctccaatgacaagtttcttatcagccgcctctttgatgttgctgaaggttcaacactgga

SEQ ID NO: 80918 - DNA, 201 bp, Homo sapiens
aggctggcctggcgctccggccgctttgtcgaaagccggcccgactggagcaggacgaagggggagggtctcgaggccgagtcctgttcttctgagggacrgaccccagctggggtggaaaagcagtaccagagagcctccgaggcgcgcggtgccaaccatggagcgggccggccccagcttcgggcagcagcgacagca

SEQ ID NO: 80919 - DNA, 201 bp, Homo sapiens
tttgtcgaaagccggcccgactggagcaggacgaagggggagggtctcgaggccgagtcctgttcttctgagggacggaccccagctggggtggaaaagcrgtaccagagagcctccgaggcgcgcggtgccaaccatggagcgggccggccccagcttcgggcagcagcgacagcagcagcagccccagcagcagaagca

SEQ ID NO: 80920 - DNA, 201 bp, Homo sapiens; identical to SEQ ID NO: 80913

SEQ ID NO: 80921 - DNA, 201 bp, Homo sapiens; identical to SEQ ID NO: 80914

SEQ ID NO: 80922 - DNA, 201 bp, Homo sapiens; identical to SEQ ID NO: 80915

SEQ ID NO: 80923 - DNA, 201 bp, Homo sapiens; identical to SEQ ID NO: 80916
  misc_feature (1)...(201): n = A,T,C or G

SEQ ID NO: 80924 - DNA, 201 bp, Homo sapiens; identical to SEQ ID NO: 80917

SEQ ID NO: 80925 - DNA, 201 bp, Homo sapiens; identical to SEQ ID NO: 80912

SEQ ID NO: 80926 - DNA, 201 bp, Homo sapiens; identical to SEQ ID NO: 80913

SEQ ID NO: 80927 - DNA, 201 bp, Homo sapiens; identical to SEQ ID NO: 80914

SEQ ID NO: 80928 - DNA, 201 bp, Homo sapiens; identical to SEQ ID NO: 80915

SEQ ID NO: 80929 - DNA, 201 bp, Homo sapiens; identical to SEQ ID NO: 80916
  misc_feature (1)...(201): n = A,T,C or G

SEQ ID NO: 80930 - DNA, 201 bp, Homo sapiens; identical to SEQ ID NO: 80917

SEQ ID NO: 80931 - DNA, 201 bp, Homo sapiens; identical to SEQ ID NO: 80912

SEQ ID NO: 80932 - DNA, 106 bp, Homo sapiens; identical to SEQ ID NO: 80911

SEQ ID NO: 80933 - DNA, 201 bp, Homo sapiens; identical to SEQ ID NO: 80912

SEQ ID NO: 80934 - DNA, 201 bp, Homo sapiens; identical to SEQ ID NO: 80913

SEQ ID NO: 80935 - DNA, 201 bp, Homo sapiens; identical to SEQ ID NO: 80914

SEQ ID NO: 80936 - DNA, 201 bp, Homo sapiens; identical to SEQ ID NO: 80915

SEQ ID NO: 80937 - DNA, 201 bp, Homo sapiens; identical to SEQ ID NO: 80916
  misc_feature (1)...(201): n = A,T,C or G

SEQ ID NO: 80938 - DNA, 201 bp, Homo sapiens; identical to SEQ ID NO: 80917

SEQ ID NO: 80939 - DNA, 201 bp, Homo sapiens; identical to SEQ ID NO: 80918

SEQ ID NO: 80940 - DNA, 201 bp, Homo sapiens; identical to SEQ ID NO: 80919

SEQ ID NO: 80941 - DNA, 201 bp, Homo sapiens
cttgctcatttttcgagtttttaactagactacactctattgagtttaattttgtcctctaggatttatttctgttgtccaaaaaaaaaaaaaaagaaaaraaaaattaaggagaatttttggtgttaatgctgaggaattgcttgagtggttagttgttaccaatttctcttttgaacctttggagctaaggatgctgag

SEQ ID NO: 80942 - DNA, 201 bp, Homo sapiens
gctgtacacacatcacagcccagacagcggtgttgattgagacactctgtgccctgggggctcagtgccgctggtctgcttgtaacatctactcaactcaraatgaagtagctgcagcactggctgaggctggagttgcagtgttcgcttggaagggcgagtcagaagatgacttctggtggtgtattgaccgctgtgtga

SEQ ID NO: 80943 - DNA, 201 bp, Homo sapiens
acttcttcagagaagcagggatggtacctacccggcaggtaggttagatgtgggtggtgcatgttaatttcccttagaagttccaagccctgtttcctgcktaaaggtggtatgtccagttcagagatgtgtataatgagcatggcttgttaagatcaggaggcccacttggatttatagtatagcccttcctccactccc

SEQ ID NO: 80944 - DNA, 201 bp, Homo sapiens
ttctatcagctgtgtaccatacagcttgtgctgaaggcgaatttcttgagccattactcagtataaagcactgagttctatctttaggatttatctttaaragcaaatttctggtcagctgtgcttctgcaacctaaaatatttaaagggaggtaggtgtgggcaggaggaggaatgataaattgggccagggcaagaaaa

SEQ ID NO: 80945 - DNA, 201 bp, Homo sapiens
cagagaggctctctcaaagatcagggagatgtattcccatgccatgcaccctgcttcccagcatttctgcatggtcaagtgagctttatgctcatgagctwtaagtatataattatccaggattttaaatcctcaacttgttctagcttgtgatccctcaaagttgggtcatacgttagtgctagatactagaaattttca

SEQ ID NO: 80946 - DNA, 201 bp, Homo sapiens
gtacctacccggcaggtaggttagatgtgggtggtgcatgttaatttcccttagaagttccaagccctgtttcctgcgtaaaggtggtatgtccagttcaragatgtgtataatgagcatggcttgttaagatcaggaggcccacttggatttatagtatagcccttcctccactcccaccagacttgctcatttttcgag

SEQ ID NO: 80947 - DNA, 201 bp, Homo sapiens
gcagaccacacaggaacttgcttcatggctctttagatgaaatagaagttcagggttcctcactctagtcactaaagaaggattttactctcccagcccaraaaggtgattctttctttaccatttctggggactttagtcttaattaggtaccttattaacaggaaatgctaaggtaccttctctgtggaacaatctgca

SEQ ID NO: 80948 - DNA, 201 bp, Homo sapiens
aattaaggagaatttttggtgttaatgctgaggaattgcttgagtggttagttgttaccaatttctcttttgaacctttggagctaaggatgctgagtctrgagaaatgctagtctcaagccctgttaagtccctctgtttctagcccgtagttcatagcatcagtgaactggagccacaacagcaaattctatcagctgt

SEQ ID NO: 80949 - DNA, 201 bp, Homo sapiens; identical to SEQ ID NO: 80942

SEQ ID NO: 80950 - DNA, 201 bp, Homo sapiens; identical to SEQ ID NO: 80944

SEQ ID NO: 80951 - DNA, 201 bp, Homo sapiens; identical to SEQ ID NO: 80945

SEQ ID NO: 80952 - DNA, 201 bp, Homo sapiens; identical to SEQ ID NO: 80941

SEQ ID NO: 80953 - DNA, 201 bp, Homo sapiens; identical to SEQ ID NO: 80942

SEQ ID NO: 80954 - DNA, 201 bp, Homo sapiens; identical to SEQ ID NO: 80943

SEQ ID NO: 80955 - DNA, 201 bp, Homo sapiens; identical to SEQ ID NO: 80944

SEQ ID NO: 80956 - DNA, 201 bp, Homo sapiens; identical to SEQ ID NO: 80945

SEQ ID NO: 80957 - DNA, 201 bp, Homo sapiens; identical to SEQ ID NO: 80946

SEQ ID NO: 80958 - DNA, 201 bp, Homo sapiens; identical to SEQ ID NO: 80947

SEQ ID NO: 80959 - DNA, 201 bp, Homo sapiens; identical to SEQ ID NO: 80948

SEQ ID NO: 80960 - DNA, 159 bp, Homo sapiens
ttagccgggtgtggtggcgggcacctgtcatcccagttactcaggtggctgaggcacgagaatcacttgaacctgggaggcggaggttgcagtgagctggratcatgccactgcactccagcctgggtgatggagtgagactctgtcttaaaaacaaac

SEQ ID NO: 80961 - DNA, 201 bp, Homo sapiens
tgggccactgcagggaagccccctgctttgccagagaaggatagagaggtaaaagcccactcccttttgttaccctggtaagtggcttttctgaacgcacygtacatgtgctgagagaagcatcctgcccagaaaggcagctttgaggttttttttttaattaagcaaatatttcaagttgtggattctttcagagttatt

SEQ ID NO: 80962 - DNA, 201 bp, Homo sapiens
ctgctttgccagagaaggatagagaggtaaaagcccactcccttttgttaccctggtaagtggcttttctgaacgcactgtacatgtgctgagagaagcaycctgcccagaaaggcagctttgaggttttttttttaattaagcaaatatttcaagttgtggattctttcagagttattccatcccttgtctgctttctta

SEQ ID NO: 80963 - DNA, 201 bp, Homo sapiens; identical to SEQ ID NO: 80941

SEQ ID NO: 80964 - DNA, 201 bp, Homo sapiens; identical to SEQ ID NO: 80942

SEQ ID NO: 80965 - DNA, 201 bp, Homo sapiens; identical to SEQ ID NO: 80943

SEQ ID NO: 80966 - DNA, 201 bp, Homo sapiens; identical to SEQ ID NO: 80944

SEQ ID NO: 80967 - DNA, 201 bp, Homo sapiens; identical to SEQ ID NO: 80945

SEQ ID NO: 80968 - DNA, 201 bp, Homo sapiens; identical to SEQ ID NO: 80946

SEQ ID NO: 80969 - DNA, 201 bp, Homo sapiens; identical to SEQ ID NO: 80947

SEQ ID NO: 80970 - DNA, 201 bp, Homo sapiens; identical to SEQ ID NO: 80948

SEQ ID NO: 80971 - DNA, 201 bp, Homo sapiens; identical to SEQ ID NO: 80942

SEQ ID NO: 80972 - DNA, 201 bp, Homo sapiens; identical to SEQ ID NO: 80961

SEQ ID NO: 80973 - DNA, 201 bp, Homo sapiens; identical to SEQ ID NO: 80962

SEQ ID NO: 80974 - DNA, 201 bp, Homo sapiens
taggcaggaaggaatatttaaacattgctttagattttcctaaaggtatttgatttgatctgttagcttccagtaaaaatatttgtttttagtaaaaacaaatttaaatatatttacatgtttgttgtttatcttttgaatgtcttttgaggctgtgaaagctgtccacatttttgctgtgtattaaatagctgtgggtca

SEQ ID NO: 80975 - DNA, 201 bp, Homo sapiens
acctgtggaaatcatcaggcactacacaggccctggggatcagactgtgaatcctcaaaatggttttgtgagaaataaagttactgaacagagagtccctktattggcaagtagtagccaatctggagactctgagagtgacagtgattcttacagctcaagaacctcttcccagagcaaaggaaataagtcatacttgga

SEQ ID NO: 80976 - DNA, 201 bp, Homo sapiens
aacagtcagcaccaggtcaaagaagctttacctgtgtcactcccccagattccttgtctgtcttcctttaaaatccatcagccatacacgttgacttttgmtgaattggtagaggattatgaacattatattaaagaggggttagagaaacctgtggaaatcatcaggcactacacaggccctggggatcagactgtgaat

SEQ ID NO: 80977 - DNA, 201 bp, Homo sapiens
aatcagctgaaagactctgaatctacgcctgtggatgatcgtatttctttggaacaaccaccaaatggaagtgacacccccaatccagagaaatatcaagratcacctggaatccagatgaagacaagacttaaagagggggctagccagagagctaagcagagccggagaaacctacccaggcggtcttccttcagattg

SEQ ID NO: 80978 - DNA, 201 bp, Homo sapiens
tccatttttcagattgttttgatttaggccaggtatattatcttcatttttaagagtttctttaagaaacttcatcagattgttgaaagataatttttggracatagagctgaaagtttcagggtgccattttctataagatcttcccaaaagaaacatttaaaaagatgacatataccaccacttacttaaaaacaataa

SEQ ID NO: 80979 - DNA, 201 bp, Homo sapiens
cagagagctaagcagagccggagaaacctacccaggcggtcttccttcagattgcagactgaagcccaggaagatgattggtatgactgtcatagggaaayacgtctgagtttttctgatacctatcaggattatgaggagtactggagagcttactacagggcatggcaagaatattatgctgccgcttctcattcatat

SEQ ID NO: 80980 - DNA, 201 bp, Homo sapiens
cagctcaagaacctcttcccagagcaaaggaaataagtcatacttggaaggctcttctgataatcagctgaaagactctgaatctacgcctgtggatgatmgtatttctttggaacaaccaccaaatggaagtgacacccccaatccagagaaatatcaagaatcacctggaatccagatgaagacaagacttaaagaggg

SEQ ID NO: 80981 - DNA, 201 bp, Homo sapiens
ctgtggaaatcatcaggcactacacaggccctggggatcagactgtgaatcctcaaaatggttttgtgagaaataaagttactgaacagagagtccctgtrttggcaagtagtagccaatctggagactctgagagtgacagtgattcttacagctcaagaacctcttcccagagcaaaggaaataagtcatacttggaag

SEQ ID NO: 80982 - DNA, 201 bp, Homo sapiens
caaattcagaaaatagagagaacccttcaaattcagaaagctcatggtgaccacatggcttcctctagaaataattctgtatctggactatcagtcaaatmaaaaaataataccaaacaaaagcttcctgtgaaaagccactcagaatgtggaatcatagaaaaagcaacgtcaccaaaagaactgggctgtgacaggcaa

SEQ ID NO: 80983 - DNA, 201 bp, Homo sapiens
aaagaggggttagagaaacctgtggaaatcatcaggcactacacaggccctggggatcagactgtgaatcctcaaaatggttttgtgagaaataaagttaytgaacagagagtccctgtattggcaagtagtagccaatctggagactctgagagtgacagtgattcttacagctcaagaacctcttcccagagcaaagga

SEQ ID NO: 80984 - DNA, 201 bp, Homo sapiens
ttaggcaggaaggaatatttaaacattgctttagattttcctaaaggtatttgatttgatctgttagcttccagtaaaaatatttgtttttagtaaaaacaaatttaaatatatttacatgtttgttgtttatcttttgaatgtcttttgaggctgtgaaagctgtccacatttttgctgtgtattaaatagctgtgggtc

SEQ ID NO: 80985 - DNA, 201 bp, Homo sapiens; identical to SEQ ID NO: 80974

SEQ ID NO: 80986 - DNA, 201 bp, Homo sapiens; identical to SEQ ID NO: 80975

SEQ ID NO: 80987 - DNA, 201 bp, Homo sapiens; identical to SEQ ID NO: 80976

SEQ ID NO: 80988 - DNA, 201 bp, Homo sapiens; identical to SEQ ID NO: 80977

SEQ ID NO: 80989 - DNA, 201 bp, Homo sapiens; identical to SEQ ID NO: 80978

SEQ ID NO: 80990 - DNA, 201 bp, Homo sapiens; identical to SEQ ID NO: 80979

SEQ ID NO: 80991 - DNA, 201 bp, Homo sapiens
ggccgacttcgagtcactgctgctttcgcggccggtgctggaggggctgcgggcggccggcttcgagaggccctcgccggtgcagctcaaggccatcccgytggggcgctgcgggctcgatttaattgttcaagctaaatctggcaccgggaaaacctgtgtgttctccaccatagctttggactctcttgttcttgaaaa

SEQ ID NO: 80992 - DNA, 201 bp, Homo sapiens; identical to SEQ ID NO: 80980

SEQ ID NO: 80993 - DNA, 201 bp, Homo sapiens
cttcttctcgctcccaagatccccgcctccccttaagcaccgcgagatctgacggcgcggctaccatggcggcggcatttgaagcctcgggagccttagcrgcagtggcgactgctatgccggctgagcatgtggccgtgcaggtcccggccccagagccaacacccgggcctgtgaggatcctgcggaccgctcaggatc

SEQ ID NO: 80994 - DNA, 201 bp, Homo sapiens; identical to SEQ ID NO: 80981

SEQ ID NO: 80995 - DNA, 201 bp, Homo sapiens; identical to SEQ ID NO: 80982

SEQ ID NO: 80996 - DNA, 201 bp, Homo sapiens; identical to SEQ ID NO: 80983

SEQ ID NO: 80997 - DNA, 201 bp, Homo sapiens; identical to SEQ ID NO: 80984

SEQ ID NO: 80998 - DNA, 201 bp, Homo sapiens
cactgttctatggaccaaaggcaggatgagcatgccgctgatacagaagcctgagggaacacactcccccctacgtccttctccaacacagcagatcccakgagagtgactctggtcataggacttggtagggtcccagggtccctaggcctccacttctgagggcagcccctctggtgccaagagctctcctccaactca

SEQ ID NO: 80999 - DNA, 133 bp, Homo sapiens
cagggttctacccggctgggtccaggcagaagkttttcctccccacctccgggtttgtcctcatcatcggtcactcccattcacagctttaagattctggaggccaagaatttgactccccccggatccatgg

SEQ ID NO: 81000 - DNA, 201 bp, Homo sapiens
tgcctgctgtgcaaggaggcttgctggacctaaaatcaatgatcgagaaggtgacagggaagaacgccctgacaaactacggcttctacggctgttactgyggctggggcggccgaggaacccccaaggatggcaccgattggtgctgttgggcgcatgaccactgctatgggcggctggaggagaagggctgcaacattc

SEQ ID NO: 81001 - DNA, 201 bp, Homo sapiens
tccgactggagacggggagcccgcgagacccgggtctccagggtctgcccaaggaagttgctcatgggagcagacctctagagcaggatttgaggccaggscaaagagaaccccagagatgaaaggcctcctcccactggcttggttcctggcttgtagtgtgcctgctgtgcaaggaggcttgctggacctaaaatcaat

SEQ ID NO: 81002 - DNA, 201 bp, Homo sapiens
tctgcctggttcctgagagaggctcctaagtcacagacctcagtctttctcgaagcttggcggacccccagggccacactgtaccctccagcgagtcccakgagagtgactctggtcataggacttggtagggtcccagggtccctaggcctccacttctgagggcagcccctctggtgccaagagctctcctccaactca

SEQ ID NO: 81003 - DNA, 201 bp, Homo sapiens
gacccgggtctccagggtctgcccaaggaagttgctcatgggagcagacctctagagcaggatttgaggccaggccaaagagaaccccagagatgaaaggyctcctcccactggcttggttcctggcttgtagtgtgcctgctgtgcaaggaggcttgctggacctaaaatcaatgatcgagaaggtgacagggaagaacg

SEQ ID NO: 81004 - DNA, 201 bp, Homo sapiens
ccaggcagaagtttttcctccccacctccgggtttgtcctcatcatcggtcactcccattcacagctttaagattctggaggccaagaatttgactccccycggatccatggtctgtggataccaatgttccgactggagacggggagcccgcgagacccgggtctccagggtctgcccaaggaagttgctcatgggagca

SEQ ID NO: 81005 - DNA, 201 bp, Homo sapiens
gcacagcccctcatctccctctccctacgagaagctgaaggagttcagctgccagcctgtgttgaacagctaccagttccacatcgtcaatggcgcagtgrtttgtggatgcacccttggtcctggtgccagctgccactgcaggctgaaggcctgtgagtgtgacaagcaatccgtgcactgcttcaaagagagcctgcc

SEQ ID NO: 81006 - DNA, 132 bp, Homo sapiens
cactgcaggctgaaggcctgtgagtgtgacaagcaatccgtgcactgcttcaaagagagcctgcccacctatgagaaaaacttcaagcagttctccagccrgcccaggtgtggcagacataagccctggtgc

SEQ ID NO: 81007 - DNA, 118 bp, Homo sapiens
atgctcattgcaacttcyttcttcctttttttctcatcggtggtggcagcccccacccacagcagtttctggcagtttcagaggagggtcaaacacatcacggggcgaagtgccttct

SEQ ID NO: 81008 - DNA, 177 bp, Homo sapiens
cttttctctgtcagcgaacgtggcattttctgcgccggcaggaccacctgccagcggctgacctgcgagtgtgacaagagggctgccctctgctttcgccrcaacctgggcacctacaaccgcaaatatgcccattatcccaacaagctgtgcaccgggcccaccccgccctgctga

SEQ ID NO: 81009 - DNA, 201 bp, Homo sapiens
cagtacaacgactatggctgttactgcggcatcggtggctcccactggccggtggaccagactgactggtgctgccacgcccacgactgctgctacgggcrtctggagaagctgggctgtgagcccaaactggaaaagtatcttttctctgtcagcgaacgtggcattttctgcgccggcaggaccacctgccagcggctg

SEQ ID NO: 81010 - DNA, 201 bp, Homo sapiens
tggttcagtttggggtgatgatcgagaagatgacaggcaagtccgccctgcagtacaacgactatggctgttactgcggcatcggtggctcccactggcckgtggaccagactgactggtgctgccacgcccacgactgctgctacgggcgtctggagaagctgggctgtgagcccaaactggaaaagtatcttttctctg

SEQ ID NO: 81011 - DNA, 149 bp, Homo sapiens
ctgctttcttctgctgccttttatgctccttgtgcacctcccttccccscaacctgggatgaaatctccccacgtgctggtgttcctttgcctcctggtggctctggtcaccgggaacctggttcagtttggggtgatgatcgagaaga

SEQ ID NO: 81012 - DNA, 119 bp, Homo sapiens
accgtggcttcctcaatgtctactgccagggccccacgcccaactgcagcatctatgaaccgccccctgaggaggtcacctgcagtcaccaatccccagcrccccccgcccctccctag

SEQ ID NO: 81013 - DNA, 119 bp, Homo sapiens; identical to SEQ ID NO: 81012

SEQ ID NO: 81014 - DNA, 119 bp, Homo sapiens; identical to SEQ ID NO: 81012

SEQ ID NO: 81015 - DNA, 109 bp, Homo sapiens
ggacgaatyaagcggcgtggagatgcggcagccgctgagctggggccgctggcgcgcgatgcttgcccgaacctacggccccgggccttcggcgggttaccgctgggcc

SEQ ID NO: 81016 - DNA, 201 bp, Homo sapiens
ggcctgtcagagcctgaagaagatattggagacacagcggttcgagaagtttttgaagagactggtataaaatcagaattcaggtccgtcctgagtattcrgcaacagcacacaaatcctggagcttttgggaagtcagatatgtatatcatctgccgcctaaagccatattcattcaccataaatttttgccaggaagaa

SEQ ID NO: 81017 - DNA, 134 bp, Homo sapiens
ggacgaattaagcggcgtggagatgcggcagccrctgagctggggccgctggcgcgcgatgcttgcccgaacctacggccccgggccttcggcgggttaccgctgggcctcgggcgcacagggttacgtgcgga

SEQ ID NO: 81018 - DNA, 201 bp, Homo sapiens
tgcagtacagcaatggcgatcagaaggtagaacagctgtatggctgcacattcccatcctccaaagccgatttattgcccctgctgcttccctgggcttcygctttcaccacgcagaatcggattcatcaacgttgactctgtggctgagagaagggcccagcagattaccaggatatgcttcacatcaagtaggagttgc

SEQ ID NO: 81019 - DNA, 201 bp, Homo sapiens; identical to SEQ ID NO: 81016

SEQ ID NO: 81020 - DNA, 201 bp, Homo sapiens; identical to SEQ ID NO: 81018

SEQ ID NO: 81021 - DNA, 106 bp, Homo sapiens
cgaatyaagcggcgtggagatgcggcagccgctgagctggggccgctggcgcgcgatgcttgcccgaacctacggccccgggccttcggcgggttaccgctgggcc

SEQ ID NO: 81022 - DNA, 201 bp, Homo sapiens; identical to SEQ ID NO: 81016

SEQ ID NO: 81023 - DNA, 131 bp, Homo sapiens
cgaattaagcggcgtggagatgcggcagccrctgagctggggccgctggcgcgcgatgcttgcccgaacctacggccccgggccttcggcgggttaccgctgggcctcgggcgcacagggttacgtgcgga

SEQ ID NO: 81024 - DNA, 201 bp, Homo sapiens
ggcaatacagcaatggcgatcagaaggtagaacagctgtatggctgcacattcccatcctccaaagccgatttattgcccctgctgcttccctgggcttcygctttcaccacgcagaatcggattcatcaacgttgactctgtggctgagagaagggcccagcagattaccaggatatgcttcacatcaagtaggagttgc

SEQ ID NO: 81025 - DNA, 201 bp, Homo sapiens; identical to SEQ ID NO: 81016

SEQ ID NO: 81026 - DNA, 112 bp, Homo sapiens
atgcggcagccrctgagctggggccgctggcgcgcgatgcttgcccgaacctacggccccgggccttcggcgggttaccgctgggcctcgggcgcacagggttacgtgcgga

SEQ ID NO: 81027 - DNA, 201 bp, Homo sapiens; identical to SEQ ID NO: 81018

SEQ ID NO: 81028 - DNA, 201 bp, Homo sapiens
gacctttagccagttagtttatcaagattcttatggaactttcaccatcaatgaatccaccattattgattctccaaggttttctcacagaggaattttgrttgatacatccagacattatctgccagttaagattattcttaaaactctggatgccatggcttttaataagtttaatgttcttcactggcacatagttga

SEQ ID NO: 81029 - DNA, 201 bp, Homo sapiens
ttttcctgagttaagcaataaaggaagctattctttgtctcatgtttatacaccaaatgatgtccgtatggtgattgaatatgccagattacgaggaattygagtcctgccagaatttgatacccctgggcatacactatcttggggaaaaggtcagaaagacctcctgactccatgttacagtagacaaaacaagttgga

SEQ ID NO: 81030 - DNA, 105 bp, Homo sapiens
ccacttctccggttgagcagtgtattttgatcttgaggattcatggcttgataagtagatagttctaaggcaaaagtagctgagcctgatgttagcgttcsaagc

SEQ ID NO: 81031 - DNA, 201 bp, Homo sapiens
ggcggtactcagaaacagaaacaacttttcattggtggagaagcttgtctatggggagaatatgtggatgcaactaacctcactccaagattatggcctcrggcaagtgctgttggtgagagactctggagttccaaagatgtcagagatatggatgacgcctatgacagactgacaaggcaccgctgcaggatggtcgaa

SEQ ID NO: 81032 - DNA, 201 bp, Homo sapiens
agattatggcctcgggcaagtgctgttggtgagagactctggagttccaaagatgtcagagatatggatgacgcctatgacagactgacaaggcaccgctrcaggatggtcgaacgtggaatagctgcacaacctctttatgctggatattgtaaccatgagaacatgtaaaaaatggaggggaaaaaggccacagcaatc

SEQ ID NO: 81033 - DNA, 201 bp, Homo sapiens
tggtgagagactctggagttccaaagatgtcagagatatggatgacgcctatgacagactgacaaggcaccgctgcaggatggtcgaacgtggaatagctrcacaacctctttatgctggatattgtaaccatgagaacatgtaaaaaatggaggggaaaaaggccacagcaatctgtactacaatcaactttattttgaa

SEQ ID NO: 81034 - DNA, 201 bp, Homo sapiens
gcaccgctgcaggatggtcgaacgtggaatagctgcacaacctctttatgctggatattgtaaccatgagaacatgtaaaaaatggaggggaaaaaggccmcagcaatctgtactacaatcaactttattttgaaatcatgtaaaataagatattagactgttttttgaataaaatatttttattgattgaacctttgacc

SEQ ID NO: 81035 - DNA, 201 bp, Homo sapiens
actttattttgaaatcatgtaaaataagatattagactgttttttgaataaaatatttttattgattgaacctttgaccctctatcttattacatttagargcctggcatctttcttgtgagacaagcttaaggacacaaaagaaacacaactttgtgataccactcttctgaaggctacttatagtaataacttcataga

SEQ ID NO: 81036 - DNA, 196 bp, Homo sapiens
ataaataaagcaataaaaattgttcttactgaaaatgaagtagctaggtgctcctgaatttctctccaaaaactaaaacatttaggtcaaaccacttctcyggttgagcagtgtattttgatcttgaggattcatggcttgataagtagatagttctaaggcaaaagtagctgagcctgatgttagcgttcgaagc

SEQ ID NO: 81037 - DNA, 201 bp, Homo sapiens
ccaagattatggcctcgggcaagtgctgttggtgagagactctggagttccaaagatgtcagagatatggatgacgcctatgacagactgacaaggcaccrctgcaggatggtcgaacgtggaatagctgcacaacctctttatgctggatattgtaaccatgagaacatgtaaaaaatggaggggaaaaaggccacagca

SEQ ID NO: 81038 - DNA, 201 bp, Homo sapiens
tgtctggcaggaggtttttgatgataaagcaaagcttgcgccgggcacaatagttgaagtatggaaagacagcgcatatcctgaggaactcagtagagtcmcagcatctggcttccctgtaatcctttctgctccttggtacttagatttgattagctatggacaagattggaggaaatactataaagtggaacctcttga

SEQ ID NO: 81039 - DNA, 201 bp, Homo sapiens
ctgctgactcaggtggcgctggtggtgcaggtggcggaggcggctcgggccccgagcgtctcggccaagccggggccggcgctgtggcccctgccgctctyggtgaagatgaccccgaacctgctgcatctcgccccggagaacttctacatcagccacagccccaattccacggcgggcccctcctgcaccctgctggag

SEQ ID NO: 81040 - DNA, 201 bp, Homo sapiens
ggcccctcctgcaccctgctggaggaagcgtttcgacgatatcatggctatatttttggtttctacaagtggcatcatgaacctgctgaattccaggctaraacccaggttcagcaacttcttgtctcaatcacccttcagtcagagtgtgatgctttccccaacatatcttcagatgagtcttatactttacttgtgaaa

SEQ ID NO: 81041 - DNA, 201 bp, Homo sapiens
gtatggaaagacagcgcatatcctgaggaactcagtagagtcacagcatctggcttccctgtaatcctttctgctccttggtacttagatttgattagctmtggacaagattggaggaaatactataaagtggaacctcttgattttggcggtactcagaaacagaaacaacttttcattggtggagaagcttgtctatgg

SEQ ID NO: 81042 - DNA, 201 bp, Homo sapiens; identical to SEQ ID NO: 81028

SEQ ID NO: 81043 - DNA, 201 bp, Homo sapiens; identical to SEQ ID NO: 81029

SEQ ID NO: 81044 - DNA, 201 bp, Homo sapiens; identical to SEQ ID NO: 81031

SEQ ID NO: 81045 - DNA, 201 bp, Homo sapiens; identical to SEQ ID NO: 81032

SEQ ID NO: 81046 - DNA, 201 bp, Homo sapiens; identical to SEQ ID NO: 81033

SEQ ID NO: 81047 - DNA, 201 bp, Homo sapiens; identical to SEQ ID NO: 81034

SEQ ID NO: 81048 - DNA, 201 bp, Homo sapiens; identical to SEQ ID NO: 81035

SEQ ID NO: 81049 - DNA, 201 bp, Homo sapiens; identical to SEQ ID NO: 81037

SEQ ID NO: 81050 - DNA, 201 bp, Homo sapiens; identical to SEQ ID NO: 81038

SEQ ID NO: 81051 - DNA, 201 bp, Homo sapiens; identical to SEQ ID NO: 81039

SEQ ID NO: 81052 - DNA, 201 bp, Homo sapiens; identical to SEQ ID NO: 81040

SEQ ID NO: 81053 - DNA, 201 bp, Homo sapiens; identical to SEQ ID NO: 81041

SEQ ID NO: 81054 - DNA, 201 bp, Homo sapiens
aagaagaggaaacattcaggaaattcagactcgccaggacaacaaagttgttattggatttgttcccttagcagaaattatgggttattcaactgtgcttsgaacgctaacatcaggctcagctacttttgccttagaactatctacttatcaagccatgaatcctcaagatcaaaatacactgctcaaccggagaagtgg

SEQ ID NO: 81055 - DNA, 201 bp, Homo sapiens
aaggcatcttgtgactgtagaagtggaagcaaggccaattgaaacatcatctgttatgcctgtgattgagtttgagtatgctgaaagtatcaatgaaggcyttttgaaggtctcccaagaggccattgaaaatggaattcacagcgcatgtctccaaggaccattgcttggatccccaattcaggatgtagcaattacttt

SEQ ID NO: 81056 - DNA, 201 bp, Homo sapiens
aaacaactgaagcaaggaatgccttaattgaacaagttgcagatttggatgatgaatttgctgacttggttttagaagaatttagtgagaattttgatttrttaccagctgaaaagctacagactgcaatacatagagtgacactagctcagacagcagtgcctgtgctttgtggaagtgccctgaaaaacaaagggatac

SEQ ID NO: 81057 - DNA, 201 bp, Homo sapiens
gaagcaaggccaattgaaacatcatctgttatgcctgtgattgagtttgagtatgctgaaagtatcaatgaaggccttttgaaggtctcccaagaggccaytgaaaatggaattcacagcgcatgtctccaaggaccattgcttggatccccaattcaggatgtagcaattactttacattccctgacaattcatcctggc

SEQ ID NO: 81058 - DNA, 201 bp, Homo sapiens
tctatgaagttattactataagtagccttcagaagagtggtatcacaaagttgtgtttcttttgtgtccttaagcttgtctcacaagaaagatgccaggcytctaaatgtaataagatagagggtcaaaggttcaatcaataaaaatattttattcaaaaaacagtctaatatcttattttacatgatttcaaaataaagt

SEQ ID NO: 81059 - DNA, 201 bp, Homo sapiens
actgtgcttcgaacgctaacatcaggctcagctacttttgccttagaactatctacttatcaagccatgaatcctcaagatcaaaatacactgctcaaccrgagaagtggtttgacctaaatgttttagtttttggagagaaattcaggagcacctagctacttcattttcagtaagaacaatttttattgctttatttat

SEQ ID NO: 81060 - DNA, 199 bp, Homo sapiens
cgaggcggtagagcggagaaagcctattttcttttcgtttagatacattgccttttgcctaggctggcgtcgagacttgaggccgttgcagactttggsgcggctcgcgcctcctgcttcaagagcccagcggtgagagctggcctgcggcacgcggcctaatgccagtcacaactgtggagagactatgaggccctga

SEQ ID NO: 81061 - DNA, 201 bp, Homo sapiens
tcctgaattgctgaaggaaacaactgaagcaaggaatgccttaattgaacaagttgcagatttggatgatgaatttgctgacttggttttagaagaatttwgtgagaattttgatttgttaccagctgaaaagctacagactgcaatacatagagtgacactagctcagacagcagtgcctgtgctttgtggaagtgccct

SEQ ID NO: 81062 - DNA, 201 bp, Homo sapiens
agtttaaaaagattaaagccacatgtgccgcttggaagaaattgcagttctctaccaggcttaataggaaatgatatcaaatcccttcattccatcatcartcctcccatagctaaaatccgtaatattggaattatggctcatattgatgcaggcaaaactaccaccacagaaagaatattgtactattccggatataca

SEQ ID NO: 81063 - DNA, 201 bp, Homo sapiens
gagaattttgatttgttaccagctgaaaagctacagactgcaatacatagagtgacactagctcagacagcagtgcctgtgctttgtggaagtgccctgaraaacaaagggatacagcccttgttagatgctgttactatgtacttaccttcacctgaagagcgtaactatgaatttctgcagtggtataaggatgactta

SEQ ID NO: 81064 - DNA, 150 bp, Homo sapiens
cgaggcggtagagcggagaaagcctattttcttttcgtttagatacattrccttttgcctaggctggcgtcgagacttgaggccgttgcagactttggcgcggctcgcgcctcctgcttcaagagcccagcggtgagagctggcctgcgg

SEQ ID NO: 81065 - DNA, 201 bp, Homo sapiens; identical to SEQ ID NO: 81054

SEQ ID NO: 81066 - DNA, 201 bp, Homo sapiens; identical to SEQ ID NO: 81055

SEQ ID NO: 81067 - DNA, 201 bp, Homo sapiens; identical to SEQ ID NO: 81056

SEQ ID NO: 81068 - DNA, 201 bp, Homo sapiens; identical to SEQ ID NO: 81057

SEQ ID NO: 81069 - DNA, 201 bp, Homo sapiens
ccgccaggagcagccgctggagtgcgaaaacgctctcaattttcgggtctcaaagacccacaagcccacaccacgcaggccgggacaggaaagagtcaccytttaaaacggccgagtgaagagcaagaaccacgcagcggttccgagcctctgttttccgcttttagctaggaggacggaagttgctggcaggcggcattt

SEQ ID NO: 81070 - DNA, 201 bp, Homo sapiens; identical to SEQ ID NO: 81058

SEQ ID NO: 81071 - DNA, 201 bp, Homo sapiens; identical to SEQ ID NO: 81059

SEQ ID NO: 81072 - DNA, 201 bp, Homo sapiens
cccgaggcggtagagcggagaaagcctattttcttttcgtttagatacattgccttttgcctaggctggcgtcgagacttgaggccgttgcagactttggsgcggctcgcgcctcctgcttcaagagcccagcggtgagagctggcctgcggcacgcggcctaatgccagacagtaacagtttggaggatcaagatgttga

SEQ ID NO: 81073 - DNA, 201 bp, Homo sapiens; identical to SEQ ID NO: 81061

SEQ ID NO: 81074 - DNA, 143 bp, Homo sapiens
ctccttaccatggtgacggccgcagagccgccaggagcagccsctggagtgcgaaaacgctctcaattttcgggtctcaaagacccacaagcccacaccacgcaggccgggacaggaaagagtcaccctttaaaacggccgag

SEQ ID NO: 81075 - DNA, 201 bp, Homo sapiens; identical to SEQ ID NO: 81062

SEQ ID NO: 81076 - DNA, 201 bp, Homo sapiens; identical to SEQ ID NO: 81063

SEQ ID NO: 81077 - DNA, 201 bp, Homo sapiens
gcaggcggcatttggccggtacaccgccggaagtgtggaggtgtggctgcccgaggcggtagagcggagaaagcctattttcttttcgtttagatacattrccttttgcctaggctggcgtcgagacttgaggccgttgcagactttggcgcggctcgcgcctcctgcttcaagagcccagcggtgagagctggcctgcgg

SEQ ID NO: 81078 - DNA, 201 bp, Homo sapiens; identical to SEQ ID NO: 81054

SEQ ID NO: 81079 - DNA, 201 bp, Homo sapiens; identical to SEQ ID NO: 81055

SEQ ID NO: 81080 - DNA, 201 bp, Homo sapiens; identical to SEQ ID NO: 81056

SEQ ID NO: 81081 - DNA, 201 bp, Homo sapiens; identical to SEQ ID NO: 81057

SEQ ID NO: 81082 - DNA, 201 bp, Homo sapiens; identical to SEQ ID NO: 81058

SEQ ID NO: 81083 - DNA, 201 bp, Homo sapiens; identical to SEQ ID NO: 81059

SEQ ID NO: 81084 - DNA, 164 bp, Homo sapiens
cgtttagatacattgccttttgcctaggctggcgtcgagacttgaggccgttgcagactttggsgcggctcgcgcctcctgcttcaagagcccagcggtgagagctggcctgcggcacgcggcctaatgccagttttttgattttgtatatttattttttcaga

SEQ ID NO: 81085 - DNA, 201 bp, Homo sapiens; identical to SEQ ID NO: 81061

SEQ ID NO: 81086 - DNA, 201 bp, Homo sapiens; identical to SEQ ID NO: 81062

SEQ ID NO: 81087 - DNA, 201 bp, Homo sapiens
gagaattttgatttgttaccagctgaaaagctacagactgcaatacatagagtgacactagctcagacagcagtgcctgtgctttgtggaagtgccctgaraaacaaagggatacagcccttgttagatgctgttactatgtacttaccttcacctgaagagcgtaactatgaatttctggagagaataagtcgtctgctt

SEQ ID NO: 81088 - DNA, 115 bp, Homo sapiens
cgtttagatacattrccttttgcctaggctggcgtcgagacttgaggccgttgcagactttggcgcggctcgcgcctcctgcttcaagagcccagcggtgagagctggcctgcgg

SEQ ID NO: 81089 - DNA, 201 bp, Homo sapiens; identical to SEQ ID NO: 81054

SEQ ID NO: 81090 - DNA, 201 bp, Homo sapiens; identical to SEQ ID NO: 81055

SEQ ID NO: 81091 - DNA, 201 bp, Homo sapiens; identical to SEQ ID NO: 81056

SEQ ID NO: 81092 - DNA, 201 bp, Homo sapiens; identical to SEQ ID NO: 81057

SEQ ID NO: 81093 - DNA, 201 bp, Homo sapiens; identical to SEQ ID NO: 81058

SEQ ID NO: 81094 - DNA, 201 bp, Homo sapiens; identical to SEQ ID NO: 81059

SEQ ID NO: 81095 - DNA, 164 bp, Homo sapiens; identical to SEQ ID NO: 81084

SEQ ID NO: 81096 - DNA, 201 bp, Homo sapiens; identical to SEQ ID NO: 81061

SEQ ID NO: 81097 - DNA, 201 bp, Homo sapiens; identical to SEQ ID NO: 81062

SEQ ID NO: 81098 - DNA, 201 bp, Homo sapiens; identical to SEQ ID NO: 81063

SEQ ID NO: 81099 - DNA, 115 bp, Homo sapiens; identical to SEQ ID NO: 81088

SEQ ID NO: 81100 - DNA, 201 bp, Homo sapiens
tacaggtcacggaaaaagcacttgatcaccacccagacagaacacaaatgtgtcttggactcctgccgttcactggaagctgagggctttcaggtcacctwcctcccagtgcagaagagtgggatcattgacctaaaggaactagaggctgctatccagccagatactagcctggtgtcagtcatgactgtgaacaatgag

SEQ ID NO: 81101 - DNA, 201 bp, Homo sapiens
tcggctggaccagcttctttaacagcaagcataatccacttcaatgtaatattttctgtagctccaaaggctatctcttcatattgactgcagacagactgaatggacagtttcttagagggcttgtctcctttctacccttgtcctctttcctttcctttgacctaatggagctagaaatatgtctgtgactccaccagt

SEQ ID NO: 81102 - DNA, 201 bp, Homo sapiens
tagattggtatagaccagttgacttcagcatcagtccacctctatgacagaaacacaagaaaactgtctttccctagcttcagttccttgggtgtggagcrctccccatttcttctcgggtcttaaagtgtgtggacattttcatcccgaagccatagagacatttgctgtcatattgctgctgggcacatctgtgctctt

SEQ ID NO: 81103 - DNA, 201 bp, Homo sapiens; identical to SEQ ID NO: 81100

SEQ ID NO: 81104 - DNA, 194 bp, Homo sapiens
tagattggtatagaccagttgacttcagcatcagtccacctctatgacagaaacacaagaaaactgtctttccctagcttcagttccttgggtgtggagcrctccccatttcttctcgggtcttaaactgctgggcacatctgtgctcttggtgaggagagcaagaggaaccagaagaagtctctttggtcagg

SEQ ID NO: 81105 - DNA, 132 bp, Homo sapiens
gaataaaaccctagcttatttctctctctggatttctggtggcattaaagggctacattctattactgattctgtcttatcaccatgtgactctcttatgytgtatcttaccaaaaaataaaattaaatgag

SEQ ID NO: 81106 - DNA, 201 bp, Homo sapiens
gtgaatgggtgaagccaggggctcacatcaatgctgttggagccagcagacctgactggagagaactggatgatgagctcatgaaagaagctgtgctgtaygtggattcccaggaggctgccctgaaggagtctggagatgtcctgctgtcaggggccgagatctttgctgagctgggagaagtgattaagggagtgaaac

SEQ ID NO: 81107 - DNA, 201 bp, Homo sapiens
ccagcccactgtgagaagaccacggtgttcaagtctttgggaatggcagtggaagacacagttgcagccaaactcatctatgattcctggtcatctggtamataaaacaaaggaacttgatgttgagatggatgcttgaggaatattgctgctggttctcataatttctagagtaaatgagggagtccagtccccagtgaa

SEQ ID NO: 81108 - DNA, 201 bp, Homo sapiens
tggtaaataaaacaaaggaacttgatgttgagatggatgcttgaggaatattgctgctggttctcataatttctagagtaaatgagggagtccagtccccrgtgaactctccttttgtgcttatcatgttttaccttaaatgctgagatcctcatttatgtttgtagttggaaagcaaagctaggtagccatttcttctgt

SEQ ID NO: 81109 - DNA, 201 bp, Homo sapiens
tgaaggagtctggagatgtcctgctgtcaggggccgagatctttgctgagctgggagaagtgattaagggagtgaaaccagcccactgtgagaagaccacsgtgttcaagtctttgggaatggcagtggaagacacagttgcagccaaactcatctatgattcctggtcatctggtaaataaaacaaaggaacttgatgtt

SEQ ID NO: 81110 - DNA, 132 bp, Homo sapiens
agcagcgggcgcgctcataaagggcacagccsagggtacgtggatcgcggtgcggagactgaggttagaaggcacaggtggcgagatgagccgggtaccagcgttcctgagcgcggccgaggtggaggaaca

SEQ ID NO: 81111 - DNA, 201 bp, Homo sapiens
gtaaataaaacaaaggaacttgatgttgagatggatgcttgaggaatattgctgctggttctcataatttctagagtaaatgagggagtccagtccccagygaactctccttttgtgcttatcatgttttaccttaaatgctgagatcctcatttatgtttgtagttggaaagcaaagctaggtagccatttcttctgttc

SEQ ID NO: 81112 - DNA, 201 bp, Homo sapiens; identical to SEQ ID NO: 81106

SEQ ID NO: 81113 - DNA, 201 bp, Homo sapiens
tgaaggagtctggagatgtcctgctgtcaggggccgagatctttgctgagctgggagaagtgattaagggagtgaaaccagcccactgtgagaagaccacsgtgttcaagtctttgggaatggcagtggaagacacagttgcagccaaactcatctatgattcctggtcatctgctgcacccatttcactgaatcttaaat

SEQ ID NO: 81114 - DNA, 201 bp, Homo sapiens; identical to SEQ ID NO: 81106

SEQ ID NO: 81115 - DNA, 201 bp, Homo sapiens; identical to SEQ ID NO: 81107

SEQ ID NO: 81116 - DNA, 201 bp, Homo sapiens; identical to SEQ ID NO: 81108

SEQ ID NO: 81117 - DNA, 201 bp, Homo sapiens; identical to SEQ ID NO: 81109

SEQ ID NO: 81118 - DNA, 201 bp, Homo sapiens
gccgcgcagccgcccgcgggcgagtctgtagcctgatcctgcgcggacccgccagaggcacaccaggagagcagcgggcgcgctcataaagggcacagccsagggtacgtggatcgcggtgcggagactgaggttagaaggcacaggtggcgagatgagccgggtaccagcgttcctgagcgcggccgaggtggaggaaca

SEQ ID NO: 81119 - DNA, 201 bp, Homo sapiens; identical to SEQ ID NO: 81111

SEQ ID NO: 81120 - DNA, 201 bp, Homo sapiens
ggatttcagagccttctgcttctgaagtaaaattatgtgcatttgttacttggtcagactgggacttgggggtttgcctggagtatgagtgtaaaagaaarcagctgttaaaacctgtgtttttaaattcttggattgatctcagagcaacttacaagcttttctataggagaaaaccaaaaggactaagtggtgccttgc

SEQ ID NO: 81121 - DNA, 201 bp, Homo sapiens
tccattatgcaagtgtggtcggagatctaagagacttgttgtttctaataatggaccgaaccatggaaaagtcttctattgttgccctatcgggaaatacmaagaaaacagaaaatgttgtggttatttcaaatgggaacaaacacttcaaaaggaaagagccaacagcatggttccatctcattccacagggggactcac

SEQ ID NO: 81122 - DNA, 188 bp, Homo sapiens
tgacagatactatgtttgttttatagatatggtaattaatgaaacaactttaaattgtcttccattctttcttcctcagttcatttctttttgtcttcccwctgatagtctttggcagctcttgaataaattctacctgttggcatcaaggggaagaaaattagcctggaaatttttatctttacata

SEQ ID NO: 81123 - DNA, 201 bp, Homo sapiens
agagttaatgccaatatgtctcatcctttagttttggggaaacatcctcttctttcaggtggtaccaaaaggaatccatgcagtccccaagctttcccacyagcaaaaaaacaacccttcactattcatgaagaaaagcctacatcatctgattgctccccagtaagaagttcttcctggaggcgtctcccatctatatta

SEQ ID NO: 81124 - DNA, 201 bp, Homo sapiens
tataaaagcaagtcttcacaatgtcaaaagttccttacctctttttaatactaagtcctctacttctgtggggcagttgcagtctcctaccttgaattcayctatctatatgcaaaagcaaggaaaaaatgaacatcttgcatttaataccaaatctaaggcttcaacagttggttcagaattggtacttgtttctaccac

SEQ ID NO: 81125 - DNA, 201 bp, Homo sapiens
cattctggccagaaatttgaatacaattcaagttgaagaaatgtctgcctgtaacattagcatccagggtcccagcatatataataaggagcctaaaaatrtaataaatcctcatgaaaaagttcaaatgaagtcaatttgtgcaaattctcctataaaggcacaacaggatcaattacaagtaaaaaacaatataaaagc

SEQ ID NO: 81126 - DNA, 201 bp, Homo sapiens
cagttaacctacaagagccatggaagagtgggaaaatgacacctccattatgcaagtgtggtcggagatctaagagacttgttgtttctaataatggacckaaccatggaaaagtcttctattgttgccctatcgggaaataccaagaaaacagaaaatgttgtggttatttcaaatgggaacaaacacttcaaaaggaaa

SEQ ID NO: 81127 - DNA, 201 bp, Homo sapiens
gcaagtcttcacaatgtcaaaagttccttacctctttttaatactaagtcctctacttctgtggggcagttgcagtctcctaccttgaattcacctatctrtatgcaaaagcaaggaaaaaatgaacatcttgcatttaataccaaatctaaggcttcaacagttggttcagaattggtacttgtttctaccaccgttcca

SEQ ID NO: 81128 - DNA, 201 bp, Homo sapiens
gaaccatggaaaagtcttctattgttgccctatcgggaaataccaagaaaacagaaaatgttgtggttatttcaaatgggaacaaacacttcaaaaggaargagccaacagcatggttccatctcattccacagggggactcacttttagttctccagaaacaagccatatttgtgacagaaatttaagtatttccaccaa

SEQ ID NO: 81129 - DNA, 201 bp, Homo sapiens
gggaagggaccgagagacaccccaggaaggtcagggaaagcaggcaggccccaaataagctggtcggggcagctgaggcgatgaaagccggttgggatctygaggagagtcagcccgaggccaagaaagcccgcttatctaccattttatttactgacaactgtgaagtaacccatgaccagctgtgtgaattgctgaagt

SEQ ID NO: 81130 - DNA, 201 bp, Homo sapiens
ctcatcctgctgccaggaaccaagagcactcatggttcactctctggtctaggactgatgggaataaaagaggaagaagaaagcgctggcccaggcctgtkttcgtgagtcggcctgccatgtttccatgtgccatttcttaccccttgtaggcaatggcaaagaatgtggtcaggctgtagcctccccaaccagcagaca

SEQ ID NO: 81131 - DNA, 194 bp, Homo sapiens
tcgtgagtcggcctgccatgtttccatgtgccatttcttaccccttgtaggcaatggcaaagaatgtggtcaggctgtagcctccccaaccagcagacagytttatggaaacttggtatagcagctaaaagagtttagtttgtttatatggcatgtataagttttcaataaatgcctaaagttcaagcatagta

SEQ ID NO: 81132 - DNA, 201 bp, Homo sapiens; identical to SEQ ID NO: 81129

SEQ ID NO: 81133 - DNA, 201 bp, Homo sapiens
gctttggcccagtccagtcaatgacttttgttcttgaaacccgtcagcctcatctctgtatacagtatgaagtcctagaagctgcccagctggccatagartccttggatggtattctggtagatggtatctgcatcaaggtgcagaggcctgtgacagagctcacgcttgattgtgacaccctcgtgaatgagctggaag

SEQ ID NO: 81134 - DNA, 201 bp, Homo sapiens; identical to SEQ ID NO: 81130

SEQ ID NO: 81135 - DNA, 194 bp, Homo sapiens; identical to SEQ ID NO: 81131

SEQ ID NO: 81136 - DNA, 201 bp, Homo sapiens
ctgtagactggaccttaagcagtggaattcttgtctcctgttcaggtgaagtgatctgtgaacctcccaacaacaaactggacaaattcagcggaaccctstactggaaggaaaataagttccctctgagcaaccagaacatgctgctgcggggctgtgtgctgcgaaacaccgagtggtgcttcgggctggtcatctttg

SEQ ID NO: 81137 - DNA, 201 bp, Homo sapiens
aagagctgctcaacaccaccatggaccaccttaatgagtacgcaggggaagggctgaggaccctggtgctggcctacaaggatctggatgaagagtactaygaggagtgggctgagcgacgcctccaggccagcctggcccaggacagccgggaggacaggctggctagcatctatgaggaggttgagaacaacatgatgc

SEQ ID NO: 81138 - DNA, 201 bp, Homo sapiens
gtgcctttggttcttgtcctcaccatcacagctgttaaagatgccactgatgactatttccgccacaagagcgataaccaggtgaataaccgccagtctcrggtgctgatcaatggaatcctccagcaggagcagtggatgaatgtctgtgttggtgatattatcaagctagaaaataaccagtttgtggcggctgtagac

SEQ ID NO: 81139 - DNA, 201 bp, Homo sapiens
ggcatgggcagtacggggccgccggggcgggcgccgagcgctgagcgctgagggtctcccatgggattgctgggatcttgctgggtgagatggcagtgtgygcaaaaaagcgccccccagaagaagaaaggagggcgcgggctaatgaccgagaatacaatgagaaattccagtatgcgagtaactgcatcaagacctcca

SEQ ID NO: 81140 - DNA, 201 bp, Homo sapiens
cccaaaacaatcaccgtccatgagatgggcacagccatcacctaccagctgctggccatcctggacttcaacaacatccgcaagcggatgtcggtcatagkgcggaatccagaggggaagatccgactctactgcaaaggggctgacactatcctactggacagactgcaccactccactcaagagctgctcaacaccacc

SEQ ID NO: 81141 - DNA, 201 bp, Homo sapiens
atgacatgactgaggttttcatagtcactggccatactgtcctggaggtgcgggaggagctcaggaaagcccgggagaagatgatggactcatcccgctcygtaggcaacggcttcacctatcaggacaagctttcttcttccaagctaacttctgtcctggaggccgttgctggggagtacgccctggtcataaatggtc

SEQ ID NO: 81142 - DNA, 201 bp, Homo sapiens
atgggctcttcgacatgtttcccaaccagttccggtttgtggggaatgcccagaacaccttggcccagcccacggtgtggctgaccattgtgctcaccacrgtcgtctgcatcatgcccgtggttgccttccgattcctcaggctcaacctgaagccggatctctccgacacggtccgctacacacagctcgtgaggaaga

SEQ ID NO: 81143 - DNA, 201 bp, Homo sapiens
aggtcatccgtctgggccacagctacttcatcaactgggataagaagatgttctgcatgaagaagcggacgcctgcagaagcccgcaccaccaccctaaaygaggagctgggccaggtggagtacatcttctccgacaagacgggcaccctcacccagaacatcatggttttcaacaagtgctccatcaatggccacagct

SEQ ID NO: 81144 - DNA, 201 bp, Homo sapiens
gtggcggtgccgacaagcccctcaagggctgaaggccgaggatggatgccctgtgccagtgaccagagcacccagggctggccagtcactgagggaacagygtctcggaactgctggtcctcattccttgcttcccgtccccccggtagactctgtcctgctggtcccaccacacatggctgggacatctgttcccagctg

SEQ ID NO: 81145 - DNA, 201 bp, Homo sapiens
cccccggtagactctgtcctgctggtcccaccacacatggctgggacatctgttcccagctgtaggcccttccaccagctggggagctagagggagcaggyccaagggcagagcagaggctgaggcacggggagccagccccactcggggaccagaagtggaaccaaaaacaagaaaaaactgtgagagattgtgtctgcc

SEQ ID NO: 81146 - DNA, 201 bp, Homo sapiens
ttgtcctcaccatcacagctgttaaagatgccactgatgactatttccgccacaagagcgataaccaggtgaataaccgccagtctcaggtgctgatcaayggaatcctccagcaggagcagtggatgaatgtctgtgttggtgatattatcaagctagaaaataaccagtttgtggcggctgtagactggaccttaagca

SEQ ID NO: 81147 - DNA, 201 bp, Homo sapiens
tcacctcagaattgggagacatcagtaagcttgccaagtttgacggtgaagtgatctgtgaacctcccaacaacaaactggacaaattcagcggaaccctstactggaaggaaaataagttccctctgagcaaccagaacatgctgctgcggggctgtgtgctgcgaaacaccgagtggtgcttcgggctggtcatctttg

SEQ ID NO: 81148 - DNA, 201 bp, Homo sapiens
gtgcctttggttcttgtcctcaccatcacagctgttaaagatgccactgatgactatttccgccacaagagcgataaccaggtgaataaccgccagtctcrggtgctgatcaatggaatcctccagcaggagcagtggatgaatgtctgtgttggtgatattatcaagctagaaaataaccagtttgtggcggcggatctc

SEQ ID NO: 81149 - DNA, 201 bp, Homo sapiens
ttgtcctcaccatcacagctgttaaagatgccactgatgactatttccgccacaagagcgataaccaggtgaataaccgccagtctcaggtgctgatcaayggaatcctccagcaggagcagtggatgaatgtctgtgttggtgatattatcaagctagaaaataaccagtttgtggcggcggatctcctcctcctttcca

SEQ ID NO: 81150 - DNA, 201 bp, Homo sapiens; identical to SEQ ID NO: 81136

SEQ ID NO: 81151 - DNA, 201 bp, Homo sapiens
tgctcaacaccaccatggaccaccttaatgtgggtgagtacgcaggggaagggctgaggaccctggtgctggcctacaaggatctggatgaagagtactaygaggagtgggctgagcgacgcctccaggccagcctggcccaggacagccgggaggacaggctggctagcatctatgaggaggttgagaacaacatgatgg

SEQ ID NO: 81152 - DNA, 201 bp, Homo sapiens; identical to SEQ ID NO: 81138

SEQ ID NO: 81153 - DNA, 201 bp, Homo sapiens; identical to SEQ ID NO: 81139

SEQ ID NO: 81154 - DNA, 201 bp, Homo sapiens; identical to SEQ ID NO: 81140

SEQ ID NO: 81155 - DNA, 201 bp, Homo sapiens; identical to SEQ ID NO: 81141

SEQ ID NO: 81156 - DNA, 201 bp, Homo sapiens; identical to SEQ ID NO: 81142

SEQ ID NO: 81157 - DNA, 201 bp, Homo sapiens; identical to SEQ ID NO: 81143

SEQ ID NO: 81158 - DNA, 201 bp, Homo sapiens; identical to SEQ ID NO: 81144

SEQ ID NO: 81159 - DNA, 201 bp, Homo sapiens; identical to SEQ ID NO: 81145

SEQ ID NO: 81160 - DNA, 201 bp, Homo sapiens; identical to SEQ ID NO: 81146

SEQ ID NO: 81161 - DNA, 201 bp, Homo sapiens
tgtttgcatgcgttggcaggggctttcagtattacagagccaaggggaatgttgaggctgatgcatttagaaagttttttcctagtgttcccttattcggyttctttggaaatggagaaattggatgtgatcggatagtcactgggaactttatattgaggaaatgtaatgaggtaaaagatgatgatctgtttcatagct

SEQ ID NO: 81162 - DNA, 201 bp, Homo sapiens
cagcaagtagtcagcactttcagtgatatgaatatcatcttggctggaggccaggtggacaacctgtcatcactgacttctgaaaagaaccctctggataytgatgcctcgggtgtggttggactgtcatttagtggacaccgaatccagagtgccactgtgctcctcaacgaggacgtcagtgatgagaagactgctgag

SEQ ID NO: 81163 - DNA, 201 bp, Homo sapiens; identical to SEQ ID NO: 81161

SEQ ID NO: 81164 - DNA, 201 bp, Homo sapiens; identical to SEQ ID NO: 81162

SEQ ID NO: 81165 - DNA, 201 bp, Homo sapiens
tagagtgtatctttatggcaaaacttctcagagcttctaatatgcccagtgctgtggaaatctggaaggagaatagcattacctgtgacagttcccaaatstgtttggtcacaaaacttttttccacagaatgtcttgcaagtcgtactggtttttggaaattctgtattagatcttttgaaaggctttttcaagcttaaa

SEQ ID NO: 81166 - DNA, 201 bp, Homo sapiens
ctgacttctgaaaagtatgtcttgtgtgcttctgatttcgtctgtgaatgaagggaaatggtctcaggttttgtcactttggggttaacaatttaaaaaaygtgtttaaagaattattaagataatagttcattccattttgtagtagacattggctaaggggcttactgaacataattctgcttacggttgaataattac

SEQ ID NO: 81167 - DNA, 201 bp, Homo sapiens
caggtaacatgtttattgagctgtacatgcatatgagaaataagaaacttttttttcctactatcatctcttaaattttgttttctttttcttttgcttcytcttcttcttttctattttttataaatatcatgcacaactataacctatgggaatgatgtagtaacacagattattcatcttgttagagttgtattaaaa

SEQ ID NO: 81168 - DNA, 201 bp, Homo sapiens
tctccactttttcttattttagattgctagaaaagacataatcatggattatgttgacattttctttttaaatttttgtttaactttttttttttttttttgagacagagtctcactctgttgcctaggctggaggacagtggcacaatcatggctgattgcagccttgacctccttgactcaattgatcctcccatctca

SEQ ID NO: 81169 - DNA, 201 bp, Homo sapiens
aggattgtaagataatctatctttgccggaatgcaaaggatgtggctgtttccttttattatttctttctaatggtggctggtcatccaaatcctggatcytttccagagtttgtggagaaattcatgcaaggacaggttccttatggttcctggtataaacatgtaaaatcttggtgggaaaagggaaagagtccacgtg

SEQ ID NO: 81170 - DNA, 201 bp, Homo sapiens
gttgcctaggctggaggacagtggcacaatcatggctgattgcagccttgacctccttgactcaattgatcctcccatctcagcctcccaagtagctaggrctacagacatgtgcaaccatgtttggctaatttttttaatgtttttttgtagagatgaggtcttattatattgtccaggctggtcttgaattcctgggct

SEQ ID NO: 81171 - DNA, 201 bp, Homo sapiens
ctgctaaaggtgggaagaagccttggttcctaacgaatgaagtggaagaatgtgaaaattattttagcaaaacactactggaccggaaaagtgaaaagagraataattctgactggctgctagctaaagaaagccatccagccacagtttttattcttttctcagatttaaatcccttggttactctaggtggcaataaag

SEQ ID NO: 81172 - DNA, 201 bp, Homo sapiens
gaatataaagtatcaacaagtgtagttatacattttgttttggatatttaatccttacttgggaaaaaatcagcatctaggtaaattattattttaataasaactcttaaattgccaacctctgagaggtgaaaagctatgtaaatagaaggaatggccagttcaaaagaatagtagatgtgatagtgccgtgaatgtatt

SEQ ID NO: 81173 - DNA, 201 bp, Homo sapiens
taatgtatgcggcaaggaatgggcacccagagatagtccaatttctgcttgagaaagggtgtgacagatcaattgtcaataaatcaaggcagactgcactrgacattgctgtattttggggttataagcatatagctaatttactagctactgctaaaggtgggaagaagccttggttcctaacgaatgaagtggaagaat

SEQ ID NO: 81174 - DNA, 201 bp, Homo sapiens
tgtatgcggcaaggaatgggcacccagagatagtccaatttctgcttgagaaagggtgtgacagatcaattgtcaataaatcaaggcagactgcactggayattgctgtattttggggttataagcatatagctaatttactagctactgctaaaggtgggaagaagccttggttcctaacgaatgaagtggaagaatgtg

SEQ ID NO: 81175 - DNA, 201 bp, Homo sapiens
agggtgtgacagatcaattgtcaataaatcaaggcagactgcactggacattgctgtattttggggttataagcatatagctaatttactagctactgctraaggtgggaagaagccttggttcctaacgaatgaagtggaagaatgtgaaaattattttagcaaaacactactggaccggaaaagtgaaaagagaaataa

SEQ ID NO: 81176 - DNA, 201 bp, Homo sapiens
taatttactagctactgctaaaggtgggaagaagccttggttcctaacgaatgaagtggaagaatgtgaaaattattttagcaaaacactactggaccggraaagtgaaaagagaaataattctgactggctgctagctaaagaaagccatccagccacagtttttattcttttctcagatttaaatcccttggttactct

SEQ ID NO: 81177 - DNA, 201 bp, Homo sapiens
attgcacatcaattaatcaaacactggattagaataaatcctaatctctaaatctaagaactaagctttgagtattatttaataatttctaataacactcrttcctcaagtgatattagagattattcagtactcttgagagtgtcacaacacaaaatacgatgttgggttttcgaaatattttcaaagtgttctgtctta

SEQ ID NO: 81178 - DNA, 201 bp, Homo sapiens
tgtagctcaagcaagatctgttcttgcctggcacagtcgatacaagttttgcccaacctgtggaaatgcaactaaaattgaagaaggtggctataagagaytatgtttaaaagaagactgtcctagtctcaatggcgtccataatacctcatacccaagagttgatccagtagtaatcatgcaagttattcatccagatgg

SEQ ID NO: 81179 - DNA, 201 bp, Homo sapiens
agaacttgaaataaaagacaaactacttaattatgctggtgaagtcccgagagaggaggaagatggattggttgcctggtttgctctaggtatagatcctrttgctgctgaagaattcaagcaaagacatgaaaattgttactttcttcatcctcctatgccagcccttctgcaattgaaagaaaaagaagctggggttgt

SEQ ID NO: 81180 - DNA, 201 bp, Homo sapiens
ttacctttaagttgtcaatatatggtttttgttcatctccccattgtagtcccacttgctctttcctgggggttccattgttctagcagtggaggtgttayagtgtcgccactcgtctaatttgaccagtgttaagaattttctaatttaataatttaatagtgatctcaataccacaccctcatggaaggagaaaagcat

SEQ ID NO: 81181 - DNA, 201 bp, Homo sapiens
agatataaaggattatttggcccagcctgagaagatcaccttgatttttcttggagtagaacttgaaataaaagacaaactacttaattatgctggtgaartcccgagagaggaggaagatggattggttgcctggtttgctctaggtatagatcctattgctgctgaagaattcaagcaaagacatgaaaattgttactt

SEQ ID NO: 81182 - DNA, 201 bp, Homo sapiens
tcaatatatggtttttgttcatctccccattgtagtcccacttgctctttcctgggggttccattgttctagcagtggaggtgttatagtgtcgccactcrtctaatttgaccagtgttaagaattttctaatttaataatttaatagtgatctcaataccacaccctcatggaaggagaaaagcatactattatatctgg

SEQ ID NO: 81183 - DNA, 201 bp, Homo sapiens
ccggttactagggcaatctgccggaagagtcaggttctgtgtatgtctccgcgtcttccgcggagcgggtgtgcagggcctgcagcattgaactagatgtygtccccgcaggccccagaagatgggcagggctgtggcgaccgcggcgatccccctggggacctccgtagcgtcttggtcacgaccgtgctcaacctcgag

SEQ ID NO: 81184 - DNA, 201 bp, Homo sapiens
tctccgcgtcttccgcggagcgggtgtgcagggcctgcagcattgaactagatgtcgtccccgcaggccccagaagatgggcagggctgtggcgaccgcgrcgatccccctggggacctccgtagcgtcttggtcacgaccgtgctcaacctcgagccgctggacgaggatctcttcagaggaaggcattactgggtaccg

SEQ ID NO: 81185 - DNA, 201 bp, Homo sapiens
ggtgtgggggtaaggcctgcctcctgcagggcttggagccgagcctctgattgacgtttgtccaggcccaggcgccaggagagccggacatgggcctccaraaagggtgccagcaaagggtggaggctcttgtccccaagcagctgcagggccttctcacagcatgcccgggcctctccagggtcttccagctcctggtgg

SEQ ID NO: 81186 - DNA, 201 bp, Homo sapiens; identical to SEQ ID NO: 81183

SEQ ID NO: 81187 - DNA, 201 bp, Homo sapiens
cttgactgtgagaccctcattgaccagtatttaagggaccctaacctccaaaagaggtacccattggcgctcaaccgaattgctgctcaggaggtccccawtgagatcaagccagtaaacccatcccccctgagccagctgcagagaatggagcccaaacagatgttctgggtgcgagcccggggctatattggcgagggc

SEQ ID NO: 81188 - DNA, 201 bp, Homo sapiens
gtggctctcgggggctggtccatgggcggctgtggcgtcaggatggagtcctagctgtgacctgtgcccaggagggcgtgatccgagtgaagccccaggtytcagagagcaagctgtagccagaggtaccagcttcgcctggggcttcaagaacctcccatctatccccattcctgagacaggagttacagtcccttttgg

SEQ ID NO: 81189 - DNA, 201 bp, Homo sapiens; identical to SEQ ID NO: 81184

SEQ ID NO: 81190 - DNA, 201 bp, Homo sapiens
ctgcttcatttggctactgtgagaactgagtgagctctgctatgtgtaagggaaaccagcaatcatcctcataaacatcaaacttgggcccaaagccagcragggagaaagagtctccagatggggagggaagaggccagacctcatggcctcaagtcctctcttctgagtcctttcttccccttggtggtggtagtgggg

SEQ ID NO: 81191 - DNA, 201 bp, Homo sapiens
aagattgataaccttgaagtgaggacatgggttcagatttggcttcatcatggggccaaattcctgaccctctctggatttcagtcctggtctggaaaacwggacaacacataactgcttcatttggctactgtgagaactgagtgagctctgctatgtgtaagggaaaccagcaatcatcctcataaacatcaaacttgg

SEQ ID NO: 81192 - DNA, 201 bp, Homo sapiens
aacatcaaacttgggcccaaagccagcaagggagaaagagtctccagatggggagggaagaggccagacctcatggcctcaagtcctctcttctgagtccyttcttccccttggtggtggtagtggggatatttttcatgaattaccacttggaggacctggcttgatttattatacagggagccgatagttttcctaaca

SEQ ID NO: 81193 - DNA, 201 bp, Homo sapiens
atgaattaccacttggaggacctggcttgatttattatacagggagccgatagttttcctaacacaagtggtcagaggtacagcagttctgcttggccgarctgttgaaggagactgttctcagagctcctccctctgtgatctttttgaggaagcgaggagaggtgtgaaagtgcttttaaactgtcaactggggttcct

SEQ ID NO: 81194 - DNA, 201 bp, Homo sapiens
tgggcatggtgatgtgcgcctgtaatcccagctgctcaggaggctgaggcgggaggatcccttgaacccaggcgcttgagaccagcctggcaacttagtgrgactctgtttcaggaaaaaaaaaaaaagtgtatttggctgttctgaagcaggccatcatcacccttcacctcacccacaggtggctctcgggggctggtc

SEQ ID NO: 81195 - DNA, 155 bp, Homo sapiens
gtggctctcgggggctggtccatgggcggctgtggcgtcaggatggagtcctagctgtgacctgtgcccaggagggcgtgatccgagtgaagccccaggtytcagagagcaagctgtagccagaggtaccagcttcgcctggggcttcaagaacc

SEQ ID NO: 81196 - DNA, 201 bp, Homo sapiens
tgaccctctctggatttcagtcctggtctggaaaacaggacaacacataactgcttcatttggctactgtgagaactgagtgagctctgctatgtgtaagrgaaaccagcaatcatcctcataaacatcaaacttgggcccaaagccagcaagggagaaagagtctccagatggggagggaagaggccagacctcatggcc

SEQ ID NO: 81197 - DNA, 201 bp, Homo sapiens
cgagttcctgtctctctgccaacgccgcccggatggcttcccaaaaccgcgacccagccgccactagcgtcgccgccgcccgtaaaggagctgagccgagsgggggcgccgcccggggtccggtgggcaaaaggctacagcaggagctgatgaccctcatgatgtctggcgataaagggatttctgccttccctgaatcag

SEQ ID NO: 81198 - DNA, 201 bp, Homo sapiens; identical to SEQ ID NO: 81197

SEQ ID NO: 81199 - DNA, 201 bp, Homo sapiens
gaagtcccggaacaccttggcaccccagcggctgctcttcgaagtgaccagcgctaacgttgtcaaggacccgccctccaagtacgtgctctacaccctcrccgtgatcggcccaggaccgccagattgccagccagcccagatctctcgccgttactcggactttgagcggctgcaccgaaacctgcagcggcaattccg

SEQ ID NO: 81200 - DNA, 201 bp, Homo sapiens
ccaagtttgatgtttatgaggatgattgctggtttcccttacacatagcagagctcactcagttctcacagtagccaaatgaagcagttatgtgttgtccwgttttccagaccaggactgaaatccagagagggtcaggaatttggccccatgatgaagccaaatctgaacccatgtcctcacttcaaggttatcaatctt

SEQ ID NO: 81201 - DNA, 201 bp, Homo sapiens
ggccatgaggtctggcctcttccctccccatctggagactctttctcccttgctggctttgggcccaagtttgatgtttatgaggatgattgctggtttcycttacacatagcagagctcactcagttctcacagtagccaaatgaagcagttatgtgttgtcctgttttccagaccaggactgaaatccagagagggtca

SEQ ID NO: 81202 - DNA, 201 bp, Homo sapiens
tccaagtacgtgctctacaccctcgccgtgatcggcccaggaccgccagattgccagccagcccagatctctcgccgttactcggactttgagcggctgcmccgaaacctgcagcggcaattccggggcccaatggctgccatctccttcccccagtcccactaagttgccaggctggtctcaagcgcctgggttcaaggg

SEQ ID NO: 81203 - DNA, 166 bp, Homo sapiens
aggaagctgcccgagcggcgctctgagcggcctgagcccggcggagccctgcagaacccggccgayctccatgggctgcggggggctgcacccggacccctggggcgcggcgcgcccctgaatgcaccgtgggacgcaggagggtgccatggcctcccggctcctg

SEQ ID NO: 81204 - DNA, 201 bp, Homo sapiens
ccccactaccaccaccaaggggaagaaaggactcagaagagaggacttgaggccatgaggtctggcctcttccctccccatctggagactctttctccctygctggctttgggcccaagtttgatgtttatgaggatgattgctggtttcccttacacatagcagagctcactcagttctcacagtagccaaatgaagcag

SEQ ID NO: 81205 - DNA, 201 bp, Homo sapiens
aggacccgccctccaagtacgtgctctacaccctcgccgtgatcggcccaggaccgccagattgccagccagcccagatctctcgccgttactcggacttwgagcggctgcaccgaaacctgcagcggcaattccggggcccaatggctgccatctccttcccccagtcccactaagttgccaggctggtctcaagcgcct

SEQ ID NO: 81206 - DNA, 140 bp, Homo sapiens
aggaagctgcccgagcggcgctctgagcggcctgagcccrgcggagccctgcagaacccggccgacctccatgggctgcggggggctgcacccggacccctggggcgcggcgcgcccctgaatgcaccgtgggacgcagg

SEQ ID NO: 81207 - DNA, 201 bp, Homo sapiens
tgttaggaaaactatcggctccctgtataataaatcaagccaggtcctccaagtggtaattcatgaaaaatatccccactaccaccaccaaggggaagaarggactcagaagagaggacttgaggccatgaggtctggcctcttccctccccatctggagactctttctcccttgctggctttgggcccaagtttgatgtt

SEQ ID NO: 81208 - DNA, 201 bp, Homo sapiens
aggaaccccagttgacagtttaaaagcactttcacacctctcctcgcttcctcaaaaagatcacagagggaggagctctgagaacagtctccttcaacagytcggccaagcagaactgctgtacctctgaccacttgtgttaggaaaactatcggctccctgtataataaatcaagccaggtcctccaagtggtaattcat

SEQ ID NO: 81209 - DNA, 201 bp, Homo sapiens
cagcccagatctctcgccgttactcggactttgagcggctgcaccgaaacctgcagcggcaattccggggcccaatggctgccatctccttcccccagtcycactaagttgccaggctggtctcaagcgcctgggttcaagggatcctcccgcctcagcctcctgagcagctgggattacaggcgcacatcaccatgccca

SEQ ID NO: 81210 - DNA, 201 bp, Homo sapiens
acaccctcgccgtgatcggcccaggaccgccagattgccagccagcccagatctctcgccgttactcggactttgagcggctgcaccgaaacctgcagcgscaattccggggcccaatggctgccatctccttcccccagtcccactaagttgccaggctggtctcaagcgcctgggttcaagggatcctcccgcctcagc

SEQ ID NO: 81211 - DNA, 201 bp, Homo sapiens
ccaccaggagctggaagaccctggagaggcccgggcatgctgtgagaaggccctgcagctgcttggggacaagagcctccaccctttgctggcaccctttytggaggcccatgtccggctctcctggcgcctgggcctggacaaacgtcaatcagaggctcggctccaagccctgcaggaggcaggccttacccccacacc

SEQ ID NO: 81212 - DNA, 201 bp, Homo sapiens
tccaagtacgtgctctacaccctcgccgtgatcggcccaggaccgccagattgccagccagcccagatctctcgccgttactcggactttgagcggctgcmccgaaacctgcagcggcaattccggggcccaatggctgccatctccttcccccgtaagcggctgcgccggaattttactgcagagaccattgcccgccgt

SEQ ID NO: 81213 - DNA, 201 bp, Homo sapiens; identical to SEQ ID NO: 81199

SEQ ID NO: 81214 - DNA, 166 bp, Homo sapiens; identical to SEQ ID NO: 81203

SEQ ID NO: 81215 - DNA, 201 bp, Homo sapiens
aggacccgccctccaagtacgtgctctacaccctcgccgtgatcggcccaggaccgccagattgccagccagcccagatctctcgccgttactcggacttwgagcggctgcaccgaaacctgcagcggcaattccggggcccaatggctgccatctccttcccccgtaagcggctgcgccggaattttactgcagagacca

SEQ ID NO: 81216 - DNA, 140 bp, Homo sapiens; identical to SEQ ID NO: 81206

SEQ ID NO: 81217 - DNA, 201 bp, Homo sapiens
acaccctcgccgtgatcggcccaggaccgccagattgccagccagcccagatctctcgccgttactcggactttgagcggctgcaccgaaacctgcagcgscaattccggggcccaatggctgccatctccttcccccgtaagcggctgcgccggaattttactgcagagaccattgcccgccgtagccgggcctttgagc

SEQ ID NO: 81218 - DNA, 201 bp, Homo sapiens; identical to SEQ ID NO: 81211

SEQ ID NO: 81219 - DNA, 201 bp, Homo sapiens
cccgccctccaactctacaccctcgccgtgatcggcccaggaccgccagattgccagccagcccagatctctcgccgttactcggactttgagcggctgcmccgaaacctgcagcggcaattccggggcccaatggctgccatctccttcccccgtaagcggctgcgccggaattttactgcagagaccattgcccgccgt

SEQ ID NO: 81220 - DNA, 201 bp, Homo sapiens
tctggaagaagtcccggaacaccttggcaccccagcggctgctcttcgaagtgaccagcgctaacgttgtcaaggacccgccctccaactctacaccctcrccgtgatcggcccaggaccgccagattgccagccagcccagatctctcgccgttactcggactttgagcggctgcaccgaaacctgcagcggcaattccg

SEQ ID NO: 81221 - DNA, 201 bp, Homo sapiens
gttgtcaaggacccgccctccaactctacaccctcgccgtgatcggcccaggaccgccagattgccagccagcccagatctctcgccgttactcggacttwgagcggctgcaccgaaacctgcagcggcaattccggggcccaatggctgccatctccttcccccgtaagcggctgcgccggaattttactgcagagacca

SEQ ID NO: 81222 - DNA, 201 bp, Homo sapiens; identical to SEQ ID NO: 81217

SEQ ID NO: 81223 - DNA, 201 bp, Homo sapiens
gtcatcaaggaagacattgtgaggagggagcggataggattcagagttcagccagaccaaggaaaaattttttacagcagcataaaagagatgaaacctcycctaaggggacatgggaaaggggcatggggcaaagagaatgttagaaaaactgaggagagtgtgctcaaggttgaggtggacttggaccaaacccagagg

SEQ ID NO: 81224 - DNA, 201 bp, Homo sapiens
ggtaggaactgagctttccccttggactgctgcttcctgctgtgttcaggggagggggtcactttctggcaactctgctgctgctgctgctgctgctgctrcttcagcttcctctccactcaaggtaagcaggctaagggagggcaggctgctagggaaagctttgtaccatgaacaggatccgaaagtttttccgaggaa

SEQ ID NO: 81225 - DNA, 201 bp, Homo sapiens
cccaatctgaatcagtggaaaaaaatttaagtgaggaagaagaggccttcaaatgcttatttaattctaggtatgaacactatttcagttcattttgtgcytttaaaactacagttttaaagatttatgataccaataacttcctagattcatgtggattttttttaaggcaatgaaaaaaggctggattataacacactg

SEQ ID NO: 81226 - DNA, 201 bp, Homo sapiens
tatttggaataccaaaagatgactcaggaaaacagtccaacattggactgaagtccttcttcggaactgggtggcctttgaattgcctgctttccaccctrtgctagacctcatcatgcaaatttccctgtgaaagctaacaggtaactggaaatgaagacagaaggacttgagaaagcatgaggatattcccaatgacta

SEQ ID NO: 81227 - DNA, 201 bp, Homo sapiens
acggagaccacctcatcgaccaagggctagatgttggcaacctcacccagcaaagggagctgcgaaagaaactgaagtgcaaaagtttcaaatggtacttrgagaatgtctttcctgacttaagggctcccattgtgagagctagtggtgtgcttattaatgtggctttgggtaaatgcatttccattgaaaacactacag

SEQ ID NO: 81228 - DNA, 201 bp, Homo sapiens
aaagaagatggaaagaaggaaacttcaatgtctaccttagcgatttgatcccagtggatagagccattgaagacaccagacctgctggatgtgcagagcasctagttcacaataacctcccaaccaccagtgtcatcatgtgctttgtggatgaagtgtggtccactctcctgagatctgttcacagtgtcatcaatcgct

SEQ ID NO: 81229 - DNA, 201 bp, Homo sapiens
catattccttccccaaagaccggatgaagacagtggagcggaacttggtgcgggttgccgaggtctggctggatgagtataaggagctgttctatggccayggagaccacctcatcgaccaagggctagatgttggcaacctcacccagcaaagggagctgcgaaagaaactgaagtgcaaaagtttcaaatggtacttgg

SEQ ID NO: 81230 - DNA, 201 bp, Homo sapiens
atcatgagaaggaatggaaactaggccggtgcattttacggttccctgagattctgcaaaagattttagatgacttatttctccacactctctgtgattawatatatgagctggcaactgctttcacagagttctatgatagctgctactgtgtggagaaagatagacagactggaaaaatattgaaggtgaacatgtggc

SEQ ID NO: 81231 - DNA, 201 bp, Homo sapiens
tattgcacgtctggccaatattgatgaagaaatgctccaaaaagctgctcgagaaaccaagattcttttggatcatgagaaggaatggaaactaggccggkgcattttacggttccctgagattctgcaaaagattttagatgacttatttctccacactctctgtgattatatatatgagctggcaactgctttcacaga

SEQ ID NO: 81232 - DNA, 201 bp, Homo sapiens
tgagaaggaatggaaactaggccggtgcattttacggttccctgagattctgcaaaagattttagatgacttatttctccacactctctgtgattatatawatgagctggcaactgctttcacagagttctatgatagctgctactgtgtggagaaagatagacagactggaaaaatattgaaggtgaacatgtggcgtat

SEQ ID NO: 81233 - DNA, 201 bp, Homo sapiens
gtatttgtcccagggtgttccataccattaaccatagtaaaatcagatggaggttatacctatgatacatctgacctggctgctattaaacaaagactatwtgaggaaaaagcagatatgattatctatgttgtggacaatggacaatctgtgcacttccagacaatatttgctgctgctcaaatgattggttggtatgac

SEQ ID NO: 81234 - DNA, 201 bp, Homo sapiens
ttgtatttgtcccagggtgttccataccattaaccatagtaaaatcagatggaggttatacctatgatacatctgacctggctgctattaaacaaagactrtttgaggaaaaagcagatatgattatctatgttgtggacaatggacaatctgtgcacttccagacaatatttgctgctgctcaaatgattggttggtatg

SEQ ID NO: 81235 - DNA, 201 bp, Homo sapiens
catgagaaggaatggaaactaggccggtgcattttacggttccctgagattctgcaaaagattttagatgacttatttctccacactctctgtgattatawatatgagctggcaactgctttcacagagttctatgatagctgctactgtgtggagaaagatagacagactggaaaaatattgaaggtgaacatgtggcgt

SEQ ID NO: 81236 - DNA, 201 bp, Homo sapiens
tagagagaggggaatccttctatcaagataggatgaatgatattgtaaaggaatttgaagatagaggatttgtgcaggtggatgatggcagaaagattgtrtttgtcccagggtgttccataccattaaccatagtaaaatcagatggaggttatacctatgatacatctgacctggctgctattaaacaaagactatttg

SEQ ID NO: 81237 - DNA, 201 bp, Homo sapiens
ggagcttctccaaatttggagcagttacaagaagaaaatttaaaattaaagtatcgactgaatattcttcgaaagagtcttcaggcagaaaggaacaaacyaactaaaaatatgattaacattattagccgcctacaagaggtctttggtcatgcaattaaggctgcatatccagatttggaaaatcctcctctgctagtg

SEQ ID NO: 81238 - DNA, 105 bp, Homo sapiens
tgacmgtttccgcttccgtccacttggcgagtgagacgctgatgggaggatggacatactggtgtctgagtgctccgcgcggctgctgcagcaggaagaagagat

SEQ ID NO: 81239 - DNA, 201 bp, Homo sapiens
tccatgctggatttggtgtggtgctaggggaagacaagaaaaagtttaaaacacgttcgggtgaaacagtgcgcctcatggatcttctgggagaaggactwaaacgatccatggacaagttgaaggaaaaagaaagagacaaggtcttaactgcagaggaattgaatgctgctcagacatccgttgcatatggctgcatca

SEQ ID NO: 81240 - DNA, 201 bp, Homo sapiens
atttaaaattaaagtatcgactgaatattcttcgaaagagtcttcaggcagaaaggaacaaaccaactaaaaatatgattaacattattagccgcctacargaggtctttggtcatgcaattaaggctgcatatccagatttggaaaatcctcctctgctagtgacaccaagtcagcaggccaagtttggggactatcagt

SEQ ID NO: 81241 - DNA, 201 bp, Homo sapiens
aagaggtctttggtcatgcaattaaggctgcatatccagatttggaaaatcctcctctgctagtgacaccaagtcagcaggccaagtttggggactatcartgtaatagtgctatgggtatttctcagatgctcaaaaccaaggaacagaaagttaatccaagagaaattgctgaaaacattaccaaacacctcccagaca

SEQ ID NO: 81242 - DNA, 132 bp, Homo sapiens
acctgtccaaaggatgtaatccttcataggtttgaacactgtgtgtttttaccaaagtggccattggcactgtttgcttttttacaatcatgtggacacargcataagtaaagaaaatttgtcaaccaggca

SEQ ID NO: 81243 - DNA, 201 bp, Homo sapiens
ctcaaatgattggttggtatgaccctaaagtaactcgagtcttccatgctggatttggtgtggtgctaggggaagacaagaaaaagtttaaaacacgttcrggtgaaacagtgcgcctcatggatcttctgggagaaggactaaaacgatccatggacaagttgaaggaaaaagaaagagacaaggtcttaactgcagagg

SEQ ID NO: 81244 - DNA, 201 bp, Homo sapiens
tgggagaaggactaaaacgatccatggacaagttgaaggaaaaagaaagagacaaggtcttaactgcagaggaattgaatgctgctcagacatccgttgcrtatggctgcatcaaatatgctgacctttcccataaccggttgaatgactacatcttctcctttgacaaaatgctagatgacagaggaaatacagctgctt

SEQ ID NO: 81245 - DNA, 148 bp, Homo sapiens
atatcctgggaataaaacctgtccaaaggatgtaatccttcataggtttgaacactgtgtgtttttaccaaagtggccattggcactgtttgcttttttamaatcatgtggacacaagcataagtaaagaaaatttgtcaaccaggca

SEQ ID NO: 81246 - DNA, 156 bp, Homo sapiens
tgaccgtttccgcttccgtccacttggcgagtgagacgctgatgggaggatggacrtactggtgtctgagtgctccgcgcggctgctgcagcaggaagaagagattaaatctctgactgctgaaattgaccggttgaaaaactgtggctgtttagg

SEQ ID NO: 81247 - DNA, 201 bp, Homo sapiens
aaagaaagaaccagtaaatggctgtaatacaggaattttgccacaaccagttgggacagtcttgttgcaaataccagaacctcaagaatcgaacagtgacrcaggaataaatttaatagcccttccagcattttcacaggtggaccctgaggtatttgctgcccttcctgctgaacttcagagggagctgaaagcagcgta

SEQ ID NO: 81248 - DNA, 201 bp, Homo sapiens
tgcactttcttgccaccttttcctgcacatctgccgaccagtcctgatactaacaaggctgagtcttcagggaaatggaatggtctacatactcctgtcaktgtgcagtcgagacttaacctgagtatagaggtcccgtcaccttcccagctggatcagtctgttttagaagcacttccacctgatctccgggaacaagta

SEQ ID NO: 81249 - DNA, 201 bp, Homo sapiens
gatgggcagtaccacctaaaaccagaagaagtagatgattttatcagaggccagctagtgaccaatctaccaggagttggacattcaatggaatctaagtkggcatctttgggaattaaaacttgtggagacttgcagtatatgaccatggcaaaactccaaaaagaatttggtcccaaaacaggtcagatgctttatagg

SEQ ID NO: 81250 - DNA, 201 bp, Homo sapiens
aaaagcaaaaccagatgggcagtaccacctaaaaccagaagaagtagatgattttatcagaggccagctagtgaccaatctaccaggagttggacattcartggaatctaagttggcatctttgggaattaaaacttgtggagacttgcagtatatgaccatggcaaaactccaaaaagaatttggtcccaaaacaggtca

SEQ ID NO: 81251 - DNA, 201 bp, Homo sapiens
tgaacttcagagggagctgaaagcagcgtatgatcaaagacaaaggcagggcgagaacagcactcaccagcagtcagccagcgcatctgtgccaaagaatmctttacttcatctaaaggcagcagtgaaagaaaagaaaagaaacaagaagaaaaaaaccattggttcaccaaaaaggattcagagtcctttgaataacaa

SEQ ID NO: 81252 - DNA, 201 bp, Homo sapiens
atttttaatggacacactcctagctctaatggtgccttaaagacacaggattgcttggtgcccatggtcaacagtgttgccagcaggctttctccagcctyttcccaggaggaggataaggctgagaagagcagcactgatttcagagactgcactctgcagcagttgcagcaaagcaccagaaacacagatgctttgcgg

SEQ ID NO: 81253 - DNA, 201 bp, Homo sapiens
aatctttactacttcttccatgcggagaaatctacatattttgaattagaaacaccctcacacccacttgaagatttttttcctgggaacattatgtcccrtagatcagaggtggtgttgtctttttgcttctactggccattgagaaactttgatgataaaaaagaacggtatagatttttcaaacgtatataaaatatt

SEQ ID NO: 81254 - DNA, 201 bp, Homo sapiens
atggcgacaaaaagaaagaaccagtaaatggctgtaatacaggaattttgccacaaccagttgggacagtcttgttgcaaataccagaacctcaagaatcraacagtgacgcaggaataaatttaatagcccttccagcattttcacaggtggaccctgaggtatttgctgcccttcctgctgaacttcagagggagctga

SEQ ID NO: 81255 - DNA, 201 bp, Homo sapiens
gggggaaaaagtaattcgaccagaatggattgtggaaagcatcaaagctggacgactcctctcctacattccatatcagctgtacaccaagcagtccagtrtgcagaaaggtctcagctttaatcctgtatgcagacctgaggatcctctgccaggtccaagcaatatagccaaacagctcaacaacagggtaaatcacat

SEQ ID NO: 81256 - DNA, 201 bp, Homo sapiens
agaagcactaagcccaaatatcaggaaatgtgtgtatgatggaattttctaggacaaaacagatcaagattaaaacagatcaagattaatgtataaaaatstctactaaaacagatcaagattaaaacagatcaagattaatgtataaaaatctctactgttaccaggtgctggcatacaaggtagtgtgatgatagttta

SEQ ID NO: 81257 - DNA, 201 bp, Homo sapiens
ccatgcggagaaatctacatattttgaattagaaacaccctcacacccacttgaagatttttttcctgggaacattatgtcccgtagatcagaggtggtgktgtctttttgcttctactggccattgagaaactttgatgataaaaaagaacggtatagatttttcaaacgtatataaaatatttttatgttatatgttat

SEQ ID NO: 81258 - DNA, 201 bp, Homo sapiens
aaagaaaagaaaagaaacaagaagaaaaaaaccattggttcaccaaaaaggattcagagtcctttgaataacaagctgcttaacagtcctgcaaaaactcygccaggggcctgtggcagtccccagaagttaattgatgggtttctaaaacatgaaggacctcctgcagagaaacccctggaagaactctctgcttctact

SEQ ID NO: 81259 - DNA, 201 bp, Homo sapiens
ccatccaaaccttcagactgcaattttatttcaaacttctattctcattcaagactgcatcacatatcaatgtggaagtgtgaattgactgagtttgtcartaccctacaaagacaaagtaatggtatctttccaggaagggaaaagttaaaaaaaatgaaaacaggcaggtctgcacttgttgtaactgacacaggagat

SEQ ID NO: 81260 - DNA, 201 bp, Homo sapiens
aagaatcctttacttcatctaaaggcagcagtgaaagaaaagaaaagaaacaagaagaaaaaaaccattggttcaccaaaaaggattcagagtcctttgamtaacaagctgcttaacagtcctgcaaaaactctgccaggggcctgtggcagtccccagaagttaattgatgggtttctaaaacatgaaggacctcctgca

SEQ ID NO: 81261 - DNA, 201 bp, Homo sapiens
gtaacactaaaatcaatggtgctcaccactccactgttcaggggccttcaagcacaaaaagcacttcttcagtatctacgtttagcaaggcagcaccttcrgtgccatccaaaccttcagactgcaattttatttcaaacttctattctcattcaagactgcatcacatatcaatgtggaagtgtgaattgactgagtttg

SEQ ID NO: 81262 - DNA, 201 bp, Homo sapiens
ctcaccagcagtcagccagcgcatctgtgccaaagaatcctttacttcatctaaaggcagcagtgaaagaaaagaaaagaaacaagaagaaaaaaaccatyggttcaccaaaaaggattcagagtcctttgaataacaagctgcttaacagtcctgcaaaaactctgccaggggcctgtggcagtccccagaagttaattg

SEQ ID NO: 81263 - DNA, 201 bp, Homo sapiens
aaagacaaaggcagggcgagaacagcactcaccagcagtcagccagcgcatctgtgccaaagaatcctttacttcatctaaaggcagcagtgaaagaaaaraaaagaaacaagaagaaaaaaaccattggttcaccaaaaaggattcagagtcctttgaataacaagctgcttaacagtcctgcaaaaactctgccagggg

SEQ ID NO: 81264 - DNA, 201 bp, Homo sapiens
ggcagggcgagaacagcactcaccagcagtcagccagcgcatctgtgccaaagaatcctttacttcatctaaaggcagcagtgaaagaaaagaaaagaaasaagaagaaaaaaaccattggttcaccaaaaaggattcagagtcctttgaataacaagctgcttaacagtcctgcaaaaactctgccaggggcctgtggca

SEQ ID NO: 81265 - DNA, 201 bp, Homo sapiens
ttgcaaagtgcatgatagtaatgctcggagtttttataattttaaatttcttttaaagcaagtgttttgtacatttcttttcaaaaagtgccaaatttgtyagtattgcatgtaaataattgtgttaattattttactgtagcatagattctatttacaaaatgtttgtttataaagttttatggatttttacagtgaagt

SEQ ID NO: 81266 - DNA, 201 bp, Homo sapiens; identical to SEQ ID NO: 81247

SEQ ID NO: 81267 - DNA, 201 bp, Homo sapiens; identical to SEQ ID NO: 81248

SEQ ID NO: 81268 - DNA, 201 bp, Homo sapiens; identical to SEQ ID NO: 81249

SEQ ID NO: 81269 - DNA, 201 bp, Homo sapiens; identical to SEQ ID NO: 81250

SEQ ID NO: 81270 - DNA, 201 bp, Homo sapiens; identical to SEQ ID NO: 81251

SEQ ID NO: 81271 - DNA, 201 bp, Homo sapiens; identical to SEQ ID NO: 81252

SEQ ID NO: 81272 - DNA, 201 bp, Homo sapiens; identical to SEQ ID NO: 81253

SEQ ID NO: 81273 - DNA, 201 bp, Homo sapiens; identical to SEQ ID NO: 81254

SEQ ID NO: 81274 - DNA, 201 bp, Homo sapiens; identical to SEQ ID NO: 81255

SEQ ID NO: 81275 - DNA, 201 bp, Homo sapiens; identical to SEQ ID NO: 81256

SEQ ID NO: 81276 - DNA, 201 bp, Homo sapiens; identical to SEQ ID NO: 81257

SEQ ID NO: 81277 - DNA, 201 bp, Homo sapiens; identical to SEQ ID NO: 81258

SEQ ID NO: 81278 - DNA, 201 bp, Homo sapiens; identical to SEQ ID NO: 81259

SEQ ID NO: 81279 - DNA, 201 bp, Homo sapiens; identical to SEQ ID NO: 81260

SEQ ID NO: 81280 - DNA, 201 bp, Homo sapiens; identical to SEQ ID NO: 81261

SEQ ID NO: 81281 - DNA, 201 bp, Homo sapiens; identical to SEQ ID NO: 81262

SEQ ID NO: 81282 - DNA, 201 bp, Homo sapiens; identical to SEQ ID NO: 81263

SEQ ID NO: 81283 - DNA, 201 bp, Homo sapiens; identical to SEQ ID NO: 81264

SEQ ID NO: 81284 - DNA, 201 bp, Homo sapiens; identical to SEQ ID NO: 81265

SEQ ID NO: 81285 - DNA, 201 bp, Homo sapiens
ccatccaaaccttcagactgcaattttatttcaaacttctattctcattcaagactgcatcacatatcaatgtggaagtgtgaattgactgagtttgtcartaccctacaaagacaaagtaatggtatctttccaggaagggaaaagttaaaaaaaatgaaaacaggcaggtctgcacttgttgtaactgacacaggtaga

SEQ ID NO: 81286 - DNA, 201 bp, Homo sapiens; identical to SEQ ID NO: 81252

SEQ ID NO: 81287 - DNA, 201 bp, Homo sapiens; identical to SEQ ID NO: 81261

SEQ ID NO: 81288 - DNA, 201 bp, Homo sapiens; identical to SEQ ID NO: 81255

SEQ ID NO: 81289 - DNA, 201 bp, Homo sapiens
tatctttccaggaagggaaaagttaaaaaaaatgaaaacaggcaggtctgcacttgttgtaactgacacaggtagatacttattaaaattgtcttcttaakaaacagtcatgcttgatcattttgctcttatgctattattggtatttctggtcaatatgaagttctcataaaagtctctaagtatgtcaaatcatgtaag

SEQ ID NO: 81290 - DNA, 201 bp, Homo sapiens
gaaaactgggaatgtaatgtggattctgtcagagctcctacagagcacagttgcctttagtttcctttaaagatgtaaaaatattgtataatacagttttktccctacacaattgtatttgccaagcttagtgcattatgatacctttatttatttgttttgggcagtattactatatatatataaacatacagttactgt

SEQ ID NO: 81291 - DNA, 201 bp, Homo sapiens
gtgagctgcatactccatcgctagatcgaaagccaaatagttttgttgcggtgagtgtcaccacccctcctcaggcattctggacgaagcatgcacagacrgagatcattgagggaaccaacaatcctatatttctaagcagtattgccttctttcaagactctcttatcaatcagatgacacaagtcaaactctccgtgt

SEQ ID NO: 81292 - DNA, 201 bp, Homo sapiens
ggatggttcttcctgtcgatgagagcttgacggaggcgttaggaatccgatccaaatacgcttcattgcgaaaggacactttgctgaaatcggtgttcggyggtgccatctgccgcatgtaccggtttccaaccactgatggtaaccatttgcggatcctggagcagatggcagagagcgtgctctccctgcacgtgcccc

SEQ ID NO: 81293 - DNA, 201 bp, Homo sapiens
ttaaaaaatctccttgctttttaaaaataaatattacccacatagttttcagatcttttttgtctggagagcattaaatatctgcactcatcaaagggaayatagcaaatgttgatcatctgtcagcagttttgcatgtgacacctttatatgaattattttcccaatttttgctctatgtaatgggtcaccataaaactg

SEQ ID NO: 81294 - DNA, 201 bp, Homo sapiens
tttcctcatgtgcaaagtgtggacaacaacagtaccttcctcataaggaacgtgcgacgcgcctcagaagtacgtgttcataaatggtagccattgttgtwaccttcccgtctgtgaacatggatcacatcatctctgtgggtaacccagtcctcgttgtatgacttgtcaaaatgcagttccacttgtattaatattgac

SEQ ID NO: 81295 - DNA, 184 bp, Homo sapiens
tgacttgtcaaaatgcagttccacttgtattaatattgaccctgttcatcgtcaccaggactgcatcttgcaccactgtgccgtcttctaggcacacacgrcccgttatctcccttggaaaaattcctctcactggaaatgtacaattaaaggatgattgaaatgtttaactcttggagttttt

SEQ ID NO: 81296 - DNA, 201 bp, Homo sapiens
agaacgtgcatgcccggaagaataagaacgtcgacattctctggcaagctgctgagatctgccgccgccttaatggggtccggttcaccagctgcaagagygctaaggaccgtacagccatgtcggtgacactggagcagtgcctgatcctgcaacacgagcatggcatggccccgcaggtcttcacccaggccctggagt

SEQ ID NO: 81297 - DNA, 201 bp, Homo sapiens
gtaaccatttgcggatcctggagcagatggcagagagcgtgctctccctgcacgtgccccggcagttcgtgaagctcctactagaggaagatgcagccagkgtgtgtgagctggaggagctgggagagctgtccccttgctgggagagcctccggcgccaaattgtcacccagtaccagaccatcatcctcacataccagg

SEQ ID NO: 81298 - DNA, 201 bp, Homo sapiens
gaaagattgataaatcaacgggagataagactttattagaaggtaacacctgcaaggtaccccacatagttggggccactcttttttctgtcccttatgasttacagaacagggagtctgctggagacacaaagccagcagtaaggtccctttagcctgtctcctgttctctgaagctccctgccgaggctccctcacgcc

SEQ ID NO: 81299 - DNA, 201 bp, Homo sapiens
cttgtttgtttagctcctgtagcatcttcagtgcttgtaacatgttcttacggtgccctgtcactgcatcgtttagctggcctggaattccttgtaccacrtctctaccttctgatgtacaactatttatcacctgtacctctcatgtgccctgtttccaagagaaacgagttctgtttaaagagaatttgtatatttgat

SEQ ID NO: 81300 - DNA, 201 bp, Homo sapiens; identical to SEQ ID NO: 81296

SEQ ID NO: 81301 - DNA, 201 bp, Homo sapiens
tacagagggccctcgtttaaagcaagcagtttgaaagcagataaaaagttagaatttgttcccacaaacttgcacatacaaaggatgagagttcaagacgktggaggatcagatcagaactacgacatcgtcaccattggggcgccagcagcacactgccaaggttttaagtcaggaggtctccgcaaaaagctgcacaaa

SEQ ID NO: 81302 - DNA, 201 bp, Homo sapiens; identical to SEQ ID NO: 81291

SEQ ID NO: 81303 - DNA, 201 bp, Homo sapiens; identical to SEQ ID NO: 81292

SEQ ID NO: 81304 - DNA, 201 bp, Homo sapiens; identical to SEQ ID NO: 81290

SEQ ID NO: 81305 - DNA, 201 bp, Homo sapiens; identical to SEQ ID NO: 81291

SEQ ID NO: 81306 - DNA, 201 bp, Homo sapiens; identical to SEQ ID NO: 81292

SEQ ID NO: 81307 - DNA, 201 bp, Homo sapiens; identical to SEQ ID NO: 81293

SEQ ID NO: 81308 - DNA, 201 bp, Homo sapiens; identical to SEQ ID NO: 81294

SEQ ID NO: 81309 - DNA, 184 bp, Homo sapiens; identical to SEQ ID NO: 81295

SEQ ID NO: 81310 - DNA, 201 bp, Homo sapiens; identical to SEQ ID NO: 81296

SEQ ID NO: 81311 - DNA, 201 bp, Homo sapiens; identical to SEQ ID NO: 81297

SEQ ID NO: 81312 - DNA, 201 bp, Homo sapiens; identical to SEQ ID NO: 81298

SEQ ID NO: 81313 - DNA, 201 bp, Homo sapiens; identical to SEQ ID NO: 81290

SEQ ID NO: 81314 - DNA, 201 bp, Homo sapiens; identical to SEQ ID NO: 81291

SEQ ID NO: 81315 - DNA, 201 bp, Homo sapiens; identical to SEQ ID NO: 81292

SEQ ID NO: 81316 - DNA, 201 bp, Homo sapiens; identical to SEQ ID NO: 81293

SEQ ID NO: 81317 - DNA, 201 bp, Homo sapiens; identical to SEQ ID NO: 81294

SEQ ID NO: 81318 - DNA, 184 bp, Homo sapiens; identical to SEQ ID NO: 81295

SEQ ID NO: 81319 - DNA, 201 bp, Homo sapiens; identical to SEQ ID NO: 81296

SEQ ID NO: 81320 - DNA, 201 bp, Homo sapiens
cagcaagaaaggtaacccggacagccacgcctactggatcagaccagaagaccccttctgtgatgtcccctcctcaccatgcccctccaccatgccctccrctgcatgccatcctcatctgaccacacattgcagtccccctcctgaagagtccagcccaggtgaatggagtgaggccctttacccgctgctgaccactct

SEQ ID NO: 81321 - DNA, 201 bp, Homo sapiens; identical to SEQ ID NO: 81297

SEQ ID NO: 81322 - DNA, 201 bp, Homo sapiens; identical to SEQ ID NO: 81298

SEQ ID NO: 81323 - DNA, 201 bp, Homo sapiens; identical to SEQ ID NO: 81299

SEQ ID NO: 81324 - DNA, 201 bp, Homo sapiens; identical to SEQ ID NO: 81296

SEQ ID NO: 81325 - DNA, 201 bp, Homo sapiens; identical to SEQ ID NO: 81297

SEQ ID NO: 81326 - DNA, 201 bp, Homo sapiens; identical to SEQ ID NO: 81291

SEQ ID NO: 81327 - DNA, 201 bp, Homo sapiens; identical to SEQ ID NO: 81292

SEQ ID NO: 81328 - DNA, 201 bp, Homo sapiens; identical to SEQ ID NO: 81290

SEQ ID NO: 81329 - DNA, 201 bp, Homo sapiens; identical to SEQ ID NO: 81291

SEQ ID NO: 81330 - DNA, 201 bp, Homo sapiens; identical to SEQ ID NO: 81292

SEQ ID NO: 81331 - DNA, 201 bp, Homo sapiens; identical to SEQ ID NO: 81293

SEQ ID NO: 81332 - DNA, 201 bp, Homo sapiens; identical to SEQ ID NO: 81294

SEQ ID NO: 81333 - DNA, 184 bp, Homo sapiens; identical to SEQ ID NO: 81295

SEQ ID NO: 81334 - DNA, 201 bp, Homo sapiens; identical to SEQ ID NO: 81296

SEQ ID NO: 81335 - DNA, 201 bp, Homo sapiens; identical to SEQ ID NO: 81301

SEQ ID NO: 81336 - DNA, 201 bp, Homo sapiens; identical to SEQ ID NO: 81298

SEQ ID NO: 81337 - DNA, 201 bp, Homo sapiens; identical to SEQ ID NO: 81299

SEQ ID NO: 81338 - DNA, 201 bp, Homo sapiens; identical to SEQ ID NO: 81296

SEQ ID NO: 81339 - DNA, 201 bp, Homo sapiens
ctgcaagctcctggccaactccatccatgggctgaacgctgcacggcctgactacattgcctccaaggcctctcccacttcgactgaggaggagcaggtgktgcttagaaatgaccaggacaccctcatggcccggtggacagggagaaacagccgatcttccctgcaggtggactggcacgaggaggagtgggagaaagt

SEQ ID NO: 81340 - DNA, 201 bp, Homo sapiens; identical to SEQ ID NO: 81291

SEQ ID NO: 81341 - DNA, 201 bp, Homo sapiens; identical to SEQ ID NO: 81292

SEQ ID NO: 81342 - DNA, 201 bp, Homo sapiens
ccttcagcctgaaattttcctccgaagggaagcagagcagaggaagaactaccaagtgctacactcaaagcctgccgtcgcagtgagcgcgacctccaaaytgaggcatttttgttccggcgaaatccctcccactcaggaaagtccctagaaagagagcgcaggcgcctgggtatcacatgaccacttcccggaagcgca

SEQ ID NO: 81343 - DNA, 201 bp, Homo sapiens
cggatacaccttgcgaagaatgccgcactctccgccactcattccccactcaccggcacccgctaaaccttcagcctgaaattttcctccgaagggaagcrgagcagaggaagaactaccaagtgctacactcaaagcctgccgtcgcagtgagcgcgacctccaaactgaggcatttttgttccggcgaaatccctccca

SEQ ID NO: 81344 - DNA, 201 bp, Homo sapiens
cacatgaccacttcccggaagcgcagcagacccgctcaacttcatcctgggttgaggcggaggagaacttccagaattatggcgaagtccgggctgaggcmggacccgcagagcacagctgcagccactgtgctaaagcgggcagtagaactagattcggagtcgcggtatccgcaggctctggtgtgttaccaagagggg

SEQ ID NO: 81345 - DNA, 201 bp, Homo sapiens
gagaccattcagaatatcatcttttagacacagcccgaggaatcaacaatagtaactctttctttccgtttttttttctttttcttttaaaaaatgtcttyttattttggtttcaggttgaagtctcttccctttctacccagtactcgagcccagggctagaagttgaaactcactagtaatgttaaacaccattttttt

SEQ ID NO: 81346 - DNA, 201 bp, Homo sapiens
aatctgggatgtactgtttgctgccacactgtctcatctagtacctttggagtaggtttaccagagagagcaaggaagcttcaaaacattgataattcaasatttattttgagaagctctgattttgcttcttccccctttctaaaagtttgaggaatatttcaagctctgcaacagggggcaaagattaatctaccttgc

SEQ ID NO: 81347 - DNA, 201 bp, Homo sapiens
tggtggccctggaggagggggcacacagacacagcaacagatgaaccagctgaaaaacaccaacacaatcaataatggcactcagcagcaagcacagagtrtgaccaccactattaaacctggtgatgactggaaaaagactttaaaactccctccaaaggatctaagaatcaaaacttcggatgtgacctccacaaaagg

SEQ ID NO: 81348 - DNA, 201 bp, Homo sapiens
tatggcacttgatgtgtagacatgtcagagccttggccctctttcctctgtggcaaagcgtgtcccatagaaaattgggtgtgtatacttgtataaacttkgtaaataagttttttttctgggttcatatatatatatatatatatacatatatatatatttttttttggatgaaggttgctgggattaaggggattagag

SEQ ID NO: 81349 - DNA, 201 bp, Homo sapiens
gtttcaggttgaagtctcttccctttctacccagtactcgagcccagggctagaagttgaaactcactagtaatgttaaacaccattttttttttcttttkggggaggagttgatatgcaactgcagttcatccgcactgtaaatacatgtatttaaaaaaacaatcccaagtaaaaatttcttctgggctgagtagataa

SEQ ID NO: 81350 - DNA, 201 bp, Homo sapiens
aggggacaaggaaggaaaagaaagaagagaaggggagaaaccctaaaaagagaagaatcttaatgaacacacaagcttgtcaatgatttcaaaattctccmacagctgactctcgtgcatttcaacttctccctgattcctcatccgttttttaagcctgaagagcttattacttatttgtgcgaagtgccttatgctatg

SEQ ID NO: 81351 - DNA, 201 bp, Homo sapiens
ttctggggaaaggggacaaggaaggaaaagaaagaagagaaggggagaaaccctaaaaagagaagaatcttaatgaacacacaagcttgtcaatgatttcmaaattctccaacagctgactctcgtgcatttcaacttctccctgattcctcatccgttttttaagcctgaagagcttattacttatttgtgcgaagtgcc

SEQ ID NO: 81352 - DNA, 201 bp, Homo sapiens
ctgactgaacattagttgcactaactgctggtttttaaaaaatgttttctggggaaaggggacaaggaaggaaaagaaagaagagaaggggagaaaccctwaaaagagaagaatcttaatgaacacacaagcttgtcaatgatttcaaaattctccaacagctgactctcgtgcatttcaacttctccctgattcctcatc

SEQ ID NO: 81353 - DNA, 169 bp, Homo sapiens
ctaatgaggagtggcacttaaactatctgggacaccactactggacacggtcttgtagaggcagctgtccagttttggtgcttgactcttgaataggaatwgttaaatggaaagatgctctgaggactaggtcaaagcctggtcttttttttttttttttttttttttt

SEQ ID NO: 81354 - DNA, 201 bp, Homo sapiens
agagaaaaaggctgaaaagaaggaatataccttttttgttccacttgtttgcactgtgtgctgactgaacattagttgcactaactgctggtttttaaaaratgttttctggggaaaggggacaaggaaggaaaagaaagaagagaaggggagaaaccctaaaaagagaagaatcttaatgaacacacaagcttgtcaatg

SEQ ID NO: 81355 - DNA, 201 bp, Homo sapiens
gatcaaaatcctgcagatgcctcctgatgggacatagccctaactccttaacaactgtagcaagaactgcacggtacaaacccaaaaaagaacaagctcawctatttggaacccaagcctcatattttctgtccagtcaatgttggttactaaatagaaaacctaattaaggaagtaacttttttccagggaggggtggga

SEQ ID NO: 81356 - DNA, 201 bp, Homo sapiens
cccttttaacccagtgtactaggtcaatcaggaggcatctggaaagggggggaaaaaagcaaaaaacaaaattaaaaaaaattgatttccatattttatttttcaaaaccctaaaatattacaaaataagtcccgcatatactttaatgttttaactcttttggacaaaggaatcaattacttgaagttgcttttttgact

SEQ ID NO: 81357 - DNA, 201 bp, Homo sapiens
tcccttttaacccagtgtactaggtcaatcaggaggcatctggaaagggggggaaaaaagcaaaaaacaaaattaaaaaaaattgatttccatattttatttttcaaaaccctaaaatattacaaaataagtcccgcatatactttaatgttttaactcttttggacaaaggaatcaattacttgaagttgcttttttgac

SEQ ID NO: 81358 - DNA, 201 bp, Homo sapiens
ttcccttttaacccagtgtactaggtcaatcaggaggcatctggaaagggggggaaaaaagcaaaaaacaaaattaaaaaaaattgatttccatattttatttttcaaaaccctaaaatattacaaaataagtcccgcatatactttaatgttttaactcttttggacaaaggaatcaattacttgaagttgcttttttga

SEQ ID NO: 81359 - DNA, 201 bp, Homo sapiens
tctgtggcaaagcgtgtcccatagaaaattgggtgtgtatacttgtataaactttgtaaataagttttttttctgggttcatatatatatatatatatatacatatatatatatttttttttggatgaaggttgctgggattaaggggattagagtgattatgggagcagctaaagatgagaggggctcagttttacgcaa

SEQ ID NO: 81360 - DNA, 201 bp, Homo sapiens
ctctgtggcaaagcgtgtcccatagaaaattgggtgtgtatacttgtataaactttgtaaataagttttttttctgggttcatatatatatatatatatatacatatatatatatttttttttggatgaaggttgctgggattaaggggattagagtgattatgggagcagctaaagatgagaggggctcagttttacgca

SEQ ID NO: 81361 - DNA, 201 bp, Homo sapiens
ttttttaagcctgaagagcttattacttatttgtgcgaagtgccttatgctatgagaccattcagaatatcatcttttagacacagcccgaggaatcaacmatagtaactctttctttccgtttttttttctttttcttttaaaaaatgtctttttattttggtttcaggttgaagtctcttccctttctacccagtactc

SEQ ID NO: 81362 - DNA, 201 bp, Homo sapiens
aatataccttttttgttccacttgtttgcactgtgtgctgactgaacattagttgcactaactgctggtttttaaaaaatgttttctggggaaaggggacmaggaaggaaaagaaagaagagaaggggagaaaccctaaaaagagaagaatcttaatgaacacacaagcttgtcaatgatttcaaaattctccaacagctg

SEQ ID NO: 81363 - DNA, 201 bp, Homo sapiens
attcccttttaacccagtgtactaggtcaatcaggaggcatctggaaagggggggaaaaaagcaaaaaacaaaattaaaaaaaattgatttccatattttatttttcaaaaccctaaaatattacaaaataagtcccgcatatactttaatgttttaactcttttggacaaaggaatcaattacttgaagttgcttttttg

SEQ ID NO: 81364 - DNA, 201 bp, Homo sapiens
ggacaaaggaatcaattacttgaagttgcttttttgactctgcctacttctgagcaaactatttgcgactcacccacaattccttggagatcaaaatcctrcagatgcctcctgatgggacatagccctaactccttaacaactgtagcaagaactgcacggtacaaacccaaaaaagaacaagctcatctatttggaacc

SEQ ID NO: 81365 - DNA, 201 bp, Homo sapiens; identical to SEQ ID NO: 81345

SEQ ID NO: 81366 - DNA, 201 bp, Homo sapiens; identical to SEQ ID NO: 81346

SEQ ID NO: 81367 - DNA, 201 bp, Homo sapiens
gcgtctccgggtcgctagttccgcgccttcctgcatggaggcgcgccccgagaggctcggacgcggccccttaggcccggcatcagcctccccggccagcwggagaagtcagattgacgtgagtgaattcagatataactcaagcttgttagagggctttttaaaaataaaaagttgattccgtgcaagagagcaagttac

SEQ ID NO: 81368 - DNA, 201 bp, Homo sapiens; identical to SEQ ID NO: 81347

SEQ ID NO: 81369 - DNA, 201 bp, Homo sapiens; identical to SEQ ID NO: 81348

SEQ ID NO: 81370 - DNA, 201 bp, Homo sapiens; identical to SEQ ID NO: 81349

SEQ ID NO: 81371 - DNA, 201 bp, Homo sapiens; identical to SEQ ID NO: 81350

SEQ ID NO: 81372 - DNA, 201 bp, Homo sapiens; identical to SEQ ID NO: 81351

SEQ ID NO: 81373 - DNA, 201 bp, Homo sapiens; identical to SEQ ID NO: 81352

SEQ ID NO: 81374 - DNA, 169 bp, Homo sapiens; identical to SEQ ID NO: 81353

SEQ ID NO: 81375 - DNA, 201 bp, Homo sapiens; identical to SEQ ID NO: 81354

SEQ ID NO: 81376 - DNA, 201 bp, Homo sapiens; identical to SEQ ID NO: 81355

SEQ ID NO: 81377 - DNA, 201 bp, Homo sapiens; identical to SEQ ID NO: 81356

SEQ ID NO: 81378 - DNA, 201 bp, Homo sapiens; identical to SEQ ID NO: 81357

SEQ ID NO: 81379 - DNA, 201 bp, Homo sapiens; identical to SEQ ID NO: 81358

SEQ ID NO: 81380 - DNA, 201 bp, Homo sapiens; identical to SEQ ID NO: 81359

SEQ ID NO: 81381 - DNA, 201 bp, Homo sapiens; identical to SEQ ID NO: 81360

SEQ ID NO: 81382 - DNA, 201 bp, Homo sapiens; identical to SEQ ID NO: 81361

SEQ ID NO: 81383 - DNA, 201 bp, Homo sapiens; identical to SEQ ID NO: 81362

SEQ ID NO: 81384 - DNA, 201 bp, Homo sapiens; identical to SEQ ID NO: 81363

SEQ ID NO: 81385 - DNA, 201 bp, Homo sapiens; identical to SEQ ID NO: 81364

SEQ ID NO: 81386 - DNA, 201 bp, Homo sapiens
tgatgtggatgagatctgtccgatttctcatcatgagatgcaagcacacatattccatctggagactctgtccacctccacagaagccaggagaaaaaagygtttccaaggacggaagactgttaatttgtccattccactaagtgaaacatcttccaccaaactgtcccacattgatgaatacatttcctcatctccaac

SEQ ID NO: 81387 - DNA, 201 bp, Homo sapiens
tacagtacttgtttttcttagcccaaattcccatcgccatgtcaccactaagtaacaatagcctatttctagagtatgccaaaaatccttttttggatttycttcagaaagggctaatgatctcactgtctacagatgacccaatgcaattccactttaccaaggagcccctaatggaagaatatgctattgctgcacaag

SEQ ID NO: 81388 - DNA, 201 bp, Homo sapiens
atctggacaccttcttagacgatatgaattttttacttgctttaattgctcaaggacctgttaagacctatacccaccggcgcctgaagttcctctcctcsaagttccaggtccatcagatgcttaacgagatggacgagttaaaggagctgaaaaacaacccccaccgagatttttataactgcaggaaggtggacaccc

SEQ ID NO: 81389 - DNA, 201 bp, Homo sapiens
cctgactgttgattctctggatgttcatgctggacgccagaccttccagcgttttgataagttcaatgacaaatataatcctgtaggagcaagtgagctaygggacctctacttgaagacagacaattacattaatggggaatattttgccactatcatcaaggaggtaggtgcggacctggtggaggccaagtaccagca

SEQ ID NO: 81390 - DNA, 201 bp, Homo sapiens
acggaagactgttaatttgtccattccactaagtgaaacatcttccaccaaactgtcccacattgatgaatacatttcctcatctccaacctaccagaccrtgcctgattttcagagagtgcagattactggtgactatgcctctggggttacagttgaagattttgaaattgtttgcaaaggtctgtatcgggcactatg

SEQ ID NO: 81391 - DNA, 201 bp, Homo sapiens
gatgtggatgagatctgtccgatttctcatcatgagatgcaagcacacatattccatctggagactctgtccacctccacagaagccaggagaaaaaagcrtttccaaggacggaagactgttaatttgtccattccactaagtgaaacatcttccaccaaactgtcccacattgatgaatacatttcctcatctccaacc

SEQ ID NO: 81392 - DNA, 201 bp, Homo sapiens
ggacctgttaagacctatacccaccggcgcctgaagttcctctcctccaagttccaggtccatcagatgcttaacgagatggacgagttaaaggagctgawaaacaacccccaccgagatttttataactgcaggaaggtggacacccatatccatgcagccgcttgcatgaaccagaaacatctgctgcgttttattaag

SEQ ID NO: 81393 - DNA, 201 bp, Homo sapiens
tgcagaagtcgtttcagaggttccctaaaaccccttccaaatacttgcggaacattgatggtgaggcttgggtagcaaatgagagcttctatccagtcttyactcctcctgtgaagaagggagaggaccccttccgaacagacaaccttcctgaaaacctgggctatcacctcaaaatgaaggacggtgtagtttacgtct

SEQ ID NO: 81394 - DNA, 201 bp, Homo sapiens
actatgcctctggggttacagttgaagattttgaaattgtttgcaaaggtctgtatcgggcactatgcatacgtgagaaatacatgcagaagtcgtttcakaggttccctaaaaccccttccaaatacttgcggaacattgatggtgaggcttgggtagcaaatgagagcttctatccagtctttactcctcctgtgaaga

SEQ ID NO: 81395 - DNA, 201 bp, Homo sapiens
tcatgacagcattcatgatagcagatgatatctctcatggcctaaatttaaaaaagagtcccgtgctacagtacttgtttttcttagcccaaattcccatygccatgtcaccactaagtaacaatagcctatttctagagtatgccaaaaatccttttttggatttccttcagaaagggctaatgatctcactgtctacag

SEQ ID NO: 81396 - DNA, 201 bp, Homo sapiens
ccatgtcaccactaagtaacaatagcctatttctagagtatgccaaaaatccttttttggatttccttcagaaagggctaatgatctcactgtctacagaygacccaatgcaattccactttaccaaggagcccctaatggaagaatatgctattgctgcacaagtcttcaagctgagcacctgtgatatgtgcgaagtgg

SEQ ID NO: 81397 - DNA, 201 bp, Homo sapiens
ttgaagacagacaattacattaatggggaatattttgccactatcatcaaggaggtaggtgcggacctggtggaggccaagtaccagcatgctgagccccrcctgtccatctatggccgcagtcctgatgagtggagcaaactctcctcctggttcgtctgcaatcgcatccactgccccaacatgacatggatgatccag

SEQ ID NO: 81398 - DNA, 201 bp, Homo sapiens
gatgcaatgcgcaactttgctgaaaaagtgtttgcctctgaagtcaaagatgaaggaggtcgtcaggagatttccccctttgatgtggatgagatctgtcygatttctcatcatgagatgcaagcacacatattccatctggagactctgtccacctccacagaagccaggagaaaaaagcgtttccaaggacggaagact

SEQ ID NO: 81399 - DNA, 201 bp, Homo sapiens
tgctcttcattttggcctgtacttctccctcagggacgtagaacaatggaatgtcagtcagtctctgtagttaaaactttttctttaaaattcaattaagktacttctccctcagggacgtagaacaatggaatgtcagtcagtctctgtagttaaaactttttctttaaaattcaattaagttacaccagaatttacagg

SEQ ID NO: 81400 - DNA, 201 bp, Homo sapiens
cccgctcacctggacaagtcaaccctcgcgtgcattggtctcatccagcccctaggttccattttcccaactgctgaacttcaagctcgttgggtgacaasagttttcaaaggcttgtgtagcctgccctcagagagaactatgatgatggacattatcaaaaggaatgaaaaaagaattgacctgtttggagaaagccag

SEQ ID NO: 81401 - DNA, 199 bp, Homo sapiens
ttcagctggaagaatgctggaggaatacggaactcctcccatttctcacagccacctccaactcttaaaaacgcttccaactgcctcccagcacacaamcaagggagaaaactattctgtcaaagagacggtgccaaaaggcaaaaacaaaggagctgatggcaaagaaggtagctgtgattggagctggggtcagtgg

SEQ ID NO: 81402 - DNA, 172 bp, Homo sapiens
ttcagctggaagaatgctggaggaatacggaactcctcccatttctcacagccacctccaactcttaaaaaygcttccaactgcctcccagcacacaaccaagggagaaaactattctgtcaaagagacggtgccaaaaggcaaaaacaaaggagctgatggcaaagaaggt

SEQ ID NO: 81403 - DNA, 201 bp, Homo sapiens
gtatggagaggttcaaaggccaatatttccatagccgccaatacaagcatccagatggatttgagggaaaacgcatcctggtgattggaatgggaaactcrggctcagatattgctgttgagctgagtaagaatgctgctcaggtttttatcagcaccaggcatggcacctgggtcatgagccgtatctctgaagatggct

SEQ ID NO: 81404 - DNA, 201 bp, Homo sapiens
tcactcagagcaacggcaaggagcagagtgctgtctttgacgcagttatggtttgcagtggccaccacattctacctcatatcccactgaagtcatttccmggtatggagaggttcaaaggccaatatttccatagccgccaatacaagcatccagatggatttgagggaaaacgcatcctggtgattggaatgggaaact

SEQ ID NO: 81405 - DNA, 201 bp, Homo sapiens
tggctgtgagactctatttcggaccctgcaactcctattagtatcgcctggttgggcctgggcaatgggaaggagccagaaatgccatcttcacccagaarcaaagaatactgaagccactcaagactcgggccctgaaggattcatctaatttctcagtttcttttctgttgaaaatcctgggccttcttgctgttgttg

SEQ ID NO: 81406 - DNA, 201 bp, Homo sapiens
gcatggcacctgggtcatgagccgtatctctgaagatggctatccttgggactcagtgttccacacccggtttcgttctatgctccgcaatgtactgccaygaacagctgtaaaatggatgatagaacaacagatgaatcggtggttcaaccatgaaaattatggccttgagcctcaaaacaaatacattatgaaggaacc

SEQ ID NO: 81407 - DNA, 201 bp, Homo sapiens
ttcattatttataaagaatttactaacagtttatcttatttatacccatacatctgctactttgggaggccctttacatagaaaacagcattctttttgcyaaatatgaccaaattacttttatttataatttttgatttatatttcagctagatctaaaaagcatctgaaggaatttacaatgaaagatacctatgcaat

SEQ ID NO: 81408 - DNA, 201 bp, Homo sapiens
gaagatggccgagcaagtatctatcaatctgtcgttaccaacaccagcaaagaaatgtcctgtttcagtgactttccaatgcctgaagattttccaaactycctgcataattctaaacttctggaatatttcaggatttttgctaaaaaatttgatctgctaaaatatattcagttccagacaactgtccttagtgtgaga

SEQ ID NO: 81409 - DNA, 201 bp, Homo sapiens
acctatgcaataacatttaggataatctttgacattttggaaaaataagaattgaggaaaaaaagtgtatctttcaagtagatgcaaagcattataatgaytgacacttgtatctaactccagtcttacagataactaaggcaaaaagctaaataaacaatatgtaacctctaacatttggtaaaaggaagtatactggtc

SEQ ID NO: 81410 - DNA, 201 bp, Homo sapiens
ggtatggagaggttcaaaggccaatatttccatagccgccaatacaagcatccagatggatttgagggaaaacgcatcctggtgattggaatgggaaactyaggctcagatattgctgttgagctgagtaagaatgctgctcaggtttttatcagcaccaggcatggcacctgggtcatgagccgtatctctgaagatggc

SEQ ID NO: 81411 - DNA, 201 bp, Homo sapiens
agcctgccctcagagagaactatgatgatggacattatcaaaaggaatgaaaaaagaattgacctgtttggagaaagccagagccagacgttgcagaccamttatgttgactacttggacgagctcgccttagagataggtgcgaagccagatttctgctctctcttgttcaaagatcctaaactggctgtgagactctat

SEQ ID NO: 81412 - DNA, 201 bp, Homo sapiens
gctcgccttagagataggtgcgaagccagatttctgctctctcttgttcaaagatcctaaactggctgtgagactctatttcggaccctgcaactcctatyagtatcgcctggttgggcctgggcaatgggaaggagccagaaatgccatcttcacccagaaacaaagaatactgaagccactcaagactcgggccctgaa

SEQ ID NO: 81413 - DNA, 201 bp, Homo sapiens
caactgctgaacttcaagctcgttgggtgacaagagttttcaaaggcttgtgtagcctgccctcagagagaactatgatgatggacattatcaaaaggaakgaaaaaagaattgacctgtttggagaaagccagagccagacgttgcagaccaattatgttgactacttggacgagctcgccttagagataggtgcgaagc

SEQ ID NO: 81414 - DNA, 196 bp, Homo sapiens
tcccattatctcaggagtgtgttggttataaaagcaagtttggctccctcttttcctcacacactctttttcccttctgccttcacctttgccgtgggtgracacagcaagaaggccctcatcagatgctggccccttggtcttgaatttcctagcctctacaactaagccaaataaatttctgtttattataaat

SEQ ID NO: 81415 - DNA, 201 bp, Homo sapiens
gaacctgtactaaatgatgatgtcccaagtcgtctactctgtggagccatcaaggtgaaatctacagtgaaagagctcacagaaacttctgccatctttgrggatggaacagtggaggagaacattgatgtcatcatttttgcaacaggatatagtttctcttttcccttccttgaagattcactcgttaaagtagagaat

SEQ ID NO: 81416 - DNA, 201 bp, Homo sapiens
aagaaggtagctgtgattggagctggggtcagtggcctaatttctctgaagtgctgtgtggatgagggacttgagcccacttgctttgagagaactgaagrtattggaggagtgtggaggttcaaagagaatgtggaagatggccgagcaagtatctatcaatctgtcgttaccaacaccagcaaagaaatgtcctgtttc

SEQ ID NO: 81417 - DNA, 201 bp, Homo sapiens
caccacattctacctcatatcccactgaagtcatttccaggtatggagaggttcaaaggccaatatttccatagccgccaatacaagcatccagatggatytgagggaaaacgcatcctggtgattggaatgggaaactcaggctcagatattgctgttgagctgagtaagaatgctgctcaggtttttatcagcaccagg

SEQ ID NO: 81418 - DNA, 201 bp, Homo sapiens
cttttcccttccttgaagattcactcgttaaagtagagaataatatggtctcactgtataaatacatattccccgctcacctggacaagtcaaccctcgcrtgcattggtctcatccagcccctaggttccattttcccaactgctgaacttcaagctcgttgggtgacaagagttttcaaaggcttgtgtagcctgccct

SEQ ID NO: 81419 - DNA, 201 bp, Homo sapiens
ggcttaataccagaagacaggactcagctgaaagagtttgtgctaaatgatgagctcccaggacgcatcatcactgggaaagtgttcatcaggccaagcayaaaagaggtaaaggaaaactctgtcatatttaacaatacttcaaaggaagagcctattgacatcattgtctttgccactggatacacatttgctttcccc

SEQ ID NO: 81420 - DNA, 201 bp, Homo sapiens
gagggggatgggtgatcagccgaatctttgactcgggctacccatgggacatggtgttcatgacacgctttcagaacatgttgagaaattccctcccaacyccaattgtgacttggttgatggagcgaaagataaacaactggctcaatcatgcaaattacggcttaataccagaagacaggactcagctgaaagagtttg

SEQ ID NO: 81421 - DNA, 201 bp, Homo sapiens
gagcaaatcgcctaatcttccaaattctttttcctggcttgttagagcagccaagggtggggtggagcttgtgaataaaaagcctgcttcatcttcctcaygcaggagaacatggccaagcgagttgccattgtgggagctggggtcagcggcctggcctccatcaagtgctgtctggaagaaggactggagcccacctgc

SEQ ID NO: 81422 - DNA, 201 bp, Homo sapiens
cactgggaaagtgttcatcaggccaagcataaaagaggtaaaggaaaactctgtcatatttaacaatacttcaaaggaagagcctattgacatcattgtcyttgccactggatacacatttgctttccccttccttgatgagtctgtagtgaaagttgaagatggccaggcctcactgtacaagtatatcttccctgcaca

SEQ ID NO: 81423 - DNA, 201 bp, Homo sapiens
catacatagatgaactcctgacctatatcaatgcaaaacccaacctgttctctatgctcctaacggatccacatctggctctgaccgtcttctttggcccrtgctcaccataccagttccgcttgactggcccaggaaaatgggaaggagccagaaatgccatcatgacccagtgggaccgaacattcaaggtcatcaaag

SEQ ID NO: 81424 - DNA, 201 bp, Homo sapiens
gagtctgtagtgaaagttgaagatggccaggcctcactgtacaagtatatcttccctgcacatctgcaaaagccaaccctggccattattggcctcatcaracccttgggctccatgatacctacaggagaaacacaagctcggtgggctgttcgagtcctgaaaggtttggcttgtgctactgcaaggctttacaatcag

SEQ ID NO: 81425 - DNA, 201 bp, Homo sapiens
aaggccaccctctcgcttccctggctggccccagggctaccactggtattcctgagcctctcccagctccacttctaatgctagagaatgataactaagayttctgtgcatttgaaggttgttggaaagttacaggttcattttagaaagaaagctgttcttgacagcactctgagccatcatacctctttcccatataaa

SEQ ID NO: 81426 - DNA, 201 bp, Homo sapiens
tcctaaatggaagatgcacagagtagatttacaatgctccaattcctctcttacagcaatattgccttcacagttataaactgtattcaaatagtaaaggycaccctctcgcttccctggctggccccagggctaccactggtattcctgagcctctcccagctccacttctaatgctagagaatgataactaagacttct

SEQ ID NO: 81427 - DNA, 201 bp, Homo sapiens
cggcttaataccagaagacaggactcagctgaaagagtttgtgctaaatgatgagctcccaggacgcatcatcactgggaaagtgttcatcaggccaagcrtaaaagaggtaaaggaaaactctgtcatatttaacaatacttcaaaggaagagcctattgacatcattgtctttgccactggatacacatttgctttccc

SEQ ID NO: 81428 - DNA, 201 bp, Homo sapiens; identical to SEQ ID NO: 81419

SEQ ID NO: 81429 - DNA, 201 bp, Homo sapiens; identical to SEQ ID NO: 81420

SEQ ID NO: 81430 - DNA, 201 bp, Homo sapiens; identical to SEQ ID NO: 81423

SEQ ID NO: 81431 - DNA, 201 bp, Homo sapiens; identical to SEQ ID NO: 81422

SEQ ID NO: 81432 - DNA, 201 bp, Homo sapiens
gagtctgtagtgaaagttgaagatggccaggcctcactgtacaagtatatcttccctgcacatctgcaaaagccaaccctggccattattggcctcatcaracccttgggctccatgatacctacaggagaaacacaagctcggtgggctgttcgagtcctgaaaggtgtaaataagttaccaccaccaagtgtcatgata

SEQ ID NO: 81433 - DNA, 201 bp, Homo sapiens; identical to SEQ ID NO: 81425

SEQ ID NO: 81434 - DNA, 201 bp, Homo sapiens
agccaaccctggccattattggcctcatcaaacccttgggctccatgatacctacaggagaaacacaagctcggtgggctgttcgagtcctgaaaggtgtraataagttaccaccaccaagtgtcatgatagaggaaattaatgcaaggaaagaaaacaagcccagttggtttggcttgtgctactgcaaggctttacaat

SEQ ID NO: 81435 - DNA, 201 bp, Homo sapiens; identical to SEQ ID NO: 81426

SEQ ID NO: 81436 - DNA, 201 bp, Homo sapiens; identical to SEQ ID NO: 81427

SEQ ID NO: 81437 - DNA, 201 bp, Homo sapiens; identical to SEQ ID NO: 81419

SEQ ID NO: 81438 - DNA, 201 bp, Homo sapiens; identical to SEQ ID NO: 81420

SEQ ID NO: 81439 - DNA, 201 bp, Homo sapiens; identical to SEQ ID NO: 81423

SEQ ID NO: 81440 - DNA, 201 bp, Homo sapiens; identical to SEQ ID NO: 81422

SEQ ID NO: 81441 - DNA, 201 bp, Homo sapiens; identical to SEQ ID NO: 81432

SEQ ID NO: 81442 - DNA, 201 bp, Homo sapiens; identical to SEQ ID NO: 81425

SEQ ID NO: 81443 - DNA, 201 bp, Homo sapiens; identical to SEQ ID NO: 81434

SEQ ID NO: 81444 - DNA, 201 bp, Homo sapiens; identical to SEQ ID NO: 81426

SEQ ID NO: 81445 - DNA, 201 bp, Homo sapiens; identical to SEQ ID NO: 81427

SEQ ID NO: 81446 - DNA, 201 bp, Homo sapiens; identical to SEQ ID NO: 81419

SEQ ID NO: 81447 - DNA, 201 bp, Homo sapiens; identical to SEQ ID NO: 81420

SEQ ID NO: 81448 - DNA, 201 bp, Homo sapiens; identical to SEQ ID NO: 81421

SEQ ID NO: 81449 - DNA, 201 bp, Homo sapiens; identical to SEQ ID NO: 81423

SEQ ID NO: 81450 - DNA, 201 bp, Homo sapiens; identical to SEQ ID NO: 81422

SEQ ID NO: 81451 - DNA, 201 bp, Homo sapiens; identical to SEQ ID NO: 81432

SEQ ID NO: 81452 - DNA, 201 bp, Homo sapiens; identical to SEQ ID NO: 81425

SEQ ID NO: 81453 - DNA, 201 bp, Homo sapiens; identical to SEQ ID NO: 81434

SEQ ID NO: 81454 - DNA, 201 bp, Homo sapiens; identical to SEQ ID NO: 81426

SEQ ID NO: 81455 - DNA, 201 bp, Homo sapiens; identical to SEQ ID NO: 81427

SEQ ID NO: 81456 - DNA, 201 bp, Homo sapiens
cctcctactcctcaactcaaaggaaaacacagagcataccatggccaagaaagttgcagtgattggagctggtgtgagtggcctctcctccatcaaatgcygtgtggatgaggacctggagcccacctgctttgagagaagtgatgacattgggggattatggaagtttactgaatcttccaaagatgggatgaccagggt

SEQ ID NO: 81457 - DNA, 201 bp, Homo sapiens
tgtatcctctgtggggcaatcactatgaaaaccagcgtgattgaatttacagaaacctctgctgtctttgaagatgggacagtggaagaaaacattgatgytgtgatcttcactacaggatatacattttcttttccattttttgaagaacctcttaaaagcctctgtacaaagaagatatttctatacaagcaagtcttt

SEQ ID NO: 81458 - DNA, 201 bp, Homo sapiens
caaagggaaaaaagcaaaattcattgtgaatgatgagctgccaaactgtatcctctgtggggcaatcactatgaaaaccagcgtgattgaatttacagaawcctctgctgtctttgaagatgggacagtggaagaaaacattgatgttgtgatcttcactacaggatatacattttcttttccattttttgaagaacctct

SEQ ID NO: 81459 - DNA, 201 bp, Homo sapiens
cttcacgttttctaaactggattcaagaaaggaagttgaataagagatttaatcatgaggattatggattaagtattaccaaagggaaaaaagcaaaattyattgtgaatgatgagctgccaaactgtatcctctgtggggcaatcactatgaaaaccagcgtgattgaatttacagaaacctctgctgtctttgaagatg

SEQ ID NO: 81460 - DNA, 201 bp, Homo sapiens
agacgaatggcttttgttttaaactgagggcacttttacaaaagtcatctttccatttatttttctttcagaaaaaagaatttgggttttgagcttttttaaaaaaaaaagacaaacactttccttgactttgagaaataatttaagtcaaagaatctgctctatgctaaccaagagatagagcacagcaaagatctgcca

SEQ ID NO: 81461 - DNA, 201 bp, Homo sapiens; identical to SEQ ID NO: 81456

SEQ ID NO: 81462 - DNA, 201 bp, Homo sapiens
acttttcttgaaattggtgagagataaactacaggacagaatgtccccttacctagtaagtctttggcgaggatgaacctgattgttacaagggttacacmaagtcatgctaattctatctccaagtatcttgtgcatccctcctctgctctccatcataactgctattagccaaattcaggcccagtcatctcctatctg

SEQ ID NO: 81463 - DNA, 201 bp, Homo sapiens; identical to SEQ ID NO: 81457

SEQ ID NO: 81464 - DNA, 201 bp, Homo sapiens; identical to SEQ ID NO: 81458

SEQ ID NO: 81465 - DNA, 201 bp, Homo sapiens; identical to SEQ ID NO: 81459

SEQ ID NO: 81466 - DNA, 201 bp, Homo sapiens; identical to SEQ ID NO: 81460

SEQ ID NO: 81467 - DNA, 201 bp, Homo sapiens
tgtagctcccataattcccacatgccgtgggaggtaggtaattgaatcatgggggcaggtcttctcccatactgttctcatggtagtgaataagtctcackatatctgatggttttataaatgacagttcccctgcacaagctctctcgtgtctaccaccatgtaagacgtgtctttgctccttcttcaccttccaccatg

SEQ ID NO: 81468 - DNA, 201 bp, Homo sapiens
tgaggggtggcctttgagaagctgctgttaacgtatttgccagttacgaagttccactgaaaattttcctattaattcttaagtactctgcataagggggraaagcttccagaaagcagccatgaaccaggctgtccaggaatggcagctgtatccaaccacaaacaacaaaggctaccctttgaccaaatgtctttctct

SEQ ID NO: 81469 - DNA, 201 bp, Homo sapiens
tgtcctggctaaatcagaactcgaatggccttgttttcttgctctggggctcttatgctcagaagaagggcagtgccattgataggaagcggcaccatgtrctacagacggctcatccctcccctttgtcagtgtatagagggttctttggatgtagacacttttcaaagaccaatgagctgctgcagaagtctggcaaga

SEQ ID NO: 81470 - DNA, 201 bp, Homo sapiens; identical to SEQ ID NO: 81468

SEQ ID NO: 81471 - DNA, 201 bp, Homo sapiens; identical to SEQ ID NO: 81469

SEQ ID NO: 81472 - DNA, 186 bp, Homo sapiens
acgtggggacgcggtggggcgggtctggcgggggcggggcacctctgtgcagggttcccagtcaccgcgacgctcctcgggaagcyatagggcgcctcccagcccgtctccccgctccagtttagaacctaattcccaattcccggaccgggcccagccctgggctcttactgtccgcttttgctg

SEQ ID NO: 81473 - DNA, 201 bp, Homo sapiens; identical to SEQ ID NO: 81468

SEQ ID NO: 81474 - DNA, 201 bp, Homo sapiens; identical to SEQ ID NO: 81469

SEQ ID NO: 81475 - DNA, 201 bp, Homo sapiens; identical to SEQ ID NO: 81468

SEQ ID NO: 81476 - DNA, 201 bp, Homo sapiens; identical to SEQ ID NO: 81469

SEQ ID NO: 81477 - DNA, 201 bp, Homo sapiens; identical to SEQ ID NO: 81468

SEQ ID NO: 81478 - DNA, 201 bp, Homo sapiens; identical to SEQ ID NO: 81469

SEQ ID NO: 81479 - DNA, 201 bp, Homo sapiens
tttgtcattcctctcctagccctcctgaggggtatcctcctaaagacctccaaagtttttatggaagggtaaatactggtaccttcccccagctttccatytgaggaccagaaaagttgtgtctcccttagatgagatctagacgcccccaaatccttgagatgtgggtatagctcagggtaagctgctctgaggtaaagg

SEQ ID NO: 81480 - DNA, 201 bp, Homo sapiens
cagctttccatctgaggaccagaaaagttgtgtctcccttagatgagatctagacgcccccaaatccttgagatgtgggtatagctcagggtaagctgctytgaggtaaaggtccatgaaccctgccccactcctgtcagcccctcatcagccttttcagcaggttccagtgcctgacttgggataggactgagtggtagg

SEQ ID NO: 81481 - DNA, 201 bp, Homo sapiens
agatctagacgcccccaaatccttgagatgtgggtatagctcagggtaagctgctctgaggtaaaggtccatgaaccctgccccactcctgtcagcccctyatcagccttttcagcaggttccagtgcctgacttgggataggactgagtggtaggaggagggggagtggaggggcatagcctttccctaattctgcctta

SEQ ID NO: 81482 - DNA, 201 bp, Homo sapiens
gtctatgtcaggcaggaaaagacactcgtgatgaacaagcacgtggggcatctacttcgaaccaaagccatcgagcatgcagatggtggtgtggcagcggkagtggcagtcctggacaacccataccctgtgtgagggcacaaccaggccacgggaccttctatcctctgtatttgtcattcctctcctagccctcctgag

SEQ ID NO: 81483 - DNA, 201 bp, Homo sapiens
cattgccacccagctggctgggactaagaaggtgcagcaggagctaagcaggccgggcatgctggagatgttgctccctggccagcctgaggctgtggccygcctccgcgccacctttgctggcctctactcactggatgtgggtgaagaaggggaccaggccatcgccgaggcccttgctgcccctagccggtttgtgct

SEQ ID NO: 81484 - DNA, 201 bp, Homo sapiens
ctggcctcccggaccccagctgtgcaccgacatgttctcagtgtcctgagtaagaccaaagaagctggcaagatcctctctaataatcccagcaagggacyggccctgggaattgccaaagcctgggagctctacggctcacccaatgctctggtgctactgattgctcaagagaaggaaagaaacatatttgaccagcgt

SEQ ID NO: 81485 - DNA, 201 bp, Homo sapiens
gaagcacgtctactgctggagaggtcacatgctgccaagtgcccagacattgccacccagctggctgggactaagaaggtgcagcaggagctaagcaggcygggcatgctggagatgttgctccctggccagcctgaggctgtggcccgcctccgcgccacctttgctggcctctactcactggatgtgggtgaagaaggg

SEQ ID NO: 81486 - DNA, 201 bp, Homo sapiens
gaggaaaggcgaactagtgttgggatggccaccaactgggggagcctcttgcaggataaacagcagctagaggagctggcacggcaggccgtggaccgggmcctggctgagggagtattgctgaggacctcacaggagcccacttcctcggaggtggtgagctatgccccattcacgctcttcccctcactggtccccagt

SEQ ID NO: 81487 - DNA, 201 bp, Homo sapiens
cgtgccatagagaatgagctactggccaggaacatccatgtgatccgacgaacatttgaagatatctctgaaaaggggtctctggaccaagaccgaaggckgtttgtggatggccaggaaattgctgtggtttacttccgggatggctacatgcctcgtcagtacagtctacagaattgggaagcacgtctactgctggag

SEQ ID NO: 81488 - DNA, 201 bp, Homo sapiens
aaaagacactcgtgatgaacaagcacgtggggcatctacttcgaaccaaagccatcgagcatgcagatggtggtgtggcagcgggagtggcagtcctggamaacccataccctgtgtgagggcacaaccaggccacgggaccttctatcctctgtatttgtcattcctctcctagccctcctgaggggtatcctcctaaag

SEQ ID NO: 81489 - DNA, 201 bp, Homo sapiens
tgccaagtgcccagacattgccacccagctggctgggactaagaaggtgcagcaggagctaagcaggccgggcatgctggagatgttgctccctggccagyctgaggctgtggcccgcctccgcgccacctttgctggcctctactcactggatgtgggtgaagaaggggaccaggccatcgccgaggcccttgctgcccc

SEQ ID NO: 81490 - DNA, 201 bp, Homo sapiens
ccaagaccgaaggctgtttgtggatggccaggaaattgctgtggtttacttccgggatggctacatgcctcgtcagtacagtctacagaattgggaagcaygtctactgctggagaggtcacatgctgccaagtgcccagacattgccacccagctggctgggactaagaaggtgcagcaggagctaagcaggccgggcat

SEQ ID NO: 81491 - DNA, 201 bp, Homo sapiens
tgtatttgtcattcctctcctagccctcctgaggggtatcctcctaaagacctccaaagtttttatggaagggtaaatactggtaccttcccccagtgctytgaggtaaaggtccatgaaccctgccccactcctgtcagcccctcatcagccttttcagcaggttccagtgcctgacttgggataggactgagtggtagg

SEQ ID NO: 81492 - DNA, 201 bp, Homo sapiens
aaagacctccaaagtttttatggaagggtaaatactggtaccttcccccagtgctctgaggtaaaggtccatgaaccctgccccactcctgtcagcccctyatcagccttttcagcaggttccagtgcctgacttgggataggactgagtggtaggaggagggggagtggaggggcatagcctttccctaattctgcctta

SEQ ID NO: 81493 - DNA, 201 bp, Homo sapiens; identical to SEQ ID NO: 81482

SEQ ID NO: 81494 - DNA, 201 bp, Homo sapiens; identical to SEQ ID NO: 81483

SEQ ID NO: 81495 - DNA, 201 bp, Homo sapiens; identical to SEQ ID NO: 81484

SEQ ID NO: 81496 - DNA, 201 bp, Homo sapiens; identical to SEQ ID NO: 81485

SEQ ID NO: 81497 - DNA, 201 bp, Homo sapiens
cgactcagcgccaaaggtgttgggatggccaccaactgggggagcctcttgcaggataaacagcagctagaggagctggcacggcaggccgtggaccgggmcctggctgagggagtattgctgaggacctcacaggagcccacttcctcggaggtggtgagctatgccccattcacgctcttcccctcactggtccccagt

SEQ ID NO: 81498 - DNA, 201 bp, Homo sapiens; identical to SEQ ID NO: 81487

SEQ ID NO: 81499 - DNA, 201 bp, Homo sapiens; identical to SEQ ID NO: 81488

SEQ ID NO: 81500 - DNA, 201 bp, Homo sapiens; identical to SEQ ID NO: 81489

SEQ ID NO: 81501 - DNA, 201 bp, Homo sapiens; identical to SEQ ID NO: 81490

SEQ ID NO: 81502 - DNA, 201 bp, Homo sapiens
ccgcttctgctgtcctcggcggcccggccggccggtggctgcaccacgctgggtcccgcgctggatccagcggcctgctgaggaaccgggggccgggcggkagcgcggaggcgagccggtcgctgagcgtgtcggcgcgggcccggagcagctcagaagataaaataacagtccactttataaaccgtgatggtgaaacat

SEQ ID NO: 81503 - DNA, 201 bp, Homo sapiens
ttcaccttgcataactactgaattttgtcattcttgaaagtatgcaatttttattttggttatattacaaaaatgtcaatcaaatattaaaaaatagttartgtgatagaaaaaccttacatatttttttcttatgtttgtttagcgactttagcaaaatgttttcatataatctcatctgtttacctagaagataggtta

SEQ ID NO: 81504 - DNA, 201 bp, Homo sapiens
tcgccgcggccctcgggcgtctgcgccgcagctgccgcccccgcctctttggagtctctcgcggcctcaaagcgcggcctgcgtcgcttccggcagttccmgaccgcgggcgatggctgccgctgggggcgcccggctgctgcgcgccgcttctgctgtcctcggcggcccggccggccggtggctgcaccacgctgggtc

SEQ ID NO: 81505 - DNA, 201 bp, Homo sapiens
gataggttaaggaaatatattattattcctgtttgatgtgggtgaaggcagagatctaacctggcttgtttagggccataccactaattagaaaatctgtrctagaacctgtgtcttattcctataagctatgtgttcagactgaaactggagaaattatgactattttatttatagtagtagttaaatctgaatgtgtat

SEQ ID NO: 81506 - DNA, 201 bp, Homo sapiens
gaacctgtgtcttattcctataagctatgtgttcagactgaaactggagaaattatgactattttatttatagtagtagttaaatctgaatgtgtatggayaaaaatatttaattgctcagtaaactgcttaacttcaaagatagttattgaccttataaataaatatttcaaaattttgattcggaagactaagtctgga

SEQ ID NO: 81507 - DNA, 201 bp, Homo sapiens
tataagctatgtgttcagactgaaactggagaaattatgactattttatttatagtagtagttaaatctgaatgtgtatggacaaaaatatttaattgctsagtaaactgcttaacttcaaagatagttattgaccttataaataaatatttcaaaattttgattcggaagactaagtctggacgtagacattataatgct

SEQ ID NO: 81508 - DNA, 201 bp, Homo sapiens
gggggccgggcgggagcgcggaggcgagccggtcgctgagcgtgtcggcgcgggcccggagcagctcagaagataaaataacagtccactttataaaccgwgatggtgaaacattaacaaccaaaggaaaagttggtgattctctgctagatgttgtggttgaaaataatctagatattgatggctttggtgcatgtgagg

SEQ ID NO: 81509 - DNA, 155 bp, Homo sapiens
ggctgcagggtgagcagcgtgggctgcagtgtgtcagtcccaggagtgagggagtggcaagcaccacagattaccacgtatgtgtggaagacattcgtacycttatctttactataaataaattcataaaagttaacaaaggggtacacagtatg

SEQ ID NO: 81510 - DNA, 185 bp, Homo sapiens
gggtatgcggaacagaacacagtggtctagctaaccgatttccgctagacgtccagctatctttcaaaatattttgtttctgcayggcaacttcagccgctaaaaaagcatccagcttacaacggaacctggagggttggtaaaggccccctgcgctggccccgccccatgggaccgggcggcgt

SEQ ID NO: 81511 - DNA, 201 bp, Homo sapiens
aacttcagccgctaaaaaagcatccagcttacaacggaacctggagggttggtaaaggccccctgcgctggccccgccccatgggaccgggcggcgtgggmgtgagaggcggggcggggccgcgctctgcttgccaatgtctttataggtcacccggaaggcacgcggaacctcggcgcggtgcttccagcagggtctctc

SEQ ID NO: 81512 - DNA, 201 bp, Homo sapiens
attatgactattttatttatagtagtagttaaatctgaatgtgtatggacaaaaatatttaattgctcagtaaactgcttaacttcaaagatagttattgmccttataaataaatatttcaaaattttgattcggaagactaagtctggacgtagacattataatgctatcaaagaagtttgatctctgttttgactaaac

SEQ ID NO: 81513 - DNA, 201 bp, Homo sapiens
aattatgactattttatttatagtagtagttaaatctgaatgtgtatggacaaaaatatttaattgctcagtaaactgcttaacttcaaagatagttattraccttataaataaatatttcaaaattttgattcggaagactaagtctggacgtagacattataatgctatcaaagaagtttgatctctgttttgactaaa

SEQ ID NO: 81514 - DNA, 108 bp, Homo sapiens
gggtatgyggaacagaacacagtggtctagctaaccgatttccgctagacgtccagctatctttcaaaatattttgtttctgcacggcaacttcagccgctaaaaaag

SEQ ID NO: 81515 - DNA, 201 bp, Homo sapiens
ggtagagaaaggactcctcccaagggtgcccatgcctcaaccagcaccaactgccagtgaagtttggttttatttggcaaatttctattggagcagtgaaygatctggggattggaaccagtcttgccatttcctggttgtgtggccttgggaaatccatgtctcaactctgagcctcagttttctcatttgtaaaataag

SEQ ID NO: 81516 - DNA, 201 bp, Homo sapiens
ccagggaagcggccactctctttcctgctgcccacagtggtccgacccgcggaggggctctgtggaacctacctcgctctgggggccaatggagctgcgcrgggcctcagcggcctgacacaggttctgctgaatgtcctgaccttgaaccggaacctgagtgacagcctggcccgcggccgcctacacccggacctgcag

SEQ ID NO: 81517 - DNA, 201 bp, Homo sapiens
cggctgccttctacgcaggtggcaacctcacactggagatggtggccgaggctcagcacgcagggggtgtcataaccgaagaggacttcagcaattacagygcccttgtggagaagcctgtgtgtggcgtgtacagaggccacctggttcttagtcccccacctccgcacacgggccctgccctcatcagtgctctcaaca

SEQ ID NO: 81518 - DNA, 166 bp, Homo sapiens
tccgccctcccactcccccgccgcagccacttccggcaggcgctgcgctgctggggggcgcgggcraggatggcggcggagaacgaggccagccaggagagcgccctgggcgcctactcgccagtggactacatgagcatcaccagcttcccgcggctgcccgagg

SEQ ID NO: 81519 - DNA, 201 bp, Homo sapiens; identical to SEQ ID NO: 81516

SEQ ID NO: 81520 - DNA, 201 bp, Homo sapiens; identical to SEQ ID NO: 81517

SEQ ID NO: 81521 - DNA, 166 bp, Homo sapiens; identical to SEQ ID NO: 81518

SEQ ID NO: 81522 - DNA, 201 bp, Homo sapiens; identical to SEQ ID NO: 81516

SEQ ID NO: 81523 - DNA, 201 bp, Homo sapiens; identical to SEQ ID NO: 81517

SEQ ID NO: 81524 - DNA, 166 bp, Homo sapiens; identical to SEQ ID NO: 81518

SEQ ID NO: 81525 - DNA, 201 bp, Homo sapiens; identical to SEQ ID NO: 81516

SEQ ID NO: 81526 - DNA, 201 bp, Homo sapiens; identical to SEQ ID NO: 81517

SEQ ID NO: 81527 - DNA, 166 bp, Homo sapiens; identical to SEQ ID NO: 81518

SEQ ID NO: 81528 - DNA, 190 bp, Homo sapiens
ccagggaagcggccactctctttcctgctgcccacagtggtccgacccgcggaggggctctgtggaacctacctcgctctgggggccaatggagctgcgcrgggcctcagcggcctgacacagcatctgaatagacaaccagccctctttagggtgggatttgaaaggaagggcctgcttttctccagaa

SEQ ID NO: 81529 - DNA, 201 bp, Homo sapiens; identical to SEQ ID NO: 81517

SEQ ID NO: 81530 - DNA, 139 bp, Homo sapiens
cacttccggcaggcgctgcgctgctggggggcgcgggcraggatggcggcggagaacgaggccagccaggagagcgccctgggcgcctactcgccagtggactacatgagcatcaccagcttcccgcggctgcccgagg

SEQ ID NO: 81531 - DNA, 201 bp, Homo sapiens
cagaggcagctgtggtgggccaccctcatcctgtgaagggtgaatgcctctactgctttgtcaccttgtgtgatggccacaccttcagccccaagctcacygaggagctcaagaagcagattagagaaaagattggccccattgccacaccagactacatccagaatgcacctggcttgcctaaaacccgctcagggaaaa

SEQ ID NO: 81532 - DNA, 201 bp, Homo sapiens
ggtgcacggcagacattggttggatcactggtcattcctacgtcacctatgggccactggccaatggtgccaccagtgttttgtttgaggggattcccacrtatccggacgtgaaccgcctgtggagcattgtggacaaatacaaggtgaccaagttctacacagcacccacagccatccgtctgctcatgaagtttggag

SEQ ID NO: 81533 - DNA, 179 bp, Homo sapiens
aaggagtaaatgtgttttgttcctagggccagaggagcttgtcttccttgtcctctgttcccaccctcccctgaacagaacccagcccataagagacattytcagatgaaactctgttttcttgccccagtcaggctcaagccctgtggttgtaggaataaagcctgtgatctcaagaa

SEQ ID NO: 81534 - DNA, 201 bp, Homo sapiens
gaggcagctgtgtaatcctatgtcagctctcttaggaagccccagtacttatattgggcatgcacttgcccttaaaaacaatgatttgtgagtccaggaayaatttactatttttaaaatattttgctgcttctgttctgggtctgaattcccttttgtgccagatgccaattcagtctccagagggtattcagatcatct

SEQ ID NO: 81535 - DNA, 201 bp, Homo sapiens
gggaattctggggagacattgccaaggaattttactggaagactccatgccctggcccattccttcggtacaactttgatgtgactaaagggaaaatcttyattgagtggatgaaaggagcaactaccaacatctgctacaatgtactggatcgaaatgtccatgagaaaaagcttggagataaagttgctttttactggg

SEQ ID NO: 81536 - DNA, 201 bp, Homo sapiens
attgatgacatgctcaatgtatctggacacctgctgagtacagcagaggtggagtcagcacttgtggaacatgaggctgttgcagaggcagctgtggtggsccaccctcatcctgtgaagggtgaatgcctctactgctttgtcaccttgtgtgatggccacaccttcagccccaagctcaccgaggagctcaagaagcag

SEQ ID NO: 81537 - DNA, 201 bp, Homo sapiens
aggagaagggtttcccagtaagatgctgcattgtggtcaagcacctggggcgggcagagctcggcatgggtgactccaccagccagtcccccccaattaaraggtcatgcccagatgtgcagggtgtggttcacacagttgggggctacatgctctatgtagccacaaccttcaagtatgtgtttgacttccatgcagagg

SEQ ID NO: 81538 - DNA, 201 bp, Homo sapiens; identical to SEQ ID NO: 81531

SEQ ID NO: 81539 - DNA, 201 bp, Homo sapiens; identical to SEQ ID NO: 81532

SEQ ID NO: 81540 - DNA, 179 bp, Homo sapiens; identical to SEQ ID NO: 81533

SEQ ID NO: 81541 - DNA, 201 bp, Homo sapiens
gaggcagctgtgtaatcctatgtcagctctcttaggaagccccagtacttatattgggcatgcacttgcccttaaaaacaatgatttgtgagtccaggaayaatttactatttttaaaatattttgctgcttctgttctgggtctgaattcccttttgtgccagatgccagtactgtctgcccattggctccaggggctgt

SEQ ID NO: 81542 - DNA, 201 bp, Homo sapiens; identical to SEQ ID NO: 81535

SEQ ID NO: 81543 - DNA, 201 bp, Homo sapiens; identical to SEQ ID NO: 81536

SEQ ID NO: 81544 - DNA, 201 bp, Homo sapiens
aggagaagggtttcccagtaagatgctgcattgtggtcaagcacctggggcgggcagagctcggcatgggtgactccaccagccagtcccccccaattaaraggtcatgcccagatgtgcagatctcatggaaccaagggattgacttgtggtggcatgagctcatgcaagaggcaggggatgagtgtgagcccgagtggt

SEQ ID NO: 81545 - DNA, 201 bp, Homo sapiens; identical to SEQ ID NO: 81531

SEQ ID NO: 81546 - DNA, 201 bp, Homo sapiens; identical to SEQ ID NO: 81532

SEQ ID NO: 81547 - DNA, 179 bp, Homo sapiens; identical to SEQ ID NO: 81533

SEQ ID NO: 81548 - DNA, 201 bp, Homo sapiens; identical to SEQ ID NO: 81541

SEQ ID NO: 81549 - DNA, 201 bp, Homo sapiens; identical to SEQ ID NO: 81535

SEQ ID NO: 81550 - DNA, 201 bp, Homo sapiens; identical to SEQ ID NO: 81536

SEQ ID NO: 81551 - DNA, 201 bp, Homo sapiens; identical to SEQ ID NO: 81537

SEQ ID NO: 81552 - DNA, 201 bp, Homo sapiens; identical to SEQ ID NO: 81531

SEQ ID NO: 81553 - DNA, 201 bp, Homo sapiens; identical to SEQ ID NO: 81532

SEQ ID NO: 81554 - DNA, 179 bp, Homo sapiens; identical to SEQ ID NO: 81533

SEQ ID NO: 81555 - DNA, 201 bp, Homo sapiens; identical to SEQ ID NO: 81534

SEQ ID NO: 81556 - DNA, 201 bp, Homo sapiens; identical to SEQ ID NO: 81535

SEQ ID NO: 81557 - DNA, 201 bp, Homo sapiens; identical to SEQ ID NO: 81536

SEQ ID NO: 81558 - DNA, 201 bp, Homo sapiens; identical to SEQ ID NO: 81544

SEQ ID NO: 81559 - DNA, 201 bp, Homo sapiens; identical to SEQ ID NO: 81531

SEQ ID NO: 81560 - DNA, 201 bp, Homo sapiens; identical to SEQ ID NO: 81532

SEQ ID NO: 81561 - DNA, 179 bp, Homo sapiens; identical to SEQ ID NO: 81533

SEQ ID NO: 81562 - DNA, 201 bp, Homo sapiens; identical to SEQ ID NO: 81534

SEQ ID NO: 81563 - DNA, 201 bp, Homo sapiens
gggaattctggggagacattgccaaggaattttactggaagactccatgccctggcccattccttcggtacaactttgatgtgactaaagggaaaatcttyattgagtggatgaaaggagcaactaccaacatctgctacaatgtactggatcgaaatgtccatgagaaaaagcttggagataaagttgctttttactggt

SEQ ID NO: 81564 - DNA, 201 bp, Homo sapiens; identical to SEQ ID NO: 81536

SEQ ID NO: 81565 - DNA, 201 bp, Homo sapiens; identical to SEQ ID NO: 81544

SEQ ID NO: 81566 - DNA, 201 bp, Homo sapiens; identical to SEQ ID NO: 81531

SEQ ID NO: 81567 - DNA, 201 bp, Homo sapiens; identical to SEQ ID NO: 81532

SEQ ID NO: 81568 - DNA, 179 bp, Homo sapiens; identical to SEQ ID NO: 81533

SEQ ID NO: 81569 - DNA, 201 bp, Homo sapiens; identical to SEQ ID NO: 81541

SEQ ID NO: 81570 - DNA, 201 bp, Homo sapiens; identical to SEQ ID NO: 81536

SEQ ID NO: 81571 - DNA, 201 bp, Homo sapiens; identical to SEQ ID NO: 81535

SEQ ID NO: 81572 - DNA, 201 bp, Homo sapiens; identical to SEQ ID NO: 81544

SEQ ID NO: 81573 - DNA, 201 bp, Homo sapiens
actgccctacaaagtcgccgacatcggcctggctgcctggggacgcaaggccctggacattgctgagaacgagatgccgggcctgatgcgtatgcgggagyggtactcggcctccaagccactgaagggcgcccgcatcgctggctgcctgcacatgaccgtggagacggccgtcctcattgagaccctcgtcaccctggg

SEQ ID NO: 81574 - DNA, 201 bp, Homo sapiens
caagccccggtcatgatggaggtcccagccacagggaaccatgagctcagtggtcttggaacagctcactaagtcagtccttccttagcctggaagtcagkagtggagtcacaaagcccatgtgttttgccatctaggccttcacctggtctgtggacttatacctgtgtgcttggtttacaggtccagtggttcttcagc

SEQ ID NO: 81575 - DNA, 201 bp, Homo sapiens
gtgctgggccttctcttaaacctcattacaatgaggttagtacttttagtccctgttttacaggggttagaatagactgttaaggggcaactgagaaagamcagagaagtgacagctaggggttgagaggggccagaaaaacatgaatgcaggcagatttcgtgaaatctgccaccactttataaccagatggttcctttc

SEQ ID NO: 81576 - DNA, 201 bp, Homo sapiens
gccttgtgaaattctgaggcttcttttcagggatcgaaatcccctccggctccgccctgcgcgttgggccccgccccagcgggtcatgaatatgcaagtgmgaggaagatatttaaaggcgtcggcgccacgcgcatatccctgctcggcgctgcccgcccagttcctgttcccagactgaggcccagcccccttcgcccg

SEQ ID NO: 81577 - DNA, 201 bp, Homo sapiens
ctgggccttctcttaaacctcattacaatgaggttagtacttttagtccctgttttacaggggttagaatagactgttaaggggcaactgagaaagaacasagaagtgacagctaggggttgagaggggccagaaaaacatgaatgcaggcagatttcgtgaaatctgccaccactttataaccagatggttcctttcaca

SEQ ID NO: 81578 - DNA, 201 bp, Homo sapiens
ggctgccattgccaaggctggcattccggtgtatgcctggaagggcgaaacggacgaggagtacctgtggtgcattgagcagaccctgtacttcaaggacrggcccctcaacatgattctggacgacgggggcgacctcaccaacctcatccacaccaagtacccgcagcttctgccaggcatccgaggcatctctgagga

SEQ ID NO: 81579 - DNA, 201 bp, Homo sapiens
ccttctcttaaacctcattacaatgaggttagtacttttagtccctgttttacaggggttagaatagactgttaaggggcaactgagaaagaacagagaaktgacagctaggggttgagaggggccagaaaaacatgaatgcaggcagatttcgtgaaatctgccaccactttataaccagatggttcctttcacaaccct

SEQ ID NO: 81580 - DNA, 201 bp, Homo sapiens
ctgttaaggggcaactgagaaagaacagagaagtgacagctaggggttgagaggggccagaaaaacatgaatgcaggcagatttcgtgaaatctgccaccmctttataaccagatggttcctttcacaaccctgggtcaaaaagagaataatttggcctataatgttaaaagaaagcaggaaggtgggtaaataaaaatct

SEQ ID NO: 81581 - DNA, 201 bp, Homo sapiens
gtacttttagtccctgttttacaggggttagaatagactgttaaggggcaactgagaaagaacagagaagtgacagctaggggttgagaggggccagaaamacatgaatgcaggcagatttcgtgaaatctgccaccactttataaccagatggttcctttcacaaccctgggtcaaaaagagaataatttggcctataat

SEQ ID NO: 81582 - DNA, 194 bp, Homo sapiens
cagagaagtgacagctaggggttgagaggggccagaaaaacatgaatgcaggcagatttcgtgaaatctgccaccactttataaccagatggttcctttcwcaaccctgggtcaaaaagagaataatttggcctataatgttaaaagaaagcaggaaggtgggtaaataaaaatcttggtgcctggaagaattt

SEQ ID NO: 81583 - DNA, 201 bp, Homo sapiens
tggcttagtgctgggccttctcttaaacctcattacaatgaggttagtacttttagtccctgttttacaggggttagaatagactgttaaggggcaactgmgaaagaacagagaagtgacagctaggggttgagaggggccagaaaaacatgaatgcaggcagatttcgtgaaatctgccaccactttataaccagatggt

SEQ ID NO: 81584 - DNA, 201 bp, Homo sapiens
tgctgggccttctcttaaacctcattacaatgaggttagtacttttagtccctgttttacaggggttagaatagactgttaaggggcaactgagaaagaasagagaagtgacagctaggggttgagaggggccagaaaaacatgaatgcaggcagatttcgtgaaatctgccaccactttataaccagatggttcctttca

SEQ ID NO: 81585 - DNA, 201 bp, Homo sapiens; identical to SEQ ID NO: 81573

SEQ ID NO: 81586 - DNA, 201 bp, Homo sapiens; identical to SEQ ID NO: 81575

SEQ ID NO: 81587 - DNA, 201 bp, Homo sapiens; identical to SEQ ID NO: 81576

SEQ ID NO: 81588 - DNA, 201 bp, Homo sapiens; identical to SEQ ID NO: 81577

SEQ ID NO: 81589 - DNA, 201 bp, Homo sapiens; identical to SEQ ID NO: 81578

SEQ ID NO: 81590 - DNA, 201 bp, Homo sapiens; identical to SEQ ID NO: 81579

SEQ ID NO: 81591 - DNA, 163 bp, Homo sapiens
ctgttaaggggcaactgagaaagaacagagaagtgacagctaggggttgagaggggccagaaaaacatgaatgcaggcagatttcgtgaaatctgccaccmctttataaccagatggttcctttcacaaccctgggtcaaaaagagaataatttggcctataa

SEQ ID NO: 81592 - DNA, 200 bp, Homo sapiens
gtacttttagtccctgttttacaggggttagaatagactgttaaggggcaactgagaaagaacagagaagtgacagctaggggttgagaggggccagaaamacatgaatgcaggcagatttcgtgaaatctgccaccactttataaccagatggttcctttcacaaccctgggtcaaaaagagaataatttggcctataa

SEQ ID NO: 81593 - DNA, 138 bp, Homo sapiens
cagagaagtgacagctaggggttgagaggggccagaaaaacatgaatgcaggcagatttcgtgaaatctgccaccactttataaccagatggttcctttcwcaaccctgggtcaaaaagagaataatttggcctataa

SEQ ID NO: 81594 - DNA, 201 bp, Homo sapiens; identical to SEQ ID NO: 81583

SEQ ID NO: 81595 - DNA, 201 bp, Homo sapiens; identical to SEQ ID NO: 81584

SEQ ID NO: 81596 - DNA, 201 bp, Homo sapiens
tccgcaaacagaatcgcgtttggctgtgctgtgttggttcatgaagttttaccatcaattcaagtaatcataaatggcaaattctgcaaaagcagaagaayatgaaaagatgtctcttgaacaggcaaaagcgtcagtgaattctgaaacagagtcttcattcaatattaatgaaaacacaacagcttctgggactgggct

SEQ ID NO: 81597 - DNA, 201 bp, Homo sapiens
ctgatgttgaattctttgggcctagaatatacttgagaaagcactagtggcttgtgttcagggagaggagctggcagtttttaaccacttctgtgggagcygtgttctaacctgtggaaagtattgcaattctgtgagagtgactctgcagagtcactgcaccatcaggcttggccctgctgtgccttcagtacccagcca

SEQ ID NO: 81598 - DNA, 201 bp, Homo sapiens
ggggattgcgatgattgatctgggaacatggctggattgtgatttaaccaagaatgctgatgttgaattctttgggcctagaatatacttgagaaagcacyagtggcttgtgttcagggagaggagctggcagtttttaaccacttctgtgggagccgtgttctaacctgtggaaagtattgcaattctgtgagagtgact

SEQ ID NO: 81599 - DNA, 201 bp, Homo sapiens
cctcttccacgccatgggtaacttgggggagagaagaatcctccaaacgatggagtagccagtggtaatacaaagcagggagaacagaaaggtagagttastaaggccttcagtgaacagaaaggagcagagagcaagattagatctgagaagatgctctggggactgagcccactgttgttggtgtcagggaggcttact

SEQ ID NO: 81600 - DNA, 201 bp, Homo sapiens
gaactgttaggaagaggactagaaaaggcttcccctgcctatcctctccgatcaccaaggtggaagggagctagtaggactcttccttgacacaccttgtmgtctaaatgttcggtattctattcaggacttacggtaactattatgagggaggcatggctttccaccgtcgggccaggaagagcacctgttgctgcaagc

SEQ ID NO: 81601 - DNA, 201 bp, Homo sapiens
taaggggctttgttgaaagagggggttagagagagcaagacagcacttgagtgcactggcaggaagcagagataagacttgaatttcagtttggtagaccwccttctttagcagcccaacctgtagcaaatctagtttagcctgcatggcagggagagggattctcttcccaccctcaccatttgcaagtggcaggagctg

SEQ ID NO: 81602 - DNA, 201 bp, Homo sapiens
gctgacagctaatgtttattagcctcctacctaagtcagtcactttgctaaattcttcacctgtggtaactcattttgattgttataacatctcagcaccrttattcccattttaatgatgaggaaactgagtcatagaggatacagacttgcccaaaggagagccaggattttcacaccccctcctcaagctgggcctgc

SEQ ID NO: 81603 - DNA, 201 bp, Homo sapiens
ttaaaaatctatttttaggtaatgttctaagaattccatttgcctctatgatcttagctcataaaaatataatatgacttgataaagcaactaaactcttyccacagtgttcagatttgtcctgtgtgtgtttacagtattcaatttattgcagttatagaattggtcagagagcattttcatagtgtgctcatttctatg

SEQ ID NO: 81604 - DNA, 201 bp, Homo sapiens
ccaagtgcttgttatatacctccacgggtgtcagcccagatgactcctcacccatccaccacctgcagcttgagatgttaactattagagctccattcttktggttcaaaacgttgatacttacttagatgttccctgagaggagtgtttatttctgagtaaggggctttgttgaaagagggggttagagagagcaagaca

SEQ ID NO: 81605 - DNA, 201 bp, Homo sapiens
gtgttggttcatgaagttttaccatcaattcaagtaatcataaatggcaaattctgcaaaagcagaagaatatgaaaagatgtctcttgaacaggcaaaascgtcagtgaattctgaaacagagtcttcattcaatattaatgaaaacacaacagcttctgggactgggctttctgaaaagacttctgtctgtaggcaagt

SEQ ID NO: 81606 - DNA, 201 bp, Homo sapiens
aaaagagtttgaagatgatcttgtaaaggaaagttctagttgtgggaaagacactccatccaagaagagaaaacttgatcctgaaattgtcccagaggaaraagattgtggtgatgctgaaggcaattcaaagaaaagaaaaagagaaactgaggatgttccaaaagataaatcttctactggagatggcactcaaaataa

SEQ ID NO: 81607 - DNA, 201 bp, Homo sapiens
atacttgttcctctgttacaacctcagcactttgcaccgtaggagccattgttaaagttgtcacttgtgtaactgactgcttttccaaaactggtacttaygtgaactgttgtccttgctttacaccaccatttggaaaacttaccagtttttagatgtagatgtagtgaaaaacttcaagaatgaagcagagcaattgag

SEQ ID NO: 81608 - DNA, 201 bp, Homo sapiens; identical to SEQ ID NO: 81601

SEQ ID NO: 81609 - DNA, 201 bp, Homo sapiens; identical to SEQ ID NO: 81596

SEQ ID NO: 81610 - DNA, 201 bp, Homo sapiens; identical to SEQ ID NO: 81597

SEQ ID NO: 81611 - DNA, 201 bp, Homo sapiens; identical to SEQ ID NO: 81602

SEQ ID NO: 81612 - DNA, 201 bp, Homo sapiens; identical to SEQ ID NO: 81598

SEQ ID NO: 81613 - DNA, 201 bp, Homo sapiens; identical to SEQ ID NO: 81606

SEQ ID NO: 81614 - DNA, 201 bp, Homo sapiens; identical to SEQ ID NO: 81605

SEQ ID NO: 81615 - DNA, 201 bp, Homo sapiens; identical to SEQ ID NO: 81604

SEQ ID NO: 81616 - DNA, 201 bp, Homo sapiens
caaaatctcagcttcacaaagtcattgaaagtgttggttcatgaagttttaccatcaattcaagtaatcataaatggcaaattctgcaaaagcagaagaayatgaaaagatgtctcttgaacaggcaaaagcgtcagtgaattctgaaacagagtcttcattcaatattaatgaaaacacaacagcttctgggactgggct

SEQ ID NO: 81617 - DNA, 201 bp, Homo sapiens; identical to SEQ ID NO: 81597

SEQ ID NO: 81618 - DNA, 201 bp, Homo sapiens; identical to SEQ ID NO: 81598

SEQ ID NO: 81619 - DNA, 201 bp, Homo sapiens; identical to SEQ ID NO: 81599

SEQ ID NO: 81620 - DNA, 201 bp, Homo sapiens; identical to SEQ ID NO: 81600

SEQ ID NO: 81621 - DNA, 201 bp, Homo sapiens; identical to SEQ ID NO: 81601

SEQ ID NO: 81622 - DNA, 201 bp, Homo sapiens; identical to SEQ ID NO: 81602

SEQ ID NO: 81623 - DNA, 201 bp, Homo sapiens; identical to SEQ ID NO: 81603

SEQ ID NO: 81624 - DNA, 201 bp, Homo sapiens; identical to SEQ ID NO: 81604

SEQ ID NO: 81625 - DNA, 201 bp, Homo sapiens; identical to SEQ ID NO: 81605

SEQ ID NO: 81626 - DNA, 201 bp, Homo sapiens; identical to SEQ ID NO: 81606

SEQ ID NO: 81627 - DNA, 201 bp, Homo sapiens; identical to SEQ ID NO: 81607

SEQ ID NO: 81628 - DNA, 201 bp, Homo sapiens; identical to SEQ ID NO: 81616

SEQ ID NO: 81629 - DNA, 201 bp, Homo sapiens; identical to SEQ ID NO: 81597

SEQ ID NO: 81630 - DNA, 201 bp, Homo sapiens; identical to SEQ ID NO: 81598

SEQ ID NO: 81631 - DNA, 201 bp, Homo sapiens; identical to SEQ ID NO: 81599

SEQ ID NO: 81632 - DNA, 201 bp, Homo sapiens; identical to SEQ ID NO: 81600

SEQ ID NO: 81633 - DNA, 201 bp, Homo sapiens; identical to SEQ ID NO: 81601

SEQ ID NO: 81634 - DNA, 201 bp, Homo sapiens; identical to SEQ ID NO: 81602

SEQ ID NO: 81635 - DNA, 201 bp, Homo sapiens; identical to SEQ ID NO: 81603

SEQ ID NO: 81636 - DNA, 201 bp, Homo sapiens; identical to SEQ ID NO: 81604

SEQ ID NO: 81637 - DNA, 201 bp, Homo sapiens; identical to SEQ ID NO: 81605

SEQ ID NO: 81638 - DNA, 201 bp, Homo sapiens; identical to SEQ ID NO: 81606

SEQ ID NO: 81639 - DNA, 201 bp, Homo sapiens; identical to SEQ ID NO: 81607

SEQ ID NO: 81640 - DNA, 201 bp, Homo sapiens
acgtcctgcaggaacccgaacagttccccctggtgcagggagtggccataggtggctcctatggacggaaaacagtcttaagaggcaactccgatggtacscttgtcctcttcttcagtgacttaaaacaattccaggatcagaagagaagccaacgtgacatcctcgataaaactggggataagctgaagttctgtctgt

SEQ ID NO: 81641 - DNA, 201 bp, Homo sapiens
caattagctcctcctttttccttccagtctaaaaaaggaatcctctgtgtcttcaaagcaaagctctttactttccccttggttctcataactctgtgatmttgctctcggtgcttccaactcatccacgtcctgtctgtttcctctgtatacaaaaccctttctgcccctgctgacacagacatcctctatgccagcagc

SEQ ID NO: 81642 - DNA, 201 bp, Homo sapiens
caaaaaatcagagaatctctttcgaggtgctggccgccttcaacgctctgagcttaaatgataatcccagcccctggatctatcgagagctcaaaagatcyttggataagacaaatgccagtcctggtgagtttgcagtctgcttcactgaactccagcagaagttttttgacaaccgtcctggaaaactaaaggatttga

SEQ ID NO: 81643 - DNA, 201 bp, Homo sapiens
acaccaggaagttgtggagctaggatccatcctattgtcaatgagatgttctcatccagaagccatagaatcctgaataataattctaaaagaaacttctrgagatcatctggcaatcgcttttaaagactcggctcaccgtgagaaagagtcactcacatccattcttcccttgatggtccctattcctccttcccttgc

SEQ ID NO: 81644 - DNA, 201 bp, Homo sapiens
cagcaagaattcctctgcctcccatcctaccattcactgtcttgccggcagccagctgagagcaatgggaaatggggagtcccagctgtcctcggtgcctrctcagaagctgggttggtttatccaggaatacctgaagccctacgaagaatgtcagacactgatcgacgagatggtgaacaccatctgtgacgtcctgca

SEQ ID NO: 81645 - DNA, 201 bp, Homo sapiens
aagagtgtgaaaggaaactgaagccaaaggggtctttgcccccaaagtatgccttggagctgctcaccatctatgcctgggagcaggggagtggagtgccrgattttgacactgcagaaggtttccggacagtcctggagctggtcacacaatatcagcagctctgcatcttctggaaggtcaattacaactttgaagatg

SEQ ID NO: 81646 - DNA, 201 bp, Homo sapiens
cccacaggtgacgtgggtggaggggaccgttggtgttggcatcttctggcaaaagaagcaaaggaatggttatcctctccctgcttcaaggatgggactgsaaacccaataccaccttggaaagtgccgacaatgcagacaccaggaagttgtggagctaggatccatcctattgtcaatgagatgttctcatccagaagc

SEQ ID NO: 81647 - DNA, 201 bp, Homo sapiens
tgcctttctccccccacccaggagtatcctcttgccaaatcaaaagacttttccttgggctttagccttaaagatacttgaaggtctaggtgctttaaccycacataccctcacttaaacttttatcactgttgcatataccagttgtgatacaataaagaatgtatctggattttgtgcctagttcctagcacacagctt

SEQ ID NO: 81648 - DNA, 199 bp, Homo sapiens
ttcctggctctgggcagcagcaagaattcctctgcctcccatcctaccattcactgtcttgccggcagccagctgagagcaatgggaaatggggagtcycagctgtcctcggtgcctgctcagaagctgggttggtttatccaggaatacctgaagccctacgaagaatgtcagacactgatcgacgagatggtgaaca

SEQ ID NO: 81649 - DNA, 201 bp, Homo sapiens
ccgaacccacaggtgacgtgggtggaggggaccgttggtgttggcatcttctggcaaaagaagcaaaggaatggttatcctctccctgcttcaaggatggkactggaaacccaataccaccttggaaagtgccgacaatgcagacaccaggaagttgtggagctaggatccatcctattgtcaatgagatgttctcatcca

SEQ ID NO: 81650 - DNA, 201 bp, Homo sapiens
atctggattttgtgcctagttcctagcacacagcttcaaaaattctagagtttcctgataggagtgtcttttgtattcataacaagcccttttcacccatscctgggtttatgctaacaaggttacccatggtgggcccttagtttcaaggaaggagttggccaagccagaaagaccaagcatgtggttaaagcattggaa

SEQ ID NO: 81651 - DNA, 201 bp, Homo sapiens
cctcgctgtctccgtatgccctggagctgcttacggtgtatgcctgggaacaggggtgcagaaaagacaactttgacattgctgaaggcgtcagaaccgtwctggagctgatcaaatgccaggagaagctgtgtatctattggatggtcaactacaactttgaagatgagaccatcaggaacatcctgctgcaccagctcc

SEQ ID NO: 81652 - DNA, 201 bp, Homo sapiens; identical to SEQ ID NO: 81640

SEQ ID NO: 81653 - DNA, 201 bp, Homo sapiens; identical to SEQ ID NO: 81641

SEQ ID NO: 81654 - DNA, 201 bp, Homo sapiens; identical to SEQ ID NO: 81642

SEQ ID NO: 81655 - DNA, 201 bp, Homo sapiens; identical to SEQ ID NO: 81643

SEQ ID NO: 81656 - DNA, 201 bp, Homo sapiens
gaagaaggaaaagatacccaaaggtcaagaacacagtgattttattagaagtttcatccgcaaattttcttccatttcattgctcagaaatgtcatgtggytacctgtaacttgaaggtggctacaaagatgactgtggacgtgggttgcactggccacccaaggatgtctgccacacctctccaaagccctccctaccta

SEQ ID NO: 81657 - DNA, 201 bp, Homo sapiens; identical to SEQ ID NO: 81644

SEQ ID NO: 81658 - DNA, 201 bp, Homo sapiens; identical to SEQ ID NO: 81645

SEQ ID NO: 81659 - DNA, 201 bp, Homo sapiens
caaggatgggactggaaacccaataccaccttggaaagtgccggtaaaagtcatctaaaggaggcgttgtctggaaatagccctgtaacaggcttgaatcraagaacttctcctactgtagcaacctgaaattaactcagacacaaataaaggaaacccagctcacaggagcttaaacagctggtcagccccctaagcccc

SEQ ID NO: 81660 - DNA, 201 bp, Homo sapiens
caataccaccttggaaagtgccggtaaaagtcatctaaaggaggcgttgtctggaaatagccctgtaacaggcttgaatcaaagaacttctcctactgtakcaacctgaaattaactcagacacaaataaaggaaacccagctcacaggagcttaaacagctggtcagccccctaagccccactacaagtgatcctcaggc

SEQ ID NO: 81661 - DNA, 201 bp, Homo sapiens
cccacaggtgacgtgggtggaggggaccgttggtgttggcatcttctggcaaaagaagcaaaggaatggttatcctctccctgcttcaaggatgggactgsaaacccaataccaccttggaaagtgccggtaaaagtcatctaaaggaggcgttgtctggaaatagccctgtaacaggcttgaatcaaagaacttctccta

SEQ ID NO: 81662 - DNA, 172 bp, Homo sapiens
tgcctttctccccccacccaggagtatcctcttgccaaatcaaaagacttttccttgggctttagccttaaagatacttgaaggtctaggtgctttaaccycacataccctcacttaaacttttatcactgttgcatataccagttgtgatacaataaagaatgtatctgga

SEQ ID NO: 81663 - DNA, 199 bp, Homo sapiens; identical to SEQ ID NO: 81648

SEQ ID NO: 81664 - DNA, 201 bp, Homo sapiens
ccgaacccacaggtgacgtgggtggaggggaccgttggtgttggcatcttctggcaaaagaagcaaaggaatggttatcctctccctgcttcaaggatggkactggaaacccaataccaccttggaaagtgccggtaaaagtcatctaaaggaggcgttgtctggaaatagccctgtaacaggcttgaatcaaagaacttc

SEQ ID NO: 81665 - DNA, 201 bp, Homo sapiens; identical to SEQ ID NO: 81651

SEQ ID NO: 81666 - DNA, 201 bp, Homo sapiens
atcaaagaacttctcctactgtagcaacctgaaattaactcagacacaaataaaggaaacccagctcacaggagcttaaacagctggtcagccccctaagccccactacaagtgatcctcaggcaggtaaccccagattcatgcactgtagggtgctgcgcagcatccctagtctctacccagtagatgccactagccctc

SEQ ID NO: 81667 - DNA, 201 bp, Homo sapiens
ttcagaattgaagatggtgacctattcagagcctttttgtccttgtcaacagactgggacagtgtctgattcccccttcaccccccccacccccgccttgscacacacagctaatattctaatggtaaatttctctgtatcaggtggggaaatgtgctgaaggacagtatgtatcccttgcttcatttttaggtcgtaggt

SEQ ID NO: 81668 - DNA, 179 bp, Homo sapiens
atgcgccgacccggcgccattttggtggccgggcgcggaggtgattccacactgaggcgagcgcggcggccggggtggkagtggcagtgttcgtgtgctcaggtctgaatcgccgagggaggaggcggtggaggaagaggtggcggcggtggcggtggtcgtagcggtggcggaggagg

SEQ ID NO: 81669 - DNA, 182 bp, Homo sapiens
atgcgccgacccggcgccattttggtggccgggcgcggaggtgattccacactgaggcgagcgcggcggccggggtggtagyggcagtgttcgtgtgctcaggtctgaatcgccgagggaggaggcggtggaggaagaggtggcggcggtggcggtggtcgtagcggtggcggaggaggcgg

SEQ ID NO: 81670 - DNA, 201 bp, Homo sapiens; identical to SEQ ID NO: 81667

SEQ ID NO: 81671 - DNA, 179 bp, Homo sapiens; identical to SEQ ID NO: 81668

SEQ ID NO: 81672 - DNA, 182 bp, Homo sapiens; identical to SEQ ID NO: 81669

SEQ ID NO: 81673 - DNA, 201 bp, Homo sapiens; identical to SEQ ID NO: 81667

SEQ ID NO: 81674 - DNA, 201 bp, Homo sapiens; identical to SEQ ID NO: 81667

SEQ ID NO: 81675 - DNA, 139 bp, Homo sapiens
gtgattccacactgaggcgagcgcggcggccggggtggkagtggcagtgttcgtgtgctcaggtctgaatcgccgagggaggaggcggtggaggaagaggtggcggcggtggcggtggtcgtagcggtggcggaggagg

SEQ ID NO: 81676 - DNA, 142 bp, Homo sapiens
gtgattccacactgaggcgagcgcggcggccggggtggtagyggcagtgttcgtgtgctcaggtctgaatcgccgagggaggaggcggtggaggaagaggtggcggcggtggcggtggtcgtagcggtggcggaggaggcgg

SEQ ID NO: 81677 - DNA, 201 bp, Homo sapiens
aaggccgggcagcagatctgaagtatattgaagcttgtgctagacgcattgtgcaaaactcaaatgggtacaaaattgtgactgagaaaagcacagttccrgtgcgggcagcagaaagtatccgtcgcatatttgatgcaaacacaaaacccaacttgaatttacaggtgctgtccaaccctgagtttctggcagagggaa

SEQ ID NO: 81678 - DNA, 163 bp, Homo sapiens
gggaggggcgtgcgccgagagggagctcagatcgagcggggcgcgggtggagaagctgcggcrgcgcggcccgtaggaaggtgctgtccgaacgatcgggataggagcggtccctgcgcttgctgctgggaagtgggtaagcgccgctcccaggctggccccg

SEQ ID NO: 81679 - DNA, 201 bp, Homo sapiens
caacaggagctgatgtagaagaggtagcaacagcgattggaatggaccagagaattggaaacaagtttctaaaagccagtgttgggtttggtgggagctgyttccaaaaggatgttctgaatttggtttatctctgtgaggctctgaatttgccagaagtagctcgttattggcagcaggtcatagacatgaatgactacc

SEQ ID NO: 81680 - DNA, 201 bp, Homo sapiens
cgtggaattctcctacacttcctatttatgagccaggactaaaagaagtggtagaatcctgtcgaggaaaaaatctttttttttctaccaatattgatgaygccatcaaagaagctgatcttgtatttatttctgtgaatactccaacaaaaacctatggaatggggaaaggccgggcagcagatctgaagtatattgaag

SEQ ID NO: 81681 - DNA, 192 bp, Homo sapiens
gggaggggcgtgcgccgagagggagctcagatcgagcggggcgcgggtggagaagctgcggcagcgcggcccgtaggaaggtgctgtccgawcgatcgggataggagcggtccctgcgcttgctgctgggaagtgggtaagcgccgctcccaggctggccccgccgcccgggcgggatgctcccagtacaat

SEQ ID NO: 81682 - DNA, 201 bp, Homo sapiens
tttttgtaaaataaaaattaaacttcaaactctttactttataaattgtccataggccacactttaatatcacattataaagggaaggacagtcttcattyctcctggttattggtttgtttgtcattaaagatatattttgaatccatgaaattgctatgctaaacagcctttacatgtatggtctggttaaagttcctt

SEQ ID NO: 81683 - DNA, 201 bp, Homo sapiens
gttgagttttatattttcagtggttatttttgcttgtgttagatcattattaaaatatatccaatgtccctttgatacttgtgctctgctgagaatgtacrgtttgcattaaacatcccaggtctcatccttcaggaattttgcagttcaatgagaagagggagacaaatataaagatgaggacagaagcatctctacaga

SEQ ID NO: 81684 - DNA, 201 bp, Homo sapiens; identical to SEQ ID NO: 81677

SEQ ID NO: 81685 - DNA, 201 bp, Homo sapiens
caggcccgggactcagagtgtaacgcgtggcagcctgagggaggggcgtgcgccgagagggagctcagatcgagcggggcgcgggtggagaagctgcggcrgcgcggcccgtaggaaggtgctgtccgaacgatcgggataggagcggtccctgcgcttgctgctgggaagtggtacaatcatgtttgaaattaagaagat

SEQ ID NO: 81686 - DNA, 201 bp, Homo sapiens; identical to SEQ ID NO: 81679

SEQ ID NO: 81687 - DNA, 201 bp, Homo sapiens; identical to SEQ ID NO: 81680

SEQ ID NO: 81688 - DNA, 201 bp, Homo sapiens
gcagcctgagggaggggcgtgcgccgagagggagctcagatcgagcggggcgcgggtggagaagctgcggcagcgcggcccgtaggaaggtgctgtccgawcgatcgggataggagcggtccctgcgcttgctgctgggaagtggtacaatcatgtttgaaattaagaagatctgttgcatcggtgcaggctatgttggag

SEQ ID NO: 81689 - DNA, 201 bp, Homo sapiens
ctaaaacttcaacaagaccttcaagatcacagaaatttttaaaatttgattccagttaataacagaggtggtgccagaatgcctggactgcagtggatgtrccccacctctttgcttaaaaaaaaaaattcaataaactgtacaaatttaattacagtaattcatttggcttttagtgtatcttctttgtcccaattaaac

SEQ ID NO: 81690 - DNA, 201 bp, Homo sapiens
agaaaggagaaaggttaagactacctccatggctaaagacagagattcccatggggaaaaattacaataaactgaaaaatactttgcggaatttaaatctmcatacagtatgtgaggaagctcgatgtcccaatattggagagtgttggggaggtggagaatatgccaccgccacagccacgatcatgttgatgggtgaca

SEQ ID NO: 81691 - DNA, 201 bp, Homo sapiens
catgtacaagaggttgcagattttgttctgttaagactgcaagaaatcctcctccactggatgccagtgagccctacaatactgcaaaggcaattgcagartggggtctggattatgttgtcctgacatctgtggatcgagatgatatgcctgatgggggagctgaacacattgcaaagaccgtatcatatttaaaggaaa

SEQ ID NO: 81692 - DNA, 201 bp, Homo sapiens
cttaaaaaaaaaaatgtcaatagccaggcatagtggctcacgcctgtaatcccagcactttaggaggccaaggcgggtggatcacctgaggtcaggagttygagaccagcctggccaacatggtgaaatcctgtctccactaaaaacacaaaaattagtcaggcgtggtagtgggtgcctgtaatcccagctactcgggag

SEQ ID NO: 81693 - DNA, 201 bp, Homo sapiens
ctaaaacttcaacaagaccttcaagatcacagaaatttttaaaatttgattccagttaataacagaggtggtgccagaatgcctggactgcagtggatgtrccccacctctttgcttaaaaaaaaaaatgtcaatagccaggcatagtggctcacgcctgtaatcccagcactttaggaggccaaggcgggtggatcacct

SEQ ID NO: 81694 - DNA, 201 bp, Homo sapiens; identical to SEQ ID NO: 81690

SEQ ID NO: 81695 - DNA, 201 bp, Homo sapiens; identical to SEQ ID NO: 81691

SEQ ID NO: 81696 - DNA, 201 bp, Homo sapiens
gaccgattatgctttctttggcctacattctttattctgcggtgaagttgaggcttataagttaaaacaaaggaactaacttactgtccaccagtttatayagaactcacagtacctatgacttttttaaactaagatctgttaaaaaagaaatctgtttcaacagatgaccgtgtacaataccgtgtggtgaaaatgaat

SEQ ID NO: 81697 - DNA, 201 bp, Homo sapiens
acaaagccattcttttaaatatttgtgactctttcctaaagccaaagtttctgttgaattatgttttgacacacccctaagtacaaggtggtatggttgtrtacacatgctgccttcttggggattcaaaaacaggtttttgattttgaatagcaattagtgatatagtgctgtttaagctactaacgataaaaggtaata

SEQ ID NO: 81698 - DNA, 201 bp, Homo sapiens
atttggatcttatatgtagagcccatcaggtggttgaagatggatatgaattttttgcaaagaggcagttggtcactctgttttctgcgcccaattattgyggagagtttgacaatgcaggtgccatgatgagtgtggatgaaacactaatgtgttcttttcagattttaaagcctgcagagaaaaagaagccaaatgcca

SEQ ID NO: 81699 - DNA, 201 bp, Homo sapiens
tctatacgagtgaccgattatgctttctttggcctacattctttattctgcggtgaagttgaggcttataagttaaaacaaaggaactaacttactgtccmccagtttatacagaactcacagtacctatgacttttttaaactaagatctgttaaaaaagaaatctgtttcaacagatgaccgtgtacaataccgtgtgg

SEQ ID NO: 81700 - DNA, 201 bp, Homo sapiens; identical to SEQ ID NO: 81696

SEQ ID NO: 81701 - DNA, 201 bp, Homo sapiens; identical to SEQ ID NO: 81698

SEQ ID NO: 81702 - DNA, 201 bp, Homo sapiens; identical to SEQ ID NO: 81699

SEQ ID NO: 81703 - DNA, 201 bp, Homo sapiens; identical to SEQ ID NO: 81696

SEQ ID NO: 81704 - DNA, 201 bp, Homo sapiens; identical to SEQ ID NO: 81697

SEQ ID NO: 81705 - DNA, 201 bp, Homo sapiens; identical to SEQ ID NO: 81698

SEQ ID NO: 81706 - DNA, 201 bp, Homo sapiens; identical to SEQ ID NO: 81699

SEQ ID NO: 81707 - DNA, 201 bp, Homo sapiens
tttggcctcgtggacatccctgtggagttcaagctggtcattgcccaggtcctgctcctggacttctgcctggcgctcctggccgaccgcgtcctgcagtwcttcctggggaccccgaagctgaaagtgccttcctgagatggcagtgctggtacccactgcccaccctggctgccgctgggcgggaaccccaacagggcc

SEQ ID NO: 81708 - DNA, 145 bp, Homo sapiens
cccccaaccccccacagcaaggctgtacagtctcgcccttggaagactgagctgggacccccacagccatccgctggcttggccagcagaaccagccccargccagcacctttggtaaataaagcagcatctgagattttaaaaa

SEQ ID NO: 81709 - DNA, 201 bp, Homo sapiens
agccaagcagcggtcggggctccctccctccgaggagcagccaacctcccagagggaccgcctgagccaggtgctgcgagacctcgaggacgagagtacgmccattgtgaaactgggggatgccagcatcgcagcacccttcacctccaagctctcatccatccagtgcatctgccacgtgatcaagcagggccgctgcac

SEQ ID NO: 81710 - DNA, 180 bp, Homo sapiens
ctgagcccggtcagccaagcccccagccctaaccctaggtgctgcccgcaggccggcagtgcgagtggcgctccattgayggcagcatcgtgctgcccctggcccggggctccccaaaggcactggccctggagtacgcactgtgcctcacaggcgacggcttggcccacctgcaggcca

SEQ ID NO: 81711 - DNA, 201 bp, Homo sapiens
gcccgactaccaccacatccacaccgagatctcccgggaaggagcccgcgtcctggcgctggggtacaaggagctgggacacctcactcaccagcaggccmgggaggtcaagcgggaggccctggagtgcagcctcaagttcgtcggcttcattgtggtctcctgcccgctcaaggctgactccaaggccgtgatccggga

SEQ ID NO: 81712 - DNA, 148 bp, Homo sapiens
atggagaagtgggaggagctgaacagccatcagccaggagaggagtaygaccccagcaaagcgacctttgtgaaggtggtgccaacccccaacaatggctccacggagctcgtggccctgcaccgcaatgagggcgaagacgggcttg

SEQ ID NO: 81713 - DNA, 201 bp, Homo sapiens
tttggcctcgtggacatccctgtggagttcaagctggtcattgcccaggtcctgctcctggacttctgcctggcgctcctggccgaccgcgtcctgcagtwcttcctggggaccccgaagctgaaagtgccttcctgagatggcagtgctggtacccaagcaaggctgtacagtctcgcccttggaagactgagctgggac

SEQ ID NO: 81714 - DNA, 201 bp, Homo sapiens
tggtggtgcgcggtgtggccgggctgagagacgggaaggaggtgaccccagtgtccagcatccctgtagaaacacaccgggccctggcctcgtgccactcrctcatgcagctggacgacggcaccctcgtgggtgaccctctagagaaggccatgctgacggccgtggactggacgctgaccaaagatgagaaagtattcc

SEQ ID NO: 81715 - DNA, 201 bp, Homo sapiens
tctccatcggccgctccccacaggagaacctggtgccatgtgacgtgcttctgctgcgaggccgctgcatcgtagacgaggccatgctcacgggggagtcygtgccacagatgaaggagcccatcgaagacctcagcccagaccgggtgctggacctccaggctgattcccggctgcacgtcatcttcgggggcaccaagg

SEQ ID NO: 81716 - DNA, 201 bp, Homo sapiens; identical to SEQ ID NO: 81709

SEQ ID NO: 81717 - DNA, 201 bp, Homo sapiens
gccacgtggcccaggagctgcacttcattgaaaaggcccacacgctgatcctgcagcctccctccgagaaaggccggcagtgcgagtggcgctccattgayggcagcatcgtgctgcccctggcccggggctccccaaaggcactggccctggagtacgcactgtgcctcacaggcgacggcttggcccacctgcaggcca

SEQ ID NO: 81718 - DNA, 201 bp, Homo sapiens
tgtactgcacagagcccttccggatcccctttgctggcaaggtcgaggtgtgctgctttgacaagacggggacgttgaccagtgacagcctggtggtgcgyggtgtggccgggctgagagacgggaaggaggtgaccccagtgtccagcatccctgtagaaacacaccgggccctggcctcgtgccactcgctcatgcagc

SEQ ID NO: 81719 - DNA, 140 bp, Homo sapiens
cagtgctggtacccaagcaaggctgtacagtctcgcccttggaagactgagctgggacccccacagccatccgctggcttggccagcagaaccagccccargccagcacctttggtaaataaagcagcatctgagatttt

SEQ ID NO: 81720 - DNA, 201 bp, Homo sapiens
ctgattcccggctgcacgtcatcttcgggggcaccaaggtggtgcagcacatccccccacagaaagccaccacgggcctgaagccggttgacagcgggtgygtggcctacgtcctgcggaccggattcaacacatcccagggcaagctgctgcgcaccatcctcttcggggtcaagagggtgactgcgaacaacctggaga

SEQ ID NO: 81721 - DNA, 201 bp, Homo sapiens
ggaggagctgaacagccatcagccaggagaggagtacgaccccagcaaagcgacctttgtgaaggtggtgccaacccccaacaatggctccacggagctcktggccctgcaccgcaatgagggcgaagacgggcttgaggtgctgtccttcgaattccagaagatcaagtattcctacgatgccctggagaagaagcagtt

SEQ ID NO: 81722 - DNA, 201 bp, Homo sapiens; identical to SEQ ID NO: 81711

SEQ ID NO: 81723 - DNA, 201 bp, Homo sapiens
tgctcgtgcttgccaccatctgcctcgcgcacgcgctcactgtcctctcggggcattggtctgtgcacgcgcattgcgcgctcacctgcaccccggagtaygaccccagcaaagcgacctttgtgaaggtggtgccaacccccaacaatggctccacggagctcgtggccctgcaccgcaatgagggcgaagacgggcttg

SEQ ID NO: 81724 - DNA, 201 bp, Homo sapiens; identical to SEQ ID NO: 81713

SEQ ID NO: 81725 - DNA, 201 bp, Homo sapiens; identical to SEQ ID NO: 81714

SEQ ID NO: 81726 - DNA, 201 bp, Homo sapiens; identical to SEQ ID NO: 81715

SEQ ID NO: 81727 - DNA, 201 bp, Homo sapiens; identical to SEQ ID NO: 81709

SEQ ID NO: 81728 - DNA, 201 bp, Homo sapiens; identical to SEQ ID NO: 81717

SEQ ID NO: 81729 - DNA, 201 bp, Homo sapiens; identical to SEQ ID NO: 81718

SEQ ID NO: 81730 - DNA, 140 bp, Homo sapiens; identical to SEQ ID NO: 81719

SEQ ID NO: 81731 - DNA, 201 bp, Homo sapiens; identical to SEQ ID NO: 81720

SEQ ID NO: 81732 - DNA, 201 bp, Homo sapiens
gcacgcgcattgcgcgctcacctgcaccccggagtacgaccccagcaaagcgacctttgtgaaggtggtgccaacccccaacaatggctccacggagctcktggccctgcaccgcaatgagggcgaagacgggcttgaggtgctgtccttcgaattccagaagatcaagtattcctacgatgccctggagaagaagcagtt

SEQ ID NO: 81733 - DNA, 201 bp, Homo sapiens; identical to SEQ ID NO: 81711

SEQ ID NO: 81734 - DNA, 201 bp, Homo sapiens; identical to SEQ ID NO: 81707

SEQ ID NO: 81735 - DNA, 201 bp, Homo sapiens; identical to SEQ ID NO: 81723

SEQ ID NO: 81736 - DNA, 201 bp, Homo sapiens
tggtggtgcgcggtgtggccgggctgagagacgggaaggaggtgaccccagtgtccagcatccctgtagaaacacaccgggccctggcctcgtgccactcrctcatgcagctggacgacggcaccctcgtgggtgaccctctagagaaggccatgctgacggccgtggactggacgctgaccaaagtgccctgaagcgaat

SEQ ID NO: 81737 - DNA, 201 bp, Homo sapiens; identical to SEQ ID NO: 81709

SEQ ID NO: 81738 - DNA, 201 bp, Homo sapiens
gccctgcaggccgctccccacaggagaacctggtgccatgtgacgtgcttctgctgcgaggccgctgcatcgtagacgaggccatgctcacgggggagtcygtgccacagatgaaggagcccatcgaagacctcagcccagaccgggtgctggacctccaggctgattcccggctgcacgtcatcttcgggggcaccaagg

SEQ ID NO: 81739 - DNA, 201 bp, Homo sapiens; identical to SEQ ID NO: 81717

SEQ ID NO: 81740 - DNA, 201 bp, Homo sapiens; identical to SEQ ID NO: 81718

SEQ ID NO: 81741 - DNA, 145 bp, Homo sapiens; identical to SEQ ID NO: 81708

SEQ ID NO: 81742 - DNA, 201 bp, Homo sapiens
ttcccggctgcacgtcatcttcgggggcaccaaggtggtgcagcacatccccccacagaaagccaccacgggcctgaagcgtagcggttgacagcgggtgygtggcctacgtcctgcggaccggattcaacacatcccagggcaagctgctgcgcaccatcctcttcggggtcaagagggtgactgcgaacaacctggaga

SEQ ID NO: 81743 - DNA, 201 bp, Homo sapiens; identical to SEQ ID NO: 81732

SEQ ID NO: 81744 - DNA, 201 bp, Homo sapiens; identical to SEQ ID NO: 81723

SEQ ID NO: 81745 - DNA, 201 bp, Homo sapiens
cggtcggggctccctccctccgaggagcagccaacctcccagagggtgagtcccaagaggggaggtgctgcaccccatcctggccagggctgacagcctgmtgtctaccctgcaggaccgcctgagccaggtgctgcgagacctcgaggacgagagtacgcccattgtgaaactgggggatgccagcatcgcagcaccctt

SEQ ID NO: 81746 - DNA, 201 bp, Homo sapiens; identical to SEQ ID NO: 81711

SEQ ID NO: 81747 - DNA, 201 bp, Homo sapiens; identical to SEQ ID NO: 81707

SEQ ID NO: 81748 - DNA, 201 bp, Homo sapiens; identical to SEQ ID NO: 81736

SEQ ID NO: 81749 - DNA, 201 bp, Homo sapiens
cactccatgttctcccagtgcccgcccgactaccaccacatccacaccgagatctcccgggaaggagcccgcgtcctggcgctggggtacaaggagctgggacacctcactcaccagcaggcccgggaggtcaagcgggaggccctggagtgcagcctcaagttcgtcggcttcattgtggtctcctgcccgctcaaggct

SEQ ID NO: 81750 - DNA, 201 bp, Homo sapiens; identical to SEQ ID NO: 81715

SEQ ID NO: 81751 - DNA, 201 bp, Homo sapiens
ggaggtgctgcaccccatcctggccagggctgacagcctgctgtctaccctgcaggaccgcctgagccaggtgctgcgagacctcgaggacgagagtacgmccattgtgaaactgggggatgccagcatcgcagcacccttcacctccaagctctcatccatccagtgcatctgccacgtgatcaagcagggccgctgcac

SEQ ID NO: 81752 - DNA, 201 bp, Homo sapiens; identical to SEQ ID NO: 81718

SEQ ID NO: 81753 - DNA, 201 bp, Homo sapiens; identical to SEQ ID NO: 81717

SEQ ID NO: 81754 - DNA, 145 bp, Homo sapiens; identical to SEQ ID NO: 81708

SEQ ID NO: 81755 - DNA, 201 bp, Homo sapiens; identical to SEQ ID NO: 81720

SEQ ID NO: 81756 - DNA, 201 bp, Homo sapiens; identical to SEQ ID NO: 81732

SEQ ID NO: 81757 - DNA, 201 bp, Homo sapiens; identical to SEQ ID NO: 81711

SEQ ID NO: 81758 - DNA, 201 bp, Homo sapiens; identical to SEQ ID NO: 81723

SEQ ID NO: 81759 - DNA, 201 bp, Homo sapiens; identical to SEQ ID NO: 81707

SEQ ID NO: 81760 - DNA, 201 bp, Homo sapiens; identical to SEQ ID NO: 81714

SEQ ID NO: 81761 - DNA, 201 bp, Homo sapiens; identical to SEQ ID NO: 81715

SEQ ID NO: 81762 - DNA, 201 bp, Homo sapiens; identical to SEQ ID NO: 81709

SEQ ID NO: 81763 - DNA, 201 bp, Homo sapiens; identical to SEQ ID NO: 81717

SEQ ID NO: 81764 - DNA, 201 bp, Homo sapiens; identical to SEQ ID NO: 81718

SEQ ID NO: 81765 - DNA, 145 bp, Homo sapiens; identical to SEQ ID NO: 81708

SEQ ID NO: 81766 - DNA, 201 bp, Homo sapiens; identical to SEQ ID NO: 81720

SEQ ID NO: 81767 - DNA, 201 bp, Homo sapiens; identical to SEQ ID NO: 81732

SEQ ID NO: 81768 - DNA, 201 bp, Homo sapiens; identical to SEQ ID NO: 81711

SEQ ID NO: 81769 - DNA, 148 bp, Homo sapiens; identical to SEQ ID NO: 81712

SEQ ID NO: 81770 - DNA, 201 bp, Homo sapiens; identical to SEQ ID NO: 81707

SEQ ID NO: 81771 - DNA, 201 bp, Homo sapiens; identical to SEQ ID NO: 81714

SEQ ID NO: 81772 - DNA, 201 bp, Homo sapiens; identical to SEQ ID NO: 81715

SEQ ID NO: 81773 - DNA, 201 bp, Homo sapiens; identical to SEQ ID NO: 81709

SEQ ID NO: 81774 - DNA, 201 bp, Homo sapiens; identical to SEQ ID NO: 81717

SEQ ID NO: 81775 - DNA, 201 bp, Homo sapiens; identical to SEQ ID NO: 81718

SEQ ID NO: 81776 - DNA, 145 bp, Homo sapiens; identical to SEQ ID NO: 81708

SEQ ID NO: 81777 - DNA, 201 bp, Homo sapiens; identical to SEQ ID NO: 81720

SEQ ID NO: 81778 - DNA, 201 bp, Homo sapiens; identical to SEQ ID NO: 81721

SEQ ID NO: 81779 - DNA, 201 bp, Homo sapiens; identical to SEQ ID NO: 81723

SEQ ID NO: 81780 - DNA, 201 bp, Homo sapiens; identical to SEQ ID NO: 81745

SEQ ID NO: 81781 - DNA, 201 bp, Homo sapiens; identical to SEQ ID NO: 81711

SEQ ID NO: 81782 - DNA, 201 bp, Homo sapiens; identical to SEQ ID NO: 81713

SEQ ID NO: 81783 - DNA, 201 bp, Homo sapiens; identical to SEQ ID NO: 81749

SEQ ID NO: 81784 - DNA, 201 bp, Homo sapiens; identical to SEQ ID NO: 81751

SEQ ID NO: 81785 - DNA, 201 bp, Homo sapiens; identical to SEQ ID NO: 81738

SEQ ID NO: 81786 - DNA, 201 bp, Homo sapiens; identical to SEQ ID NO: 81717

SEQ ID NO: 81787 - DNA, 201 bp, Homo sapiens
tgtactgcacagagcccttccggatcccctttgctggcaaggtcgaggtgtgctgctttgacaagacggggacgttgaccagtgacagcctggtggtgcgyggtgtggccggggacggcaccctcgtgggtgaccctctagagaaggccatgctgacggccgtggactggacgctgaccaaagtgccctgaagcgaatgtc

SEQ ID NO: 81788 - DNA, 201 bp, Homo sapiens
ttgagccaagcctggtcaacagcaccgtctacatcatggccatggccatgcagatggccaccttcgccatcaattacaaagtaaggcctgggccctgcccraacattcactgtctgcccacccagccccaccccatgaagccatctgtccctcatccccacagggcccgcccttcatggagagcctgcccgagaacaagcc

SEQ ID NO: 81789 - DNA, 140 bp, Homo sapiens; identical to SEQ ID NO: 81719

SEQ ID NO: 81790 - DNA, 201 bp, Homo sapiens; identical to SEQ ID NO: 81742

SEQ ID NO: 81791 - DNA, 201 bp, Homo sapiens; identical to SEQ ID NO: 81732

SEQ ID NO: 81792 - DNA, 201 bp, Homo sapiens
ctgaccgacacactccgggagctgcagggtctggccaccaaccagcccttcttctgggaagcacaggccccggtgagcaccgtggagcagctggaccagcrctacctgctggtgcctgagaaggtcaaggacgcctacctggtccacctgatccagcgcttccaggatgagcacgaggactggtccattatcatcttcacc

SEQ ID NO: 81793 - DNA, 201 bp, Homo sapiens
agatcgcagagcagttccgggtcctggggaagcctctagggctgaaagactgcatcatcgtcggtggcatggacatggtggcccaggcgctggagctctcycggaaaccacacgtggtcatcgccacgccggggcgcctggcagatcacctgcgcagctccaacacttttagtataaagaagatccgcttcctggtgatgg

SEQ ID NO: 81794 - DNA, 201 bp, Homo sapiens
gattctgtgcatgatgctgcgcaaattcagcttccccaccgtggctctgcactccatgatgaagcagaaagaacgctttgccgccctagccaagttcaagkccagcatctaccggatcctgatcgcaacagacgtggcctcccggggcctggacatccctacggtacaggtggtcatcaaccacaacacccccgggctccc

SEQ ID NO: 81795 - DNA, 201 bp, Homo sapiens
ggggaaggaccctgacctggaggccaagcgcaaggctgagctggccaagatcaagcagaagaaccggcgcttcaaggagaaggtggaggagacgctgaagygacagaaggctggcagggctggccacaaggggcgtccacccaggacaccgtctgggtcccactcaggcccagtcccctcccagggcctggtctgagcccc

SEQ ID NO: 81796 - DNA, 201 bp, Homo sapiens
tcaagcagaagaaccggcgcttcaaggagaaggtggaggagacgctgaagcgacagaaggctggcagggctggccacaaggggcgtccacccaggacaccrtctgggtcccactcaggcccagtcccctcccagggcctggtctgagccccacacggccatctgcccagtccttgactcgtccatggagctgagggtcgga

SEQ ID NO: 81797 - DNA, 201 bp, Homo sapiens
cagcagcccttcccgggggcctacccagtgccccacagcagaacccgtgggcgctcgtgttgtgcgggccctgctcctctgccccgaaaccactggctggycccttccctgagccctggccaagattcaggctgcaggggaagaaagaacatgaccgggaggttgtgaccccaacccaaggtcaccccccaggggtgccgc

SEQ ID NO: 81798 - DNA, 201 bp, Homo sapiens
agcccacgcccgtgcagctcggctgcatccccgccatcctggagggtcgagactgcttgggctgtgctaagacaggcagtgggaagacagcagcgtttgtycttcccatcttgcagaagctgtctgaggatccctatggcatcttctgcctcgtcctgacacccaccagggagctggcctaccagatcgcagagcagttcc

SEQ ID NO: 81799 - DNA, 159 bp, Homo sapiens
ccgaaaccactggctggtcccttccctgagccctggccaagattcaggctgcaggggaagaaagaacatgaccgggaggttgtgaccccaacccaaggtcmccccccaggggtgccgcatacaggaggtgcttaataaacgggtcttttgacttcctca

SEQ ID NO: 81800 - DNA, 180 bp, Homo sapiens
gcgccggaagcgcggatcacacgggcccctacaaggggcccctacaagcggccacaaggatggcaggcttcgcggagctygggctgtcatcgtggctcgtggaacaatgtcggcagctgggtttgaagcagcccacgcccgtgcagctcggctgcatccccgccatcctggagggtcgag

SEQ ID NO: 81801 - DNA, 149 bp, Homo sapiens
gcgccggaagcgcggatcacacgggcccctacaaggggcccctacaagyggccacaaggatggcaggcttcgcggagctcgggctgtcatcgtggctcgtggaacaatgtcggcagctgggtttgaagcagcccacgcccgtgcagctc

SEQ ID NO: 81802 - DNA, 201 bp, Homo sapiens
ggggcgtccacccaggacaccgtctgggtcccactcaggcccagtcccctcccagggcctggtctgagccccacacggccatctgcccagtccttgactcrtccatggagctgagggtcggaggaaccttccttgggggcagcagcccttcccgggggcctacccagtgccccacagcagaacccgtgggcgctcgtgttg

SEQ ID NO: 81803 - DNA, 201 bp, Homo sapiens
aattcagcttccccaccgtggctctgcactccatgatgaagcagaaagaacgctttgccgccctagccaagttcaagtccagcatctaccggatcctgatygcaacagacgtggcctcccggggcctggacatccctacggtacaggtggtcatcaaccacaacacccccgggctccccaagatctacatccaccgagtcg

SEQ ID NO: 81804 - DNA, 201 bp, Homo sapiens
cgctgaagcgacagaaggctggcagggctggccacaaggggcgtccacccaggacaccgtctgggtcccactcaggcccagtcccctcccagggcctggtytgagccccacacggccatctgcccagtccttgactcgtccatggagctgagggtcggaggaaccttccttgggggcagcagcccttcccgggggcctacc

SEQ ID NO: 81805 - DNA, 201 bp, Homo sapiens; identical to SEQ ID NO: 81792

SEQ ID NO: 81806 - DNA, 201 bp, Homo sapiens; identical to SEQ ID NO: 81793

SEQ ID NO: 81807 - DNA, 201 bp, Homo sapiens
acctgatccagcgcttccaggatgagcacgaggactggtccattatcatcttcaccaacacgtgcaaaaagaacgctttgccgccctagccaagttcaagkccagcatctaccggatcctgatcgcaacagacgtggcctcccggggcctggacatccctacggtacaggtggtcatcaaccacaacacccccgggctccc

SEQ ID NO: 81808 - DNA, 201 bp, Homo sapiens
ggggaaggaccctgacctggaggccaagcgcaaggctgagctggccaagatcaagcagaagaaccggcgcttcaaggagaaggtggaggagacgctgaagygacagaaggctggcagggctggccacaaggggcgtccacccaggacaccgtctgggtcccactcaggcccagtcccccagtgccccacagcagaacccgt

SEQ ID NO: 81809 - DNA, 201 bp, Homo sapiens
tcaagcagaagaaccggcgcttcaaggagaaggtggaggagacgctgaagcgacagaaggctggcagggctggccacaaggggcgtccacccaggacaccrtctgggtcccactcaggcccagtcccccagtgccccacagcagaacccgtgggcgctcgtgttgtgcgggccctgctcctctgccccgaaaccactggct

SEQ ID NO: 81810 - DNA, 201 bp, Homo sapiens
agcccacgcccgtgcagctcggctgcatccccgccatcctggagggtcgagactgcttgggctgtgctaagacaggcagtgggaagacagcagcgtttgtycttcccatcttgcagaagctgtctgaggatccctatggcatcttctgcctcgtcctgacacccaccaggggtcctgcagaattaaacaagatggccccgg

SEQ ID NO: 81811 - DNA, 201 bp, Homo sapiens
tgggtcccactcaggcccagtcccccagtgccccacagcagaacccgtgggcgctcgtgttgtgcgggccctgctcctctgccccgaaaccactggctggycccttccctgagccctggccaagattcaggctgcaggggaagaaagaacatgaccgggaggttgtgaccccaacccaaggtcaccccccaggggtgccgc

SEQ ID NO: 81812 - DNA, 160 bp, Homo sapiens
ccgaaaccactggctggtcccttccctgagccctggccaagattcaggctgcaggggaagaaagaacatgaccgggaggttgtgaccccaacccaaggtcmccccccaggggtgccgcatacaggaggtgcttaataaacgggtcttttgacttcctcag

SEQ ID NO: 81813 - DNA, 180 bp, Homo sapiens; identical to SEQ ID NO: 81800

SEQ ID NO: 81814 - DNA, 149 bp, Homo sapiens; identical to SEQ ID NO: 81801

SEQ ID NO: 81815 - DNA, 201 bp, Homo sapiens
gagcacgaggactggtccattatcatcttcaccaacacgtgcaaaaagaacgctttgccgccctagccaagttcaagtccagcatctaccggatcctgatygcaacagacgtggcctcccggggcctggacatccctacggtacaggtggtcatcaaccacaacacccccgggctccccaagatctacatccaccgagtcg

SEQ ID NO: 81816 - DNA, 201 bp, Homo sapiens
aaccgtactctcccactggaactctggggcccactgaggcaccattattggggatttcagggtggctgggcactgcaaactgctccctcctctgtggtccmtgaaagagccccacacgcctgcttcagacgtgtccacgcacaccagtcctcacagacacacacacacatgcatggaggcaataaatatgttccgtaccag

SEQ ID NO: 81817 - DNA, 201 bp, Homo sapiens
agctggtttggagtctcatcattgcttgccctgggcctatcccatgaggcccagtgactccacaacctccctgaggaggggatggaggggtcaaatctcaragaggctctcttgtgagctcttggaccctcctcttcacggacccaactgtgccgtttgtcccctctcttatggagactgaataaaccacctctggcccat

SEQ ID NO: 81818 - DNA, 201 bp, Homo sapiens
catctggtacagccccgcggccccctgcgctggctcgatcctggggcctttgggactctgggagttggtgcaggatttgcacttggggccaagctgtgccrgccagatgctgaggtctggtgcctgtttggggacggagcttttggctacagcctcatcgaatttgatacattcgtcagacacaagatcccagtgatggcc

SEQ ID NO: 81819 - DNA, 201 bp, Homo sapiens
acgaggatcaggtggtcaaggtgctgcacgatgcccagcagcagtgccgagacggccacccggttgtggtcaacatcctcattgggaggacggacttccgygatggctccattgctgtatagggccttgtgggtcaggacgcttggctgccttcctgcccctggactgtgtccagctggtttggagtctcatcattgcttg

SEQ ID NO: 81820 - DNA, 201 bp, Homo sapiens
gccgccttgctgggcgccgctcaccgcctggggctcttctatcagctgctgcacaaggtggacaaggcaagcgtccggcatggcggagagaacgtggccgytgtgctgagggcccatggtgtgcggttcatcttcacgctggtcggtgggcacatttccccgctgctggtggcctgtgagaaactgggcatccgtgtggtg

SEQ ID NO: 81821 - DNA, 201 bp, Homo sapiens
ggggggggggcaaggggggggcaaggagatggggattggaaaggccagactctgttatctccatttgctgactagaggccaatcgtggggtcttccccggraaagggtaggggaaaccagctgtttctctataagccccaggctacccctgtgtccatgctggaacccaggataggggctgccccccacaaagagtgcctc

SEQ ID NO: 81822 - DNA, 201 bp, Homo sapiens
gaccctcctcttcacggacccaactgtgccgtttgtcccctctcttatggagactgaataaaccacctctggcccatgtaggcccaagtactcagtctcaraacctgtgcatatttatttattatccacaaagatggaggtgcggaaaagaagagggagacaggagggaaccgtactctcccactggaactctggggccca

SEQ ID NO: 81823 - DNA, 201 bp, Homo sapiens
gtgttccctgcttccttggagggatggcacgggggctgttaggccgcaaccaccccctccacatccgggagaaccgcagtgcggccctgaagaaggcggaygtcattgtcctagcaggaactgtgtgtgacttccgcctatcctatggccgtgtcctcagccacagcagcaagatcatcatcgtcaatcgtaatcgggaag

SEQ ID NO: 81824 - DNA, 201 bp, Homo sapiens
tgcggttcatcttcacgctggtcggtgggcacatttccccgctgctggtggcctgtgagaaactgggcatccgtgtggtggacacacgccatgaggtcacrgccgtctttgctgctgatgctatggcccgcctgtccgggacggtgggcgtggcggcagtgacagcaggccctggcctcaccaacacggtgactgcggtga

SEQ ID NO: 81825 - DNA, 180 bp, Homo sapiens
ttccccgggaaagggtaggggaaaccagctgtttctctataagccccaggctacccctgtgtccatgctggaacccaggataggggctgccccccacaaasagtgcctcatgctagtctttgtgtcgtccaagggagggagaaacagtgcagtgctcaaagctaatactgatttggttgg

SEQ ID NO: 81826 - DNA, 201 bp, Homo sapiens
ggagggtgcgggacattgtgcccaccctgagggccgcgatggctgccgcccagtcgggcaccccaggtccggtgtttgtggagctgcccgttgacgtgctktacccctacttcatggtccagaaggagatggtgccagccaagccacccaagggcctcgtgggccgagtggtctcctggtatttagagaattacctggcca

SEQ ID NO: 81827 - DNA, 201 bp, Homo sapiens
ccgcctgtccgggacggtgggcgtggcggcagtgacagcaggccctggcctcaccaacacggtgactgcggtgaagaatgctcagatggctcagtccccartcctgcttctgggtggggctgccagcactctgctgcagaaccggggtgcgctccaggctgttgatcagctgtcccttttccggccactctgtaagttttg

SEQ ID NO: 81828 - DNA, 201 bp, Homo sapiens
aggaaacgctacctgacaactcaattctggtggtggatggtggggacttcgtgggcactgctgcccatctggtacagccccgcggccccctgcgctggctygatcctggggcctttgggactctgggagttggtgcaggatttgcacttggggccaagctgtgccggccagatgctgaggtctggtgcctgtttggggacg

SEQ ID NO: 81829 - DNA, 201 bp, Homo sapiens
agaaggcagcgatgcctgtggcccagcacctgaacccagtgcaggtgctgcagctggtggaggaaacgctacctgacaactcaattctggtggtggatggyggggacttcgtgggcactgctgcccatctggtacagccccgcggccccctgcgctggctcgatcctggggcctttgggactctgggagttggtgcaggat

SEQ ID NO: 81830 - DNA, 201 bp, Homo sapiens; identical to SEQ ID NO: 81816

SEQ ID NO: 81831 - DNA, 201 bp, Homo sapiens; identical to SEQ ID NO: 81817

SEQ ID NO: 81832 - DNA, 201 bp, Homo sapiens; identical to SEQ ID NO: 81818

SEQ ID NO: 81833 - DNA, 201 bp, Homo sapiens; identical to SEQ ID NO: 81819

SEQ ID NO: 81834 - DNA, 201 bp, Homo sapiens; identical to SEQ ID NO: 81820

SEQ ID NO: 81835 - DNA, 107 bp, Homo sapiens
aggtgartagcgtcgggggtcgagctggtgtgggagaaccacatcctgatgcgatgtgacctcgacccagcctggcccggggtcggggatcaggctcgggcccgtgc

SEQ ID NO: 81836 - DNA, 201 bp, Homo sapiens; identical to SEQ ID NO: 81821

SEQ ID NO: 81837 - DNA, 201 bp, Homo sapiens; identical to SEQ ID NO: 81822

SEQ ID NO: 81838 - DNA, 201 bp, Homo sapiens; identical to SEQ ID NO: 81823

SEQ ID NO: 81839 - DNA, 201 bp, Homo sapiens; identical to SEQ ID NO: 81824

SEQ ID NO: 81840 - DNA, 201 bp, Homo sapiens; identical to SEQ ID NO: 81826

SEQ ID NO: 81841 - DNA, 180 bp, Homo sapiens; identical to SEQ ID NO: 81825

SEQ ID NO: 81842 - DNA, 201 bp, Homo sapiens; identical to SEQ ID NO: 81827

SEQ ID NO: 81843 - DNA, 201 bp, Homo sapiens; identical to SEQ ID NO: 81828

SEQ ID NO: 81844 - DNA, 201 bp, Homo sapiens
ggtgtgggagaaccacatcctgatgcgatgtgacctcgacccagcctggcccggggtcggggatcaggctcgggcccgtgcgctctttaagggagaggcgkgggttgcgtggagggtcgcgcccgctaacccgggggcgtgacctcgtgcctcttggtgacgtaacatggggcgggctcactactggggctgagatttggg

SEQ ID NO: 81845 - DNA, 201 bp, Homo sapiens; identical to SEQ ID NO: 81829

SEQ ID NO: 81846 - DNA, 201 bp, Homo sapiens; identical to SEQ ID NO: 81816

SEQ ID NO: 81847 - DNA, 201 bp, Homo sapiens; identical to SEQ ID NO: 81817

SEQ ID NO: 81848 - DNA, 201 bp, Homo sapiens; identical to SEQ ID NO: 81818

SEQ ID NO: 81849 - DNA, 201 bp, Homo sapiens; identical to SEQ ID NO: 81819

SEQ ID NO: 81850 - DNA, 201 bp, Homo sapiens; identical to SEQ ID NO: 81820

SEQ ID NO: 81851 - DNA, 201 bp, Homo sapiens; identical to SEQ ID NO: 81821

SEQ ID NO: 81852 - DNA, 201 bp, Homo sapiens; identical to SEQ ID NO: 81822

SEQ ID NO: 81853 - DNA, 201 bp, Homo sapiens; identical to SEQ ID NO: 81823

SEQ ID NO: 81854 - DNA, 201 bp, Homo sapiens; identical to SEQ ID NO: 81824

SEQ ID NO: 81855 - DNA, 180 bp, Homo sapiens; identical to SEQ ID NO: 81825

SEQ ID NO: 81856 - DNA, 201 bp, Homo sapiens; identical to SEQ ID NO: 81826

SEQ ID NO: 81857 - DNA, 201 bp, Homo sapiens; identical to SEQ ID NO: 81827

SEQ ID NO: 81858 - DNA, 201 bp, Homo sapiens; identical to SEQ ID NO: 81828

SEQ ID NO: 81859 - DNA, 201 bp, Homo sapiens; identical to SEQ ID NO: 81829

SEQ ID NO: 81860 - DNA, 155 bp, Homo sapiens
taaaccctgaccttcctgtccctgccttcgacctcctgcctgggtcttcagctcagtgctactctgaatacaatactgctgaccacatttggctacttcarcttaaatgtatgttaattgaaatgaaatacaatgaaaatgcagtgctcagtccc

SEQ ID NO: 81861 - DNA, 201 bp, Homo sapiens
cttccccctggaaccccaggagctgaccacacccacattgctgctgtggggggagaaggacacttacttggagctggggctggtggaagccatcggcagcygctttgtgccgggccgcttggaggcccacatcctgccaggcatagggcattggatcccacagagcaacccccaggagatgcaccagtacatgtgggcctt

SEQ ID NO: 81862 - DNA, 155 bp, Homo sapiens; identical to SEQ ID NO: 81860

SEQ ID NO: 81863 - DNA, 201 bp, Homo sapiens; identical to SEQ ID NO: 81861

SEQ ID NO: 81864 - DNA, 125 bp, Homo sapiens
atgcggggcaatgaggaggacatgmggctgatggaggatctgggccactacttccgtgatgtccaactctggtggcttgggtctttctaccctgtcctgcatctcgtccaccctacgttcactgc

SEQ ID NO: 81865 - DNA, 201 bp, Homo sapiens
gaggacatgaggctgatggaggatctgggccactacttccgtgatgtccaactctggtggcttgggtctttctaccctgtcctgcatctcgtccaccctaygttcactgcccctgtgctccaggcttcagctgctgttgcactcaaggatatgagtttctatggcttcctgaagccctggctgggggatgggctcctgatt

SEQ ID NO: 81866 - DNA, 201 bp, Homo sapiens
cctgcaggccaaggccaagtccaagactttggacttcattgacgtgctcttgctggccaaggatgaaaatggaaagaagttgtcagatgagaacataagarcggaggctgacaccttcatgtctgggggccatgacaccacggccagtggtctctcctgggtcctgtacaacctcgcgaggtacccagaataccaggagca

SEQ ID NO: 81867 - DNA, 201 bp, Homo sapiens
catgaggctgatggaggatctgggccactacttccgtgatgtccaactctggtggcttgggtctttctaccctgtcctgcatctcgtccaccctacgttcrctgcccctgtgctccaggcttcagctgctgttgcactcaaggatatgagtttctatggcttcctgaagccctggctgggggatgggctcctgattagtgc

SEQ ID NO: 81868 - DNA, 201 bp, Homo sapiens
ctttggacttcattgacgtgctcttgctggccaaggatgaaaatggaaagaagttgtcagatgagaacataagagcggaggctgacaccttcatgtctggkggccatgacaccacggccagtggtctctcctgggtcctgtacaacctcgcgaggtacccagaataccaggagcactgccgacaggaggtgcaagagctcc

SEQ ID NO: 81869 - DNA, 201 bp, Homo sapiens
tgacgtgctcttgctggccaaggatgaaaatggaaagaagttgtcagatgagaacataagagcggaggctgacaccttcatgtctgggggccatgacaccwcggccagtggtctctcctgggtcctgtacaacctcgcgaggtacccagaataccaggagcactgccgacaggaggtgcaagagctcctgaagaacggtga

SEQ ID NO: 81870 - DNA, 201 bp, Homo sapiens
gtacaacctcgcgaggtacccagaataccaggagcactgccgacaggaggtgcaagagctcctgaagaacggtgatcctaaagagattgaatgggatgacytggcccagttgcccttcctgaccatgtgcctgaaggagagcctgcggctgcattccccagtctccaggatccaccgctgctgcccccaggacggggtgct

SEQ ID NO: 81871 - DNA, 201 bp, Homo sapiens
atggccgggtcatccccaaagggaacacttgcaccatcagcatctttgggatccatcacaacccttcagtctggccggacccggaggtgctaccccttccsccttctccatcccggggcctggtctatgacccctttcgcttcgacccagaaaatctccagaagacatcacctctggcttttattcccttctcagcagtgc

SEQ ID NO: 81872 - DNA, 201 bp, Homo sapiens
tgggggtcctgggcacagtcagagtccccaccccctcccccgggaactgcatcggccagacgttcgccatggctgagatgaaggtggtcctggcgctcackctgctgcgcttccgcgtcctgccggaccacgcggagccccgcaggaagttggagctgatcgtgcgcgcggaggatggactttggctacgggtggagcccc

SEQ ID NO: 81873 - DNA, 169 bp, Homo sapiens
catcggccagacgttcgccatggctgagatgaaggtggtcctggcgctcactctgctgcgcttccgcgtcctgccggaccacgcggagccccgcaggaagytggagctgatcgtgcgcgcggaggatggactttggctacgggtggagcccctgagcgcggatctgcag

SEQ ID NO: 81874 - DNA, 166 bp, Homo sapiens
cggccagacgttcgccatggctgagatgaaggtggtcctggcgctcactctgctgcgcttccgcgtcctgccggaccacgcggagccccgcaggaagttgsagctgatcgtgcgcgcggaggatggactttggctacgggtggagcccctgagcgcggatctgcag

SEQ ID NO: 81875 - DNA, 201 bp, Homo sapiens
ctggtacggaacatatttattgcctccatgcatgtgtgtgtgtgtctgtgaggactggtgtgcgtggacacgtctgaagcaggcgtgtggggctctttcakggaccacagaggagggagcagtttgcagtgcccagccaccctgaaatccccaataatggtgcctcagtgggccccagagttccagtgggagagtacggtt

SEQ ID NO: 81876 - DNA, 201 bp, Homo sapiens
atgggccagaggtggtttattcagtctccataagagaggggacaaacggcacagttgggtccgtgaagaggagggtccaagagctcacaagagagcctctytgagatttgacccctccatcccctcctcagggaggttgtggagtcactgggcctcatgggataggcccagggcaagcaatgatgagactccaaaccagct

SEQ ID NO: 81877 - DNA, 201 bp, Homo sapiens
caagcaatgatgagactccaaaccagctggacacagtccaggggcaggaaggcagccaagcgtcctgacccacaaggccctatacagcaatggagccatcrcggaagtccgtcctcccaatgaggatgttgaccacaaccgggtggccgtctcggcactgctgctgggcatcgtgcagcaccttgaccacctgatcctcgt

SEQ ID NO: 81878 - DNA, 201 bp, Homo sapiens
aagtggtgactcggccccgcggtcgaggaggccccgaaagccccccgagcaaccgctacgccggcgactggagcgtttgcgggcgggacttcctgccctgygggcgggatttcctgtccgggccagactacgaccacgtgacgggcagtgacagcgaggacgaggacgaggaggtcggcgagccgagggtcaccggtgact

SEQ ID NO: 81879 - DNA, 201 bp, Homo sapiens
gaggcactctttgtggggggcagcccctatcctgggttccagcatggacacaggggtagcctggggcttatagagaaacagctggtttcccctaccctttyccggggaagaccccacgattggcctctagtcagcaaatggagataacagagtctggcctttccaatccccatctccttgccccccccttgcccccccccc

SEQ ID NO: 81880 - DNA, 201 bp, Homo sapiens
ccggagcccgagggccggttacctcagcgacggggactcaccggagcgcccagctgggcccccatcacccacctccttccggccctacgaggtgggtcccrcagcccgggcacccccggccgcactctggggccgcctcagcctgcacctgtacggtctcggggggctgcggccagcgccgggggccacccccagggacct

SEQ ID NO: 81881 - DNA, 201 bp, Homo sapiens
tgggccccagagttccagtgggagagtacggttccctcctgtctccctcttcttttccgcacctccatctttgtggataataaataaatatgcacaggttytgagactgagtacttgggcctacatgggccagaggtggtttattcagtctccataagagaggggacaaacggcacagttgggtccgtgaagaggagggtc

SEQ ID NO: 81882 - DNA, 201 bp, Homo sapiens
tagtcggccctcttgctgctgccaaccaaatcagtattagctttgagcactgcactgtttctccctcccttggacgacacaaagactagcatgaggcactstttgtggggggcagcccctatcctgggttccagcatggacacaggggtagcctggggcttatagagaaacagctggtttcccctaccctttcccggggaa

SEQ ID NO: 81883 - DNA, 201 bp, Homo sapiens
cagcggtctgcctatctgaggacctgtaccccgatatcaatgtcatcactggcatcctcaaggattatcttcgagagttgcccaccccactcatcacccarcccctgtataaggtggtactggaggccatggcccgggaccccccaaacagagttccccccaccactgagggcacccgagggctcctcagctgcctgccag

SEQ ID NO: 81884 - DNA, 201 bp, Homo sapiens; identical to SEQ ID NO: 81875

SEQ ID NO: 81885 - DNA, 201 bp, Homo sapiens; identical to SEQ ID NO: 81876

SEQ ID NO: 81886 - DNA, 201 bp, Homo sapiens; identical to SEQ ID NO: 81881

SEQ ID NO: 81887 - DNA, 201 bp, Homo sapiens; identical to SEQ ID NO: 81877

SEQ ID NO: 81888 - DNA, 201 bp, Homo sapiens; identical to SEQ ID NO: 81882

SEQ ID NO: 81889 - DNA, 201 bp, Homo sapiens; identical to SEQ ID NO: 81878

SEQ ID NO: 81890 - DNA, 201 bp, Homo sapiens; identical to SEQ ID NO: 81883

SEQ ID NO: 81891 - DNA, 201 bp, Homo sapiens; identical to SEQ ID NO: 81879

SEQ ID NO: 81892 - DNA, 201 bp, Homo sapiens; identical to SEQ ID NO: 81875

SEQ ID NO: 81893 - DNA, 201 bp, Homo sapiens; identical to SEQ ID NO: 81876

SEQ ID NO: 81894 - DNA, 201 bp, Homo sapiens; identical to SEQ ID NO: 81877

SEQ ID NO: 81895 - DNA, 201 bp, Homo sapiens; identical to SEQ ID NO: 81878

SEQ ID NO: 81896 - DNA, 201 bp, Homo sapiens; identical to SEQ ID NO: 81879

SEQ ID NO: 81897 - DNA, 201 bp, Homo sapiens; identical to SEQ ID NO: 81880

SEQ ID NO: 81898 - DNA, 201 bp, Homo sapiens; identical to SEQ ID NO: 81881

SEQ ID NO: 81899 - DNA, 201 bp, Homo sapiens; identical to SEQ ID NO: 81882

SEQ ID NO: 81900 - DNA, 201 bp, Homo sapiens
tagccttagaagccagtggtgccctgaccagaggggaccctgtgttcacaggcatcctcaaggattatcttcgagagttgcccaccccactcatcacccarcccctgtataaggtggtactggaggccatggcccgggaccccccaaacagagttccccccaccactgagggcacccgagggctcctcagctgcctgccag

SEQ ID NO: 81901 - DNA, 201 bp, Homo sapiens
gcagcggtctgcctatctgaggacctgtaccccgatatcaatgtcatcactgctgtgccctccttagccttagaagccagtggtgccctgaccagaggggrccctgtgttcacaggcatcctcaaggattatcttcgagagttgcccaccccactcatcacccagcccctgtataaggtggtactggaggccatggcccgg

SEQ ID NO: 81902 - DNA, 201 bp, Homo sapiens; identical to SEQ ID NO: 81875

SEQ ID NO: 81903 - DNA, 201 bp, Homo sapiens; identical to SEQ ID NO: 81876

SEQ ID NO: 81904 - DNA, 201 bp, Homo sapiens; identical to SEQ ID NO: 81881

SEQ ID NO: 81905 - DNA, 201 bp, Homo sapiens; identical to SEQ ID NO: 81877

SEQ ID NO: 81906 - DNA, 201 bp, Homo sapiens; identical to SEQ ID NO: 81882

SEQ ID NO: 81907 - DNA, 201 bp, Homo sapiens; identical to SEQ ID NO: 81878

SEQ ID NO: 81908 - DNA, 201 bp, Homo sapiens; identical to SEQ ID NO: 81883

SEQ ID NO: 81909 - DNA, 201 bp, Homo sapiens; identical to SEQ ID NO: 81879

SEQ ID NO: 81910 - DNA, 201 bp, Homo sapiens
atcctatcagcatcttcatgacgcacctgtccaactatgggaatgaccgcctgggcctgtacaccttcaagcacctggtgcgcttcctgcactcctggacsaacctccggctgcagacactgccccctgtgcagttggcgcagaagtacttccagatcttctccgaggagaaggacccgctctggcaggacccctgcgagg

SEQ ID NO: 81911 - DNA, 201 bp, Homo sapiens
caaatcactccacctatgagccagtgctgctggccaagacgcgctcgtctgagtccatcccacacctgggcgcagacgccggcctgcatgctgcactgcaygccactgtggtccaggacctgggcctgcacgacggcatccagcgcgtgctgtttggcaacaacctgaacttctggctgcacaagcttgtcttcgtggatg

SEQ ID NO: 81912 - DNA, 201 bp, Homo sapiens
caggaccacgcgggggtttgccatggtgacataaaggggcgcggaggaaggaaggagcgtgaccagcctgtggactgcgcccctggctgggaggaaggacygggggcccagatcctccactcccagtgccccacaagggcgtcgcttcctaagtctctgtgaatttgttggtcagtggacgattctcgtgtctcctcctgt

SEQ ID NO: 81913 - DNA, 201 bp, Homo sapiens
ggaatgaccgcctgggcctgtacaccttcaagcacctggtgcgcttcctgcactcctggaccaacctccggctgcagacactgccccctgtgcagttggcrcagaagtacttccagatcttctccgaggagaaggacccgctctggcaggacccctgcgaggacaaacgtcacaaagacatctggtccaaggagaagacgt

SEQ ID NO: 81914 - DNA, 201 bp, Homo sapiens
tggaccgctacatcctggtggacattgatgacatcttcgtgggcaaggagggcacacgcatgaaggtggaggacgtgaaggccctgtttgacacacagaaygaactacgcgcacacatcccaaacttcaccttcaacctgggctactcagggaaattcttccacacaggtaccaatgctgaggacgctggggatgatctgc

SEQ ID NO: 81915 - DNA, 201 bp, Homo sapiens
cgtggccaccacagccagactgaacgtttgtgaaagctgggacatcccaccacacgctgagccagacctgcagagtgggaagctggaccagggcagctgcrcacttatgagcaatactctgtggaggtctggtggggctgggggagcacccaggcggatctgcaagcacctcggagcacccaccgctgggtctgcggccta

SEQ ID NO: 81916 - DNA, 201 bp, Homo sapiens
ggaagaatttctggttcctacagtatccactccatcctcaaggcttcccgcagggccttggggcactgccttgccatcgggcccagttctccgggccccasctgcacccctttcttccccctgggatatgatgtgtggtgtttcctgtggtaaaagactgaggcaggccaggggtctgccagtaacatgttcccatgtaca

SEQ ID NO: 81917 - DNA, 201 bp, Homo sapiens
gtataagatgggccagacacttcccacttggctacgagaggacctccagaacaccaggtagccgtggccaccacagccagactgaacgtttgtgaaagctrggacatcccaccacacgctgagccagacctgcagagtgggaagctggaccagggcagctgcgcacttatgagcaatactctgtggaggtctggtggggct

SEQ ID NO: 81918 - DNA, 201 bp, Homo sapiens
ccattccgttcccagctgctcctggggaggccgcttcctggtaggagggagtccacgagactcttttctgtccctcactgtgttccgccgactgtcccctstcgtcacccatcactccctgcttccgcagggcgcccctcagtattcgctgccatatgtccctgtcctccaggctgtaggggaggagagcctggccggggg

SEQ ID NO: 81919 - DNA, 201 bp, Homo sapiens
ctaagtctctgtgaatttgttggtcagtggacgattctcgtgtctcctcctgtgtggggccttggggtagccagggcaggccgggcctccggtggccaagktctcggaggccaggatgcctgccctggcatgcctccggaggctgtgtcggcacgtgtccccgcaggctgtccttttcctgctgttcatcttctgcctgtt

SEQ ID NO: 81920 - DNA, 201 bp, Homo sapiens
gaacgtttgtgaaagctgggacatcccaccacacgctgagccagacctgcagagtgggaagctggaccagggcagctgcgcacttatgagcaatactctgwggaggtctggtggggctgggggagcacccaggcggatctgcaagcacctcggagcacccaccgctgggtctgcggcctaagggacctccctcgccagcag

SEQ ID NO: 81921 - DNA, 201 bp, Homo sapiens
tgcacaagcttgtcttcgtggatgccgtggccttcctcacggggaagcgcctctccctgccattggaccgctacatcctggtggacattgatgacatcttygtgggcaaggagggcacacgcatgaaggtggaggacgtgaaggccctgtttgacacacagaacgaactacgcgcacacatcccaaacttcaccttcaacc

SEQ ID NO: 81922 - DNA, 201 bp, Homo sapiens
ccagactgaacgtttgtgaaagctgggacatcccaccacacgctgagccagacctgcagagtgggaagctggaccagggcagctgcgcacttatgagcaakactctgtggaggtctggtggggctgggggagcacccaggcggatctgcaagcacctcggagcacccaccgctgggtctgcggcctaagggacctccctcg

SEQ ID NO: 81923 - DNA, 201 bp, Homo sapiens
  misc_feature (1)...(201): n = A,T,C or G
gcctgaaggactgcagcatcaaccccaagtccccgctgctctacgtgacgcgacctagcgaggtggagaaaggtgtgctccccggcgaggactggacggtnttccagtcaaatcactccacctatgagccagtgctgctggccaagacgcgctcgtctgagtccatcccacacctgggcgcagacgccggcctgcatgctg

SEQ ID NO: 81924 - DNA, 201 bp, Homo sapiens
aaggtgtgctccccggcgaggactggacggttttccagtcaaatcactccacctatgagccagtgctgctggccaagacgcgctcgtctgagtccatcccrcacctgggcgcagacgccggcctgcatgctgcactgcacgccactgtggtccaggacctgggcctgcacgacggcatccagcgcgtgctgtttggcaaca

SEQ ID NO: 81925 - DNA, 201 bp, Homo sapiens; identical to SEQ ID NO: 81910

SEQ ID NO: 81926 - DNA, 201 bp, Homo sapiens; identical to SEQ ID NO: 81911

SEQ ID NO: 81927 - DNA, 201 bp, Homo sapiens; identical to SEQ ID NO: 81912

SEQ ID NO: 81928 - DNA, 201 bp, Homo sapiens; identical to SEQ ID NO: 81913

SEQ ID NO: 81929 - DNA, 201 bp, Homo sapiens; identical to SEQ ID NO: 81914

SEQ ID NO: 81930 - DNA, 201 bp, Homo sapiens; identical to SEQ ID NO: 81915

SEQ ID NO: 81931 - DNA, 201 bp, Homo sapiens; identical to SEQ ID NO: 81916

SEQ ID NO: 81932 - DNA, 201 bp, Homo sapiens; identical to SEQ ID NO: 81917

SEQ ID NO: 81933 - DNA, 201 bp, Homo sapiens; identical to SEQ ID NO: 81918

SEQ ID NO: 81934 - DNA, 201 bp, Homo sapiens; identical to SEQ ID NO: 81919

SEQ ID NO: 81935 - DNA, 201 bp, Homo sapiens; identical to SEQ ID NO: 81920

SEQ ID NO: 81936 - DNA, 201 bp, Homo sapiens; identical to SEQ ID NO: 81921

SEQ ID NO: 81937 - DNA, 201 bp, Homo sapiens; identical to SEQ ID NO: 81922

SEQ ID NO: 81938 - DNA, 201 bp, Homo sapiens; identical to SEQ ID NO: 81923
  misc_feature (1)...(201): n = A,T,C or G

SEQ ID NO: 81939 - DNA, 201 bp, Homo sapiens; identical to SEQ ID NO: 81924

SEQ ID NO: 81940 - DNA, 201 bp, Homo sapiens; identical to SEQ ID NO: 81911

SEQ ID NO: 81941 - DNA, 201 bp, Homo sapiens; identical to SEQ ID NO: 81919

SEQ ID NO: 81942 - DNA, 201 bp, Homo sapiens; identical to SEQ ID NO: 81921

SEQ ID NO: 81943 - DNA, 201 bp, Homo sapiens; identical to SEQ ID NO: 81912

SEQ ID NO: 81944 - DNA, 201 bp, Homo sapiens; identical to SEQ ID NO: 81914

SEQ ID NO: 81945 - DNA, 201 bp, Homo sapiens; identical to SEQ ID NO: 81923
  misc_feature (1)...(201): n = A,T,C or G

SEQ ID NO: 81946 - DNA, 201 bp, Homo sapiens; identical to SEQ ID NO: 81924

SEQ ID NO: 81947 - DNA, 201 bp, Homo sapiens
tgaggaagaggagctggctgagatcctgcaagcggagctgccagatgcagataaatacgaaattaataaatttcacttcagtgacttacccctaacagaastggagctggtaaaatgtggaatacagatgtattatgagctcaaagtggtggataaatttcacattccacaagaggccctggtgcggttcatgtactccct

SEQ ID NO: 81948 - DNA, 201 bp, Homo sapiens
gtgacctggagcgcacggtgctgcaacagaatcccattcccatgatggacagaaacaaagcagatgaactccctaagcttcaagtcggcttcattgacttygtttgcaccttcgtctacaaggaattctcccgtttccacgaggagatcaccccaatgttggacgggatcaccaacaatcgcaaggagtggaaggcgcttg

SEQ ID NO: 81949 - DNA, 201 bp, Homo sapiens
agctcaaagtggtggataaatttcacattccacaagaggccctggtgcggttcatgtactccctgagtaagggctaccgcaagatcacctaccacaactgrcggcacggcttcaacgtggggcagaccatgttctccctgctggtgacgggaaagctgaagcgctacttcacggacctagaggccttggccatggtcactg

SEQ ID NO: 81950 - DNA, 201 bp, Homo sapiens
catgccaggtggagaggcctggccatcttggctgagcatgggataactgtgcagggctgttccagctccacgactcctcgtggggtccactaaggctgtcrctgggctcacatcccaactcgacttctccctctgcccactcctatttccttcccttccccaagcatcggtccccagggcactgcttaataagcatcctgc

SEQ ID NO: 81951 - DNA, 201 bp, Homo sapiens
gcttttcaatgtccacaaggatgctgtcctcgaggactgcctggtgatgcccgaccaagagatcgtcttccctttggacatgggcatcgtgggccatgtcrcacactctaagaagattgctaacgtccccaacacagaggaggatgagcatttctgtgactttgtggacatcctcacagagtacaagaccaagaacatctt

SEQ ID NO: 81952 - DNA, 201 bp, Homo sapiens
ctcaactgtgacagatactctgtgggtctcttagacatgaccaagcagaaggaattttttgatgtgtggccggttctgatgggtgaagttccaccttactstggtcccaggactccggatggaagagaaattaacttttacaaggtcattgactacatcctgcatggcaaagaggacatcaaagtcatcccgaatccacct

SEQ ID NO: 81953 - DNA, 201 bp, Homo sapiens
atgaactccctaagcttcaagtcggcttcattgactttgtttgcaccttcgtctacaaggaattctcccgtttccacgaggagatcaccccaatgttggaygggatcaccaacaatcgcaaggagtggaaggcgcttgctgatgagtacgatgccaagatgaaggtgcaggaggagaagaagcagaaacagcagtcggcca

SEQ ID NO: 81954 - DNA, 201 bp, Homo sapiens
gcttcattgactttgtttgcaccttcgtctacaaggaattctcccgtttccacgaggagatcaccccaatgttggacgggatcaccaacaatcgcaaggartggaaggcgcttgctgatgagtacgatgccaagatgaaggtgcaggaggagaagaagcagaaacagcagtcggccaagtcagcagccgcaggaaatcagc

SEQ ID NO: 81955 - DNA, 201 bp, Homo sapiens
catcttcaatgtcatgaagaagctgtgcttcctcctgcaggcagaccgcatgagcctgttcatgtaccggacccgcaatggcatcgcagagctggccaccmggcttttcaatgtccacaaggatgctgtcctcgaggactgcctggtgatgcccgaccaagagatcgtcttccctttggacatgggcatcgtgggccatgt

SEQ ID NO: 81956 - DNA, 201 bp, Homo sapiens
aggactgcctggtgatgcccgaccaagagatcgtcttccctttggacatgggcatcgtgggccatgtcgcacactctaagaagattgctaacgtccccaayacagaggaggatgagcatttctgtgactttgtggacatcctcacagagtacaagaccaagaacatcttggcttcccccataatgaatgggaaggatgtgg

SEQ ID NO: 81957 - DNA, 201 bp, Homo sapiens
ggactccggatggaagagaaattaacttttacaaggtcattgactacatcctgcatggcaaagaggacatcaaagtcatcccgaatccacctcctgaccaytgggctttagtaagcggtctcccagcttatgttgcccagaatggcctgatttgcaacatcatgaatgcgcctgcggaggacttttttgcatttcagaaag

SEQ ID NO: 81958 - DNA, 201 bp, Homo sapiens
caacatcatgaatgcgcctgcggaggacttttttgcatttcagaaagaacctctggatgagtctggatggatgattaaaaatgtgctttcaatgccgattrtgaacaagaaggaagaaattgttggagtggccacattttacaatcgtaaagatgggaagccctttgatgaaatggatgagacgctcatggagtctttgac

SEQ ID NO: 81959 - DNA, 201 bp, Homo sapiens
gcttcaacgtggggcagaccatgttctccctgctggtgacgggaaagctgaagcgctacttcacggacctagaggccttggccatggtcactgctgctttytgccatgacattgaccacagaggcaccaataacctctaccagatgaaatcccagaacccactggccaagctccatgggtcctctatcttggaaagacacc

SEQ ID NO: 81960 - DNA, 201 bp, Homo sapiens
cagtgggattcccagccatgggcgaggtgacagcagaggaggtggagaagttcctggactcgaatattggctttgccaaacagtactacaacctccactaycgggccaagctcatctccgacctccttggggccaaggaggctgccgtggacttcagcaactaccactccccgagcagcatggaggagagcgaaatcatct

SEQ ID NO: 81961 - DNA, 201 bp, Homo sapiens
caaatcctggccaggcgtggtggctcacacctgtaatcccagcacttcaggaggctgaggtgggcagactgcatgagcccaggagtctgagaccaacctgrgcaaaatggcaaaaccctgtctctacaaaaaatacaaaaattagcactcacctgtagtctcagctacctgggaggcagaggtgagaggatctcttgaacc

SEQ ID NO: 81962 - DNA, 179 bp, Homo sapiens
agtatgttttgcagacaagacccagagaagtccagactggacttgttgcagactgcaaaactgccattggaaggcctcygtcccagtccttctacagagtagccagtgggattcccagccatgggcgaggtgacagcagaggaggtggagaagttcctggactcgaatattggctttgc

SEQ ID NO: 81963 - DNA, 201 bp, Homo sapiens
tttcttttcaattttttttcttacctgaagtgtttaaaggcaaatcctggccaggcgtggtggctcacacctgtaatcccagcacttcaggaggctgaggygggcagactgcatgagcccaggagtctgagaccaacctgggcaaaatggcaaaaccctgtctctacaaaaaatacaaaaattagcactcacctgtagtct

SEQ ID NO: 81964 - DNA, 201 bp, Homo sapiens
atgaatgggaaggatgtggtggccataatcatggctgtgaataaagtggatggatcccacttcaccaagagagatgaagagattcttctcaagtacctcarttttgcaaatctaatcatgaaggtgtaccacctgagttacctgcacaactgtgaaactcgacgtggccagatactgctgtggtctgggagcaaagtcttt

SEQ ID NO: 81965 - DNA, 201 bp, Homo sapiens
ggccatgtcgcacactctaagaagattgctaacgtccccaacacagaggaggatgagcatttctgtgactttgtggacatcctcacagagtacaagaccargaacatcttggcttcccccataatgaatgggaaggatgtggtggccataatcatggctgtgaataaagtggatggatcccacttcaccaagagagatgaa

SEQ ID NO: 81966 - DNA, 201 bp, Homo sapiens
ttttgttcttatactttcagttaatgtattgtaaaaattttcaatcattttcaaaagtagagaattgtacgttgaatccccacatacccatcacccagatyccaatatcaagattttgctacatgcatttcgtctgtcctttttacattttcttttcaattttttttcttacctgaagtgtttaaaggcaaatcctggcca

SEQ ID NO: 81967 - DNA, 201 bp, Homo sapiens
gtgcagttgggactaacaccaggtagccgagaccacagacgggaaagctgaagcgctacttcacggacctagaggccttggccatggtcactgctgctttytgccatgacattgaccacagaggcaccaataacctctaccagatgaaatcccagaacccactggccaagctccatgggtcctctatcttggaaagacacc

SEQ ID NO: 81968 - DNA, 201 bp, Homo sapiens; identical to SEQ ID NO: 81948

SEQ ID NO: 81969 - DNA, 201 bp, Homo sapiens; identical to SEQ ID NO: 81950

SEQ ID NO: 81970 - DNA, 201 bp, Homo sapiens; identical to SEQ ID NO: 81953

SEQ ID NO: 81971 - DNA, 201 bp, Homo sapiens; identical to SEQ ID NO: 81961

SEQ ID NO: 81972 - DNA, 201 bp, Homo sapiens; identical to SEQ ID NO: 81954

SEQ ID NO: 81973 - DNA, 201 bp, Homo sapiens; identical to SEQ ID NO: 81963

SEQ ID NO: 81974 - DNA, 201 bp, Homo sapiens; identical to SEQ ID NO: 81966

SEQ ID NO: 81975 - DNA, 201 bp, Homo sapiens
gcaagaaaattactaaagaggagtttgccaatgaatttctgaagctgaaaaggcaatctaccaagtacaaggcagacaaaacctatcctacaactgtggcygagaagcccaagaatatcaagaaaaacagatataaggatattttgccctatgattatagccgggtagaactatccctgataacctctgatgaggattcca

SEQ ID NO: 81976 - DNA, 201 bp, Homo sapiens
atacaggatctttcagatcatgtgcaatttttatctaaccaatcagaaatactagtttaaaatgaatttctatatgaatatggatctgccataagaaaatmtagttcaactctaattttatgtagtaaataaattggcaggtaattgtttttacaaagaatccacctgacttcccctaatgcattaaaaatatttttattt

SEQ ID NO: 81977 - DNA, 201 bp, Homo sapiens
tttgtcacttgagcttatgtacagaatgctatatgagaaacacttttagaatggatttatttttcatttttgccagttatttttattttcttttacttttytacataaacataaacttcaaaaggtttgtaagatttggatctcaactaatttctacattgccagaatatactataaaaagttaaaaaaaaaacttacttt

SEQ ID NO: 81978 - DNA, 201 bp, Homo sapiens
taaataaattggcaggtaattgtttttacaaagaatccacctgacttcccctaatgcattaaaaatatttttatttaaataactttatttataacttttaraaacatgtagtattgtttaaacatcatttgttcttcagtatttttcatttggaagtccaatagggcaaattgaatgaagtattattatctgtctcttgta

SEQ ID NO: 81979 - DNA, 201 bp, Homo sapiens
gaaatactagtttaaaatgaatttctatatgaatatggatctgccataagaaaatctagttcaactctaattttatgtagtaaataaattggcaggtaatygtttttacaaagaatccacctgacttcccctaatgcattaaaaatatttttatttaaataactttatttataacttttagaaacatgtagtattgtttaa

SEQ ID NO: 81980 - DNA, 201 bp, Homo sapiens
gaattctccaaccaatatttcctcactattgaaccaggagtcagctgtactagcaactgctccaaggatagatgatgaaatcccccctccacttcctgtayggacacctgaatcatttattgtggttgaggaagctggagaattctcaccaaatgttcccaaatccttatcctcagctgtgaaggtaaaaattggaacatc

SEQ ID NO: 81981 - DNA, 201 bp, Homo sapiens
ggctgtggaaggactggtgttatttgtgctattgattatacatggatgttgctaaaagatgggataattcctgagaacttcagtgttttcagtttgatccrggaaatgcggacacagaggccttcattagttcaaacgcaggaacaatatgaactggtctacaatgctgtattagaactatttaagagacagatggatgtt

SEQ ID NO: 81982 - DNA, 201 bp, Homo sapiens; identical to SEQ ID NO: 81975

SEQ ID NO: 81983 - DNA, 201 bp, Homo sapiens
actctaaaagttaagttcaatagtgaaactcgaactatctaccagtttcattacaagaattggccagaccatgatgtaccttcatctatagaccctattcktgagctcatctgggatgtacgttgttaccaagaggatgacagtgttcccatatgcattcactgcagtgctggctgtggaaggactggtgttatttgtgct

SEQ ID NO: 81984 - DNA, 201 bp, Homo sapiens; identical to SEQ ID NO: 81976

SEQ ID NO: 81985 - DNA, 201 bp, Homo sapiens; identical to SEQ ID NO: 81977

SEQ ID NO: 81986 - DNA, 201 bp, Homo sapiens; identical to SEQ ID NO: 81978

SEQ ID NO: 81987 - DNA, 201 bp, Homo sapiens; identical to SEQ ID NO: 81979

SEQ ID NO: 81988 - DNA, 201 bp, Homo sapiens; identical to SEQ ID NO: 81980

SEQ ID NO: 81989 - DNA, 201 bp, Homo sapiens; identical to SEQ ID NO: 81981

SEQ ID NO: 81990 - DNA, 201 bp, Homo sapiens; identical to SEQ ID NO: 81975

SEQ ID NO: 81991 - DNA, 201 bp, Homo sapiens; identical to SEQ ID NO: 81983

SEQ ID NO: 81992 - DNA, 201 bp, Homo sapiens; identical to SEQ ID NO: 81976

SEQ ID NO: 81993 - DNA, 201 bp, Homo sapiens; identical to SEQ ID NO: 81977

SEQ ID NO: 81994 - DNA, 201 bp, Homo sapiens; identical to SEQ ID NO: 81978

SEQ ID NO: 81995 - DNA, 201 bp, Homo sapiens; identical to SEQ ID NO: 81979

SEQ ID NO: 81996 - DNA, 201 bp, Homo sapiens; identical to SEQ ID NO: 81980

SEQ ID NO: 81997 - DNA, 201 bp, Homo sapiens; identical to SEQ ID NO: 81981

SEQ ID NO: 81998 - DNA, 201 bp, Homo sapiens; identical to SEQ ID NO: 81975

SEQ ID NO: 81999 - DNA, 201 bp, Homo sapiens; identical to SEQ ID NO: 81983

SEQ ID NO: 82000 - DNA, 201 bp, Homo sapiens
cccaaccagaactttctgtcctaatcatacaccagaagacaaacaatatgatttgctgttaccaaatctcagtggctgattctgaacaattgtggtctctyttaacttgaggttctcttttgactaatagagctccatttcccctcttaaatgagaaagcatttcttttctctttaatctcctattccttcacacagttca

SEQ ID NO: 82001 - DNA, 201 bp, Homo sapiens
aggaaatcatccagaacggccacgaagaagagcctctggaaaacacatggcccactccatacccgtacagcaaaaagcttgctgagaaggctgtgctggcrgctaatgggtggaatctaaaaaatggtgataccttgtacacttgtgcgttaagacccacatatatctatggggaaggaggcccattcctttctgccagta

SEQ ID NO: 82002 - DNA, 201 bp, Homo sapiens
agacattctggatgagccattcctgaaaagagcctgccaggacgtctcggtcgtcatccacaccgcctgtatcattgatgtctttggtgtcactcacagasagtccatcatgaatgtcaatgtgaaaggtacccagctactgttggaggcctgtgtccaagccagtgtgccagtcttcatctacaccagtagcatagaggt

SEQ ID NO: 82003 - DNA, 199 bp, Homo sapiens
tggaggaggagggagcaatgagtatgtggcaggagttcaagccctcttctgggtcacgctagaatcagatctgctctccagcatcttctgtttcctggyaagtgtttcctgctactttggattggccacgatgggctggagctgccttgtgacaggagcaggagggcttctgggtcagaggatcgtccgcctgttggtg

SEQ ID NO: 82004 - DNA, 201 bp, Homo sapiens
cttctgggtcacgctagaatcagatctgctctccagcatcttctgtttcctggcaagtgtttcctgctactttggattggccacgatgggctggagctgcyttgtgacaggagcaggagggcttctgggtcagaggatcgtccgcctgttggtggaagagaaggaactgaaggagatcagggccttggacaaggccttcag

SEQ ID NO: 82005 - DNA, 201 bp, Homo sapiens
gaaaggtacccagctactgttggaggcctgtgtccaagccagtgtgccagtcttcatctacaccagtagcatagaggtagccgggcccaactcctacaagkaaatcatccagaacggccacgaagaagagcctctggaaaacacatggcccactccatacccgtacagcaaaaagcttgctgagaaggctgtgctggcggc

SEQ ID NO: 82006 - DNA, 201 bp, Homo sapiens
ttcctgaaaagagcctgccaggacgtctcggtcgtcatccacaccgcctgtatcattgatgtctttggtgtcactcacagagagtccatcatgaatgtcartgtgaaaggtacccagctactgttggaggcctgtgtccaagccagtgtgccagtcttcatctacaccagtagcatagaggtagccgggcccaactcctac

SEQ ID NO: 82007 - DNA, 201 bp, Homo sapiens
tgtcatcaaaatctgcacagtcactggcccaaccagaactttctgtcctaatcatacaccagaagacaaacaatatgatttgctgttaccaaatctcagtrgctgattctgaacaattgtggtctctcttaacttgaggttctcttttgactaatagagctccatttcccctcttaaatgagaaagcatttcttttctctt

SEQ ID NO: 82008 - DNA, 201 bp, Homo sapiens
ttggcctccgccttgattccagatggagccttcctttaaccctgatgtactggattggcttcctgctggaagtagtgagcttcctactcagcccaatttastcctatcaaccccccttcaaccgccacacagtcacattatcaaatagtgtgttcaccttctcttacaagaaggctcagcgagatctggcgtataagccac

SEQ ID NO: 82009 - DNA, 201 bp, Homo sapiens
ggaggcctgtgtccaagccagtgtgccagtcttcatctacaccagtagcatagaggtagccgggcccaactcctacaaggaaatcatccagaacggccacraagaagagcctctggaaaacacatggcccactccatacccgtacagcaaaaagcttgctgagaaggctgtgctggcggctaatgggtggaatctaaaaaa

SEQ ID NO: 82010 - DNA, 201 bp, Homo sapiens
tatctatggggaaggaggcccattcctttctgccagtataaatgaggccctgaacaacaatgggatcctgtcaagtgttggaaagttctctacagtcaacmcagtctatgttggcaacgtggcctgggcccacattctggccttgagggctctgcgggaccccaagaaggccccaagtgtccgaggtcaattctattacat

SEQ ID NO: 82011 - DNA, 190 bp, Homo sapiens
atatgatttgctgttaccaaatctcagtggctgattctgaacaattgtggtctctcttaacttgaggttctcttttgactaatagagctccatttcccctsttaaatgagaaagcatttcttttctctttaatctcctattccttcacacagttcaacataaagagcaataaatgttttaatgcttaaca

SEQ ID NO: 82012 - DNA, 201 bp, Homo sapiens
atctatggggaaggaggcccattcctttctgccagtataaatgaggccctgaacaacaatgggatcctgtcaagtgttggaaagttctctacagtcaaccmagtctatgttggcaacgtggcctgggcccacattctggccttgagggctctgcgggaccccaagaaggccccaagtgtccgaggtcaattctattacatc

SEQ ID NO: 82013 - DNA, 201 bp, Homo sapiens
gaggccctgaacaacaatgggatcctgtcaagtgttggaaagttctctacagtcaacccagtctatgttggcaacgtggcctgggcccacattctggcctygagggctctgcgggaccccaagaaggccccaagtgtccgaggtcaattctattacatctcagatgacacgcctcaccaaagctatgataaccttaattac

SEQ ID NO: 82014 - DNA, 201 bp, Homo sapiens
agtgatttaaggatgacagagatgtgcatgtgggtattgttaggaaatgtcatcaaactccacccacctggcttcatacagaaggcaacaggggcacaagsccaggtcctgctgcctctctttcacacaatgcccaacttactgtcttcttcatgtcatcaaaatctgcacagtcactggcccaaccagaactttctgtcc

SEQ ID NO: 82015 - DNA, 201 bp, Homo sapiens
caccaaagctatgataaccttaattacatcctgagcaaagagtttggcctccgccttgattccagatggagccttcctttaaccctgatgtactggattgkcttcctgctggaagtagtgagcttcctactcagcccaatttactcctatcaaccccccttcaaccgccacacagtcacattatcaaatagtgtgttcacc

SEQ ID NO: 82016 - DNA, 201 bp, Homo sapiens
gcaacgtggcctgggcccacattctggccttgagggctctgcgggaccccaagaaggccccaagtgtccgaggtcaattctattacatctcagatgacacrcctcaccaaagctatgataaccttaattacatcctgagcaaagagtttggcctccgccttgattccagatggagccttcctttaaccctgatgtactgga

SEQ ID NO: 82017 - DNA, 201 bp, Homo sapiens
agtcaacccagtctatgttggcaacgtggcctgggcccacattctggccttgagggctctgcgggaccccaagaaggccccaagtgtccgaggtcaattcwattacatctcagatgacacgcctcaccaaagctatgataaccttaattacatcctgagcaaagagtttggcctccgccttgattccagatggagccttcc

SEQ ID NO: 82018 - DNA, 201 bp, Homo sapiens
gctccagaacaggaccaagctgactgtacttgaaggagacattctggatgagccattcctgaaaagagcctgccaggacgtctcggtcgtcatccacaccrcctgtatcattgatgtctttggtgtcactcacagagagtccatcatgaatgtcaatgtgaaaggtacccagctactgttggaggcctgtgtccaagccag

SEQ ID NO: 82019 - DNA, 201 bp, Homo sapiens
ggccacgaagaagagcctctggaaaacacatggcccactccatacccgtacagcaaaaagcttgctgagaaggctgtgctggcggctaatgggtggaatckaaaaaatggtgataccttgtacacttgtgcgttaagacccacatatatctatggggaaggaggcccattcctttctgccagtataaatgaggccctgaac

SEQ ID NO: 82020 - DNA, 201 bp, Homo sapiens
gtctcggtcgtcatccacaccgcctgtatcattgatgtctttggtgtcactcacagagagtccatcatgaatgtcaatgtgaaaggtacccagctactgtkggaggcctgtgtccaagccagtgtgccagtcttcatctacaccagtagcatagaggtagccgggcccaactcctacaaggaaatcatccagaacggccac

SEQ ID NO: 82021 - DNA, 201 bp, Homo sapiens
accagtagcatagaggtagccgggcccaactcctacaaggaaatcatccagaacggccacgaagaagagcctctggaaaacacatggcccactccataccygtacagcaaaaagcttgctgagaaggctgtgctggcggctaatgggtggaatctaaaaaatggtgataccttgtacacttgtgcgttaagacccacatat

SEQ ID NO: 82022 - DNA, 201 bp, Homo sapiens
aatctaaaaaatggtgataccttgtacacttgtgcgttaagacccacatatatctatggggaaggaggcccattcctttctgccagtataaatgaggcccygaacaacaatgggatcctgtcaagtgttggaaagttctctacagtcaacccagtctatgttggcaacgtggcctgggcccacattctggccttgagggct

SEQ ID NO: 82023 - DNA, 201 bp, Homo sapiens
aaagttctctacagtcaacccagtctatgttggcaacgtggcctgggcccacattctggccttgagggctctgcgggaccccaagaaggccccaagtgtcygaggtcaattctattacatctcagatgacacgcctcaccaaagctatgataaccttaattacatcctgagcaaagagtttggcctccgccttgattccag

SEQ ID NO: 82024 - DNA, 201 bp, Homo sapiens
ctagaatcagatctgctctccagcatcttctgtttcctggcaagtgtttcctgctactttggattggccacgatgggctggagctgccttgtgacaggaghaggagggcttctgggtcagaggatcgtccgcctgttggtggaagagaaggaactgaaggagatcagggccttggacaaggccttcagaccagaattgaga

SEQ ID NO: 82025 - DNA, 201 bp, Homo sapiens
ggcaacgtggcctgggcccacattctggccttgagggctctgcgggaccccaagaaggccccaagtgtccgaggtcaattctattacatctcagatgacabgcctcaccaaagctatgataaccttaattacatcctgagcaaagagtttggcctccgccttgattccagatggagccttcctttaaccctgatgtactgg

SEQ ID NO: 82026 - DNA, 201 bp, Homo sapiens
gtcaagtgttggaaagttctctacagtcaacccagtctatgttggcaacgtggcctgggcccacattctggccttgagggctctgcgggaccccaagaagsccccaagtgtccgaggtcaattctattacatctcagatgacacgcctcaccaaagctatgataaccttaattacatcctgagcaaagagtttggcctccg

SEQ ID NO: 82027 - DNA, 201 bp, Homo sapiens
ccatacccgtacagcaaaaagcttgctgagaaggctgtgctggcggctaatgggtggaatctaaaaaatggtgataccttgtacacttgtgcgttaagacycacatatatctatggggaaggaggcccattcctttctgccagtataaatgaggccctgaacaacaatgggatcctgtcaagtgttggaaagttctctaca

SEQ ID NO: 82028 - DNA, 201 bp, Homo sapiens
cagaacggccacgaagaagagcctctggaaaacacatggcccactccatacccgtacagcaaaaagcttgctgagaaggctgtgctggcggctaatgggtrgaatctaaaaaatggtgataccttgtacacttgtgcgttaagacccacatatatctatggggaaggaggcccattcctttctgccagtataaatgaggcc

SEQ ID NO: 82029 - DNA, 201 bp, Homo sapiens
ctctccagcatcttctgtttcctggcaagtgtttcctgctactttggattggccacgatgggctggagctgccttgtgacaggagcaggagggcttctggrtcagaggatcgtccgcctgttggtggaagagaaggaactgaaggagatcagggccttggacaaggccttcagaccagaattgagagaggaattttctaag

SEQ ID NO: 82030 - DNA, 201 bp, Homo sapiens
ggcccactccatacccgtacagcaaaaagcttgctgagaaggctgtgctggcggctaatgggtggaatctaaaaaatggtgataccttgtacacttgtgcrttaagacccacatatatctatggggaaggaggcccattcctttctgccagtataaatgaggccctgaacaacaatgggatcctgtcaagtgttggaaagt

SEQ ID NO: 82031 - DNA, 201 bp, Homo sapiens
catcatgaatgtcaatgtgaaaggtacccagctactgttggaggcctgtgtccaagccagtgtgccagtcttcatctacaccagtagcatagaggtagccrggcccaactcctacaaggaaatcatccagaacggccacgaagaagagcctctggaaaacacatggcccactccatacccgtacagcaaaaagcttgctga

SEQ ID NO: 82032 - DNA, 201 bp, Homo sapiens
caacccagtctatgttggcaacgtggcctgggcccacattctggccttgagggctctgcgggaccccaagaaggccccaagtgtccgaggtcaattctatkacatctcagatgacacgcctcaccaaagctatgataaccttaattacatcctgagcaaagagtttggcctccgccttgattccagatggagccttccttt

SEQ ID NO: 82033 - DNA, 201 bp, Homo sapiens; identical to SEQ ID NO: 82000

SEQ ID NO: 82034 - DNA, 201 bp, Homo sapiens; identical to SEQ ID NO: 82001

SEQ ID NO: 82035 - DNA, 201 bp, Homo sapiens; identical to SEQ ID NO: 82002

SEQ ID NO: 82036 - DNA, 201 bp, Homo sapiens
ggacttggactcctctgtccagcttttaacaatctaagttacgccctcttctgggtcacgctagaatcagatctgctctccagcatcttctgtttcctggyaagtgtttcctgctactttggattggccacgatgggctggagctgccttgtgacaggagcaggagggcttctgggtcagaggatcgtccgcctgttggtg

SEQ ID NO: 82037 - DNA, 201 bp, Homo sapiens; identical to SEQ ID NO: 82004

SEQ ID NO: 82038 - DNA, 201 bp, Homo sapiens; identical to SEQ ID NO: 82005

SEQ ID NO: 82039 - DNA, 201 bp, Homo sapiens; identical to SEQ ID NO: 82006

SEQ ID NO: 82040 - DNA, 201 bp, Homo sapiens; identical to SEQ ID NO: 82007

SEQ ID NO: 82041 - DNA, 201 bp, Homo sapiens; identical to SEQ ID NO: 82008

SEQ ID NO: 82042 - DNA, 201 bp, Homo sapiens; identical to SEQ ID NO: 82009

SEQ ID NO: 82043 - DNA, 201 bp, Homo sapiens; identical to SEQ ID NO: 82010

SEQ ID NO: 82044 - DNA, 190 bp, Homo sapiens; identical to SEQ ID NO: 82011

SEQ ID NO: 82045 - DNA, 201 bp, Homo sapiens; identical to SEQ ID NO: 82012

SEQ ID NO: 82046 - DNA, 201 bp, Homo sapiens; identical to SEQ ID NO: 82013

SEQ ID NO: 82047 - DNA, 201 bp, Homo sapiens; identical to SEQ ID NO: 82014

SEQ ID NO: 82048 - DNA, 201 bp, Homo sapiens; identical to SEQ ID NO: 82015

SEQ ID NO: 82049 - DNA, 201 bp, Homo sapiens; identical to SEQ ID NO: 82016

SEQ ID NO: 82050 - DNA, 201 bp, Homo sapiens; identical to SEQ ID NO: 82017

SEQ ID NO: 82051 - DNA, 201 bp, Homo sapiens; identical to SEQ ID NO: 82018

SEQ ID NO: 82052 - DNA, 201 bp, Homo sapiens; identical to SEQ ID NO: 82019

SEQ ID NO: 82053 - DNA, 201 bp, Homo sapiens; identical to SEQ ID NO: 82020

SEQ ID NO: 82054 - DNA, 201 bp, Homo sapiens; identical to SEQ ID NO: 82021

SEQ ID NO: 82055 - DNA, 201 bp, Homo sapiens; identical to SEQ ID NO: 82022

SEQ ID NO: 82056 - DNA, 201 bp, Homo sapiens; identical to SEQ ID NO: 82023

SEQ ID NO: 82057 - DNA, 201 bp, Homo sapiens; identical to SEQ ID NO: 82024

SEQ ID NO: 82058 - DNA, 201 bp, Homo sapiens; identical to SEQ ID NO: 82025

SEQ ID NO: 82059 - DNA, 201 bp, Homo sapiens; identical to SEQ ID NO: 82026

SEQ ID NO: 82060 - DNA, 201 bp, Homo sapiens; identical to SEQ ID NO: 82027

SEQ ID NO: 82061 - DNA, 201 bp, Homo sapiens; identical to SEQ ID NO: 82028

SEQ ID NO: 82062 - DNA, 201 bp, Homo sapiens; identical to SEQ ID NO: 82029

SEQ ID NO: 82063 - DNA, 201 bp, Homo sapiens; identical to SEQ ID NO: 82030

SEQ ID NO: 82064 - DNA, 201 bp, Homo sapiens; identical to SEQ ID NO: 82031

SEQ ID NO: 82065 - DNA, 201 bp, Homo sapiens; identical to SEQ ID NO: 82032

SEQ ID NO: 82066 - DNA, 201 bp, Homo sapiens; identical to SEQ ID NO: 82000

SEQ ID NO: 82067 - DNA, 201 bp, Homo sapiens; identical to SEQ ID NO: 82001

SEQ ID NO: 82068 - DNA, 201 bp, Homo sapiens; identical to SEQ ID NO: 82002

SEQ ID NO: 82069 - DNA, 201 bp, Homo sapiens
ttggactcctctgtccagcttttaacaatctaagttacggttaccctcttctgggtcacgctagaatcagatctgctctccagcatcttctgtttcctggyaagtgtttcctgctactttggattggccacgatgggctggagctgccttgtgacaggagcaggagggcttctgggtcagaggatcgtccgcctgttggtg

SEQ ID NO: 82070 - DNA, 201 bp, Homo sapiens; identical to SEQ ID NO: 82004

SEQ ID NO: 82071 - DNA, 201 bp, Homo sapiens; identical to SEQ ID NO: 82005

SEQ ID NO: 82072 - DNA, 201 bp, Homo sapiens; identical to SEQ ID NO: 82006

SEQ ID NO: 82073 - DNA, 201 bp, Homo sapiens; identical to SEQ ID NO: 82007

SEQ ID NO: 82074 - DNA, 201 bp, Homo sapiens; identical to SEQ ID NO: 82008

SEQ ID NO: 82075 - DNA, 201 bp, Homo sapiens; identical to SEQ ID NO: 82009

SEQ ID NO: 82076 - DNA, 201 bp, Homo sapiens; identical to SEQ ID NO: 82010

SEQ ID NO: 82077 - DNA, 190 bp, Homo sapiens; identical to SEQ ID NO: 82011

SEQ ID NO: 82078 - DNA, 201 bp, Homo sapiens; identical to SEQ ID NO: 82012

SEQ ID NO: 82079 - DNA, 201 bp, Homo sapiens; identical to SEQ ID NO: 82013

SEQ ID NO: 82080 - DNA, 201 bp, Homo sapiens; identical to SEQ ID NO: 82014

SEQ ID NO: 82081 - DNA, 201 bp, Homo sapiens; identical to SEQ ID NO: 82015

SEQ ID NO: 82082 - DNA, 201 bp, Homo sapiens; identical to SEQ ID NO: 82016

SEQ ID NO: 82083 - DNA, 201 bp, Homo sapiens; identical to SEQ ID NO: 82017

SEQ ID NO: 82084 - DNA, 201 bp, Homo sapiens; identical to SEQ ID NO: 82018

SEQ ID NO: 82085 - DNA, 201 bp, Homo sapiens; identical to SEQ ID NO: 82019

SEQ ID NO: 82086 - DNA, 201 bp, Homo sapiens; identical to SEQ ID NO: 82020

SEQ ID NO: 82087 - DNA, 201 bp, Homo sapiens; identical to SEQ ID NO: 82021

SEQ ID NO: 82088 - DNA, 201 bp, Homo sapiens; identical to SEQ ID NO: 82022

SEQ ID NO: 82089 - DNA, 201 bp, Homo sapiens; identical to SEQ ID NO: 82023

SEQ ID NO: 82090 - DNA, 201 bp, Homo sapiens; identical to SEQ ID NO: 82024

SEQ ID NO: 82091 - DNA, 201 bp, Homo sapiens; identical to SEQ ID NO: 82025

SEQ ID NO: 82092 - DNA, 201 bp, Homo sapiens; identical to SEQ ID NO: 82026

SEQ ID NO: 82093 - DNA, 201 bp, Homo sapiens; identical to SEQ ID NO: 82027

SEQ ID NO: 82094 - DNA, 201 bp, Homo sapiens; identical to SEQ ID NO: 82028

SEQ ID NO: 82095 - DNA, 201 bp, Homo sapiens; identical to SEQ ID NO: 82029

SEQ ID NO: 82096 - DNA, 201 bp, Homo sapiens; identical to SEQ ID NO: 82030

SEQ ID NO: 82097 - DNA, 201 bp, Homo sapiens; identical to SEQ ID NO: 82031

SEQ ID NO: 82098 - DNA, 201 bp, Homo sapiens; identical to SEQ ID NO: 82032

SEQ ID NO: 82099 - DNA, 201 bp, Homo sapiens
actcaggccaatttacacctatcgaccgcccttcaaccgccacatagtcacattgtcaaatagcgtattcaccttctcttataagaaggctcagcgagatytggcgtataagccactctacagctgggaggaagccaagcagaaaacggtggagtgggttggttcccttgtggaccggcacaaggagaacctgaagtccaa

SEQ ID NO: 82100 - DNA, 201 bp, Homo sapiens
gtcatcaaaacctgcgcagtcattggcccaacaagaaggtttctgtcctaatcatataccagaggaaagaccatgtggtttgctgttaccaaatctcagtrgctgattctgaacaatttagggactcttttaacttgagggtcgttttgactactagagctccatttctactcttaaatgagaaaggatttcctttctttt

SEQ ID NO: 82101 - DNA, 201 bp, Homo sapiens
gttctactatatctcagatgacacgcctcaccaaagctatgataaccttaattacaccctgagcaaagagttcggcctccgccttgattccagatggagcyttcctttatccctgatgtattggattggcttcctgctggaaatagtgagcttcctactcaggccaatttacacctatcgaccgcccttcaaccgccacat

SEQ ID NO: 82102 - DNA, 201 bp, Homo sapiens
ttgattccagatggagctttcctttatccctgatgtattggattggcttcctgctggaaatagtgagcttcctactcaggccaatttacacctatcgaccrcccttcaaccgccacatagtcacattgtcaaatagcgtattcaccttctcttataagaaggctcagcgagatttggcgtataagccactctacagctggg

SEQ ID NO: 82103 - DNA, 120 bp, Homo sapiens
acagaactccagaacaagaycaagctgacagtgctggaaggagacattctggatgagccattcctgaagagagcctgccaggacgtctcggtcatcatccacaccgcctgtatcattgat

SEQ ID NO: 82104 - DNA, 187 bp, Homo sapiens
acagaactccagaacaagaccaagctgacagtgctggaaggagacattctggatgagccattcctgaagagagcctgccaggacgtytcggtcatcatccacaccgcctgtatcattgatgtcttcggtgtcactcacagagagtctatcatgaatgtcaatgtgaaagtcttcatctacaccagta

SEQ ID NO: 82105 - DNA, 201 bp, Homo sapiens
tggagtgggttggttcccttgtggaccggcacaaggagaacctgaagtccaagactcagtgatttaaggatgacagagatgtgcatgtgggtattgttagkagatgtcatcaagctccaccctcctggcctcatacagaaagtgacaagggcacaagctcaggtcctgctgcctccctttcatacaatggccaacttattg

SEQ ID NO: 82106 - DNA, 194 bp, Homo sapiens
acagaactccagaacaagaccaagctgacagtgctggaaggagacattctggatgagccattcctgaagagagcctgccaggacgtctcggtcrtcatccacaccgcctgtatcattgatgtcttcggtgtcactcacagagagtctatcatgaatgtcaatgtgaaagtcttcatctacaccagtagcataga

SEQ ID NO: 82107 - DNA, 201 bp, Homo sapiens
ggatcctgtcaagtgttggaaagttctccactgttaacccagtctatgttggcaatgtggcctgggcccacattctggccttgagggccctgcaggacccyaagaaggccccaagcatccgaggacagttctactatatctcagatgacacgcctcaccaaagctatgataaccttaattacaccctgagcaaagagttcg

SEQ ID NO: 82108 - DNA, 201 bp, Homo sapiens
cagtgctggaaggagacattctggatgagccattcctgaagagagcctgccaggacgtctcggtcatcatccacaccgcctgtatcattgatgtcttcggwgtcactcacagagagtctatcatgaatgtcaatgtgaaagtcttcatctacaccagtagcatagaggtagccgggcccaactcctacaaggaaatcatcc

SEQ ID NO: 82109 - DNA, 125 bp, Homo sapiens
acagaactccagaacaagaccaagytgacagtgctggaaggagacattctggatgagccattcctgaagagagcctgccaggacgtctcggtcatcatccacaccgcctgtatcattgatgtctt

SEQ ID NO: 82110 - DNA, 201 bp, Homo sapiens
gctcagcgagatttggcgtataagccactctacagctgggaggaagccaagcagaaaacggtggagtgggttggttcccttgtggaccggcacaaggagamcctgaagtccaagactcagtgatttaaggatgacagagatgtgcatgtgggtattgttaggagatgtcatcaagctccaccctcctggcctcatacagaa

SEQ ID NO: 82111 - DNA, 176 bp, Homo sapiens
actcttctgtccagcttttaacaatctaactaatgctctttttagccctctccagggtcaccctagaatcagatcygctccccagcatcttctgtttcctggtgagtgattcctgctactttggatggccatgacgggctggagctgccttgtgacaggagcaggagggtttctgg

SEQ ID NO: 82112 - DNA, 201 bp, Homo sapiens; identical to SEQ ID NO: 82099

SEQ ID NO: 82113 - DNA, 201 bp, Homo sapiens; identical to SEQ ID NO: 82100

SEQ ID NO: 82114 - DNA, 201 bp, Homo sapiens; identical to SEQ ID NO: 82101

SEQ ID NO: 82115 - DNA, 201 bp, Homo sapiens; identical to SEQ ID NO: 82102

SEQ ID NO: 82116 - DNA, 201 bp, Homo sapiens
cgcctcttggtgaaggagaaggagctgaaggagatcagggtcttggacaaggccttcggaccagaattgagagaggaattttctaaactccagaacaagaycaagctgacagtgctggaaggagacattctggatgagccattcctgaagagagcctgccaggacgtctcggtcatcatccacaccgcctgtatcattgat

SEQ ID NO: 82117 - DNA, 201 bp, Homo sapiens
tgagagaggaattttctaaactccagaacaagaccaagctgacagtgctggaaggagacattctggatgagccattcctgaagagagcctgccaggacgtytcggtcatcatccacaccgcctgtatcattgatgtcttcggtgtcactcacagagagtctatcatgaatgtcaatgtgaaaggtacccagctcctgttag

SEQ ID NO: 82118 - DNA, 201 bp, Homo sapiens; identical to SEQ ID NO: 82105

SEQ ID NO: 82119 - DNA, 201 bp, Homo sapiens
ggaattttctaaactccagaacaagaccaagctgacagtgctggaaggagacattctggatgagccattcctgaagagagcctgccaggacgtctcggtcrtcatccacaccgcctgtatcattgatgtcttcggtgtcactcacagagagtctatcatgaatgtcaatgtgaaaggtacccagctcctgttagaggcctg

SEQ ID NO: 82120 - DNA, 201 bp, Homo sapiens
cttggtgaaggagaaggagctgaaggagatcagggtcttggacaaggccttcggaccagaattgagagaggaattttctaaactccagaacaagaccaagytgacagtgctggaaggagacattctggatgagccattcctgaagagagcctgccaggacgtctcggtcatcatccacaccgcctgtatcattgatgtctt

SEQ ID NO: 82121 - DNA, 201 bp, Homo sapiens; identical to SEQ ID NO: 82107

SEQ ID NO: 82122 - DNA, 201 bp, Homo sapiens
cagtgctggaaggagacattctggatgagccattcctgaagagagcctgccaggacgtctcggtcatcatccacaccgcctgtatcattgatgtcttcggwgtcactcacagagagtctatcatgaatgtcaatgtgaaaggtacccagctcctgttagaggcctgtgtccaagctagtgtgccagtcttcatctacacca

SEQ ID NO: 82123 - DNA, 201 bp, Homo sapiens; identical to SEQ ID NO: 82110

SEQ ID NO: 82124 - DNA, 201 bp, Homo sapiens
gacaaggaccatttagagaaggttttacaaattggatcagcaaaagccaaagaattagcatacactgtgtgccaggaggtgaagaaattggtgggttttcyataggaagtttcaacgaatcacagcaaggcttttgtgccttgcactccatgcattctgataacggcagctttcctaaaaagaaaaagttatagttttggg

SEQ ID NO: 82125 - DNA, 201 bp, Homo sapiens
caaactggccaccgtccgaataacagacagcccagaggagatagtgcagaaattccgcaaggctgtgacagacttcacctcggaggtcacctatgacccgsctggccgcgctggcgtgtccaacatagtggcggtgcatgccgcggtgacggggctctccgtggaggaagtggtgcgccgcagcgcgggcatgaacactgc

SEQ ID NO: 82126 - DNA, 201 bp, Homo sapiens
ctgaacacacacaattaagttggatcctttcctgcatggtcagactacctcgattacaacatttacatcagtggaaggcaaagactaccaagcagaagcaygatggcacggtgggcctgctcacatacccagtactccaggcagccgacattctgttgtacaagtccacacacgttcctgttggggaggatcaagtccagc

SEQ ID NO: 82127 - DNA, 201 bp, Homo sapiens
gaatattgctttgtagctttgaaatacgacagtgttccaaatcccatcaacaaaatgctgtgaacaacaacaacaaaaaataaatcaagaaggcatagctstctgaatccccaattattgaggcacactccttggcctgcagaaatgtgattgaagtaaggagtaatttgggaaatggagtatcatttgtgcttctctctg

SEQ ID NO: 82128 - DNA, 201 bp, Homo sapiens
agtcctagaacctctttgagcatatttcttacaagcctctgttttttcccctttaaaggaaactttgaaaggattgtgaatactggaaaatgacaaaactraaggtagatctatcaagccaattgtctgtttatctgtttgtgtggtttttacccccttgcaatacctttcctccaaaaaattaaggcactatggaaagaa

SEQ ID NO: 82129 - DNA, 201 bp, Homo sapiens
acatacataactaggttgttgagcaaagcatttttgctcatgtttcttaaggaagtagagtagtccttgtgtcagaacacatgttaatccacaaaacgccscatcccagattccaaattaaaacatcgtttttaggattcttggagctagcctggatcatgggtaaaggaaacattttgccttttgtatcttatactggaa

SEQ ID NO: 82130 - DNA, 201 bp, Homo sapiens
accccttattcttaagaatagtgcttgtttattcagtacaaaaaaaatgctgaaaggcagcgttttttagactctaaacattctgattttgaaggtgggtrttggaacgactgatgatgttttttatatcatcaattcagccaatggatgcgaacttaaaatctggattcacagaaccgtggtcacatttccccatcaaaa

SEQ ID NO: 82131 - DNA, 201 bp, Homo sapiens
ttcccaatgactgacagcttctcatcttgcctctacctcagttaagtaatgtcaccctgaaacctagcttttctgcacttccatttctgacacctgaaaawgaaaatgataatcctaacttatacaccaagacctgttagcaagatcgattttgtaacagaaattgcttataagttttttatcagtaaggaccatgatcac

SEQ ID NO: 82132 - DNA, 201 bp, Homo sapiens
ctccttggcctgcagaaatgtgattgaagtaaggagtaatttgggaaatggagtatcatttgtgcttctctctggagtacttactgtaacagatgcacackttatctacttcaacccttttataaagcaatatatagaggtcttagatgtataatccttgagatgccatttgatcagatgccaatttgtattcagagctca

SEQ ID NO: 82133 - DNA, 201 bp, Homo sapiens
aacaacaacaaaaaataaatcaagaaggcatagctgtctgaatccccaattattgaggcacactccttggcctgcagaaatgtgattgaagtaaggagtartttgggaaatggagtatcatttgtgcttctctctggagtacttactgtaacagatgcacacgttatctacttcaacccttttataaagcaatatatagag

SEQ ID NO: 82134 - DNA, 201 bp, Homo sapiens
tcatgccttaaaagagcctgccaggacatcttggtcatcatccacactgcctctatcattgacgtcttcggtgtcactcacagacagtctatcatgaaagmcaatgtgaaaggtacccaacttctgttgggaacctgtgtccaagctagtatgccaggcttcatccacaccagcatcatagaagtatccaggcccaactcc

SEQ ID NO: 82135 - DNA, 201 bp, Homo sapiens
tgttcatgcaaagctccaaaacaagaccaagctaacagtgttggaaggagacattctgaatgagtcatgccttaaaagagcctgccaggacatcttggtcrtcatccacactgcctctatcattgacgtcttcggtgtcactcacagacagtctatcatgaaagacaatgtgaaaggtacccaacttctgttgggaacctg

SEQ ID NO: 82136 - DNA, 105 bp, Homo sapiens
atgaygggctggaacttccttgtgacaggagcaggaatgtttctggatcagagaatcatccatctcttggtgaaggagaaggagctgaaggagatcagggctttg

SEQ ID NO: 82137 - DNA, 201 bp, Homo sapiens
tccttcaaagtcaaacaaacacaacgcattctctatatggcagctgaaacagccaaggaactgactcctttcctgctgaaatcaaagattttatctcccartggtggcaaacccaaggccatcaaccaagagatgtttaaactctcatccatggatgttacccatgctcacttggtgaataaattctggcattttggtggt

SEQ ID NO: 82138 - DNA, 201 bp, Homo sapiens
gaaacagccaaggaactgactcctttcctgctgaaatcaaagattttatctcccagtggtggcaaacccaaggccatcaaccaagagatgtttaaactctmatccatggatgttacccatgctcacttggtgaataaattctggcattttggtggtaatgagaggagccagagattcattgagcgctgcattcagaccttt

SEQ ID NO: 82139 - DNA, 201 bp, Homo sapiens
tggcagctgaaacagccaaggaactgactcctttcctgctgaaatcaaagattttatctcccagtggtggcaaacccaaggccatcaaccaagagatgttwaaactctcatccatggatgttacccatgctcacttggtgaataaattctggcattttggtggtaatgagaggagccagagattcattgagcgctgcattc

SEQ ID NO: 82140 - DNA, 164 bp, Homo sapiens
cagaagctggaaccagtggaactgtgtacctctgtgatgccaatcctgaacataagacagtgttgggcaggtctgggcgtataatttgaggagtggatggyggatgaaaagaaataataaattgtaatcagcagtaaaggagtgggcactgtttggactctggg

SEQ ID NO: 82141 - DNA, 201 bp, Homo sapiens
tctcaagacaatagaggtcacagcaaatacaaacctttatactaatggattttgttttcttcttggaccctccatagcaaccaagagatgtttaaactctmatccatggatgttacccatgctcacttggtgaataaattctggcattttggtggtaatgagaggagccagagattcattgagcgctgcattcagaccttt

SEQ ID NO: 82142 - DNA, 201 bp, Homo sapiens
actctgtctctcaagacaatagaggtcacagcaaatacaaacctttatactaatggattttgttttcttcttggaccctccatagcaaccaagagatgttwaaactctcatccatggatgttacccatgctcacttggtgaataaattctggcattttggtggtaatgagaggagccagagattcattgagcgctgcattc

SEQ ID NO: 82143 - DNA, 135 bp, Homo sapiens
cagaagctggaaccagtggaactgtgtacctctgtgatgccaatcctgaacataagacagtgttgggcaggtctgggcgtataatttgaggagtggatggyggatgaaaagaaataataaattgtaatcagcagt

SEQ ID NO: 82144 - DNA, 201 bp, Homo sapiens
ctctttcatcacaagctcatctatattccaggacttcacatttgttatttcttctgtctactctgtctctcaagacaatagaggtcacagcaaatacaaayctttatactaatggattttgttttcttcttggaccctccatagcaaccaagagatgtttaaactctcatccatggatgttacccatgctcacttggtgaa

SEQ ID NO: 82145 - DNA, 201 bp, Homo sapiens
aactgactcctttcctgctgaaatcaaagattttatctcccagtggtggcaaacccaaggccatgtgagtttgataaaatccagtctgtaccactcacacytctcaagtaacctcccaacttctctccctgcattcactctggctttcctacaatcaatgttgtacaaagaaatcagaattacatttttaaaaaatgtaac

SEQ ID NO: 82146 - DNA, 201 bp, Homo sapiens
gaaacagccaaggaactgactcctttcctgctgaaatcaaagattttatctcccagtggtggcaaacccaaggccatgtgagtttgataaaatccagtctrtaccactcacacttctcaagtaacctcccaacttctctccctgcattcactctggctttcctacaatcaatgttgtacaaagaaatcagaattacatttt

SEQ ID NO: 82147 - DNA, 201 bp, Homo sapiens
tccttcaaagtcaaacaaacacaacgcattctctatatggcagctgaaacagccaaggaactgactcctttcctgctgaaatcaaagattttatctcccartggtggcaaacccaaggccatgtgagtttgataaaatccagtctgtaccactcacacttctcaagtaacctcccaacttctctccctgcattcactctgg

SEQ ID NO: 82148 - DNA, 201 bp, Homo sapiens
tctatattccaggacttcacatttgttatttcttctgtctactctgtctctcaagacaatagaggtcacagcaaatacaaacctttatactaatggatttwgttttcttcttggaccctccatagcaaccaagagatgtttaaactctcatccatggatgttacccatgctcacttggtgaataaattctggcattttggt

SEQ ID NO: 82149 - DNA, 201 bp, Homo sapiens
atctatattccaggacttcacatttgttatttcttctgtctactctgtctctcaagacaatagaggtcacagcaaatacaaacctttatactaatggattwtgttttcttcttggaccctccatagcaaccaagagatgtttaaactctcatccatggatgttacccatgctcacttggtgaataaattctggcattttgg

SEQ ID NO: 82150 - DNA, 201 bp, Homo sapiens
ttcgtggagaactaccggaggcacatcgtgtgtgtggcaatcttctcggccatctgtgttggcgtgtttgcagatcgtgcttactactatggctttgcctygccaccctcggacattgcacagaccaccctcgtgggcatcatcctgtcacgaggcacggcggccagcgtctccttcatgttctcttatatcttgctcacc

SEQ ID NO: 82151 - DNA, 201 bp, Homo sapiens
ctttttgctcaggtgctggacatcaaccaggccgacgcagggaccctgcccctggactcctcccagaaggtgcgggaggccctgacctgcgagctgagcarggccgagtttgccgagtccctgggcctcaagccccaggacatgtttgtggagtccatgttctctctggctgacaaggatggcaatggctacctgtccttc

SEQ ID NO: 82152 - DNA, 201 bp, Homo sapiens
tccagaggccccaaggctttgagtacaagtcaggacagtgggtgcggatcgcctgcctggctctggggaccaccgagtaccaccccttcacactgacctcygcgccccatgaggacacactcagcctgcacatccgggcagtggggccctggaccactcgcctcagggagatctactcatccccaaagggcaatggctgtg

SEQ ID NO: 82153 - DNA, 201 bp, Homo sapiens
gttggaggacaacatagtggttgaagatctgagggattactggcctggccctggcaaattctcccgtacagactatgtggccagcagcatccaacgtggcygagatatggggctgcccagctatagccaggccctgctggcctttgggctggacatcccaaggaactggagtgatctcaaccctaatgtggacccccaggt

SEQ ID NO: 82154 - DNA, 201 bp, Homo sapiens
gccaggccccaaggagaggagcagtcccatcatcatccagctgctgtcagacaggtgtctgcaggtcctgaacaggcatctcactgtgctccgtgtggtcyagctgcagcctctgcagcaggtcaacctcatcctgtccaacaaccgaggatgccgcaccctgctgctcaagatccctaaggagtatgacctggtgctgct

SEQ ID NO: 82155 - DNA, 201 bp, Homo sapiens
gtcagacaggtgtctgcaggtcctgaacaggcatctcactgtgctccgtgtggtccagctgcagcctctgcagcaggtcaacctcatcctgtccaacaacygaggatgccgcaccctgctgctcaagatccctaaggagtatgacctggtgctgctgtttagttctgaagaggaacggggcgcctttgtgcagcagctatg

SEQ ID NO: 82156 - DNA, 201 bp, Homo sapiens
cgctgagtttggaagtcgcgcgggaccccttttatagcagcgtgggcgacgtgccacacgggtgtcccagcccaggggctggtctgagctggaagaggttrtgcaaataagggccccacctccacggcaggagggtgagccctaggtccagatgctcacactggcgcaggtctgtcctgagccgacacctgcacagtggcg

SEQ ID NO: 82157 - DNA, 201 bp, Homo sapiens
ggaactggagtgatctcaaccctaatgtggacccccaggtgctggaggccacagctgccctgtacaaccaggacctatcccagctagagctgctccttggsgggctcctggagagccatggggaccctggacccctgttcagtgccattgtcctcgaccagtttgtacggctgcgggatggtgaccgctactggtttgaga

SEQ ID NO: 82158 - DNA, 201 bp, Homo sapiens
cagcgtgggcgacgtgccacacgggtgtcccagcccaggggctggtctgagctggaagaggttatgcaaataagggccccacctccacggcaggagggtgrgccctaggtccagatgctcacactggcgcaggtctgtcctgagccgacacctgcacagtggcgagaccaaggacccagagagaaaggtgagagtgcagcc

SEQ ID NO: 82159 - DNA, 201 bp, Homo sapiens
ggctggacggcagcgccatctatggctcctcgcactcctggagcgacgcgctgcggagcttctcggggggacagctggcgtcggggcccgaccccgctttyccccgagactcgcagaaccccctgctcatgtgggcggcgcccgaccccgccaccgggcagaacgggccccgggggctgtacgccttcggggcagagagag

SEQ ID NO: 82160 - DNA, 201 bp, Homo sapiens
cacccccagggactggggccccctgccccagaagccccagagctgggaggccctggactgaagaagaggtttggcaaaaaggcagcagtgcccactccccrgctgtacacagaggcgctgcaagagaagatgcagcgaggcttcctagcccaaaagctgcagcagtacaagcgcttcgtggagaactaccggaggcacatc

SEQ ID NO: 82161 - DNA, 201 bp, Homo sapiens
tggaaatggtattagagatatctttaaacaaaacatcagctgtcgagtctcgttcatcactcggacacctggggagcgctcccacccccagggactggggscccctgccccagaagccccagagctgggaggccctggactgaagaagaggtttggcaaaaaggcagcagtgcccactccccggctgtacacagaggcgct

SEQ ID NO: 82162 - DNA, 201 bp, Homo sapiens
ctgtgatgcttagaacctggacagcccgactgcctcaactctgtctccaggtctattccctccagctccaaaaggagcagccctacttctaccccttcccrtccccaaagtgtcagcaactttgaggagggcaccaggaaacaaagatgcctccccagccctgatattcttgatgtcaccagtgatacccactgccctgac

SEQ ID NO: 82163 - DNA, 201 bp, Homo sapiens
gtggcaagcaaagtggggaggagacagtccctgcttgtgacaagtgtggaggtgaaaaggtacaatagtgcttgtctccgatagctccccacatctctaaytgacttccacaaaatcgatgcgttgctttggtatttgcttggactgacatttgagggaggaggaggctgggatcctctggctgagaatctcctcagagcc

SEQ ID NO: 82164 - DNA, 201 bp, Homo sapiens
caacccccgggacctggccaaccaggtgacgggctggctggacggcagcgccatctatggctcctcgcactcctggagcgacgcgctgcggagcttctcgrggggacagctggcgtcggggcccgaccccgctttcccccgagactcgcagaaccccctgctcatgtgggcggcgcccgaccccgccaccgggcagaacgg

SEQ ID NO: 82165 - DNA, 201 bp, Homo sapiens
ggggtcttctttggctaccatgttctttccgacgtggtgagcgtggaaacgcccggttgccccgccgagttcctcaacatccgcatcccacctggagaccycgtgttcgaccccgaccagcgcggggacgtggtgctgcccttccagaggagccgctgggaccccgagaccggacggagtcccagcaacccccgggacctg

SEQ ID NO: 82166 - DNA, 201 bp, Homo sapiens
aacgcatcctggagatcttcttcagacacctttttgctcaggtgctggacatcaaccaggccgacgcagggaccctgcccctggactcctcccagaaggtrcgggaggccctgacctgcgagctgagcagggccgagtttgccgagtccctgggcctcaagccccaggacatgtttgtggagtccatgttctctctggctg

SEQ ID NO: 82167 - DNA, 201 bp, Homo sapiens
gcaacccccgggacctggccaaccaggtgacgggctggctggacggcagcgccatctatggctcctcgcactcctggagcgacgcgctgcggagcttctcsgggggacagctggcgtcggggcccgaccccgctttcccccgagactcgcagaaccccctgctcatgtgggcggcgcccgaccccgccaccgggcagaacg

SEQ ID NO: 82168 - DNA, 201 bp, Homo sapiens
gctgggaccccgagaccggacggagtcccagcaacccccgggacctggccaaccaggtgacgggctggctggacggcagcgccatctatggctcctcgcaytcctggagcgacgcgctgcggagcttctcggggggacagctggcgtcggggcccgaccccgctttcccccgagactcgcagaaccccctgctcatgtggg

SEQ ID NO: 82169 - DNA, 201 bp, Homo sapiens
agaggagccgctgggaccccgagaccggacggagtcccagcaacccccgggacctggccaaccaggtgacgggctggctggacggcagcgccatctatggytcctcgcactcctggagcgacgcgctgcggagcttctcggggggacagctggcgtcggggcccgaccccgctttcccccgagactcgcagaaccccctgc

SEQ ID NO: 82170 - DNA, 201 bp, Homo sapiens
cccactgccctgacccctgggcaggcccctctctgcatctactggagtggtccctgggctctggggctgaaggattccagcctctctgccagatattcagwactcgatctcaattcccctcttccacaagagttgggtgaccagctgtcctagtttgcccaggactctccctgttttagcactgaaagtctcttgccccag

SEQ ID NO: 82171 - DNA, 201 bp, Homo sapiens
attttccccaatatatgataagagtgcccaggagtggaatctggaaatagagtctacatttgatgttgtcagctcaaagccagttggtggtcaagtgatcrtagccatccctaagttgcaaacacaacagacatacagcattgaacttcaacctgggaaaaggattgttgagctatttgtgaacattagcaagaatattac

SEQ ID NO: 82172 - DNA, 201 bp, Homo sapiens
gggtctctttggataactggacctatagcaaagaatttaaaatcccctttgaaattagcaaatggcaaaaagtaaatttgattcttgagggagtggatacrgtttcaaaaatcctgttcaatgaagtcactattggggaaacagacaatatgttcaatagatatagctttgatattaccaacgtggtcagggacgtgaact

SEQ ID NO: 82173 - DNA, 105 bp, Homo sapiens
acagagatttcttggtggtagctatttgggtaaaggtatatgggtatttttctgtacatgtgaaattatataaaaataaaagttatataaattacattgamaact

SEQ ID NO: 82174 - DNA, 201 bp, Homo sapiens
  misc_feature (1)...(201): n = A,T,C or G
tgggcttctcttgagtacggaggaaagtggaaaatgcttcattactttgctcagaatttctttgctccactgttgccagtaggctttgagaatgaaaacangttctatatctatggtgtgtcagatcttcactcggattattcgatgacactcagtgtgagagtccatacatggagctccctggagcccgtgtgctctcgt

SEQ ID NO: 82175 - DNA, 201 bp, Homo sapiens
tggacaatgggaataaagcatttctaaagcaccgactggagaggaaggcaacagagacaaggagagaagccgagagacatgtctgcgtgctgccacgcatytgagcgattgctctgtgaagagttgtacactgaacactttcaggggaggctgtttacccaggcaatgtcctcaaacaagcctgtgccggggtgtcctgga

SEQ ID NO: 82176 - DNA, 201 bp, Homo sapiens
ggagaggaaggcaacagagacaaggagagaagccgagagacatgtctgcgtgctgccacgcatttgagcgattgctctgtgaagagttgtacactgaacaytttcaggggaggctgtttacccaggcaatgtcctcaaacaagcctgtgccggggtgtcctggaatctgtgccaggactgtgtttttagcccttcacctct

SEQ ID NO: 82177 - DNA, 201 bp, Homo sapiens
attgctgaggagatgtgggaattgcacacgggaaagctgtgtggtttccttttacctttcagctgaccatgaactcctgagcccgaccaactaccacttcytgtcctcaccgaaggaggccgtggggctctgcaaggcgcagatcactgccatcatctctcagcaaggtgacatatttgtttttgacctggagacctcagc

SEQ ID NO: 82178 - DNA, 201 bp, Homo sapiens
agttataacaagatggccctgcagctggttacaagaatgtgacatggcaggatctatggaaccaaatggaaggttttgaggtgatgtaggtctttcacagytagctttggggaatacggaatactcaaataaagtgctttgttattatttcagagggaatggcgattgaaatgttacaacagagatttcttggtggtagct

SEQ ID NO: 82179 - DNA, 201 bp, Homo sapiens
gaggaaggcaacagagacaaggagagaagccgagagacatgtctgcgtgctgccacgcatttgagcgattgctctgtgaagagttgtacactgaacacttycaggggaggctgtttacccaggcaatgtcctcaaacaagcctgtgccggggtgtcctggaatctgtgccaggactgtgtttttagcccttcacctctcag

SEQ ID NO: 82180 - DNA, 201 bp, Homo sapiens
cctgcagctggttacaagaatgtgacatggcaggatctatggaaccaaatggaaggttttgaggtgatgtaggtctttcacagctagctttggggaatacrgaatactcaaataaagtgctttgttattatttcagagggaatggcgattgaaatgttacaacagagatttcttggtggtagctatttgggtaaaggtata

SEQ ID NO: 82181 - DNA, 162 bp, Homo sapiens
tactcaaataaagtgctttgttattatttcagagggaatggcgattgaaatgttacaacagagatttcttggtggtagctatttgggtaaaggtatatggrtatttttctgtacatgtgaaattatataaaaataaaagttatataaattacattgacaact

SEQ ID NO: 82182 - DNA, 201 bp, Homo sapiens
cagagactgtaacaagatcgcattttacaggaagaaaagcgtattatgttaattctgaacaggcgtcagaaacagtggctttccaagaagtccacctatcrggcattattggattcagtcacaacagatgaagacagcaccaggttccaaatcatcaatgaagcaagtaaggttcctctcctggctgaaatttatggtata

SEQ ID NO: 82183 - DNA, 201 bp, Homo sapiens
cagcagctacggttgccggtcccgcactgaaaaacgacagtggtgacgggtgagctcccagaagcagaagaatgacaggcaacacctgaagccacgcagcmgccgccatcttcacagccgtggagtgcctaccgaaagcatttcaccctcttccggactcattgcgtacacgccctcaccgccgcccagtttcggttccta

SEQ ID NO: 82184 - DNA, 201 bp, Homo sapiens
cagactgattaatatctactgtaacaatttggcagtgagttttctttggatattagtataaatatgtaagtatcgttttaatatattagtcatgatatagyattttaaaaattatctgtaacctgaattctgttaaaacactttatattccaaaagaatgaatgacagtgatattaaaatcactacattaaagggtttgcc

SEQ ID NO: 82185 - DNA, 201 bp, Homo sapiens
tttgttctgtaaatactgctttcctaatttagtaaaatgaaagaatagacactaaaatcacactgacctatacttatacctatagaatcagttaataaggktatcagactgattaatatctactgtaacaatttggcagtgagttttctttggatattagtataaatatgtaagtatcgttttaatatattagtcatgata

SEQ ID NO: 82186 - DNA, 201 bp, Homo sapiens
ggcttttttaaaagatcgcccagggcccttgtcctgagagctgggagctggtcggagtgacagagaagccatggaagcagcagtgaaagaggaaataagtsttgaagatgaagctgtagataaaaacattttcagagactgtaacaagatcgcattttacaggaagaaaagcgtattatgttaattctgaacaggcgtcag

SEQ ID NO: 82187 - DNA, 201 bp, Homo sapiens
caccttttgatgaataatttgaatccagctttgtgcgtatagtggggatttctatctgagcttgtgacacagctaactcaggagctgttatggtccttggktggctgtttcacttgtttttatttgttctgtaaatactgctttcctaatttagtaaaatgaaagaatagacactaaaatcacactgacctatacttatac

SEQ ID NO: 82188 - DNA, 201 bp, Homo sapiens
ccatatcacagcaaacccattcaaggtagacttggtgtctgaagaagaggttgtgattagcataaattccctgggccaattatactttgagcatctacagrttcttcacaaacaaagagctgctaaagaaaatgaggaggagacatcagtggacacctctcaggaaaatcaagaagatctgggcctgtgggaagagaaatt

SEQ ID NO: 82189 - DNA, 201 bp, Homo sapiens
ggataccaaatatatgataaaatgggcatttatggttcagtaccttatctcctggcccacaaactgggcagaactataggtattttctggctgaatgcctyggaaacactggtggagatcaatacagagcctgcagtagagtacacactgacccagatgggcccagttgctgctaaacaaaaggtcagatctcgcactcat

SEQ ID NO: 82190 - DNA, 201 bp, Homo sapiens
aagacagcaccaggttccaaatcatcaatgaagcaagtaaggttcctctcctggctgaaatttatggtatagaaggaaacattttcaggcttaaaattaaygaagagactcctctaaaacccagatttgaagttccggatgtcctcacaagcaagccaagcactgtaaggctgatttcatgctctggggacacaggcagtc

SEQ ID NO: 82191 - DNA, 201 bp, Homo sapiens
gctggtcggagtgacagagaagccatggaagcagcagtgaaagaggaaataagtgttgaagatgaagctgtagataaaaacattttcagagactgtaacargatcgcattttacaggaagaaaagcgtattatgttaattctgaacaggcgtcagaaacagtggctttccaagaagtccacctatcgggcattattggatt

SEQ ID NO: 82192 - DNA, 201 bp, Homo sapiens
gttgaagatgaagctgtagataaaaacattttcagagactgtaacaagatcgcattttacaggcgtcagaaacagtggctttccaagaagtccacctatcrggcattattggattcagtcacaacagatgaagacagcaccaggttccaaatcatcaatgaagcaagtaaggttcctctcctggctgaaatttatggtata

SEQ ID NO: 82193 - DNA, 201 bp, Homo sapiens
cttgatgatggccattcattccaatacctccaccagaagcaatttttgcacaggaagttttcattctgttccagtgttctgatcaatagttttgctgaccrgaggggtcattatcccagcaagtgtgtggtggagaagatcttggtcttaggcttcaggaaggagccatcttctgtgactacccactcatctgatggtaaa

SEQ ID NO: 82194 - DNA, 201 bp, Homo sapiens
tagcgttcaggagtcttctattgcttccattccttcagcagggctgcgtgggtctgttttaacgtgggccaagcctacctgggcagcccatttgccagggyttgcctcaggccatgcagcattggcgctctggctgcagcagctgagttgctcaaggccagtgtccaagtggacagcagcctctggtactccccccagtta

SEQ ID NO: 82195 - DNA, 201 bp, Homo sapiens
gagttatatcttgatgatggccattcattccaatacctccaccagaagcaatttttgcacaggaagttttcattctgttccagtgttctgatcaatagttytgctgaccagaggggtcattatcccagcaagtgtgtggtggagaagatcttggtcttaggcttcaggaaggagccatcttctgtgactacccactcatct

SEQ ID NO: 82196 - DNA, 201 bp, Homo sapiens
tactcactctcagcattactgggatctctttttgcggagctgacataggcgggttcattgggaatccagagacagagctgctagtgcgttggtaccaggcyggagcctaccagcccttcttccgtggccatgccaccatgaacaccaagcgacgagagccctggctctttggggaggaacacacccgactcatccgagaag

SEQ ID NO: 82197 - DNA, 201 bp, Homo sapiens
ggcttttttaaaagatcgcccagggcccttgtcctgagagctgggagctggtcggagtgacagagaagccatggaagcagcagtgaaagaggaaataagtsttgaagatgaagctgtagataaaaacattttcagagactgtaacaagatcgcattttacaggcgtcagaaacagtggctttccaagaagtccacctatcg

SEQ ID NO: 82198 - DNA, 196 bp, Homo sapiens
ctacttagcattctcagggatcataccttaatgttttcagtatgtctgcgttctcctactagattgtatgtccctcaagagcatgttctgtttctcttctrtctgacagagcactattatacctgactttcagtaactgttagctgtgattagttagctggtggatttaattgattaaaaaattacgattgaatgt

SEQ ID NO: 82199 - DNA, 201 bp, Homo sapiens
gtggctccctgctgcctgccacagcatctgttttagcagcctcgactcctcagcactcctcagcacacacctcttcttatcaggcttcctccacttagcarcttgctaacggccacctctgtgccttctgatccctgggcgccaatatcctcctgcccttaccatccttccaggcccaacttaaatcccactttcccatga

SEQ ID NO: 82200 - DNA, 201 bp, Homo sapiens; identical to SEQ ID NO: 82188

SEQ ID NO: 82201 - DNA, 201 bp, Homo sapiens
gggacaaaaacagattcccaaaccccaagaggatgcaagagctgctcaggagcaaaaagcgtaagcttgtggtcatcagtgatccccacatcaagattgawcctgactactcagtatatgtgaaggccaaagatcagggcttctttgtgaagaatcaggaaggggaagactttgaaggggtgtgttggccaggtctctcct

SEQ ID NO: 82202 - DNA, 201 bp, Homo sapiens; identical to SEQ ID NO: 82189

SEQ ID NO: 82203 - DNA, 201 bp, Homo sapiens
gccatgtggctggacatagagcacactgagggcaagaggtacttcacctgggacaaaaacagattcccaaaccccaagaggatgcaagagctgctcaggarcaaaaagcgtaagcttgtggtcatcagtgatccccacatcaagattgatcctgactactcagtatatgtgaaggccaaagatcagggcttctttgtgaag

SEQ ID NO: 82204 - DNA, 201 bp, Homo sapiens
gcgggttcattgggaatccagagacagagctgctagtgcgttggtaccaggctggagcctaccagcccttcttccgtggccatgccaccatgaacaccaarcgacgagagccctggctctttggggaggaacacacccgactcatccgagaagccatcagagagcgctatggcctcctgccatattggtattctctgttct

SEQ ID NO: 82205 - DNA, 201 bp, Homo sapiens; identical to SEQ ID NO: 82190

SEQ ID NO: 82206 - DNA, 201 bp, Homo sapiens
gctggtcggagtgacagagaagccatggaagcagcagtgaaagaggaaataagtgttgaagatgaagctgtagataaaaacattttcagagactgtaacargatcgcattttacaggcgtcagaaacagtggctttccaagaagtccacctatcgggcattattggattcagtcacaacagatgaagacagcaccaggttc

SEQ ID NO: 82207 - DNA, 201 bp, Homo sapiens
tcattcgagctggaagagatatttttgcacagagaagccaggttacaaactacctaggcattgaatggatgcgtaggcatcttgctccagactacagagtrcatatcatctcctttaaagatcccaatcccatgcatattgatgctaccttcaacatcattggacctggtattgtgctttccaaccctgaccgaccatgtc

SEQ ID NO: 82208 - DNA, 201 bp, Homo sapiens
ctcaacattgtgatatatgctactaaaaaccttttcatatacatcttacctcatttcaagtgaattattttaatcttttcctctctttccaaaaatttacaggaatgtttagtgtaattggatttcgctatcagttcccatccttaagttttgatattcaatatctgatagatacactgcatctttggtcatctaagattt

SEQ ID NO: 82209 - DNA, 201 bp, Homo sapiens
tctcaacattgtgatatatgctactaaaaaccttttcatatacatcttacctcatttcaagtgaattattttaatcttttcctctctttccaaaaatttacaggaatgtttagtgtaattggatttcgctatcagttcccatccttaagttttgatattcaatatctgatagatacactgcatctttggtcatctaagatt

SEQ ID NO: 82210 - DNA, 201 bp, Homo sapiens
aggcattgaatggatgcgtaggcatcttgctccagactacagagtgcatatcatctcctttaaagatcccaatcccatgcatattgatgctaccttcaacrtcattggacctggtattgtgctttccaaccctgaccgaccatgtcaccagattgatcttttcaagaaagcaggatggactatcattactcctccaacacc

SEQ ID NO: 82211 - DNA, 144 bp, Homo sapiens
caaatgtgcaaattatttagagcatagactttataagcattaaaaaaaactaatggaggtaaaacctaaatgcgatgtgaaataattttagtgttgatacygtatgtgtatttttattctaataaacttttgtgttccagattg

SEQ ID NO: 82212 - DNA, 201 bp, Homo sapiens
attagtcacctgagtaacttggccactaataattaaccatctacctctgtttttaatttttttgttttttaaaaaataacctagactatgcaaaacatcaragtgaattttccatgaatgtttttaatattctcatctcaacattgtgatatatgctactaaaaaccttttcatatacatcttacctcatttcaagtgaat

SEQ ID NO: 82213 - DNA, 201 bp, Homo sapiens
caagtataaaattttggtgaatgtgtaccaagaaaaaattagtcacctgagtaacttggccactaataattaaccatctacctctgtttttaatttttttkttttttaaaaaataacctagactatgcaaaacatcaaagtgaattttccatgaatgtttttaatattctcatctcaacattgtgatatatgctactaaaa

SEQ ID NO: 82214 - DNA, 201 bp, Homo sapiens
gtaattggatttcgctatcagttcccatccttaagttttgatattcaatatctgatagatacactgcatctttggtcatctaagatttgtttacaaatgtrcaaattatttagagcatagactttataagcattaaaaaaaactaatggaggtaaaacctaaatgcgatgtgaaataattttagtgttgatactgtatgtg

SEQ ID NO: 82215 - DNA, 201 bp, Homo sapiens
aaagctgggtatcactaccattaaagttaacattcgtaatgccaattccctgggaggaggcttccattgctggacctgcgatgtccggcgccgaggcaccytacagtcctacttggactgaacaggcctgatggagcttgtggctggcctcagatacacctaagaagcttaggggcaaggttcattctcctgctttaaaaa

SEQ ID NO: 82216 - DNA, 201 bp, Homo sapiens
atattctcatctcaacattgtgatatatgctactaaaaaccttttcatatacatcttacctcatttcaagtgaattattttaatcttttcctctctttccmaaaatttacaggaatgtttagtgtaattggatttcgctatcagttcccatccttaagttttgatattcaatatctgatagatacactgcatctttggtca

SEQ ID NO: 82217 - DNA, 201 bp, Homo sapiens
gaatgtttttaatattctcatctcaacattgtgatatatgctactaaaaaccttttcatatacatcttacctcatttcaagtgaattattttaatcttttyctctctttccaaaaatttacaggaatgtttagtgtaattggatttcgctatcagttcccatccttaagttttgatattcaatatctgatagatacactgc

SEQ ID NO: 82218 - DNA, 201 bp, Homo sapiens
gaagagatatttttgcacagagaagccaggttacaaactacctaggcattgaatggatgcgtaggcatcttgctccagactacagagtgcatatcatctcytttaaagatcccaatcccatgcatattgatgctaccttcaacatcattggacctggtattgtgctttccaaccctgaccgaccatgtcaccagattgatc

SEQ ID NO: 82219 - DNA, 201 bp, Homo sapiens
aagtgatagtgggcagagcagaaaacgcctgtgttccaccgttcaccatcgaggtgaaggccaacacatatgaaaagtactggccattttaccagaagcawggagggcattattttcccaaagatcatttgaaaaaggctgttgctgaaattgaagaaatgtgcaatattttaaaaacggaaggagtgacagtaaggaggc

SEQ ID NO: 82220 - DNA, 201 bp, Homo sapiens
tttttgcacagagaagccaggttacaaactacctaggcattgaatggatgcgtaggcatcttgctccagactacagagtgcatatcatctcctttaaagaycccaatcccatgcatattgatgctaccttcaacatcattggacctggtattgtgctttccaaccctgaccgaccatgtcaccagattgatcttttcaaga

SEQ ID NO: 82221 - DNA, 201 bp, Homo sapiens
tctgcccaaggactgccctgtctcttcttacaacgaatgggaccccttagaggaagtgatagtgggcagagcagaaaacgcctgtgttccaccgttcaccrtcgaggtgaaggccaacacatatgaaaagtactggccattttaccagaagcatggagggcattattttcccaaagatcatttgaaaaaggctgttgctga

SEQ ID NO: 82222 - DNA, 201 bp, Homo sapiens; identical to SEQ ID NO: 82207

SEQ ID NO: 82223 - DNA, 201 bp, Homo sapiens; identical to SEQ ID NO: 82208

SEQ ID NO: 82224 - DNA, 201 bp, Homo sapiens; identical to SEQ ID NO: 82209

SEQ ID NO: 82225 - DNA, 201 bp, Homo sapiens; identical to SEQ ID NO: 82210

SEQ ID NO: 82226 - DNA, 146 bp, Homo sapiens
caaatgtgcaaattatttagagcatagactttataagcattaaaaaaaactaatggaggtaaaacctaaatgcgatgtgaaataattttagtgttgatacygtatgtgtatttttattctaataaacttttgtgttccagattgaa

SEQ ID NO: 82227 - DNA, 201 bp, Homo sapiens
ctaagtagaaccaggtaattgtctctttttctaataaggaatttgggtaatttttaattttttgttttttaaaaaataacctagactatgcaaaacatcaragtgaattttccatgaatgtttttaatattctcatctcaacattgtgatatatgctactaaaaaccttttcatatacatcttacctcatttcaagtgaat

SEQ ID NO: 82228 - DNA, 201 bp, Homo sapiens
ttctaaaggagagaaagacttagaacatacacagatcctaagtagaaccaggtaattgtctctttttctaataaggaatttgggtaatttttaattttttkttttttaaaaaataacctagactatgcaaaacatcaaagtgaattttccatgaatgtttttaatattctcatctcaacattgtgatatatgctactaaaa

SEQ ID NO: 82229 - DNA, 201 bp, Homo sapiens; identical to SEQ ID NO: 82214

SEQ ID NO: 82230 - DNA, 201 bp, Homo sapiens; identical to SEQ ID NO: 82215

SEQ ID NO: 82231 - DNA, 201 bp, Homo sapiens; identical to SEQ ID NO: 82216

SEQ ID NO: 82232 - DNA, 201 bp, Homo sapiens; identical to SEQ ID NO: 82217

SEQ ID NO: 82233 - DNA, 201 bp, Homo sapiens; identical to SEQ ID NO: 82218

SEQ ID NO: 82234 - DNA, 201 bp, Homo sapiens; identical to SEQ ID NO: 82219

SEQ ID NO: 82235 - DNA, 201 bp, Homo sapiens; identical to SEQ ID NO: 82220

SEQ ID NO: 82236 - DNA, 201 bp, Homo sapiens; identical to SEQ ID NO: 82221

SEQ ID NO: 82237 - DNA, 201 bp, Homo sapiens
atatacacaccagtagaagagagctccattggtaaatttcctagatgtacaactatagatttcatgatgtatcgttcaataaggtgactttaaaatgagaygaaaatcattaaacgtatctttgttttatcctgtatttaaataatatatcatgtacctttattgaacaaggcatccgttatatctaattttgtatatgtt

SEQ ID NO: 82238 - DNA, 201 bp, Homo sapiens; identical to SEQ ID NO: 82237

SEQ ID NO: 82239 - DNA, 201 bp, Homo sapiens; identical to SEQ ID NO: 82237

SEQ ID NO: 82240 - DNA, 201 bp, Homo sapiens
attcactgtttcactgaaatgtttggattctcttagctactgtatgcaaagtccgattatattggtgcgtttttacagttagggttttgcaataacttctwtattttaatagaaataaattcctaaactcccttccctctctcccatttcaggaatttaaaattaagtagaacaaaaaacccagcgcacctgttagagtcg

SEQ ID NO: 82241 - DNA, 201 bp, Homo sapiens
atttccgattgaatgattctcataaacacaaagataaacacaaagatcgagaacaccggcacaaagaacacaagaaggagaaggaccgggaaaagtccaarcatagcaacagtgaacataaagattctgaaaagaaacacaaagagaaggagaagaccaaacacaaagatggaagctcagaaaagcataaagacaaacata

SEQ ID NO: 82242 - DNA, 201 bp, Homo sapiens
tcactgtttcactgaaatgtttggattctcttagctactgtatgcaaagtccgattatattggtgcgtttttacagttagggttttgcaataacttctatwttttaatagaaataaattcctaaactcccttccctctctcccatttcaggaatttaaaattaagtagaacaaaaaacccagcgcacctgttagagtcgtc

SEQ ID NO: 82243 - DNA, 201 bp, Homo sapiens
aggcagcgtcgccgccgtggtagcagcctcagccgtttctggagtctcgggcccacagtcaccgccgcttacctgcgcctcctcgagcctccggagtcccmgtccgcccgcacaggccggttcgccgtctgcgtctcccccacgccgcctcgcctgccgccgcgctcgtccctccgggccgacatgagtggggaccacctc

SEQ ID NO: 82244 - DNA, 156 bp, Homo sapiens
caaatgcgaacttaggctgttacacaactgctggggtctgttctcgccgcccgccmggcagtcaggcagcgtcgccgccgtggtagcagcctcagccgtttctggagtctcgggcccacagtcaccgccgcttacctgcgcctcctcgagcctccg

SEQ ID NO: 82245 - DNA, 201 bp, Homo sapiens
tattgtataaaaagtttcacaggtcaataaacttagaggaaaatgagtatttggtccaaaaaaaggaaaaataatcaagattttagggcttttattttttyttttgtaattgtgtaaaaaatggaaaaaaacataaaaagcagaattttaatgtgaagacattttttgctataatcattagttttagaggcattgttagtt

SEQ ID NO: 82246 - DNA, 201 bp, Homo sapiens
agcagcccgaggatgatctttttgatagactcaatactggtattctgaataagcatcttcaggatctcatggagggcttgacagccaaggtattccgtacrtacaatgcctccatcacgctacagcagcagctaaaagaactgacagccccggatgagaacatcccagcgaagatcctttcttataaccgtgccaatcgag

SEQ ID NO: 82247 - DNA, 201 bp, Homo sapiens
aaattcactgtttcactgaaatgtttggattctcttagctactgtatgcaaagtccgattatattggtgcgtttttacagttagggttttgcaataacttytatattttaatagaaataaattcctaaactcccttccctctctcccatttcaggaatttaaaattaagtagaacaaaaaacccagcgcacctgttagagt

SEQ ID NO: 82248 - DNA, 201 bp, Homo sapiens
ggcttttattttttcttttgtaattgtgtaaaaaatggaaaaaaacataaaaagcagaattttaatgtgaagacattttttgctataatcattagttttaraggcattgttagtttagtgtgtgtgcagagtccatttcccacatctttcctcaagtatcttctatttttatcatgaattcccttttaatcaactgtaggt

SEQ ID NO: 82249 - DNA, 201 bp, Homo sapiens
agtgaatctaaggataatgaaataatcagtgactgaaaccattttcccatcatcctttgttctgagcattcgctgtaccctttaagatatccatctttttytttttaaccctaatctttcacttgaaagattttattgtataaaaagtttcacaggtcaataaacttagaggaaaatgagtatttggtccaaaaaaaggaa

SEQ ID NO: 82250 - DNA, 201 bp, Homo sapiens
atcgacaagcttgctctgagagcaggcaatgaaaaggaggaaggagaaacagcggacactgtgggctgctgctcacttcgtgtggagcacatcaatctacrcccagagttggatggtcaggaatatgtggtagagtttgacttcctcgggaaggactccatcagatactataacaaggtccctgttgagaaacgagttttt

SEQ ID NO: 82251 - DNA, 201 bp, Homo sapiens; identical to SEQ ID NO: 82240

SEQ ID NO: 82252 - DNA, 201 bp, Homo sapiens; identical to SEQ ID NO: 82241

SEQ ID NO: 82253 - DNA, 201 bp, Homo sapiens; identical to SEQ ID NO: 82242

SEQ ID NO: 82254 - DNA, 201 bp, Homo sapiens; identical to SEQ ID NO: 82243

SEQ ID NO: 82255 - DNA, 156 bp, Homo sapiens; identical to SEQ ID NO: 82244

SEQ ID NO: 82256 - DNA, 179 bp, Homo sapiens
tattgtataaaaagtttcacaggtcaataaacttagaggaaaatgagtatttggtccaaaaaaaggaaaaataatcaagattttagggcttttattttttyttttgtaattgtgtaaaaaatggaaaaaaacataaaaagcattgttagtttagtgtgtgtgcagagtccatttcccac

SEQ ID NO: 82257 - DNA, 201 bp, Homo sapiens; identical to SEQ ID NO: 82246

SEQ ID NO: 82258 - DNA, 201 bp, Homo sapiens; identical to SEQ ID NO: 82247

SEQ ID NO: 82259 - DNA, 201 bp, Homo sapiens; identical to SEQ ID NO: 82249

SEQ ID NO: 82260 - DNA, 201 bp, Homo sapiens; identical to SEQ ID NO: 82250

SEQ ID NO: 82261 - DNA, 201 bp, Homo sapiens; identical to SEQ ID NO: 82240

SEQ ID NO: 82262 - DNA, 201 bp, Homo sapiens; identical to SEQ ID NO: 82241

SEQ ID NO: 82263 - DNA, 201 bp, Homo sapiens; identical to SEQ ID NO: 82242

SEQ ID NO: 82264 - DNA, 201 bp, Homo sapiens; identical to SEQ ID NO: 82243

SEQ ID NO: 82265 - DNA, 156 bp, Homo sapiens; identical to SEQ ID NO: 82244

SEQ ID NO: 82266 - DNA, 179 bp, Homo sapiens; identical to SEQ ID NO: 82256

SEQ ID NO: 82267 - DNA, 201 bp, Homo sapiens; identical to SEQ ID NO: 82246

SEQ ID NO: 82268 - DNA, 201 bp, Homo sapiens; identical to SEQ ID NO: 82247

SEQ ID NO: 82269 - DNA, 201 bp, Homo sapiens; identical to SEQ ID NO: 82249

SEQ ID NO: 82270 - DNA, 201 bp, Homo sapiens; identical to SEQ ID NO: 82250

SEQ ID NO: 82271 - DNA, 201 bp, Homo sapiens; identical to SEQ ID NO: 82240

SEQ ID NO: 82272 - DNA, 201 bp, Homo sapiens; identical to SEQ ID NO: 82241

SEQ ID NO: 82273 - DNA, 201 bp, Homo sapiens; identical to SEQ ID NO: 82242

SEQ ID NO: 82274 - DNA, 201 bp, Homo sapiens; identical to SEQ ID NO: 82243

SEQ ID NO: 82275 - DNA, 156 bp, Homo sapiens; identical to SEQ ID NO: 82244

SEQ ID NO: 82276 - DNA, 201 bp, Homo sapiens; identical to SEQ ID NO: 82245

SEQ ID NO: 82277 - DNA, 201 bp, Homo sapiens; identical to SEQ ID NO: 82246

SEQ ID NO: 82278 - DNA, 201 bp, Homo sapiens; identical to SEQ ID NO: 82247

SEQ ID NO: 82279 - DNA, 201 bp, Homo sapiens; identical to SEQ ID NO: 82248

SEQ ID NO: 82280 - DNA, 201 bp, Homo sapiens; identical to SEQ ID NO: 82249

SEQ ID NO: 82281 - DNA, 201 bp, Homo sapiens; identical to SEQ ID NO: 82250

SEQ ID NO: 82282 - DNA, 201 bp, Homo sapiens
gcaaggattgacacgtcctgcctgaccaccatcctgccaccaccttctcttctcttgtcactagggggactagggggtccccaaagtggcccactttctgwggctctgatcagcgcaggggccagccagggacatagccagggaggggccacatcacttcccactggaaatctctgtggtctgcaagtgcttcccagccca

SEQ ID NO: 82283 - DNA, 201 bp, Homo sapiens
cacgggagctgcagtccatggctgaccaggagcaggtgtcaccagccgccatcaagaagaccatcctggacaaggtgaagctggactcccctgcagggacygctctgtcgccttctggccacaccaagctgctcccccgcagcctggccccagcgggcaaggattgacacgtcctgcctgaccaccatcctgccaccacct

SEQ ID NO: 82284 - DNA, 201 bp, Homo sapiens
tggaggacgggaggctcatggagcagctgctgagcagcgtgggcttctgcacggaggtggaagaggacctgattgatgccgtcacggggctcagtggcagyggccccgcctacgcattcacagccctggatgccctggctgatgggggtgtgaagatgggacttccaaggcgcctggcagtccgcctcggggcccaggccc

SEQ ID NO: 82285 - DNA, 201 bp, Homo sapiens
gcaagtgcttcccagcccagaacaggggtggattccccaacctcaacctcctttcttctctgctcccaaaccatgtcaggaccaccttcctctagagctcrggagcccggagggtcttcacccactcctactccagtatcagctggcacgggctccttcctgagagcaaaggtcaaggaccccctctgtgaaggctcagca

SEQ ID NO: 82286 - DNA, 201 bp, Homo sapiens
tgcagcacagtgatgtgctcttcctggctgtgaagccacacatcatccccttcatcctggatgaaataggcgccgacattgaggacagacacattgtggtrtcctgcgcggccggcgtcaccatcagctccattgagaagaagctgtcagcgtttcggccagcccccagggtcatccgctgcatgaccaacactccagtcg

SEQ ID NO: 82287 - DNA, 201 bp, Homo sapiens
gcacggaggtggaagaggacctgattgatgccgtcacggggctcagtggcagcggccccgcctacgcattcacagccctggatgccctggctgatgggggygtgaagatgggacttccaaggcgcctggcagtccgcctcggggcccaggccctcctgggggctgccaagatgctgctgcactcagaacagcacccaggcc

SEQ ID NO: 82288 - DNA, 201 bp, Homo sapiens
tgcagtccatggctgaccaggagcaggtgtcaccagccgccatcaagaagaccatcctggacaaggtgaagctggactcccctgcagggaccgctctgtcrccttctggccacaccaagctgctcccccgcagcctggccccagcgggcaaggattgacacgtcctgcctgaccaccatcctgccaccaccttctcttctc

SEQ ID NO: 82289 - DNA, 201 bp, Homo sapiens
aacgctgtggaggcctcctgcatccgcacacgggagctgcagtccatggctgaccaggagcaggtgtcaccagccgccatcaagaagaccatcctggacarggtgaagctggactcccctgcagggaccgctctgtcgccttctggccacaccaagctgctcccccgcagcctggccccagcgggcaaggattgacacgtc

SEQ ID NO: 82290 - DNA, 201 bp, Homo sapiens
ccccgcagcctggccccagcgggcaaggattgacacgtcctgcctgaccaccatcctgccaccaccttctcttctcttgtcactagggggactagggggtycccaaagtggcccactttctgtggctctgatcagcgcaggggccagccagggacatagccagggaggggccacatcacttcccactggaaatctctgtgg

SEQ ID NO: 82291 - DNA, 201 bp, Homo sapiens
gcgccgacattgaggacagacacattgtggtgtcctgcgcggccggcgtcaccatcagctccattgagaagaagctgtcagcgtttcggccagcccccagrgtcatccgctgcatgaccaacactccagtcgtggtgcgggagggggccaccgtgtatgccacaggcacgcacgcccaggtggaggacgggaggctcatgg

SEQ ID NO: 82292 - DNA, 201 bp, Homo sapiens
tggactcccctgcagggaccgctctgtcgccttctggccacaccaagctgctcccccgcagcctggccccagcgggcaaggattgacacgtcctgcctgawcaccatcctgccaccaccttctcttctcttgtcactagggggactagggggtccccaaagtggcccactttctgtggctctgatcagcgcaggggccagc

SEQ ID NO: 82293 - DNA, 201 bp, Homo sapiens
cagcgtgggcttctgcacggaggtggaagaggacctgattgatgccgtcacggggctcagtggcagcggccccgcctacggagctgcagtccatggctgaycaggagcaggtgtcaccagccgccatcaagaagaccatcctggacaaggtgaagctggactcccctgcagggaccgctctgtcgccttctggccacacca

SEQ ID NO: 82294 - DNA, 201 bp, Homo sapiens
gatcagcgcaggggccagccagggacatagccagggaggggccacatcacttcccactggaaatctctgtggtctgcaagtgcttcccagcccagaacagrggtggattccccaacctcaacctcctttcttctctgctcccaaaccatgtcaggaccaccttcctctagagctcgggagcccggagggtcttcacccact

SEQ ID NO: 82295 - DNA, 201 bp, Homo sapiens
agacatggacctggccacagtttctgctctcagggtagatgggggtgaagttgacaccccacaacaaggagacggtgcagcacagtgatgtgctcttcctrgctgtgaagccacacatcatccccttcatcctggatgaaataggcgccgacattgaggacagacacattgtggtgtcctgcgcggccggcgtcaccatca

SEQ ID NO: 82296 - DNA, 201 bp, Homo sapiens
cttctgcacggaggtggaagaggacctgattgatgccgtcacggggctcagtggcagcggccccgcctacggagctgcagtccatggctgaccaggagcargtgtcaccagccgccatcaagaagaccatcctggacaaggtgaagctggactcccctgcagggaccgctctgtcgccttctggccacaccaagctgctcc

SEQ ID NO: 82297 - DNA, 201 bp, Homo sapiens
accatcctggacaaggtgaagctggactcccctgcagggaccgctctgtcgccttctggccacaccaagctgctcccccgcagcctggccccagcgggcayggattgacacgtcctgcctgaccaccatcctgccaccaccttctcttctcttgtcactagggggactagggggtccccaaagtggcccactttctgtggc

SEQ ID NO: 82298 - DNA, 201 bp, Homo sapiens
acgggaggctcatggagcagctgctgagcagcgtgggcttctgcacggaggtggaagaggacctgattgatgccgtcacggggctcagtggcagcggcccrgcctacggagctgcagtccatggctgaccaggagcaggtgtcaccagccgccatcaagaagaccatcctggacaaggtgaagctggactcccctgcaggg

SEQ ID NO: 82299 - DNA, 201 bp, Homo sapiens; identical to SEQ ID NO: 82282

SEQ ID NO: 82300 - DNA, 201 bp, Homo sapiens; identical to SEQ ID NO: 82283

SEQ ID NO: 82301 - DNA, 201 bp, Homo sapiens; identical to SEQ ID NO: 82284

SEQ ID NO: 82302 - DNA, 201 bp, Homo sapiens; identical to SEQ ID NO: 82285

SEQ ID NO: 82303 - DNA, 201 bp, Homo sapiens; identical to SEQ ID NO: 82286

SEQ ID NO: 82304 - DNA, 201 bp, Homo sapiens
gcacggaggtggaagaggacctgattgatgccgtcacggggctcagtggcagcggccccgcctacgcattcacagccctggatgccctggctgatgggggygtgaagatgggacttccaaggcgcctggcagtccgcctcggggcccaggccctcctggtcaggggctgccaagatgctgctgcactcagaacagcaccca

SEQ ID NO: 82305 - DNA, 201 bp, Homo sapiens; identical to SEQ ID NO: 82288

SEQ ID NO: 82306 - DNA, 201 bp, Homo sapiens; identical to SEQ ID NO: 82290

SEQ ID NO: 82307 - DNA, 201 bp, Homo sapiens; identical to SEQ ID NO: 82289

SEQ ID NO: 82308 - DNA, 201 bp, Homo sapiens; identical to SEQ ID NO: 82291

SEQ ID NO: 82309 - DNA, 201 bp, Homo sapiens; identical to SEQ ID NO: 82282

SEQ ID NO: 82310 - DNA, 201 bp, Homo sapiens
cctgggagctgcagtccatggctgaccaggagcaggtgtcaccagccgccatcaagaagaccatcctggacaaggtgaagctggactcccctgcagggacygctctgtcgccttctggccacaccaagctgctcccccgcagcctggccccagcgggcaaggattgacacgtcctgcctgaccaccatcctgccaccacct

SEQ ID NO: 82311 - DNA, 201 bp, Homo sapiens; identical to SEQ ID NO: 82284

SEQ ID NO: 82312 - DNA, 201 bp, Homo sapiens; identical to SEQ ID NO: 82285

SEQ ID NO: 82313 - DNA, 201 bp, Homo sapiens; identical to SEQ ID NO: 82286

SEQ ID NO: 82314 - DNA, 201 bp, Homo sapiens
gcacggaggtggaagaggacctgattgatgccgtcacggggctcagtggcagcggccccgcctacgcattcacagccctggatgccctggctgatgggggygtgaagatgggacttccaaggcgcctggcagtccgcctcggggcccaggccctcctgggagctgcagtccatggctgaccaggagcaggtgtcaccagcc

SEQ ID NO: 82315 - DNA, 201 bp, Homo sapiens; identical to SEQ ID NO: 82288

SEQ ID NO: 82316 - DNA, 201 bp, Homo sapiens; identical to SEQ ID NO: 82290

SEQ ID NO: 82317 - DNA, 201 bp, Homo sapiens
tggcagtccgcctcggggcccaggccctcctgggagctgcagtccatggctgaccaggagcaggtgtcaccagccgccatcaagaagaccatcctggacarggtgaagctggactcccctgcagggaccgctctgtcgccttctggccacaccaagctgctcccccgcagcctggccccagcgggcaaggattgacacgtc

SEQ ID NO: 82318 - DNA, 201 bp, Homo sapiens; identical to SEQ ID NO: 82291

SEQ ID NO: 82319 - DNA, 201 bp, Homo sapiens; identical to SEQ ID NO: 82282

SEQ ID NO: 82320 - DNA, 201 bp, Homo sapiens; identical to SEQ ID NO: 82283

SEQ ID NO: 82321 - DNA, 201 bp, Homo sapiens; identical to SEQ ID NO: 82284

SEQ ID NO: 82322 - DNA, 201 bp, Homo sapiens; identical to SEQ ID NO: 82285

SEQ ID NO: 82323 - DNA, 201 bp, Homo sapiens; identical to SEQ ID NO: 82286

SEQ ID NO: 82324 - DNA, 201 bp, Homo sapiens; identical to SEQ ID NO: 82287

SEQ ID NO: 82325 - DNA, 201 bp, Homo sapiens; identical to SEQ ID NO: 82288

SEQ ID NO: 82326 - DNA, 201 bp, Homo sapiens; identical to SEQ ID NO: 82289

SEQ ID NO: 82327 - DNA, 201 bp, Homo sapiens; identical to SEQ ID NO: 82290

SEQ ID NO: 82328 - DNA, 201 bp, Homo sapiens; identical to SEQ ID NO: 82291

SEQ ID NO: 82329 - DNA, 201 bp, Homo sapiens; identical to SEQ ID NO: 82282

SEQ ID NO: 82330 - DNA, 201 bp, Homo sapiens; identical to SEQ ID NO: 82283

SEQ ID NO: 82331 - DNA, 201 bp, Homo sapiens; identical to SEQ ID NO: 82284

SEQ ID NO: 82332 - DNA, 201 bp, Homo sapiens; identical to SEQ ID NO: 82285

SEQ ID NO: 82333 - DNA, 201 bp, Homo sapiens; identical to SEQ ID NO: 82286

SEQ ID NO: 82334 - DNA, 201 bp, Homo sapiens; identical to SEQ ID NO: 82287

SEQ ID NO: 82335 - DNA, 201 bp, Homo sapiens; identical to SEQ ID NO: 82288

SEQ ID NO: 82336 - DNA, 201 bp, Homo sapiens; identical to SEQ ID NO: 82289

SEQ ID NO: 82337 - DNA, 201 bp, Homo sapiens; identical to SEQ ID NO: 82290

SEQ ID NO: 82338 - DNA, 201 bp, Homo sapiens; identical to SEQ ID NO: 82291

SEQ ID NO: 82339 - DNA, 201 bp, Homo sapiens; identical to SEQ ID NO: 82282

SEQ ID NO: 82340 - DNA, 201 bp, Homo sapiens; identical to SEQ ID NO: 82283

SEQ ID NO: 82341 - DNA, 201 bp, Homo sapiens
tggaggacgggaggctcatggagcagctgctgagcagcgtgggcttctgcacggaggtggaagaggacctgattgatgccgtcacggggctcagtggcagyggccccgcctacggggctgccaagatgctgctgcactcagaacagcacccaggccagctcaaggacaacgtcagctctcctggtggggccaccatccatg

SEQ ID NO: 82342 - DNA, 201 bp, Homo sapiens; identical to SEQ ID NO: 82285

SEQ ID NO: 82343 - DNA, 201 bp, Homo sapiens; identical to SEQ ID NO: 82286

SEQ ID NO: 82344 - DNA, 201 bp, Homo sapiens; identical to SEQ ID NO: 82288

SEQ ID NO: 82345 - DNA, 201 bp, Homo sapiens; identical to SEQ ID NO: 82289

SEQ ID NO: 82346 - DNA, 201 bp, Homo sapiens; identical to SEQ ID NO: 82290

SEQ ID NO: 82347 - DNA, 201 bp, Homo sapiens; identical to SEQ ID NO: 82291

SEQ ID NO: 82348 - DNA, 201 bp, Homo sapiens; identical to SEQ ID NO: 82282

SEQ ID NO: 82349 - DNA, 201 bp, Homo sapiens; identical to SEQ ID NO: 82283

SEQ ID NO: 82350 - DNA, 201 bp, Homo sapiens; identical to SEQ ID NO: 82284

SEQ ID NO: 82351 - DNA, 201 bp, Homo sapiens; identical to SEQ ID NO: 82285

SEQ ID NO: 82352 - DNA, 201 bp, Homo sapiens; identical to SEQ ID NO: 82286

SEQ ID NO: 82353 - DNA, 201 bp, Homo sapiens; identical to SEQ ID NO: 82287

SEQ ID NO: 82354 - DNA, 201 bp, Homo sapiens; identical to SEQ ID NO: 82288

SEQ ID NO: 82355 - DNA, 201 bp, Homo sapiens; identical to SEQ ID NO: 82289

SEQ ID NO: 82356 - DNA, 201 bp, Homo sapiens; identical to SEQ ID NO: 82290

SEQ ID NO: 82357 - DNA, 201 bp, Homo sapiens; identical to SEQ ID NO: 82291

SEQ ID NO: 82358 - DNA, 201 bp, Homo sapiens
acggcaaacacaacggacctgagcactggcataaggacttccccattgccaagggagagcgccagtcccctgttgacatcgacactcatacagccaagtakgacccttccctgaagcccctgtctgtttcctatgatcaagcaacttccctgaggatcctcaacaatggtcatgctttcaacgtggagtttgatgactctc

SEQ ID NO: 82359 - DNA, 201 bp, Homo sapiens
gggccttcagaaagttgttgatgtgctggattccattaaaacaaagggcaagagtgctgacttcactaacttcgatcctcgtggcctccttcctgaatccytggattactggacctacccaggctcactgaccacccctcctcttctggaatgtgtgacctggattgtgctcaaggaacccatcagcgtcagcagcgagca

SEQ ID NO: 82360 - DNA, 201 bp, Homo sapiens
aattgagctagttaaggcaaatcaggtaaaatagtcatgattctatgtaatgtaaaccagaaaaaataaatgttcatgatttcaagatgttatattaaagraaaactttaaaaattattatatatttatagcaaagttatcttaaatatgaattctgttgtaatttaatgacttttgaattacagagatataaatgaagta

SEQ ID NO: 82361 - DNA, 146 bp, Homo sapiens
agagatataaatgaagtattatctgtaaaaattgttataattagagttgtgatacagagtatatttccattcagacaatatatcataacttaataaatatwgtattttagatatattctctaataaaattcagaattctattctgg

SEQ ID NO: 82362 - DNA, 129 bp, Homo sapiens
attatctgtaaaaattgttataattagagttgtgatacagagtatatttccattcagacaatatatcataacttaataaatattgtattttagatatattmtctaataaaattcagaattctattctgg

SEQ ID NO: 82363 - DNA, 201 bp, Homo sapiens
atcctcaacaatggtcatgctttcaacgtggagtttgatgactctcaggacaaagcagtgctcaagggaggacccctggatggcacttacagattgattcmgtttcactttcactggggttcacttgatggacaaggttcagagcatactgtggataaaaagaaatatgctgcagaacttcacttggttcactggaacacc

SEQ ID NO: 82364 - DNA, 201 bp, Homo sapiens
tctgagaggagattttccaggttcaagtcccgagacgaggtttcaccgtgctggccaagctggtctccacctcaggtgatctgccccgctaagcctccgcragtgctgggattacaggctagtgcaaatcttcaggggccgtccaggactacagagctgtttcaccctaccttggcttcaatctcttcccccatgctcgaa

SEQ ID NO: 82365 - DNA, 201 bp, Homo sapiens
accgtgctggccaagctggtctccacctcaggtgatctgccccgctaagcctccgcaagtgctgggattacaggctagtgcaaatcttcaggggccgtccrggactacagagctgtttcaccctaccttggcttcaatctcttcccccatgctcgaaggtgcggagctgtacttcaacgtggaccatggctacctggaggg

SEQ ID NO: 82366 - DNA, 201 bp, Homo sapiens
gaccctctatccaaccttcggcaaactctatcctgaggggttgcggctgttggctcaagcagaagactttgaccagatgaagaacgtagcggatcattacrgagtatacaaacctttatttgaagctgtaggtggcagtgggggaaagacattggaggacgtgttttacgagcgtgaggtacaaatgaatgtgctggcatt

SEQ ID NO: 82367 - DNA, 201 bp, Homo sapiens
tgaccagatgaagaacgtagcggatcattacggagtatacaaacctttatttgaagctgtaggtggcagtgggggaaagacattggaggacgtgttttacragcgtgaggtacaaatgaatgtgctggcattcaacagacagttccactacggtgtgttttatgcatatgtaaagctgaaggaacaggaaattagaaatat

SEQ ID NO: 82368 - DNA, 201 bp, Homo sapiens
aagacctggatcagctgggccgaaataagatcacacacatcatctctatccatgagtcaccccagcctctgctgcaggatatcacctaccttcgcatcccrgtcgctgatacccctgaggtacccatcaaaaagcacttcaaagaatgtatcaacttcatccactgctgccgccttaatggggggaactgccttgtgcact

SEQ ID NO: 82369 - DNA, 201 bp, Homo sapiens
ggagttgcgcgcgctgctgccgctgtgcaagcgctgccggcagggctccgcgacctcggcctcctccgccgggccgcactcagcagcctccgagggaaccstgcagcgcctggtgccgcgcacgccccgggaagcccaccggccgctgccgctgctggcgcgcgtcaagcagactttctcttgcctcccccggtgtctgtc

SEQ ID NO: 82370 - DNA, 201 bp, Homo sapiens
gctgccgctgctggcgcgcgtcaagcagactttctcttgcctcccccggtgtctgtcccgcaagggcggcaagtgaggatgcagtccagccgtggctcccyacttccgactggctcccttcgggggctgtctgcgccttccacgccccccaggacgggcccagaggctgggggagccccgcggcggcctgaaccctgcctc

SEQ ID NO: 82371 - DNA, 201 bp, Homo sapiens; identical to SEQ ID NO: 82369

SEQ ID NO: 82372 - DNA, 201 bp, Homo sapiens; identical to SEQ ID NO: 82368

SEQ ID NO: 82373 - DNA, 201 bp, Homo sapiens; identical to SEQ ID NO: 82370

SEQ ID NO: 82374 - DNA, 201 bp, Homo sapiens; identical to SEQ ID NO: 82368

SEQ ID NO: 82375 - DNA, 201 bp, Homo sapiens; identical to SEQ ID NO: 82369

SEQ ID NO: 82376 - DNA, 201 bp, Homo sapiens; identical to SEQ ID NO: 82370

SEQ ID NO: 82377 - DNA, 201 bp, Homo sapiens
cagaccatgtgatcacacgcctaatgatgtccgagttggagaataggcgtggccagcactggctccttgatggttttcctaggacattaggacaagccgargccctggacaaaatctatcgtctcagccgccgttggattcaccctcctagcggaagggtatataacctggacttcaatccacctcatgtacatggtattg

SEQ ID NO: 82378 - DNA, 201 bp, Homo sapiens
agaacatcaaggccagcaccgaagttggtgagatggcaaagcagtatatagagaaaagtcttttggttccagaccatgtgatcacacgcctaatgatgtcygagttggagaataggcgtggccagcactggctccttgatggttttcctaggacattaggacaagccgaagccctggacaaaatctatcgtctcagccgcc

SEQ ID NO: 82379 - DNA, 201 bp, Homo sapiens
tttttggaaacaggaaaatcttcaaacttctttcttcacttccctttgtgtttagctgaccctccaatgtgatcattgcctttggagtttgggagaggtaygggaagtggcctgatgcctgcttccatacttcactcctccatccatccttccctccctcttcccctccagctaaatggacaattctagccaacattgagt

SEQ ID NO: 82380 - DNA, 201 bp, Homo sapiens; identical to SEQ ID NO: 53161

SEQ ID NO: 82381 - DNA, 201 bp, Homo sapiens
tccggaacggagacgaacaaaatctggccctacgtttacacacttttctcaaacaagatcacacctattcagtccaaagaagcatattgaccctgcccaawggaagaaccaggaagatgtggtcattcattcaatagtgtgtgtagtattggtgctgtgtccaaattagaagctagctgaggtagcttgcagcatcttttc

SEQ ID NO: 82382 - DNA, 201 bp, Homo sapiens
cacatccctaatgtaggtcctattatcaccattctcattttgcaggtgaggagactgaagcatgagattaagaaatcaagaccgccttccccctgtagggscggccggcgagtcccagtgagagcggagggtgccagaggtagggggccgagaaacaaagttcctggggctccctccggggccgcggtcggggctgcgcgt

SEQ ID NO: 82383 - DNA, 201 bp, Homo sapiens
agattaagaaatcaagaccgccttccccctgtaggggcggccggcgagtcccagtgagagcggagggtgccagaggtagggggccgagaaacaaagttccyggggctccctccggggccgcggtcggggctgcgcgtttgaccgcccccctcctcgcgaaggcaatggcttccaaactcctgcgcgcggtcatcctcgggc

SEQ ID NO: 82384 - DNA, 201 bp, Homo sapiens
gagtgatggggctatattgaatctctgtatgcactgagaactgagctatgaagaggatcttattaaactgctggtctgactttatggattgacactgttcmtttcttttattgtgaaaaaaaaaaaaaaccctgaaagtcttgggaaccccctaaagtcttttgggaatcctcaaaaagcatgggaagttaagtatttagc

SEQ ID NO: 82385 - DNA, 201 bp, Homo sapiens
aagttggtgagatggcaaagcagtatatagagaaaagtcttttggttccagaccatgtgatcacacgcctaatgatgtccgagttggagaataggcgtggmcagcactggctccttgatggttttcctaggacattaggacaagccgaagccctggacaaaatctatcgtctcagccgccgttggattcaccctcctagcg

SEQ ID NO: 82386 - DNA, 201 bp, Homo sapiens
caccgtgtgccagaggatcgcccagaactttggtctccagcatctctccagcggccacttcttgcgggagaacatcaaggccagcaccgaagttggtgagrtggcaaagcagtatatagagaaaagtcttttggttccagaccatgtgatcacacgcctaatgatgtccgagttggagaataggcgtggccagcactggct

SEQ ID NO: 82387 - DNA, 201 bp, Homo sapiens
gtttctctggtcttgagtgactgtgtccacagttcatttttttccggtaggaataactccttttctacatccacactccatagagtctctccttttcagayatcctgggatgaaagaatttggcttttttttttttttttttttgacatctgttttcactcttaggcttttaaacaatagttattgctcttatccctctca

SEQ ID NO: 82388 - DNA, 201 bp, Homo sapiens
tggacaaaatctatcgtctcagccgccgttggattcaccctcctagcggaagggtatataacctggacttcaatccacctcatgtacatggtattgatgaygtcactggtgaaccattagtccagcaggaggatgataaacccgaagcagttgctgccaggctaagacagtacaaagacgcggcaaagccagtcattgaat

SEQ ID NO: 82389 - DNA, 201 bp, Homo sapiens
ccattagtccagcaggaggatgataaacccgaagcagttgctgccaggctaagacagtacaaagacgcggcaaagccagtcattgaattatacaagagccraggagtgctccaccaattttccggaacggagacgaacaaaatctggccctacgtttacacacttttctcaaacaagatcacacctattcagtccaaagaa

SEQ ID NO: 82390 - DNA, 201 bp, Homo sapiens
gtctcagccgccgttggattcaccctcctagcggaagggtatataacctggacttcaatccacctcatgtacatggtattgatgacgtcactggtgaaccrttagtccagcaggaggatgataaacccgaagcagttgctgccaggctaagacagtacaaagacgcggcaaagccagtcattgaattatacaagagccgag

SEQ ID NO: 82391 - DNA, 201 bp, Homo sapiens
gtatcccttcttcacccatcatgactgtccccagtgagtgtcctttactattcttgggagtgactcctgtctaacttttcatactggcgagaagaaaagargcctattttaacactttagtggtgttgaaacacattacttactttctgaagatgtcccagtgaatcctctgtcaattcactgccatatgtaatctatatg

SEQ ID NO: 82392 - DNA, 201 bp, Homo sapiens
tatagatcagtcttctccccatccatcctctcaaacataatgagattgtttactttttagatttatgcagtgaaaatgcccagtcaggtctgaatcgtcartgcattatattgactctgagcactttagaatttagagttgcaattgaatgccagctgtggagatggggtgcatatcagatatataaataaagctcaggtt

SEQ ID NO: 82393 - DNA, 201 bp, Homo sapiens
ccgaagcagttgctgccaggctaagacagtacaaagacgcggcaaagccagtcattgaattatacaagagccgaggagtgctccaccaattttccggaacrgagacgaacaaaatctggccctacgtttacacacttttctcaaacaagatcacacctattcagtccaaagaagcatattgaccctgcccaatggaagaac

SEQ ID NO: 82394 - DNA, 201 bp, Homo sapiens
attacttactttctgaagatgtcccagtgaatcctctgtcaattcactgccatatgtaatctatatgataaggaatgcatcttccaagtactgcccaaacycttgccagctcctctcccattgtcccttcatgtgaatatttcttggctaccttagtggaaatatagatcagtcttctccccatccatcctctcaaacata

SEQ ID NO: 82395 - DNA, 201 bp, Homo sapiens
tatcagatatataaataaagctcaggtttgctagggaaccaggtatagagaaaaataagtctgatatgaggaaaattgcacaatttagagtagttatgccrtagagaaaatttccacaaactaggaaatgtagagagttattctatagaatactcaaaagaggaaagtatgtgatttttggaaacaggaaaatcttcaaac

SEQ ID NO: 82396 - DNA, 201 bp, Homo sapiens
ccctccaatgtgatcattgcctttggagtttgggagaggtacgggaagtggcctgatgcctgcttccatacttcactcctccatccatccttccctccctyttcccctccagctaaatggacaattctagccaacattgagtcactcaataagtctcaacagtgggtgtgtttgctgagattgtccagcagttgagcagtt

SEQ ID NO: 82397 - DNA, 201 bp, Homo sapiens
cagaccatgtgatcacacgcctaatgatgtccgagttggagaataggcgtggccagcactggctccttgatggttttcctaggacattaggacaagccgargccctggacaaaatctgtgaagtggatctagtgatcagtttgaatattccatttgaaacacttaaagatcgtctcagccgccgttggattcaccctccta

SEQ ID NO: 82398 - DNA, 201 bp, Homo sapiens
agaacatcaaggccagcaccgaagttggtgagatggcaaagcagtatatagagaaaagtcttttggttccagaccatgtgatcacacgcctaatgatgtcygagttggagaataggcgtggccagcactggctccttgatggttttcctaggacattaggacaagccgaagccctggacaaaatctgtgaagtggatctag

SEQ ID NO: 82399 - DNA, 201 bp, Homo sapiens; identical to SEQ ID NO: 82379

SEQ ID NO: 82400 - DNA, 201 bp, Homo sapiens; identical to SEQ ID NO: 53161

SEQ ID NO: 82401 - DNA, 201 bp, Homo sapiens; identical to SEQ ID NO: 82381

SEQ ID NO: 82402 - DNA, 201 bp, Homo sapiens; identical to SEQ ID NO: 82382

SEQ ID NO: 82403 - DNA, 201 bp, Homo sapiens; identical to SEQ ID NO: 82383

SEQ ID NO: 82404 - DNA, 201 bp, Homo sapiens; identical to SEQ ID NO: 82384

SEQ ID NO: 82405 - DNA, 201 bp, Homo sapiens
aagttggtgagatggcaaagcagtatatagagaaaagtcttttggttccagaccatgtgatcacacgcctaatgatgtccgagttggagaataggcgtggmcagcactggctccttgatggttttcctaggacattaggacaagccgaagccctggacaaaatctgtgaagtggatctagtgatcagtttgaatattccat

SEQ ID NO: 82406 - DNA, 201 bp, Homo sapiens; identical to SEQ ID NO: 82386

SEQ ID NO: 82407 - DNA, 201 bp, Homo sapiens; identical to SEQ ID NO: 82387

SEQ ID NO: 82408 - DNA, 201 bp, Homo sapiens
aaacacttaaagatcgtctcagccgccgttggattcaccctcctagcggaagggtatataacctggacttcaatccacctcatgtacatggtattgatgaygtcactggtgaaccattagtccagcaggaggatgataaacccgaagcagttgctgccaggctaagacagtacaaagacgcggcaaagccagtcattgaat

SEQ ID NO: 82409 - DNA, 201 bp, Homo sapiens; identical to SEQ ID NO: 82389

SEQ ID NO: 82410 - DNA, 201 bp, Homo sapiens; identical to SEQ ID NO: 82390

SEQ ID NO: 82411 - DNA, 201 bp, Homo sapiens; identical to SEQ ID NO: 82391

SEQ ID NO: 82412 - DNA, 201 bp, Homo sapiens; identical to SEQ ID NO: 82392

SEQ ID NO: 82413 - DNA, 201 bp, Homo sapiens; identical to SEQ ID NO: 82393

SEQ ID NO: 82414 - DNA, 201 bp, Homo sapiens; identical to SEQ ID NO: 82394

SEQ ID NO: 82415 - DNA, 201 bp, Homo sapiens; identical to SEQ ID NO: 82395

SEQ ID NO: 82416 - DNA, 201 bp, Homo sapiens; identical to SEQ ID NO: 82396

SEQ ID NO: 82417 - DNA, 201 bp, Homo sapiens
ataagagaaaagtacaaaaattcaaagtatcatggtgtttctctcctcaacccaccagagacactaaatctgtaacaatgaaagactgcctttgttttctragatgtaaatcactcaaagtatatggtgtacagtttttaacttaggttttaattttacaatcatttctgaatacagaagttgtggccaagtacaaattat

SEQ ID NO: 82418 - DNA, 201 bp, Homo sapiens
tcctgtaaatgatgagcatgtcaccgttcctccttggaaagcaaacagtaaacagcctgcgttcaccattcatgtggatgaagcagaaaaagaagctcagragaagccagctgaatctcaaaaaatagagcgtgaagatgccctggcttttaattcagccattagtttacctggacccagaaaaccattggtccctcttga

SEQ ID NO: 82419 - DNA, 201 bp, Homo sapiens
ctccagcgggctgctcgctgcatctctgggcgtctttggctcgccacgctgggcagtgcctgcctgcgcctttcgcaacctcctcggccctgcgtggtctygagctgggtgagcgagcgggcgggctggtaggctggcctgggctgcgaccggcggctacgactattctttggccgggtcggtgcgagtggtcggctgggc

SEQ ID NO: 82420 - DNA, 199 bp, Homo sapiens
gtcgcgggatacttgaactgcaagaacagccgccgctccagcgggctgctcgctgcatctctgggcgtctttggctcgccacgctgggcagtgcctgcytgcgcctttcgcaacctcctcggccctgcgtggtctcgagctgggtgagcgagcgggcgggctggtaggctggcctgggctgcgaccggcggctacgact

SEQ ID NO: 82421 - DNA, 140 bp, Homo sapiens
gtcgcgggatacttgaactgcaagaacagccgccgctccrgcgggctgctcgctgcatctctgggcgtctttggctcgccacgctgggcagtgcctgcctgcgcctttcgcaacctcctcggccctgcgtggtctcgagc

SEQ ID NO: 82422 - DNA, 201 bp, Homo sapiens
ctaaagtgggttacatgaagaaacagccagacatcactaacagtatgagagctatcctcgtggactggttagttgaagtaggagaagaatataaactacaraatgagaccctgcatttggctgtgaactacattgataggttcctgtcttccatgtcagtgctgagaggaaaacttcagcttgtgggcactgctgctatgc

SEQ ID NO: 82423 - DNA, 201 bp, Homo sapiens
gctttttacttggtgctttttcttgttttgcactggtggtctgtgttctgtgaataaagcaaagtaagaatttactaagagtatgttaagttttggattaytgaaataagaggcatttcttagttttccagtaggatctaaaatgtgtcagctatgagtaagactggcatccaagaagtttatattatagatttaggtcct

SEQ ID NO: 82424 - DNA, 201 bp, Homo sapiens
atggaataaatatcccttttaatagttatatatacagatatacaactgttagctttaattggcagctctcttcttttttcttcttttcactggctttttasttggtgctttttcttgttttgcactggtggtctgtgttctgtgaataaagcaaagtaagaatttactaagagtatgttaagttttggattattgaaataa

SEQ ID NO: 82425 - DNA, 201 bp, Homo sapiens
tttaattttacaatcatttctgaatacagaagttgtggccaagtacaaattatggtatctattactttttaaatggttttaatttgtatatcttttgtatytgtatctgtcttagatatttggctaattttaagtggttttgttaaagtattaatgatgccagctgtcaggataataaattgatttggaaaactttgcaag

SEQ ID NO: 82426 - DNA, 201 bp, Homo sapiens
tttggctcgccacgctgggcagtgcctgcctgcgcctttcgcaacctcctcggccctgcgtggtctcgagctgggtgagcgagcgggcgggctggtaggcyggcctgggctgcgaccggcggctacgactattctttggccgggtcggtgcgagtggtcggctgggcagagtgcacgctgcttggcgccgcaggctgatcc

SEQ ID NO: 82427 - DNA, 201 bp, Homo sapiens
ttcagccattagtttacctggacccagaaaaccattggtccctcttgattatccaatggatggtagttttgagtcaccacatactatggacatgtcaattrtattagaagatgaaaagccagtgagtgttaatgaagtaccagactaccatgaggatattcacacataccttagggaaatggaggttaaatgtaaacctaa

SEQ ID NO: 82428 - DNA, 201 bp, Homo sapiens
gactcctggaactgcccaaattggagagggagtagaaaactcctggggtgatcttgaagactctgagaaggaagatgatgaaggcggtggtgatcaagctrtcattcttgatggtataaaaatggacactggagtagaagtctctgatattggaagccaagagctggggtttcaccatgttggccagactggactcgagtt

SEQ ID NO: 82429 - DNA, 201 bp, Homo sapiens
tcagatagtgaagaagaagaaatgatcattttggaaccagacaagaatccaaagaaaataagaacacagaccaccagtgcaaaacaagaaaaagcaccaastaaaaagccagtgaaaagaagaaaaaagaagagagctgccaattaaagctaacagttgtatatctgtatatataactattaaaagggatatttattccat

SEQ ID NO: 82430 - DNA, 201 bp, Homo sapiens
tggtgtgaaagtagcagaaattacagagctaatattgaaagctttggagaatgaccaaaaagtaaggaaagaaggtggaaagtttggttttgcagagtctrtagcaaatcaaaggatcacagcatttaaaatggaaaaggcccctattgatacctcggatgtagaagaaaaagcagaagaaatcattgctgaagcagaacc

SEQ ID NO: 82431 - DNA, 163 bp, Homo sapiens
tgatgacgtaattttcctgcgcctcggggcgagcagcggcgcgcaaggaaagatcgggttccrtttttcccgcggattctggtgcctgtggggccggtgacccaacaccatgaaggaaacgccactctcaaactgcgaacgccgcttcctactccgtgccatc

SEQ ID NO: 82432 - DNA, 201 bp, Homo sapiens
gactcctggaactgcccaaattggagagggagtagaaaactcctggggtgatcttgaagactctgagaaggaagatgatgaaggcggtggtgatcaagctrtcattcttgatggtataaaaatggacactggagtagaagtctctgatattggaagccaagatgctcccataatactctcagatagtgaagaagaagaaat

SEQ ID NO: 82433 - DNA, 201 bp, Homo sapiens; identical to SEQ ID NO: 82429

SEQ ID NO: 82434 - DNA, 201 bp, Homo sapiens; identical to SEQ ID NO: 82430

SEQ ID NO: 82435 - DNA, 163 bp, Homo sapiens; identical to SEQ ID NO: 82431

SEQ ID NO: 82436 - DNA, 201 bp, Homo sapiens; identical to SEQ ID NO: 82432

SEQ ID NO: 82437 - DNA, 201 bp, Homo sapiens; identical to SEQ ID NO: 82429

SEQ ID NO: 82438 - DNA, 201 bp, Homo sapiens; identical to SEQ ID NO: 82430

SEQ ID NO: 82439 - DNA, 163 bp, Homo sapiens; identical to SEQ ID NO: 82431

SEQ ID NO: 82440 - DNA, 201 bp, Homo sapiens; identical to SEQ ID NO: 82432

SEQ ID NO: 82441 - DNA, 201 bp, Homo sapiens; identical to SEQ ID NO: 82429

SEQ ID NO: 82442 - DNA, 201 bp, Homo sapiens; identical to SEQ ID NO: 82430

SEQ ID NO: 82443 - DNA, 201 bp, Homo sapiens; identical to SEQ ID NO: 82432

SEQ ID NO: 82444 - DNA, 201 bp, Homo sapiens; identical to SEQ ID NO: 82429

SEQ ID NO: 82445 - DNA, 201 bp, Homo sapiens; identical to SEQ ID NO: 82430

SEQ ID NO: 82446 - DNA, 201 bp, Homo sapiens
agcacacatcccatcaggtgaagtgtcattttgattataatccatacaatgacaacctaataccttgcaaagaagcaggattgaagttttccaaaggagarattcttcagattgtaaatagagaagatccaaattggtggcaggctagccatgtaaaagagggaggaagcgctggtctcattccaagccagttcctggaag

SEQ ID NO: 82447 - DNA, 201 bp, Homo sapiens
ttgtaaatagagaagatccaaattggtggcaggctagccatgtaaaagagggaggaagcgctggtctcattccaagccagttcctggaagagaagagaaargcatttgttagaagagactgggacaattcaggacctttttgtggaactataagtagcaaaaaaaagaaaaagatgatgtatctcacaaccagaaatgcag

SEQ ID NO: 82448 - DNA, 201 bp, Homo sapiens
aaggtctacttcatgtgggagatataattaaagaagtcaatggccatgaggttggaaataatccaaaggaattacaagaattactgaaaaatattagtggragtgtcaccctaaaaatcttaccaagttatagagataccattactcctcaacagagtttcatcaatatggagaggcatccagcacacatcccatcaggtg

SEQ ID NO: 82449 - DNA, 201 bp, Homo sapiens
actgcaaactgccatagagaaactgagaatggaaccacagtgggtcccaatcagctgggtttactgatgattcagtaaggttaacaatgaaaattaaactyttaaaaagtgactgcaacaaataaaccttctactgagaaaatacatcacagatagaagattatctgctaagtccaggcatttttatggtgtagattgaaa

SEQ ID NO: 82450 - DNA, 201 bp, Homo sapiens
ctcctcaacaggtatttgtgaagtgtcattttgattataatccatacaatgacaacctaataccttgcaaagaagcaggattgaagttttccaaaggagarattcttcagattgtaaatagagaagatccaaattggtggcaggctagccatgtaaaagagggaggaagcgctggtctcattccaagccagttcctggaag

SEQ ID NO: 82451 - DNA, 201 bp, Homo sapiens; identical to SEQ ID NO: 82447

SEQ ID NO: 82452 - DNA, 201 bp, Homo sapiens
aaggtctacttcatgtgggagatataattaaagaagtcaatggccatgaggttggaaataatccaaaggaattacaagaattactgaaaaatattagtggragtgtcaccctaaaaatcttaccaagttatagagataccattactcctcaacaggtatttgtgaagtgtcattttgattataatccatacaatgacaacc

SEQ ID NO: 82453 - DNA, 201 bp, Homo sapiens; identical to SEQ ID NO: 82449

SEQ ID NO: 82454 - DNA, 201 bp, Homo sapiens; identical to SEQ ID NO: 82450

SEQ ID NO: 82455 - DNA, 201 bp, Homo sapiens; identical to SEQ ID NO: 82447

SEQ ID NO: 82456 - DNA, 201 bp, Homo sapiens; identical to SEQ ID NO: 82452

SEQ ID NO: 82457 - DNA, 201 bp, Homo sapiens; identical to SEQ ID NO: 82449

SEQ ID NO: 82458 - DNA, 201 bp, Homo sapiens
acccgtcggagcgcgtgctatctgactacacccaagtgttctacaaccacatgcagaagcacaagccctacccgtccatcgaggagttcctggtgcgcgayggcaggctcaatgtggactacaaggccctcaaccgcagcctctaccacgtgcacatgcagaactggctgcgctttttcccgctgcgccacatccacattg

SEQ ID NO: 82459 - DNA, 201 bp, Homo sapiens
ccatcgaggagttcctggtgcgcgatggcaggctcaatgtggactacaaggccctcaaccgcagcctctaccacgtgcacatgcagaactggctgcgcttyttcccgctgcgccacatccacattgtggacggcgaccgcctcatcagggaccccttccctgagatccaaaaggtcgagaggttcctaaagctgtcgccgc

SEQ ID NO: 82460 - DNA, 201 bp, Homo sapiens
agtgggtgcctgcgccttctccccgcccgcctgccccgggccatccagaaacttgctctacccgccgcgggtgctcggcagtgctgcccatggcccagccyaggagcctatttagggcgccggacgggctggacagaggcgcggctcagtaattgaaggcctgaaacgcccatgtgccactgactaggaggcttccctgct

SEQ ID NO: 82461 - DNA, 201 bp, Homo sapiens
cgggaccgctgcttacatgagtccaaaggccgggcgcacccccaagtcgatcccaaactactcaataaactgcacgaatattttcatgagccaaataagargttcttcgagcttgttggcagaacatttgactggcactgatttgcaataagctaagctcagaaactttcctactgtaagttctggtgtacatctgagggg

SEQ ID NO: 82462 - DNA, 156 bp, Homo sapiens
aacgcccgcctgcaaggtcctctgcgccctggcagccaggagtcgccgccacgacmgccgggtctcagtgggtgcctgcgccttctccccgcccgcctgccccgggccatccagaaacttgctctacccgccgcgggtgctcggcagtgctgccca

SEQ ID NO: 82463 - DNA, 201 bp, Homo sapiens; identical to SEQ ID NO: 82458

SEQ ID NO: 82464 - DNA, 201 bp, Homo sapiens; identical to SEQ ID NO: 82459

SEQ ID NO: 82465 - DNA, 201 bp, Homo sapiens; identical to SEQ ID NO: 82461

SEQ ID NO: 82466 - DNA, 201 bp, Homo sapiens; identical to SEQ ID NO: 82458

SEQ ID NO: 82467 - DNA, 201 bp, Homo sapiens; identical to SEQ ID NO: 82459

SEQ ID NO: 82468 - DNA, 201 bp, Homo sapiens; identical to SEQ ID NO: 82461

SEQ ID NO: 82469 - DNA, 201 bp, Homo sapiens; identical to SEQ ID NO: 82458

SEQ ID NO: 82470 - DNA, 201 bp, Homo sapiens; identical to SEQ ID NO: 82459

SEQ ID NO: 82471 - DNA, 201 bp, Homo sapiens; identical to SEQ ID NO: 82461

SEQ ID NO: 82472 - DNA, 201 bp, Homo sapiens
tgcatcggggccaacctcggccactgtgctcctgccagctcggcaggcagccttgctgcaggccccctgctgctcgcgctggccctctaccccctgagcgycctgttctgagggcccagggcccgggcacccacaagcccgtgacagatgccaacttcccacacggcagcccccccctcaaggggcagggaggtgggggcc

SEQ ID NO: 82473 - DNA, 201 bp, Homo sapiens
ccaggggaacgaggtcacctccatcctgcgctgggccaaggacgctgggaaatctgtgggcattgtgaccaccacgagagtgaaccatgccacccccagcrccgcctacgcccactcggctgaccgggactggtactcagacaacgagatgccccctgaggccttgagccagggctgtaaggacatcgcctaccagctcat

SEQ ID NO: 82474 - DNA, 201 bp, Homo sapiens
cctgcatgaggcggtggagatggaccgggccatcgggcaggcaggcagcttgacctcctcggaagacactctgaccgtggtcactgcggaccattcccacrtcttcacatttggtggatacaccccccgtggcaactctatctttggtctggcccccatgctgagtgacacagacaagaagcccttcactgccatcctgta

SEQ ID NO: 82475 - DNA, 201 bp, Homo sapiens
tacaacaccaatgcccaggtccctgacagcgccggcaccgccaccgcctacctgtgtggggtgaaggccaatgagggcaccgtgggggtaagcgcagccamtgagcgttcccggtgcaacaccacccaggggaacgaggtcacctccatcctgcgctgggccaaggacgctgggaaatctgtgggcattgtgaccaccacg

SEQ ID NO: 82476 - DNA, 201 bp, Homo sapiens
accaatgcccaggtccctgacagcgccggcaccgccaccgcctacctgtgtggggtgaaggccaatgagggcaccgtgggggtaagcgcagccactgagcrttcccggtgcaacaccacccaggggaacgaggtcacctccatcctgcgctgggccaaggacgctgggaaatctgtgggcattgtgaccaccacgagagtg

SEQ ID NO: 82477 - DNA, 201 bp, Homo sapiens
cctgcgctgggccaaggacgctgggaaatctgtgggcattgtgaccaccacgagagtgaaccatgccacccccagcgccgcctacgcccactcggctgacygggactggtactcagacaacgagatgccccctgaggccttgagccagggctgtaaggacatcgcctaccagctcatgcataacatcagggacattgacgt

SEQ ID NO: 82478 - DNA, 201 bp, Homo sapiens
gggaaatctgtgggcattgtgaccaccacgagagtgaaccatgccacccccagcgccgcctacgcccactcggctgaccgggactggtactcagacaacgrgatgccccctgaggccttgagccagggctgtaaggacatcgcctaccagctcatgcataacatcagggacattgacgtgatcatggggggtggccggaaa

SEQ ID NO: 82479 - DNA, 201 bp, Homo sapiens
agagtgaaccatgccacccccagcgccgcctacgcccactcggctgaccgggactggtactcagacaacgagatgccccctgaggccttgagccagggctrtaaggacatcgcctaccagctcatgcataacatcagggacattgacgtgatcatggggggtggccggaaatacatgtaccccaagaataaaactgatgtg

SEQ ID NO: 82480 - DNA, 201 bp, Homo sapiens
aaggacatcgcctaccagctcatgcataacatcagggacattgacgtgatcatggggggtggccggaaatacatgtaccccaagaataaaactgatgtggrgtatgagagtgacgagaaagccaggggcacgaggctggacggcctggacctcgttgacacctggaagagcttcaaaccgagatacaagcactcccacttc

SEQ ID NO: 82481 - DNA, 201 bp, Homo sapiens
cgaggtcacctccatcctgcgctgggccaaggacgctgggaaatctgtgggcattgtgaccaccacgagagtgaaccatgccacccccagcgccgcctacrcccactcggctgaccgggactggtactcagacaacgagatgccccctgaggccttgagccagggctgtaaggacatcgcctaccagctcatgcataacat

SEQ ID NO: 82482 - DNA, 201 bp, Homo sapiens
ggggaacgaggtcacctccatcctgcgctgggccaaggacgctgggaaatctgtgggcattgtgaccaccacgagagtgaaccatgccacccccagcgccrcctacgcccactcggctgaccgggactggtactcagacaacgagatgccccctgaggccttgagccagggctgtaaggacatcgcctaccagctcatgca

SEQ ID NO: 82483 - DNA, 201 bp, Homo sapiens
ctggcgagaccaagcgcaagagacactgaaatatgccctggagcttcagaagctcaacaccaacgtggctaagaatgtcatcatgttcctgggagatgggwtgggtgtctccacagtgacggctgcccgcatcctcaagggtcagctccaccacaaccctggggaggagaccaggctggagatggacaagttccccttcgt

SEQ ID NO: 82484 - DNA, 201 bp, Homo sapiens
cgagaccaagcgcaagagacactgaaatatgccctggagcttcagaagctcaacaccaacgtggctaagaatgtcatcatgttcctgggagatgggatggktgtctccacagtgacggctgcccgcatcctcaagggtcagctccaccacaaccctggggaggagaccaggctggagatggacaagttccccttcgtggcc

SEQ ID NO: 82485 - DNA, 201 bp, Homo sapiens
gagacactgaaatatgccctggagcttcagaagctcaacaccaacgtggctaagaatgtcatcatgttcctgggagatgggatgggtgtctccacagtgayggctgcccgcatcctcaagggtcagctccaccacaaccctggggaggagaccaggctggagatggacaagttccccttcgtggccctctccaagacgtac

SEQ ID NO: 82486 - DNA, 201 bp, Homo sapiens
gtgacggctgcccgcatcctcaagggtcagctccaccacaaccctggggaggagaccaggctggagatggacaagttccccttcgtggccctctccaagaygtacaacaccaatgcccaggtccctgacagcgccggcaccgccaccgcctacctgtgtggggtgaaggccaatgagggcaccgtgggggtaagcgcagcc

SEQ ID NO: 82487 - DNA, 201 bp, Homo sapiens
tgtggggtgaaggccaatgagggcaccgtgggggtaagcgcagccactgagcgttcccggtgcaacaccacccaggggaacgaggtcacctccatcctgcrctgggccaaggacgctgggaaatctgtgggcattgtgaccaccacgagagtgaaccatgccacccccagcgccgcctacgcccactcggctgaccgggac

SEQ ID NO: 82488 - DNA, 201 bp, Homo sapiens
ggggtaagcgcagccactgagcgttcccggtgcaacaccacccaggggaacgaggtcacctccatcctgcgctgggccaaggacgctgggaaatctgtggkcattgtgaccaccacgagagtgaaccatgccacccccagcgccgcctacgcccactcggctgaccgggactggtactcagacaacgagatgccccctgag

SEQ ID NO: 82489 - DNA, 201 bp, Homo sapiens
ctacgcccactcggctgaccgggactggtactcagacaacgagatgccccctgaggccttgagccagggctgtaaggacatcgcctaccagctcatgcatracatcagggacattgacgtgatcatggggggtggccggaaatacatgtaccccaagaataaaactgatgtggagtatgagagtgacgagaaagccagggg

SEQ ID NO: 82490 - DNA, 201 bp, Homo sapiens
cgcccactcggctgaccgggactggtactcagacaacgagatgccccctgaggccttgagccagggctgtaaggacatcgcctaccagctcatgcataacwtcagggacattgacgtgatcatggggggtggccggaaatacatgtaccccaagaataaaactgatgtggagtatgagagtgacgagaaagccaggggcac

SEQ ID NO: 82491 - DNA, 201 bp, Homo sapiens
tactcagacaacgagatgccccctgaggccttgagccagggctgtaaggacatcgcctaccagctcatgcataacatcagggacattgacgtgatcatggkgggtggccggaaatacatgtaccccaagaataaaactgatgtggagtatgagagtgacgagaaagccaggggcacgaggctggacggcctggacctcgtt

SEQ ID NO: 82492 - DNA, 201 bp, Homo sapiens
gggacattgacgtgatcatggggggtggccggaaatacatgtaccccaagaataaaactgatgtggagtatgagagtgacgagaaagccaggggcacgagkctggacggcctggacctcgttgacacctggaagagcttcaaaccgagatacaagcactcccacttcatctggaaccgcacggaactcctgacccttgacc

SEQ ID NO: 82493 - DNA, 201 bp, Homo sapiens
gaataaaactgatgtggagtatgagagtgacgagaaagccaggggcacgaggctggacggcctggacctcgttgacacctggaagagcttcaaaccgagayacaagcactcccacttcatctggaaccgcacggaactcctgacccttgacccccacaatgtggactacctattgggtctcttcgagccaggggacatgca

SEQ ID NO: 82494 - DNA, 201 bp, Homo sapiens
acggaactcctgacccttgacccccacaatgtggactacctattgggtctcttcgagccaggggacatgcagtacgagctgaacaggaacaacgtgacggwcccgtcactctccgagatggtggtggtggccatccagatcctgcggaagaaccccaaaggcttcttcttgctggtggaaggaggcagaattgaccacggg

SEQ ID NO: 82495 - DNA, 201 bp, Homo sapiens
gccaagcaggccctgcatgaggcggtggagatggaccgggccatcgggcaggcaggcagcttgacctcctcggaagacactctgaccgtggtcactgcggwccattcccacgtcttcacatttggtggatacaccccccgtggcaactctatctttggtctggcccccatgctgagtgacacagacaagaagcccttcact

SEQ ID NO: 82496 - DNA, 201 bp, Homo sapiens
aagttccccttcgtggccctctccaagacgtacaacaccaatgcccaggtccctgacagcgccggcaccgccaccgcctacctgtgtggggtgaaggccartgagggcaccgtgggggtaagcgcagccactgagcgttcccggtgcaacaccacccaggggaacgaggtcacctccatcctgcgctgggccaaggacgct

SEQ ID NO: 82497 - DNA, 201 bp, Homo sapiens
ggaagaaccccaaaggcttcttcttgctggtggaaggaggcagaattgaccacgggcaccatgaaggaaaagccaagcaggccctgcatgaggcggtggasatggaccgggccatcgggcaggcaggcagcttgacctcctcggaagacactctgaccgtggtcactgcggaccattcccacgtcttcacatttggtggat

SEQ ID NO: 82498 - DNA, 201 bp, Homo sapiens
aaagccaagcaggccctgcatgaggcggtggagatggaccgggccatcgggcaggcaggcagcttgacctcctcggaagacactctgaccgtggtcactgyggaccattcccacgtcttcacatttggtggatacaccccccgtggcaactctatctttggtctggcccccatgctgagtgacacagacaagaagcccttc

SEQ ID NO: 82499 - DNA, 201 bp, Homo sapiens
gcctcttatttttctagcgaacgtatttctccagacccagaggccctgaagcctccgtggaacattctggatctgaccctcccagtctcatctcctgaccytcccactcccatctccttacctctggaaccccccaggccctacaatgctcatgtccctgtccccaggcccagccctccttcaggggagttgaggtctttc

SEQ ID NO: 82500 - DNA, 201 bp, Homo sapiens
caacgagatgccccctgaggccttgagccagggctgtaaggacatcgcctaccagctcatgcataacatcagggacattgacgtgatcatggggggtggcyggaaatacatgtaccccaagaataaaactgatgtggagtatgagagtgacgagaaagccaggggcacgaggctggacggcctggacctcgttgacacctg

SEQ ID NO: 82501 - DNA, 201 bp, Homo sapiens
cgagatgccccctgaggccttgagccagggctgtaaggacatcgcctaccagctcatgcataacatcagggacattgacgtgatcatggggggtggccggraatacatgtaccccaagaataaaactgatgtggagtatgagagtgacgagaaagccaggggcacgaggctggacggcctggacctcgttgacacctggaa

SEQ ID NO: 82502 - DNA, 201 bp, Homo sapiens
gagagtgacgagaaagccaggggcacgaggctggacggcctggacctcgttgacacctggaagagcttcaaaccgagatacaagcactcccacttcatctrgaaccgcacggaactcctgacccttgacccccacaatgtggactacctattgggtctcttcgagccaggggacatgcagtacgagctgaacaggaacaac

SEQ ID NO: 82503 - DNA, 201 bp, Homo sapiens
ctggaagagcttcaaaccgagatacaagcactcccacttcatctggaaccgcacggaactcctgacccttgacccccacaatgtggactacctattgggtytcttcgagccaggggacatgcagtacgagctgaacaggaacaacgtgacggacccgtcactctccgagatggtggtggtggccatccagatcctgcggaa

SEQ ID NO: 82504 - DNA, 201 bp, Homo sapiens
gagcttcaaaccgagatacaagcactcccacttcatctggaaccgcacggaactcctgacccttgacccccacaatgtggactacctattgggtctcttcdagccaggggacatgcagtacgagctgaacaggaacaacgtgacggacccgtcactctccgagatggtggtggtggccatccagatcctgcggaagaaccc

SEQ ID NO: 82505 - DNA, 201 bp, Homo sapiens
tccaccacaaccctggggaggagaccaggctggagatggacaagttccccttcgtggccctctccaagacgtacaacaccaatgcccaggtccctgacagygccggcaccgccaccgcctacctgtgtggggtgaaggccaatgagggcaccgtgggggtaagcgcagccactgagcgttcccggtgcaacaccacccagg

SEQ ID NO: 82506 - DNA, 201 bp, Homo sapiens
ccgagatacaagcactcccacttcatctggaaccgcacggaactcctgacccttgacccccacaatgtggactacctattgggtctcttcgagccaggggmcatgcagtacgagctgaacaggaacaacgtgacggacccgtcactctccgagatggtggtggtggccatccagatcctgcggaagaaccccaaaggcttc

SEQ ID NO: 82507 - DNA, 201 bp, Homo sapiens
accgagatacaagcactcccacttcatctggaaccgcacggaactcctgacccttgacccccacaatgtggactacctattgggtctcttcgagccagggkacatgcagtacgagctgaacaggaacaacgtgacggacccgtcactctccgagatggtggtggtggccatccagatcctgcggaagaaccccaaaggctt

SEQ ID NO: 82508 - DNA, 201 bp, Homo sapiens
gagatacaagcactcccacttcatctggaaccgcacggaactcctgacccttgacccccacaatgtggactacctattgggtctcttcgagccaggggacrtgcagtacgagctgaacaggaacaacgtgacggacccgtcactctccgagatggtggtggtggccatccagatcctgcggaagaaccccaaaggcttctt

SEQ ID NO: 82509 - DNA, 201 bp, Homo sapiens
aggggacatgcagtacgagctgaacaggaacaacgtgacggacccgtcactctccgagatggtggtggtggccatccagatcctgcggaagaaccccaaasgcttcttcttgctggtggaaggaggcagaattgaccacgggcaccatgaaggaaaagccaagcaggccctgcatgaggcggtggagatggaccgggccat

SEQ ID NO: 82510 - DNA, 201 bp, Homo sapiens
gacatgcagtacgagctgaacaggaacaacgtgacggacccgtcactctccgagatggtggtggtggccatccagatcctgcggaagaaccccaaaggctkcttcttgctggtggaaggaggcagaattgaccacgggcaccatgaaggaaaagccaagcaggccctgcatgaggcggtggagatggaccgggccatcggg

SEQ ID NO: 82511 - DNA, 201 bp, Homo sapiens
ggtggccatccagatcctgcggaagaaccccaaaggcttcttcttgctggtggaaggaggcagaattgaccacgggcaccatgaaggaaaagccaagcagrccctgcatgaggcggtggagatggaccgggccatcgggcaggcaggcagcttgacctcctcggaagacactctgaccgtggtcactgcggaccattccca

SEQ ID NO: 82512 - DNA, 201 bp, Homo sapiens
gccctgcatgaggcggtggagatggaccgggccatcgggcaggcaggcagcttgacctcctcggaagacactctgaccgtggtcactgcggaccattcccrcgtcttcacatttggtggatacaccccccgtggcaactctatctttggtctggcccccatgctgagtgacacagacaagaagcccttcactgccatcctg

SEQ ID NO: 82513 - DNA, 201 bp, Homo sapiens
tgggaaatctgtgggcattgtgaccaccacgagagtgaaccatgccacccccagcgccgcctacgcccactcggctgaccgggactggtactcagacaacragatgccccctgaggccttgagccagggctgtaaggacatcgcctaccagctcatgcataacatcagggacattgacgtgatcatggggggtggccggaa

SEQ ID NO: 82514 - DNA, 201 bp, Homo sapiens
acgagagaatgtctccatggtggactatgctcacaacaactaccaggcgcagtctgctgtgcccctgcgccacgagacccacggcggggaggacgtggccrtcttctccaagggccccatggcgcacctgctgcacggcgtccacgagcagaactacgtcccccacgtgatggcgtatgcagcctgcatcggggccaacct

SEQ ID NO: 82515 - DNA, 201 bp, Homo sapiens
acatttggtggatacaccccccgtggcaactctatctttggtctggcccccatgctgagtgacacagacaagaagcccttcactgccatcctgtatggcartgggcctggctacaaggtggtgggcggtgaacgagagaatgtctccatggtggactatgctcacaacaactaccaggcgcagtctgctgtgcccctgcgc

SEQ ID NO: 82516 - DNA, 201 bp, Homo sapiens
caactaccaggcgcagtctgctgtgcccctgcgccacgagacccacggcggggaggacgtggccgtcttctccaagggccccatggcgcacctgctgcacrgcgtccacgagcagaactacgtcccccacgtgatggcgtatgcagcctgcatcggggccaacctcggccactgtgctcctgccagctcggcaggcagcct

SEQ ID NO: 82517 - DNA, 201 bp, Homo sapiens
ccccgtggcaactctatctttggtctggcccccatgctgagtgacacagacaagaagcccttcactgccatcctgtatggcaatgggcctggctacaaggyggtgggcggtgaacgagagaatgtctccatggtggactatgctcacaacaactaccaggcgcagtctgctgtgcccctgcgccacgagacccacggcggg

SEQ ID NO: 82518 - DNA, 201 bp, Homo sapiens
cggtgaacgagagaatgtctccatggtggactatgctcacaacaactaccaggcgcagtctgctgtgcccctgcgccacgagacccacggcggggaggacrtggccgtcttctccaagggccccatggcgcacctgctgcacggcgtccacgagcagaactacgtcccccacgtgatggcgtatgcagcctgcatcggggc

SEQ ID NO: 82519 - DNA, 201 bp, Homo sapiens
gcgcagtctgctgtgcccctgcgccacgagacccacggcggggaggacgtggccgtcttctccaagggccccatggcgcacctgctgcacggcgtccacgrgcagaactacgtcccccacgtgatggcgtatgcagcctgcatcggggccaacctcggccactgtgctcctgccagctcggcaggcagccttgctgcaggc

SEQ ID NO: 82520 - DNA, 201 bp, Homo sapiens
ggaggacgtggccgtcttctccaagggccccatggcgcacctgctgcacggcgtccacgagcagaactacgtcccccacgtgatggcgtatgcagcctgcwtcggggccaacctcggccactgtgctcctgccagctcggcaggcagccttgctgcaggccccctgctgctcgcgctggccctctaccccctgagcgtcct

SEQ ID NO: 82521 - DNA, 201 bp, Homo sapiens
ggtggtgggcggtgaacgagagaatgtctccatggtggactatgctcacaacaactaccaggcgcagtctgctgtgcccctgcgccacgagacccacggcrgggaggacgtggccgtcttctccaagggccccatggcgcacctgctgcacggcgtccacgagcagaactacgtcccccacgtgatggcgtatgcagcctg

SEQ ID NO: 82522 - DNA, 201 bp, Homo sapiens
gtactggccattggcacctgccttactaactccttagtgccagagaaagagaaagaccccaagtactggcgagaccaagcgcaagagacactgaaatatgycctggagcttcagaagctcaacaccaacgtggctaagaatgtcatcatgttcctgggagatgggatgggtgtctccacagtgacggctgcccgcatcctc

SEQ ID NO: 82523 - DNA, 201 bp, Homo sapiens
aaagtctgccgcccacctcgctcccctctggaatcttccccaagggccaaacccacttctggcctccagcctttgctccctccccgctgccctttggccamcagggtagatttctcttgggcaggcagagagtacagactgcagacattctcaaagcctcttatttttctagcgaacgtatttctccagacccagaggccc

SEQ ID NO: 82524 - DNA, 201 bp, Homo sapiens
ggagcttcagaagctcaacaccaacgtggctaagaatgtcatcatgttcctgggagatgggatgggtgtctccacagtgacggctgcccgcatcctcaagrgtcagctccaccacaaccctggggaggagaccaggctggagatggacaagttccccttcgtggccctctccaagacgtacaacaccaatgcccaggtccc

SEQ ID NO: 82525 - DNA, 201 bp, Homo sapiens
gcgctggccctctaccccctgagcgtcctgttctgagggcccagggcccgggcacccacaagcccgtgacagatgccaacttcccacacggcagccccccyctcaaggggcagggaggtgggggcctcctcagcctctgcaactgcaagaaaggggacccaggaaaccaaagtctgccgcccacctcgctcccctctggaa

SEQ ID NO: 82526 - DNA, 201 bp, Homo sapiens
gcccgtgacagatgccaacttcccacacggcagcccccccctcaaggggcagggaggtgggggcctcctcagcctctgcaactgcaagaaaggggacccargaaaccaaagtctgccgcccacctcgctcccctctggaatcttccccaagggccaaacccacttctggcctccagcctttgctccctccccgctgccctt

SEQ ID NO: 82527 - DNA, 201 bp, Homo sapiens
ggaggagaccaggctggagatggacaagttccccttcgtggccctctccaagacgtacaacaccaatgcccaggtccctgacagcgccggcaccgccaccrcctacctgtgtggggtgaaggccaatgagggcaccgtgggggtaagcgcagccactgagcgttcccggtgcaacaccacccaggggaacgaggtcacctc

SEQ ID NO: 82528 - DNA, 201 bp, Homo sapiens
gctggagatggacaagttccccttcgtggccctctccaagacgtacaacaccaatgcccaggtccctgacagcgccggcaccgccaccgcctacctgtgtrgggtgaaggccaatgagggcaccgtgggggtaagcgcagccactgagcgttcccggtgcaacaccacccaggggaacgaggtcacctccatcctgcgctg

SEQ ID NO: 82529 - DNA, 201 bp, Homo sapiens
ggccctctccaagacgtacaacaccaatgcccaggtccctgacagcgccggcaccgccaccgcctacctgtgtggggtgaaggccaatgagggcaccgtgrgggtaagcgcagccactgagcgttcccggtgcaacaccacccaggggaacgaggtcacctccatcctgcgctgggccaaggacgctgggaaatctgtggg

SEQ ID NO: 82530 - DNA, 201 bp, Homo sapiens
ggacatgcagtacgagctgaacaggaacaacgtgacggacccgtcactctccgagatggtggtggtggccatccagatcctgcggaagaaccccaaaggcytcttcttgctggtggaaggaggcagaattgaccacgggcaccatgaaggaaaagccaagcaggccctgcatgaggcggtggagatggaccgggccatcgg

SEQ ID NO: 82531 - DNA, 201 bp, Homo sapiens
aggaacaacgtgacggacccgtcactctccgagatggtggtggtggccatccagatcctgcggaagaaccccaaaggcttcttcttgctggtggaaggagrcagaattgaccacgggcaccatgaaggaaaagccaagcaggccctgcatgaggcggtggagatggaccgggccatcgggcaggcaggcagcttgacctcc

SEQ ID NO: 82532 - DNA, 201 bp, Homo sapiens
ggccatcgggcaggcaggcagcttgacctcctcggaagacactctgaccgtggtcactgcggaccattcccacgtcttcacatttggtggatacacccccygtggcaactctatctttggtctggcccccatgctgagtgacacagacaagaagcccttcactgccatcctgtatggcaatgggcctggctacaaggtggt

SEQ ID NO: 82533 - DNA, 201 bp, Homo sapiens
gccatcgggcaggcaggcagcttgacctcctcggaagacactctgaccgtggtcactgcggaccattcccacgtcttcacatttggtggatacaccccccrtggcaactctatctttggtctggcccccatgctgagtgacacagacaagaagcccttcactgccatcctgtatggcaatgggcctggctacaaggtggtg

SEQ ID NO: 82534 - DNA, 201 bp, Homo sapiens
gacctcctcggaagacactctgaccgtggtcactgcggaccattcccacgtcttcacatttggtggatacaccccccgtggcaactctatctttggtctgkcccccatgctgagtgacacagacaagaagcccttcactgccatcctgtatggcaatgggcctggctacaaggtggtgggcggtgaacgagagaatgtctc

SEQ ID NO: 82535 - DNA, 201 bp, Homo sapiens
cccacgtgatggcgtatgcagcctgcatcggggccaacctcggccactgtgctcctgccagctcggcaggcagccttgctgcaggccccctgctgctcgckctggccctctaccccctgagcgtcctgttctgagggcccagggcccgggcacccacaagcccgtgacagatgccaacttcccacacggcagcccccccct

SEQ ID NO: 82536 - DNA, 201 bp, Homo sapiens
gagtgacacagacaagaagcccttcactgccatcctgtatggcaatgggcctggctacaaggtggtgggcggtgaacgagagaatgtctccatggtggacyatgctcacaacaactaccaggcgcagtctgctgtgcccctgcgccacgagacccacggcggggaggacgtggccgtcttctccaagggccccatggcgca

SEQ ID NO: 82537 - DNA, 201 bp, Homo sapiens
gacgtgatcatggggggtggccggaaatacatgtaccccaagaataaaactgatgtggagtatgagagtgacgagaaagccaggggcacgaggctggacgkcctggacctcgttgacacctggaagagcttcaaaccgagatacaagcactcccacttcatctggaaccgcacggaactcctgacccttgacccccacaat

SEQ ID NO: 82538 - DNA, 201 bp, Homo sapiens
ggcgcagtctgctgtgcccctgcgccacgagacccacggcggggaggacgtggccgtcttctccaagggccccatggcgcacctgctgcacggcgtccacragcagaactacgtcccccacgtgatggcgtatgcagcctgcatcggggccaacctcggccactgtgctcctgccagctcggcaggcagccttgctgcagg

SEQ ID NO: 82539 - DNA, 201 bp, Homo sapiens
tctgctgtgcccctgcgccacgagacccacggcggggaggacgtggccgtcttctccaagggccccatggcgcacctgctgcacggcgtccacgagcagawctacgtcccccacgtgatggcgtatgcagcctgcatcggggccaacctcggccactgtgctcctgccagctcggcaggcagccttgctgcaggccccctg

SEQ ID NO: 82540 - DNA, 201 bp, Homo sapiens
ggggaggacgtggccgtcttctccaagggccccatggcgcacctgctgcacggcgtccacgagcagaactacgtcccccacgtgatggcgtatgcagcctscatcggggccaacctcggccactgtgctcctgccagctcggcaggcagccttgctgcaggccccctgctgctcgcgctggccctctaccccctgagcgtc

SEQ ID NO: 82541 - DNA, 201 bp, Homo sapiens
tggcacctgccttactaactccttagtgccagagaaagagaaagaccccaagtactggcgagaccaagcgcaagagacactgaaatatgccctggagcttyagaagctcaacaccaacgtggctaagaatgtcatcatgttcctgggagatgggatgggtgtctccacagtgacggctgcccgcatcctcaagggtcagct

SEQ ID NO: 82542 - DNA, 201 bp, Homo sapiens
cgtggccctctccaagacgtacaacaccaatgcccaggtccctgacagcgccggcaccgccaccgcctacctgtgtggggtgaaggccaatgagggcaccrtgggggtaagcgcagccactgagcgttcccggtgcaacaccacccaggggaacgaggtcacctccatcctgcgctgggccaaggacgctgggaaatctgt

SEQ ID NO: 82543 - DNA, 201 bp, Homo sapiens
ggacgtggccgtcttctccaagggccccatggcgcacctgctgcacggcgtccacgagcagaactacgtcccccacgtgatggcgtatgcagcctgcatcrgggccaacctcggccactgtgctcctgccagctcggcaggcagccttgctgcaggccccctgctgctcgcgctggccctctaccccctgagcgtcctgtt

SEQ ID NO: 82544 - DNA, 201 bp, Homo sapiens
cttcagaagctcaacaccaacgtggctaagaatgtcatcatgttcctgggagatgggatgggtgtctccacagtgacggctgcccgcatcctcaagggtcrgctccaccacaaccctggggaggagaccaggctggagatggacaagttccccttcgtggccctctccaagacgtacaacaccaatgcccaggtccctgac

SEQ ID NO: 82545 - DNA, 201 bp, Homo sapiens
aagacgtacaacaccaatgcccaggtccctgacagcgccggcaccgccaccgcctacctgtgtggggtgaaggccaatgagggcaccgtgggggtaagcgyagccactgagcgttcccggtgcaacaccacccaggggaacgaggtcacctccatcctgcgctgggccaaggacgctgggaaatctgtgggcattgtgacc

SEQ ID NO: 82546 - DNA, 201 bp, Homo sapiens
aacgagatgccccctgaggccttgagccagggctgtaaggacatcgcctaccagctcatgcataacatcagggacattgacgtgatcatggggggtggccrgaaatacatgtaccccaagaataaaactgatgtggagtatgagagtgacgagaaagccaggggcacgaggctggacggcctggacctcgttgacacctgg

SEQ ID NO: 82547 - DNA, 201 bp, Homo sapiens
ggacccgtcactctccgagatggtggtggtggccatccagatcctgcggaagaaccccaaaggcttcttcttgctggtggaaggaggcagaattgaccacrggcaccatgaaggaaaagccaagcaggccctgcatgaggcggtggagatggaccgggccatcgggcaggcaggcagcttgacctcctcggaagacactct

SEQ ID NO: 82548 - DNA, 201 bp, Homo sapiens
ccacgtcttcacatttggtggatacaccccccgtggcaactctatctttggtctggcccccatgctgagtgacacagacaagaagcccttcactgccatcmtgtatggcaatgggcctggctacaaggtggtgggcggtgaacgagagaatgtctccatggtggactatgctcacaacaactaccaggcgcagtctgctgt

SEQ ID NO: 82549 - DNA, 201 bp, Homo sapiens
cctggggaggagaccaggctggagatggacaagttccccttcgtggccctctccaagacgtacaacaccaatgcccaggtccctgacagcgccggcaccgscaccgcctacctgtgtggggtgaaggccaatgagggcaccgtgggggtaagcgcagccactgagcgttcccggtgcaacaccacccaggggaacgaggtc

SEQ ID NO: 82550 - DNA, 201 bp, Homo sapiens
cggtgcaacaccacccaggggaacgaggtcacctccatcctgcgctgggccaaggacgctgggaaatctgtgggcattgtgaccaccacgagagtgaaccrtgccacccccagcgccgcctacgcccactcggctgaccgggactggtactcagacaacgagatgccccctgaggccttgagccagggctgtaaggacatc

SEQ ID NO: 82551 - DNA, 201 bp, Homo sapiens
acctccatcctgcgctgggccaaggacgctgggaaatctgtgggcattgtgaccaccacgagagtgaaccatgccacccccagcgccgcctacgcccactyggctgaccgggactggtactcagacaacgagatgccccctgaggccttgagccagggctgtaaggacatcgcctaccagctcatgcataacatcagggac

SEQ ID NO: 82552 - DNA, 201 bp, Homo sapiens
ctgaagcctccgtggaacattctggatctgaccctcccagtctcatctcctgaccctcccactcccatctccttacctctggaaccccccaggccctacartgctcatgtccctgtccccaggcccagccctccttcaggggagttgaggtctttctcctcaggacaaggccttgctcactcactcactccaagaccacca

SEQ ID NO: 82553 - DNA, 201 bp, Homo sapiens; identical to SEQ ID NO: 82472

SEQ ID NO: 82554 - DNA, 201 bp, Homo sapiens; identical to SEQ ID NO: 82473

SEQ ID NO: 82555 - DNA, 201 bp, Homo sapiens; identical to SEQ ID NO: 82474

SEQ ID NO: 82556 - DNA, 201 bp, Homo sapiens; identical to SEQ ID NO: 82475

SEQ ID NO: 82557 - DNA, 201 bp, Homo sapiens; identical to SEQ ID NO: 82476

SEQ ID NO: 82558 - DNA, 201 bp, Homo sapiens; identical to SEQ ID NO: 82477

SEQ ID NO: 82559 - DNA, 201 bp, Homo sapiens; identical to SEQ ID NO: 82478

SEQ ID NO: 82560 - DNA, 201 bp, Homo sapiens; identical to SEQ ID NO: 82479

SEQ ID NO: 82561 - DNA, 201 bp, Homo sapiens; identical to SEQ ID NO: 82480

SEQ ID NO: 82562 - DNA, 201 bp, Homo sapiens; identical to SEQ ID NO: 82481

SEQ ID NO: 82563 - DNA, 201 bp, Homo sapiens; identical to SEQ ID NO: 82482

SEQ ID NO: 82564 - DNA, 201 bp, Homo sapiens; identical to SEQ ID NO: 82483

SEQ ID NO: 82565 - DNA, 201 bp, Homo sapiens; identical to SEQ ID NO: 82484

SEQ ID NO: 82566 - DNA, 201 bp, Homo sapiens; identical to SEQ ID NO: 82485

SEQ ID NO: 82567 - DNA, 201 bp, Homo sapiens; identical to SEQ ID NO: 82486

SEQ ID NO: 82568 - DNA, 201 bp, Homo sapiens; identical to SEQ ID NO: 82487

SEQ ID NO: 82569 - DNA, 201 bp, Homo sapiens; identical to SEQ ID NO: 82488

SEQ ID NO: 82570 - DNA, 201 bp, Homo sapiens; identical to SEQ ID NO: 82489

SEQ ID NO: 82571 - DNA, 201 bp, Homo sapiens; identical to SEQ ID NO: 82490

SEQ ID NO: 82572 - DNA, 201 bp, Homo sapiens; identical to SEQ ID NO: 82491

SEQ ID NO: 82573 - DNA, 201 bp, Homo sapiens; identical to SEQ ID NO: 82492

SEQ ID NO: 82574 - DNA, 201 bp, Homo sapiens; identical to SEQ ID NO: 82493

SEQ ID NO: 82575 - DNA, 201 bp, Homo sapiens; identical to SEQ ID NO: 82494

SEQ ID NO: 82576 - DNA, 201 bp, Homo sapiens; identical to SEQ ID NO: 82495

SEQ ID NO: 82577 - DNA, 201 bp, Homo sapiens; identical to SEQ ID NO: 82496

SEQ ID NO: 82578 - DNA, 201 bp, Homo sapiens; identical to SEQ ID NO: 82497

SEQ ID NO: 82579 - DNA, 201 bp, Homo sapiens; identical to SEQ ID NO: 82498

SEQ ID NO: 82580 - DNA, 201 bp, Homo sapiens; identical to SEQ ID NO: 82499

SEQ ID NO: 82581 - DNA, 201 bp, Homo sapiens; identical to SEQ ID NO: 82500

SEQ ID NO: 82582 - DNA, 201 bp, Homo sapiens; identical to SEQ ID NO: 82501

SEQ ID NO: 82583 - DNA, 201 bp, Homo sapiens; identical to SEQ ID NO: 82502

SEQ ID NO: 82584 - DNA, 201 bp, Homo sapiens; identical to SEQ ID NO: 82503

SEQ ID NO: 82585 - DNA, 201 bp, Homo sapiens; identical to SEQ ID NO: 82504

SEQ ID NO: 82586 - DNA, 201 bp, Homo sapiens; identical to SEQ ID NO: 82505

SEQ ID NO: 82587 - DNA, 201 bp, Homo sapiens; identical to SEQ ID NO: 82506

SEQ ID NO: 82588 - DNA, 201 bp, Homo sapiens; identical to SEQ ID NO: 82507

SEQ ID NO: 82589 - DNA, 201 bp, Homo sapiens; identical to SEQ ID NO: 82508

SEQ ID NO: 82590 - DNA, 201 bp, Homo sapiens; identical to SEQ ID NO: 82509

SEQ ID NO: 82591 - DNA, 201 bp, Homo sapiens; identical to SEQ ID NO: 82510

SEQ ID NO: 82592 - DNA, 201 bp, Homo sapiens; identical to SEQ ID NO: 82511

SEQ ID NO: 82593 - DNA, 201 bp, Homo sapiens; identical to SEQ ID NO: 82512

SEQ ID NO: 82594 - DNA, 201 bp, Homo sapiens; identical to SEQ ID NO: 82513

SEQ ID NO: 82595 - DNA, 201 bp, Homo sapiens; identical to SEQ ID NO: 82514

SEQ ID NO: 82596 - DNA, 201 bp, Homo sapiens; identical to SEQ ID NO: 82515

SEQ ID NO: 82597 - DNA, 201 bp, Homo sapiens; identical to SEQ ID NO: 82516

SEQ ID NO: 82598 - DNA, 201 bp, Homo sapiens; identical to SEQ ID NO: 82517

SEQ ID NO: 82599 - DNA, 201 bp, Homo sapiens; identical to SEQ ID NO: 82518

SEQ ID NO: 82600 - DNA, 201 bp, Homo sapiens; identical to SEQ ID NO: 82519

SEQ ID NO: 82601 - DNA, 201 bp, Homo sapiens; identical to SEQ ID NO: 82520

SEQ ID NO: 82602 - DNA, 201 bp, Homo sapiens; identical to SEQ ID NO: 82521

SEQ ID NO: 82603 - DNA, 201 bp, Homo sapiens; identical to SEQ ID NO: 82522

SEQ ID NO: 82604 - DNA, 201 bp, Homo sapiens; identical to SEQ ID NO: 82523

SEQ ID NO: 82605 - DNA, 201 bp, Homo sapiens; identical to SEQ ID NO: 82524

SEQ ID NO: 82606 - DNA, 201 bp, Homo sapiens; identical to SEQ ID NO: 82525

SEQ ID NO: 82607 - DNA, 201 bp, Homo sapiens; identical to SEQ ID NO: 82526

SEQ ID NO: 82608 - DNA, 201 bp, Homo sapiens; identical to SEQ ID NO: 82527

SEQ ID NO: 82609 - DNA, 201 bp, Homo sapiens; identical to SEQ ID NO: 82528

SEQ ID NO: 82610 - DNA, 201 bp, Homo sapiens; identical to SEQ ID NO: 82529

SEQ ID NO: 82611 - DNA, 201 bp, Homo sapiens; identical to SEQ ID NO: 82530

SEQ ID NO: 82612 - DNA, 201 bp, Homo sapiens; identical to SEQ ID NO: 82531

SEQ ID NO: 82613 - DNA, 201 bp, Homo sapiens; identical to SEQ ID NO: 82532

SEQ ID NO: 82614 - DNA, 201 bp, Homo sapiens; identical to SEQ ID NO: 82533

SEQ ID NO: 82615 - DNA, 201 bp, Homo sapiens; identical to SEQ ID NO: 82534

SEQ ID NO: 82616 - DNA, 201 bp, Homo sapiens; identical to SEQ ID NO: 82535

SEQ ID NO: 82617 - DNA, 201 bp, Homo sapiens; identical to SEQ ID NO: 82536

SEQ ID NO: 82618 - DNA, 201 bp, Homo sapiens; identical to SEQ ID NO: 82537

SEQ ID NO: 82619 - DNA, 201 bp, Homo sapiens; identical to SEQ ID NO: 82538

SEQ ID NO: 82620 - DNA, 201 bp, Homo sapiens; identical to SEQ ID NO: 82539

SEQ ID NO: 82621 - DNA, 201 bp, Homo sapiens; identical to SEQ ID NO: 82540

SEQ ID NO: 82622 - DNA, 201 bp, Homo sapiens; identical to SEQ ID NO: 82541

SEQ ID NO: 82623 - DNA, 201 bp, Homo sapiens; identical to SEQ ID NO: 82542

SEQ ID NO: 82624 - DNA, 201 bp, Homo sapiens; identical to SEQ ID NO: 82543

SEQ ID NO: 82625 - DNA, 201 bp, Homo sapiens; identical to SEQ ID NO: 82544

SEQ ID NO: 82626 - DNA, 201 bp, Homo sapiens; identical to SEQ ID NO: 82545

SEQ ID NO: 82627 - DNA, 201 bp, Homo sapiens; identical to SEQ ID NO: 82546

SEQ ID NO: 82628 - DNA, 201 bp, Homo sapiens; identical to SEQ ID NO: 82547

SEQ ID NO: 82629 - DNA, 201 bp, Homo sapiens; identical to SEQ ID NO: 82548

SEQ ID NO: 82630 - DNA, 201 bp, Homo sapiens; identical to SEQ ID NO: 82549

SEQ ID NO: 82631 - DNA, 201 bp, Homo sapiens; identical to SEQ ID NO: 82550

SEQ ID NO: 82632 - DNA, 201 bp, Homo sapiens; identical to SEQ ID NO: 82551

SEQ ID NO: 82633 - DNA, 201 bp, Homo sapiens; identical to SEQ ID NO: 82552

SEQ ID NO: 82634 - DNA, 201 bp, Homo sapiens; identical to SEQ ID NO: 82472

SEQ ID NO: 82635 - DNA, 201 bp, Homo sapiens; identical to SEQ ID NO: 82473

SEQ ID NO: 82636 - DNA, 201 bp, Homo sapiens; identical to SEQ ID NO: 82474

SEQ ID NO: 82637 - DNA, 201 bp, Homo sapiens; identical to SEQ ID NO: 82475

SEQ ID NO: 82638 - DNA, 201 bp, Homo sapiens; identical to SEQ ID NO: 82476

SEQ ID NO: 82639 - DNA, 201 bp, Homo sapiens; identical to SEQ ID NO: 82477

SEQ ID NO: 82640 - DNA, 201 bp, Homo sapiens; identical to SEQ ID NO: 82478

SEQ ID NO: 82641 - DNA, 201 bp, Homo sapiens; identical to SEQ ID NO: 82479

SEQ ID NO: 82642 - DNA, 201 bp, Homo sapiens; identical to SEQ ID NO: 82480

SEQ ID NO: 82643 - DNA, 201 bp, Homo sapiens; identical to SEQ ID NO: 82481

SEQ ID NO: 82644 - DNA, 201 bp, Homo sapiens; identical to SEQ ID NO: 82482

SEQ ID NO: 82645 - DNA, 201 bp, Homo sapiens; identical to SEQ ID NO: 82483

SEQ ID NO: 82646 - DNA, 201 bp, Homo sapiens; identical to SEQ ID NO: 82484

SEQ ID NO: 82647 - DNA, 201 bp, Homo sapiens; identical to SEQ ID NO: 82485

SEQ ID NO: 82648 - DNA, 201 bp, Homo sapiens; identical to SEQ ID NO: 82486

SEQ ID NO: 82649 - DNA, 201 bp, Homo sapiens; identical to SEQ ID NO: 82487

SEQ ID NO: 82650 - DNA, 201 bp, Homo sapiens; identical to SEQ ID NO: 82488

SEQ ID NO: 82651 - DNA, 201 bp, Homo sapiens; identical to SEQ ID NO: 82489

SEQ ID NO: 82652 - DNA, 201 bp, Homo sapiens; identical to SEQ ID NO: 82490

SEQ ID NO: 82653 - DNA, 201 bp, Homo sapiens; identical to SEQ ID NO: 82491

SEQ ID NO: 82654 - DNA, 201 bp, Homo sapiens; identical to SEQ ID NO: 82492

SEQ ID NO: 82655 - DNA, 201 bp, Homo sapiens; identical to SEQ ID NO: 82493

SEQ ID NO: 82656 - DNA, 201 bp, Homo sapiens; identical to SEQ ID NO: 82494

SEQ ID NO: 82657 - DNA, 201 bp, Homo sapiens; identical to SEQ ID NO: 82495

SEQ ID NO: 82658 - DNA, 201 bp, Homo sapiens; identical to SEQ ID NO: 82496

SEQ ID NO: 82659 - DNA, 201 bp, Homo sapiens; identical to SEQ ID NO: 82497

SEQ ID NO: 82660 - DNA, 201 bp, Homo sapiens; identical to SEQ ID NO: 82498

SEQ ID NO: 82661 - DNA, 201 bp, Homo sapiens; identical to SEQ ID NO: 82499

SEQ ID NO: 82662 - DNA, 201 bp, Homo sapiens; identical to SEQ ID NO: 82500

SEQ ID NO: 82663 - DNA, 201 bp, Homo sapiens; identical to SEQ ID NO: 82501

SEQ ID NO: 82664 - DNA, 201 bp, Homo sapiens; identical to SEQ ID NO: 82502

SEQ ID NO: 82665 - DNA, 201 bp, Homo sapiens; identical to SEQ ID NO: 82503

SEQ ID NO: 82666 - DNA, 201 bp, Homo sapiens; identical to SEQ ID NO: 82504

SEQ ID NO: 82667 - DNA, 201 bp, Homo sapiens; identical to SEQ ID NO: 82505

SEQ ID NO: 82668 - DNA, 201 bp, Homo sapiens; identical to SEQ ID NO: 82506

SEQ ID NO: 82669 - DNA, 201 bp, Homo sapiens; identical to SEQ ID NO: 82507

SEQ ID NO: 82670 - DNA, 201 bp, Homo sapiens; identical to SEQ ID NO: 82508

SEQ ID NO: 82671 - DNA, 201 bp, Homo sapiens; identical to SEQ ID NO: 82509

SEQ ID NO: 82672 - DNA, 201 bp, Homo sapiens; identical to SEQ ID NO: 82510

SEQ ID NO: 82673 - DNA, 201 bp, Homo sapiens; identical to SEQ ID NO: 82511

SEQ ID NO: 82674 - DNA, 201 bp, Homo sapiens; identical to SEQ ID NO: 82512

SEQ ID NO: 82675 - DNA, 201 bp, Homo sapiens; identical to SEQ ID NO: 82513

SEQ ID NO: 82676 - DNA, 201 bp, Homo sapiens; identical to SEQ ID NO: 82514

SEQ ID NO: 82677 - DNA, 201 bp, Homo sapiens; identical to SEQ ID NO: 82515

SEQ ID NO: 82678 - DNA, 201 bp, Homo sapiens; identical to SEQ ID NO: 82516

SEQ ID NO: 82679 - DNA, 201 bp, Homo sapiens; identical to SEQ ID NO: 82517

SEQ ID NO: 82680 - DNA, 201 bp, Homo sapiens; identical to SEQ ID NO: 82518

SEQ ID NO: 82681 - DNA, 201 bp, Homo sapiens; identical to SEQ ID NO: 82519

SEQ ID NO: 82682 - DNA, 201 bp, Homo sapiens; identical to SEQ ID NO: 82520

SEQ ID NO: 82683 - DNA, 201 bp, Homo sapiens; identical to SEQ ID NO: 82521

SEQ ID NO: 82684 - DNA, 201 bp, Homo sapiens; identical to SEQ ID NO: 82522

SEQ ID NO: 82685 - DNA, 201 bp, Homo sapiens; identical to SEQ ID NO: 82523

SEQ ID NO: 82686 - DNA, 201 bp, Homo sapiens; identical to SEQ ID NO: 82524

SEQ ID NO: 82687 - DNA, 201 bp, Homo sapiens; identical to SEQ ID NO: 82525

SEQ ID NO: 82688 - DNA, 201 bp, Homo sapiens; identical to SEQ ID NO: 82526

SEQ ID NO: 82689 - DNA, 201 bp, Homo sapiens; identical to SEQ ID NO: 82527

SEQ ID NO: 82690 - DNA, 201 bp, Homo sapiens; identical to SEQ ID NO: 82528

SEQ ID NO: 82691 - DNA, 201 bp, Homo sapiens; identical to SEQ ID NO: 82529

SEQ ID NO: 82692 - DNA, 201 bp, Homo sapiens; identical to SEQ ID NO: 82530

SEQ ID NO: 82693 - DNA, 201 bp, Homo sapiens; identical to SEQ ID NO: 82531

SEQ ID NO: 82694 - DNA, 201 bp, Homo sapiens; identical to SEQ ID NO: 82532

SEQ ID NO: 82695 - DNA, 201 bp, Homo sapiens; identical to SEQ ID NO: 82533

SEQ ID NO: 82696 - DNA, 201 bp, Homo sapiens; identical to SEQ ID NO: 82534

SEQ ID NO: 82697 - DNA, 201 bp, Homo sapiens; identical to SEQ ID NO: 82535

SEQ ID NO: 82698 - DNA, 201 bp, Homo sapiens; identical to SEQ ID NO: 82536

SEQ ID NO: 82699 - DNA, 201 bp, Homo sapiens; identical to SEQ ID NO: 82537

SEQ ID NO: 82700 - DNA, 201 bp, Homo sapiens; identical to SEQ ID NO: 82538

SEQ ID NO: 82701 - DNA, 201 bp, Homo sapiens; identical to SEQ ID NO: 82539

SEQ ID NO: 82702 - DNA, 201 bp, Homo sapiens; identical to SEQ ID NO: 82540

SEQ ID NO: 82703 - DNA, 201 bp, Homo sapiens; identical to SEQ ID NO: 82541

SEQ ID NO: 82704 - DNA, 201 bp, Homo sapiens; identical to SEQ ID NO: 82542

SEQ ID NO: 82705 - DNA, 201 bp, Homo sapiens; identical to SEQ ID NO: 82543

SEQ ID NO: 82706 - DNA, 201 bp, Homo sapiens; identical to SEQ ID NO: 82544

SEQ ID NO: 82707 - DNA, 201 bp, Homo sapiens; identical to SEQ ID NO: 82545

SEQ ID NO: 82708 - DNA, 201 bp, Homo sapiens; identical to SEQ ID NO: 82546

SEQ ID NO: 82709 - DNA, 201 bp, Homo sapiens; identical to SEQ ID NO: 82547

SEQ ID NO: 82710 - DNA, 201 bp, Homo sapiens; identical to SEQ ID NO: 82548

SEQ ID NO: 82711 - DNA, 201 bp, Homo sapiens; identical to SEQ ID NO: 82549

SEQ ID NO: 82712 - DNA, 201 bp, Homo sapiens; identical to SEQ ID NO: 82550

SEQ ID NO: 82713 - DNA, 201 bp, Homo sapiens; identical to SEQ ID NO: 82551

SEQ ID NO: 82714 - DNA, 201 bp, Homo sapiens; identical to SEQ ID NO: 82552

SEQ ID NO: 82715 - DNA, 201 bp, Homo sapiens; identical to SEQ ID NO: 82472

SEQ ID NO: 82716 - DNA, 201 bp, Homo sapiens; identical to SEQ ID NO: 82473

SEQ ID NO: 82717 - DNA, 201 bp, Homo sapiens; identical to SEQ ID NO: 82474

SEQ ID NO: 82718 - DNA, 201 bp, Homo sapiens; identical to SEQ ID NO: 82475

SEQ ID NO: 82719 - DNA, 201 bp, Homo sapiens; identical to SEQ ID NO: 82476

SEQ ID NO: 82720 - DNA, 201 bp, Homo sapiens; identical to SEQ ID NO: 82477

SEQ ID NO: 82721 - DNA, 201 bp, Homo sapiens; identical to SEQ ID NO: 82478

SEQ ID NO: 82722 - DNA, 201 bp, Homo sapiens; identical to SEQ ID NO: 82479

SEQ ID NO: 82723 - DNA, 201 bp, Homo sapiens; identical to SEQ ID NO: 82480

SEQ ID NO: 82724 - DNA, 201 bp, Homo sapiens; identical to SEQ ID NO: 82481

SEQ ID NO: 82725 - DNA, 201 bp, Homo sapiens; identical to SEQ ID NO: 82482

SEQ ID NO: 82726 - DNA, 201 bp, Homo sapiens; identical to SEQ ID NO: 82483

SEQ ID NO: 82727 - DNA, 201 bp, Homo sapiens; identical to SEQ ID NO: 82484

SEQ ID NO: 82728 - DNA, 201 bp, Homo sapiens; identical to SEQ ID NO: 82485

SEQ ID NO: 82729 - DNA, 201 bp, Homo sapiens; identical to SEQ ID NO: 82486

SEQ ID NO: 82730 - DNA, 201 bp, Homo sapiens; identical to SEQ ID NO: 82487

SEQ ID NO: 82731 - DNA, 201 bp, Homo sapiens; identical to SEQ ID NO: 82488

SEQ ID NO: 82732 - DNA, 201 bp, Homo sapiens; identical to SEQ ID NO: 82489

SEQ ID NO: 82733 - DNA, 201 bp, Homo sapiens; identical to SEQ ID NO: 82490

SEQ ID NO: 82734 - DNA, 201 bp, Homo sapiens; identical to SEQ ID NO: 82491

SEQ ID NO: 82735 - DNA, 201 bp, Homo sapiens; identical to SEQ ID NO: 82492

SEQ ID NO: 82736 - DNA, 201 bp, Homo sapiens; identical to SEQ ID NO: 82493

SEQ ID NO: 82737 - DNA, 201 bp, Homo sapiens; identical to SEQ ID NO: 82494

SEQ ID NO: 82738 - DNA, 201 bp, Homo sapiens; identical to SEQ ID NO: 82495

SEQ ID NO: 82739 - DNA, 201 bp, Homo sapiens; identical to SEQ ID NO: 82496

SEQ ID NO: 82740 - DNA, 201 bp, Homo sapiens; identical to SEQ ID NO: 82497

SEQ ID NO: 82741 - DNA, 201 bp, Homo sapiens; identical to SEQ ID NO: 82498

SEQ ID NO: 82742 - DNA, 201 bp, Homo sapiens; identical to SEQ ID NO: 82499

SEQ ID NO: 82743 - DNA, 201 bp, Homo sapiens; identical to SEQ ID NO: 82500

SEQ ID NO: 82744 - DNA, 201 bp, Homo sapiens; identical to SEQ ID NO: 82501

SEQ ID NO: 82745 - DNA, 201 bp, Homo sapiens; identical to SEQ ID NO: 82502

SEQ ID NO: 82746 - DNA, 201 bp, Homo sapiens; identical to SEQ ID NO: 82503

SEQ ID NO: 82747 - DNA, 201 bp, Homo sapiens; identical to SEQ ID NO: 82504

SEQ ID NO: 82748 - DNA, 201 bp, Homo sapiens; identical to SEQ ID NO: 82505

SEQ ID NO: 82749 - DNA, 201 bp, Homo sapiens; identical to SEQ ID NO: 82506

SEQ ID NO: 82750 - DNA, 201 bp, Homo sapiens; identical to SEQ ID NO: 82507

SEQ ID NO: 82751 - DNA, 201 bp, Homo sapiens; identical to SEQ ID NO: 82508

SEQ ID NO: 82752 - DNA, 201 bp, Homo sapiens; identical to SEQ ID NO: 82509

SEQ ID NO: 82753 - DNA, 201 bp, Homo sapiens; identical to SEQ ID NO: 82510

SEQ ID NO: 82754 - DNA, 201 bp, Homo sapiens; identical to SEQ ID NO: 82511

SEQ ID NO: 82755 - DNA, 201 bp, Homo sapiens; identical to SEQ ID NO: 82512

SEQ ID NO: 82756 - DNA, 201 bp, Homo sapiens; identical to SEQ ID NO: 82513

SEQ ID NO: 82757 - DNA, 201 bp, Homo sapiens; identical to SEQ ID NO: 82514

SEQ ID NO: 82758 - DNA, 201 bp, Homo sapiens; identical to SEQ ID NO: 82515

SEQ ID NO: 82759 - DNA, 201 bp, Homo sapiens; identical to SEQ ID NO: 82516

SEQ ID NO: 82760 - DNA, 201 bp, Homo sapiens; identical to SEQ ID NO: 82517

SEQ ID NO: 82761 - DNA, 201 bp, Homo sapiens; identical to SEQ ID NO: 82518

SEQ ID NO: 82762 - DNA, 201 bp, Homo sapiens; identical to SEQ ID NO: 82519

SEQ ID NO: 82763 - DNA, 201 bp, Homo sapiens; identical to SEQ ID NO: 82520

SEQ ID NO: 82764 - DNA, 201 bp, Homo sapiens; identical to SEQ ID NO: 82521

SEQ ID NO: 82765 - DNA, 201 bp, Homo sapiens
gcctcctttgtttcttcacttgccgcctggccaggccgctcagagaaagagaaagaccccaagtactggcgagaccaagcgcaagagacactgaaatatgycctggagcttcagaagctcaacaccaacgtggctaagaatgtcatcatgttcctgggagatgggatgggtgtctccacagtgacggctgcccgcatcctc

SEQ ID NO: 82766 - DNA, 201 bp, Homo sapiens; identical to SEQ ID NO: 82523

SEQ ID NO: 82767 - DNA, 201 bp, Homo sapiens; identical to SEQ ID NO: 82524

SEQ ID NO: 82768 - DNA, 201 bp, Homo sapiens; identical to SEQ ID NO: 82525

SEQ ID NO: 82769 - DNA, 201 bp, Homo sapiens; identical to SEQ ID NO: 82526

SEQ ID NO: 82770 - DNA, 201 bp, Homo sapiens; identical to SEQ ID NO: 82527

SEQ ID NO: 82771 - DNA, 201 bp, Homo sapiens; identical to SEQ ID NO: 82528

SEQ ID NO: 82772 - DNA, 201 bp, Homo sapiens; identical to SEQ ID NO: 82529

SEQ ID NO: 82773 - DNA, 201 bp, Homo sapiens; identical to SEQ ID NO: 82530

SEQ ID NO: 82774 - DNA, 201 bp, Homo sapiens; identical to SEQ ID NO: 82531

SEQ ID NO: 82775 - DNA, 201 bp, Homo sapiens; identical to SEQ ID NO: 82532

SEQ ID NO: 82776 - DNA, 201 bp, Homo sapiens; identical to SEQ ID NO: 82533

SEQ ID NO: 82777 - DNA, 201 bp, Homo sapiens; identical to SEQ ID NO: 82534

SEQ ID NO: 82778 - DNA, 201 bp, Homo sapiens; identical to SEQ ID NO: 82535

SEQ ID NO: 82779 - DNA, 201 bp, Homo sapiens; identical to SEQ ID NO: 82536

SEQ ID NO: 82780 - DNA, 201 bp, Homo sapiens; identical to SEQ ID NO: 82537

SEQ ID NO: 82781 - DNA, 201 bp, Homo sapiens; identical to SEQ ID NO: 82538

SEQ ID NO: 82782 - DNA, 201 bp, Homo sapiens; identical to SEQ ID NO: 82539

SEQ ID NO: 82783 - DNA, 201 bp, Homo sapiens; identical to SEQ ID NO: 82540

SEQ ID NO: 82784 - DNA, 201 bp, Homo sapiens
ttcttcacttgccgcctggccaggccgctcagagaaagagaaagaccccaagtactggcgagaccaagcgcaagagacactgaaatatgccctggagcttyagaagctcaacaccaacgtggctaagaatgtcatcatgttcctgggagatgggatgggtgtctccacagtgacggctgcccgcatcctcaagggtcagct

SEQ ID NO: 82785 - DNA, 201 bp, Homo sapiens; identical to SEQ ID NO: 82542

SEQ ID NO: 82786 - DNA, 201 bp, Homo sapiens; identical to SEQ ID NO: 82543

SEQ ID NO: 82787 - DNA, 201 bp, Homo sapiens; identical to SEQ ID NO: 82544

SEQ ID NO: 82788 - DNA, 201 bp, Homo sapiens; identical to SEQ ID NO: 82545

SEQ ID NO: 82789 - DNA, 201 bp, Homo sapiens; identical to SEQ ID NO: 82546

SEQ ID NO: 82790 - DNA, 201 bp, Homo sapiens; identical to SEQ ID NO: 82547

SEQ ID NO: 82791 - DNA, 201 bp, Homo sapiens; identical to SEQ ID NO: 82548

SEQ ID NO: 82792 - DNA, 201 bp, Homo sapiens; identical to SEQ ID NO: 82549

SEQ ID NO: 82793 - DNA, 201 bp, Homo sapiens; identical to SEQ ID NO: 82550

SEQ ID NO: 82794 - DNA, 201 bp, Homo sapiens; identical to SEQ ID NO: 82551

SEQ ID NO: 82795 - DNA, 201 bp, Homo sapiens; identical to SEQ ID NO: 82552

SEQ ID NO: 82796 - DNA, 201 bp, Homo sapiens
cgtatcccgatcacttccgggtagtgctccacgggcacgagccgcgattgggctaccgtagatggggtacttccggtgtgcaggtgctgggtccttcggcmggaggaggaagatggagcccagcaccgcggcccgggcttgggccctcttttggttgctgctgcccttgcttggcgcggtttgcgccagcggaccccgcac

SEQ ID NO: 82797 - DNA, 201 bp, Homo sapiens
gacaacctcaacgtgcgggagactcattcgcttttcttccggagcctgaaggaccggggctttgagctcacattcaagaccgctgatgaccccagcctgtmtctcataaagtatggggaattcctctatgacaatctcatcattttctccccttcggtagaagattttggaggcaacatcaacgtggagaccatcagtgcc

SEQ ID NO: 82798 - DNA, 201 bp, Homo sapiens
ctggacgcccagccgcggcgtatcccgatcacttccgggtagtgctccacgggcacgagccgcgattgggctaccgtagatggggtacttccggtgtgcasgtgctgggtccttcggcaggaggaggaagatggagcccagcaccgcggcccgggcttgggccctcttttggttgctgctgcccttgcttggcgcggtttg

SEQ ID NO: 82799 - DNA, 201 bp, Homo sapiens
ctgtctctactaaaagtacaaaaaattagctgggcgtggtggtgggcacctgtagtcccagctactcgggaggctgaggcaggagaaaggcatgaatccargaggcagagcttgcagtgagctgagatcacgccattgcactccagcctgggcaacagtgttaagactctgtctcaaatataaataaataaataaataaat

SEQ ID NO: 82800 - DNA, 201 bp, Homo sapiens
tcatcgtggctgacactgagaacctgctgaaggccccaaccatcgttgggaaatcatctctaaatcccatcccctctccgcacagcgtggagacggggcarggaggggggttattaggattggtggttttgttttgctttgtttaaagccgtgggaaaatggcacaactttacctctgtgggagatgcaacactgagagcc

SEQ ID NO: 82801 - DNA, 164 bp, Homo sapiens
accagggcacttccggcggcgctctccgcgccttatcgccaaagctgcggctctggacgcccakccgcggcgtatcccgatcacttccgggtagtgctccacgggcacgagccgcgattgggctaccgtagatggggtacttccggtgtgcaggtgctgggtcc

SEQ ID NO: 82802 - DNA, 201 bp, Homo sapiens
gtgcaggtgctgggtccttcggcaggaggaggaagatggagcccagcaccgcggcccgggcttgggccctcttttggttgctgctgcccttgcttggcgcrgtttgcgccagcggaccccgcaccttagtgctgctggacaacctcaacgtgcgggagactcattcgcttttcttccggagcctgaaggaccggggctttg

SEQ ID NO: 82803 - DNA, 201 bp, Homo sapiens
atggggaattcctctatgacaatctcatcattttctccccttcggtagaagattttggaggcaacatcaacgtggagaccatcagtgcctttattgacggyggaggcagtgtgctggtagctgccagctccgacattggtgaccctcttcgagagctgggcagtgagtgcgggattgagtttgacgaggagaaaacggctg

SEQ ID NO: 82804 - DNA, 201 bp, Homo sapiens; identical to SEQ ID NO: 82796

SEQ ID NO: 82805 - DNA, 201 bp, Homo sapiens; identical to SEQ ID NO: 82797

SEQ ID NO: 82806 - DNA, 201 bp, Homo sapiens; identical to SEQ ID NO: 82798

SEQ ID NO: 82807 - DNA, 201 bp, Homo sapiens; identical to SEQ ID NO: 82799

SEQ ID NO: 82808 - DNA, 201 bp, Homo sapiens
cttactccttcttcccggacaagcctatcacccagtatccacatgcggtggggaagaacaccctcctcattgctgggctccaggccaggaacaatgcccgygtcatcttcagcggctccctcgacttcttcagcgactccttcttcaactcagcagtgcagaaggcggcgcccggctcccagaggtattcccagacaggca

SEQ ID NO: 82809 - DNA, 201 bp, Homo sapiens
cacatgcggtggggaagaacaccctcctcattgctgggctccaggccaggaacaatgcccgcgtcatcttcagcggctccctcgacttcttcagcgactcmttcttcaactcagcagtgcagaaggcggcgcccggctcccagaggtattcccagacaggcaactatgaactagctgtggccctctcccgctgggtgttca

SEQ ID NO: 82810 - DNA, 201 bp, Homo sapiens
ggggctcttcatcttcagcatcgtcttcttgcacatgaaggagaaggagaagtccgactgaggggctagagccctctccgcacagcgtggagacggggcarggaggggggttattaggattggtggttttgttttgctttgtttaaagccgtgggaaaatggcacaactttacctctgtgggagatgcaacactgagagcc

SEQ ID NO: 82811 - DNA, 201 bp, Homo sapiens; identical to SEQ ID NO: 82802

SEQ ID NO: 82812 - DNA, 164 bp, Homo sapiens; identical to SEQ ID NO: 82801

SEQ ID NO: 82813 - DNA, 201 bp, Homo sapiens; identical to SEQ ID NO: 82803

SEQ ID NO: 82814 - DNA, 201 bp, Homo sapiens
cacacctgtactcttccactcaggtatccgtgcggccactccagcacacgcagtatgagcgcttcatcccctcggcctacccctactacgccagcgccttytccatgatgctggggctcttcatcttcagcatcgtcttcttgcacatgaaggagaaggagaagtccgactgaggggctagagccctctccgcacagcgtg

SEQ ID NO: 82815 - DNA, 201 bp, Homo sapiens
tcgacttcttcagcgactccttcttcaactcagcagtgcagaaggcggcgcccggctcccagaggtattcccagacaggcaactatgaactagctgtggcyctctcccgctgggtgttcaaggaggagggtgtcctccgtgtggggcctgtgtcccatcatcgggtgggcgagacagccccacccaatgcctacactgtca

SEQ ID NO: 82816 - DNA, 201 bp, Homo sapiens; identical to SEQ ID NO: 82796

SEQ ID NO: 82817 - DNA, 201 bp, Homo sapiens
gacaacctcaacgtgcgggagactcattcgcttttcttccggagcctgaaggaccggggctttgagctcacattcaagaccgctgatgaccccagcctgtmtctcataaagtatggggaattcctctatgacaatctcctggagtttgtccgcattgatccttttgtgaggaccttcctgaagaagaaaggtggcaaatac

SEQ ID NO: 82818 - DNA, 201 bp, Homo sapiens; identical to SEQ ID NO: 82798

SEQ ID NO: 82819 - DNA, 201 bp, Homo sapiens; identical to SEQ ID NO: 82799

SEQ ID NO: 82820 - DNA, 201 bp, Homo sapiens; identical to SEQ ID NO: 82810

SEQ ID NO: 82821 - DNA, 164 bp, Homo sapiens; identical to SEQ ID NO: 82801

SEQ ID NO: 82822 - DNA, 201 bp, Homo sapiens; identical to SEQ ID NO: 82802

SEQ ID NO: 82823 - DNA, 201 bp, Homo sapiens; identical to SEQ ID NO: 82814

SEQ ID NO: 82824 - DNA, 201 bp, Homo sapiens
ccaagcccgaggccttttccggctaaccagccctctctgcgctgtcttgtctcctgactcccaccctcaccattcacagaccatcacgacacagaggatgycaagttcttttagtaattcaccagctccatgcagggacatcacagggctgccctccatgagcagaggaggagggctgcctggcagagcgtttcacactcc

SEQ ID NO: 82825 - DNA, 201 bp, Homo sapiens; identical to SEQ ID NO: 82796

SEQ ID NO: 82826 - DNA, 201 bp, Homo sapiens; identical to SEQ ID NO: 82797

SEQ ID NO: 82827 - DNA, 201 bp, Homo sapiens
cagacatgctacgctgcccccttcaaacgagttcctcgtgttaggggcaaaggtcacagccaaactctgccactgacagccagtgccttggcctggatccwctctgtggatgcaggcctacccctcctcagtccagcctcatctactagaccagcttggccattcacttttcagatgtctgtgagcacaggactgcagact

SEQ ID NO: 82828 - DNA, 201 bp, Homo sapiens; identical to SEQ ID NO: 82808

SEQ ID NO: 82829 - DNA, 201 bp, Homo sapiens; identical to SEQ ID NO: 82809

SEQ ID NO: 82830 - DNA, 201 bp, Homo sapiens; identical to SEQ ID NO: 82810

SEQ ID NO: 82831 - DNA, 164 bp, Homo sapiens; identical to SEQ ID NO: 82801

SEQ ID NO: 82832 - DNA, 201 bp, Homo sapiens
ctgacagccagtgccttggcctggatcctctctgtggatgcaggcctacccctcctcagtccagcctcatctactagaccagcttggccattcacttttcrgatgtctgtgagcacaggactgcagactgaactctcactcaagttcttccatttgccaagcccgaggccttttccggctaaccagccctctctgcgctgt

SEQ ID NO: 82833 - DNA, 201 bp, Homo sapiens
acatgctacgctgcccccttcaaacgagttcctcgtgttaggggcaaaggtcacagccaaactctgccactgacagccagtgccttggcctggatcctctmtgtggatgcaggcctacccctcctcagtccagcctcatctactagaccagcttggccattcacttttcagatgtctgtgagcacaggactgcagactgaa

SEQ ID NO: 82834 - DNA, 201 bp, Homo sapiens; identical to SEQ ID NO: 82814

SEQ ID NO: 82835 - DNA, 201 bp, Homo sapiens
ttaaagccaaatattcagttcaaggcacatacgtcatctgcagttgtaaatttgcatttaatatttcacaattcctgtaagagaggctagtcaggagggamaccctcaagtttaaatccccacacttacttacttactgctcatccgtcactttcgctaagtgagattaataattcagtagctggtccagaacgcacagct

SEQ ID NO: 82836 - DNA, 201 bp, Homo sapiens
gcttcctaaaaatcatgtataaagttagttagttagacatgaaatctcttccccaatgttgatacctgcccacaaaatattctcaccttcagagtataagratcattcttaaagccaaatattcagttcaaggcacatacgtcatctgcagttgtaaatttgcatttaatatttcacaattcctgtaagagaggctagtca

SEQ ID NO: 82837 - DNA, 201 bp, Homo sapiens
actgtctttcttttaactgtgaaatgatgatggttctccctaacgtctcctcaaaggatacaagaaagttgttgttgctagtagaccgaggggtgggaatyactgaaatggaaaatctagatgacagtgctggggaagagaaaactagaacagctcagttgaagacaacctttactgcatgttgacgctgatttaggcaat

SEQ ID NO: 82838 - DNA, 201 bp, Homo sapiens
atataaataaataaataaataaataaaaataaagcgagatgttgccctcaaacttcacctggccccggtcctggtttgctaatggctgtgggtgggggttrctgtgggtgatgactgactggatacaaaatcctaagtaagtggcttcatgaaattttgcctaggactggactgtctttcttttaactgtgaaatgatgat

SEQ ID NO: 82839 - DNA, 201 bp, Homo sapiens; identical to SEQ ID NO: 82799

SEQ ID NO: 82840 - DNA, 201 bp, Homo sapiens
actttcgctaagtgagattaataattcagtagctggtccagaacgcacagcttgggaacgcagaggcccaggcctcatgtaatttcccactcccgtaactsaacgtgctgacccatgttgatgtctgccttcatccaggtggcaaatcagacatgctacgctgcccccttcaaacgagttcctcgtgttaggggcaaaggt

SEQ ID NO: 82841 - DNA, 201 bp, Homo sapiens; identical to SEQ ID NO: 82798

SEQ ID NO: 82842 - DNA, 201 bp, Homo sapiens
agcccgaggccttttccggctaaccagccctctctgcgctgtcttgtctcctgactcccaccctcaccattcacagaccatcacgacacagaggatgccawgttcttttagtaattcaccagctccatgcagggacatcacagggctgccctccatgagcagaggaggagggctgcctggcagagcgtttcacactccagg

SEQ ID NO: 82843 - DNA, 201 bp, Homo sapiens
aggtcaggagatcgagactatcctggtaacacggtaaaaccctgtctctactaaaagtacaaaaaattagctgggcgtggtggtgggcacctgtagtcccrgctactcgggaggctgaggcaggagaaaggcatgaatccaggaggcagagcttgcagtgagctgagatcacgccattgcactccagcctgggcaacagtg

SEQ ID NO: 82844 - DNA, 201 bp, Homo sapiens
ttggcctggatcctctctgtggatgcaggcctacccctcctcagtccagcctcatctactagaccagcttggccattcacttttcagatgtctgtgagcasaggactgcagactgaactctcactcaagttcttccatttgccaagcccgaggccttttccggctaaccagccctctctgcgctgtcttgtctcctgactc

SEQ ID NO: 82845 - DNA, 201 bp, Homo sapiens
gggacgtggccaggcacggtggctcatgcctgtaatcccagcactttgggaggccgaggcaggcggctcacgaggtcaggagatcgagactatcctggtarcacggtaaaaccctgtctctactaaaagtacaaaaaattagctgggcgtggtggtgggcacctgtagtcccagctactcgggaggctgaggcaggagaaa

SEQ ID NO: 82846 - DNA, 201 bp, Homo sapiens; identical to SEQ ID NO: 82802

SEQ ID NO: 82847 - DNA, 201 bp, Homo sapiens
gatgtctgtgagcacaggactgcagactgaactctcactcaagttcttccatttgccaagcccgaggccttttccggctaaccagccctctctgcgctgtsttgtctcctgactcccaccctcaccattcacagaccatcacgacacagaggatgccaagttcttttagtaattcaccagctccatgcagggacatcacag

SEQ ID NO: 82848 - DNA, 201 bp, Homo sapiens; identical to SEQ ID NO: 82803

SEQ ID NO: 82849 - DNA, 201 bp, Homo sapiens; identical to SEQ ID NO: 82815

SEQ ID NO: 82850 - DNA, 201 bp, Homo sapiens
ggccaggcacggtggctcatgcctgtaatcccagcactttgggaggccgaggcaggcggctcacgaggtcaggagatcgagactatcctggtaacacggtraaaccctgtctctactaaaagtacaaaaaattagctgggcgtggtggtgggcacctgtagtcccagctactcgggaggctgaggcaggagaaaggcatga

SEQ ID NO: 82851 - DNA, 201 bp, Homo sapiens; identical to SEQ ID NO: 82796

SEQ ID NO: 82852 - DNA, 201 bp, Homo sapiens; identical to SEQ ID NO: 82802

SEQ ID NO: 82853 - DNA, 164 bp, Homo sapiens; identical to SEQ ID NO: 82801

SEQ ID NO: 82854 - DNA, 201 bp, Homo sapiens
gacaacctcaacgtgcgggagactcattcgcttttcttccggagcctgaaggaccggggctttgagctcacattcaagaccgctgatgaccccagcctgtmtctcataaagtatggggaattcctctatgacattcagctggagtttgtccgcattgatccttttgtgaggaccttcctgaagaagaaaggtggcaaatac

SEQ ID NO: 82855 - DNA, 201 bp, Homo sapiens; identical to SEQ ID NO: 82798

SEQ ID NO: 82856 - DNA, 201 bp, Homo sapiens; identical to SEQ ID NO: 82814

SEQ ID NO: 82857 - DNA, 201 bp, Homo sapiens; identical to SEQ ID NO: 82810

SEQ ID NO: 82858 - DNA, 201 bp, Homo sapiens
ggagtgtgaaacgctctgccaggcagccctcctcctctgctcatggagggcagccctgtgatgtccctgcatggagctggtgaattactaaaagaacttgrcatcctctgtgtcgtgatggtctgtgaatggtgagggtgggagtcaggagacaagacagcgcagagagggctggttagccggaaaaggcctcgggcttgg

SEQ ID NO: 82859 - DNA, 201 bp, Homo sapiens
tcatctaagcctctggggtgaacatattctagccctgaagaatctgaagttagacaagatggttggctggctcctccaacaatcggccgccactttgttgkccaacaggctcacagagaagtgttgtgtggaaacaaaaatgaagatgctctttctggctaacctggagtgtgaaacgctctgccaggcagccctcctcct

SEQ ID NO: 82860 - DNA, 201 bp, Homo sapiens
agtctgcagtcctgtgctcacagacatctgaaaagtgaatggccaagctggtctagtagatgaggctggactgaggaggggtaggcctgcatccacagagwggatccaggccaaggcactggctgtcagtggcagagtttggctgtgacctttgcccctaacacgaggaactcgtttgaagggggcagcgtagcatgtctg

SEQ ID NO: 82861 - DNA, 201 bp, Homo sapiens
acctttgcccctaacacgaggaactcgtttgaagggggcagcgtagcatgtctgatttgccacctggatgaaggcagacatcaacatgggtcagcacgttsagttacgggagtgggaaattacatgaggcctgggcctctgcgttcccaagctgtgcgttctggaccagctactgaattattaatctcacttagcgaaagt

SEQ ID NO: 82862 - DNA, 201 bp, Homo sapiens
gaggctcagctacctgcactgcccgagtcagtgcctccagacgtgagacagttggtgagggcactgctccagcgagaggccagcaagagaccatctgcccragtagccgcaaatgtgcttcatctaagcctctggggtgaacatattctagccctgaagaatctgaagttagacaagatggttggctggctcctccaacaa

SEQ ID NO: 82863 - DNA, 201 bp, Homo sapiens
cctggagtgtgaaacgctctgccaggcagccctcctcctctgctcatggagggcagccctgtgatgtccctgcatggagctggtgaattactaaaagaacwtggcatcctctgtgtcgtgatggtctgtgaatggtgagggtgggagtcaggagacaagacagcgcagagagggctggttagccggaaaaggcctcgggct

SEQ ID NO: 82864 - DNA, 201 bp, Homo sapiens
gagtcaggagacaagacagcgcagagagggctggttagccggaaaaggcctcgggcttggcaaatggaagaacttgagtgagagttcagtctgcagtcctstgctcacagacatctgaaaagtgaatggccaagctggtctagtagatgaggctggactgaggaggggtaggcctgcatccacagagaggatccaggccaa

SEQ ID NO: 82865 - DNA, 201 bp, Homo sapiens
gcactgctccagcgagaggccagcaagagaccatctgcccgagtagccgcaaatgtgcttcatctaagcctctggggtgaacatattctagccctgaagamtctgaagttagacaagatggttggctggctcctccaacaatcggccgccactttgttggccaacaggctcacagagaagtgttgtgtggaaacaaaaatg

SEQ ID NO: 82866 - DNA, 201 bp, Homo sapiens
ctgtgatgtccctgcatggagctggtgaattactaaaagaacttggcatcctctgtgtcgtgatggtctgtgaatggtgagggtgggagtcaggagacaasacagcgcagagagggctggttagccggaaaaggcctcgggcttggcaaatggaagaacttgagtgagagttcagtctgcagtcctgtgctcacagacatc

SEQ ID NO: 82867 - DNA, 201 bp, Homo sapiens
acagcgcagagagggctggttagccggaaaaggcctcgggcttggcaaatggaagaacttgagtgagagttcagtctgcagtcctgtgctcacagacatcygaaaagtgaatggccaagctggtctagtagatgaggctggactgaggaggggtaggcctgcatccacagagaggatccaggccaaggcactggctgtcag

SEQ ID NO: 82868 - DNA, 201 bp, Homo sapiens
aggcctgggccatggccggacgctgttcctcgttatgaagaactatccctgtaccctgcgccagtacctttgtgtgaacacacccagcccccgcctcgccrccatgatgctgctgcagctgctggaaggcgtggaccatctggttcaacagggcatcgcgcacagagacctgaaatccgacaacatccttgtggagctgga

SEQ ID NO: 82869 - DNA, 201 bp, Homo sapiens
ttcagtctgcagtcctgtgctcacagacatctgaaaagtgaatggccaagctggtctagtagatgaggctggactgaggaggggtaggcctgcatccacakagaggatccaggccaaggcactggctgtcagtggcagagtttggctgtgacctttgcccctaacacgaggaactcgtttgaagggggcagcgtagcatgt

SEQ ID NO: 82870 - DNA, 201 bp, Homo sapiens
agctgtgcgttctggaccagctactgaattattaatctcacttagcgaaagtgacggatgagcagtaagtaagtaagtgtggggatttaaacttgagggtktccctcctgactagcctctcttacaggaattgtgaaatattaaatgcaaatttacaactgcagatgacgtatgtgccttgaactgaatatttggctttaa

SEQ ID NO: 82871 - DNA, 201 bp, Homo sapiens
tgactagcctctcttacaggaattgtgaaatattaaatgcaaatttacaactgcagatgacgtatgtgccttgaactgaatatttggctttaagaatgatycttatactctgaaggtgagaatattttgtgggcaggtatcaacattggggaagagatttcatgtctaactaactaactttatacatgatttttaggaagc

SEQ ID NO: 82872 - DNA, 201 bp, Homo sapiens
ccgagtggccttggctggggagtatggagcagtcacttacagaaaatccaagagaggtcccaagcaactagcccctcaccccaacatcatccgggttctcygcgccttcacctcttccgtgccgctgctgccaggggccctggtcgactaccctgatgtgctgccctcacgcctccaccctgaaggcctgggccatggccg

SEQ ID NO: 82873 - DNA, 201 bp, Homo sapiens
tatttgatgatgcgtcacctggaaagcaaaaggaaatccaagaaccagatcctacctatgaagaaaaaatgcaaactgaccgggcaaatagattcgagtayttattaaagcagacagaactttttgcacatttcattcaacctgctgctcagaagactccaacttcacctttgaagatgaaaccagggcgcccacgaataa

SEQ ID NO: 82874 - DNA, 201 bp, Homo sapiens
tgcacatttcattcaacctgctgctcagaagactccaacttcacctttgaagatgaaaccagggcgcccacgaataaaaaaagatgagaagcagaacttaytatccgttggcgattaccgacaccgtagaacagagcaagaggaggatgaagagctattaacagaaagctccaaagcaaccaatgtttgcactcgatttga

SEQ ID NO: 82875 - DNA, 201 bp, Homo sapiens
ggccaaggccggccttccttgacctcagtgacccgtctggccccgcccaccctcgtcgacgtgattcccgccgtgagccccgcggaagagcagaacgtttrggagtgtgcagctcctgggcccggctcaggcccgtcgcggaggcgcggcgcaggggagcgctcgggtgggagtctcgctcctccaccagtttattgcgac

SEQ ID NO: 82876 - DNA, 101 bp, Homo sapiens
tgttttaacctgtcgcttccctgtcacttctctggctttcctctcctgctaagcttttgtttcctggcagtaattaaaatcttctgtcagtgccacagcty

SEQ ID NO: 82877 - DNA, 201 bp, Homo sapiens
agaagaaaaggagaaggcagagaaaaagaaacgaggaccaaagccttcaacacagaaacgtaaaatggatggcgcacctgatggtcgaggaagaaaaaagragctgaaactatgaatatgtttttgtttcataatcactaactttaaaccagtagttctttaatttacgggtcttcataagatgtactgtacaatgctcaa

SEQ ID NO: 82878 - DNA, 201 bp, Homo sapiens
atggtcgaggaagaaaaaagaagctgaaactatgaatatgtttttgtttcataatcactaactttaaaccagtagttctttaatttacgggtcttcataaratgtactgtacaatgctcaattgttatgtcatttaaagacatcaggttcatctgtttactgagctagaaacatagtatgtagtttcacttttttaaatgc

SEQ ID NO: 82879 - DNA, 201 bp, Homo sapiens
cctttgcagaaatttgggtattttctttgtagtgctattgagtctcatctggaaagattatataaattgcattctccttgcttatgtgggtagaatgggaraagaaggcaagacaaagtatacttaaattctatgcatatttctgttatgctttctgttttttttagttgattctgaaatgaatatgccctattcttttga

SEQ ID NO: 82880 - DNA, 201 bp, Homo sapiens
tactaagtgtttcatttgatttatttttctattgtagttccatttgtgaagattgtgactttttgtttattagctataatttctacacttgtaaggcttamaaacaagttaaaaagaaaattgcaaataacatttgtccctttcagtcttcacctagttgtgtaattattttaattcactttgcctttgcagaaatttggg

SEQ ID NO: 82881 - DNA, 201 bp, Homo sapiens
gcagctcctgggcccggctcaggcccgtcgcggaggcgcggcgcaggggagcgctcgggtgggagtctcgctcctccaccagtttattgcgacgtagcatycaggcctaggcctccccgtccatccccgccggactcgggcctctggcagcagcgggtgacgcagacggaacatcatgtcgtccgcggccgagcctccgcc

SEQ ID NO: 82882 - DNA, 201 bp, Homo sapiens; identical to SEQ ID NO: 82873

SEQ ID NO: 82883 - DNA, 201 bp, Homo sapiens; identical to SEQ ID NO: 82874

SEQ ID NO: 82884 - DNA, 124 bp, Homo sapiens
ccccgcggaagagcagaacgtttrggagtgtgcagctcctgggcccggctcaggcccgtcgcggaggcgcggcgcaggggagcgctcgggtgggagtctcgctcctccaccagtttattgcgac

SEQ ID NO: 82885 - DNA, 201 bp, Homo sapiens; identical to SEQ ID NO: 82877

SEQ ID NO: 82886 - DNA, 201 bp, Homo sapiens; identical to SEQ ID NO: 82878

SEQ ID NO: 82887 - DNA, 201 bp, Homo sapiens; identical to SEQ ID NO: 82880

SEQ ID NO: 82888 - DNA, 201 bp, Homo sapiens; identical to SEQ ID NO: 82879

SEQ ID NO: 82889 - DNA, 201 bp, Homo sapiens; identical to SEQ ID NO: 82881

SEQ ID NO: 82890 - DNA, 201 bp, Homo sapiens
tattttgaatttttgtaagtgaagatttttaaactgactaacttaaaaaaatagattgtaattgatgtgccttaatttgcataaatcataaatgtatgtcytctctgtaattgttttaatgtgtgcttgaaatatccagaaaacctatggagttagtaaattctgggctgtcatatgtaggatagccactttttaggtata

SEQ ID NO: 82891 - DNA, 201 bp, Homo sapiens
aaatgatcaccttcacctttgctaatggaggcgtggccaccatgcgcaccagtgggacagagcccaaaatcaagtactatgcagagctgtgtgccccaccwgggaacagtgatcctgagcagctgaagaaggaactgaatgaactggtcagtgctattgaagaacattttttccagccacagaagtacaatctgcagccaa

SEQ ID NO: 82892 - DNA, 201 bp, Homo sapiens
aacttgttaagcaatatttttaagggccaaatgattcaaaacatcacaggtatttatgtgttttacaaagacctacattcctcattgtttcatgtttgacytttaaggtgaaaaaagaaaatggccaaacccaacaaactaacattcctactaaaaagttgagcttggacatattttgaatttttgtaagtgaagattttt

SEQ ID NO: 82893 - DNA, 201 bp, Homo sapiens
gagcagctgaagaaggaactgaatgaactggtcagtgctattgaagaacattttttccagccacagaagtacaatctgcagccaaaagcagactaaaatartccagccttgggtatacttgcatttacctacaattaagctgggtttaacttgttaagcaatatttttaagggccaaatgattcaaaacatcacaggtatt

SEQ ID NO: 82894 - DNA, 201 bp, Homo sapiens
caacagtgaaatacccgaatcccgaagaggggaaaggtgtcttgactttgtcttttgctttggctgacaaaaccaaggccagaattgttttagctaacgayccggatgctgatagacttgctgtggcagaaaagcaagacagtggtgaatggagggtgttttcaggcaatgagttgggggccctcctgggctggtggcttt

SEQ ID NO: 82895 - DNA, 201 bp, Homo sapiens
caaccaagaatttgtctttgtctcagcaactaaaggccatttatgtggagtatggctaccatattactaaagcttcctattttatctgccatgatcaagamaccattaagaaattatttgaaaacctcagaaactacgatggaaaaaataattatccaaaagcttgtggcaaatttgaaatttctgccattagggacctta

SEQ ID NO: 82896 - DNA, 201 bp, Homo sapiens
ctcgtatgaatgacttgaccatcatccagactacacagggattttgcagatacctggaaaaacaattcagtgacttaaagcagaaaggcatcgtgatcagytttgacgcccgagctcatccatccagtgggggtagcagcagaaggtttgcccgacttgctgcaaccacatttatcagtcaggggattcctgtgtacctct

SEQ ID NO: 82897 - DNA, 201 bp, Homo sapiens
ggagcaagagcaagaggctcttcctcgtaacgcgagcccagtcccccttcaaagtttatcattaccagttcaagatccagttcatcaaccaaactgagacrccaatacaaacaacttttaccatgtcactactcggaacaaaagagaaaatgcagaaaattcccatcactctgggcaaaggaattgctagtaataaaacgt

SEQ ID NO: 82898 - DNA, 201 bp, Homo sapiens
ttcctagagctctacagacatattgcccagcacggcttcaatgccatcacccagaccataaaatgctcccacgagcgatcggtgcaccttttcatcgactycttgctgcacgccggcacgcagagcatggcctacccgtgtggtgacatgaacagcttcagccagggcctgtgcctgagctgcaagaagggccgctgcaac

SEQ ID NO: 82899 - DNA, 201 bp, Homo sapiens
gatgtggatatcggcgagctgatcatgatcaagttcaagtgggaaaacagtgcagtgtgggccaatgtctgggacacggtccagaccatcatcccatggarcacagggccgcgccactcaggcctcgttctgaagacgatcagagtcaaagcaggagaaacccagcaaagaatgacattttgttcagaaaacacagatgac

SEQ ID NO: 82900 - DNA, 201 bp, Homo sapiens
tttaccatgtcactactcggaacaaaagagaaaatgcagaaaattcccatcactctgggcaaaggaattgctagtaataaaacgtattcctttcttatcaygctggatgtggatatcggcgagctgatcatgatcaagttcaagtgggaaaacagtgcagtgtgggccaatgtctgggacacggtccagaccatcatccca

SEQ ID NO: 82901 - DNA, 201 bp, Homo sapiens
ctgtcagattcgaatcaatcatccggacacgttacaggagtgcggcttcaactcctccctgcctctggtgatgataatccacgggtggtcggtggacggcrtgctagaaaactggatctggcagatggtggccgcgctgaagtctcagccggcccagccagtgaacgtggggctggtggactggatcaccctggcccacga

SEQ ID NO: 82902 - DNA, 201 bp, Homo sapiens
taattgggtacagcctgggtgcacacgtgtcaggatttgccggcagttccatcggtggaacgcacaagattgggagaatcacagggctggatgccgcgggrcctttgtttgagggaagtgcccccagcaatcgtctttctccagatgatgccagttttgtggatgccattcatacctttacccgggagcacatgggcctga

SEQ ID NO: 82903 - DNA, 141 bp, Homo sapiens
gaaataaagtctaaaacatcaaagcgaaagatcagatgagatttaatgaagacccagtgtaaagaataaatgaatcttactccttatctggaatggctgcyttatttagaagccaaaattacataaagaatctcacacaaa

SEQ ID NO: 82904 - DNA, 201 bp, Homo sapiens
ggtggaacgcacaagattgggagaatcacagggctggatgccgcgggacctttgtttgagggaagtgcccccagcaatcgtctttctccagatgatgccarttttgtggatgccattcatacctttacccgggagcacatgggcctgagcgtgggcatcaaacagcccataggacactatgacttctatcccaacgggggc

SEQ ID NO: 82905 - DNA, 201 bp, Homo sapiens
ggatcaccctggcccacgaccactacaccatcgccgtccgcaacacccgccttgtgggcaaggaggtcgcggctcttctccggtggctggaggaatctgtkcaactctctcgaagccatgttcacctaattgggtacagcctgggtgcacacgtgtcaggatttgccggcagttccatcggtggaacgcacaagattggga

SEQ ID NO: 82906 - DNA, 201 bp, Homo sapiens
atcttatattgcagagccatttggaagaagagctcaagctgttgaaacaaacaaaacgctgcatgagatgaagaccagattcctgctctttggagaaaccmatcagggctgtcagattcgaatcaatcatccggacacgttacaggagtgcggcttcaactcctccctgcctctggtgatgataatccacgggtggtcggt

SEQ ID NO: 82907 - DNA, 201 bp, Homo sapiens
caggcctcgttctgaagacgatcagagtcaaagcaggagaaacccagcaaagaatgacattttgttcagaaaacacagatgacctactacttcgcccaacmcaggaaaaaatcttcgtgaaatgtgaaataaagtctaaaacatcaaagcgaaagatcagatgagatttaatgaagacccagtgtaaagaataaatgaatc

SEQ ID NO: 82908 - DNA, 201 bp, Homo sapiens
aaatgctcccacgagcgatcggtgcaccttttcatcgactccttgctgcacgccggcacgcagagcatggcctacccgtgtggtgacatgaacagcttcakccagggcctgtgcctgagctgcaagaagggccgctgcaacacgctgggctaccacgtccgccaggagccgcggagcaagagcaagaggctcttcctcgta

SEQ ID NO: 82909 - DNA, 201 bp, Homo sapiens
cagggctggatgccgcgggacctttgtttgagggaagtgcccccagcaatcgtctttctccagatgatgccagttttgtggatgccattcatacctttacscgggagcacatgggcctgagcgtgggcatcaaacagcccataggacactatgacttctatcccaacgggggctccttccagcctggctgccacttcctag

SEQ ID NO: 82910 - DNA, 201 bp, Homo sapiens
cgctgggctaccacgtccgccaggagccgcggagcaagagcaagaggctcttcctcgtaacgcgagcccagtcccccttcaaagtttatcattaccagttmaagatccagttcatcaaccaaactgagacgccaatacaaacaacttttaccatgtcactactcggaacaaaagagaaaatgcagaaaattcccatcactc

SEQ ID NO: 82911 - DNA, 201 bp, Homo sapiens; identical to SEQ ID NO: 82897

SEQ ID NO: 82912 - DNA, 201 bp, Homo sapiens; identical to SEQ ID NO: 82898

SEQ ID NO: 82913 - DNA, 201 bp, Homo sapiens; identical to SEQ ID NO: 82899

SEQ ID NO: 82914 - DNA, 201 bp, Homo sapiens; identical to SEQ ID NO: 82900

SEQ ID NO: 82915 - DNA, 201 bp, Homo sapiens; identical to SEQ ID NO: 82901

SEQ ID NO: 82916 - DNA, 201 bp, Homo sapiens; identical to SEQ ID NO: 82902

SEQ ID NO: 82917 - DNA, 141 bp, Homo sapiens; identical to SEQ ID NO: 82903

SEQ ID NO: 82918 - DNA, 201 bp, Homo sapiens; identical to SEQ ID NO: 82904

SEQ ID NO: 82919 - DNA, 201 bp, Homo sapiens; identical to SEQ ID NO: 82905

SEQ ID NO: 82920 - DNA, 201 bp, Homo sapiens
aagcctgaaaccagagccatttggaagaagagctcaagctgttgaaacaaacaaaacgctgcatgagatgaagaccagattcctgctctttggagaaaccmatcagggctgtcagattcgaatcaatcatccggacacgttacaggagtgcggcttcaactcctccctgcctctggtgatgataatccacgggtggtcggt

SEQ ID NO: 82921 - DNA, 201 bp, Homo sapiens; identical to SEQ ID NO: 82907

SEQ ID NO: 82922 - DNA, 201 bp, Homo sapiens; identical to SEQ ID NO: 82908

SEQ ID NO: 82923 - DNA, 201 bp, Homo sapiens; identical to SEQ ID NO: 82909

SEQ ID NO: 82924 - DNA, 201 bp, Homo sapiens; identical to SEQ ID NO: 82910

SEQ ID NO: 82925 - DNA, 201 bp, Homo sapiens
aacgacctggacatgcagctgtatgactacgccaaggacctcttccagcagcgctaccagtacaagcggcagctggagcgcagggagcagcgcctgaggarccgcgaggagcgtctgctgcaccgggccaaggaggcgctgccgcgggaggacgccgacgagccgggccgcgtgcccaccgaggactacatgagccacatc

SEQ ID NO: 82926 - DNA, 201 bp, Homo sapiens
aggaggccaaagctgatgttcaggccccacccactccctacagtcctcagaccaaggaggggtttgggtagtaggcccgagctgcattgccggccttcctygggccaactggcagcccaggagtggggaggctttggccagggatgctgccacttgtgcgtgagtccgcggctggcccttggaggtgaccatccaggcagg

SEQ ID NO: 82927 - DNA, 201 bp, Homo sapiens
aggccacctggctggggttggtgggggtcctctctcctgccccagcttccactcagccaccacagttgccacaccatggggtggagacgtgggtcaccacsggcttgggagcaagcgccttctgcagcacaggaagccgaagctggggtcaggtgaggtcgctacccctggaggtctggcataagggccccaccctcaggt

SEQ ID NO: 82928 - DNA, 201 bp, Homo sapiens
ctgactcagagctagggcagtgggctctgcaggccacctggctggggttggtgggggtcctctctcctgccccagcttccactcagccaccacagttgccmcaccatggggtggagacgtgggtcaccacgggcttgggagcaagcgccttctgcagcacaggaagccgaagctggggtcaggtgaggtcgctacccctgg

SEQ ID NO: 82929 - DNA, 201 bp, Homo sapiens
ccctaggaggccaagctggtgtctctaggagggcccacacgggcaccctggatcccccagagagcagattggtgtgctcaggccgcaggctgactcagagstagggcagtgggctctgcaggccacctggctggggttggtgggggtcctctctcctgccccagcttccactcagccaccacagttgccacaccatggggt

SEQ ID NO: 82930 - DNA, 201 bp, Homo sapiens
agtaggcccgagctgcattgccggccttcctcgggccaactggcagcccaggagtggggaggctttggccagggatgctgccacttgtgcgtgagtccgcrgctggcccttggaggtgaccatccaggcaggcctggctcagactggaagggctggggaccgagggctcccctgcctctgttctcctttctgacccactgg

SEQ ID NO: 82931 - DNA, 201 bp, Homo sapiens
ggacgccgacgagccgggccgcgtgcccaccgaggactacatgagccacatcattgagaagtggtagtggcggtggtggccacggggaggcctcttggggkgtgtgggggataaaacaggacagacgacaggtccacccaagactgtcaagggatgagcatcccaaacctgctccacagaggtagctgcgtcctgaaaaaa

SEQ ID NO: 82932 - DNA, 201 bp, Homo sapiens
aagcacgtgccctgtgccctgtccccattccttatgccctaggaggccaagctggtgtctctaggagggcccacacgggcaccctggatcccccagagagyagattggtgtgctcaggccgcaggctgactcagagctagggcagtgggctctgcaggccacctggctggggttggtgggggtcctctctcctgccccagc

SEQ ID NO: 82933 - DNA, 201 bp, Homo sapiens
tggacctgttccccacgcccgacccccactacgagaagaagtactacttcccggtccgcgagctggagcgctcgctgcgcttcgacatgaagggcgacgamgtgatcgtcttcctgcacatccagaagacgggcggcaccaccttcggccgccacctcgtgcagaacgtacgcctcgaggtgccgtgcgactgccggcccg

SEQ ID NO: 82934 - DNA, 201 bp, Homo sapiens
ctgaggagccgcgaggagcgtctgctgcaccgggccaaggaggcgctgccgcgggaggacgccgacgagccgggccgcgtgcccaccgaggactacatgakccacatcattgagaagtggtagtggcggtggtggccacggggaggcctcttggggtgtgtgggggataaaacaggacagacgacaggtccacccaagact

SEQ ID NO: 82935 - DNA, 201 bp, Homo sapiens
gctaccagtacaagcggcagctggagcgcagggagcagcgcctgaggagccgcgaggagcgtctgctgcaccgggccaaggaggcgctgccgcgggaggaygccgacgagccgggccgcgtgcccaccgaggactacatgagccacatcattgagaagtggtagtggcggtggtggccacggggaggcctcttggggtgtg

SEQ ID NO: 82936 - DNA, 201 bp, Homo sapiens
tgtgcttcatgctcatcttgtaccagtacgcgggcccaggactgagcctgggcgcgcccggcggcggcgcgccgcccgacgacctggacctgttccccacrcccgacccccactacgagaagaagtactacttcccggtccgcgagctggagcgctcgctgcgcttcgacatgaagggcgacgacgtgatcgtcttcctgc

SEQ ID NO: 82937 - DNA, 201 bp, Homo sapiens
ggtggcgggcccggtgtgcttcatgctcatcttgtaccagtacgcgggcccaggactgagcctgggcgcgcccggcggcggcgcgccgcccgacgacctgkacctgttccccacgcccgacccccactacgagaagaagtactacttcccggtccgcgagctggagcgctcgctgcgcttcgacatgaagggcgacgacgt

SEQ ID NO: 82938 - DNA, 201 bp, Homo sapiens
acctcttccagcagcgctaccagtacaagcggcagctggagcgcagggagcagcgcctgaggagccgcgaggagcgtctgctgcaccgggccaaggaggcrctgccgcgggaggacgccgacgagccgggccgcgtgcccaccgaggactacatgagccacatcattgagaagtggtagtggcggtggtggccacggggag

SEQ ID NO: 82939 - DNA, 201 bp, Homo sapiens
gctcatcttgtaccagtacgcgggcccaggactgagcctgggcgcgcccggcggcggcgcgccgcccgacgacctggacctgttccccacgcccgaccccsactacgagaagaagtactacttcccggtccgcgagctggagcgctcgctgcgcttcgacatgaagggcgacgacgtgatcgtcttcctgcacatccagaa

SEQ ID NO: 82940 - DNA, 201 bp, Homo sapiens
gtacgcgggcccaggactgagcctgggcgcgcccggcggcggcgcgccgcccgacgacctggacctgttccccacgcccgacccccactacgagaagaagyactacttcccggtccgcgagctggagcgctcgctgcgcttcgacatgaagggcgacgacgtgatcgtcttcctgcacatccagaagacgggcggcaccac

SEQ ID NO: 82941 - DNA, 201 bp, Homo sapiens
tgagcctgggcgcgcccggcggcggcgcgccgcccgacgacctggacctgttccccacgcccgacccccactacgagaagaagtactacttcccggtccgygagctggagcgctcgctgcgcttcgacatgaagggcgacgacgtgatcgtcttcctgcacatccagaagacgggcggcaccaccttcggccgccacctcg

SEQ ID NO: 82942 - DNA, 201 bp, Homo sapiens
tctggctgcccccaatgccccgaggcctggggagcccccagctcacccatctgtagctccctcaaagtcagggcccaccccatctgaggcagagaagactygagtccagcccccaggaagcctgctcccctctctggcccatggtcctgcttcatgctttgggtcaggaggccaaagctgatgttcaggccccacccactc

SEQ ID NO: 82943 - DNA, 201 bp, Homo sapiens
tcggacactcaacatgggggtgggtgcactccttggaggaggaggaacatgttcaggggatcgtgaggtcttgcacaagccacgaacagcagaactgcccmcaaaacaaggctgtgaacttttcgggaactggaactgtttaacttgaacccaggattgtttaaagctttatttatttatagcttcttcttaaaaaaaagt

SEQ ID NO: 82944 - DNA, 141 bp, Homo sapiens
gcagaactgcccacaaaacaaggctgtgaacttttcgggaactggaactgtttaacttgaacccaggattgtttaaagctttatttatttatagcttcttyttaaaaaaaagtgttgaagaaattttttggttattcatac

SEQ ID NO: 82945 - DNA, 201 bp, Homo sapiens
gcacaggaagccgaagctggggtcaggtgaggtcgctacccctggaggtctggcataagggccccaccctcaggtctcctacactggccccattttacttyggggtccaaggacaggatggtcaacagggcagggtggacagcgtgccagcgccgcgcagggccacctccctgggtggatgcatcacactaaggaagcgag

SEQ ID NO: 82946 - DNA, 201 bp, Homo sapiens
ctccctgggtggatgcatcacactaaggaagcgagtgccaaggggatttagtggtgtggttctttcaaagggaggtcagggtaaatgggaatctgctcggmcactcaacatgggggtgggtgcactccttggaggaggaggaacatgttcaggggatcgtgaggtcttgcacaagccacgaacagcagaactgcccacaaa

SEQ ID NO: 82947 - DNA, 201 bp, Homo sapiens
aggtctcctacactggccccattttactttggggtccaaggacaggatggtcaacagggcagggtggacagcgtgccagcgccgcgcagggccacctcccwgggtggatgcatcacactaaggaagcgagtgccaaggggatttagtggtgtggttctttcaaagggaggtcagggtaaatgggaatctgctcggacactc

SEQ ID NO: 82948 - DNA, 201 bp, Homo sapiens
aaagccatgttgcatatccgttgtaagcacgtgccctgtgccctgtccccattccttatgccctaggaggccaagctggtgtctctaggagggcccacacrggcaccctggatcccccagagagcagattggtgtgctcaggccgcaggctgactcagagctagggcagtgggctctgcaggccacctggctggggttggt

SEQ ID NO: 82949 - DNA, 201 bp, Homo sapiens
gacagcgtgccagcgccgcgcagggccacctccctgggtggatgcatcacactaaggaagcgagtgccaaggggatttagtggtgtggttctttcaaaggraggtcagggtaaatgggaatctgctcggacactcaacatgggggtgggtgcactccttggaggaggaggaacatgttcaggggatcgtgaggtcttgcac

SEQ ID NO: 82950 - DNA, 201 bp, Homo sapiens
tccttgcatttccccatgctccccaccccctggcaaaaggctggccatgctctgttcccagcagccgcgcaggtttccccactggctgcaatggccctacyaaaagccatgttgcatatccgttgtaagcacgtgccctgtgccctgtccccattccttatgccctaggaggccaagctggtgtctctaggagggcccaca

SEQ ID NO: 82951 - DNA, 201 bp, Homo sapiens
gggggataaaacaggacagacgacaggtccacccaagactgtcaagggatgagcatcccaaacctgctccacagaggtagctgcgtcctgaaaaaaaacasagcagggatgtagtggggctgggcagggatgggggcttgagaaatcaacaggtgcagcccagtgggtcagaggaaagcgtgctcgaaggatgccatggtc

SEQ ID NO: 82952 - DNA, 201 bp, Homo sapiens
gaggagctcaacgacctggacatgcagctgtatgactacgccaaggacctcttccagcagcgctaccagtacaagcggcagctggagcgcagggagcagcrcctgaggagccgcgaggagcgtctgctgcaccgggccaaggaggcgctgccgcgggaggacgccgacgagccgggccgcgtgcccaccgaggactacatg

SEQ ID NO: 82953 - DNA, 201 bp, Homo sapiens
agcgccgcgcagggccacctccctgggtggatgcatcacactaaggaagcgagtgccaaggggatttagtggtgtggttctttcaaagggaggtcagggtmaatgggaatctgctcggacactcaacatgggggtgggtgcactccttggaggaggaggaacatgttcaggggatcgtgaggtcttgcacaagccacgaac

SEQ ID NO: 82954 - DNA, 201 bp, Homo sapiens
gcccacgcctgaggagctgccgccctgctacgagggcacggactggtcgggctgcacgctacaggagttcatggactgcccgtacaacctggccaacaacmgccaggtgcgcatgctggccgacctgagcctggtgggctgctacaacctgtccttcatccccgagggcaagcgggcccagctgctgctcgagagcgccaa

SEQ ID NO: 82955 - DNA, 201 bp, Homo sapiens
ttccccatgctccccaccccctggcaaaaggctggccatgctctgttcccagcagccgcgcaggtttccccactggctgcaatggccctactaaaagccaygttgcatatccgttgtaagcacgtgccctgtgccctgtccccattccttatgccctaggaggccaagctggtgtctctaggagggcccacacgggcaccc

SEQ ID NO: 82956 - DNA, 201 bp, Homo sapiens
ggaagttctactacatcaccctgctacgagaccccgtgtcccgctacctgagcgagtggcggcatgtgcagaggggtgccacgtggaagacgtcgttgcayatgtgtgatgggcgcacgcccacgcctgaggagctgccgccctgctacgagggcacggactggtcgggctgcacgctacaggagttcatggactgcccgt

SEQ ID NO: 82957 - DNA, 201 bp, Homo sapiens
cgcccaggaagttctactacatcaccctgctacgagaccccgtgtcccgctacctgagcgagtggcggcatgtgcagaggggtgccacgtggaagacgtckttgcatatgtgtgatgggcgcacgcccacgcctgaggagctgccgccctgctacgagggcacggactggtcgggctgcacgctacaggagttcatggact

SEQ ID NO: 82958 - DNA, 201 bp, Homo sapiens
caggaggccaaagctgatgttcaggccccacccactccctacagtcctcagaccaaggaggggtttgggtagtaggcccgagctgcattgccggccttcckcgggccaactggcagcccaggagtggggaggctttggccagggatgctgccacttgtgcgtgagtccgcggctggcccttggaggtgaccatccaggcag

SEQ ID NO: 82959 - DNA, 201 bp, Homo sapiens
ttcgacatgaagggcgacgacgtgatcgtcttcctgcacatccagaagacgggcggcaccaccttcggccgccacctcgtgcagaacgtacgcctcgaggkgccgtgcgactgccggcccggccagaagaagtgcacctgctaccggcccaaccgccgcgagacttggctcttctcccgcttctccaccggctggagctgc

SEQ ID NO: 82960 - DNA, 201 bp, Homo sapiens
tgaagggcgacgacgtgatcgtcttcctgcacatccagaagacgggcggcaccaccttcggccgccacctcgtgcagaacgtacgcctcgaggtgccgtgygactgccggcccggccagaagaagtgcacctgctaccggcccaaccgccgcgagacttggctcttctcccgcttctccaccggctggagctgcgggctgc

SEQ ID NO: 82961 - DNA, 201 bp, Homo sapiens
agtacgcgggcccaggactgagcctgggcgcgcccggcggcggcgcgccgcccgacgacctggacctgttccccacgcccgacccccactacgagaagaaktactacttcccggtccgcgagctggagcgctcgctgcgcttcgacatgaagggcgacgacgtgatcgtcttcctgcacatccagaagacgggcggcacca

SEQ ID NO: 82962 - DNA, 201 bp, Homo sapiens
ggttctttcaaagggaggtcagggtaaatgggaatctgctcggacactcaacatgggggtgggtgcactccttggaggaggaggaacatgttcaggggatygtgaggtcttgcacaagccacgaacagcagaactgcccacaaaacaaggctgtgaacttttcgggaactggaactgtttaacttgaacccaggattgttt

SEQ ID NO: 82963 - DNA, 201 bp, Homo sapiens
atttagtggtgtggttctttcaaagggaggtcagggtaaatgggaatctgctcggacactcaacatgggggtgggtgcactccttggaggaggaggaacaygttcaggggatcgtgaggtcttgcacaagccacgaacagcagaactgcccacaaaacaaggctgtgaacttttcgggaactggaactgtttaacttgaac

SEQ ID NO: 82964 - DNA, 201 bp, Homo sapiens
ctttggggtccaaggacaggatggtcaacagggcagggtggacagcgtgccagcgccgcgcagggccacctccctgggtggatgcatcacactaaggaagygagtgccaaggggatttagtggtgtggttctttcaaagggaggtcagggtaaatgggaatctgctcggacactcaacatgggggtgggtgcactccttgg

SEQ ID NO: 82965 - DNA, 201 bp, Homo sapiens
tgcatatgtgtgatgggcgcacgcccacgcctgaggagctgccgccctgctacgagggcacggactggtcgggctgcacgctacaggagttcatggactgyccgtacaacctggccaacaaccgccaggtgcgcatgctggccgacctgagcctggtgggctgctacaacctgtccttcatccccgagggcaagcgggccc

SEQ ID NO: 82966 - DNA, 201 bp, Homo sapiens; identical to SEQ ID NO: 82925

SEQ ID NO: 82967 - DNA, 201 bp, Homo sapiens; identical to SEQ ID NO: 82927

SEQ ID NO: 82968 - DNA, 201 bp, Homo sapiens; identical to SEQ ID NO: 82928

SEQ ID NO: 82969 - DNA, 201 bp, Homo sapiens; identical to SEQ ID NO: 82929

SEQ ID NO: 82970 - DNA, 201 bp, Homo sapiens; identical to SEQ ID NO: 82931

SEQ ID NO: 82971 - DNA, 201 bp, Homo sapiens; identical to SEQ ID NO: 82932

SEQ ID NO: 82972 - DNA, 201 bp, Homo sapiens; identical to SEQ ID NO: 82933

SEQ ID NO: 82973 - DNA, 201 bp, Homo sapiens; identical to SEQ ID NO: 82934

SEQ ID NO: 82974 - DNA, 201 bp, Homo sapiens; identical to SEQ ID NO: 82936

SEQ ID NO: 82975 - DNA, 201 bp, Homo sapiens; identical to SEQ ID NO: 82935

SEQ ID NO: 82976 - DNA, 201 bp, Homo sapiens; identical to SEQ ID NO: 82937

SEQ ID NO: 82977 - DNA, 201 bp, Homo sapiens; identical to SEQ ID NO: 82938

SEQ ID NO: 82978 - DNA, 201 bp, Homo sapiens; identical to SEQ ID NO: 82939

SEQ ID NO: 82979 - DNA, 201 bp, Homo sapiens; identical to SEQ ID NO: 82940

SEQ ID NO: 82980 - DNA, 201 bp, Homo sapiens; identical to SEQ ID NO: 82941

SEQ ID NO: 82981 - DNA, 201 bp, Homo sapiens
tctggctgcccccaatgccccgaggcctggggagcccccagctcacccatctgtagctccctcaaagtcagggcccaccccatctgaggcagagaagactygagtccagcccccaggaagcctgctcccctctctggcccattctgacccactgggatttgctagcaggctgccccagccccatcaccgaaacacatactc

SEQ ID NO: 82982 - DNA, 201 bp, Homo sapiens; identical to SEQ ID NO: 82943

SEQ ID NO: 82983 - DNA, 141 bp, Homo sapiens; identical to SEQ ID NO: 82944

SEQ ID NO: 82984 - DNA, 201 bp, Homo sapiens; identical to SEQ ID NO: 82945

SEQ ID NO: 82985 - DNA, 201 bp, Homo sapiens; identical to SEQ ID NO: 82946

SEQ ID NO: 82986 - DNA, 201 bp, Homo sapiens; identical to SEQ ID NO: 82947

SEQ ID NO: 82987 - DNA, 201 bp, Homo sapiens; identical to SEQ ID NO: 82948

SEQ ID NO: 82988 - DNA, 201 bp, Homo sapiens; identical to SEQ ID NO: 82949

SEQ ID NO: 82989 - DNA, 201 bp, Homo sapiens; identical to SEQ ID NO: 82950

SEQ ID NO: 82990 - DNA, 201 bp, Homo sapiens; identical to SEQ ID NO: 82951

SEQ ID NO: 82991 - DNA, 201 bp, Homo sapiens; identical to SEQ ID NO: 82952

SEQ ID NO: 82992 - DNA, 201 bp, Homo sapiens; identical to SEQ ID NO: 82953

SEQ ID NO: 82993 - DNA, 201 bp, Homo sapiens; identical to SEQ ID NO: 82954

SEQ ID NO: 82994 - DNA, 201 bp, Homo sapiens; identical to SEQ ID NO: 82955

SEQ ID NO: 82995 - DNA, 201 bp, Homo sapiens; identical to SEQ ID NO: 82956

SEQ ID NO: 82996 - DNA, 201 bp, Homo sapiens; identical to SEQ ID NO: 82957

SEQ ID NO: 82997 - DNA, 201 bp, Homo sapiens; identical to SEQ ID NO: 82959

SEQ ID NO: 82998 - DNA, 201 bp, Homo sapiens; identical to SEQ ID NO: 82960

SEQ ID NO: 82999 - DNA, 201 bp, Homo sapiens; identical to SEQ ID NO: 82961

SEQ ID NO: 83000 - DNA, 201 bp, Homo sapiens; identical to SEQ ID NO: 82962

SEQ ID NO: 83001 - DNA, 201 bp, Homo sapiens; identical to SEQ ID NO: 82963

SEQ ID NO: 83002 - DNA, 201 bp, Homo sapiens; identical to SEQ ID NO: 82964

SEQ ID NO: 83003 - DNA, 201 bp, Homo sapiens; identical to SEQ ID NO: 82965

SEQ ID NO: 83004 - DNA, 201 bp, Homo sapiens; identical to SEQ ID NO: 82925

SEQ ID NO: 83005 - DNA, 201 bp, Homo sapiens; identical to SEQ ID NO: 82926

SEQ ID NO: 83006 - DNA, 201 bp, Homo sapiens; identical to SEQ ID NO: 82927

SEQ ID NO: 83007 - DNA, 201 bp, Homo sapiens; identical to SEQ ID NO: 82928

SEQ ID NO: 83008 - DNA, 201 bp, Homo sapiens; identical to SEQ ID NO: 82929

SEQ ID NO: 83009 - DNA, 201 bp, Homo sapiens; identical to SEQ ID NO: 82930

SEQ ID NO: 83010 - DNA, 201 bp, Homo sapiens; identical to SEQ ID NO: 82931

SEQ ID NO: 83011 - DNA, 201 bp, Homo sapiens; identical to SEQ ID NO: 82932

SEQ ID NO: 83012 - DNA, 201 bp, Homo sapiens; identical to SEQ ID NO: 82933

SEQ ID NO: 83013 - DNA, 201 bp, Homo sapiens; identical to SEQ ID NO: 82934

SEQ ID NO: 83014 - DNA, 201 bp, Homo sapiens; identical to SEQ ID NO: 82935

SEQ ID NO: 83015 - DNA, 201 bp, Homo sapiens; identical to SEQ ID NO: 82936

SEQ ID NO: 83016 - DNA, 201 bp, Homo sapiens; identical to SEQ ID NO: 82937

SEQ ID NO: 83017 - DNA, 201 bp, Homo sapiens; identical to SEQ ID NO: 82938

SEQ ID NO: 83018 - DNA, 201 bp, Homo sapiens; identical to SEQ ID NO: 82939

SEQ ID NO: 83019 - DNA, 201 bp, Homo sapiens; identical to SEQ ID NO: 82940

SEQ ID NO: 83020 - DNA, 201 bp, Homo sapiens; identical to SEQ ID NO: 82941

SEQ ID NO: 83021 - DNA, 201 bp, Homo sapiens; identical to SEQ ID NO: 82942

SEQ ID NO: 83022 - DNA, 119 bp, Homo sapiens
gaaacaggcagggagtggagctaacagcttagtcaccaggacccccagacctgcaaacgtcccctcctggaaggggaagccaggaacagcagaactgcccmcaaaacaaggctgtgaac

SEQ ID NO: 83023 - DNA, 201 bp, Homo sapiens; identical to SEQ ID NO: 82945

SEQ ID NO: 83024 - DNA, 201 bp, Homo sapiens
ggcaccttggcttcccggcaggaggtggacacccagccagaggcctggctcaaggtgacctcaccttcaccatgggcttcctgggtgcgcgggcctgagcrcaggttgttttgtacatattggaatatgtgttaacttatgccccgcatcccaactcacacggaagcacgggtcttgtctcagtctcttcgctgcatttgg

SEQ ID NO: 83025 - DNA, 201 bp, Homo sapiens
ctccctgggtggatgcatcacactaaggaagcgagtgccaaggggatttagtggtgtggttctttcaaagggaggtcagggtaaatgggaatctgctcggmcactcaacatgggggtgggtgcactccttggaggaggaggaacatgttcaggggatcgtgaggtcttgcacaagccacgtggggcaccttggcttcccgg

SEQ ID NO: 83026 - DNA, 201 bp, Homo sapiens; identical to SEQ ID NO: 82947

SEQ ID NO: 83027 - DNA, 201 bp, Homo sapiens
gtgttaacttatgccccgcatcccaactcacacggaagcacgggtcttgtctcagtctcttcgctgcatttggaaagcagtctcctctcgggccagcgccrggctgaggtgtccagaggcggcggcagctggcagtgccctcagcccccaagtgtccagcctggcacttcccattcaggccacctgctttgggtcaacagt

SEQ ID NO: 83028 - DNA, 201 bp, Homo sapiens; identical to SEQ ID NO: 82948

SEQ ID NO: 83029 - DNA, 201 bp, Homo sapiens; identical to SEQ ID NO: 82949

SEQ ID NO: 83030 - DNA, 201 bp, Homo sapiens; identical to SEQ ID NO: 82950

SEQ ID NO: 83031 - DNA, 201 bp, Homo sapiens; identical to SEQ ID NO: 82951

SEQ ID NO: 83032 - DNA, 201 bp, Homo sapiens; identical to SEQ ID NO: 82952

SEQ ID NO: 83033 - DNA, 201 bp, Homo sapiens
agcgccgcgcagggccacctccctgggtggatgcatcacactaaggaagcgagtgccaaggggatttagtggtgtggttctttcaaagggaggtcagggtmaatgggaatctgctcggacactcaacatgggggtgggtgcactccttggaggaggaggaacatgttcaggggatcgtgaggtcttgcacaagccacgtgg

SEQ ID NO: 83034 - DNA, 201 bp, Homo sapiens; identical to SEQ ID NO: 82954

SEQ ID NO: 83035 - DNA, 201 bp, Homo sapiens; identical to SEQ ID NO: 82955

SEQ ID NO: 83036 - DNA, 201 bp, Homo sapiens; identical to SEQ ID NO: 82956

SEQ ID NO: 83037 - DNA, 201 bp, Homo sapiens; identical to SEQ ID NO: 82957

SEQ ID NO: 83038 - DNA, 201 bp, Homo sapiens; identical to SEQ ID NO: 82958

SEQ ID NO: 83039 - DNA, 201 bp, Homo sapiens; identical to SEQ ID NO: 82959

SEQ ID NO: 83040 - DNA, 201 bp, Homo sapiens; identical to SEQ ID NO: 82960

SEQ ID NO: 83041 - DNA, 201 bp, Homo sapiens; identical to SEQ ID NO: 82961

SEQ ID NO: 83042 - DNA, 201 bp, Homo sapiens
ggttctttcaaagggaggtcagggtaaatgggaatctgctcggacactcaacatgggggtgggtgcactccttggaggaggaggaacatgttcaggggatygtgaggtcttgcacaagccacgtggggcaccttggcttcccggcaggaggtggacacccagccagaggcctggctcaaggtgacctcaccttcaccatgg

SEQ ID NO: 83043 - DNA, 201 bp, Homo sapiens
atttagtggtgtggttctttcaaagggaggtcagggtaaatgggaatctgctcggacactcaacatgggggtgggtgcactccttggaggaggaggaacaygttcaggggatcgtgaggtcttgcacaagccacgtggggcaccttggcttcccggcaggaggtggacacccagccagaggcctggctcaaggtgacctca

SEQ ID NO: 83044 - DNA, 201 bp, Homo sapiens; identical to SEQ ID NO: 82964

SEQ ID NO: 83045 - DNA, 201 bp, Homo sapiens; identical to SEQ ID NO: 82965

SEQ ID NO: 83046 - DNA, 201 bp, Homo sapiens
tgtctttgttaagcggggagctgaccgtggagcagcgagcttccatcattcagaggtttcgggatgggaaagagaaggttctcataacaactaatgtttgygcccgagggattgatgtgaagcaggtcacaattgttgtgaactttgatctccctgtaaaacaaggagaggagccggactatgagacctacctccaccgca

SEQ ID NO: 83047 - DNA, 201 bp, Homo sapiens
aggaagagttactaaaaggaatctatgcaatgggatttaataggccatctaaaatccaagagatggctctccctatgatgctggcacatccaccccagaayctcatagcacagagccagtctggaacaggaaagacagcggcatttgtgttggcaatgttaagcagagttaatgccttggaattgttcccacagtgcctct

SEQ ID NO: 83048 - DNA, 201 bp, Homo sapiens
tgattgatttgactaagattcgtgtgtttgtcctggatgaagcagatgtgatgattgacactcaaggattctcagatcatagtattcgtattcaaagagckctaccctccgaatgccaaatgctcctcttttcagcaacctttgaggactctgtgtggcactttgctgagcgaatcatccctgaccctaatgttatcaagt

SEQ ID NO: 83049 - DNA, 201 bp, Homo sapiens
gtggaagttttacagaaggatcccagctctccactttactcagtaaagacatttgaagagctgcggctaaaggaagagttactaaaaggaatctatgcaakgggatttaataggccatctaaaatccaagagatggctctccctatgatgctggcacatccaccccagaacctcatagcacagagccagtctggaacagga

SEQ ID NO: 83050 - DNA, 201 bp, Homo sapiens; identical to SEQ ID NO: 83046

SEQ ID NO: 83051 - DNA, 201 bp, Homo sapiens; identical to SEQ ID NO: 83047

SEQ ID NO: 83052 - DNA, 201 bp, Homo sapiens; identical to SEQ ID NO: 83048

SEQ ID NO: 83053 - DNA, 201 bp, Homo sapiens; identical to SEQ ID NO: 83049

SEQ ID NO: 83054 - DNA, 201 bp, Homo sapiens
tgtgttgacacagaaattaaaagcatcatttaaccatagacaatttgccaggatctaggaaccacctaatggtaggtggacagaaaaggaaaaaaaaaaaaatttacttgcaagtactaggaattcagatgatcagctcttaaaagaaaaaaaaaagcaaaaagactaaagccctattaaggaagttattgctttaataag

SEQ ID NO: 83055 - DNA, 201 bp, Homo sapiens
cgaagagggtctgtgttgacacagaaattaaaagcatcatttaaccatagacaatttgccaggatctaggaaccacctaatggtaggtggacagaaaaggraaaaaaaaaaaatttacttgcaagtactaggaattcagatgatcagctcttaaaagaaaaaaaaaagcaaaaagactaaagccctattaaggaagttatt

SEQ ID NO: 83056 - DNA, 201 bp, Homo sapiens
gaagctcctaaaaagagtacgagaactggagcaagaggtgcaaagacttaaaaaggaacaggccaaaaataaggaggactcaaacattagagaaaattcakcaggagctggaaaaactaagcgtgcatttgatttcagtgctcatggccgaagacacgtagccctaagaatagcctatatgggctggggataccagggctt

SEQ ID NO: 83057 - DNA, 201 bp, Homo sapiens
cggggcggagggcagagagcggggcgaaagggcgcggaccggagggcagagggggcagcttccgcagagtggagagcgccccccgcgccgccccgcggccmgccgctcacacagccctccaggcgggagccccccagactccccgccgcgctttacgccccgtgtcggtttccctggaaatttccgcctccacatcacaag

SEQ ID NO: 83058 - DNA, 201 bp, Homo sapiens
catgagggctcgggcgcctgcgcagaagacgcacagtgacagcttcctttctcggaaacgcggcgcggccggctgccggaaaacagggcagacctgtatgrttggtttattcctggggttgtcatatcatggctgataatgacacagacagaaaccagactgagaagctcctaaaaagagtacgagaactggagcaagagg

SEQ ID NO: 83059 - DNA, 201 bp, Homo sapiens
taatgtaaaagaggaggctaatgctgctgctgaagagatccgttatacccacattctcaatcgggtactccctccagacatccgtatattggcctgggccyctgtagaaccaagcttcagtgctaggttcagctgccttgagcggacttaccgctattttttccctcgtgctgatttagatattgtaaccatggattatgc

SEQ ID NO: 83060 - DNA, 201 bp, Homo sapiens
ggaccggagggcagagggggcagcttccgcagagtggagagcgccccccgcgccgccccgcggcccgccgctcacacagccctccaggcgggagccccccrgactccccgccgcgctttacgccccgtgtcggtttccctggaaatttccgcctccacatcacaagatgtcagaaaggcccagattctgccctgtgggcgg

SEQ ID NO: 83061 - DNA, 201 bp, Homo sapiens
gagggctcgggcgcctgcgcagaagacgcacagtgacagcttcctttctcggaaacgcggcgcggccggctgccggaaaacagggcagacctgtatgattsgtttattcctggggttgtcatatcatggctgataatgacacagacagaaaccagactgagaagctcctaaaaagagtacgagaactggagcaagaggtgc

SEQ ID NO: 83062 - DNA, 201 bp, Homo sapiens
tccagcattttgtacgtaggggacgaattgagcacccacatttattccatgaggaagaaacaaaagccaaaagggactgtaatgacacactagaggaagasaatactaatttggagacaccaacgaagagggtctgtgttgacacagaaattaaaagcatcatttaaccatagacaatttgccaggatctaggaaccacct

SEQ ID NO: 83063 - DNA, 201 bp, Homo sapiens
agtgacagcttcctttctcggaaacgcggcgcggccggctgccggaaaacagggcagacctgtatgattggtttattcctggggttgtcatatcatggctkataatgacacagacagaaaccagactgagaagctcctaaaaagagtacgagaactggagcaagaggtgcaaagacttaaaaaggaacaggccaaaaataa

SEQ ID NO: 83064 - DNA, 192 bp, Homo sapiens
cgcgcaggcgctggaaggctgggtggcgcgcggaaggggcggagggcagagagcggggcggggggcagagagcggggcggagggcagagagsggggcggagggcagagagcggggcgaaagggcgcggaccggagggcagagggggcagcttccgcagagtggagagcgccccccgcgccgccccgcggccc

SEQ ID NO: 83065 - DNA, 201 bp, Homo sapiens; identical to SEQ ID NO: 83056

SEQ ID NO: 83066 - DNA, 201 bp, Homo sapiens; identical to SEQ ID NO: 83059

SEQ ID NO: 83067 - DNA, 201 bp, Homo sapiens; identical to SEQ ID NO: 83062

SEQ ID NO: 83068 - DNA, 201 bp, Homo sapiens; identical to SEQ ID NO: 83054

SEQ ID NO: 83069 - DNA, 201 bp, Homo sapiens; identical to SEQ ID NO: 83055

SEQ ID NO: 83070 - DNA, 119 bp, Homo sapiens
acagggcagacctgtatgrttggtttattcctggggttgtcatatcatggctgataatgacacagacagaaaccagactgagaagctcctaaaaagagtacgagaactggagcaagagg

SEQ ID NO: 83071 - DNA, 122 bp, Homo sapiens
acagggcagacctgtatgattsgtttattcctggggttgtcatatcatggctgataatgacacagacagaaaccagactgagaagctcctaaaaagagtacgagaactggagcaagaggtgc

SEQ ID NO: 83072 - DNA, 153 bp, Homo sapiens
acagggcagacctgtatgattggtttattcctggggttgtcatatcatggctkataatgacacagacagaaaccagactgagaagctcctaaaaagagtacgagaactggagcaagaggtgcaaagacttaaaaaggaacaggccaaaaataa

SEQ ID NO: 83073 - DNA, 201 bp, Homo sapiens
ccaccgtgttcttcaacattgccattgacagcgagcccttgggccacgtctccttcaagctgtttgcagacaagtttccaaagacagcagaaaacttttgkgctctgagcactggagagaaagcatttggttataagggttcctgctttcacagaattattccagggtttatgtattagggtggtgacttcacacaccata

SEQ ID NO: 83074 - DNA, 201 bp, Homo sapiens
ccaccgtgttcttcaacattgccattgacagcgagcccttgggccacgtctccttcaagctgtttgcagacaagtttccaaagacagcagaaaacttttgkgctctgagcactggagagaaagcatttggttataagggttcctgctttcacagaattattccaggcactggtggcaagtccatctatggggagaaatttg

SEQ ID NO: 83075 - DNA, 201 bp, Homo sapiens
gtagttttaattcagtttaagtattgctttttgttcaggtgacaaatgagatcagctctccttccagaacgaaagggctgataatttttggccttagttcyaggtagattaaaaagctgctagctcacatacaggacagccagcagtaggctgtggagcgggtaggagagagatggctgatactgctcacgtgcgctgcag

SEQ ID NO: 83076 - DNA, 122 bp, Homo sapiens
caagtcaaggttgcagagtgtrtgcagccaggggtagcagccacttcaggatctgggtctggatttgtgctgagaaccactatgaccttttaaagccagtgaggaggttttctgggggccca

SEQ ID NO: 83077 - DNA, 201 bp, Homo sapiens
ttgggtcactctagttgccgcctcccctgccccatgcccacccccactgctcactcaaggctagcctctctcagtgggtgactgagctgtcttcagtggargcccgaggcagatgccacgcaattctggagctggatacggctgcccacacggggaccccagcatgctggacagcagagagaccccacaggagagccggca

SEQ ID NO: 83078 - DNA, 201 bp, Homo sapiens
ggcagcagagccaccacagtgtccgagatcatagagaagaaggatgaggccgtgtaccaggccatcgaagaggggatccggagggtcaacatgaacgcggyggcccggccctaccacatccagaagtgggccattctcgagagagacttctccatttcgggtggagagttgggtcccacgatgaaactgaaacggctcaca

SEQ ID NO: 83079 - DNA, 201 bp, Homo sapiens
gaaccaggacgcagagggcattggcgagatctgcctgtggggccgcaccatattcatgggctacctgaacatggaggacaagacttgtgaggccatcgacraggaaggctggctgcacacgggtgatgctggccgcctggacgccgatggcttcctctacatcactgggcgcctcaaagaattaatcatcacagctggtgg

SEQ ID NO: 83080 - DNA, 201 bp, Homo sapiens
tgctagctcacatacaggacagccagcagtaggctgtggagcgggtaggagagagatggctgatactgctcacgtgcgctgcaggaaaagcaatcagtcasaactcacctagcgacctgacttactctggaatcttggcgggcatcgccgaccctattattccattaccaggcactccgccacccacatgccaactgactt

SEQ ID NO: 83081 - DNA, 201 bp, Homo sapiens
acacccagcagcccaaccagtgctgtgtgctagtctacacttccggcaccactgggaaccccaagggcgtgatgctgagtcaagacaatatcacgtggacrgcacggtacggcagccaggccggtgacatccggccggcagaagtccagcaggaggtggtagtcagctacctgcccctcagccatattgccgcccagatct

SEQ ID NO: 83082 - DNA, 201 bp, Homo sapiens
ctgggcgcctcaaagaattaatcatcacagctggtggggagaatgtgccccctgtgcccatcgaggaggccgtgaagatggagctgcccatcatcagcaaygccatgctcattggggaccagaggaagttcctgtccatgctgctcaccttgaagtgcactctggacccagacacctctgaccagactgataatctgactg

SEQ ID NO: 83083 - DNA, 201 bp, Homo sapiens
cattggggaccagaggaagttcctgtccatgctgctcaccttgaagtgcactctggacccagacacctctgaccagactgataatctgactgaacaagctrtggagttctgccagagggtgggcagcagagccaccacagtgtccgagatcatagagaagaaggatgaggccgtgtaccaggccatcgaagaggggatccg

SEQ ID NO: 83084 - DNA, 201 bp, Homo sapiens
tttgcatcaaaaagaacactggcttcattgaaattctcctcatcttgagagaaacaaaaccacaaagaaaaggaaagttttaattctgagaaacttcactraggagcaattttttttgagcttctaaaaatagagaggaaatgagcctctttgggtcactctagttgccgcctcccctgccccatgcccacccccactgct

SEQ ID NO: 83085 - DNA, 201 bp, Homo sapiens
gatttgccaagtgtcaaaagaacttctatggagcggcccccatgatggcagagacacagcacttcttcctgggtctcaacatccgcttgtatgcgggctayggcctcagtgagacctcaggcccccacttcatgtccagtccctacaactaccggctgtacagctcaggcaagttggtgcccggctgtcgggtgaagctgg

SEQ ID NO: 83086 - DNA, 201 bp, Homo sapiens
acttcatgtccagtccctacaactaccggctgtacagctcaggcaagttggtgcccggctgtcgggtgaagctggtgaaccaggacgcagagggcattggygagatctgcctgtggggccgcaccatattcatgggctacctgaacatggaggacaagacttgtgaggccatcgacgaggaaggctggctgcacacgggtg

SEQ ID NO: 83087 - DNA, 201 bp, Homo sapiens
ctttgtgcaagtatctggatgagctgggcttcacggtatttgccggagttttgaatgaaaatggcccaggagctgaggaattgcgaagaacctgctctccrcgcctctcggtgctccaaatggacatcacgaagccagtgcagataaaagatgcttacagcaaggttgcagcaatgctgcaggacagaggactgtgggctg

SEQ ID NO: 83088 - DNA, 201 bp, Homo sapiens
ctggccaagaattgttacctgtggatcagaaggcagtcctggtgacaggtggtgattgcgggcttggccatgctttgtgcaagtatctggatgagctgggyttcacggtatttgccggagttttgaatgaaaatggcccaggagctgaggaattgcgaagaacctgctctccgcgcctctcggtgctccaaatggacatca

SEQ ID NO: 83089 - DNA, 135 bp, Homo sapiens
ctgggaatatgattatgcttaatctatgctcagtygaaaggggctggggctgctttctcccctcccttcttgactctctgttcacagaactcaggctgcctccagccagcctttgcccgctagactcactggccc

SEQ ID NO: 83090 - DNA, 201 bp, Homo sapiens
acggccaggactacatcttagcacagcggaatttcctcctattgatcaactcgttagccagcaaggacttctctccggtgctgcgggacatccagcatgcyatcttggcgaagagcccttttgcctattacacgccagggaaaggcgcttacttgtggatctgccttgctcactatttgcctattggcatatatgattact

SEQ ID NO: 83091 - DNA, 201 bp, Homo sapiens
atatcatggaaataaaagaaatccgcccagggaagaactccaaagatttcgagcgagcaaaagcagttcgccagaaagaagactgctgcttcaccatcctrtatggcactcagttcgtcctcagcacgctcagcttggcagctgactctaaagaggatgcagttaactggctctctggcttgaaaatcttacaccaggaag

SEQ ID NO: 83092 - DNA, 200 bp, Homo sapiens
ctgggtccacgcttcccaggagtgatgaggctatgatttacttgagctggaacatggttaaggattttatttttatcatcgtcactttattttcacatttrccttcatttctattgagtgacgtgatttcctatttatggaagtgacatagctgcctttagaataattttgtttcatagtaaatgccatgcacaagcctc

SEQ ID NO: 83093 - DNA, 179 bp, Homo sapiens
gtgatgaggctatgatttacttgagctggaacatggttaaggattttatttttatcatcgtcactttattttcacatttaccttcatttctattgagtgaygtgatttcctatttatggaagtgacatagctgcctttagaataattttgtttcatagtaaatgccatgcacaagcctc

SEQ ID NO: 83094 - DNA, 201 bp, Homo sapiens
ggacggtgatgactgtgttcagcttccgcaagtccacccccgagcggagaaccgtccaggtgatcatggagacgcggcaggtggcctggagcaagaccgcygacaagatcgagggcttcttggatatcatggaaataaaagaaatccgcccagggaagaactccaaagatttcgagcgagcaaaagcagttcgccagaaag

SEQ ID NO: 83095 - DNA, 201 bp, Homo sapiens; identical to SEQ ID NO: 83091

SEQ ID NO: 83096 - DNA, 201 bp, Homo sapiens
gtctctttgcagaggaatattggacctcaatacctataacgtcgtgaaagcccctcagggaaaaaaccagaagtcctttgtcttcatcctggagcccaagsagcagggcgatcctccggtggagtttgccacagacagggtggaggagctctttgagtggtttcagagcatccgagagatcacctggaagattgacaccaa

SEQ ID NO: 83097 - DNA, 201 bp, Homo sapiens
ctgctgttgacgaagcccacggaggccagtgctgaccagctgccctcgcccagccagctgcgggagaagatcatcatcaagcataagaagctgggcccccsaggcgatgtggatgtcaacatggaggacaagaaggacgaacacaagcaacagggggagctgtacatgtgggattccattgaccagaaatggactcggcac

SEQ ID NO: 83098 - DNA, 201 bp, Homo sapiens
accccttccgcctctggctgtgcggttctcagatggtggcactcaatttccagacggcagataagtacatgcagatgaatcacgcattgttttctctcaaygggcgcacgggctacgttctgcagcctgagagcatgaggacagagaaatatgacccgatgccacccgagtcccagaggaagatcctgatgacgctgacag

SEQ ID NO: 83099 - DNA, 201 bp, Homo sapiens
tcaacatggaggacaagaaggacgaacacaagcaacagggggagctgtacatgtgggattccattgaccagaaatggactcggcactactgcgccattgcygatgccaagctgtccttcagtgatgacattgaacagactatggaggaggaagtgccccaggatataccccctacagaactacattttggggagaaatggt

SEQ ID NO: 83100 - DNA, 201 bp, Homo sapiens
tatgtgtgtaagggtattgtgtgtgtgcgcatgtgtgtttgcatgtaggagaacgtgccctattcacactctgggaagacgctaatctgtgacatcttttyttcaagcctgccatcaaggacatttcttaagacccaactggcatgagttggggtaatttcctattattttcatcttggacaactttcttaacttatattc

SEQ ID NO: 83101 - DNA, 201 bp, Homo sapiens; identical to SEQ ID NO: 83094

SEQ ID NO: 83102 - DNA, 201 bp, Homo sapiens
gggtaatttcctattattttcatcttggacaactttcttaacttatattctttatagaggattccccaaaatgtgctcctcatttttggcctctcatgttscaaacctcattgaataaaagcaatgaaaaccttgatcaattaagccttctgttgcacgacctgtgcagtgaacaggatttcttttctggccaagaagatt

SEQ ID NO: 83103 - DNA, 201 bp, Homo sapiens; identical to SEQ ID NO: 83091

SEQ ID NO: 83104 - DNA, 201 bp, Homo sapiens; identical to SEQ ID NO: 83096

SEQ ID NO: 83105 - DNA, 201 bp, Homo sapiens; identical to SEQ ID NO: 83097

SEQ ID NO: 83106 - DNA, 201 bp, Homo sapiens; identical to SEQ ID NO: 83098

SEQ ID NO: 83107 - DNA, 201 bp, Homo sapiens; identical to SEQ ID NO: 83099

SEQ ID NO: 83108 - DNA, 201 bp, Homo sapiens; identical to SEQ ID NO: 83100

SEQ ID NO: 83109 - DNA, 201 bp, Homo sapiens; identical to SEQ ID NO: 83094

SEQ ID NO: 83110 - DNA, 201 bp, Homo sapiens; identical to SEQ ID NO: 83102

SEQ ID NO: 83111 - DNA, 201 bp, Homo sapiens
actaataacattgctgtcaagtgtagattccccccttcaaaaaaagcttgtgaccattttgtatggcttgtctggaaacttctgtaaatcttatgttttartaaaatattttttgttattctactttgcctttgtacagtttattttactgtgtttatttcattttcccaatttgacaatcgtattttaaaattgaaactg

SEQ ID NO: 83112 - DNA, 201 bp, Homo sapiens
acattgctgtcaagtgtagattccccccttcaaaaaaagcttgtgaccattttgtatggcttgtctggaaacttctgtaaatcttatgttttagtaaaatwttttttgttattctactttgcctttgtacagtttattttactgtgtttatttcattttcccaatttgacaatcgtattttaaaattgaaactgatggaac

SEQ ID NO: 83113 - DNA, 201 bp, Homo sapiens
atcacagccctcactaataacattgctgtcaagtgtagattccccccttcaaaaaaagcttgtgaccattttgtatggcttgtctggaaacttctgtaaawcttatgttttagtaaaatattttttgttattctactttgcctttgtacagtttattttactgtgtttatttcattttcccaatttgacaatcgtatttta

SEQ ID NO: 83114 - DNA, 201 bp, Homo sapiens
ttttattttattttattttattttatgggctcctttcccccttttttggtgatctaattgcattggttaaaagcagctaaccaggtctttagaatatgctytagccaagtctaactttatttagacgctgtagatggacaagcttgattgttggaaccaaaatgggaacattaaacaaacatcacagccctcactaataac

SEQ ID NO: 83115 - DNA, 201 bp, Homo sapiens
gaaccaaaatgggaacattaaacaaacatcacagccctcactaataacattgctgtcaagtgtagattccccccttcaaaaaaagcttgtgaccattttgwatggcttgtctggaaacttctgtaaatcttatgttttagtaaaatattttttgttattctactttgcctttgtacagtttattttactgtgtttatttca

SEQ ID NO: 83116 - DNA, 201 bp, Homo sapiens; identical to SEQ ID NO: 83111

SEQ ID NO: 83117 - DNA, 201 bp, Homo sapiens; identical to SEQ ID NO: 83112

SEQ ID NO: 83118 - DNA, 201 bp, Homo sapiens; identical to SEQ ID NO: 83113

SEQ ID NO: 83119 - DNA, 201 bp, Homo sapiens
tgaggggggaggtagtttaattttatgggctcctttcccccttttttggtgatctaattgcattggttaaaagcagctaaccaggtctttagaatatgctytagccaagtctaactttatttagacgctgtagatggacaagcttgattgttggaaccaaaatgggaacattaaacaaacatcacagccctcactaataac

SEQ ID NO: 83120 - DNA, 201 bp, Homo sapiens; identical to SEQ ID NO: 83115

SEQ ID NO: 83121 - DNA, 201 bp, Homo sapiens; identical to SEQ ID NO: 83111

SEQ ID NO: 83122 - DNA, 201 bp, Homo sapiens; identical to SEQ ID NO: 83112

SEQ ID NO: 83123 - DNA, 201 bp, Homo sapiens; identical to SEQ ID NO: 83113

SEQ ID NO: 83124 - DNA, 201 bp, Homo sapiens; identical to SEQ ID NO: 83119

SEQ ID NO: 83125 - DNA, 201 bp, Homo sapiens; identical to SEQ ID NO: 83115

SEQ ID NO: 83126 - DNA, 201 bp, Homo sapiens
aagcatcatgggcctcgcagccgggcctgtgccacggctagtgttgtgtgatttaaaatggactcagcaggaagcatattgtctggggattgttgggacargttttggtgactctgtgcccttgctctctaacttctgagcccacctcccagggtaggcacctgggggcatgcaggtgcccacctctttctcttgggtgag

SEQ ID NO: 83127 - DNA, 201 bp, Homo sapiens
tccaagggcagcaacgccttcggcgggccgcctagggtgattggctgctgcagcccaccccctagccggtttggtgggcggcgaagcctggattggtggarctaagagctggctcagtttcagcgctggctcttcgtgcatggcagagatggcgactgcgactcggctgctggggtggcgtgtggcgagctggaggctgcg

SEQ ID NO: 83128 - DNA, 201 bp, Homo sapiens
acctcgtctctactaaaaatacaaaaattagccaggtgtggtggcaggctcctgtaatcccagctactcaggaggctgaggcagagaattgcttgaacccrggaggcagagtttgcagtgagccaagatcacaccactgcactccagcttggacgacagagcgagactctgtctcaaaaaataataggccaggcatggtgg

SEQ ID NO: 83129 - DNA, 201 bp, Homo sapiens
gatgccaagctgtatgagataggggctgggaccagcgaggtgaggcggctggtcatcggcagagccttcaatgcagactttcactagtcctgagacccttygcccccttttcctgcacctagtggcctttcttgggaagtagagatgtggcggctttcccaccctgcccacagcaggccctcctgcccagctgctcttgtc

SEQ ID NO: 83130 - DNA, 201 bp, Homo sapiens
gctgcggccgccgcttgccggcttcgtttcccagcgggcccactcgcttttgcccgtggacgatgcaatcaatgggctaagcgaggagcagaggcagcttygtcagaccatggctaagttccttcaggagcacctggcccccaaggcccaggagatcgatcgcagcaatgagttcaagaacctgcgagaattttggaagca

SEQ ID NO: 83131 - DNA, 201 bp, Homo sapiens
gggtggcgtgtggcgagctggaggctgcggccgccgcttgccggcttcgtttcccagcgggcccactcgcttttgcccgtggacgatgcaatcaatgggcyaagcgaggagcagaggcagcttcgtcagaccatggctaagttccttcaggagcacctggcccccaaggcccaggagatcgatcgcagcaatgagttcaag

SEQ ID NO: 83132 - DNA, 201 bp, Homo sapiens
ctgcggccgccgcttgccggcttcgtttcccagcgggcccactcgcttttgcccgtggacgatgcaatcaatgggctaagcgaggagcagaggcagcttcstcagaccatggctaagttccttcaggagcacctggcccccaaggcccaggagatcgatcgcagcaatgagttcaagaacctgcgagaattttggaagcag

SEQ ID NO: 83133 - DNA, 201 bp, Homo sapiens
ggggaagatggctgacatgtacacccgcctcatggcgtgtcggcagtatgtctacaatgtcgccaaggcctgcgatgagggccattgcactgctaaggacygtgcaggtgtgattctttactcagctgagtgtgccacacaggtagccctggacggcattcagtgttttggtggcaatggctacatcaatgactttcccat

SEQ ID NO: 83134 - DNA, 201 bp, Homo sapiens
cacagcccctgttcagtatggcggctccggcctgggctacctggagcatgtgctggtgatggaggagatatcccgagcttccggagcagtggggctcagtyacggtgcccactccaacctctgcatcaaccagcttgtacgcaatgggaatgaggcccagaaagagaagtatctcccgaagctgatcagtggtgagtacat

SEQ ID NO: 83135 - DNA, 201 bp, Homo sapiens
gtgaaacaaacctatctggggagaagcaatctacttgccgctgcttcctgtctggatccagcttgtgtccttggagagtggctggcccaggtcctattccygtcctccagcccgttctttcatgagggacaggaaggtaaaatcagcccttaggagagaggtctcagcctccctttcccagatctcccagtgagttttaaa

SEQ ID NO: 83136 - DNA, 201 bp, Homo sapiens
tgttttggtggcaatggctacatcaatgactttcccatgggccgctttcttcgagatgccaagctgtatgagataggggctgggaccagcgaggtgaggckgctggtcatcggcagagccttcaatgcagactttcactagtcctgagacccttcgcccccttttcctgcacctagtggcctttcttgggaagtagagatg

SEQ ID NO: 83137 - DNA, 201 bp, Homo sapiens
aaaaatagaaaaaaattagttgggcatggtggtgggcacctgtaatcccagctacttcaggaggctgaggcaggagaattacttgaacccaggaggcggasgttgcagtgagccgagcttgtgccattgcactccagcctgggcgacaagagcaaaactcttcaaaaaacaaaacaaaacaaaaaaaccctggcccttgtt

SEQ ID NO: 83138 - DNA, 201 bp, Homo sapiens
gagcccaatgcaggctctgatgttgtctctatgaagctcaaagcggaaaagaaaggaaatcactacatcctgaatggcaacaagttctggatcactaatgkccctgatgctgacgtcctgattgtctatgccaagacagatctggctgctgtgccagcttctcggggcatcacagccttcattgtggagaagggtatgcct

SEQ ID NO: 83139 - DNA, 201 bp, Homo sapiens
atgccaagacagatctggctgctgtgccagcttctcggggcatcacagccttcattgtggagaagggtatgcctggctttagcacctctaagaagctggayaagctggggatgaggggctctaacacctgtgagctaatctttgaagactgcaagattcctgctgccaacatcctgggccatgagaataagggtgtctacg

SEQ ID NO: 83140 - DNA, 201 bp, Homo sapiens
aagcatcatgggcctcgcagccgggcctgtgccacggctagtgttgtgtgatttaaaatggactcagcaggaagcatattgtctggggattgttgggacargttttggtgactctgtgcccttgctctctaacttctgagcccacctcccagggtaggcacctgggggcatgcaggtgcccacctcccagggtaggcacct

SEQ ID NO: 83141 - DNA, 201 bp, Homo sapiens; identical to SEQ ID NO: 83127

SEQ ID NO: 83142 - DNA, 201 bp, Homo sapiens; identical to SEQ ID NO: 83128

SEQ ID NO: 83143 - DNA, 201 bp, Homo sapiens; identical to SEQ ID NO: 83129

SEQ ID NO: 83144 - DNA, 201 bp, Homo sapiens; identical to SEQ ID NO: 83130

SEQ ID NO: 83145 - DNA, 201 bp, Homo sapiens; identical to SEQ ID NO: 83131

SEQ ID NO: 83146 - DNA, 201 bp, Homo sapiens; identical to SEQ ID NO: 83132

SEQ ID NO: 83147 - DNA, 201 bp, Homo sapiens; identical to SEQ ID NO: 83133

SEQ ID NO: 83148 - DNA, 201 bp, Homo sapiens; identical to SEQ ID NO: 83134

SEQ ID NO: 83149 - DNA, 201 bp, Homo sapiens; identical to SEQ ID NO: 83135

SEQ ID NO: 83150 - DNA, 201 bp, Homo sapiens; identical to SEQ ID NO: 83136

SEQ ID NO: 83151 - DNA, 201 bp, Homo sapiens; identical to SEQ ID NO: 83137

SEQ ID NO: 83152 - DNA, 201 bp, Homo sapiens; identical to SEQ ID NO: 83138

SEQ ID NO: 83153 - DNA, 201 bp, Homo sapiens; identical to SEQ ID NO: 83139

SEQ ID NO: 83154 - DNA, 201 bp, Homo sapiens
ggaaggggaaaccccctgacgaggagcccattatcacccatggcttcaccatgaccacagacatcttcttcaaagaagcaattgaggctattgcagaaagygcctttaagacctccccctatcccatcatcctgtcgtttgagaaccatgtggactcaccccgccagcaggctaagatggctgagtattgccggacgatct

SEQ ID NO: 83155 - DNA, 201 bp, Homo sapiens
accacagacaagatggcccaggagaggttgaagagagagattaacaactcccacatccaggaagtagtgcaggtgatcaagcagatgacggagaacttggrgaggcaccaggagaagctggaggagaagcaggcggcttgcctggaacagatacgggagatggaaaagcagttccagaaggaggcgctggcagagtacgag

SEQ ID NO: 83156 - DNA, 201 bp, Homo sapiens
cggcttatgaggagatgtccagcctagtcaattacatccagcccaccaagttcgtctcctttgagttctctgcccaaaagaaccgaagttatgtcatctcrtccttcacagagctcaaggcatatgacctgctctccaaggcctcggtgcagtttgtggactacaacaagcgccagatgagccgcatttaccccaagggaa

SEQ ID NO: 83157 - DNA, 201 bp, Homo sapiens
aggatctcaggggcaagatcctcatcaagaacaagaagaaccagttttctggccccacctcctccagtaaggataccggtggggaggctgagggcagcagyccacccagtgcccctgcagtgtgggctggcgaggaagggactgagctggaggaggaggaggtggaagaggaagaggaggaggagtcaggaaacctggatg

SEQ ID NO: 83158 - DNA, 201 bp, Homo sapiens
caggtgtccccctgcccagccctgaggatctcaggggcaagatcctcatcaagaacaagaagaaccagttttctggccccacctcctccagtaaggatacyggtggggaggctgagggcagcagcccacccagtgcccctgcagtgtgggctggcgaggaagggactgagctggaggaggaggaggtggaagaggaagagg

SEQ ID NO: 83159 - DNA, 201 bp, Homo sapiens
agctgaaggccctgaaggagacgtcggagaacgacaccaaagagatgaagaaaaagctggagacaaagagactggagcggatccagggcatgaccaaagtmaccacagacaagatggcccaggagaggttgaagagagagattaacaactcccacatccaggaagtagtgcaggtgatcaagcagatgacggagaacttgg

SEQ ID NO: 83160 - DNA, 106 bp, Homo sapiens
agtcccagtgttgtcttcttaagaggtggaacgtctcgcacccagaaccgagattctgtctctctcttacccgctgccggcaacaaaatgtgcggctcatraaaag

SEQ ID NO: 83161 - DNA, 201 bp, Homo sapiens; identical to SEQ ID NO: 83154

SEQ ID NO: 83162 - DNA, 201 bp, Homo sapiens; identical to SEQ ID NO: 83155

SEQ ID NO: 83163 - DNA, 201 bp, Homo sapiens; identical to SEQ ID NO: 83156

SEQ ID NO: 83164 - DNA, 201 bp, Homo sapiens; identical to SEQ ID NO: 83157

SEQ ID NO: 83165 - DNA, 201 bp, Homo sapiens; identical to SEQ ID NO: 83158

SEQ ID NO: 83166 - DNA, 201 bp, Homo sapiens; identical to SEQ ID NO: 83159

SEQ ID NO: 83167 - DNA, 201 bp, Homo sapiens
ttggggacctttcttaataatttcacctgcgtctacacttaacaattggcaccaggagtttactagatttgttcctaaatttaaggtttctcttttcaccyttccccttttatatttacagaagaccctctacactcaggatgcccccttccatgtggttattaccagctatcagctggtggtgcaggatgtaaagtattt

SEQ ID NO: 83168 - DNA, 201 bp, Homo sapiens
catacgggtacaacgtgtctaaagctcagactctggtaaccaaggccacaggctccaaggaagcttacgcgggactggtgcttacgttcttgtctctctcygtccccacaggaatctccgccagcagtcctctgcagacatcccttgttcggcctgctggccttgctgactttggaccttcaagcgcctcttctcctttga

SEQ ID NO: 83169 - DNA, 201 bp, Homo sapiens
caaataagcagaaagcttcagctcgtaacctgtttctcaccaatagccgaaagcttgctcaccagtgcatgaaggaggtgcgtcgagctgccttgcaggcmcagaagaactgtaaggaaaccttgcctcgtgcccgccgcctcaccaaggagatgcttctgtactggaagaaatatgagaaagtagagaaggagcaccgca

SEQ ID NO: 83170 - DNA, 201 bp, Homo sapiens
tacttccgggaaaagtaaccttgcatcggcggttgcgggcctggaaagctctcgcgacattttctcctgcgagatctgcttgctcactgtagcgatgacaycctcctcctcctccccgccgcctttcggcaatcttcgccagtcccagtcccgactaatctgtactcagatggcatggatcagggtctcccctcgaacccc

SEQ ID NO: 83171 - DNA, 201 bp, Homo sapiens
agcggcctctgcagctgcctatgccgcatacgggtacaacgtgtctaaagctcagactctggtaaccaaggccacaggctccaaggaagcttacgcgggaytggtgcttacgttcttgtctctctccgtccccacaggaatctccgccagcagtcctctgcagacatcccttgttcggcctgctggccttgctgactttgg

SEQ ID NO: 83172 - DNA, 201 bp, Homo sapiens
gatgtggaaaatgaattatctgacaagaattgtcttgctctgttgcccaggctggagtgcaatggcgtgatttcggctcactgcaacctctggctcccagkttcaggcaattctcctgcctcagcctcccaaggagctgagactacaggagcctgccaccacgcctggctaatttttgtatttttagtagagatgaggctt

SEQ ID NO: 83173 - DNA, 201 bp, Homo sapiens
ggtctgtggagcatcagacctcagaatggctggtctttcatcaggattccaggcaaggagagcctcatcactgacagtggaaagctgtatgcccttgatgkcctgctgactcggctcaagtctcaagggcatagggtccttatctactcccagatgaccaggatgatagacctactggaggaatacatggtttacaggaag

SEQ ID NO: 83174 - DNA, 201 bp, Homo sapiens
ggcggagagagggggcaggctcggcaccggccctcccagcccggccagcctgagcttgctgccctccagtagagacagaggggcagtgtttgcatgggagrtgtttctgcctgtccctgcctgatgtccctggtggagcaggtacctccgggcgggcaagcctctgatttgcacacctgaaaatcgcggaattgagtttcg

SEQ ID NO: 83175 - DNA, 201 bp, Homo sapiens
gaagagggcggagagagggggcaggctcggcaccggccctcccagcccggccagcctgagcttgctgccctccagtagagacagaggggcagtgtttgcawgggaggtgtttctgcctgtccctgcctgatgtccctggtggagcaggtacctccgggcgggcaagcctctgatttgcacacctgaaaatcgcggaattga

SEQ ID NO: 83176 - DNA, 201 bp, Homo sapiens; identical to SEQ ID NO: 83168

SEQ ID NO: 83177 - DNA, 201 bp, Homo sapiens; identical to SEQ ID NO: 83171

SEQ ID NO: 83178 - DNA, 201 bp, Homo sapiens; identical to SEQ ID NO: 83173

SEQ ID NO: 83179 - DNA, 201 bp, Homo sapiens
cactgagctgccatcttttttgtgtgtggccagtccacgacgcttggagcggttacgcttccttcagctagagcaggaacatacgtgtcctcaggaaggaygcgctgaacgcttaagggggcagcccctgaaggttaccgcagtgccattggattcttactgcaatgaccgaagtgcagaatatgaaaggcgagttctgaa

SEQ ID NO: 83180 - DNA, 201 bp, Homo sapiens; identical to SEQ ID NO: 83175

SEQ ID NO: 83181 - DNA, 201 bp, Homo sapiens; identical to SEQ ID NO: 83169

SEQ ID NO: 83182 - DNA, 201 bp, Homo sapiens; identical to SEQ ID NO: 83170

SEQ ID NO: 83183 - DNA, 201 bp, Homo sapiens
acagatcagggtcttcaatcattcacgagacaggtggttaagggttctttctccatttgcaccagactatatccaacggtctctctttcacagaaaaggtrttaatgaagaaagctgtttctctttccttcgctttattgatatatctccagcagaaatggcaaaccttatgcttcagggacttttggccagatggttagc

SEQ ID NO: 83184 - DNA, 201 bp, Homo sapiens; identical to SEQ ID NO: 83174

SEQ ID NO: 83185 - DNA, 177 bp, Homo sapiens
ctcagactctggtaaccaaggccacaggctccaaggaagcttacgcgggactggtgcttacgttcttgtctctctcygtccccacaggaatctccgccagcagtcctctgcagacatcccttgttcggcctgctggccttgctgactttggaccttcaagcgcctcttctcctttga

SEQ ID NO: 83186 - DNA, 151 bp, Homo sapiens
ctcagactctggtaaccaaggccacaggctccaaggaagcttacgcgggaytggtgcttacgttcttgtctctctccgtccccacaggaatctccgccagcagtcctctgcagacatcccttgttcggcctgctggccttgctgactttgg

SEQ ID NO: 83187 - DNA, 201 bp, Homo sapiens; identical to SEQ ID NO: 83174

SEQ ID NO: 83188 - DNA, 201 bp, Homo sapiens; identical to SEQ ID NO: 83175

SEQ ID NO: 83189 - DNA, 201 bp, Homo sapiens; identical to SEQ ID NO: 83169

SEQ ID NO: 83190 - DNA, 201 bp, Homo sapiens; identical to SEQ ID NO: 83173

SEQ ID NO: 83191 - DNA, 201 bp, Homo sapiens; identical to SEQ ID NO: 83170

SEQ ID NO: 83192 - DNA, 201 bp, Homo sapiens; identical to SEQ ID NO: 83183

SEQ ID NO: 83193 - DNA, 201 bp, Homo sapiens
agatcctaccagcaaccgtagcaccttccacccaggggactcccagaagccagtaaagagaccaggagccacctcaatcagggcagtgtttgcatgggagrtgtttctgcctgtccctgcctgatgtccctggtggagcaggtacctccgggcgggcaagcctctgatttgcacacctgaaaatcgcggaattgagtttcg

SEQ ID NO: 83194 - DNA, 201 bp, Homo sapiens
accttcagatcctaccagcaaccgtagcaccttccacccaggggactcccagaagccagtaaagagaccaggagccacctcaatcagggcagtgtttgcawgggaggtgtttctgcctgtccctgcctgatgtccctggtggagcaggtacctccgggcgggcaagcctctgatttgcacacctgaaaatcgcggaattga

SEQ ID NO: 83195 - DNA, 201 bp, Homo sapiens
ggccctattactttgacttccggacctactgcaaaggtcgctgggtgggccacagcttgctgcacgtcttcagtaccgagttccgagctcagcccctggcytactatgaggccgcggtccgggcgggccgcctgcaactcaacgagaagccggtgcaggacctcaacatcgtgctcaaggacaatgatttcttgcggaaca

SEQ ID NO: 83196 - DNA, 201 bp, Homo sapiens
tcttgcggaacacagtgcacaggcatgagccaccagtcacagcagagcccattcgcctgctagctgagaacgaagatgtggtggttgtagacaagccttcstccattcccgttcacccctgtggccgcttccgacacaacacagttatcttcatcctaggcaaggagcaccaactcaaggagctacaccccttgcatcggc

SEQ ID NO: 83197 - DNA, 201 bp, Homo sapiens
acttccggacctactgcaaaggtcgctgggtgggccacagcttgctgcacgtcttcagtaccgagttccgagctcagcccctggcttactatgaggccgcsgtccgggcgggccgcctgcaactcaacgagaagccggtgcaggacctcaacatcgtgctcaaggacaatgatttcttgcggaacacagtgcacaggcatg

SEQ ID NO: 83198 - DNA, 201 bp, Homo sapiens
gcccgggcaagcataagaagcggcggggcgcaaccagggagcgtgtcgtgccgcccccgaagaagcggcggaccggggtgagcttcggagatgagcacttygcagaaaccagttattacttcgagggcggcctgcgtaaggtgcggccctattactttgacttccggacctactgcaaaggtcgctgggtgggccacagct

SEQ ID NO: 83199 - DNA, 181 bp, Homo sapiens
tcacataacataaaattaaccactttaactagccaggcacagtggctcatggctataatcctagtactttgggaggtagaagtgaaaggatcactggaggycaagagttcaaggttaaagtgaactgtgattgtgctgctgcactccagagcctaggtgacagagtgagaccctgtctctt

SEQ ID NO: 83200 - DNA, 201 bp, Homo sapiens
agtgcacaggcatgagccaccagtcacagcagagcccattcgcctgctagctgagaacgaagatgtggtggttgtagacaagccttcctccattcccgttyacccctgtggccgcttccgacacaacacagttatcttcatcctaggcaaggagcaccaactcaaggagctacaccccttgcatcggcttgaccgccttac

SEQ ID NO: 83201 - DNA, 201 bp, Homo sapiens
tcgtgccgcccccgaagaagcggcggaccggggtgagcttcggagatgagcactttgcagaaaccagttattacttcgagggcggcctgcgtaaggtgcgsccctattactttgacttccggacctactgcaaaggtcgctgggtgggccacagcttgctgcacgtcttcagtaccgagttccgagctcagcccctggctt

SEQ ID NO: 83202 - DNA, 201 bp, Homo sapiens
acacaacacagttatcttcatcctaggcaaggagcaccaactcaaggagctacaccccttgcatcggcttgaccgccttacctcaggggtgcttatgtttkccaagacagctgcagtctctgagagaattcacgagcaggttcgggaccggcagctggagaaggagtacgtgtgccgggtggaaggggagttccccactga

SEQ ID NO: 83203 - DNA, 201 bp, Homo sapiens
cgagctcagcccctggcttactatgaggccgcggtccgggcgggccgcctgcaactcaacgagaagccggtgcaggacctcaacatcgtgctcaaggacartgatttcttgcggaacacagtgcacaggcatgagccaccagtcacagcagagcccattcgcctgctagctgagaacgaagatgtggtggttgtagacaag

SEQ ID NO: 83204 - DNA, 201 bp, Homo sapiens; identical to SEQ ID NO: 83195

SEQ ID NO: 83205 - DNA, 201 bp, Homo sapiens; identical to SEQ ID NO: 83196

SEQ ID NO: 83206 - DNA, 201 bp, Homo sapiens; identical to SEQ ID NO: 83197

SEQ ID NO: 83207 - DNA, 201 bp, Homo sapiens; identical to SEQ ID NO: 83198

SEQ ID NO: 83208 - DNA, 181 bp, Homo sapiens; identical to SEQ ID NO: 83199

SEQ ID NO: 83209 - DNA, 201 bp, Homo sapiens; identical to SEQ ID NO: 83200

SEQ ID NO: 83210 - DNA, 201 bp, Homo sapiens; identical to SEQ ID NO: 83201

SEQ ID NO: 83211 - DNA, 201 bp, Homo sapiens; identical to SEQ ID NO: 83202

SEQ ID NO: 83212 - DNA, 103 bp, Homo sapiens
tgrgagtggagtgggggcagcgtggttatgtggctggaccgccgcggatggctcagggttcttggacattggcgctacgaccttaggcgccctagctttacca

SEQ ID NO: 83213 - DNA, 201 bp, Homo sapiens; identical to SEQ ID NO: 83203

SEQ ID NO: 83214 - DNA, 201 bp, Homo sapiens
aggatgaaaaataccggtgtttacctcatttccagattaggggtcagctttctggttcttcccaaatatgaaaggataatgcagaagtacaacctgctgcyggagaagtccatgtatgatttggttcatgggtccagcctgtggatgctgtgtactgacgtagcactggaattcccaagacccactctgcctaatgttgtt

SEQ ID NO: 83215 - DNA, 201 bp, Homo sapiens
ggcaactatgaatttattccatgtcattctgtttacttagcacttgcactacccttgttggttgagtgtatgctttatttgtttctagtttgaaatcccayatctgatagctgagagtaggcaaatacaacatttacctaatgtcattcactaacatggaagagttgtgaaaattctagagtgctgtaaatccttggcata

SEQ ID NO: 83216 - DNA, 201 bp, Homo sapiens
ttcccaaatatgaaaggataatgcagaagtacaacctgctgccggagaagtccatgtatgatttggttcatgggtccagcctgtggatgctgtgtactgaygtagcactggaattcccaagacccactctgcctaatgttgtttatgtaggaggaatcctaaccaaaccagccagcccactaccagaagatctccaaagat

SEQ ID NO: 83217 - DNA, 201 bp, Homo sapiens
atagcacagttaatggacattaccacaatggaatcctcaatggcaagtacaaaagaaatggccatattaaacatgaaaagaaagtgaaatgagccaacagyccaggtgatagaaataaattggttcactcattgaatttttattgctattatttagtctaacagctactaaaagtaaaacatcagtaaacaattctaacat

SEQ ID NO: 83218 - DNA, 201 bp, Homo sapiens
ctaaactcatagaatggttaccacaaaatgacctgcttgggcattcaaagattaaagccttcctgagccatggtggtttgaacagtatttttgaaactatrtatcatggtgtgcctgtagtgggaattccactctttggagaccattatgatactatgaccagagtacaggcaaaaggcatggggatattgctagaatgga

SEQ ID NO: 83219 - DNA, 201 bp, Homo sapiens
tttcaactggcctttggtatcctgctgaagtgggtgctcctgctccattagcatacgtcccagagtttaactcactcctcacagaccgcatgaacttgctkcaaaggatgaaaaataccggtgtttacctcatttccagattaggggtcagctttctggttcttcccaaatatgaaaggataatgcagaagtacaacctgc

SEQ ID NO: 83220 - DNA, 201 bp, Homo sapiens
ggatgaaaaataccggtgtttacctcatttccagattaggggtcagctttctggttcttcccaaatatgaaaggataatgcagaagtacaacctgctgccrgagaagtccatgtatgatttggttcatgggtccagcctgtggatgctgtgtactgacgtagcactggaattcccaagacccactctgcctaatgttgttt

SEQ ID NO: 83221 - DNA, 201 bp, Homo sapiens
cccaaaactggatgcagaggaagaaaaaaaaaaaagaaatggcacagttttttgtatttttttttttagttattttttgttgttgttgtttgtattgtttytcttttctgatagagtatggccacttctgggggaaaaacatgtaattaagtaaatgtatacattggttttcacgttttacttttgttttcccactaccaa

SEQ ID NO: 83222 - DNA, 201 bp, Homo sapiens
ccctgccgcgtcaggccgctcctctcggctccgcgctccttccctcgcgcgtgggcacccgcccccgagcggtgagagcgcgtgcgcgcgcgcccttctcygtgggcgagccagccagtcccgctgcacacgctcgcagtctgtgggccctccgggaggcggcggaggtcaccgcggggagaggggcgggcgcagcatggc

SEQ ID NO: 83223 - DNA, 201 bp, Homo sapiens
cctcaccaactcccgacactcagcagacttgtttttatatttttttctttcttgtacattcttactacgtattttttgacttaagaatgacatctttagaygcatttcagagccaatgatgatatttgctttagataattattatattattataaatatagccatattattttgaattcaaataaatttctatactggtaa

SEQ ID NO: 83224 - DNA, 201 bp, Homo sapiens
ctgaagctatgaatcttggaatcaggttagggcttgacccaaaactactggctaaaatcctaaatatgagctcaggacggtgttggtcaagtgacacttayaatcctgtacctggagtgatggatggcgttccctcggctaataactatcagggtggatttggaacaacactcatggctaaggatctgggattggcacaag

SEQ ID NO: 83225 - DNA, 201 bp, Homo sapiens
ctgcatgttttctatttggactccgtcacaatatggtaggatatccctcaccaactcccgacactcagcagacttgtttttatatttttttctttcttgtwcattcttactacgtattttttgacttaagaatgacatctttagacgcatttcagagccaatgatgatatttgctttagataattattatattattataaa

SEQ ID NO: 83226 - DNA, 160 bp, Homo sapiens
caggccctgccgcgtcaggccgctcctctcggctccgcgctccttccctcgcgcgtgggyacccgcccccgagcggtgagagcgcgtgcgcgcgcgcccttctccgtgggcgagccagccagtcccgctgcacacgctcgcagtctgtgggccctccggg

SEQ ID NO: 83227 - DNA, 201 bp, Homo sapiens
gccagtcccgctgcacacgctcgcagtctgtgggccctccgggaggcggcggaggtcaccgcggggagaggggcgggcgcagcatggcagcctccttacgkctcctcggagctgcctccggtctccggtactggagccggcggctgcggccggcagccggcagctttgcagcggtgtgttctaggtcagtggcttcaaaga

SEQ ID NO: 83228 - DNA, 146 bp, Homo sapiens
caggccctgccgcgtcaggccgctcctctcggctccgcgctccttycctcgcgcgtgggcacccgcccccgagcggtgagagcgcgtgcgcgcgcgcccttctccgtgggcgagccagccagtcccgctgcacacgctcgcagtct

SEQ ID NO: 83229 - DNA, 201 bp, Homo sapiens; identical to SEQ ID NO: 83222

SEQ ID NO: 83230 - DNA, 199 bp, Homo sapiens
cctcaccaactcccgacactcagcagacttgtttttatatttttttctttcttgtacattcttactacgtattttttgacttaagaatgacatctttagaygcatttcagagccaatgatgatatttgctttagataattattatattattataaatatagccatattattttgaattcaaataaatttctatactggt

SEQ ID NO: 83231 - DNA, 201 bp, Homo sapiens; identical to SEQ ID NO: 83224

SEQ ID NO: 83232 - DNA, 201 bp, Homo sapiens; identical to SEQ ID NO: 83225

SEQ ID NO: 83233 - DNA, 160 bp, Homo sapiens; identical to SEQ ID NO: 83226

SEQ ID NO: 83234 - DNA, 201 bp, Homo sapiens; identical to SEQ ID NO: 83227

SEQ ID NO: 83235 - DNA, 146 bp, Homo sapiens; identical to SEQ ID NO: 83228

SEQ ID NO: 83236 - DNA, 201 bp, Homo sapiens; identical to SEQ ID NO: 83222

SEQ ID NO: 83237 - DNA, 199 bp, Homo sapiens; identical to SEQ ID NO: 83230

SEQ ID NO: 83238 - DNA, 201 bp, Homo sapiens; identical to SEQ ID NO: 83224

SEQ ID NO: 83239 - DNA, 201 bp, Homo sapiens; identical to SEQ ID NO: 83225

SEQ ID NO: 83240 - DNA, 160 bp, Homo sapiens; identical to SEQ ID NO: 83226

SEQ ID NO: 83241 - DNA, 201 bp, Homo sapiens; identical to SEQ ID NO: 83227

SEQ ID NO: 83242 - DNA, 146 bp, Homo sapiens; identical to SEQ ID NO: 83228

SEQ ID NO: 83243 - DNA, 201 bp, Homo sapiens
agtcaaggaataaactacagtgtaaacatatcccagatgaaaactgctgtatggaaaaatgacagaaagtaactgattgacactgttgattcacagttcarcctcctatctgggaaagacatttctttcctctgctcactttaagaacttttaccgactccaaaaatctcaggaattaaacttttaacagttacagcaata

SEQ ID NO: 83244 - DNA, 201 bp, Homo sapiens
gagcctttgcagaggcgctgctgcttaagggcgccaaggtagcgctggtggattggaatcttgaagcaggtgtacagtgtaaagctgccctggatgagcartttgaacctcagaagactctgttcatccagtgcgatgtggctgaccagcaacaactgagagacacttttagaaaagttgtagaccactttggaagactgg

SEQ ID NO: 83245 - DNA, 172 bp, Homo sapiens
gcctctgctccgctctccttctatccagttggtctttagggcactgaaggaaactcttcttcagaaataacyttttaacttttcttctgtcagctgcctgccaatcacggagccagaggctgaggggaggctttgagccggtctgcgagtccggaaggcaaagatcgcgaag

SEQ ID NO: 83246 - DNA, 201 bp, Homo sapiens
cataggcagagcctttgcagaggcgctgctgcttaagggcgccaaggtagcgctggtggattggaatcttgaagcaggtgtacagtgtaaagctgccctgsatgagcagtttgaacctcagaagactctgttcatccagtgcgatgtggctgaccagcaacaactgagagacacttttagaaaagttgtagaccactttgg

SEQ ID NO: 83247 - DNA, 201 bp, Homo sapiens
actcttcttcagaaataaccttttaacttttcttctgtcagctgcctgccaatcacggagccagaggctgaggggaggctttgagccggtctgcgagtccsgaaggcaaagatcgcgaagcttggcgctccagaacgctcagggggcaggtgacacagtcgtgggttccccggcgggcgctggcttgacagtttcctcccc

SEQ ID NO: 83248 - DNA, 201 bp, Homo sapiens
atcaaaacaaatgattttcaaggaatattcaatattctgcctttcagaaagtgtatttatatctgtgcttcataaatattaatgtttttaaaagaggaaakctacttaacaatgacaaatatttcacaataataatttttacttatataccatctttcaactgaacatttcagttcttccaagagcttcttagagtagtat

SEQ ID NO: 83249 - DNA, 201 bp, Homo sapiens
agcacaaatagcttatattcagatcctatcttcatttgaatatagcttttaaatgaaatgttacagtttgaagttttccttcatgcacttggtgataaacrttttctaaatttttagttaagtatatggataaaaagttatgaactattaaaaatgtgatgtggaccaaaggctaggttgtaatcttgatagtctaaaaaa

SEQ ID NO: 83250 - DNA, 201 bp, Homo sapiens; identical to SEQ ID NO: 83243

SEQ ID NO: 83251 - DNA, 201 bp, Homo sapiens; identical to SEQ ID NO: 83244

SEQ ID NO: 83252 - DNA, 172 bp, Homo sapiens; identical to SEQ ID NO: 83245

SEQ ID NO: 83253 - DNA, 201 bp, Homo sapiens; identical to SEQ ID NO: 83246

SEQ ID NO: 83254 - DNA, 201 bp, Homo sapiens
gttcttcagaacatcattttaaaggagatacttgaattgttatttaaatcaaaccagatgtaaaacactcacatacaagttcatactttaaaagaggaaakctacttaacaatgacaaatatttcacaataataatttttacttatataccatctttcaactgaacatttcagttcttccaagagcttcttagagtagtat

SEQ ID NO: 83255 - DNA, 201 bp, Homo sapiens; identical to SEQ ID NO: 83249

SEQ ID NO: 83256 - DNA, 201 bp, Homo sapiens
tatcaagtagaattgaaaaatgtgagttacataagttaaaaacttactttaaatcttaccttctataggtagctctaaataaattcatatggttatatggyatctctggtgtatactgattgagaaaataattaaactgaagttaggggagggggaccttggtttcttgtatttttcagtgaatatcctaatgtaaatggt

SEQ ID NO: 83257 - DNA, 201 bp, Homo sapiens
atatcaagtagaattgaaaaatgtgagttacataagttaaaaacttactttaaatcttaccttctataggtagctctaaataaattcatatggttatatgrcatctctggtgtatactgattgagaaaataattaaactgaagttaggggagggggaccttggtttcttgtatttttcagtgaatatcctaatgtaaatgg

SEQ ID NO: 83258 - DNA, 201 bp, Homo sapiens; identical to SEQ ID NO: 83247

SEQ ID NO: 83259 - DNA, 201 bp, Homo sapiens; identical to SEQ ID NO: 83243

SEQ ID NO: 83260 - DNA, 201 bp, Homo sapiens; identical to SEQ ID NO: 83244

SEQ ID NO: 83261 - DNA, 172 bp, Homo sapiens; identical to SEQ ID NO: 83245

SEQ ID NO: 83262 - DNA, 201 bp, Homo sapiens; identical to SEQ ID NO: 83246

SEQ ID NO: 83263 - DNA, 201 bp, Homo sapiens; identical to SEQ ID NO: 83247

SEQ ID NO: 83264 - DNA, 201 bp, Homo sapiens; identical to SEQ ID NO: 83254

SEQ ID NO: 83265 - DNA, 201 bp, Homo sapiens; identical to SEQ ID NO: 83249

SEQ ID NO: 83266 - DNA, 201 bp, Homo sapiens
cggaaagtactggaacatacaacacacacacttttagtaggagagtcagccaccacatttgctcaaagtatggggtttatcaatgaagacttatctaccastgcttctcaagctcttcattcagattggcttgctcggaattgccagccaaattattggaggaatgttataccagatccctcaaaatactgcggaccctac

SEQ ID NO: 83267 - DNA, 201 bp, Homo sapiens
ggggcactggggattaattgttcggcgatcgctggctgccgggacttttctcgcgctggtctcttcggtggtcagggatggcgcggaagtcgaacttgccygtgcttctcgtgccgtttctgctctgccaggccctagtgcgctgctccagccctctgcccctggtcgtcaacacttggccctttaagaatgcaaccgaag

SEQ ID NO: 83268 - DNA, 201 bp, Homo sapiens
gagcagtgtgacggctctgtaggctttggaggaagtcctgatgaacttggagaaaccacactagatgccatgatcatggatggcactactatggatgtagragcagtaggagatctcagacgaattaaaaatgctattggtgtggcacggaaagtactggaacatacaacacacacacttttagtaggagagtcagccacc

SEQ ID NO: 83269 - DNA, 201 bp, Homo sapiens
cagtgtgacggctctgtaggctttggaggaagtcctgatgaacttggagaaaccacactagatgccatgatcatggatggcactactatggatgtaggagyagtaggagatctcagacgaattaaaaatgctattggtgtggcacggaaagtactggaacatacaacacacacacttttagtaggagagtcagccaccaca

SEQ ID NO: 83270 - DNA, 201 bp, Homo sapiens
gtaggagatctcagacgaattaaaaatgctattggtgtggcacggaaagtactggaacatacaacacacacacttttagtaggagagtcagccaccacatytgctcaaagtatggggtttatcaatgaagacttatctaccagtgcttctcaagctcttcattcagattggcttgctcggaattgccagccaaattattgg

SEQ ID NO: 83271 - DNA, 201 bp, Homo sapiens
gagtcagccaccacatttgctcaaagtatggggtttatcaatgaagacttatctaccagtgcttctcaagctcttcattcagattggcttgctcggaattsccagccaaattattggaggaatgttataccagatccctcaaaatactgcggaccctacaaaccacctggtatcttaaagcaggatattcctatccataaa

SEQ ID NO: 83272 - DNA, 201 bp, Homo sapiens
tttgctcaaagtatggggtttatcaatgaagacttatctaccagtgcttctcaagctcttcattcagattggcttgctcggaattgccagccaaattattrgaggaatgttataccagatccctcaaaatactgcggaccctacaaaccacctggtatcttaaagcaggatattcctatccataaagaaacagaagatgat

SEQ ID NO: 83273 - DNA, 201 bp, Homo sapiens
tcctatccataaagaaacagaagatgatcgtggtcatgacactattggcatggttgtaatccataagacaggacatattgctgctggtacatctacaaatrgagactcaccaatacctggagctggagcctatgctgacgatactgcaggggcagccgcagccactgggaatggtgatatattgatgcgcttcctgccaag

SEQ ID NO: 83274 - DNA, 201 bp, Homo sapiens
ggagcctatgctgacgatactgcaggggcagccgcagccactgggaatggtgatatattgatgcgcttcctgccaagttagtttcatggtttataattcckaaaaaaatcagccaactgaggaaaaagtggactgcatctaatccatctttactgtcaacatctgtatttaaagaagaaagaaacaaaggctgaaaaggct

SEQ ID NO: 83275 - DNA, 201 bp, Homo sapiens
ggattaattgttcggcgatcgctggctgccgggacttttctcgcgctggtctcttcggtggtcagggatggcgcggaagtcgaacttgcctgtgcttctcktgccgtttctgctctgccaggccctagtgcgctgctccagccctctgcccctggtcgtcaacacttggccctttaagaatgcaaccgaagcagcgtggag

SEQ ID NO: 83276 - DNA, 201 bp, Homo sapiens
ctgcccctggtcgtcaacacttggccctttaagaatgcaaccgaagcagcgtggagggcattagcatctggaggctctgccctggatgcagtggagagcgrctgtgccatgtgtgagagagagcagtgtgacggctctgtaggctttggaggaagtcctgatgaacttggagaaaccacactagatgccatgatcatggat

SEQ ID NO: 83277 - DNA, 201 bp, Homo sapiens
atggttgtaatccataagacaggacatattgctgctggtacatctacaaatggagactcaccaatacctggagctggagcctatgctgacgatactgcagrggcagccgcagccactgggaatggtgatatattgatgcgcttcctgccaagttagtttcatggtttataattccgaaaaaaatcagccaactgaggaaaa

SEQ ID NO: 83278 - DNA, 201 bp, Homo sapiens
catggttgtaatccataagacaggacatattgctgctggtacatctacaaatggagactcaccaatacctggagctggagcctatgctgacgatactgcasgggcagccgcagccactgggaatggtgatatattgatgcgcttcctgccaagttagtttcatggtttataattccgaaaaaaatcagccaactgaggaaa

SEQ ID NO: 83279 - DNA, 201 bp, Homo sapiens
ccgggacttttctcgcgctggtctcttcggtggtcagggatggcgcggaagtcgaacttgcctgtgcttctcgtgccgtttctgctctgccaggccctagygcgctgctccagccctctgcccctggtcgtcaacacttggccctttaagaatgcaaccgaagcagcgtggagggcattagcatctggaggctctgccctg

SEQ ID NO: 83280 - DNA, 201 bp, Homo sapiens
tgcaaccgaagcagcgtggagggcattagcatctggaggctctgccctggatgcagtggagagcggctgtgccatgtgtgagagagagcagtgtgacggcyctgtaggctttggaggaagtcctgatgaacttggagaaaccacactagatgccatgatcatggatggcactactatggatgtaggagcagtaggagatct

SEQ ID NO: 83281 - DNA, 201 bp, Homo sapiens
tcaacacttggccctttaagaatgcaaccgaagcagcgtggagggcattagcatctggaggctctgccctggatgcagtggagagcggctgtgccatgtgwgagagagagcagtgtgacggctctgtaggctttggaggaagtcctgatgaacttggagaaaccacactagatgccatgatcatggatggcactactatgg

SEQ ID NO: 83282 - DNA, 201 bp, Homo sapiens
gtgatatattgatgcgcttcctgccaagttagtttcatggtttataattccgaaaaaaatcagccaactgaggaaaaagtggactgcatctaatccatctytactgtcaacatctgtatttaaagaagaaagaaacaaaggctgaaaaggctgctcactctcatcatctagtgttcctcatgtgttctaaagtctttttgt

SEQ ID NO: 83283 - DNA, 201 bp, Homo sapiens
tattgatgcgcttcctgccaagctaccaagctgtagaatacatgagaagaggagaagatccaaccatagcttgccaaaaagtgatttcaagaatccagaarcattttccagaattctttggggctgttatatgtgccaatgtgactggaagttacggtgctgcttgcaataaactttcaacatttactcagtttagtttca

SEQ ID NO: 83284 - DNA, 201 bp, Homo sapiens
ccaagctaccaagctgtagaatacatgagaagaggagaagatccaaccatagcttgccaaaaagtgatttcaagaatccagaagcattttccagaattctytggggctgttatatgtgccaatgtgactggaagttacggtgctgcttgcaataaactttcaacatttactcagtttagtttcatggtttataattccgaa

SEQ ID NO: 83285 - DNA, 201 bp, Homo sapiens; identical to SEQ ID NO: 83266

SEQ ID NO: 83286 - DNA, 201 bp, Homo sapiens; identical to SEQ ID NO: 83267

SEQ ID NO: 83287 - DNA, 201 bp, Homo sapiens; identical to SEQ ID NO: 83268

SEQ ID NO: 83288 - DNA, 201 bp, Homo sapiens; identical to SEQ ID NO: 83269

SEQ ID NO: 83289 - DNA, 201 bp, Homo sapiens; identical to SEQ ID NO: 83270

SEQ ID NO: 83290 - DNA, 201 bp, Homo sapiens; identical to SEQ ID NO: 83271

SEQ ID NO: 83291 - DNA, 201 bp, Homo sapiens; identical to SEQ ID NO: 83272

SEQ ID NO: 83292 - DNA, 201 bp, Homo sapiens
cctatccataaagaaacagaagatgatcgtggtcatgacactattggcatggttgtaatccataagacaggacatattgctgctggtacatctacaaatgrtataaaattcaaaatacatggccgtgtaggagactcaccaatacctggagctggagcctatgctgacgatactgcaggggcagccgcagccactgggaat

SEQ ID NO: 83293 - DNA, 201 bp, Homo sapiens
ctttggggctgttatatgtgccaatgtgactggaagttacggtgctgcttgcaataaactttcaacatttactcagtttagtttcatggtttataattcckaaaaaaatcagccaactgaggaaaaagtggactgcatctaatccatctttactgtcaacatctgtatttaaagaagaaagaaacaaaggctgaaaaggct

SEQ ID NO: 83294 - DNA, 157 bp, Homo sapiens
ttgtttagcttggtttgtttccctaacttctgattaactctctgtatgacaactctacagaagttgtgcgcgtgctttctcagcagcatttttccttcaamatcatctttttaatcaacagtcattaataaatgtacatgtacgatattcaaacttt

SEQ ID NO: 83295 - DNA, 201 bp, Homo sapiens; identical to SEQ ID NO: 83275

SEQ ID NO: 83296 - DNA, 201 bp, Homo sapiens; identical to SEQ ID NO: 83276

SEQ ID NO: 83297 - DNA, 201 bp, Homo sapiens
atgtggctgtattttgtatatatttaagttttaagtgacacttggatttctgatcagtgttgcaaaaaattgctactttgagatttatttccacagtgatrtattaaacccaaaaggaatcatcatatttggatgcttaaaatagagtatacaagttttttagacccaaagaaaaaaacagcagagtctcagcatgatcag

SEQ ID NO: 83298 - DNA, 201 bp, Homo sapiens
atagagtatacaagttttttagacccaaagaaaaaaacagcagagtctcagcatgatcagtcctgattgaatttcattatgtcacagtgatgcatgtcttrgcactgattattggttttacttaatattccctaaaaacttgaggaaggaagatgatagaacatgagatactctttgttttgtacatactagaaaatacag

SEQ ID NO: 83299 - DNA, 201 bp, Homo sapiens
gctgctggtacatctacaaatggtataaaattcaaaatacatggccgtgtaggagactcaccaatacctggagctggagcctatgctgacgatactgcagrggcagccgcagccactgggaatggtgatatattgatgcgcttcctgccaagctaccaagctgtagaatacatgagaagaggagaagatccaaccatagct

SEQ ID NO: 83300 - DNA, 201 bp, Homo sapiens
tgctgctggtacatctacaaatggtataaaattcaaaatacatggccgtgtaggagactcaccaatacctggagctggagcctatgctgacgatactgcasgggcagccgcagccactgggaatggtgatatattgatgcgcttcctgccaagctaccaagctgtagaatacatgagaagaggagaagatccaaccatagc

SEQ ID NO: 83301 - DNA, 201 bp, Homo sapiens
cctcatgtgttctaaagtctttttgtaaaataaacacaaaaataaatttatgttgaattggcactttctatatctgaaattgtattatctatttttatttmacctttcttatattatctgaagatgaatatgtatgtggctgtattttgtatatatttaagttttaagtgacacttggatttctgatcagtgttgcaaaaa

SEQ ID NO: 83302 - DNA, 201 bp, Homo sapiens; identical to SEQ ID NO: 83279

SEQ ID NO: 83303 - DNA, 201 bp, Homo sapiens; identical to SEQ ID NO: 83280

SEQ ID NO: 83304 - DNA, 201 bp, Homo sapiens; identical to SEQ ID NO: 83281

SEQ ID NO: 83305 - DNA, 201 bp, Homo sapiens
tgcaataaactttcaacatttactcagtttagtttcatggtttataattccgaaaaaaatcagccaactgaggaaaaagtggactgcatctaatccatctytactgtcaacatctgtatttaaagaagaaagaaacaaaggctgaaaaggctgctcactctcatcatctagtgttcctcatgtgttctaaagtctttttgt

SEQ ID NO: 83306 - DNA, 201 bp, Homo sapiens
aaaaataaatttatgttgaattggcactttctatatctgaaattgtattatctatttttatttaacctttcttatattatctgaagatgaatatgtatgtsgctgtattttgtatatatttaagttttaagtgacacttggatttctgatcagtgttgcaaaaaattgctactttgagatttatttccacagtgatatatt

SEQ ID NO: 83307 - DNA, 201 bp, Homo sapiens; identical to SEQ ID NO: 83283

SEQ ID NO: 83308 - DNA, 201 bp, Homo sapiens; identical to SEQ ID NO: 83284

SEQ ID NO: 83309 - DNA, 201 bp, Homo sapiens; identical to SEQ ID NO: 83266

SEQ ID NO: 83310 - DNA, 201 bp, Homo sapiens; identical to SEQ ID NO: 83267

SEQ ID NO: 83311 - DNA, 201 bp, Homo sapiens; identical to SEQ ID NO: 83268

SEQ ID NO: 83312 - DNA, 201 bp, Homo sapiens; identical to SEQ ID NO: 83269

SEQ ID NO: 83313 - DNA, 201 bp, Homo sapiens; identical to SEQ ID NO: 83270

SEQ ID NO: 83314 - DNA, 201 bp, Homo sapiens; identical to SEQ ID NO: 83271

SEQ ID NO: 83315 - DNA, 201 bp, Homo sapiens; identical to SEQ ID NO: 83272

SEQ ID NO: 83316 - DNA, 201 bp, Homo sapiens; identical to SEQ ID NO: 83292

SEQ ID NO: 83317 - DNA, 201 bp, Homo sapiens; identical to SEQ ID NO: 83293

SEQ ID NO: 83318 - DNA, 150 bp, Homo sapiens
ttgtttagcttggtttgtttccctaacttctgattaactctctgtatgacaactctacagaagttgtgcgcgtgctttctcagcagcatttttccttcaamatcatctttttaatcaacagtcattaataaatgtacatgtacgatattc

SEQ ID NO: 83319 - DNA, 201 bp, Homo sapiens; identical to SEQ ID NO: 83275

SEQ ID NO: 83320 - DNA, 201 bp, Homo sapiens; identical to SEQ ID NO: 83276

SEQ ID NO: 83321 - DNA, 201 bp, Homo sapiens
atgtgttctaaagtctttttgtaaaataaacacaaaaataaatttatgttgaattggcactttctatatctgaaattgtattatctatttttatttaaccrgcactgattattggttttacttaatattccctaaaaacttgaggaaggaagatgatagaacatgagatactctttgttttgtacatactagaaaatacag

SEQ ID NO: 83322 - DNA, 201 bp, Homo sapiens; identical to SEQ ID NO: 83299

SEQ ID NO: 83323 - DNA, 201 bp, Homo sapiens
cctcatgtgttctaaagtctttttgtaaaataaacacaaaaataaatttatgttgaattggcactttctatatctgaaattgtattatctatttttatttmaccagcactgattattggttttacttaatattccctaaaaacttgaggaaggaagatgatagaacatgagatactctttgttttgtacatactagaaaat

SEQ ID NO: 83324 - DNA, 201 bp, Homo sapiens; identical to SEQ ID NO: 83300

SEQ ID NO: 83325 - DNA, 201 bp, Homo sapiens; identical to SEQ ID NO: 83279

SEQ ID NO: 83326 - DNA, 201 bp, Homo sapiens; identical to SEQ ID NO: 83280

SEQ ID NO: 83327 - DNA, 201 bp, Homo sapiens; identical to SEQ ID NO: 83281

SEQ ID NO: 83328 - DNA, 201 bp, Homo sapiens; identical to SEQ ID NO: 83305

SEQ ID NO: 83329 - DNA, 201 bp, Homo sapiens; identical to SEQ ID NO: 83283

SEQ ID NO: 83330 - DNA, 201 bp, Homo sapiens; identical to SEQ ID NO: 83284

SEQ ID NO: 83331 - DNA, 201 bp, Homo sapiens; identical to SEQ ID NO: 83266

SEQ ID NO: 83332 - DNA, 201 bp, Homo sapiens; identical to SEQ ID NO: 83267

SEQ ID NO: 83333 - DNA, 201 bp, Homo sapiens; identical to SEQ ID NO: 83268

SEQ ID NO: 83334 - DNA, 201 bp, Homo sapiens; identical to SEQ ID NO: 83269

SEQ ID NO: 83335 - DNA, 201 bp, Homo sapiens; identical to SEQ ID NO: 83270

SEQ ID NO: 83336 - DNA, 201 bp, Homo sapiens; identical to SEQ ID NO: 83271

SEQ ID NO: 83337 - DNA, 201 bp, Homo sapiens; identical to SEQ ID NO: 83272

SEQ ID NO: 83338 - DNA, 201 bp, Homo sapiens; identical to SEQ ID NO: 83293

SEQ ID NO: 83339 - DNA, 157 bp, Homo sapiens; identical to SEQ ID NO: 83294

SEQ ID NO: 83340 - DNA, 201 bp, Homo sapiens; identical to SEQ ID NO: 83275

SEQ ID NO: 83341 - DNA, 201 bp, Homo sapiens; identical to SEQ ID NO: 83276

SEQ ID NO: 83342 - DNA, 201 bp, Homo sapiens; identical to SEQ ID NO: 83297

SEQ ID NO: 83343 - DNA, 201 bp, Homo sapiens; identical to SEQ ID NO: 83298

SEQ ID NO: 83344 - DNA, 201 bp, Homo sapiens
tatccataaagaaacagaagatgatcgtggtcatgacactattgccgtgtaggagactcaccaatacctggagctggagcctatgctgacgatactgcagrggcagccgcagccactgggaatggtgatatattgatgcgcttcctgccaagctaccaagctgtagaatacatgagaagaggagaagatccaaccatagct

SEQ ID NO: 83345 - DNA, 201 bp, Homo sapiens
ctatccataaagaaacagaagatgatcgtggtcatgacactattgccgtgtaggagactcaccaatacctggagctggagcctatgctgacgatactgcasgggcagccgcagccactgggaatggtgatatattgatgcgcttcctgccaagctaccaagctgtagaatacatgagaagaggagaagatccaaccatagc

SEQ ID NO: 83346 - DNA, 201 bp, Homo sapiens; identical to SEQ ID NO: 83301

SEQ ID NO: 83347 - DNA, 201 bp, Homo sapiens; identical to SEQ ID NO: 83279

SEQ ID NO: 83348 - DNA, 201 bp, Homo sapiens; identical to SEQ ID NO: 83280

SEQ ID NO: 83349 - DNA, 201 bp, Homo sapiens; identical to SEQ ID NO: 83281

SEQ ID NO: 83350 - DNA, 201 bp, Homo sapiens; identical to SEQ ID NO: 83305

SEQ ID NO: 83351 - DNA, 201 bp, Homo sapiens; identical to SEQ ID NO: 83306

SEQ ID NO: 83352 - DNA, 201 bp, Homo sapiens
ggaagttgtctgtattttcctgacagcagcccttggatttcccgaggctttgattcctgttcagctgctctgggtcaatctggtgacagatggcctgcctrccactgcactggggttcaaccctcctgatctggacatcatgaataaacctccccggaacccaaaggaaccattgatcagcgggtggctctttttccgtta

SEQ ID NO: 83353 - DNA, 201 bp, Homo sapiens
tattttcctgacagcagcccttggatttcccgaggctttgattcctgttcagctgctctgggtcaatctggtgacagatggcctgcctgccactgcactgsggttcaaccctcctgatctggacatcatgaataaacctccccggaacccaaaggaaccattgatcagcgggtggctctttttccgttacttggctattgg

SEQ ID NO: 83354 - DNA, 201 bp, Homo sapiens
ccggccgggcccccgaagccatggagaacgcgcacaccaagacggtggaggaggtgctgggccacttcggcgtcaacgagagtacggggctgagcctggarcaggtcaagaagcttaaggagagatggggctccaacgagttaccggctgaagaaggaaaaaccttgctggaacttgtgattgagcagtttgaagacttgc

SEQ ID NO: 83355 - DNA, 201 bp, Homo sapiens
gccattcctgaaggtctgcctgcagtcatcaccacctgcctggctcttggaactcgcagaatggcaaagaaaaatgccattgttcgaagcctcccgtctgyggaaacccttggttgtacttctgttatctgctcagacaagactggtacacttacaacaaaccagatgtcagtctgcaggatgttcattctggacagagtg

SEQ ID NO: 83356 - DNA, 201 bp, Homo sapiens
gactgacagttttccataaagaagatgtttaacttaatcaattaatttttttattgtttaaagcaactgtctatttctgctgaattttcacatgaacataytggctggtgatggaggtttcatactctagattttgttttgctttttctgactccagtggggcaagattttccttttttatacacataattaaagtgtcca

SEQ ID NO: 83357 - DNA, 201 bp, Homo sapiens
acatgtacagagaactaacactattttatgcaaatatttttttgtagatgaaaaagcatgtacagtgttctgtttaatactcatccttgtataaaaaaaayagttgagccagcagacattgtcagcaaattaattggcagcagattttaggaaatgaatgtgtgtggttttttttctaaaactaaatagcatgtattgtgt

SEQ ID NO: 83358 - DNA, 201 bp, Homo sapiens
ttccataaagaagatgtttaacttaatcaattaatttttttattgtttaaagcaactgtctatttctgctgaattttcacatgaacatactggctggtgawggaggtttcatactctagattttgttttgctttttctgactccagtggggcaagattttccttttttatacacataattaaagtgtccattgacatgtac

SEQ ID NO: 83359 - DNA, 201 bp, Homo sapiens
atagcacatgaccaaatgaacatattgtatagaactatttttatttgaatgtggcactaaccaccaccaccgttactacgatcaatgtttgcgcatgttcragatgagtctcaccaacagtgtgtaagtcattaacagtcctaactgtggtgttttcctccaatgccttccaacatccatcaactaaccaatactggagta

SEQ ID NO: 83360 - DNA, 201 bp, Homo sapiens
atccgggatgaaatggtggcaacagaacaggagagaacaccccttcagcaaaaactagatgaatttggggaacagctttccaaagtcatctcccttatttkcattgcagtctggatcataaatattgggcacttcaatgacccggttcatggagggtcctggatcagaggtgctatttactactttaaaattgcagtggcc

SEQ ID NO: 83361 - DNA, 201 bp, Homo sapiens
tctgtcgccgcatcggcatcttcgggcaggatgaggacgtgacgtcaaaagctttcacaggccgggagtttgatgaactcaacccctccgcccagcgagaygcctgcctgaacgcccgctgttttgctcgagttgaaccctcccacaagtctaaaatcgtagaatttcttcagtcttttgatgagattacagctatgactg

SEQ ID NO: 83362 - DNA, 201 bp, Homo sapiens
gtgacgtcaaaagctttcacaggccgggagtttgatgaactcaacccctccgcccagcgagacgcctgcctgaacgcccgctgttttgctcgagttgaacyctcccacaagtctaaaatcgtagaatttcttcagtcttttgatgagattacagctatgactggcgatggcgtgaacgatgctcctgctctgaagaaagcc

SEQ ID NO: 83363 - DNA, 201 bp, Homo sapiens
gaaggcgtggattgtgcaatctttgaatccccatacccgatgacaatggcgctctctgttctagtaactatagaaatgtgtaacgccctcaacagcttgtmcgaaaaccagtccttgctgaggatgcccccctgggagaacatctggctcgtgggctccatctgcctgtccatgtcactccacttcctgatcctctatgtc

SEQ ID NO: 83364 - DNA, 201 bp, Homo sapiens
aggcgtggattgtgcaatctttgaatccccatacccgatgacaatggcgctctctgttctagtaactatagaaatgtgtaacgccctcaacagcttgtcckaaaaccagtccttgctgaggatgcccccctgggagaacatctggctcgtgggctccatctgcctgtccatgtcactccacttcctgatcctctatgtcga

SEQ ID NO: 83365 - DNA, 201 bp, Homo sapiens
tgtgcaatctttgaatccccatacccgatgacaatggcgctctctgttctagtaactatagaaatgtgtaacgccctcaacagcttgtccgaaaaccagtmcttgctgaggatgcccccctgggagaacatctggctcgtgggctccatctgcctgtccatgtcactccacttcctgatcctctatgtcgaacccttgcca

SEQ ID NO: 83366 - DNA, 201 bp, Homo sapiens
caccaagacggtggaggaggtgctgggccacttcggcgtcaacgagagtacggggctgagcctggaacaggtcaagaagcttaaggagagatggggctccracgagttaccggctgaagaaggaaaaaccttgctggaacttgtgattgagcagtttgaagacttgctagttaggattttattactggcagcatgtatatc

SEQ ID NO: 83367 - DNA, 201 bp, Homo sapiens
cttaatgagtttaccataactggatcaacttatgcacctattggagaagtgcataaagatgataaaccagtgaattgtcaccagtatgatggtctggtagrattagcaacaatttgtgctctttgtaatgactctgctttggattacaatgaggcaaagggtgtgtatgaaaaagttggagaagctacagagactgctctc

SEQ ID NO: 83368 - DNA, 201 bp, Homo sapiens
accaagacggtggaggaggtgctgggccacttcggcgtcaacgagagtacggggctgagcctggaacaggtcaagaagcttaaggagagatggggctccamcgagttaccggctgaagaaggaaaaaccttgctggaacttgtgattgagcagtttgaagacttgctagttaggattttattactggcagcatgtatatct

SEQ ID NO: 83369 - DNA, 201 bp, Homo sapiens
ctttctaaaatagaacgtgcaaatgcctgcaactcagtcattaaacagctgatgaaaaaggaattcactctagagttttcacgtgacagaaagtcaatgtyggtttactgtacaccaaataaaccaagcaggacatcaatgagcaagatgtttgtgaaggcaaggtgctcctgaaggtgtcattgacaggtgcacccacat

SEQ ID NO: 83370 - DNA, 201 bp, Homo sapiens
ccacatgccgcggcggcggcgaaaggggaggcagcggccgataaatgctattagagcagccgccgcggagccgtccccgacgccacctccttttccttcgycgcagtttcctccgccgctgtcgggcgtgcggcgctgagggacccgggcgagcgcgccgcgcaccgccccgccggctcgcctccctcgccgcgttccgcc

SEQ ID NO: 83371 - DNA, 201 bp, Homo sapiens
tttggcttggtttgaagaaggtgaagaaacaattacagcctttgtagaaccttttgtaattttactcatattagtagccaatgcaattgtgggtgtatggyaggaaagaaatgctgaaaatgccatcgaagcccttaaggaatatgagcctgaaatgggcaaagtgtatcgacaggacagaaagagtgtgcagcggattaa

SEQ ID NO: 83372 - DNA, 201 bp, Homo sapiens
cttttccttcgccgcagtttcctccgccgctgtcgggcgtgcggcgctgagggacccgggcgagcgcgccgcgcaccgccccgccggctcgcctccctcgscgcgttccgccctcagtggtctgccgggcgccccctcctccggcccgggcggggcctctgatcgcctcaagagagcggggagggggctcgggggccgcgg

SEQ ID NO: 83373 - DNA, 201 bp, Homo sapiens
gtttactgtacaccaaataaaccaagcaggacatcaatgagcaagatgtttgtgaaggcaaggtgctcctgaaggtgtcattgacaggtgcacccacattygagttggaagtactaaggttcctatgacctctggagtcaaacagaagatcatgtctgtcattcgagagtggggtagtggcagcgacacactgcgatgcct

SEQ ID NO: 83374 - DNA, 201 bp, Homo sapiens
gaaggtgtcattgacaggtgcacccacattcgagttggaagtactaaggttcctatgacctctggagtcaaacagaagatcatgtctgtcattcgagagtrgggtagtggcagcgacacactgcgatgcctggccctggccactcatgacaacccactgagaagagaagaaatgcaccttgaggactctgccaactttatt

SEQ ID NO: 83375 - DNA, 201 bp, Homo sapiens
gggcaggatgaggacgtgacgtcaaaagctttcacaggccgggagtttgatgaactcaacccctccgcccagcgagacgcctgcctgaacgcccgctgttytgctcgagttgaaccctcccacaagtctaaaatcgtagaatttcttcagtcttttgatgagattacagctatgactggcgatggcgtgaacgatgctcct

SEQ ID NO: 83376 - DNA, 201 bp, Homo sapiens
ggatgaggacgtgacgtcaaaagctttcacaggccgggagtttgatgaactcaacccctccgcccagcgagacgcctgcctgaacgcccgctgttttgctygagttgaaccctcccacaagtctaaaatcgtagaatttcttcagtcttttgatgagattacagctatgactggcgatggcgtgaacgatgctcctgctct

SEQ ID NO: 83377 - DNA, 201 bp, Homo sapiens
aaaagctttcacaggccgggagtttgatgaactcaacccctccgcccagcgagacgcctgcctgaacgcccgctgttttgctcgagttgaaccctcccacragtctaaaatcgtagaatttcttcagtcttttgatgagattacagctatgactggcgatggcgtgaacgatgctcctgctctgaagaaagccgagattgg

SEQ ID NO: 83378 - DNA, 141 bp, Homo sapiens
ttaataaaatgctaaatgtcaatttatcactgcgcatgtttgactttagactgtaaatagagatcagtttgtttctttctgtgctggtaacaatgagcgtygcacagacatggtttcaggtaaataaatctattctatgat

SEQ ID NO: 83379 - DNA, 201 bp, Homo sapiens
acgggaggcgaggccggccgggcccccgaagccatggagaacgcgcacaccaagacggtggaggaggtgctgggccacttcggcgtcaacgagagtacggrgctgagcctggaacaggtcaagaagcttaaggagagatggggctccaacgagttaccggctgaagaaggaaaaaccttgctggaacttgtgattgagcag

SEQ ID NO: 83380 - DNA, 201 bp, Homo sapiens
gtccaagagtgtccttctaccagctgagtcatttcctacagtgtaaagaggacaacccggactttgaaggcgtggattgtgcaatctttgaatccccatamccgatgacaatggcgctctctgttctagtaactatagaaatgtgtaacgccctcaacagcttgtccgaaaaccagtccttgctgaggatgcccccctggg

SEQ ID NO: 83381 - DNA, 201 bp, Homo sapiens
ctccacttcctgatcctctatgtcgaacccttgccactcatcttccagatcacaccgctgaacgtgacccagtggctgatggtgctgaaaatctccttgcscgtgattctcatggatgagacgctcaagtttgtggcccgcaactacctggaacctggtaaagagtgtgtgcagcctgccaccaaatcctgctcgttctcg

SEQ ID NO: 83382 - DNA, 201 bp, Homo sapiens
ggcaacagaacaggagagaacaccccttcagcaaaaactagatgaatttggggaacagctttccaaagtcatctcccttatttgcattgcagtctggatcrtaaatattgggcacttcaatgacccggttcatggagggtcctggatcagaggtgctatttactactttaaaattgcagtggccctggctgtagcagccat

SEQ ID NO: 83383 - DNA, 201 bp, Homo sapiens
ctggatcagaggtgctatttactactttaaaattgcagtggccctggctgtagcagccattcctgaaggtctgcctgcagtcatcaccacctgcctggctyttggaactcgcagaatggcaaagaaaaatgccattgttcgaagcctcccgtctgtggaaacccttggttgtacttctgttatctgctcagacaagactgg

SEQ ID NO: 83384 - DNA, 201 bp, Homo sapiens
cattcgagttggaagtactaaggttcctatgacctctggagtcaaacagaagatcatgtctgtcattcgagagtggggtagtggcagcgacacactgcgaygcctggccctggccactcatgacaacccactgagaagagaagaaatgcaccttgaggactctgccaactttattaaatatgagaccaatctgaccttcgt

SEQ ID NO: 83385 - DNA, 201 bp, Homo sapiens
ctgcctgcagtcatcaccacctgcctggctcttggaactcgcagaatggcaaagaaaaatgccattgttcgaagcctcccgtctgtggaaacccttggttrtacttctgttatctgctcagacaagactggtacacttacaacaaaccagatgtcagtctgcaggatgttcattctggacagagtggaaggtgatacttgt

SEQ ID NO: 83386 - DNA, 201 bp, Homo sapiens
agcaactgtctatttctgctgaattttcacatgaacatactggctggtgatggaggtttcatactctagattttgttttgctttttctgactccagtgggrcaagattttccttttttatacacataattaaagtgtccattgacatgtacagagaactaacactattttatgcaaatatttttttgtagatgaaaaagca

SEQ ID NO: 83387 - DNA, 201 bp, Homo sapiens
attgctgttggtgacaaagttcctgctgatataaggttaacttccatcaaatctaccacactaagagttgaccagtcaattctcacaggtgaatctgtctytgtcatcaagcacactgatcccgtccctgacccacgagctgtcaaccaagataaaaagaacatgctgttttctggtacaaacattgctgctgggaaagct

SEQ ID NO: 83388 - DNA, 201 bp, Homo sapiens
tcaatcgactgggtttatgtcccttcacatagtttttaaggttatttatttaaatgtctaatgtattttattgtaacagacattgttttgccaacattgcytatttcagtggcacgtcatctagttttaaaaaaataaaacattttaaatggacagagaaaaataactgtcttgtctttaactcgtaagtggcttacctgg

SEQ ID NO: 83389 - DNA, 201 bp, Homo sapiens
ctgccaactttattaaatatgagaccaatctgaccttcgttggctgcgtgggcatgctggatcctccgagaatcgaggtggcctcctccgtgaagctgtgmcggcaagcaggcatccgggtcatcatgatcactggggacaacaagggcactgctgtggccatctgtcgccgcatcggcatcttcgggcaggatgaggacg

SEQ ID NO: 83390 - DNA, 201 bp, Homo sapiens
tcaattctcacaggtgaatctgtctctgtcatcaagcacactgatcccgtccctgacccacgagctgtcaaccaagataaaaagaacatgctgttttctgrtacaaacattgctgctgggaaagctatgggagtggtggtagcaactggagttaacaccgaaattggcaagatccgggatgaaatggtggcaacagaacag

SEQ ID NO: 83391 - DNA, 201 bp, Homo sapiens
gaatggttaaaatgtaggcctccagttcattttcagttattttctgagtgtgcagacagctatttcgcactgtattaaatgtaacttatttaatgaaatcwgaagcagtagacagatgttggtgcaatacaaatattgtgatgcatttatcttaataaaatgctaaatgtcaatttatcactgcgcatgtttgactttaga

SEQ ID NO: 83392 - DNA, 201 bp, Homo sapiens
aaagctttcacaggccgggagtttgatgaactcaacccctccgcccagcgagacgcctgcctgaacgcccgctgttttgctcgagttgaaccctcccacargtctaaaatcgtagaatttcttcagtcttttgatgagattacagctatgactggcgatggcgtgaacgatgctcctgctctgaagaaagccgagattggc

SEQ ID NO: 83393 - DNA, 201 bp, Homo sapiens
ccattgttcgaagcctcccgtctgtggaaacccttggttgtacttctgttatctgctcagacaagactggtacacttacaacaaaccagatgtcagtctgmaggatgttcattctggacagagtggaaggtgatacttgttcccttaatgagtttaccataactggatcaacttatgcacctattggagaagtgcataaag

SEQ ID NO: 83394 - DNA, 201 bp, Homo sapiens
tagaaccttttgtaattttactcatattagtagccaatgcaattgtgggtgtatggcaggaaagaaatgctgaaaatgccatcgaagcccttaaggaatakgagcctgaaatgggcaaagtgtatcgacaggacagaaagagtgtgcagcggattaaagctaaagacatagttcctggtgatattgtagaaattgctgttg

SEQ ID NO: 83395 - DNA, 201 bp, Homo sapiens
atcaccacctgcctggctcttggaactcgcagaatggcaaagaaaaatgccattgttcgaagcctcccgtctgtggaaacccttggttgtacttctgttayctgctcagacaagactggtacacttacaacaaaccagatgtcagtctgcaggatgttcattctggacagagtggaaggtgatacttgttcccttaatgag

SEQ ID NO: 83396 - DNA, 201 bp, Homo sapiens
agacagctatttcgcactgtattaaatgtaacttatttaatgaaatcagaagcagtagacagatgttggtgcaatacaaatattgtgatgcatttatcttmataaaatgctaaatgtcaatttatcactgcgcatgtttgactttagactgtaaatagagatcagtttgtttctttctgtgctggtaacaatgagcgtcgc

SEQ ID NO: 83397 - DNA, 201 bp, Homo sapiens
tcgtagaatttcttcagtcttttgatgagattacagctatgactggcgatggcgtgaacgatgctcctgctctgaagaaagccgagattggcattgctatrggctctggcactgcggtggctaaaaccgcctctgagatggtcctggcggatgacaacttctccaccattgtggctgccgttgaggaggggcgggcaatct

SEQ ID NO: 83398 - DNA, 201 bp, Homo sapiens
tggagggtcctggatcagaggtgctatttactactttaaaattgcagtggccctggctgtagcagccattcctgaaggtctgcctgcagtcatcaccaccygcctggctcttggaactcgcagaatggcaaagaaaaatgccattgttcgaagcctcccgtctgtggaaacccttggttgtacttctgttatctgctcaga

SEQ ID NO: 83399 - DNA, 201 bp, Homo sapiens
ttagtagccaatgcaattgtgggtgtatggcaggaaagaaatgctgaaaatgccatcgaagcccttaaggaatatgagcctgaaatgggcaaagtgtatcracaggacagaaagagtgtgcagcggattaaagctaaagacatagttcctggtgatattgtagaaattgctgttggtgacaaagttcctgctgatataagg

SEQ ID NO: 83400 - DNA, 201 bp, Homo sapiens
attgctatgggctctggcactgcggtggctaaaaccgcctctgagatggtcctggcggatgacaacttctccaccattgtggctgccgttgaggaggggcrggcaatctacaacaacatgaaacagttcatccgctacctcatctcgtccaacgtcggggaagttgtctgtattttcctgacagcagcccttggatttccc

SEQ ID NO: 83401 - DNA, 201 bp, Homo sapiens
cccctccgcccagcgagacgcctgcctgaacgcccgctgttttgctcgagttgaaccctcccacaagtctaaaatcgtagaatttcttcagtcttttgatkagattacagctatgactggcgatggcgtgaacgatgctcctgctctgaagaaagccgagattggcattgctatgggctctggcactgcggtggctaaaac

SEQ ID NO: 83402 - DNA, 201 bp, Homo sapiens
ctgacagcagcccttggatttcccgaggctttgattcctgttcagctgctctgggtcaatctggtgacagatggcctgcctgccactgcactggggttcawccctcctgatctggacatcatgaataaacctccccggaacccaaaggaaccattgatcagcgggtggctctttttccgttacttggctattggctgttac

SEQ ID NO: 83403 - DNA, 201 bp, Homo sapiens
ctgcctgaacgcccgctgttttgctcgagttgaaccctcccacaagtctaaaatcgtagaatttcttcagtcttttgatgagattacagctatgactggcratggcgtgaacgatgctcctgctctgaagaaagccgagattggcattgctatgggctctggcactgcggtggctaaaaccgcctctgagatggtcctggc

SEQ ID NO: 83404 - DNA, 201 bp, Homo sapiens
ctgactccagtggggcaagattttccttttttatacacataattaaagtgtccattgacatgtacagagaactaacactattttatgcaaatatttttttktagatgaaaaagcatgtacagtgttctgtttaatactcatccttgtataaaaaaaatagttgagccagcagacattgtcagcaaattaattggcagcaga

SEQ ID NO: 83405 - DNA, 201 bp, Homo sapiens
ctggcggatgacaacttctccaccattgtggctgccgttgaggaggggcgggcaatctacaacaacatgaaacagttcatccgctacctcatctcgtccarcgtcggggaagttgtctgtattttcctgacagcagcccttggatttcccgaggctttgattcctgttcagctgctctgggtcaatctggtgacagatggc

SEQ ID NO: 83406 - DNA, 201 bp, Homo sapiens
ggatgacaacttctccaccattgtggctgccgttgaggaggggcgggcaatctacaacaacatgaaacagttcatccgctacctcatctcgtccaacgtcvgggaagttgtctgtattttcctgacagcagcccttggatttcccgaggctttgattcctgttcagctgctctgggtcaatctggtgacagatggcctgcc

SEQ ID NO: 83407 - DNA, 201 bp, Homo sapiens
aaagccgagattggcattgctatgggctctggcactgcggtggctaaaaccgcctctgagatggtcctggcggatgacaacttctccaccattgtggctgmcgttgaggaggggcgggcaatctacaacaacatgaaacagttcatccgctacctcatctcgtccaacgtcggggaagttgtctgtattttcctgacagca

SEQ ID NO: 83408 - DNA, 201 bp, Homo sapiens
tgcactggggttcaaccctcctgatctggacatcatgaataaacctccccggaacccaaaggaaccattgatcagcgggtggctctttttccgttacttgsctattggctgttacgtcggcgctgctaccgtgggtgctgctgcatggtggttcattgctgctgacggtggtccaagagtgtccttctaccagctgagtca

SEQ ID NO: 83409 - DNA, 201 bp, Homo sapiens
tggcattgctatgggctctggcactgcggtggctaaaaccgcctctgagatggtcctggcggatgacaacttctccaccattgtggctgccgttgaggagrggcgggcaatctacaacaacatgaaacagttcatccgctacctcatctcgtccaacgtcggggaagttgtctgtattttcctgacagcagcccttggatt

SEQ ID NO: 83410 - DNA, 201 bp, Homo sapiens
ccctcctgatctggacatcatgaataaacctccccggaacccaaaggaaccattgatcagcgggtggctctttttccgttacttggctattggctgttacktcggcgctgctaccgtgggtgctgctgcatggtggttcattgctgctgacggtggtccaagagtgtccttctaccagctgagtcatttcctacagtgtaa

SEQ ID NO: 83411 - DNA, 201 bp, Homo sapiens
ttacgtcggcgctgctaccgtgggtgctgctgcatggtggttcattgctgctgacggtggtccaagagtgtccttctaccagctgagtcatttcctacagkgtaaagaggacaacccggactttgaaggcgtggattgtgcaatctttgaatccccatacccgatgacaatggcgctctctgttctagtaactatagaaat

SEQ ID NO: 83412 - DNA, 201 bp, Homo sapiens
gaaacagttcatccgctacctcatctcgtccaacgtcggggaagttgtctgtattttcctgacagcagcccttggatttcccgaggctttgattcctgttyagctgctctgggtcaatctggtgacagatggcctgcctgccactgcactggggttcaaccctcctgatctggacatcatgaataaacctccccggaaccc

SEQ ID NO: 83413 - DNA, 201 bp, Homo sapiens
tccctcacccactttggcctccgttcaccccaccccaccccacctctccccaccttacccccgccccgcttggcttcttctttaggattgtgatggttcgytctgtttacatcagttttaacgagaggtatgcctgtactcgcttgtgcagaaaacattgttccagattcaatcgactgggtttatgtcccttcacatagt

SEQ ID NO: 83414 - DNA, 201 bp, Homo sapiens; identical to SEQ ID NO: 83352

SEQ ID NO: 83415 - DNA, 201 bp, Homo sapiens; identical to SEQ ID NO: 83353

SEQ ID NO: 83416 - DNA, 201 bp, Homo sapiens
ccggccgggcccccgaagccatggagaacgcgcacaccaagacggtggaggaggtgctgggccacttcggcgtcaacgagagtacggggctgagcctggarcaggtcaagaagcttaaggagagatggggctccaacggtaggtgcagggcgaaaaaccttgctggaacttgtgattgagcagtttgaagacttgctagtt

SEQ ID NO: 83417 - DNA, 201 bp, Homo sapiens; identical to SEQ ID NO: 83355

SEQ ID NO: 83418 - DNA, 201 bp, Homo sapiens; identical to SEQ ID NO: 83356

SEQ ID NO: 83419 - DNA, 201 bp, Homo sapiens; identical to SEQ ID NO: 83357

SEQ ID NO: 83420 - DNA, 201 bp, Homo sapiens; identical to SEQ ID NO: 83358

SEQ ID NO: 83421 - DNA, 201 bp, Homo sapiens; identical to SEQ ID NO: 83359

SEQ ID NO: 83422 - DNA, 201 bp, Homo sapiens; identical to SEQ ID NO: 83360

SEQ ID NO: 83423 - DNA, 201 bp, Homo sapiens; identical to SEQ ID NO: 83361

SEQ ID NO: 83424 - DNA, 201 bp, Homo sapiens; identical to SEQ ID NO: 83362

SEQ ID NO: 83425 - DNA, 201 bp, Homo sapiens; identical to SEQ ID NO: 83363

SEQ ID NO: 83426 - DNA, 201 bp, Homo sapiens; identical to SEQ ID NO: 83364

SEQ ID NO: 83427 - DNA, 201 bp, Homo sapiens
caccaagacggtggaggaggtgctgggccacttcggcgtcaacgagagtacggggctgagcctggaacaggtcaagaagcttaaggagagatggggctccracggtaggtgcagggcgaaaaaccttgctggaacttgtgattgagcagtttgaagacttgctagttaggattttattactggcagcatgtatatcttttg

SEQ ID NO: 83428 - DNA, 201 bp, Homo sapiens; identical to SEQ ID NO: 83365

SEQ ID NO: 83429 - DNA, 201 bp, Homo sapiens; identical to SEQ ID NO: 83367

SEQ ID NO: 83430 - DNA, 201 bp, Homo sapiens; identical to SEQ ID NO: 83369

SEQ ID NO: 83431 - DNA, 201 bp, Homo sapiens; identical to SEQ ID NO: 83370

SEQ ID NO: 83432 - DNA, 201 bp, Homo sapiens
accaagacggtggaggaggtgctgggccacttcggcgtcaacgagagtacggggctgagcctggaacaggtcaagaagcttaaggagagatggggctccamcggtaggtgcagggcgaaaaaccttgctggaacttgtgattgagcagtttgaagacttgctagttaggattttattactggcagcatgtatatcttttgt

SEQ ID NO: 83433 - DNA, 201 bp, Homo sapiens; identical to SEQ ID NO: 83373

SEQ ID NO: 83434 - DNA, 201 bp, Homo sapiens; identical to SEQ ID NO: 83372

SEQ ID NO: 83435 - DNA, 201 bp, Homo sapiens; identical to SEQ ID NO: 83371

SEQ ID NO: 83436 - DNA, 201 bp, Homo sapiens; identical to SEQ ID NO: 83374

SEQ ID NO: 83437 - DNA, 201 bp, Homo sapiens; identical to SEQ ID NO: 83375

SEQ ID NO: 83438 - DNA, 201 bp, Homo sapiens; identical to SEQ ID NO: 83376

SEQ ID NO: 83439 - DNA, 201 bp, Homo sapiens; identical to SEQ ID NO: 83377

SEQ ID NO: 83440 - DNA, 141 bp, Homo sapiens; identical to SEQ ID NO: 83378

SEQ ID NO: 83441 - DNA, 201 bp, Homo sapiens
acgggaggcgaggccggccgggcccccgaagccatggagaacgcgcacaccaagacggtggaggaggtgctgggccacttcggcgtcaacgagagtacggrgctgagcctggaacaggtcaagaagcttaaggagagatggggctccaacggtaggtgcagggcgaaaaaccttgctggaacttgtgattgagcagtttga

SEQ ID NO: 83442 - DNA, 201 bp, Homo sapiens; identical to SEQ ID NO: 83380

SEQ ID NO: 83443 - DNA, 201 bp, Homo sapiens; identical to SEQ ID NO: 83382

SEQ ID NO: 83444 - DNA, 201 bp, Homo sapiens; identical to SEQ ID NO: 83381

SEQ ID NO: 83445 - DNA, 201 bp, Homo sapiens; identical to SEQ ID NO: 83383

SEQ ID NO: 83446 - DNA, 201 bp, Homo sapiens; identical to SEQ ID NO: 83384

SEQ ID NO: 83447 - DNA, 201 bp, Homo sapiens; identical to SEQ ID NO: 83385

SEQ ID NO: 83448 - DNA, 201 bp, Homo sapiens; identical to SEQ ID NO: 83386

SEQ ID NO: 83449 - DNA, 201 bp, Homo sapiens; identical to SEQ ID NO: 83389

SEQ ID NO: 83450 - DNA, 201 bp, Homo sapiens; identical to SEQ ID NO: 83387

SEQ ID NO: 83451 - DNA, 201 bp, Homo sapiens; identical to SEQ ID NO: 83388

SEQ ID NO: 83452 - DNA, 201 bp, Homo sapiens; identical to SEQ ID NO: 83392

SEQ ID NO: 83453 - DNA, 201 bp, Homo sapiens; identical to SEQ ID NO: 83390

SEQ ID NO: 83454 - DNA, 201 bp, Homo sapiens; identical to SEQ ID NO: 83391

SEQ ID NO: 83455 - DNA, 201 bp, Homo sapiens; identical to SEQ ID NO: 83395

SEQ ID NO: 83456 - DNA, 201 bp, Homo sapiens; identical to SEQ ID NO: 83397

SEQ ID NO: 83457 - DNA, 201 bp, Homo sapiens; identical to SEQ ID NO: 83394

SEQ ID NO: 83458 - DNA, 201 bp, Homo sapiens; identical to SEQ ID NO: 83393

SEQ ID NO: 83459 - DNA, 201 bp, Homo sapiens; identical to SEQ ID NO: 83396

SEQ ID NO: 83460 - DNA, 201 bp, Homo sapiens; identical to SEQ ID NO: 83398

SEQ ID NO: 83461 - DNA, 201 bp, Homo sapiens; identical to SEQ ID NO: 83401

SEQ ID NO: 83462 - DNA, 201 bp, Homo sapiens; identical to SEQ ID NO: 83400

SEQ ID NO: 83463 - DNA, 201 bp, Homo sapiens; identical to SEQ ID NO: 83399

SEQ ID NO: 83464 - DNA, 201 bp, Homo sapiens; identical to SEQ ID NO: 83402

SEQ ID NO: 83465 - DNA, 201 bp, Homo sapiens; identical to SEQ ID NO: 83403

SEQ ID NO: 83466 - DNA, 201 bp, Homo sapiens; identical to SEQ ID NO: 83405

SEQ ID NO: 83467 - DNA, 201 bp, Homo sapiens; identical to SEQ ID NO: 83404

SEQ ID NO: 83468 - DNA, 201 bp, Homo sapiens; identical to SEQ ID NO: 83406

SEQ ID NO: 83469 - DNA, 201 bp, Homo sapiens; identical to SEQ ID NO: 83407

SEQ ID NO: 83470 - DNA, 201 bp, Homo sapiens; identical to SEQ ID NO: 83408

SEQ ID NO: 83471 - DNA, 201 bp, Homo sapiens; identical to SEQ ID NO: 83409

SEQ ID NO: 83472 - DNA, 201 bp, Homo sapiens; identical to SEQ ID NO: 83410

SEQ ID NO: 83473 - DNA, 201 bp, Homo sapiens; identical to SEQ ID NO: 83411

SEQ ID NO: 83474 - DNA, 201 bp, Homo sapiens; identical to SEQ ID NO: 83412

SEQ ID NO: 83475 - DNA, 201 bp, Homo sapiens; identical to SEQ ID NO: 83413

SEQ ID NO: 83476 - DNA, 201 bp, Homo sapiens; identical to SEQ ID NO: 83352

SEQ ID NO: 83477 - DNA, 201 bp, Homo sapiens; identical to SEQ ID NO: 83353

SEQ ID NO: 83478 - DNA, 201 bp, Homo sapiens; identical to SEQ ID NO: 83416

SEQ ID NO: 83479 - DNA, 201 bp, Homo sapiens; identical to SEQ ID NO: 83355

SEQ ID NO: 83480 - DNA, 201 bp, Homo sapiens; identical to SEQ ID NO: 83356

SEQ ID NO: 83481 - DNA, 201 bp, Homo sapiens; identical to SEQ ID NO: 83357

SEQ ID NO: 83482 - DNA, 201 bp, Homo sapiens; identical to SEQ ID NO: 83358

SEQ ID NO: 83483 - DNA, 201 bp, Homo sapiens
atagcacatgaccaaatgaacatattgtatagaactatttttatttgaatgtggcactaaccaccaccaccgttactacgatcaatgtttgcgcatgttcragatgagtctcaccaacagtgtgtaagtcattaacagtcctaactgtggtgttttcctccaatgccttccaacatccatcaactaacgtgagtattttct

SEQ ID NO: 83484 - DNA, 201 bp, Homo sapiens; identical to SEQ ID NO: 83360

SEQ ID NO: 83485 - DNA, 201 bp, Homo sapiens; identical to SEQ ID NO: 83361

SEQ ID NO: 83486 - DNA, 201 bp, Homo sapiens; identical to SEQ ID NO: 83362

SEQ ID NO: 83487 - DNA, 201 bp, Homo sapiens; identical to SEQ ID NO: 83363

SEQ ID NO: 83488 - DNA, 201 bp, Homo sapiens; identical to SEQ ID NO: 83364

SEQ ID NO: 83489 - DNA, 201 bp, Homo sapiens; identical to SEQ ID NO: 83427

SEQ ID NO: 83490 - DNA, 201 bp, Homo sapiens; identical to SEQ ID NO: 83365

SEQ ID NO: 83491 - DNA, 201 bp, Homo sapiens; identical to SEQ ID NO: 83367

SEQ ID NO: 83492 - DNA, 201 bp, Homo sapiens
ctttctaaaatagaacgtgcaaatgcctgcaactcagtcattaaacagctgatgaaaaaggaattcactctagagttttcacgtgacagaaagtcaatgtyggtttactgtacaccaaataaaccaagcaggacatcaatgagcaagatgtttgtgaagggtgctcctgaaggtgtcattgacaggtgcacccacattcga

SEQ ID NO: 83493 - DNA, 201 bp, Homo sapiens; identical to SEQ ID NO: 83370

SEQ ID NO: 83494 - DNA, 201 bp, Homo sapiens; identical to SEQ ID NO: 83432

SEQ ID NO: 83495 - DNA, 201 bp, Homo sapiens
gtcggtttactgtacaccaaataaaccaagcaggacatcaatgagcaagatgtttgtgaagggtgctcctgaaggtgtcattgacaggtgcacccacattygagttggaagtactaaggttcctatgacctctggagtcaaacagaagatcatgtctgtcattcgagagtggggtagtggcagcgacacactgcgatgcct

SEQ ID NO: 83496 - DNA, 201 bp, Homo sapiens; identical to SEQ ID NO: 83372

SEQ ID NO: 83497 - DNA, 201 bp, Homo sapiens; identical to SEQ ID NO: 83371

SEQ ID NO: 83498 - DNA, 201 bp, Homo sapiens; identical to SEQ ID NO: 83374

SEQ ID NO: 83499 - DNA, 201 bp, Homo sapiens; identical to SEQ ID NO: 83375

SEQ ID NO: 83500 - DNA, 201 bp, Homo sapiens; identical to SEQ ID NO: 83376

SEQ ID NO: 83501 - DNA, 201 bp, Homo sapiens; identical to SEQ ID NO: 83377

SEQ ID NO: 83502 - DNA, 201 bp, Homo sapiens; identical to SEQ ID NO: 83441

SEQ ID NO: 83503 - DNA, 201 bp, Homo sapiens; identical to SEQ ID NO: 83380

SEQ ID NO: 83504 - DNA, 201 bp, Homo sapiens; identical to SEQ ID NO: 83382

SEQ ID NO: 83505 - DNA, 201 bp, Homo sapiens; identical to SEQ ID NO: 83381

SEQ ID NO: 83506 - DNA, 201 bp, Homo sapiens; identical to SEQ ID NO: 83383

SEQ ID NO: 83507 - DNA, 201 bp, Homo sapiens; identical to SEQ ID NO: 83385

SEQ ID NO: 83508 - DNA, 201 bp, Homo sapiens; identical to SEQ ID NO: 83384

SEQ ID NO: 83509 - DNA, 201 bp, Homo sapiens; identical to SEQ ID NO: 83386

SEQ ID NO: 83510 - DNA, 201 bp, Homo sapiens; identical to SEQ ID NO: 83387

SEQ ID NO: 83511 - DNA, 201 bp, Homo sapiens; identical to SEQ ID NO: 83389

SEQ ID NO: 83512 - DNA, 201 bp, Homo sapiens; identical to SEQ ID NO: 83388

SEQ ID NO: 83513 - DNA, 201 bp, Homo sapiens; identical to SEQ ID NO: 83390

SEQ ID NO: 83514 - DNA, 201 bp, Homo sapiens; identical to SEQ ID NO: 83392

SEQ ID NO: 83515 - DNA, 201 bp, Homo sapiens; identical to SEQ ID NO: 83397

SEQ ID NO: 83516 - DNA, 201 bp, Homo sapiens; identical to SEQ ID NO: 83395

SEQ ID NO: 83517 - DNA, 201 bp, Homo sapiens; identical to SEQ ID NO: 83393

SEQ ID NO: 83518 - DNA, 201 bp, Homo sapiens; identical to SEQ ID NO: 83394

SEQ ID NO: 83519 - DNA, 201 bp, Homo sapiens; identical to SEQ ID NO: 83400

SEQ ID NO: 83520 - DNA, 201 bp, Homo sapiens; identical to SEQ ID NO: 83398

SEQ ID NO: 83521 - DNA, 201 bp, Homo sapiens; identical to SEQ ID NO: 83399

SEQ ID NO: 83522 - DNA, 201 bp, Homo sapiens; identical to SEQ ID NO: 83401

SEQ ID NO: 83523 - DNA, 201 bp, Homo sapiens; identical to SEQ ID NO: 83403

SEQ ID NO: 83524 - DNA, 201 bp, Homo sapiens; identical to SEQ ID NO: 83402

SEQ ID NO: 83525 - DNA, 201 bp, Homo sapiens; identical to SEQ ID NO: 83405

SEQ ID NO: 83526 - DNA, 201 bp, Homo sapiens; identical to SEQ ID NO: 83404

SEQ ID NO: 83527 - DNA, 201 bp, Homo sapiens; identical to SEQ ID NO: 83406

SEQ ID NO: 83528 - DNA, 201 bp, Homo sapiens; identical to SEQ ID NO: 83408

SEQ ID NO: 83529 - DNA, 201 bp, Homo sapiens; identical to SEQ ID NO: 83407

SEQ ID NO: 83530 - DNA, 201 bp, Homo sapiens; identical to SEQ ID NO: 83410

SEQ ID NO: 83531 - DNA, 201 bp, Homo sapiens; identical to SEQ ID NO: 83409

SEQ ID NO: 83532 - DNA, 201 bp, Homo sapiens; identical to SEQ ID NO: 83411

SEQ ID NO: 83533 - DNA, 201 bp, Homo sapiens; identical to SEQ ID NO: 83412

SEQ ID NO: 83534 - DNA, 201 bp, Homo sapiens; identical to SEQ ID NO: 83413

SEQ ID NO: 83535 - DNA, 201 bp, Homo sapiens; identical to SEQ ID NO: 83352

SEQ ID NO: 83536 - DNA, 201 bp, Homo sapiens; identical to SEQ ID NO: 83353

SEQ ID NO: 83537 - DNA, 201 bp, Homo sapiens; identical to SEQ ID NO: 83416

SEQ ID NO: 83538 - DNA, 201 bp, Homo sapiens; identical to SEQ ID NO: 83355

SEQ ID NO: 83539 - DNA, 201 bp, Homo sapiens; identical to SEQ ID NO: 83360

SEQ ID NO: 83540 - DNA, 201 bp, Homo sapiens; identical to SEQ ID NO: 83361

SEQ ID NO: 83541 - DNA, 201 bp, Homo sapiens; identical to SEQ ID NO: 83362

SEQ ID NO: 83542 - DNA, 201 bp, Homo sapiens; identical to SEQ ID NO: 83363

SEQ ID NO: 83543 - DNA, 201 bp, Homo sapiens; identical to SEQ ID NO: 83364

SEQ ID NO: 83544 - DNA, 201 bp, Homo sapiens; identical to SEQ ID NO: 83427

SEQ ID NO: 83545 - DNA, 201 bp, Homo sapiens; identical to SEQ ID NO: 83365

SEQ ID NO: 83546 - DNA, 201 bp, Homo sapiens; identical to SEQ ID NO: 83367

SEQ ID NO: 83547 - DNA, 201 bp, Homo sapiens; identical to SEQ ID NO: 83432

SEQ ID NO: 83548 - DNA, 201 bp, Homo sapiens; identical to SEQ ID NO: 83370

SEQ ID NO: 83549 - DNA, 201 bp, Homo sapiens; identical to SEQ ID NO: 83492

SEQ ID NO: 83550 - DNA, 201 bp, Homo sapiens; identical to SEQ ID NO: 83495

SEQ ID NO: 83551 - DNA, 201 bp, Homo sapiens; identical to SEQ ID NO: 83372

SEQ ID NO: 83552 - DNA, 201 bp, Homo sapiens; identical to SEQ ID NO: 83371

SEQ ID NO: 83553 - DNA, 201 bp, Homo sapiens; identical to SEQ ID NO: 83374

SEQ ID NO: 83554 - DNA, 201 bp, Homo sapiens; identical to SEQ ID NO: 83375

SEQ ID NO: 83555 - DNA, 201 bp, Homo sapiens; identical to SEQ ID NO: 83376

SEQ ID NO: 83556 - DNA, 201 bp, Homo sapiens; identical to SEQ ID NO: 83377

SEQ ID NO: 83557 - DNA, 141 bp, Homo sapiens; identical to SEQ ID NO: 83378

SEQ ID NO: 83558 - DNA, 201 bp, Homo sapiens; identical to SEQ ID NO: 83441

SEQ ID NO: 83559 - DNA, 201 bp, Homo sapiens; identical to SEQ ID NO: 83380

SEQ ID NO: 83560 - DNA, 201 bp, Homo sapiens; identical to SEQ ID NO: 83382

SEQ ID NO: 83561 - DNA, 201 bp, Homo sapiens
ctccacttcctgatcctctatgtcgaacccttgccactcatcttccagatcacaccgctgaacgtgacccagtggctgatggtgctgaaaatctccttgcscgtgattctcatggatgagacgctcaagtttgtggcccgcaactacctggaacctgcaatactggagtaaccgcttcctaaaccattttgcagaaatgta

SEQ ID NO: 83562 - DNA, 201 bp, Homo sapiens; identical to SEQ ID NO: 83383

SEQ ID NO: 83563 - DNA, 201 bp, Homo sapiens; identical to SEQ ID NO: 83384

SEQ ID NO: 83564 - DNA, 201 bp, Homo sapiens; identical to SEQ ID NO: 83385

SEQ ID NO: 83565 - DNA, 201 bp, Homo sapiens; identical to SEQ ID NO: 83389

SEQ ID NO: 83566 - DNA, 201 bp, Homo sapiens; identical to SEQ ID NO: 83387

SEQ ID NO: 83567 - DNA, 201 bp, Homo sapiens; identical to SEQ ID NO: 83391

SEQ ID NO: 83568 - DNA, 201 bp, Homo sapiens; identical to SEQ ID NO: 83392

SEQ ID NO: 83569 - DNA, 201 bp, Homo sapiens; identical to SEQ ID NO: 83390

SEQ ID NO: 83570 - DNA, 201 bp, Homo sapiens; identical to SEQ ID NO: 83396

SEQ ID NO: 83571 - DNA, 201 bp, Homo sapiens; identical to SEQ ID NO: 83394

SEQ ID NO: 83572 - DNA, 201 bp, Homo sapiens; identical to SEQ ID NO: 83393

SEQ ID NO: 83573 - DNA, 201 bp, Homo sapiens; identical to SEQ ID NO: 83395

SEQ ID NO: 83574 - DNA, 201 bp, Homo sapiens; identical to SEQ ID NO: 83397

SEQ ID NO: 83575 - DNA, 201 bp, Homo sapiens; identical to SEQ ID NO: 83401

SEQ ID NO: 83576 - DNA, 201 bp, Homo sapiens; identical to SEQ ID NO: 83399

SEQ ID NO: 83577 - DNA, 201 bp, Homo sapiens; identical to SEQ ID NO: 83398

SEQ ID NO: 83578 - DNA, 201 bp, Homo sapiens; identical to SEQ ID NO: 83400

SEQ ID NO: 83579 - DNA, 201 bp, Homo sapiens; identical to SEQ ID NO: 83402

SEQ ID NO: 83580 - DNA, 201 bp, Homo sapiens; identical to SEQ ID NO: 83403

SEQ ID NO: 83581 - DNA, 201 bp, Homo sapiens; identical to SEQ ID NO: 83405

SEQ ID NO: 83582 - DNA, 201 bp, Homo sapiens; identical to SEQ ID NO: 83406

SEQ ID NO: 83583 - DNA, 201 bp, Homo sapiens; identical to SEQ ID NO: 83407

SEQ ID NO: 83584 - DNA, 201 bp, Homo sapiens; identical to SEQ ID NO: 83408

SEQ ID NO: 83585 - DNA, 201 bp, Homo sapiens; identical to SEQ ID NO: 83409

SEQ ID NO: 83586 - DNA, 201 bp, Homo sapiens; identical to SEQ ID NO: 83410

SEQ ID NO: 83587 - DNA, 201 bp, Homo sapiens; identical to SEQ ID NO: 83411

SEQ ID NO: 83588 - DNA, 201 bp, Homo sapiens; identical to SEQ ID NO: 83412

SEQ ID NO: 83589 - DNA, 201 bp, Homo sapiens
agccccaggtgtgtgggttcatatctgacagaagtgtcaaggaagtggcctgtgggggaaaccactctgtgttcctgctggaagatggggaagtttacacrtgtggtttgaacaccaaggggcaactgggccatgagagggaaggaaacaagccagaacaaattggagctctggcagatcagcatatcattcatgtggcat

SEQ ID NO: 83590 - DNA, 201 bp, Homo sapiens
cctcttgcactctcgcttttggagcaagttgcattaactattttgagtctctatattgtccaagaaaagtagaaataataaatttactttccctttttctrtcaccttatgtcctctaccattttctccttcctcccttcccttattttctccttttcgtaccctgtgtcctccctgattttcctttcgtttcttctttat

SEQ ID NO: 83591 - DNA, 201 bp, Homo sapiens
gctgacccaggcccttgacaactatgaagggtttagtttggcctgaggcttctcagcttgtccagtatttcccttcgttcctcagtgtccacattgaggcytatacagaaaatcatggggagtgatttctatttttttattgtctaagtgggttgggacttttaaatactgagcctggttgatgtgtttctgggattgtat

SEQ ID NO: 83592 - DNA, 201 bp, Homo sapiens
aagtagaaataataaatttactttccctttttctatcaccttatgtcctctaccattttctccttcctcccttcccttattttctccttttcgtaccctgygtcctccctgattttcctttcgtttcttctttattttatcccattctctgttacttgactcagtgctcccttcctctcctctccttctagtggatgcatg

SEQ ID NO: 83593 - DNA, 201 bp, Homo sapiens
ctctctacaagaagttactcaatgtaaagcctggcttggaagacttaaaggagttgtcacccactgaaggaaggagtctccaagagcttttagattacccyggggaggatgtggaggagactttctgcctcaacttcacgatctgccgagaaagctatggagtgattgaacagaagaagctgatacctgggggagataatg

SEQ ID NO: 83594 - DNA, 201 bp, Homo sapiens
cttcctaaaggtgtgtggtggcaaagtacttgagctcttccagccttcagaactgagggctatgatggtggggaacagcaactacaactgggaagaactgsaagagactgccatctacaagggagattactcggccacacatcccactgtaaaactattttgggaaacatttcatgagtttccattggaaaagaagaagaa

SEQ ID NO: 83595 - DNA, 201 bp, Homo sapiens
ctggtttcacttgattggtataacctgtggactagctatctacaactccactgtggtcgatctccacttcccattggctctctacaagaagttactcaatktaaagcctggcttggaagacttaaaggagttgtcacccactgaaggaaggagtctccaagagcttttagattaccccggggaggatgtggaggagacttt

SEQ ID NO: 83596 - DNA, 201 bp, Homo sapiens
aaggactgcttcagaaactcccaattccaaaaagctgagtctgggtccattattttggcagaactcctaagaatttatgggagcctatataaacatatctwgcttttaaaaagttcttgagggaatagcaactttcccatggctgtgcctatttcctagaccttttaaaagatgtgcagagcagcttagcattcgttgcag

SEQ ID NO: 83597 - DNA, 201 bp, Homo sapiens
tcaatgtaaagcctggcttggaagacttaaaggagttgtcacccactgaaggaaggagtctccaagagcttttagattaccccggggaggatgtggaggaractttctgcctcaacttcacgatctgccgagaaagctatggagtgattgaacagaagaagctgatacctgggggagataatgtaactgtgtgcaaggata

SEQ ID NO: 83598 - DNA, 201 bp, Homo sapiens
tcccattggctctctacaagaagttactcaatgtaaagcctggcttggaagacttaaaggagttgtcacccactgaaggaaggagtctccaagagcttttrgattaccccggggaggatgtggaggagactttctgcctcaacttcacgatctgccgagaaagctatggagtgattgaacagaagaagctgatacctgggg

SEQ ID NO: 83599 - DNA, 201 bp, Homo sapiens
ccctgatgttttctcacagtgcttccttgtccttctcttaacttctcattcctctataagaatgatttagactgacctgtccttttttatctgcgcatgcragaacatcaccttcctctgtacacttggaaatgcctctggcttgttgcagccctcctttaacccaaaggaggaaaggactgcttcagaaactcccaattc

SEQ ID NO: 83600 - DNA, 201 bp, Homo sapiens
ttttgaacagttttgaaagttgtctgattccccagttgtcaagctcaccaccagatgttgaagccatgagaatctatttaatactacctgagtttcccctrctccaggattccaagtattatataacattgactattcccttggctatggccattcttcggctggatacaaaccccagcaaagtactagataactggtggt

SEQ ID NO: 83601 - DNA, 201 bp, Homo sapiens
gttcctcagtgtccacattgaggcctatacagaaaatcatggggagtgatttctatttttttattgtctaagtgggttgggacttttaaatactgagcctkgttgatgtgtttctgggattgtatagcagtaaacaacctttttgaaaaattagaggttggggatggggtgaaaaattggcccttgtatgggaggtgtttt

SEQ ID NO: 83602 - DNA, 201 bp, Homo sapiens
tcaagtggtaagagtcaagatgtccaaagagaatcagaacctctgagagaaaaggttacccagcttttgcctcaaaatgttcacagtcacaactcaataavcaagccccagaaagggggacccctcaacaaggagtacacgaattgggaggctaaagaaacaaaggcaaaggatggccctagcatacaggccacccagaaa

SEQ ID NO: 83603 - DNA, 201 bp, Homo sapiens
agagcaaggaactaatgagaagagtaacagtcaagtaccacagcagagtcacttcaccaaaactaccactggccctccccacctggtgcctccccaacccyttcctcgtcgtggtacccaacctgtgggttctctagaactaaagtctgcctgccaggtgactgctggaggatccagtcagtgctatcgaggccatacaaa

SEQ ID NO: 83604 - DNA, 201 bp, Homo sapiens
agtagaagaaaagatcttacagctccaagaaaaaaagaaagatttggccaaacaagttctatcagggtctggagaatctgtcaccaagctcaccttggctsacctcagagtcctttttggcatctaacctcctgtggataagggctcagaatagcaccattgctggtttgtattaggatctgggaataacaacctaaccat

SEQ ID NO: 83605 - DNA, 201 bp, Homo sapiens
cagtgccaaggtaatgagcttacaagaccatctgcatcttctcaggagaaatcaagtggtaagagtcaagatgtccaaagagaatcagaacctctgagagraaaggttacccagcttttgcctcaaaatgttcacagtcacaactcaataagcaagccccagaaagggggacccctcaacaaggagtacacgaattgggag

SEQ ID NO: 83606 - DNA, 201 bp, Homo sapiens
tctggcctggtaccaaagaaaaaacaatctgtagttcaagagaagaagcaagaagagggagcagagattcagtgtgaggcagagactggaggcacacacaraagagacttttctgaaattaaatctcaacagtgccaaggtaatgagcttacaagaccatctgcatcttctcaggagaaatcaagtggtaagagtcaagat

SEQ ID NO: 83607 - DNA, 201 bp, Homo sapiens
ctgtttcccttaacggcaccttcttcaagatggagctttttgaaggcatgcgagagagcaccaagatttcatctctgttggcagaattggaggcaattcaragaaattcagcatcccaaaagagtgtcattgtctctcagtggaccaacatgctgaaagttgtagcattgcacctgaagaagcatggactgacttatgcca

SEQ ID NO: 83608 - DNA, 201 bp, Homo sapiens
ggtacttgacaagaatcaagaaccagctctctggaaacagctcatcaaaggtgaaggtgaggaaaagaaggctgataagaagcaaagagaaaagggagatsagcttttcgatcaaaagaaagaacagaagcctgaaatgatggagaaagacctctcatctggcctggtaccaaagaaaaaacaatctgtagttcaagagaa

SEQ ID NO: 83609 - DNA, 201 bp, Homo sapiens
tctatctctaccatgggccaaaccgggattcacgtgccagagtcctctctacatatgacatcgtgatcactacctatagcctcgtggccaaggagattccyacaaacaagcaagaggcagagatcccaggtgcaaacctcaatgtggagggcacctcaacacctttgcttcgaatagcctgggctcgaatcatattggatg

SEQ ID NO: 83610 - DNA, 201 bp, Homo sapiens
cccagttgctgagactccgccagtgttgctgtcatctttctttactgaagtcggccctggatccaatggaactgaagggtgaaggtcttgtcctttccctrgaagaacagctcagtgctttgaccttgtcagaactccgtgactcagagccatcttccactgtttcccttaacggcaccttcttcaagatggagctttttg

SEQ ID NO: 83611 - DNA, 112 bp, Homo sapiens
aacttgggggamccagcgaaatggaagaagttaggtgtccagagcacgggactttctgctttcttaagaccggcgtccgcgatggcccgaataaaggaaagagcttctacgt

SEQ ID NO: 83612 - DNA, 201 bp, Homo sapiens
tggaagaagccctaataatccattcagtagagtggcactggagtttgggtctgaggagcctagacactcggaggcagcagactcaccgagatccagcaccrtccacatactgtcccagttgctgagactccgccagtgttgctgtcatctttctttactgaagtcggccctggatccaatggaactgaagggtgaaggtct

SEQ ID NO: 83613 - DNA, 201 bp, Homo sapiens
aagttaggtgtccagagcacgggactttctgctttcttaagaccggcgtccgcgatggcccgaataaaggaaagagcttctacgtgtgccgggcagacacktgcagcttcgtgcgggccaccgacattcctgtttcccattgcttattgcatgaggactttgtggtagagcttcagggtttgcttctgccacaggacaaga

SEQ ID NO: 83614 - DNA, 201 bp, Homo sapiens
tgatcgaagtgtgcaaagaaaggtgtctcctgcctcaggtgtttccaagaaggtagaaccctcagacccagtagcccggcgtgtctaccttacaacacaaytgaaacaaaagaagagcacactggcatcagtgaacatccaggctcttccagacaagggtcagaagttgatcaaacaaatccaggagctggaggaagtact

SEQ ID NO: 83615 - DNA, 201 bp, Homo sapiens
tagaactaaagtctgcctgccaggtgactgctggaggatccagtcagtgctatcgaggccatacaaaccaagatcacgttcatgcagtgtggaaaatcacragtgaagccatcggtcaactgcatcgctcacttgagtcatgtcctggtgagacggttgtggcagaagatcccgccgggctgaaggtccctttgctactac

SEQ ID NO: 83616 - DNA, 201 bp, Homo sapiens
gattcccacaaacaagcaagaggcagagatcccaggtgcaaacctcaatgtggagggcacctcaacacctttgcttcgaatagcctgggctcgaatcataytggatgaagctcacaatgttaagaatccccgagtgcagacttccatagctgtgtgtaagctacaagcctgtgcccgttgggctgtcactggaacccccat

SEQ ID NO: 83617 - DNA, 201 bp, Homo sapiens
ccaccatcgatggctctgtcaatcccaagcagagaatggacttggtagaggcatttaaccactccagaggccctcaggtaatgctaatctctctcttggcyggaggtgttggtctaaacctgactggaggaaatcacctctttcttttggacatgcactggaatccatcacttgaagatcaagcttgtgaccgaatttacc

SEQ ID NO: 83618 - DNA, 201 bp, Homo sapiens
tgttctttgcatttcaatttcaccgtcaagcctttcaccttcctcaaaatgaggcataatcttatccccagaattgaggaggggttgtgttaaccaattakttaaccaattatgttaataatttatttaatgagtggtatggaaaccaattgatttttttagataaaagaatatgttttagagttggatgattttggaaaa

SEQ ID NO: 83619 - DNA, 201 bp, Homo sapiens
tgagagaaaaggttacccagcttttgcctcaaaatgttcacagtcacaactcaataagcaagccccagaaagggggacccctcaacaaggagtacacgaabtgggaggctaaagaaacaaaggcaaaggatggccctagcatacaggccacccagaaaagcctgcctcaggggcatttccaagagcggccggagacccaca

SEQ ID NO: 83620 - DNA, 201 bp, Homo sapiens
tcatctgtcctgcctccctgatccatcattggaaaaatgaggtggagaaacgggtgaacagcaacaaactaagagtctatctctaccatgggccaaaccgsgattcacgtgccagagtcctctctacatatgacatcgtgatcactacctatagcctcgtggccaaggagattcccacaaacaagcaagaggcagagatcc

SEQ ID NO: 83621 - DNA, 201 bp, Homo sapiens
tcgaatagcctgggctcgaatcatattggatgaagctcacaatgttaagaatccccgagtgcagacttccatagctgtgtgtaagctacaagcctgtgccygttgggctgtcactggaacccccattcaaaacaacttattggatatgtattcgctgctgaagtttctccgttgctctccatttgatgagttcaatctgtg

SEQ ID NO: 83622 - DNA, 201 bp, Homo sapiens
agaaccagctctctggaaacagctcatcaaaggtgaaggtgaggaaaagaaggctgataagaagcaaagagaaaagggagatcagcttttcgatcaaaagraagaacagaagcctgaaatgatggagaaagacctctcatctggcctggtaccaaagaaaaaacaatctgtagttcaagagaagaagcaagaagagggagc

SEQ ID NO: 83623 - DNA, 201 bp, Homo sapiens; identical to SEQ ID NO: 83602

SEQ ID NO: 83624 - DNA, 201 bp, Homo sapiens; identical to SEQ ID NO: 83603

SEQ ID NO: 83625 - DNA, 201 bp, Homo sapiens; identical to SEQ ID NO: 83604

SEQ ID NO: 83626 - DNA, 201 bp, Homo sapiens; identical to SEQ ID NO: 83605

SEQ ID NO: 83627 - DNA, 201 bp, Homo sapiens; identical to SEQ ID NO: 83606

SEQ ID NO: 83628 - DNA, 201 bp, Homo sapiens; identical to SEQ ID NO: 83607

SEQ ID NO: 83629 - DNA, 201 bp, Homo sapiens; identical to SEQ ID NO: 83608

SEQ ID NO: 83630 - DNA, 201 bp, Homo sapiens; identical to SEQ ID NO: 83609

SEQ ID NO: 83631 - DNA, 201 bp, Homo sapiens; identical to SEQ ID NO: 83610

SEQ ID NO: 83632 - DNA, 112 bp, Homo sapiens; identical to SEQ ID NO: 83611

SEQ ID NO: 83633 - DNA, 201 bp, Homo sapiens; identical to SEQ ID NO: 83612

SEQ ID NO: 83634 - DNA, 201 bp, Homo sapiens; identical to SEQ ID NO: 83613

SEQ ID NO: 83635 - DNA, 201 bp, Homo sapiens; identical to SEQ ID NO: 83614

SEQ ID NO: 83636 - DNA, 201 bp, Homo sapiens; identical to SEQ ID NO: 83615

SEQ ID NO: 83637 - DNA, 201 bp, Homo sapiens; identical to SEQ ID NO: 83616

SEQ ID NO: 83638 - DNA, 201 bp, Homo sapiens; identical to SEQ ID NO: 83617

SEQ ID NO: 83639 - DNA, 201 bp, Homo sapiens; identical to SEQ ID NO: 83619

SEQ ID NO: 83640 - DNA, 201 bp, Homo sapiens; identical to SEQ ID NO: 83620

SEQ ID NO: 83641 - DNA, 201 bp, Homo sapiens; identical to SEQ ID NO: 83621

SEQ ID NO: 83642 - DNA, 201 bp, Homo sapiens; identical to SEQ ID NO: 83622

SEQ ID NO: 83643 - DNA, 201 bp, Homo sapiens
aaggtgaagcctggagtcaatggattaggctgtattgggtgcgtggtcaccagggctgcttttaactctggtaaagtggatattgtcgccatcaatgatgmcttcaatgacctcaactacatggtctacatgttccagtatgatttcacccatggcgaattccatggcactgtcaaagctgagaacaggaagcttgtcatc

SEQ ID NO: 83644 - DNA, 201 bp, Homo sapiens
gaatcaaatggggtgatgctggcactgggtatgttgtgaagtccactgacatcttcatcatggagaaggctggggctcatttgcagggggagccaaagggrtcatcatctctgccccctctgctgatgcccccatgttcatgatgggcttgaaccatgagaagtaggacaacagccccaagatagtcagcaatgcttcctg

SEQ ID NO: 83645 - DNA, 201 bp, Homo sapiens
ctgagctgaatgggaagctcactggcatggccttctgagtccccactgacaatgtgttggccaggaacctgacctgctgtctggaaaaacctgccacatakgatgacatcaagaaggtggtgaagcagcatcagagggccccctcaagggcatcctggcctacactgagcaccaggctgtctcctccgacttcaacagtga

SEQ ID NO: 83646 - DNA, 201 bp, Homo sapiens
gcagggctctccagaacatcatccttgcctctaccggcactgccaagcctgtgggcaaggtcatccctgagctgaatgggaagctcactggcatggccttytgagtccccactgacaatgtgttggccaggaacctgacctgctgtctggaaaaacctgccacataggatgacatcaagaaggtggtgaagcagcatcaga

SEQ ID NO: 83647 - DNA, 201 bp, Homo sapiens; identical to SEQ ID NO: 83643

SEQ ID NO: 83648 - DNA, 201 bp, Homo sapiens
ctgagctgaatgggaagctcactggcatggccttctgagtccccactgacaatgtgttggccaggaacctgacctgctgtctggaaaaacctgccacatakgatgacatcaagaaggtggtgaagcagcatcagagggccccctcaagggcatcctggcctacactgagcaccaggctgaagagagaggccctcactgctg

SEQ ID NO: 83649 - DNA, 201 bp, Homo sapiens; identical to SEQ ID NO: 83646

SEQ ID NO: 83650 - DNA, 201 bp, Homo sapiens
tatgcctgaagatattgacgatgaggaagactcagtaaaaataatccgtctggtcaaaaatagagaaccactgggagctaccattaagaaggatgaacagmccggggcgatcattgtggccagaatcatgagaggaggagctgcagatagaagtggtcttattcatgttggtgatgaacttagggaagtcaacgggatacc

SEQ ID NO: 83651 - DNA, 201 bp, Homo sapiens
catttccaagcatttgtttgagacagatgtacaaaataacaagtttattgaatatggagaatataaaaacaactactacggcacaagtatagactcagttyggtctgtccttgctaaaaacaaagtttgtttgttggatgttcagcctcatacagtgaagcatttaaggacactagaatttaagccctatgtgatatttat

SEQ ID NO: 83652 - DNA, 201 bp, Homo sapiens
ctggttacattcataactaagagaaatttccataattgtctttttctatagagtgcatgatgaaatcaattacagttttggtagtagggtttttaaatctrtatcactgtcatagatgtacaatcttggttcaagttgaatgctggttttgtttgtatctttttacagccttatttcaaacgccatgtgttagtataagat

SEQ ID NO: 83653 - DNA, 201 bp, Homo sapiens
ccctcaaagcatttccaggaaaggagattggctttgagacgaccagaaatattggttcagcccctgaaagtttccaacaggaaatcatctggttttagaaraagttttcgtcttagtagaaaagataagaaaacaaataaatccatgtatgaatgcaagaagagtgatcagtacgacacagctgacgtacccacatacgaa

SEQ ID NO: 83654 - DNA, 201 bp, Homo sapiens
taagagaaatttccataattgtctttttctatagagtgcatgatgaaatcaattacagttttggtagtagggtttttaaatctatatcactgtcatagatrtacaatcttggttcaagttgaatgctggttttgtttgtatctttttacagccttatttcaaacgccatgtgttagtataagatccgaaatcaaaatatgc

SEQ ID NO: 83655 - DNA, 201 bp, Homo sapiens
tgtatgaatgcaagaagagtgatcagtacgacacagctgacgtacccacatacgaagaagtgacaccgtatcggcgacaaactaatgaaaaatacagactygttgtcttggttggtcccgtgggagtagggctgaatgaactgaaacgaaagctgctgatcagtgacacccagcactatggcgtgacagtgccccatacca

SEQ ID NO: 83656 - DNA, 201 bp, Homo sapiens; identical to SEQ ID NO: 83651

SEQ ID NO: 83657 - DNA, 201 bp, Homo sapiens; identical to SEQ ID NO: 83652

SEQ ID NO: 83658 - DNA, 201 bp, Homo sapiens
ttggtaaagcatttccaggaaaggagattggctttgagacgaccagaaatattggttcagcccctgaaagtttccaacaggaaatcatctggttttagaaraagttttcgtcttagtagaaaagataagaaaacaaataaatccatgtatgaatgcaagaagagtgatcagtacgacacagctgacgtacccacatacgaa

SEQ ID NO: 83659 - DNA, 201 bp, Homo sapiens; identical to SEQ ID NO: 83654

SEQ ID NO: 83660 - DNA, 201 bp, Homo sapiens; identical to SEQ ID NO: 83655

SEQ ID NO: 83661 - DNA, 201 bp, Homo sapiens
tgtggttacctgcttagagcggcggcacagacttcaagtgctgaggcaggcagaagttcctatagagccacactggcattttcaacagcagagtcatttcmatatgagactgaaccgctagggagtgtttgctttcttactggtatcattctgtttccttgacttgaaacaagagaacattgaaccaaagaagtgggaaaa

SEQ ID NO: 83662 - DNA, 201 bp, Homo sapiens; identical to SEQ ID NO: 83661

SEQ ID NO: 83663 - DNA, 201 bp, Homo sapiens
gcttagaggtgctcgcgccgctctgctgctgctgctgccgccccggctcttagcccgaccctcgctcctgctccgccggtccctcagcgcggcctcctgcsccccgatctccttgcccgccgccgcctcccggagcagcatggacggcgcgggggctgaggaggtgctggcacctctgaggctagcagtgcgccagcaggg

SEQ ID NO: 83664 - DNA, 201 bp, Homo sapiens
cacgcgcgccgcgtcgtttacgcggcgatttcatcatgctccgagccgggcggcgcgcgccgcttccgtcgccaccctctctggacagcccagggccgcasgctcatgccctctccgcgtccagtgctgcttagaggtgctcgcgccgctctgctgctgctgctgccgccccggctcttagcccgaccctcgctcctgctc

SEQ ID NO: 83665 - DNA, 201 bp, Homo sapiens
ccttcggcctgggtaggatcatgtatacggtatttgaacatacattccatgtacgagaaggagatgaacagagaacattcttcagtttccctgctgtagtygctccattcaaatgttccgtcctcccactgagccaaaaccaggagttcatgccatttgtcaaggaattatcggaagccctgaccaggcatggagtatctc

SEQ ID NO: 83666 - DNA, 201 bp, Homo sapiens
gtagatcccagtgagaaagaccaccccaagttccagaatgtggcagaccttcacctttatttgtattcagcaaaagcccaggtcagcggacagtccgctcrgaaaatgcgcctgggagatgctgttgaacagggtgtgattaataacacagtattaggctatttcattggccgcatctacctctacctcacgaaggttgga

SEQ ID NO: 83667 - DNA, 201 bp, Homo sapiens
aagaaatcagaaatggaaagtgttttggcccagcttgataactatggacagcaagaacttgcggatctttttgtgaactataatgtaaaatctcccattaytggaaatgatctatcccctccagtgtcttttaacttaatgttcaagactttcattgggcctggaggaaacatgcctgggtacttgagaccagaaactgca

SEQ ID NO: 83668 - DNA, 201 bp, Homo sapiens
aggtctcgctcagagctgtgtccctgaacatccaccctgctggggtggcttgacgcacttctgtgcaaatctgttcgctcgcaaccctacctacctctctyccgaaccggagaaaaccttcggcggggtccttccgggttttgtgtcgaatctgcggcggcgacccggcgccgcgtcacgcggtggtgaatgtgcggcagc

SEQ ID NO: 83669 - DNA, 201 bp, Homo sapiens
acatgatcaatgtgaagagattccagaaaacactatatgtggaagaagttgttccgaatgtaattgaaccttccttcggcctgggtaggatcatgtatacrgtatttgaacatacattccatgtacgagaaggagatgaacagagaacattcttcagtttccctgctgtagttgctccattcaaatgttccgtcctcccac

SEQ ID NO: 83670 - DNA, 201 bp, Homo sapiens
gtttacgcggcgatttcatcatgctccgagccgggcggcgcgcgccgcttccgtcgccaccctctctggacagcccagggccgcaggctcatgccctctcygcgtccagtgctgcttagaggtgctcgcgccgctctgctgctgctgctgccgccccggctcttagcccgaccctcgctcctgctccgccggtccctcagc

SEQ ID NO: 83671 - DNA, 201 bp, Homo sapiens
gtctcggcctgcaggtctcgctcagagctgtgtccctgaacatccaccctgctggggtggcttgacgcacttctgtgcaaatctgttcgctcgcaaccctrcctacctctctcccgaaccggagaaaaccttcggcggggtccttccgggttttgtgtcgaatctgcggcggcgacccggcgccgcgtcacgcggtggtga

SEQ ID NO: 83672 - DNA, 201 bp, Homo sapiens
tctcgtgtgtctcggcctgcaggtctcgctcagagctgtgtccctgaacatccaccctgctggggtggcttgacgcacttctgtgcaaatctgttcgctcrcaaccctacctacctctctcccgaaccggagaaaaccttcggcggggtccttccgggttttgtgtcgaatctgcggcggcgacccggcgccgcgtcacgc

SEQ ID NO: 83673 - DNA, 141 bp, Homo sapiens
gtcactcgtataaaaacctatgctttgaaggttctcgtgtrtctcggcctgcaggtctcgctcagagctgtgtccctgaacatccaccctgctggggtggcttgacgcacttctgtgcaaatctgttcgctcgcaacccta

SEQ ID NO: 83674 - DNA, 201 bp, Homo sapiens
acactgcaactctgagggaccgtgactcaatgcggcagataagagcagagatctctgagctgcccagcatagtccaagacctagccaatggcaacatcacrtgggctgatgtggaggccaggtatcctctgtttgaagggcaagagactggtaaaaaagagacaatcgaggaatgaggacaattttgacaacttttgacca

SEQ ID NO: 83675 - DNA, 201 bp, Homo sapiens
atctattaaaagctcatttacagaaattgatgtctgataagaagtgttctgtcgaaaagaaatcagaaatggaaagtgttttggcccagcttgataactayggacagcaagaacttgcggatctttttgtgaactataatgtaaaatctcccattactggaaatgatctatcccctccagtgtcttttaacttaatgttca

SEQ ID NO: 83676 - DNA, 201 bp, Homo sapiens
gcaggctcatgccctctccgcgtccagtgctgcttagaggtgctcgcgccgctctgctgctgctgctgccgccccggctcttagcccgaccctcgctcctsctccgccggtccctcagcgcggcctcctgcgccccgatctccttgcccgccgccgcctcccggagcagcatggacggcgcgggggctgaggaggtgctgg

SEQ ID NO: 83677 - DNA, 201 bp, Homo sapiens; identical to SEQ ID NO: 83663

SEQ ID NO: 83678 - DNA, 201 bp, Homo sapiens; identical to SEQ ID NO: 83664

SEQ ID NO: 83679 - DNA, 201 bp, Homo sapiens; identical to SEQ ID NO: 83665

SEQ ID NO: 83680 - DNA, 201 bp, Homo sapiens; identical to SEQ ID NO: 83666

SEQ ID NO: 83681 - DNA, 201 bp, Homo sapiens; identical to SEQ ID NO: 83667

SEQ ID NO: 83682 - DNA, 201 bp, Homo sapiens; identical to SEQ ID NO: 83668

SEQ ID NO: 83683 - DNA, 201 bp, Homo sapiens; identical to SEQ ID NO: 83669

SEQ ID NO: 83684 - DNA, 201 bp, Homo sapiens; identical to SEQ ID NO: 83670

SEQ ID NO: 83685 - DNA, 201 bp, Homo sapiens; identical to SEQ ID NO: 83671

SEQ ID NO: 83686 - DNA, 201 bp, Homo sapiens; identical to SEQ ID NO: 83672

SEQ ID NO: 83687 - DNA, 141 bp, Homo sapiens; identical to SEQ ID NO: 83673

SEQ ID NO: 83688 - DNA, 201 bp, Homo sapiens; identical to SEQ ID NO: 83674

SEQ ID NO: 83689 - DNA, 201 bp, Homo sapiens; identical to SEQ ID NO: 83675

SEQ ID NO: 83690 - DNA, 201 bp, Homo sapiens; identical to SEQ ID NO: 83676

SEQ ID NO: 83691 - DNA, 176 bp, Homo sapiens
cgcccagagagagaaaaagttaagctgctgaccctgaaggcaagggagagcaggctgcacagctgtgtgtggaagccacgggctcaagcagccaaggcagktggacagtgtgagagagctagtgtaagctgttgatgagagctgttgctgaataaaaccatattcacctgcctatg

SEQ ID NO: 83692 - DNA, 175 bp, Homo sapiens
gcccagagagagaaaaagttaagctgctgaccctgaaggcaagggagagcaggctgcacagctgtgtgtggaagccacgggctcaagcagccaaggcaggyggacagtgtgagagagctagtgtaagctgttgatgagagctgttgctgaataaaaccatattcacctgcctatg

SEQ ID NO: 83693 - DNA, 198 bp, Homo sapiens
acatttcagggacaccatgaagggtggcttcactgggggtgatgagtaccagaagcacttcctgcccagggactacttggctacttactacagcttcratggcagcccctcacccgaggccgagatgctgaagtttaacttggaatgtctccacaagaccttcggccctggaggcctccaaggggacacgctgattga

SEQ ID NO: 83694 - DNA, 201 bp, Homo sapiens
gtggagcaggctgtcctggatgctggctttgacattgaacagctcctacacagtccccagagctactctgtcaccaatgctgccaacaatggggtctgctkcattgtggctcgcaagaagcctgggccctgagccaggagggccagccagaggtctggtcaggctgtgaggccttggccatctgtatgctagagaggggtg

SEQ ID NO: 83695 - DNA, 197 bp, Homo sapiens
acatttcagggacaccatgaagggtggcttcactgggggtgatgagtaccagaagcacttcctgcccagggactacttggctacttactacagcttygatggcagcccctcacccgaggccgagatgctgaagtttaacttggaatgtctccacaagaccttcggccctggaggcctccaaggggacacgctgattg

SEQ ID NO: 83696 - DNA, 201 bp, Homo sapiens
gacattgaacagctcctacacagtccccagagctactctgtcaccaatgctgccaacaatggggtctgctgcattgtggctcgcaagaagcctgggccctsagccaggagggccagccagaggtctggtcaggctgtgaggccttggccatctgtatgctagagaggggtgaggaatggatgctgtctaacagtctctgat

SEQ ID NO: 83697 - DNA, 201 bp, Homo sapiens
tgttctataaccagctctgtaaaggaaaagcactgatgtgtggtagtcaccaatttctgtggtgtaaatactcccaccatggttgatttcaagccaccagkggtttaataaccagctcataaatctcctaaatattttacagttgactctcatgagctgattggagtcagctggaacataccactgcctctagactaaggc

SEQ ID NO: 83698 - DNA, 201 bp, Homo sapiens
ttgtctgtaaaaggtaattgtcctgctaatgctgtacaggggctcttggggttcggctcagctcaacatggcttgacatggtgggcacactggcgcccagyaagagagagagagagccaaagctgtccgttttgcagatggacaggaaggagccaggacacagctcagcttgctcacgcccagagagagaaaaagttaagc

SEQ ID NO: 83699 - DNA, 201 bp, Homo sapiens
gggaggagaaggaggagaagctgcgggcagcggtgaagcgggtgctcaagtgcgatgtccacctgggcaacccgctggccccggctgtgttgcctctcgcygactgtgtgctcaccctgctggccatggagtgtgcctgctgtagccttgatgcctaccgcgctgccctgtgcaaccttgcctcactgctcaagccgggtg

SEQ ID NO: 83700 - DNA, 201 bp, Homo sapiens
tagccttgatgcctaccgcgctgccctgtgcaaccttgcctcactgctcaagccgggtggccacctggtgaccactgtcacgcttcggctcccgtcctacrtggtggggaagcgtgaattttcctgcgtggccctggagaaagaggaggtggagcaggctgtcctggatgctggctttgacattgaacagctcctacacag

SEQ ID NO: 83701 - DNA, 201 bp, Homo sapiens
ctgctcaagccgggtggccacctggtgaccactgtcacgcttcggctcccgtcctacatggtggggaagcgtgaattttcctgcgtggccctggagaaagrggaggtggagcaggctgtcctggatgctggctttgacattgaacagctcctacacagtccccagagctactctgtcaccaatgctgccaacaatggggtc

SEQ ID NO: 83702 - DNA, 201 bp, Homo sapiens
tggtttaataaccagctcataaatctcctaaatattttacagttgactctcatgagctgattggagtcagctggaacataccactgcctctagactaaggycagcagatttagcaaatacagactgccccagttcattgaattttagataaatgaaataaatctataaggttaagtatgtccccagaactgcatggaacat

SEQ ID NO: 83703 - DNA, 201 bp, Homo sapiens
gtgagctggaaggaaacagcggccgatgggaggagaaggaggagaagctgcgggcagcggtgaagcgggtgctcaagtgcgatgtccacctgggcaacccrctggccccggctgtgttgcctctcgccgactgtgtgctcaccctgctggccatggagtgtgcctgctgtagccttgatgcctaccgcgctgccctgtgca

SEQ ID NO: 83704 - DNA, 201 bp, Homo sapiens
ccctggagaaagaggaggtggagcaggctgtcctggatgctggctttgacattgaacagctcctacacagtccccagagctactctgtcaccaatgctgcyaacaatggggtctgctgcattgtggctcgcaagaagcctgggccctgagccaggagggccagccagaggtctggtcaggctgtgaggccttggccatctg

SEQ ID NO: 83705 - DNA, 177 bp, Homo sapiens
acgcccagagagagaaaaagttaagctgctgaccctgaaggcaagggagagcaggctgcacagctgtgtgtggaagccacgggctcaagcagccaaggcaggtggacagtgtgagagagctagtgtaagctgttgatgagagctgttgctgaataaaaccatattcacctgcctatg

SEQ ID NO: 83706 - DNA, 201 bp, Homo sapiens
ttccagtatgatttcatccatggcaagttccatggcactatcaaggctaagaacaggaagtttgtcatcaatggaaatcccatcattatcttccaggagtragagcccatcacaatcaaatgggatgatactggtgctgattatgttgtggaatccaccagcattttcactactgtggagaaagatggggctcatggggtg

SEQ ID NO: 83707 - DNA, 201 bp, Homo sapiens
ccagaaatcatccctatatctacgggtgctgctaaggctgtgggcaaggtcatccctgagctgaacaagaagctcactggcatggccttccatgtccccastgccaacatgttggtacgagacctgacctggcatctggagaaacctgccaaatatgatgacaccaacaaggtggtgaagcaggcatcagagggcctcctc

SEQ ID NO: 83708 - DNA, 201 bp, Homo sapiens
tcagagggcctcctcaaggacatcctgggctatactgagcaccacgttgtctcttactttaacagtgacacccattcttccaccttgatgctgaggctgcyattgccctcaatgactactttgtcaagctcatgtcctggtattacagtgcagttagctacagcaacagagtggtggacttcgcagaccacatggcctctg

SEQ ID NO: 83709 - DNA, 201 bp, Homo sapiens
ttggaaataaagatataaatacttttgaacagatcgatgactacaatccagacactgctatgcctgcccattcaagaagtcatagttgggatgacaaaacrtgtcaaaagtcagctaatgttagcagcatttggcataggaattactctcccagaccagagtcgggtactgtttcagatgccccacaattgaaggaaaatc

SEQ ID NO: 83710 - DNA, 201 bp, Homo sapiens
ttatctcatttctcaaaaaaagacacacctctaaggaacaaggttcctgggctatataagtccagttctgcagactctctttctacaaccaagatcaaacytctaggacctgccagagccagtgggctgagcaagaagccggcaagcatccagaagagaaagcatcataatgccgagaacaagccggggttacagatcaaa

SEQ ID NO: 83711 - DNA, 201 bp, Homo sapiens
gctgtcagaagatgacctgttgagtcagtattctctttcatttacgaagaagaccaagaaaaatagctctgaaggcaataaatcattgagcttttctgaartgtttgtgcctgacctggtaaatggacctactaacaaaaagagtgtaagcactccacctaggacgagaaataaatttgcaacatttttacaaaggaaaaa

SEQ ID NO: 83712 - DNA, 201 bp, Homo sapiens
aagttgttttagttggtctggaggtcttggagatttttcaagaacgccgagcccctctccaagcacagcattgcagcagttccgaagaaagagcgattccbccacctctttgcctgagaataatatgtctgatgtgtcgcagttaaagagcgaggagtccagtgacgatgagtctcatcccttacgagaagaggcatgttc

SEQ ID NO: 83713 - DNA, 201 bp, Homo sapiens
agctctggaaaaactttggatttaaaaaattctgaaaagcttcctccttgtaagaaacccctgtccccagtcagagataacatccaactaactccagaagyggaagaggatatatttaacaaacctgaatgtggccgtgttcaaagagcaatattccagtaaatgcagactgctgcaaagcttttgcctgcaagagaatct

SEQ ID NO: 83714 - DNA, 201 bp, Homo sapiens
agcgattcccccacctctttgcctgagaataatatgtctgatgtgtcgcagttaaagagcgaggagtccagtgacgatgagtctcatcccttacgagaagrggcatgttcttcacagtcccaggaaagtggagaattctcactgcagagttcaaatgcatcaaagctttctcagtgctctagtaaggactctgattcagag

SEQ ID NO: 83715 - DNA, 201 bp, Homo sapiens
agcacgtaattcaagtgatgacattccgaataatcatattccaggtgatcatattccagacaaggcaacagtgtttacagatgaagagtcctactcttttragagcagcaaatttacaaggaccatttcaccacccactttgggaacactaagaagttgttttagttggtctggaggtcttggagatttttcaagaacgcc

SEQ ID NO: 83716 - DNA, 201 bp, Homo sapiens
tttctcagtgctctagtaaggactctgattcagaggaatctgattgcaatattaagttacttgacagtcaaagtgaccagacctccaagctatgtttatcwcatttctcaaaaaaagacacacctctaaggaacaaggttcctgggctatataagtccagttctgcagactctctttctacaaccaagatcaaacctctag

SEQ ID NO: 83717 - DNA, 201 bp, Homo sapiens
atagctcttcaaatagcacttggaaataaagatataaatacttttgaacagatcgatgactacaatccagacactgctatgcctgcccattcaagaagtcrtagttgggatgacaaaacatgtcaaaagtcagctaatgttagcagcatttggcataggaattactctcccagaccagagtcgggtactgtttcagatgcc

SEQ ID NO: 83718 - DNA, 201 bp, Homo sapiens
aaagggttaaatctcccaaggaaatcatccattgtgaaaagaccaagaagtgcagagctgtcagaagatgacctgttgagtcagtattctctttcatttaygaagaagaccaagaaaaatagctctgaaggcaataaatcattgagcttttctgaagtgtttgtgcctgacctggtaaatggacctactaacaaaaagagt

SEQ ID NO: 83719 - DNA, 201 bp, Homo sapiens
cgtctggaatgggcttgggggccacgcctgcacatctccgcgagacagagggataaagtgaagatggtgctgttattgttacctcgagtgccacatgcgayctctgagatatgtacacagtcattcttactatcgcactcagccattcttactacgctaaagaagaaataattattcgaggatatttgcctggcccagaag

SEQ ID NO: 83720 - DNA, 201 bp, Homo sapiens
cgtgggtgctctggccacagtgagttaggggcgtcggagcgggtttctccaaccgcaatcggctccgctcaaggggaggaggagagtcccttctcggaagrcctaaggaaacgtgtcgtctggaatgggcttgggggccacgcctgcacatctccgcgagacagagggataaagtgaagatggtgctgttattgttacctc

SEQ ID NO: 83721 - DNA, 201 bp, Homo sapiens
agaggtagttaatttggcaccatggggatacagggattgctacaatttatcaaagaagcttcagaacccatccatgtgaggaagtataaagggcaggtagyagctgtggatacatattgctggcttcacaaaggagctattgcttgtgctgaaaaactagccaaaggtgaacctactgataggtatgtaggattttgtatg

SEQ ID NO: 83722 - DNA, 201 bp, Homo sapiens
  misc_feature (1)...(201): n = A,T,C or G
atcaaagctttctcagtgctctagtaaggactctgattcagaggaatctgattgcaatattaagttacttgacagtcaaagtgaccagacctccaagctangtttatctcatttctcaaaaaaagacacacctctaaggaacaaggttcctgggctatataagtccagttctgcagactctctttctacaaccaagatcaa

SEQ ID NO: 83723 - DNA, 201 bp, Homo sapiens
cgtatttgatggatgtactttaccttctaaaaaggaagtagagagatctagaagagaaagacgacaagccaatcttcttaagggaaagcaacttcttcgtraggggaaagtctcggaagctcgagagtgtttcacccggtctatcaatatcacacatgccatggcccacaaagtaattaaagctgcccggtctcagggggt

SEQ ID NO: 83724 - DNA, 110 bp, Homo sapiens
gatcaatttgaagtccctgtttgggaatgaggcacttatcagcatgaagaattttttctcattctgtgccattttaaaaatagaatacattttgtatattractttataa

SEQ ID NO: 83725 - DNA, 201 bp, Homo sapiens
ggcaacagtgtttacagatgaagagtcctactcttttaagagcagcaaatttacaaggaccatttcaccacccactttgggaacactaagaagttgttttrgttggtctggaggtcttggagatttttcaagaacgccgagcccctctccaagcacagcattgcagcagttccgaagaaagagcgattcccccacctcttt

SEQ ID NO: 83726 - DNA, 201 bp, Homo sapiens
catttctcaaaaaaagacacacctctaaggaacaaggttcctgggctatataagtccagttctgcagactctctttctacaaccaagatcaaacctctagracctgccagagccagtgggctgagcaagaagccggcaagcatccagaagagaaagcatcataatgccgagaacaagccggggttacagatcaaactcaat

SEQ ID NO: 83727 - DNA, 201 bp, Homo sapiens
aaggttcctgggctatataagtccagttctgcagactctctttctacaaccaagatcaaacctctaggacctgccagagccagtgggctgagcaagaagcyggcaagcatccagaagagaaagcatcataatgccgagaacaagccggggttacagatcaaactcaatgagctctggaaaaactttggatttaaaaaattc

SEQ ID NO: 83728 - DNA, 121 bp, Homo sapiens
caagagaatctgatcaatttgaagtccctgtttgggaatgaggcacttatcagcatgaagaattttttctcattctgtgccattttaaaaatagaatacattttgtatattgactttataa

SEQ ID NO: 83729 - DNA, 121 bp, Homo sapiens
gcgcgctgtgtaggcaagttrcccgtgttctgcgttgccggccgtgggtgctctggccacagtgagttaggggcgtcggagcgggtttctccaaccgcaatcggctccgctcaaggggagg

SEQ ID NO: 83730 - DNA, 201 bp, Homo sapiens; identical to SEQ ID NO: 83709

SEQ ID NO: 83731 - DNA, 201 bp, Homo sapiens; identical to SEQ ID NO: 83710

SEQ ID NO: 83732 - DNA, 201 bp, Homo sapiens; identical to SEQ ID NO: 83711

SEQ ID NO: 83733 - DNA, 201 bp, Homo sapiens; identical to SEQ ID NO: 83712

SEQ ID NO: 83734 - DNA, 201 bp, Homo sapiens
ctctggaaaaactttggatttaaaaaagattctgaaaagcttcctccttgtaagaaacccctgtccccagtcagagataacatccaactaactccagaagyggaagaggatatatttaacaaacctgaatgtggccgtgttcaaagagcaatattccagtaaatgcagactgctgcaaagcttttgcctgcaagagaatct

SEQ ID NO: 83735 - DNA, 201 bp, Homo sapiens; identical to SEQ ID NO: 83714

SEQ ID NO: 83736 - DNA, 201 bp, Homo sapiens; identical to SEQ ID NO: 83715

SEQ ID NO: 83737 - DNA, 201 bp, Homo sapiens; identical to SEQ ID NO: 83716

SEQ ID NO: 83738 - DNA, 201 bp, Homo sapiens; identical to SEQ ID NO: 83717

SEQ ID NO: 83739 - DNA, 201 bp, Homo sapiens; identical to SEQ ID NO: 83718

SEQ ID NO: 83740 - DNA, 201 bp, Homo sapiens; identical to SEQ ID NO: 83719

SEQ ID NO: 83741 - DNA, 101 bp, Homo sapiens
rcctaaggaaacgtgtcgtctggaatgggcttgggggccacgcctgcacatctccgcgagacagagggataaagtgaagatggtgctgttattgttacctc

SEQ ID NO: 83742 - DNA, 201 bp, Homo sapiens; identical to SEQ ID NO: 83721

SEQ ID NO: 83743 - DNA, 201 bp, Homo sapiens; identical to SEQ ID NO: 83722
  misc_feature (1)...(201): n = A,T,C or G

SEQ ID NO: 83744 - DNA, 201 bp, Homo sapiens; identical to SEQ ID NO: 83723

SEQ ID NO: 83745 - DNA, 111 bp, Homo sapiens
gatcaatttgaagtccctgtttgggaatgaggcacttatcagcatgaagaattttttctcattctgtgccattttaaaaatagaatacattttgtatattractttataat

SEQ ID NO: 83746 - DNA, 201 bp, Homo sapiens; identical to SEQ ID NO: 83725

SEQ ID NO: 83747 - DNA, 201 bp, Homo sapiens; identical to SEQ ID NO: 83726

SEQ ID NO: 83748 - DNA, 201 bp, Homo sapiens
aaggttcctgggctatataagtccagttctgcagactctctttctacaaccaagatcaaacctctaggacctgccagagccagtgggctgagcaagaagcyggcaagcatccagaagagaaagcatcataatgccgagaacaagccggggttacagatcaaactcaatgagctctggaaaaactttggatttaaaaaagat

SEQ ID NO: 83749 - DNA, 122 bp, Homo sapiens
caagagaatctgatcaatttgaagtccctgtttgggaatgaggcacttatcagcatgaagaattttttctcattctgtgccattttaaaaatagaatacattttgtatattgactttataat

SEQ ID NO: 83750 - DNA, 201 bp, Homo sapiens; identical to SEQ ID NO: 83709

SEQ ID NO: 83751 - DNA, 201 bp, Homo sapiens; identical to SEQ ID NO: 83710

SEQ ID NO: 83752 - DNA, 201 bp, Homo sapiens; identical to SEQ ID NO: 83711

SEQ ID NO: 83753 - DNA, 201 bp, Homo sapiens; identical to SEQ ID NO: 83712

SEQ ID NO: 83754 - DNA, 201 bp, Homo sapiens; identical to SEQ ID NO: 83734

SEQ ID NO: 83755 - DNA, 201 bp, Homo sapiens; identical to SEQ ID NO: 83714

SEQ ID NO: 83756 - DNA, 201 bp, Homo sapiens; identical to SEQ ID NO: 83715

SEQ ID NO: 83757 - DNA, 201 bp, Homo sapiens; identical to SEQ ID NO: 83716

SEQ ID NO: 83758 - DNA, 201 bp, Homo sapiens; identical to SEQ ID NO: 83717

SEQ ID NO: 83759 - DNA, 201 bp, Homo sapiens; identical to SEQ ID NO: 83718

SEQ ID NO: 83760 - DNA, 201 bp, Homo sapiens; identical to SEQ ID NO: 83719

SEQ ID NO: 83761 - DNA, 201 bp, Homo sapiens; identical to SEQ ID NO: 83720

SEQ ID NO: 83762 - DNA, 201 bp, Homo sapiens; identical to SEQ ID NO: 83721

SEQ ID NO: 83763 - DNA, 201 bp, Homo sapiens; identical to SEQ ID NO: 83722
  misc_feature (1)...(201): n = A,T,C or G

SEQ ID NO: 83764 - DNA, 201 bp, Homo sapiens; identical to SEQ ID NO: 83723

SEQ ID NO: 83765 - DNA, 111 bp, Homo sapiens; identical to SEQ ID NO: 83745

SEQ ID NO: 83766 - DNA, 201 bp, Homo sapiens; identical to SEQ ID NO: 83725

SEQ ID NO: 83767 - DNA, 201 bp, Homo sapiens; identical to SEQ ID NO: 83726

SEQ ID NO: 83768 - DNA, 201 bp, Homo sapiens; identical to SEQ ID NO: 83748

SEQ ID NO: 83769 - DNA, 122 bp, Homo sapiens; identical to SEQ ID NO: 83749

SEQ ID NO: 83770 - DNA, 121 bp, Homo sapiens; identical to SEQ ID NO: 83729

SEQ ID NO: 83771 - DNA, 201 bp, Homo sapiens; identical to SEQ ID NO: 83709

SEQ ID NO: 83772 - DNA, 201 bp, Homo sapiens; identical to SEQ ID NO: 83710

SEQ ID NO: 83773 - DNA, 201 bp, Homo sapiens; identical to SEQ ID NO: 83711

SEQ ID NO: 83774 - DNA, 201 bp, Homo sapiens; identical to SEQ ID NO: 83712

SEQ ID NO: 83775 - DNA, 201 bp, Homo sapiens; identical to SEQ ID NO: 83713

SEQ ID NO: 83776 - DNA, 201 bp, Homo sapiens; identical to SEQ ID NO: 83714

SEQ ID NO: 83777 - DNA, 201 bp, Homo sapiens; identical to SEQ ID NO: 83715

SEQ ID NO: 83778 - DNA, 201 bp, Homo sapiens; identical to SEQ ID NO: 83716

SEQ ID NO: 83779 - DNA, 201 bp, Homo sapiens; identical to SEQ ID NO: 83717

SEQ ID NO: 83780 - DNA, 201 bp, Homo sapiens; identical to SEQ ID NO: 83718

SEQ ID NO: 83781 - DNA, 201 bp, Homo sapiens; identical to SEQ ID NO: 83719

SEQ ID NO: 83782 - DNA, 201 bp, Homo sapiens; identical to SEQ ID NO: 83720

SEQ ID NO: 83783 - DNA, 201 bp, Homo sapiens
agaggtagttaatttggcaccatggggatacagggattgctacaatttatcaaagaagcttcagaacccatccatgtgaggaagtataaagggcaggtagyagctgtggatacatattgctggcttcacaaaggagctattgcttgtgctgaaaaactagccaaaggtgaacctactgatagaagacgacaagccaatctt

SEQ ID NO: 83784 - DNA, 201 bp, Homo sapiens; identical to SEQ ID NO: 83722
  misc_feature (1)...(201): n = A,T,C or G

SEQ ID NO: 83785 - DNA, 201 bp, Homo sapiens
tcacaaaggagctattgcttgtgctgaaaaactagccaaaggtgaacctactgatagaagacgacaagccaatcttcttaagggaaagcaacttcttcgtraggggaaagtctcggaagctcgagagtgtttcacccggtctatcaatatcacacatgccatggcccacaaagtaattaaagctgcccggtctcagggggt

SEQ ID NO: 83786 - DNA, 110 bp, Homo sapiens; identical to SEQ ID NO: 83724

SEQ ID NO: 83787 - DNA, 201 bp, Homo sapiens; identical to SEQ ID NO: 83725

SEQ ID NO: 83788 - DNA, 201 bp, Homo sapiens; identical to SEQ ID NO: 83726

SEQ ID NO: 83789 - DNA, 201 bp, Homo sapiens; identical to SEQ ID NO: 83727

SEQ ID NO: 83790 - DNA, 121 bp, Homo sapiens; identical to SEQ ID NO: 83728

SEQ ID NO: 83791 - DNA, 121 bp, Homo sapiens; identical to SEQ ID NO: 83729

SEQ ID NO: 83792 - DNA, 201 bp, Homo sapiens; identical to SEQ ID NO: 83709

SEQ ID NO: 83793 - DNA, 201 bp, Homo sapiens; identical to SEQ ID NO: 83710

SEQ ID NO: 83794 - DNA, 201 bp, Homo sapiens; identical to SEQ ID NO: 83711

SEQ ID NO: 83795 - DNA, 201 bp, Homo sapiens; identical to SEQ ID NO: 83712

SEQ ID NO: 83796 - DNA, 201 bp, Homo sapiens; identical to SEQ ID NO: 83734

SEQ ID NO: 83797 - DNA, 201 bp, Homo sapiens; identical to SEQ ID NO: 83714

SEQ ID NO: 83798 - DNA, 201 bp, Homo sapiens; identical to SEQ ID NO: 83715

SEQ ID NO: 83799 - DNA, 201 bp, Homo sapiens; identical to SEQ ID NO: 83716

SEQ ID NO: 83800 - DNA, 201 bp, Homo sapiens; identical to SEQ ID NO: 83717

SEQ ID NO: 83801 - DNA, 201 bp, Homo sapiens; identical to SEQ ID NO: 83718

SEQ ID NO: 83802 - DNA, 201 bp, Homo sapiens; identical to SEQ ID NO: 83719

SEQ ID NO: 83803 - DNA, 201 bp, Homo sapiens; identical to SEQ ID NO: 83720

SEQ ID NO: 83804 - DNA, 201 bp, Homo sapiens
cagggtagttaatttggcaccatggggatacagggattgctacaatttatcaaagaagcttcagaacccatccatgtgaggaagtataaagggcaggtagyagctgtggatacatattgctggcttcacaaaggagctattgcttgtgctgaaaaactagccaaaggtgaacctactgataggtatgtaggattttgtatg

SEQ ID NO: 83805 - DNA, 201 bp, Homo sapiens; identical to SEQ ID NO: 83722
  misc_feature (1)...(201): n = A,T,C or G

SEQ ID NO: 83806 - DNA, 201 bp, Homo sapiens; identical to SEQ ID NO: 83723

SEQ ID NO: 83807 - DNA, 111 bp, Homo sapiens; identical to SEQ ID NO: 83745

SEQ ID NO: 83808 - DNA, 201 bp, Homo sapiens; identical to SEQ ID NO: 83725

SEQ ID NO: 83809 - DNA, 201 bp, Homo sapiens; identical to SEQ ID NO: 83726

SEQ ID NO: 83810 - DNA, 201 bp, Homo sapiens; identical to SEQ ID NO: 83748

SEQ ID NO: 83811 - DNA, 122 bp, Homo sapiens; identical to SEQ ID NO: 83749

SEQ ID NO: 83812 - DNA, 121 bp, Homo sapiens; identical to SEQ ID NO: 83729

SEQ ID NO: 83813 - DNA, 201 bp, Homo sapiens; identical to SEQ ID NO: 83709

SEQ ID NO: 83814 - DNA, 201 bp, Homo sapiens; identical to SEQ ID NO: 83710

SEQ ID NO: 83815 - DNA, 201 bp, Homo sapiens; identical to SEQ ID NO: 83711

SEQ ID NO: 83816 - DNA, 201 bp, Homo sapiens; identical to SEQ ID NO: 83712

SEQ ID NO: 83817 - DNA, 201 bp, Homo sapiens; identical to SEQ ID NO: 83713

SEQ ID NO: 83818 - DNA, 201 bp, Homo sapiens; identical to SEQ ID NO: 83714

SEQ ID NO: 83819 - DNA, 201 bp, Homo sapiens; identical to SEQ ID NO: 83715

SEQ ID NO: 83820 - DNA, 201 bp, Homo sapiens; identical to SEQ ID NO: 83716

SEQ ID NO: 83821 - DNA, 201 bp, Homo sapiens; identical to SEQ ID NO: 83717

SEQ ID NO: 83822 - DNA, 201 bp, Homo sapiens; identical to SEQ ID NO: 83718

SEQ ID NO: 83823 - DNA, 201 bp, Homo sapiens; identical to SEQ ID NO: 83719

SEQ ID NO: 83824 - DNA, 101 bp, Homo sapiens; identical to SEQ ID NO: 83741

SEQ ID NO: 83825 - DNA, 201 bp, Homo sapiens; identical to SEQ ID NO: 83721

SEQ ID NO: 83826 - DNA, 201 bp, Homo sapiens; identical to SEQ ID NO: 83722
  misc_feature (1)...(201): n = A,T,C or G

SEQ ID NO: 83827 - DNA, 201 bp, Homo sapiens; identical to SEQ ID NO: 83723

SEQ ID NO: 83828 - DNA, 110 bp, Homo sapiens; identical to SEQ ID NO: 83724

SEQ ID NO: 83829 - DNA, 201 bp, Homo sapiens; identical to SEQ ID NO: 83725

SEQ ID NO: 83830 - DNA, 201 bp, Homo sapiens; identical to SEQ ID NO: 83726

SEQ ID NO: 83831 - DNA, 201 bp, Homo sapiens; identical to SEQ ID NO: 83727

SEQ ID NO: 83832 - DNA, 121 bp, Homo sapiens; identical to SEQ ID NO: 83728

SEQ ID NO: 83833 - DNA, 201 bp, Homo sapiens
gccagcaagagtttggccacactgggcttcctgacctaagcagtatgactgaggaagagaagattgtttgtgccatgcagatgtccctgcagggagcagaktttggcctggcagaatcagcagacattgatgccagctcagccatggacacatctgagccagccaaggaggaggatgattacgacgtgatgcaagaccctg

SEQ ID NO: 83834 - DNA, 201 bp, Homo sapiens
tccctgatggtctttttttggatgctgacgtgcacaacgctctctgtaagaccctgcagcgtgactgtttggtgctgcagagcttcaagataatggattayagcctcttgatgtcaatccataatatagatcatgcacaacgagagcccttaagcagcgaaacacaatactcagttgatactcgaagaccagccccccaaa

SEQ ID NO: 83835 - DNA, 201 bp, Homo sapiens
gtagatcccagtgctgatcctgagctggccttggtccttcgtgtatttatggaagagcagcggcagcggcaggaggaggaggcccggcaggcagctgcagyttctgctgctgaggccgggattgctacgactgggactgaagactcagacgatgccctgctgaagatgaccatcagccagcaagagtttggccacactggg

SEQ ID NO: 83836 - DNA, 201 bp, Homo sapiens
ccttggtccttcgtgtatttatggaagagcagcggcagcggcaggaggaggaggcccggcaggcagctgcagcttctgctgctgaggccgggattgctacractgggactgaagactcagacgatgccctgctgaagatgaccatcagccagcaagagtttggccacactgggcttcctgacctaagcagtatgactgagg

SEQ ID NO: 83837 - DNA, 201 bp, Homo sapiens
acgtgagttctcccccatgccaggcgaatggtgtggacttgagctggtccagcagccggctcgacttgtctgagggagccctggagggggcggggaggggscccacagaacgtgggttctataaagagacattgggaagattcgattccgagaagaggaagagccggattgaaagagagccaggcccttgagggggagggg

SEQ ID NO: 83838 - DNA, 201 bp, Homo sapiens
aagagaagattgtttgtgccatgcagatgtccctgcagggagcagagtttggcctggcagaatcagcagacattgatgccagctcagccatggacacatcygagccagccaaggaggaggatgattacgacgtgatgcaagaccctgagttccttcagagtgtcctagagaacctcccaggtgtggatcccaacaatgaag

SEQ ID NO: 83839 - DNA, 201 bp, Homo sapiens
cagccatggacacatctgagccagccaaggaggaggatgattacgacgtgatgcaagaccctgagttccttcagagtgtcctagagaacctcccaggtgtrgatcccaacaatgaagccattcgaaatgctgtgggctccctggcctcccaggccaccaaggacagcaagaaggacaagaaggaggaagacaagaagtgag

SEQ ID NO: 83840 - DNA, 201 bp, Homo sapiens
cccggcaggcagctgcagcttctgctgctgaggccgggattgctacgactgggactgaagactcagacgatgccctgctgaagatgaccatcagccagcawgagtttggccacactgggcttcctgacctaagcagtatgactgaggaagagaagattgtttgtgccatgcagatgtccctgcagggagcagagtttggcc

SEQ ID NO: 83841 - DNA, 201 bp, Homo sapiens; identical to SEQ ID NO: 83833

SEQ ID NO: 83842 - DNA, 201 bp, Homo sapiens
tccctgatggtctttttttggatgctgacgtgcacaacgctctctgtaagaccctgcagcgtgactgtttggtgctgcagagcttcaagataatggattayagcctcttgatgtcaatccataatatagatcatgcacaacgagagcccttaagcagcgaaacacaatactcaactccacctttggaggaaatcagtgagg

SEQ ID NO: 83843 - DNA, 201 bp, Homo sapiens; identical to SEQ ID NO: 83835

SEQ ID NO: 83844 - DNA, 201 bp, Homo sapiens; identical to SEQ ID NO: 83836

SEQ ID NO: 83845 - DNA, 201 bp, Homo sapiens; identical to SEQ ID NO: 83837

SEQ ID NO: 83846 - DNA, 201 bp, Homo sapiens; identical to SEQ ID NO: 83838

SEQ ID NO: 83847 - DNA, 201 bp, Homo sapiens; identical to SEQ ID NO: 83839

SEQ ID NO: 83848 - DNA, 201 bp, Homo sapiens; identical to SEQ ID NO: 83840

SEQ ID NO: 83849 - DNA, 201 bp, Homo sapiens
tgtttcctgatcaaaatggaacaggaaaagcacaatcaacagtctgaatttactgttgaaagcttgatagccactgtaactgatatgtttggggctggaayagagacaacgagcaccactctgagatatggactcctgctcctgctgaagtacccagaggtcacagctaaagtccaggaagagattgaatgtgtagttggc

SEQ ID NO: 83850 - DNA, 201 bp, Homo sapiens
cctggccactttctggataagagtggcaactttaagaaaagtgactacttcatgcctttctcagcaggaaaacggatgtgtatgggagagggcctggccckcatggagctgtttttattcctgaccaccattttgcagaactttaacctgaaatctcaggttgacccaaaggatattgacatcacccccattgccaatgca

SEQ ID NO: 83851 - DNA, 201 bp, Homo sapiens
ggctggaacagagacaacgagcaccactctgagatatggactcctgctcctgctgaagtacccagaggtcacagctaaagtccaggaagagattgaatgtktagttggcagaaaccggagcccctgtatgcaggacaggagtcacatgccctacacagatgctgtggtgcacgagatccagagatacattgacctcctccc

SEQ ID NO: 83852 - DNA, 201 bp, Homo sapiens
ggaaaaattcaatgaaaacctcaggattctgagctctccatggatccaggtctgcaataatttccctgctctcatcgattatctcccaggaagtcataatraaatagctgaaaattttgcttacattaaaagttatgtattggagagaataaaagaacatcaagaatccctggacatgaacagtgctcgggactttattga

SEQ ID NO: 83853 - DNA, 141 bp, Homo sapiens
cctaaatatatctgctattctccatactctgtatcacttgtattgaccaccacatatgctaatacctatctactgctgagttgtcagtatgttatcactakaaaacaaagaaaaatgattaataaatgacaattcagagcc

SEQ ID NO: 83854 - DNA, 201 bp, Homo sapiens
ccacccttgtaccagctctgcttcattcctgtctgaagaagggcagatagtttggctgctcctgtgctgtcacctgcaattctcccttatcagggccattrgcctctcccttctctctgtgagggatattttctctgacttgtcaatccacatcttcccattccctcaagatccaatgaacatccaacctccattaaagag

SEQ ID NO: 83855 - DNA, 201 bp, Homo sapiens
tgcttcattcctgtctgaagaagggcagatagtttggctgctcctgtgctgtcacctgcaattctcccttatcagggccattggcctctcccttctctctrtgagggatattttctctgacttgtcaatccacatcttcccattccctcaagatccaatgaacatccaacctccattaaagagagtttcttgggtcacttc

SEQ ID NO: 83856 - DNA, 201 bp, Homo sapiens
gtgcacgagatccagagatacattgacctcctccccaccaacctgccccatgcagtgacctgtgatgttaaattcaaaaactacctcatccccaagggcaygaccataataacatccctgacttctgtgctgcacaatgacaaagaattccccaacccagagatgtttgaccctggccactttctggataagagtggcaac

SEQ ID NO: 83857 - DNA, 201 bp, Homo sapiens
catcacccccattgccaatgcatttggtcgtgtgccacccttgtaccagctctgcttcattcctgtctgaagaagggcagatagtttggctgctcctgtgytgtcacctgcaattctcccttatcagggccattggcctctcccttctctctgtgagggatattttctctgacttgtcaatccacatcttcccattccctc

SEQ ID NO: 83858 - DNA, 201 bp, Homo sapiens
ggaacattgatcagataatagatttttttttttttctcagatggagttctgctcttgtcgcccagactggagtgcaatggcacgatgttggctcactgcartctccgcttcccaggttcaagcagttctccagccttagcctcccaagtagctgggattacaggctcccactaccattcccagaatttttgtattttaatt

SEQ ID NO: 83859 - DNA, 201 bp, Homo sapiens
tgagattgagcatcttgtttgttttgtcaccactatataacagcatgttggaaacaaagcagtaataaagctagaaaaaccaagcgaatacactggattawaaaaaatactgtttcctagaattaaagaaataaatgaggccgggcgcagtggtgcctgtaatcccagcagtttgggaggctgaggctagtggatcatgtg

SEQ ID NO: 83860 - DNA, 201 bp, Homo sapiens
gtaataaagctagaaaaaccaagcgaatacactggattaaaaaaaatactgtttcctagaattaaagaaataaatgaggccgggcgcagtggtgcctgtartcccagcagtttgggaggctgaggctagtggatcatgtggccgagatcgcgtcactgcactccagtctagcaacagagcgataccttgtttcttacttaa

SEQ ID NO: 83861 - DNA, 201 bp, Homo sapiens
attatagagcaaataagagcatcaaaaacaatcttagaaatctttcagagaaaggtcacctacaaaggaacattgatcagataatagatttttttttttttctcagatggagttctgctcttgtcgcccagactggagtgcaatggcacgatgttggctcactgcaatctccgcttcccaggttcaagcagttctccagcc

SEQ ID NO: 83862 - DNA, 201 bp, Homo sapiens
gcaacagagcgataccttgtttcttacttaaaaaaaaaaaaagacctcatttgttaactgttaaacagaaaacaagaaattccctatacctgtatgcattrtagagcaaataagagcatcaaaaacaatcttagaaatctttcagagaaaggtcacctacaaaggaacattgatcagataatagatttttttttttttctc

SEQ ID NO: 83863 - DNA, 201 bp, Homo sapiens
cattatagagcaaataagagcatcaaaaacaatcttagaaatctttcagagaaaggtcacctacaaaggaacattgatcagataatagatttttttttttttctcagatggagttctgctcttgtcgcccagactggagtgcaatggcacgatgttggctcactgcaatctccgcttcccaggttcaagcagttctccagc

SEQ ID NO: 83864 - DNA, 201 bp, Homo sapiens
tctgtgtacatttaattcttcagtgtgtatccaccacatttaacttattcacttacagaactatgcaagaatttctctggtaaatttcactaagtacttaygtacttttcagaacgattgtgagtttacacccctaccagcaggactgagttgagtacccatttcctcacatccttgccagtacttcatttgcctaatttt

SEQ ID NO: 83865 - DNA, 201 bp, Homo sapiens
tttctctgaaggggaaagttatcctctttttgcccaagtcacacttgtgtcatttcttatactgtaaacatgtggttccaattctgaggtattttcccggyttgtaggacccaaaaagaagttaggcttgagaaattttaagtgaagagaacaattctagttcagagtgattggctcttcctaaaagctgacatttgactg

SEQ ID NO: 83866 - DNA, 201 bp, Homo sapiens
aagggaagaaggtcattctctataccagtgaaggctccatccaaaccagtgtttgggggcatagtcataattgaaaaatgattgttttccttatctgtaaracaggtaaatggtattaatcctcaggtggttgtgaggattaagtgatacatgtaaaaaaaagaaagctttggatagtacctattataagaaactcagtgt

SEQ ID NO: 83867 - DNA, 201 bp, Homo sapiens
agggaatagtttcagtgacattatgtcattgaagaccttagaagatttccctcgctaaaggagataaagcgactggcacaacatgtatttctctgagtaaktagaagtgttcttttctggctgtactgaagggactttcatgatttcttcgtttttgtactcttagttttataatattgcatagtagctaaggcctggctg

SEQ ID NO: 83868 - DNA, 201 bp, Homo sapiens; identical to SEQ ID NO: 83858

SEQ ID NO: 83869 - DNA, 201 bp, Homo sapiens; identical to SEQ ID NO: 83859

SEQ ID NO: 83870 - DNA, 201 bp, Homo sapiens; identical to SEQ ID NO: 83860

SEQ ID NO: 83871 - DNA, 201 bp, Homo sapiens; identical to SEQ ID NO: 83861

SEQ ID NO: 83872 - DNA, 201 bp, Homo sapiens; identical to SEQ ID NO: 83862

SEQ ID NO: 83873 - DNA, 201 bp, Homo sapiens; identical to SEQ ID NO: 83863

SEQ ID NO: 83874 - DNA, 201 bp, Homo sapiens; identical to SEQ ID NO: 83864

SEQ ID NO: 83875 - DNA, 201 bp, Homo sapiens; identical to SEQ ID NO: 83865

SEQ ID NO: 83876 - DNA, 201 bp, Homo sapiens; identical to SEQ ID NO: 83866

SEQ ID NO: 83877 - DNA, 201 bp, Homo sapiens; identical to SEQ ID NO: 83867

SEQ ID NO: 83878 - DNA, 107 bp, Homo sapiens
aatgtctttttccctcctttcttctagtaatgcagttcatgggctttaggtacttcagttatgaagtaggcttttcatggggagagattgggattatgctytctgtt

SEQ ID NO: 83879 - DNA, 201 bp, Homo sapiens
atgtttgttttaaagtggagctcaagaatagcttttaaaagttcttatttacatctagtgatttccctgtattgggtttgaaatactgattgtccacttcmccttttttattatatcagttgacatgtaactagtaccatgcgtacttaaatagatggtaattttctgagccttaccaagaacaaagaagtatccatatta

SEQ ID NO: 83880 - DNA, 201 bp, Homo sapiens
tatcatggccatagtatattgtaacctttgtctaatcattggatttattgtgtcacttctgaagtttcacagaaatgaatgaattttatcatctatgatawgagtgagataattatgggagtggtaagaattatgacttgaattcttctttgattgtgttgcacatagatatggtagtctgctctgtatatttttcccttt

SEQ ID NO: 83881 - DNA, 201 bp, Homo sapiens
gaaatgaatgaattttatcatctatgatatgagtgagataattatgggagtggtaagaattatgacttgaattcttctttgattgtgttgcacatagatayggtagtctgctctgtatatttttcccttttataatgtgcttttcacactgctgcaaaccttagttacatcctaggaaaaaatacttcctaaaataaaact

SEQ ID NO: 83882 - DNA, 201 bp, Homo sapiens
tcacccggaaatcggtccgcaaggcgcagaggcagaagcgctcccagggctcgtcgcagtttcgcagccagggcagccaggcagagctgcacccgctgccycagctcaaagatgccacttcaaatgaacaacaagagcttttctgtcagaagttgcagcagtgttgtatactgtttgatttcatggactctgtttcagact

SEQ ID NO: 83883 - DNA, 201 bp, Homo sapiens
cttggcctcacatacagttggtatatgaattcttcttgagatttttggagagccctgatttccagcctagcattgcaaaacgatacattgatcagaaattygtacaacagctcctggagctttttgatagtgaagatcccagagaacgtgacttcctgaagactgttctgcaccgaatttatgggaaatttcttggattaa

SEQ ID NO: 83884 - DNA, 201 bp, Homo sapiens
ctgcgcgcccagagtcaacaacttcttcacccccctccgcccccgcccttccctccgtcagccccgggagctcgccgcgcgccggggaccaggaacctccrgcgctgagatgtggccgtgaggcgttggcgggcggcgaggagaagctcggcggcgtcccggggccggagggccgtggggccggggcgcaggggcgcgagc

SEQ ID NO: 83885 - DNA, 201 bp, Homo sapiens
tacagagcactagttgtcactgcctggctttatttaaaggaactgcagtaggcttcctctgtagagctctgaaaaggttgactatatagaggtcttgtatktttttacttggtcaagtatttctcacatcttttgttatcagagtaccattccaatctcttaacttgcagttgtgtggaaaactgttttgtaatgaaagat

SEQ ID NO: 83886 - DNA, 201 bp, Homo sapiens
agtcccacagtgtggtgatacagagcactagttgtcactgcctggctttatttaaaggaactgcagtaggcttcctctgtagagctctgaaaaggttgackatatagaggtcttgtatgtttttacttggtcaagtatttctcacatcttttgttatcagagtaccattccaatctcttaacttgcagttgtgtggaaaac

SEQ ID NO: 83887 - DNA, 201 bp, Homo sapiens
tttctggcaactgtaaatggaaaacctttgtctaatcattggatttattgtgtcacttctgaagtttcacagaaatgaatgaattttatcatctatgatawgagtgagataattatgggagtggtaagaattatgacttgaattcttctttgattgtgttgcacatagatatggtagtctgctctgtatatttttcccttt

SEQ ID NO: 83888 - DNA, 201 bp, Homo sapiens; identical to SEQ ID NO: 83881

SEQ ID NO: 83889 - DNA, 201 bp, Homo sapiens; identical to SEQ ID NO: 83882

SEQ ID NO: 83890 - DNA, 201 bp, Homo sapiens; identical to SEQ ID NO: 83883

SEQ ID NO: 83891 - DNA, 201 bp, Homo sapiens; identical to SEQ ID NO: 83884

SEQ ID NO: 83892 - DNA, 201 bp, Homo sapiens; identical to SEQ ID NO: 83885

SEQ ID NO: 83893 - DNA, 201 bp, Homo sapiens; identical to SEQ ID NO: 83886

SEQ ID NO: 83894 - DNA, 201 bp, Homo sapiens
aggcaggtatggatgtattgtcgcctgtaccgcactttcgagcgcttccgccatgctcagcttctggacgcagcaaaagcaggtggtgagttcttgctgcrgtatgcccgggtggcacctcctggcaagaagtgtgcctttgtgctgactcgggacggccgcccggtcaaggtgcagcgaaccatcttcagtgagtgtttc

SEQ ID NO: 83895 - DNA, 201 bp, Homo sapiens
gggagacagcagaacccaggccacacgctggaagccggctggtttctgctccgtcattgcattcggaaaggcgaccccgaacttcgagcccacgtgattgrcaagttcctattgttgcccttccactccggatgggaccctgaccacggaggcctcttttacttccaggatgctgataacttctgccccacccagctggag

SEQ ID NO: 83896 - DNA, 201 bp, Homo sapiens; identical to SEQ ID NO: 83894

SEQ ID NO: 83897 - DNA, 201 bp, Homo sapiens; identical to SEQ ID NO: 83895

SEQ ID NO: 83898 - DNA, 201 bp, Homo sapiens; identical to SEQ ID NO: 83894

SEQ ID NO: 83899 - DNA, 201 bp, Homo sapiens; identical to SEQ ID NO: 83895

SEQ ID NO: 83900 - DNA, 201 bp, Homo sapiens
tacctggcctactacctccagggaggcttcagcagattccaggccgagtgccctcacctgtgtgagaccagccttgctggccgtgccggctccagcatggygccggtgcccggtccagtgcccgtggtggggttgggcagcctgtgcctgggctccgactgctctgatgcggaatccgaggctgaccgcgactccatgagc

SEQ ID NO: 83901 - DNA, 201 bp, Homo sapiens; identical to SEQ ID NO: 83900

SEQ ID NO: 83902 - DNA, 201 bp, Homo sapiens; identical to SEQ ID NO: 83900

SEQ ID NO: 83903 - DNA, 201 bp, Homo sapiens
tccaggctaaggacacagaacgggggcaggacgggtggggcgggccgctgtgtcctggagcctttgctggagagaacagagggcaggtcacactggacttkttgtctcaggatggagccttcagggagaaaacatggcaccttgctccagtagccacgataccaggagtggaggagggtgtccccgggatacaggtcttcc

SEQ ID NO: 83904 - DNA, 201 bp, Homo sapiens
acagagagcacagatgtcaaggacagctcagaggcctccgactcagcctcctagagcctgccccatcccctcctcaccccacgagctttcacaataaattygctccgtggcactggggaactttgtgtgtgagcgcgcgcacatttagagggtgtgtttctccaggtcctctggtggggatgtgagccttggccttttgac

SEQ ID NO: 83905 - DNA, 201 bp, Homo sapiens
ttgggaatagagaggtgtgggtccctggcgtgagcagatgctgaggagcaggactcaagcatgaccaagcacctagaagaatccaagagagagcagaatcraggagaatgcacattcaggaaggaagggccagtggccaggcagcctagtggatgggggaggtctgcctgaggaccaggaggccccgtgtgcctagcacac

SEQ ID NO: 83906 - DNA, 201 bp, Homo sapiens
aggtcacactggacttgttgtctcaggatggagccttcagggagaaaacatggcaccttgctccagtagccacgataccaggagtggaggagggtgtcccygggatacaggtcttcctccttgctctctaaccctctgcccccaggatcagtgaagtggagcccaaatactatgcagatggggaggacgcctatgccatga

SEQ ID NO: 83907 - DNA, 201 bp, Homo sapiens
taggcctggcagggccagcctaggccattgagtccagctccccttccagggacatggccacgcgagtctgcacacacacctgcccagtgtagtcacggccscagagctgctcaggcagggctcaccgtctttcctgggttctgatggctgttgtgaggcagctcagtaagggacagggcgcagggcagggagggaagggga

SEQ ID NO: 83908 - DNA, 201 bp, Homo sapiens
aacatccgcaatgcgaggccagaggacctaatgaacatgcagcactgcaacctcctctgcctgcccgagaactaccagatgaaatactacttctaccatgscctttcctggccccagctctcttacattgctgaggacgagaatgggaagattgtggggtatgtcctggccaaaatggaagaggacccagatgatgtgccc

SEQ ID NO: 83909 - DNA, 201 bp, Homo sapiens
tgggctgcctgtggagggacactaactgcactcagcccgtttggtaggggatgaagaagagggactgttgggaagggcggtggcctctgggctggatgctrgcaagagggatctgtgacccagatgacgatgtctggtgggaattgctttatagctaagtcagcaatcctcatgtcttaggcctggcagggccagcctagg

SEQ ID NO: 83910 - DNA, 201 bp, Homo sapiens; identical to SEQ ID NO: 83904

SEQ ID NO: 83911 - DNA, 201 bp, Homo sapiens; identical to SEQ ID NO: 83908

SEQ ID NO: 83912 - DNA, 201 bp, Homo sapiens; identical to SEQ ID NO: 83904

SEQ ID NO: 83913 - DNA, 201 bp, Homo sapiens; identical to SEQ ID NO: 83908

SEQ ID NO: 83914 - DNA, 137 bp, Homo sapiens
caacggcggtggcgcccggagcccgagtttccaggakggcttctgcatcaacttctaaatataattcacactccttggagaatgagtctattaagaggacgtctcgagatggagtcaatcgagatctcactgaggct

SEQ ID NO: 83915 - DNA, 201 bp, Homo sapiens
gtttattgattgtgtgtggcaaatgtcaaaacagttccctacagcttttgaattcaatgaacaatttttgattataattttggatcatctgtatagttgcygatttggtactttcttattcaactgtgaatctgctcgagaaagacagaaggttacagaaaggactgtttctttatggtcactgataaacagtaataaaga

SEQ ID NO: 83916 - DNA, 184 bp, Homo sapiens
caacggcggtggcgcccggagcccgagtttccaggatggcttctgcatcaacttctaaatataattcacactccttggagaatkagtctattaagaggacgtctcgagatggagtcaatcgagatctcactgaggctgttcctcgacttccaggagaaacactaatcactgacaaagaagttat

SEQ ID NO: 83917 - DNA, 201 bp, Homo sapiens
ggcggtggcgcccggagcccgagtttccaggatggcttctgcatcaacttctaaatataattcacactccttggagaatgagtctattaagaggacgtctygagatggagtcaatcgagatctcactgaggctgttcctcgacttccaggagaaacactaatcactgacaaagaagttatttacatatgtcctttcaatgg

SEQ ID NO: 83918 - DNA, 201 bp, Homo sapiens
attcaagtagcagacaaagtttcttcagggaagagttcagtgcttgtgcattgcagtgacggatgggacaggactgctcagctgacatccttggccatgcygatgttggatagcttctataggagcattgaagggttcgaaatactggtacaaaaagaatggataagttttggacataaatttgcatctcgaataggtcat

SEQ ID NO: 83919 - DNA, 201 bp, Homo sapiens
ggagaatgagtctattaagaggacgtctcgagatggagtcaatcgagatctcactgaggctgttcctcgacttccaggagaaacactaatcactgacaaakaagttatttacatatgtcctttcaatggccccattaagggaagagtttacatcacaaattatcgtctttatttaagaagtttggaaacggattcttctct

SEQ ID NO: 83920 - DNA, 201 bp, Homo sapiens
gaatgagtctattaagaggacgtctcgagatggagtcaatcgagatctcactgaggctgttcctcgacttccaggagaaacactaatcactgacaaagaakttatttacatatgtcctttcaatggccccattaagggaagagtttacatcacaaattatcgtctttatttaagaagtttggaaacggattcttctctaat

SEQ ID NO: 83921 - DNA, 201 bp, Homo sapiens
tcacagtctgccattatttgcatttttaaatgaagaaaagtttaacgtggatggatggacagtttacaatccagtggaagaatacaggaggcagggcttgyccaatcaccattggagaataacttttattaataagtgctatgagctctgtgacacttaccctgctcttttggtggttccgtatcgtgcctcagatgatga

SEQ ID NO: 83922 - DNA, 201 bp, Homo sapiens
gtttcttcagggaagagttcagtgcttgtgcattgcagtgacggatgggacaggactgctcagctgacatccttggccatgctgatgttggatagcttctrtaggagcattgaagggttcgaaatactggtacaaaaagaatggataagttttggacataaatttgcatctcgaataggtcatggtgataaaaaccacacc

SEQ ID NO: 83923 - DNA, 201 bp, Homo sapiens
ggttagaacatatcaagctcgttttgacaggagccattcaagtagcagacaaagtttcttcagggaagagttcagtgcttgtgcattgcagtgacggatgrgacaggactgctcagctgacatccttggccatgctgatgttggatagcttctataggagcattgaagggttcgaaatactggtacaaaaagaatggataa

SEQ ID NO: 83924 - DNA, 201 bp, Homo sapiens
cattggttagaacatatcaagctcgttttgacaggagccattcaagtagcagacaaagtttcttcagggaagagttcagtgcttgtgcattgcagtgacgratgggacaggactgctcagctgacatccttggccatgctgatgttggatagcttctataggagcattgaagggttcgaaatactggtacaaaaagaatgg

SEQ ID NO: 83925 - DNA, 201 bp, Homo sapiens
atctgctcgagaaagacagaaggttacagaaaggactgtttctttatggtcactgataaacagtaataaagaaaaattcaaaaaccccttctatactaaakaaatcaatcgagttttatatccagttgccagtatgcgtcacttggaactctgggtgaattactacattagatggaaccccaggatcaagcaacaacagcc

SEQ ID NO: 83926 - DNA, 201 bp, Homo sapiens
gaagaaaagtttaacgtggatggatggacagtttacaatccagtggaagaatacaggaggcagggcttgcccaatcaccattggagaataacttttattartaagtgctatgagctctgtgacacttaccctgctcttttggtggttccgtatcgtgcctcagatgatgacctccggagagttgcaacttttaggtcccga

SEQ ID NO: 83927 - DNA, 201 bp, Homo sapiens
tctactcattggttagaacatatcaagctcgttttgacaggagccattcaagtagcagacaaagtttcttcagggaagagttcagtgcttgtgcattgcartgacggatgggacaggactgctcagctgacatccttggccatgctgatgttggatagcttctataggagcattgaagggttcgaaatactggtacaaaaa

SEQ ID NO: 83928 - DNA, 201 bp, Homo sapiens
gaagaatctcattggttgtccagtttggagtctactcattggttagaacatatcaagctcgttttgacaggagccattcaagtagcagacaaagtttcttsagggaagagttcagtgcttgtgcattgcagtgacggatgggacaggactgctcagctgacatccttggccatgctgatgttggatagcttctataggagc

SEQ ID NO: 83929 - DNA, 201 bp, Homo sapiens
ttggccatgctgatgttggatagcttctataggagcattgaagggttcgaaatactggtacaaaaagaatggataagttttggacataaatttgcatctcraataggtcatggtgataaaaaccacaccgatgctgaccgttctcctatttttctccagtttattgattgtgtgtggcaaatgtcaaaacagttccctaca

SEQ ID NO: 83930 - DNA, 201 bp, Homo sapiens
cttggccatgctgatgttggatagcttctataggagcattgaagggttcgaaatactggtacaaaaagaatggataagttttggacataaatttgcatctygaataggtcatggtgataaaaaccacaccgatgctgaccgttctcctatttttctccagtttattgattgtgtgtggcaaatgtcaaaacagttccctac

SEQ ID NO: 83931 - DNA, 201 bp, Homo sapiens
tggataagttttggacataaatttgcatctcgaataggtcatggtgataaaaaccacaccgatgctgaccgttctcctatttttctccagtttattgattrtgtgtggcaaatgtcaaaacagttccctacagcttttgaattcaatgaacaatttttgattataattttggatcatctgtatagttgccgatttggtact

SEQ ID NO: 83932 - DNA, 201 bp, Homo sapiens
cagtttacaatccagtggaagaatacaggaggcagggcttgcccaatcaccattggagaataacttttattaataagtgctatgagctctgtgacacttamcctgctcttttggtggttccgtatcgtgcctcagatgatgacctccggagagttgcaacttttaggtcccgaaatcgaattccagtgctgtcatggattc

SEQ ID NO: 83933 - DNA, 201 bp, Homo sapiens
caatcgagatctcactgaggctgttcctcgacttccaggagaaacactaatcactgacaaagaagttatttacatatgtcctttcaatggccccattaagkgaagagtttacatcacaaattatcgtctttatttaagaagtttggaaacggattcttctctaatacttgatgttcctctgggtgtgatctcgagaattga

SEQ ID NO: 83934 - DNA, 201 bp, Homo sapiens
tcattggttagaacatatcaagctcgttttgacaggagccattcaagtagcagacaaagtttcttcagggaagagttcagtgcttgtgcattgcagtgacrgatgggacaggactgctcagctgacatccttggccatgctgatgttggatagcttctataggagcattgaagggttcgaaatactggtacaaaaagaatg

SEQ ID NO: 83935 - DNA, 201 bp, Homo sapiens
gacagtttacaatccagtggaagaatacaggaggcagggcttgcccaatcaccattggagaataacttttattaataagtgctatgagctctgtgacactwaccctgctcttttggtggttccgtatcgtgcctcagatgatgacctccggagagttgcaacttttaggtcccgaaatcgaattccagtgctgtcatggat

SEQ ID NO: 83936 - DNA, 201 bp, Homo sapiens
agtttacaatccagtggaagaatacaggaggcagggcttgcccaatcaccattggagaataacttttattaataagtgctatgagctctgtgacacttacyctgctcttttggtggttccgtatcgtgcctcagatgatgacctccggagagttgcaacttttaggtcccgaaatcgaattccagtgctgtcatggattca

SEQ ID NO: 83937 - DNA, 201 bp, Homo sapiens
gttttggacataaatttgcatctcgaataggtcatggtgataaaaaccacaccgatgctgaccgttctcctatttttctccagtttattgattgtgtgtgrcaaatgtcaaaacagttccctacagcttttgaattcaatgaacaatttttgattataattttggatcatctgtatagttgccgatttggtactttcttat

SEQ ID NO: 83938 - DNA, 201 bp, Homo sapiens
gaactaattcatttattaagtatatttgtaaaagctaaggctcgagttaaaacaatgaagtgttttacaatgatttgtaaaggactatttataactaatayggttttgttttcaatgaattaagaaagattaaatatatctttgtaaattattttatgtcatagtttaattggtctaccaagtaagacatctcaaatacag

SEQ ID NO: 83939 - DNA, 201 bp, Homo sapiens
cataaatttgcatctcgaataggtcatggtgataaaaaccacaccgatgctgaccgttctcctatttttctccagtttattgattgtgtgtggcaaatgtsaaaacagttccctacagcttttgaattcaatgaacaatttttgattataattttggatcatctgtatagttgccgatttggtactttcttattcaactgt

SEQ ID NO: 83940 - DNA, 201 bp, Homo sapiens
gtaaaggactatttataactaatatggttttgttttcaatgaattaagaaagattaaatatatctttgtaaattattttatgtcatagtttaattggtctmccaagtaagacatctcaaatacagtagtataatgtatgaattttgtaagtataagaaattttattagacattctcttactttttgtaaatgctgtaaata

SEQ ID NO: 83941 - DNA, 201 bp, Homo sapiens
ccctacagcttttgaattcaatgaacaatttttgattataattttggatcatctgtatagttgccgatttggtactttcttattcaactgtgaatctgctygagaaagacagaaggttacagaaaggactgtttctttatggtcactgataaacagtaataaagaaaaattcaaaaaccccttctatactaaagaaatcaa

SEQ ID NO: 83942 - DNA, 201 bp, Homo sapiens
tggacagtttacaatccagtggaagaatacaggaggcagggcttgcccaatcaccattggagaataacttttattaataagtgctatgagctctgtgacayttaccctgctcttttggtggttccgtatcgtgcctcagatgatgacctccggagagttgcaacttttaggtcccgaaatcgaattccagtgctgtcatgg

SEQ ID NO: 83943 - DNA, 201 bp, Homo sapiens
cctatttttctccagtttattgattgtgtgtggcaaatgtcaaaacagttccctacagcttttgaattcaatgaacaatttttgattataattttggatcmtctgtatagttgccgatttggtactttcttattcaactgtgaatctgctcgagaaagacagaaggttacagaaaggactgtttctttatggtcactgata

SEQ ID NO: 83944 - DNA, 201 bp, Homo sapiens
aaaatatttgcctccatgtagaacttgaactaacataatcttaaactcttgaatatgtgccttctagaatacatattacaagaaaactacagggtccacayggcaatcagaagaaaggagctgagatgaggttttggaaaaccctgacacctttaaaaagcagtttttgaaagacaaaatttagatttaatttacgtcttg

SEQ ID NO: 83945 - DNA, 201 bp, Homo sapiens
tccagaaaataagacggtcattgtgcgttgcagtcagcctcttgtcggtatgagtgggaaacgaaataaagatgatgagaaatatctcgatgttatcaggkagactaataaacaaatttctaaactcaccatttatgatgcaagacccagcgtaaatgcagtggccaacaaggcaacaggaggaggatatgaaagtgatga

SEQ ID NO: 83946 - DNA, 201 bp, Homo sapiens
gtgcattgcagtgacggatgggacaggactgctcagctgacatccttggccatgctgatgttggatagcttctataggagcattgaagggttcgaaatacyggtacaaaaagaatggataagttttggacataaatttgcatctcgaataggtcatggtgataaaaaccacaccgatgctgaccgttctcctatttttctc

SEQ ID NO: 83947 - DNA, 201 bp, Homo sapiens
agtgcttgtgcattgcagtgacggatgggacaggactgctcagctgacatccttggccatgctgatgttggatagcttctataggagcattgaagggttcraaatactggtacaaaaagaatggataagttttggacataaatttgcatctcgaataggtcatggtgataaaaaccacaccgatgctgaccgttctcctat

SEQ ID NO: 83948 - DNA, 201 bp, Homo sapiens
agttcagtgcttgtgcattgcagtgacggatgggacaggactgctcagctgacatccttggccatgctgatgttggatagcttctataggagcattgaagbgttcgaaatactggtacaaaaagaatggataagttttggacataaatttgcatctcgaataggtcatggtgataaaaaccacaccgatgctgaccgttct

SEQ ID NO: 83949 - DNA, 201 bp, Homo sapiens
gagttcagtgcttgtgcattgcagtgacggatgggacaggactgctcagctgacatccttggccatgctgatgttggatagcttctataggagcattgaarggttcgaaatactggtacaaaaagaatggataagttttggacataaatttgcatctcgaataggtcatggtgataaaaaccacaccgatgctgaccgttc

SEQ ID NO: 83950 - DNA, 201 bp, Homo sapiens
aggttacagaaaggactgtttctttatggtcactgataaacagtaataaagaaaaattcaaaaaccccttctatactaaagaaatcaatcgagttttatawccagttgccagtatgcgtcacttggaactctgggtgaattactacattagatggaaccccaggatcaagcaacaacagccgaatccagtggagcagcgtt

SEQ ID NO: 83951 - DNA, 201 bp, Homo sapiens
gaatacaggaggcagggcttgcccaatcaccattggagaataacttttattaataagtgctatgagctctgtgacacttaccctgctcttttggtggttcygtatcgtgcctcagatgatgacctccggagagttgcaacttttaggtcccgaaatcgaattccagtgctgtcatggattcatccagaaaataagacggtc

SEQ ID NO: 83952 - DNA, 201 bp, Homo sapiens
atttttctccagtttattgattgtgtgtggcaaatgtcaaaacagttccctacagcttttgaattcaatgaacaatttttgattataattttggatcatcygtatagttgccgatttggtactttcttattcaactgtgaatctgctcgagaaagacagaaggttacagaaaggactgtttctttatggtcactgataaac

SEQ ID NO: 83953 - DNA, 201 bp, Homo sapiens
ggagccattcaagtagcagacaaagtttcttcagggaagagttcagtgcttgtgcattgcagtgacggatgggacaggactgctcagctgacatccttggmcatgctgatgttggatagcttctataggagcattgaagggttcgaaatactggtacaaaaagaatggataagttttggacataaatttgcatctcgaata

SEQ ID NO: 83954 - DNA, 201 bp, Homo sapiens
aatgcagtggccaacaaggcaacaggaggaggatatgaaagtgatgatgcatatcataacgccgaacttttcttcttagacattcataatattcatgttakgcgggaatctttaaaaaaagtgaaggacattgtttatcctaatgtagaagaatctcattggttgtccagtttggagtctactcattggttagaacatatc

SEQ ID NO: 83955 - DNA, 201 bp, Homo sapiens
atttgcatttttaaatgaagaaaagtttaacgtggatggatggacagtttacaatccagtggaagaatacaggaggcagggcttgcccaatcaccattggrgaataacttttattaataagtgctatgagctctgtgacacttaccctgctcttttggtggttccgtatcgtgcctcagatgatgacctccggagagttgc

SEQ ID NO: 83956 - DNA, 201 bp, Homo sapiens
tttggagtctactcattggttagaacatatcaagctcgttttgacaggagccattcaagtagcagacaaagtttcttcagggaagagttcagtgcttgtgsattgcagtgacggatgggacaggactgctcagctgacatccttggccatgctgatgttggatagcttctataggagcattgaagggttcgaaatactggt

SEQ ID NO: 83957 - DNA, 201 bp, Homo sapiens
taataagtgctatgagctctgtgacacttaccctgctcttttggtggttccgtatcgtgcctcagatgatgacctccggagagttgcaacttttaggtccygaaatcgaattccagtgctgtcatggattcatccagaaaataagacggtcattgtgcgttgcagtcagcctcttgtcggtatgagtgggaaacgaaataa

SEQ ID NO: 83958 - DNA, 201 bp, Homo sapiens
taggtcccgaaatcgaattccagtgctgtcatggattcatccagaaaataagacggtcattgtgcgttgcagtcagcctcttgtcggtatgagtgggaaaygaaataaagatgatgagaaatatctcgatgttatcagggagactaataaacaaatttctaaactcaccatttatgatgcaagacccagcgtaaatgcagt

SEQ ID NO: 83959 - DNA, 201 bp, Homo sapiens
agaaagacagaaggttacagaaaggactgtttctttatggtcactgataaacagtaataaagaaaaattcaaaaaccccttctatactaaagaaatcaatygagttttatatccagttgccagtatgcgtcacttggaactctgggtgaattactacattagatggaaccccaggatcaagcaacaacagccgaatccagt

SEQ ID NO: 83960 - DNA, 201 bp, Homo sapiens
gtgctatgagctctgtgacacttaccctgctcttttggtggttccgtatcgtgcctcagatgatgacctccggagagttgcaacttttaggtcccgaaatygaattccagtgctgtcatggattcatccagaaaataagacggtcattgtgcgttgcagtcagcctcttgtcggtatgagtgggaaacgaaataaagatga

SEQ ID NO: 83961 - DNA, 201 bp, Homo sapiens
tatgagctctgtgacacttaccctgctcttttggtggttccgtatcgtgcctcagatgatgacctccggagagttgcaacttttaggtcccgaaatcgaaytccagtgctgtcatggattcatccagaaaataagacggtcattgtgcgttgcagtcagcctcttgtcggtatgagtgggaaacgaaataaagatgatgag

SEQ ID NO: 83962 - DNA, 201 bp, Homo sapiens
gcctcagatgatgacctccggagagttgcaacttttaggtcccgaaatcgaattccagtgctgtcatggattcatccagaaaataagacggtcattgtgckttgcagtcagcctcttgtcggtatgagtgggaaacgaaataaagatgatgagaaatatctcgatgttatcagggagactaataaacaaatttctaaactc

SEQ ID NO: 83963 - DNA, 201 bp, Homo sapiens
tgcctcagatgatgacctccggagagttgcaacttttaggtcccgaaatcgaattccagtgctgtcatggattcatccagaaaataagacggtcattgtgygttgcagtcagcctcttgtcggtatgagtgggaaacgaaataaagatgatgagaaatatctcgatgttatcagggagactaataaacaaatttctaaact

SEQ ID NO: 83964 - DNA, 201 bp, Homo sapiens
gctctgtgacacttaccctgctcttttggtggttccgtatcgtgcctcagatgatgacctccggagagttgcaacttttaggtcccgaaatcgaattccartgctgtcatggattcatccagaaaataagacggtcattgtgcgttgcagtcagcctcttgtcggtatgagtgggaaacgaaataaagatgatgagaaata

SEQ ID NO: 83965 - DNA, 201 bp, Homo sapiens
tgtgacacttaccctgctcttttggtggttccgtatcgtgcctcagatgatgacctccggagagttgcaacttttaggtcccgaaatcgaattccagtgcygtcatggattcatccagaaaataagacggtcattgtgcgttgcagtcagcctcttgtcggtatgagtgggaaacgaaataaagatgatgagaaatatctc

SEQ ID NO: 83966 - DNA, 201 bp, Homo sapiens
attttaaaatcaaaggggatatatgtttgtggaatggattttcctgaagctgcttaacagttgctttggattctctaagatgaatccaaatgtgaaagatkcatgttactgccaaaaccaaattgagctcagcttcctaggcattacccaaaagcaaggtgtttaagtaattgccagcttttataccatcatgagtggtga

SEQ ID NO: 83967 - DNA, 201 bp, Homo sapiens
tgacacttaccctgctcttttggtggttccgtatcgtgcctcagatgatgacctccggagagttgcaacttttaggtcccgaaatcgaattccagtgctgycatggattcatccagaaaataagacggtcattgtgcgttgcagtcagcctcttgtcggtatgagtgggaaacgaaataaagatgatgagaaatatctcga

SEQ ID NO: 83968 - DNA, 201 bp, Homo sapiens
cttaccctgctcttttggtggttccgtatcgtgcctcagatgatgacctccggagagttgcaacttttaggtcccgaaatcgaattccagtgctgtcatgkattcatccagaaaataagacggtcattgtgcgttgcagtcagcctcttgtcggtatgagtgggaaacgaaataaagatgatgagaaatatctcgatgtta

SEQ ID NO: 83969 - DNA, 201 bp, Homo sapiens
tactgccaaaaccaaattgagctcagcttcctaggcattacccaaaagcaaggtgtttaagtaattgccagcttttataccatcatgagtggtgacttaakgagaaatagctgtatagatgagtttttcattatttggaaatttaggggtagaaaatgttttcccctaattttccagagaagcctatttttatatttttaa

SEQ ID NO: 83970 - DNA, 201 bp, Homo sapiens
acttaccctgctcttttggtggttccgtatcgtgcctcagatgatgacctccggagagttgcaacttttaggtcccgaaatcgaattccagtgctgtcatrgattcatccagaaaataagacggtcattgtgcgttgcagtcagcctcttgtcggtatgagtgggaaacgaaataaagatgatgagaaatatctcgatgtt

SEQ ID NO: 83971 - DNA, 201 bp, Homo sapiens
cctgctcttttggtggttccgtatcgtgcctcagatgatgacctccggagagttgcaacttttaggtcccgaaatcgaattccagtgctgtcatggattcrtccagaaaataagacggtcattgtgcgttgcagtcagcctcttgtcggtatgagtgggaaacgaaataaagatgatgagaaatatctcgatgttatcagg

SEQ ID NO: 83972 - DNA, 201 bp, Homo sapiens
attcatccagaaaataagacggtcattgtgcgttgcagtcagcctcttgtcggtatgagtgggaaacgaaataaagatgatgagaaatatctcgatgttakcagggagactaataaacaaatttctaaactcaccatttatgatgcaagacccagcgtaaatgcagtggccaacaaggcaacaggaggaggatatgaaagt

SEQ ID NO: 83973 - DNA, 201 bp, Homo sapiens
ccagtggaagaatacaggaggcagggcttgcccaatcaccattggagaataacttttattaataagtgctatgagctctgtgacacttaccctgctctttyggtggttccgtatcgtgcctcagatgatgacctccggagagttgcaacttttaggtcccgaaatcgaattccagtgctgtcatggattcatccagaaaat

SEQ ID NO: 83974 - DNA, 158 bp, Homo sapiens
cggcagccgagcagcctggcaacggcggtggcgcccggagcccgagagtttccaggakggcttctgcatcaacttctaaatataattcacactccttggagaatgagtctattaagaggacgtctcgagatggagtcaatcgagatctcactgaggct

SEQ ID NO: 83975 - DNA, 201 bp, Homo sapiens; identical to SEQ ID NO: 83915

SEQ ID NO: 83976 - DNA, 201 bp, Homo sapiens
agccgagcagcctggcaacggcggtggcgcccggagcccgagagtttccaggatggcttctgcatcaacttctaaatataattcacactccttggagaatkagtctattaagaggacgtctcgagatggagtcaatcgagatctcactgaggctgttcctcgacttccaggagaaacactaatcactgacaaagaagttat

SEQ ID NO: 83977 - DNA, 201 bp, Homo sapiens
cggtggcgcccggagcccgagagtttccaggatggcttctgcatcaacttctaaatataattcacactccttggagaatgagtctattaagaggacgtctygagatggagtcaatcgagatctcactgaggctgttcctcgacttccaggagaaacactaatcactgacaaagaagttatttacatatgtcctttcaatgg

SEQ ID NO: 83978 - DNA, 201 bp, Homo sapiens; identical to SEQ ID NO: 83918

SEQ ID NO: 83979 - DNA, 201 bp, Homo sapiens; identical to SEQ ID NO: 83919

SEQ ID NO: 83980 - DNA, 201 bp, Homo sapiens; identical to SEQ ID NO: 83920

SEQ ID NO: 83981 - DNA, 201 bp, Homo sapiens; identical to SEQ ID NO: 83921

SEQ ID NO: 83982 - DNA, 201 bp, Homo sapiens; identical to SEQ ID NO: 83922

SEQ ID NO: 83983 - DNA, 201 bp, Homo sapiens; identical to SEQ ID NO: 83923

SEQ ID NO: 83984 - DNA, 201 bp, Homo sapiens; identical to SEQ ID NO: 83924

SEQ ID NO: 83985 - DNA, 201 bp, Homo sapiens; identical to SEQ ID NO: 83925

SEQ ID NO: 83986 - DNA, 201 bp, Homo sapiens; identical to SEQ ID NO: 83926

SEQ ID NO: 83987 - DNA, 201 bp, Homo sapiens; identical to SEQ ID NO: 83927

SEQ ID NO: 83988 - DNA, 201 bp, Homo sapiens; identical to SEQ ID NO: 83928

SEQ ID NO: 83989 - DNA, 201 bp, Homo sapiens; identical to SEQ ID NO: 83929

SEQ ID NO: 83990 - DNA, 201 bp, Homo sapiens; identical to SEQ ID NO: 83930

SEQ ID NO: 83991 - DNA, 201 bp, Homo sapiens; identical to SEQ ID NO: 83931

SEQ ID NO: 83992 - DNA, 201 bp, Homo sapiens; identical to SEQ ID NO: 83932

SEQ ID NO: 83993 - DNA, 201 bp, Homo sapiens; identical to SEQ ID NO: 83933

SEQ ID NO: 83994 - DNA, 201 bp, Homo sapiens; identical to SEQ ID NO: 83934

SEQ ID NO: 83995 - DNA, 201 bp, Homo sapiens; identical to SEQ ID NO: 83935

SEQ ID NO: 83996 - DNA, 201 bp, Homo sapiens; identical to SEQ ID NO: 83936

SEQ ID NO: 83997 - DNA, 201 bp, Homo sapiens; identical to SEQ ID NO: 83937

SEQ ID NO: 83998 - DNA, 201 bp, Homo sapiens; identical to SEQ ID NO: 83938

SEQ ID NO: 83999 - DNA, 201 bp, Homo sapiens; identical to SEQ ID NO: 83939

SEQ ID NO: 84000 - DNA, 201 bp, Homo sapiens; identical to SEQ ID NO: 83940

SEQ ID NO: 84001 - DNA, 201 bp, Homo sapiens; identical to SEQ ID NO: 83941

SEQ ID NO: 84002 - DNA, 201 bp, Homo sapiens; identical to SEQ ID NO: 83942

SEQ ID NO: 84003 - DNA, 201 bp, Homo sapiens; identical to SEQ ID NO: 83943

SEQ ID NO: 84004 - DNA, 201 bp, Homo sapiens; identical to SEQ ID NO: 83944

SEQ ID NO: 84005 - DNA, 201 bp, Homo sapiens; identical to SEQ ID NO: 83945

SEQ ID NO: 84006 - DNA, 201 bp, Homo sapiens; identical to SEQ ID NO: 83946

SEQ ID NO: 84007 - DNA, 201 bp, Homo sapiens; identical to SEQ ID NO: 83947

SEQ ID NO: 84008 - DNA, 201 bp, Homo sapiens; identical to SEQ ID NO: 83948

SEQ ID NO: 84009 - DNA, 201 bp, Homo sapiens; identical to SEQ ID NO: 83949

SEQ ID NO: 84010 - DNA, 201 bp, Homo sapiens; identical to SEQ ID NO: 83950

SEQ ID NO: 84011 - DNA, 201 bp, Homo sapiens; identical to SEQ ID NO: 83951

SEQ ID NO: 84012 - DNA, 201 bp, Homo sapiens; identical to SEQ ID NO: 83952

SEQ ID NO: 84013 - DNA, 201 bp, Homo sapiens; identical to SEQ ID NO: 83953

SEQ ID NO: 84014 - DNA, 201 bp, Homo sapiens; identical to SEQ ID NO: 83954

SEQ ID NO: 84015 - DNA, 201 bp, Homo sapiens; identical to SEQ ID NO: 83955

SEQ ID NO: 84016 - DNA, 201 bp, Homo sapiens; identical to SEQ ID NO: 83956

SEQ ID NO: 84017 - DNA, 201 bp, Homo sapiens; identical to SEQ ID NO: 83957

SEQ ID NO: 84018 - DNA, 201 bp, Homo sapiens; identical to SEQ ID NO: 83958

SEQ ID NO: 84019 - DNA, 201 bp, Homo sapiens; identical to SEQ ID NO: 83959

SEQ ID NO: 84020 - DNA, 201 bp, Homo sapiens; identical to SEQ ID NO: 83960

SEQ ID NO: 84021 - DNA, 201 bp, Homo sapiens; identical to SEQ ID NO: 83961

SEQ ID NO: 84022 - DNA, 201 bp, Homo sapiens; identical to SEQ ID NO: 83962

SEQ ID NO: 84023 - DNA, 201 bp, Homo sapiens; identical to SEQ ID NO: 83963

SEQ ID NO: 84024 - DNA, 201 bp, Homo sapiens; identical to SEQ ID NO: 83964

SEQ ID NO: 84025 - DNA, 201 bp, Homo sapiens; identical to SEQ ID NO: 83965

SEQ ID NO: 84026 - DNA, 201 bp, Homo sapiens; identical to SEQ ID NO: 83966

SEQ ID NO: 84027 - DNA, 201 bp, Homo sapiens; identical to SEQ ID NO: 83967

SEQ ID NO: 84028 - DNA, 201 bp, Homo sapiens; identical to SEQ ID NO: 83968

SEQ ID NO: 84029 - DNA, 201 bp, Homo sapiens; identical to SEQ ID NO: 83969

SEQ ID NO: 84030 - DNA, 201 bp, Homo sapiens; identical to SEQ ID NO: 83970

SEQ ID NO: 84031 - DNA, 201 bp, Homo sapiens; identical to SEQ ID NO: 83971

SEQ ID NO: 84032 - DNA, 201 bp, Homo sapiens; identical to SEQ ID NO: 83972

SEQ ID NO: 84033 - DNA, 201 bp, Homo sapiens; identical to SEQ ID NO: 83973

SEQ ID NO: 84034 - DNA, 137 bp, Homo sapiens; identical to SEQ ID NO: 83914

SEQ ID NO: 84035 - DNA, 201 bp, Homo sapiens; identical to SEQ ID NO: 83915

SEQ ID NO: 84036 - DNA, 184 bp, Homo sapiens; identical to SEQ ID NO: 83916

SEQ ID NO: 84037 - DNA, 201 bp, Homo sapiens; identical to SEQ ID NO: 83917

SEQ ID NO: 84038 - DNA, 201 bp, Homo sapiens; identical to SEQ ID NO: 83919

SEQ ID NO: 84039 - DNA, 201 bp, Homo sapiens; identical to SEQ ID NO: 83918

SEQ ID NO: 84040 - DNA, 201 bp, Homo sapiens; identical to SEQ ID NO: 83920

SEQ ID NO: 84041 - DNA, 201 bp, Homo sapiens; identical to SEQ ID NO: 83921

SEQ ID NO: 84042 - DNA, 201 bp, Homo sapiens; identical to SEQ ID NO: 83922

SEQ ID NO: 84043 - DNA, 201 bp, Homo sapiens
ggttagaacatatcaaggcaagtatattttgagccattcaagtagcagacaaagtttcttcagggaagagttcagtgcttgtgcattgcagtgacggatgrgacaggactgctcagctgacatccttggccatgctgatgttggatagcttctataggagcattgaagggttcgaaatactggtacaaaaagaatggataa

SEQ ID NO: 84044 - DNA, 201 bp, Homo sapiens
cattggttagaacatatcaaggcaagtatattttgagccattcaagtagcagacaaagtttcttcagggaagagttcagtgcttgtgcattgcagtgacgratgggacaggactgctcagctgacatccttggccatgctgatgttggatagcttctataggagcattgaagggttcgaaatactggtacaaaaagaatgg

SEQ ID NO: 84045 - DNA, 201 bp, Homo sapiens; identical to SEQ ID NO: 83925

SEQ ID NO: 84046 - DNA, 201 bp, Homo sapiens; identical to SEQ ID NO: 83926

SEQ ID NO: 84047 - DNA, 201 bp, Homo sapiens
tctactcattggttagaacatatcaaggcaagtatattttgagccattcaagtagcagacaaagtttcttcagggaagagttcagtgcttgtgcattgcartgacggatgggacaggactgctcagctgacatccttggccatgctgatgttggatagcttctataggagcattgaagggttcgaaatactggtacaaaaa

SEQ ID NO: 84048 - DNA, 201 bp, Homo sapiens
gaagaatctcattggttgtccagtttggagtctactcattggttagaacatatcaaggcaagtatattttgagccattcaagtagcagacaaagtttcttsagggaagagttcagtgcttgtgcattgcagtgacggatgggacaggactgctcagctgacatccttggccatgctgatgttggatagcttctataggagc

SEQ ID NO: 84049 - DNA, 201 bp, Homo sapiens; identical to SEQ ID NO: 83929

SEQ ID NO: 84050 - DNA, 201 bp, Homo sapiens; identical to SEQ ID NO: 83930

SEQ ID NO: 84051 - DNA, 201 bp, Homo sapiens; identical to SEQ ID NO: 83931

SEQ ID NO: 84052 - DNA, 201 bp, Homo sapiens; identical to SEQ ID NO: 83932

SEQ ID NO: 84053 - DNA, 201 bp, Homo sapiens; identical to SEQ ID NO: 83933

SEQ ID NO: 84054 - DNA, 201 bp, Homo sapiens; identical to SEQ ID NO: 83936

SEQ ID NO: 84055 - DNA, 201 bp, Homo sapiens; identical to SEQ ID NO: 83935

SEQ ID NO: 84056 - DNA, 201 bp, Homo sapiens; identical to SEQ ID NO: 83938

SEQ ID NO: 84057 - DNA, 201 bp, Homo sapiens
tcattggttagaacatatcaaggcaagtatattttgagccattcaagtagcagacaaagtttcttcagggaagagttcagtgcttgtgcattgcagtgacrgatgggacaggactgctcagctgacatccttggccatgctgatgttggatagcttctataggagcattgaagggttcgaaatactggtacaaaaagaatg

SEQ ID NO: 84058 - DNA, 201 bp, Homo sapiens; identical to SEQ ID NO: 83937

SEQ ID NO: 84059 - DNA, 201 bp, Homo sapiens; identical to SEQ ID NO: 83940

SEQ ID NO: 84060 - DNA, 201 bp, Homo sapiens; identical to SEQ ID NO: 83939

SEQ ID NO: 84061 - DNA, 201 bp, Homo sapiens; identical to SEQ ID NO: 83941

SEQ ID NO: 84062 - DNA, 201 bp, Homo sapiens; identical to SEQ ID NO: 83942

SEQ ID NO: 84063 - DNA, 201 bp, Homo sapiens; identical to SEQ ID NO: 83943

SEQ ID NO: 84064 - DNA, 201 bp, Homo sapiens; identical to SEQ ID NO: 83944

SEQ ID NO: 84065 - DNA, 201 bp, Homo sapiens; identical to SEQ ID NO: 83945

SEQ ID NO: 84066 - DNA, 201 bp, Homo sapiens; identical to SEQ ID NO: 83946

SEQ ID NO: 84067 - DNA, 201 bp, Homo sapiens; identical to SEQ ID NO: 83947

SEQ ID NO: 84068 - DNA, 201 bp, Homo sapiens; identical to SEQ ID NO: 83948

SEQ ID NO: 84069 - DNA, 201 bp, Homo sapiens; identical to SEQ ID NO: 83949

SEQ ID NO: 84070 - DNA, 201 bp, Homo sapiens; identical to SEQ ID NO: 83950

SEQ ID NO: 84071 - DNA, 201 bp, Homo sapiens; identical to SEQ ID NO: 83951

SEQ ID NO: 84072 - DNA, 201 bp, Homo sapiens; identical to SEQ ID NO: 83952

SEQ ID NO: 84073 - DNA, 201 bp, Homo sapiens
tgagccattcaagtagcagacaaagtttcttcagggaagagttcagtgcttgtgcattgcagtgacggatgggacaggactgctcagctgacatccttggmcatgctgatgttggatagcttctataggagcattgaagggttcgaaatactggtacaaaaagaatggataagttttggacataaatttgcatctcgaata

SEQ ID NO: 84074 - DNA, 201 bp, Homo sapiens; identical to SEQ ID NO: 83954

SEQ ID NO: 84075 - DNA, 201 bp, Homo sapiens; identical to SEQ ID NO: 83955

SEQ ID NO: 84076 - DNA, 201 bp, Homo sapiens; identical to SEQ ID NO: 83957

SEQ ID NO: 84077 - DNA, 201 bp, Homo sapiens
tttggagtctactcattggttagaacatatcaaggcaagtatattttgagccattcaagtagcagacaaagtttcttcagggaagagttcagtgcttgtgsattgcagtgacggatgggacaggactgctcagctgacatccttggccatgctgatgttggatagcttctataggagcattgaagggttcgaaatactggt

SEQ ID NO: 84078 - DNA, 201 bp, Homo sapiens; identical to SEQ ID NO: 83960

SEQ ID NO: 84079 - DNA, 201 bp, Homo sapiens; identical to SEQ ID NO: 83958

SEQ ID NO: 84080 - DNA, 201 bp, Homo sapiens; identical to SEQ ID NO: 83959

SEQ ID NO: 84081 - DNA, 201 bp, Homo sapiens; identical to SEQ ID NO: 83962

SEQ ID NO: 84082 - DNA, 201 bp, Homo sapiens; identical to SEQ ID NO: 83961

SEQ ID NO: 84083 - DNA, 201 bp, Homo sapiens; identical to SEQ ID NO: 83963

SEQ ID NO: 84084 - DNA, 201 bp, Homo sapiens; identical to SEQ ID NO: 83964

SEQ ID NO: 84085 - DNA, 201 bp, Homo sapiens
attttaaaatcaaaggggatatatgtttgtggaatggattttcctgaagctgcttaacagttgctttggattctctaagatgaatccaaatgtgaaagatkcatgttactgcctaattgccagcttttataccatcatgagtggtgacttaaggagaaatagctgtatagatgagtttttcattatttggaaatttagggg

SEQ ID NO: 84086 - DNA, 201 bp, Homo sapiens; identical to SEQ ID NO: 83965

SEQ ID NO: 84087 - DNA, 201 bp, Homo sapiens; identical to SEQ ID NO: 83967

SEQ ID NO: 84088 - DNA, 201 bp, Homo sapiens
cttaacagttgctttggattctctaagatgaatccaaatgtgaaagatgcatgttactgcctaattgccagcttttataccatcatgagtggtgacttaakgagaaatagctgtatagatgagtttttcattatttggaaatttaggggtagaaaatgttttcccctaattttccagagaagcctatttttatatttttaa

SEQ ID NO: 84089 - DNA, 201 bp, Homo sapiens; identical to SEQ ID NO: 83968

SEQ ID NO: 84090 - DNA, 201 bp, Homo sapiens; identical to SEQ ID NO: 83970

SEQ ID NO: 84091 - DNA, 201 bp, Homo sapiens; identical to SEQ ID NO: 83971

SEQ ID NO: 84092 - DNA, 201 bp, Homo sapiens; identical to SEQ ID NO: 83972

SEQ ID NO: 84093 - DNA, 201 bp, Homo sapiens; identical to SEQ ID NO: 83973

SEQ ID NO: 84094 - DNA, 158 bp, Homo sapiens; identical to SEQ ID NO: 83974

SEQ ID NO: 84095 - DNA, 201 bp, Homo sapiens; identical to SEQ ID NO: 83915

SEQ ID NO: 84096 - DNA, 201 bp, Homo sapiens; identical to SEQ ID NO: 83976

SEQ ID NO: 84097 - DNA, 201 bp, Homo sapiens; identical to SEQ ID NO: 83977

SEQ ID NO: 84098 - DNA, 201 bp, Homo sapiens; identical to SEQ ID NO: 83918

SEQ ID NO: 84099 - DNA, 201 bp, Homo sapiens; identical to SEQ ID NO: 83919

SEQ ID NO: 84100 - DNA, 201 bp, Homo sapiens; identical to SEQ ID NO: 83920

SEQ ID NO: 84101 - DNA, 201 bp, Homo sapiens; identical to SEQ ID NO: 83921

SEQ ID NO: 84102 - DNA, 201 bp, Homo sapiens; identical to SEQ ID NO: 83922

SEQ ID NO: 84103 - DNA, 201 bp, Homo sapiens
ctactcattggttagaacatatcaaggcaagagccattcaagtagcagacaaagtttcttcagggaagagttcagtgcttgtgcattgcagtgacggatgrgacaggactgctcagctgacatccttggccatgctgatgttggatagcttctataggagcattgaagggttcgaaatactggtacaaaaagaatggataa

SEQ ID NO: 84104 - DNA, 201 bp, Homo sapiens
gagtctactcattggttagaacatatcaaggcaagagccattcaagtagcagacaaagtttcttcagggaagagttcagtgcttgtgcattgcagtgacgratgggacaggactgctcagctgacatccttggccatgctgatgttggatagcttctataggagcattgaagggttcgaaatactggtacaaaaagaatgg

SEQ ID NO: 84105 - DNA, 201 bp, Homo sapiens; identical to SEQ ID NO: 83925

SEQ ID NO: 84106 - DNA, 201 bp, Homo sapiens; identical to SEQ ID NO: 83926

SEQ ID NO: 84107 - DNA, 201 bp, Homo sapiens
agtttggagtctactcattggttagaacatatcaaggcaagagccattcaagtagcagacaaagtttcttcagggaagagttcagtgcttgtgcattgcartgacggatgggacaggactgctcagctgacatccttggccatgctgatgttggatagcttctataggagcattgaagggttcgaaatactggtacaaaaa

SEQ ID NO: 84108 - DNA, 201 bp, Homo sapiens
cctaatgtagaagaatctcattggttgtccagtttggagtctactcattggttagaacatatcaaggcaagagccattcaagtagcagacaaagtttcttsagggaagagttcagtgcttgtgcattgcagtgacggatgggacaggactgctcagctgacatccttggccatgctgatgttggatagcttctataggagc

SEQ ID NO: 84109 - DNA, 201 bp, Homo sapiens; identical to SEQ ID NO: 83929

SEQ ID NO: 84110 - DNA, 201 bp, Homo sapiens; identical to SEQ ID NO: 83930

SEQ ID NO: 84111 - DNA, 201 bp, Homo sapiens; identical to SEQ ID NO: 83931

SEQ ID NO: 84112 - DNA, 201 bp, Homo sapiens; identical to SEQ ID NO: 83932

SEQ ID NO: 84113 - DNA, 201 bp, Homo sapiens; identical to SEQ ID NO: 83933

SEQ ID NO: 84114 - DNA, 201 bp, Homo sapiens
ggagtctactcattggttagaacatatcaaggcaagagccattcaagtagcagacaaagtttcttcagggaagagttcagtgcttgtgcattgcagtgacrgatgggacaggactgctcagctgacatccttggccatgctgatgttggatagcttctataggagcattgaagggttcgaaatactggtacaaaaagaatg

SEQ ID NO: 84115 - DNA, 201 bp, Homo sapiens; identical to SEQ ID NO: 83935

SEQ ID NO: 84116 - DNA, 201 bp, Homo sapiens; identical to SEQ ID NO: 83936

SEQ ID NO: 84117 - DNA, 201 bp, Homo sapiens; identical to SEQ ID NO: 83937

SEQ ID NO: 84118 - DNA, 201 bp, Homo sapiens; identical to SEQ ID NO: 83938

SEQ ID NO: 84119 - DNA, 201 bp, Homo sapiens; identical to SEQ ID NO: 83939

SEQ ID NO: 84120 - DNA, 201 bp, Homo sapiens; identical to SEQ ID NO: 83940

SEQ ID NO: 84121 - DNA, 201 bp, Homo sapiens; identical to SEQ ID NO: 83941

SEQ ID NO: 84122 - DNA, 201 bp, Homo sapiens; identical to SEQ ID NO: 83942

SEQ ID NO: 84123 - DNA, 201 bp, Homo sapiens; identical to SEQ ID NO: 83943

SEQ ID NO: 84124 - DNA, 201 bp, Homo sapiens; identical to SEQ ID NO: 83944

SEQ ID NO: 84125 - DNA, 201 bp, Homo sapiens; identical to SEQ ID NO: 83945

SEQ ID NO: 84126 - DNA, 201 bp, Homo sapiens; identical to SEQ ID NO: 83946

SEQ ID NO: 84127 - DNA, 201 bp, Homo sapiens; identical to SEQ ID NO: 83947

SEQ ID NO: 84128 - DNA, 201 bp, Homo sapiens; identical to SEQ ID NO: 83948

SEQ ID NO: 84129 - DNA, 201 bp, Homo sapiens; identical to SEQ ID NO: 83949

SEQ ID NO: 84130 - DNA, 201 bp, Homo sapiens; identical to SEQ ID NO: 83950

SEQ ID NO: 84131 - DNA, 201 bp, Homo sapiens; identical to SEQ ID NO: 83951

SEQ ID NO: 84132 - DNA, 201 bp, Homo sapiens; identical to SEQ ID NO: 83952

SEQ ID NO: 84133 - DNA, 201 bp, Homo sapiens
agagccattcaagtagcagacaaagtttcttcagggaagagttcagtgcttgtgcattgcagtgacggatgggacaggactgctcagctgacatccttggmcatgctgatgttggatagcttctataggagcattgaagggttcgaaatactggtacaaaaagaatggataagttttggacataaatttgcatctcgaata

SEQ ID NO: 84134 - DNA, 201 bp, Homo sapiens; identical to SEQ ID NO: 83954

SEQ ID NO: 84135 - DNA, 201 bp, Homo sapiens; identical to SEQ ID NO: 83955

SEQ ID NO: 84136 - DNA, 201 bp, Homo sapiens
gttgtccagtttggagtctactcattggttagaacatatcaaggcaagagccattcaagtagcagacaaagtttcttcagggaagagttcagtgcttgtgsattgcagtgacggatgggacaggactgctcagctgacatccttggccatgctgatgttggatagcttctataggagcattgaagggttcgaaatactggt

SEQ ID NO: 84137 - DNA, 201 bp, Homo sapiens; identical to SEQ ID NO: 83957

SEQ ID NO: 84138 - DNA, 201 bp, Homo sapiens; identical to SEQ ID NO: 83958

SEQ ID NO: 84139 - DNA, 201 bp, Homo sapiens; identical to SEQ ID NO: 83959

SEQ ID NO: 84140 - DNA, 201 bp, Homo sapiens; identical to SEQ ID NO: 83960

SEQ ID NO: 84141 - DNA, 201 bp, Homo sapiens; identical to SEQ ID NO: 83961

SEQ ID NO: 84142 - DNA, 201 bp, Homo sapiens; identical to SEQ ID NO: 83962

SEQ ID NO: 84143 - DNA, 201 bp, Homo sapiens; identical to SEQ ID NO: 83963

SEQ ID NO: 84144 - DNA, 201 bp, Homo sapiens; identical to SEQ ID NO: 83964

SEQ ID NO: 84145 - DNA, 201 bp, Homo sapiens; identical to SEQ ID NO: 83965

SEQ ID NO: 84146 - DNA, 201 bp, Homo sapiens; identical to SEQ ID NO: 83966

SEQ ID NO: 84147 - DNA, 201 bp, Homo sapiens; identical to SEQ ID NO: 83967

SEQ ID NO: 84148 - DNA, 201 bp, Homo sapiens; identical to SEQ ID NO: 83968

SEQ ID NO: 84149 - DNA, 201 bp, Homo sapiens; identical to SEQ ID NO: 83969

SEQ ID NO: 84150 - DNA, 201 bp, Homo sapiens; identical to SEQ ID NO: 83970

SEQ ID NO: 84151 - DNA, 201 bp, Homo sapiens; identical to SEQ ID NO: 83971

SEQ ID NO: 84152 - DNA, 201 bp, Homo sapiens; identical to SEQ ID NO: 83972

SEQ ID NO: 84153 - DNA, 201 bp, Homo sapiens; identical to SEQ ID NO: 83973

SEQ ID NO: 84154 - DNA, 201 bp, Homo sapiens
actgcagatacccctatgaatatgaaggcgggcacatcaagactgcggtgaacttgcccctggaacgcgacgccgagagcttcctactgaagagccccatygcgccctgtagcctggacaagagagtcatcctcattttccactgtgaattctcatctgagcgtgggccccgcatgtgccgtttcatcagggaacgagacc

SEQ ID NO: 84155 - DNA, 201 bp, Homo sapiens
cggcgggagctctgtagccggctgcaggaccagtgaggggcctgcgccagtcctgctacctcccttgcctttcgaggcctgaagccagctgccctatgggyctgccgggctgagggcctgctggaggcctcaggtgctgtccatgggaaagatggtgtgggtgtcctgcctgtctgccccagcccagattcccctgtgtca

SEQ ID NO: 84156 - DNA, 201 bp, Homo sapiens
tcttccgctctccgtccatgccctgcagcgtgatccggcccatcctcaagaggctggagcggccccaggacagggacacgcccgtgcagaataagcggagrcggagcgtgacccctcctgaggagcagcaggaggctgaggaacctaaagcccgcgtcctccgctcaaaatcactgtgtcacgatgagatcgagaacctcc

SEQ ID NO: 84157 - DNA, 190 bp, Homo sapiens
caaaaatatttacacttagggtttggagctattcaagaggaaatgtcacagaagcagctaaaccaaggactgagcaccctctggattctgaatctcaagaygggggcagggctgtgcttgaaggccctgctgagtcatctgttagggccttggttcaataaagcactgagcaagttgagaaaccagcatt

SEQ ID NO: 84158 - DNA, 201 bp, Homo sapiens
acagcaagtgccagcggctcttccgctctccgtccatgccctgcagcgtgatccggcccatcctcaagaggctggagcggccccaggacagggacacgccygtgcagaataagcggaggcggagcgtgacccctcctgaggagcagcaggaggctgaggaacctaaagcccgcgtcctccgctcaaaatcactgtgtcacg

SEQ ID NO: 84159 - DNA, 201 bp, Homo sapiens
gatggccgtggatggccgtggatgcgcagtgccttgcatacccaaaccaggtgggagcgttttgttgagcatgacagcctgcagcaggaatatatgtgtgyctatttgtgtggacaaaaatatttacacttagggtttggagctattcaagaggaaatgtcacagaagcagctaaaccaaggactgagcaccctctggatt

SEQ ID NO: 84160 - DNA, 201 bp, Homo sapiens
atgacagcctgcagcaggaatatatgtgtgcctatttgtgtggacaaaaatatttacacttagggtttggagctattcaagaggaaatgtcacagaagcasctaaaccaaggactgagcaccctctggattctgaatctcaagatgggggcagggctgtgcttgaaggccctgctgagtcatctgttagggccttggttca

SEQ ID NO: 84161 - DNA, 201 bp, Homo sapiens
tctaacccgctaccccattggtggcgtccggcggcgcggctgctgttatttttcgaatatataaggaggtggaagtggcagctgcaactagaggcttcccwggctggtgcctgagcccggcgtccctcgccccccgccctccccgcatccctctcctccctcgcgcctggccctgtggctcttcctccctccctccttccc

SEQ ID NO: 84162 - DNA, 201 bp, Homo sapiens
cagcaacatcgtggataagtttgtgattgtagactgcagatacccctatgaatatgaaggcgggcacatcaagactgcggtgaacttgcccctggaacgckacgccgagagcttcctactgaagagccccatcgcgccctgtagcctggacaagagagtcatcctcattttccactgtgaattctcatctgagcgtgggcc

SEQ ID NO: 84163 - DNA, 201 bp, Homo sapiens
tctgtgaaccccaggactaccggcccatgaaccacgaggccttcaaggatgagctaaagaccttccgcctcaagactcgcagctgggctggggagcggagscggcgggagctctgtagccggctgcaggaccagtgaggggcctgcgccagtcctgctacctcccttgcctttcgaggcctgaagccagctgccctatggg

SEQ ID NO: 84164 - DNA, 201 bp, Homo sapiens
ttctgtgaaccccaggactaccggcccatgaaccacgaggccttcaaggatgagctaaagaccttccgcctcaagactcgcagctgggctggggagcggasccggcgggagctctgtagccggctgcaggaccagtgaggggcctgcgccagtcctgctacctcccttgcctttcgaggcctgaagccagctgccctatgg

SEQ ID NO: 84165 - DNA, 201 bp, Homo sapiens
ccgagagctgattggagattactctaaggccttcctcctacagacagtagacggaaagcaccaagacctcaagtacatctcaccagaaacgatggtggccytattgacgggcaagttcagcaacatcgtggataagtttgtgattgtagactgcagatacccctatgaatatgaaggcgggcacatcaagactgcggtgaa

SEQ ID NO: 84166 - DNA, 201 bp, Homo sapiens; identical to SEQ ID NO: 84154

SEQ ID NO: 84167 - DNA, 201 bp, Homo sapiens; identical to SEQ ID NO: 84155

SEQ ID NO: 84168 - DNA, 201 bp, Homo sapiens; identical to SEQ ID NO: 84156

SEQ ID NO: 84169 - DNA, 164 bp, Homo sapiens
gttttgttgagcatgacagcctgcagcaggaatatatgtgtgcctatttgtaagcagctaaaccaaggactgagcaccctctggattctgaatctcaagaygggggcagggctgtgcttgaaggccctgctgagtcatctgttagggccttggttcaataaagc

SEQ ID NO: 84170 - DNA, 201 bp, Homo sapiens; identical to SEQ ID NO: 84158

SEQ ID NO: 84171 - DNA, 201 bp, Homo sapiens
gatggccgtggatggccgtggatgcgcagtgccttgcatacccaaaccaggtgggagcgttttgttgagcatgacagcctgcagcaggaatatatgtgtgyctatttgtaagcagctaaaccaaggactgagcaccctctggattctgaatctcaagatgggggcagggctgtgcttgaaggccctgctgagtcatctgtt

SEQ ID NO: 84172 - DNA, 201 bp, Homo sapiens
gccgtggatgcgcagtgccttgcatacccaaaccaggtgggagcgttttgttgagcatgacagcctgcagcaggaatatatgtgtgcctatttgtaagcasctaaaccaaggactgagcaccctctggattctgaatctcaagatgggggcagggctgtgcttgaaggccctgctgagtcatctgttagggccttggttca

SEQ ID NO: 84173 - DNA, 201 bp, Homo sapiens; identical to SEQ ID NO: 84161

SEQ ID NO: 84174 - DNA, 201 bp, Homo sapiens; identical to SEQ ID NO: 84162

SEQ ID NO: 84175 - DNA, 201 bp, Homo sapiens; identical to SEQ ID NO: 84163

SEQ ID NO: 84176 - DNA, 201 bp, Homo sapiens; identical to SEQ ID NO: 84164

SEQ ID NO: 84177 - DNA, 201 bp, Homo sapiens; identical to SEQ ID NO: 84165

SEQ ID NO: 84178 - DNA, 201 bp, Homo sapiens; identical to SEQ ID NO: 84154

SEQ ID NO: 84179 - DNA, 201 bp, Homo sapiens; identical to SEQ ID NO: 84155

SEQ ID NO: 84180 - DNA, 201 bp, Homo sapiens; identical to SEQ ID NO: 84156

SEQ ID NO: 84181 - DNA, 190 bp, Homo sapiens; identical to SEQ ID NO: 84157

SEQ ID NO: 84182 - DNA, 201 bp, Homo sapiens; identical to SEQ ID NO: 84158

SEQ ID NO: 84183 - DNA, 201 bp, Homo sapiens; identical to SEQ ID NO: 84159

SEQ ID NO: 84184 - DNA, 201 bp, Homo sapiens; identical to SEQ ID NO: 84160

SEQ ID NO: 84185 - DNA, 201 bp, Homo sapiens; identical to SEQ ID NO: 84161

SEQ ID NO: 84186 - DNA, 201 bp, Homo sapiens; identical to SEQ ID NO: 84162

SEQ ID NO: 84187 - DNA, 201 bp, Homo sapiens; identical to SEQ ID NO: 84163

SEQ ID NO: 84188 - DNA, 201 bp, Homo sapiens; identical to SEQ ID NO: 84164

SEQ ID NO: 84189 - DNA, 201 bp, Homo sapiens; identical to SEQ ID NO: 84165

SEQ ID NO: 84190 - DNA, 201 bp, Homo sapiens; identical to SEQ ID NO: 84154

SEQ ID NO: 84191 - DNA, 201 bp, Homo sapiens; identical to SEQ ID NO: 84155

SEQ ID NO: 84192 - DNA, 201 bp, Homo sapiens; identical to SEQ ID NO: 84156

SEQ ID NO: 84193 - DNA, 164 bp, Homo sapiens; identical to SEQ ID NO: 84169

SEQ ID NO: 84194 - DNA, 201 bp, Homo sapiens; identical to SEQ ID NO: 84158

SEQ ID NO: 84195 - DNA, 201 bp, Homo sapiens; identical to SEQ ID NO: 84171

SEQ ID NO: 84196 - DNA, 201 bp, Homo sapiens; identical to SEQ ID NO: 84172

SEQ ID NO: 84197 - DNA, 201 bp, Homo sapiens; identical to SEQ ID NO: 84161

SEQ ID NO: 84198 - DNA, 201 bp, Homo sapiens; identical to SEQ ID NO: 84162

SEQ ID NO: 84199 - DNA, 201 bp, Homo sapiens; identical to SEQ ID NO: 84163

SEQ ID NO: 84200 - DNA, 201 bp, Homo sapiens; identical to SEQ ID NO: 84164

SEQ ID NO: 84201 - DNA, 201 bp, Homo sapiens; identical to SEQ ID NO: 84165

SEQ ID NO: 84202 - DNA, 201 bp, Homo sapiens; identical to SEQ ID NO: 84155

SEQ ID NO: 84203 - DNA, 201 bp, Homo sapiens
tgcagatacccctatgaatatgaaggcgggcacatcaagagactgcggtgaacttgcccctggaacgcgacgccgagagcttcctactgaagagccccatygcgccctgtagcctggacaagagagtcatcctcattttccactgtgaattctcatctgagcgtgggccccgcatgtgccgtttcatcagggaacgagacc

SEQ ID NO: 84204 - DNA, 201 bp, Homo sapiens; identical to SEQ ID NO: 84156

SEQ ID NO: 84205 - DNA, 201 bp, Homo sapiens; identical to SEQ ID NO: 84158

SEQ ID NO: 84206 - DNA, 164 bp, Homo sapiens; identical to SEQ ID NO: 84169

SEQ ID NO: 84207 - DNA, 201 bp, Homo sapiens; identical to SEQ ID NO: 84172

SEQ ID NO: 84208 - DNA, 201 bp, Homo sapiens; identical to SEQ ID NO: 84171

SEQ ID NO: 84209 - DNA, 201 bp, Homo sapiens; identical to SEQ ID NO: 84163

SEQ ID NO: 84210 - DNA, 201 bp, Homo sapiens; identical to SEQ ID NO: 84161

SEQ ID NO: 84211 - DNA, 201 bp, Homo sapiens
gcaacatcgtggataagtttgtgattgtagactgcagatacccctatgaatatgaaggcgggcacatcaagagactgcggtgaacttgcccctggaacgckacgccgagagcttcctactgaagagccccatcgcgccctgtagcctggacaagagagtcatcctcattttccactgtgaattctcatctgagcgtgggcc

SEQ ID NO: 84212 - DNA, 201 bp, Homo sapiens; identical to SEQ ID NO: 84164

SEQ ID NO: 84213 - DNA, 201 bp, Homo sapiens
ccgagagctgattggagattactctaaggccttcctcctacagacagtagacggaaagcaccaagacctcaagtacatctcaccagaaacgatggtggccytattgacgggcaagttcagcaacatcgtggataagtttgtgattgtagactgcagatacccctatgaatatgaaggcgggcacatcaagagactgcggtg

SEQ ID NO: 84214 - DNA, 201 bp, Homo sapiens; identical to SEQ ID NO: 84154

SEQ ID NO: 84215 - DNA, 201 bp, Homo sapiens; identical to SEQ ID NO: 84155

SEQ ID NO: 84216 - DNA, 201 bp, Homo sapiens; identical to SEQ ID NO: 84156

SEQ ID NO: 84217 - DNA, 164 bp, Homo sapiens; identical to SEQ ID NO: 84169

SEQ ID NO: 84218 - DNA, 201 bp, Homo sapiens; identical to SEQ ID NO: 84158

SEQ ID NO: 84219 - DNA, 201 bp, Homo sapiens; identical to SEQ ID NO: 84171

SEQ ID NO: 84220 - DNA, 201 bp, Homo sapiens; identical to SEQ ID NO: 84172

SEQ ID NO: 84221 - DNA, 201 bp, Homo sapiens; identical to SEQ ID NO: 84161

SEQ ID NO: 84222 - DNA, 201 bp, Homo sapiens; identical to SEQ ID NO: 84162

SEQ ID NO: 84223 - DNA, 201 bp, Homo sapiens; identical to SEQ ID NO: 84163

SEQ ID NO: 84224 - DNA, 201 bp, Homo sapiens; identical to SEQ ID NO: 84164

SEQ ID NO: 84225 - DNA, 201 bp, Homo sapiens; identical to SEQ ID NO: 84165

SEQ ID NO: 84226 - DNA, 201 bp, Homo sapiens
ccttgggggctcccagggcaagggttaaggcctgaatcatgagcctgctggaagcccagcccctactgctgtgaaccctggggcctgactgctcagaactygctgctgtcttgttgcggatggatggaaggttggatggatgggtggatggccgtggatggccgtggatgcgcagtgccttgcatacccaaaccaggtggg

SEQ ID NO: 84227 - DNA, 201 bp, Homo sapiens
cccctgtcaaatatcagttacccactcgaaagggatgttattatccttgggggctcccagggcaagggttaaggcctgaatcatgagcctgctggaagccsagcccctactgctgtgaaccctggggcctgactgctcagaacttgctgctgtcttgttgcggatggatggaaggttggatggatgggtggatggccgtgg

SEQ ID NO: 84228 - DNA, 201 bp, Homo sapiens
agactgtttaggttcccctgtcaaatatcagttacccactcgaaagggatgttattatccttgggggctcccagggcaagggttaaggcctgaatcatgaycctgctggaagcccagcccctactgctgtgaaccctggggcctgactgctcagaacttgctgctgtcttgttgcggatggatggaaggttggatggatgg

SEQ ID NO: 84229 - DNA, 201 bp, Homo sapiens
agggaacgagaccgtgctgtcaacgactaccccagcctctactaccctgagatgtatatcctgaaaggcggctacaaggagttcttccctcagcacccgaycttctgtgaaccccaggactaccggcccatgaaccacgaggccttcaaggatgagctaaagaccttccgcctcaagactcgcagctgggctggggagcgg

SEQ ID NO: 84230 - DNA, 201 bp, Homo sapiens
tgaagagccccatcgcgccctgtagcctggacaagagagtcatcctcattttccactgtgaattctcatctgagcgtgggccccgcatgtgccgtttcatsagggaacgagaccgtgctgtcaacgactaccccagcctctactaccctgagatgtatatcctgaaaggcggctacaaggagttcttccctcagcacccga

SEQ ID NO: 84231 - DNA, 201 bp, Homo sapiens
gaaggccaaagcaggtgtggcctctgattttgggaatgaaacttcattctttgaggctcctggtcttaccaatttaactttctcccctctccctcatcccktccgttcccttcaggccttcctcctacagacagtagacggaaagcaccaagacctcaagtacatctcaccagaaacgatggtggccctattgacgggcaa

SEQ ID NO: 84232 - DNA, 201 bp, Homo sapiens; identical to SEQ ID NO: 84154

SEQ ID NO: 84233 - DNA, 201 bp, Homo sapiens; identical to SEQ ID NO: 84155

SEQ ID NO: 84234 - DNA, 201 bp, Homo sapiens; identical to SEQ ID NO: 84156

SEQ ID NO: 84235 - DNA, 190 bp, Homo sapiens; identical to SEQ ID NO: 84157

SEQ ID NO: 84236 - DNA, 201 bp, Homo sapiens; identical to SEQ ID NO: 84158

SEQ ID NO: 84237 - DNA, 201 bp, Homo sapiens; identical to SEQ ID NO: 84159

SEQ ID NO: 84238 - DNA, 201 bp, Homo sapiens; identical to SEQ ID NO: 84160

SEQ ID NO: 84239 - DNA, 201 bp, Homo sapiens; identical to SEQ ID NO: 84161

SEQ ID NO: 84240 - DNA, 201 bp, Homo sapiens; identical to SEQ ID NO: 84162

SEQ ID NO: 84241 - DNA, 201 bp, Homo sapiens; identical to SEQ ID NO: 84163

SEQ ID NO: 84242 - DNA, 201 bp, Homo sapiens; identical to SEQ ID NO: 84164

SEQ ID NO: 84243 - DNA, 201 bp, Homo sapiens; identical to SEQ ID NO: 84165

SEQ ID NO: 84244 - DNA, 201 bp, Homo sapiens; identical to SEQ ID NO: 84154

SEQ ID NO: 84245 - DNA, 201 bp, Homo sapiens; identical to SEQ ID NO: 84155

SEQ ID NO: 84246 - DNA, 201 bp, Homo sapiens; identical to SEQ ID NO: 84156

SEQ ID NO: 84247 - DNA, 164 bp, Homo sapiens; identical to SEQ ID NO: 84169

SEQ ID NO: 84248 - DNA, 201 bp, Homo sapiens; identical to SEQ ID NO: 84158

SEQ ID NO: 84249 - DNA, 201 bp, Homo sapiens; identical to SEQ ID NO: 84171

SEQ ID NO: 84250 - DNA, 201 bp, Homo sapiens; identical to SEQ ID NO: 84172

SEQ ID NO: 84251 - DNA, 201 bp, Homo sapiens; identical to SEQ ID NO: 84161

SEQ ID NO: 84252 - DNA, 201 bp, Homo sapiens; identical to SEQ ID NO: 84162

SEQ ID NO: 84253 - DNA, 201 bp, Homo sapiens; identical to SEQ ID NO: 84163

SEQ ID NO: 84254 - DNA, 201 bp, Homo sapiens; identical to SEQ ID NO: 84164

SEQ ID NO: 84255 - DNA, 201 bp, Homo sapiens; identical to SEQ ID NO: 84165

SEQ ID NO: 84256 - DNA, 201 bp, Homo sapiens; identical to SEQ ID NO: 84154

SEQ ID NO: 84257 - DNA, 201 bp, Homo sapiens; identical to SEQ ID NO: 84155

SEQ ID NO: 84258 - DNA, 201 bp, Homo sapiens; identical to SEQ ID NO: 84156

SEQ ID NO: 84259 - DNA, 190 bp, Homo sapiens; identical to SEQ ID NO: 84157

SEQ ID NO: 84260 - DNA, 201 bp, Homo sapiens; identical to SEQ ID NO: 84158

SEQ ID NO: 84261 - DNA, 201 bp, Homo sapiens; identical to SEQ ID NO: 84159

SEQ ID NO: 84262 - DNA, 201 bp, Homo sapiens; identical to SEQ ID NO: 84160

SEQ ID NO: 84263 - DNA, 201 bp, Homo sapiens; identical to SEQ ID NO: 84161

SEQ ID NO: 84264 - DNA, 201 bp, Homo sapiens; identical to SEQ ID NO: 84162

SEQ ID NO: 84265 - DNA, 201 bp, Homo sapiens; identical to SEQ ID NO: 84163

SEQ ID NO: 84266 - DNA, 201 bp, Homo sapiens; identical to SEQ ID NO: 84164

SEQ ID NO: 84267 - DNA, 201 bp, Homo sapiens; identical to SEQ ID NO: 84165

SEQ ID NO: 84268 - DNA, 201 bp, Homo sapiens
aaacgatggtggccctattgacgggcaagttcagcaacatcgtggataagtttgtgattgtagactgcagatacccctatgaatatgaaggcgggcacatyaagactgcggtgaacttgcccctggaacgcgacgccgagagcttcctactgaagagccccatcgcgccctgtagcctggacaagagagtcatcctcattt

SEQ ID NO: 84269 - DNA, 201 bp, Homo sapiens
gccttcaaggatgagctaaagaccttccgcctcaagactcgcagctgggctggggagcggagccggcgggagctctgtagccggctgcaggaccagtgagyggcctgcgccagtcctgctacctcccttgcctttcgaggcctgaagccagctgccctatgggcctgccgggctgagggcctgctggaggcctcaggtgct

SEQ ID NO: 84270 - DNA, 201 bp, Homo sapiens; identical to SEQ ID NO: 84156

SEQ ID NO: 84271 - DNA, 201 bp, Homo sapiens
gggtggatggccgtggatggccgtggatgcgcagtgccttgcatacccaaaccaggtgggagcgttttgttgagcatgacagcctgcagcaggaatatatytgtgcctatttgtaagcagctaaaccaaggactgagcaccctctggattctgaatctcaagatgggggcagggctgtgcttgaaggccctgctgagtcat

SEQ ID NO: 84272 - DNA, 201 bp, Homo sapiens; identical to SEQ ID NO: 84158

SEQ ID NO: 84273 - DNA, 201 bp, Homo sapiens
cctgactgctcagaacttgctgctgtcttgttgcggatggatggaaggttggatggatgggtggatggccgtggatggccgtggatgcgcagtgccttgcytacccaaaccaggtgggagcgttttgttgagcatgacagcctgcagcaggaatatatgtgtgcctatttgtaagcagctaaaccaaggactgagcaccct

SEQ ID NO: 84274 - DNA, 201 bp, Homo sapiens
acttgctgctgtcttgttgcggatggatggaaggttggatggatgggtggatggccgtggatggccgtggatgcgcagtgccttgcatacccaaaccaggsgggagcgttttgttgagcatgacagcctgcagcaggaatatatgtgtgcctatttgtaagcagctaaaccaaggactgagcaccctctggattctgaatc

SEQ ID NO: 84275 - DNA, 201 bp, Homo sapiens
actaccctgagatgtatatcctgaaaggcggctacaaggagttcttccctcagcacccgaacttctgtgaaccccaggactaccggcccatgaaccacgasgccttcaaggatgagctaaagaccttccgcctcaagactcgcagctgggctggggagcggagccggcgggagctctgtagccggctgcaggaccagtgag

SEQ ID NO: 84276 - DNA, 201 bp, Homo sapiens
gattactctaaggttgttccctgggtgtcagacccaagaggtgcctctcagttgccatgggaaccagaactgaatttgaaggccaaagcaggccttcctcytacagacagtagacggaaagcaccaagacctcaagtacatctcaccagaaacgatggtggccctattgacgggcaagttcagcaacatcgtggataagtt

SEQ ID NO: 84277 - DNA, 201 bp, Homo sapiens
taacggggaacgccaagaagctggaggaggtcgttcagattctaggagataagtttccatgcactttggtggcacagaaaattgacctgccggagtaccarggggagccggatgagatttccatacagaaatgtcaggaggcagttcgccaggtacaggggcccgtgctggttgaggacacttgtctgtgcttcaatgccc

SEQ ID NO: 84278 - DNA, 201 bp, Homo sapiens
ctgcaggagtactttggcagtttggcagcttgacttctgcagctggaggaggcccctcaggccggggatctggggagggctagcccaaaacctcccgcatygggcaggcaccccctgaagtacttccttcagggtttcccctttgtgagggtgtcgagtagcctcaccggcctgtctggaggagcagctggctctgctctg

SEQ ID NO: 84279 - DNA, 201 bp, Homo sapiens
gctttcagcctgatggatatgagcagacgtacgcagagatgcctaaggcggagaagaacgctgtctcccatcgcttccgggccctgctggagctgcaggartactttggcagtttggcagcttgacttctgcagctggaggaggcccctcaggccggggatctggggagggctagcccaaaacctcccgcatcgggcaggc

SEQ ID NO: 84280 - DNA, 201 bp, Homo sapiens
gcagttcgccaggtacaggggcccgtgctggttgaggacacttgtctgtgcttcaatgcccttggagggctccccggcccctacataaagtggtttctggrgaagttaaagcctgaaggtctccaccagctcctggccgggttcgaggacaagtcagcctatgcgctctgcacgtttgcactcagcaccggggacccaagc

SEQ ID NO: 84281 - DNA, 201 bp, Homo sapiens
tcttgaagatagcgtcccttaggcaggaggggtgggtcactcagtctccaggctcgggaggcccccagcaaatcggacgctgtgggctaggccgccaccgsgagcccactcgcccgatacgcgccttggggtccgggtcggctttccccgggacccctggccggaaactgagccgttcacttccgccaccagccggaagtt

SEQ ID NO: 84282 - DNA, 201 bp, Homo sapiens
attgcagagaagagcgaaagcaggggcggggtgggggtgggagtggtctcttccggttcttgaagatagcgtcccttaggcaggaggggtgggtcactcartctccaggctcgggaggcccccagcaaatcggacgctgtgggctaggccgccaccgcgagcccactcgcccgatacgcgccttggggtccgggtcggctt

SEQ ID NO: 84283 - DNA, 201 bp, Homo sapiens
ctcccatcgcttccgggccctgctggagctgcaggagtactttggcagtttggcagcttgacttctgcagctggaggaggcccctcaggccggggatctgsggagggctagcccaaaacctcccgcatcgggcaggcaccccctgaagtacttccttcagggtttcccctttgtgagggtgtcgagtagcctcaccggcct

SEQ ID NO: 84284 - DNA, 201 bp, Homo sapiens
gatcaccatggcggcctcattggtggggaagaagatcgtgtttgtaacggggaacgccaagaagctggaggaggtcgttcagattctaggagataagtttmcatgcactttggtggcacagaaaattgacctgccggagtaccaaggggagccggatgagatttccatacagaaatgtcaggaggcagttcgccaggtaca

SEQ ID NO: 84285 - DNA, 201 bp, Homo sapiens
taaggcggagaagaacgctgtctcccatcgcttccgggccctgctggagctgcaggagtactttggcagtttggcagcttgacttctgcagctggaggagscccctcaggccggggatctggggagggctagcccaaaacctcccgcatcgggcaggcaccccctgaagtacttccttcagggtttcccctttgtgagggt

SEQ ID NO: 84286 - DNA, 201 bp, Homo sapiens
ctcaggccggggatctggggagggctagcccaaaacctcccgcatcgggcaggcaccccctgaagtacttccttcagggtttcccctttgtgagggtgtcragtagcctcaccggcctgtctggaggagcagctggctctgctctgagaaactctggcaagtggacgccattctcttgcccttaggattcactgctctctc

SEQ ID NO: 84287 - DNA, 156 bp, Homo sapiens
aggaccttgggtggtaaagctgtacttggtgggagtgagggcgtggggaggaaccatgcaaatcgccttccatggtttttaaatgcagtaaataacatttytggatgagacttgtttccaaaataaaccagctatatctgttttgaaccctgcccc

SEQ ID NO: 84288 - DNA, 201 bp, Homo sapiens
tccaggctcgggaggcccccagcaaatcggacgctgtgggctaggccgccaccgcgagcccactcgcccgatacgcgccttggggtccgggtcggctttcyccgggacccctggccggaaactgagccgttcacttccgccaccagccggaagttttctgtcactggacgccaaggagttttcggtggctcagctgggtaa

SEQ ID NO: 84289 - DNA, 201 bp, Homo sapiens; identical to SEQ ID NO: 84278

SEQ ID NO: 84290 - DNA, 201 bp, Homo sapiens; identical to SEQ ID NO: 84283

SEQ ID NO: 84291 - DNA, 201 bp, Homo sapiens; identical to SEQ ID NO: 84285

SEQ ID NO: 84292 - DNA, 201 bp, Homo sapiens; identical to SEQ ID NO: 84279

SEQ ID NO: 84293 - DNA, 201 bp, Homo sapiens
aagctggaggaggtacaggggcccgtgctggttgaggacacttgtctgtgcttcaatgcccttggagggctccccggcccctacataaagtggtttctggrgaagttaaagcctgaaggtctccaccagctcctggccgggttcgaggacaagtcagcctatgcgctctgcacgtttgcactcagcaccggggacccaagc

SEQ ID NO: 84294 - DNA, 201 bp, Homo sapiens; identical to SEQ ID NO: 84286

SEQ ID NO: 84295 - DNA, 156 bp, Homo sapiens; identical to SEQ ID NO: 84287

SEQ ID NO: 84296 - DNA, 201 bp, Homo sapiens
atgagcatcagaatggcctgaggagcttggtcgttcagattctaggagataagtttccatgcactttggtggcacagaaaattgacctgccggagtaccarggggagccggatgagatttccatacagaaatgtcaggaggcagttcgccaggtacaggggcccgtgctggttgaggacacttgtctgtgcttcaatgccc

SEQ ID NO: 84297 - DNA, 201 bp, Homo sapiens; identical to SEQ ID NO: 84278

SEQ ID NO: 84298 - DNA, 201 bp, Homo sapiens; identical to SEQ ID NO: 84279

SEQ ID NO: 84299 - DNA, 201 bp, Homo sapiens; identical to SEQ ID NO: 84280

SEQ ID NO: 84300 - DNA, 201 bp, Homo sapiens
cggccagggcctcaggcctttggagacgcagttttgctcttgttgcccaggctggagtccgatggcacgatctccgctcactgcaacccccacctcccgarttcaggcgattctcctgaatcctgaattctctgaactgggattacaggcatgcaccaccatgcccagctaattttgtactttttggtagagatggggttt

SEQ ID NO: 84301 - DNA, 201 bp, Homo sapiens
ctcccgaattcaggcgattctcctgaatcctgaattctctgaactgggattacaggcatgcaccaccatgcccagctaattttgtactttttggtagagayggggtttctccatgttggtcaggctggtttcaaactcctgacctcgggtgatccactcgcctcagcctcccaaagtgctgggattacaggcgtgagccac

SEQ ID NO: 84302 - DNA, 201 bp, Homo sapiens
cgacggtgacggatgggagtgtgcgccggccagggcctcaggcctttggagacgcagttttgctcttgttgcccaggctggagtccgatggcacgatctcygctcactgcaacccccacctcccgaattcaggcgattctcctgaatcctgaattctctgaactgggattacaggcatgcaccaccatgcccagctaattt

SEQ ID NO: 84303 - DNA, 201 bp, Homo sapiens; identical to SEQ ID NO: 84283

SEQ ID NO: 84304 - DNA, 201 bp, Homo sapiens
tgctgggattacaggcgtgagccaccgggctttcccacactttgatgagcatcagaatggcctgaggagcttggtcgttcagattctaggagataagtttmcatgcactttggtggcacagaaaattgacctgccggagtaccaaggggagccggatgagatttccatacagaaatgtcaggaggcagttcgccaggtaca

SEQ ID NO: 84305 - DNA, 201 bp, Homo sapiens; identical to SEQ ID NO: 84285

SEQ ID NO: 84306 - DNA, 201 bp, Homo sapiens; identical to SEQ ID NO: 84286

SEQ ID NO: 84307 - DNA, 156 bp, Homo sapiens; identical to SEQ ID NO: 84287

SEQ ID NO: 84308 - DNA, 201 bp, Homo sapiens
atggaaaacccctgcggcctccctaacaggtgcagagggaaagggccccgacggtgacggatgggagtgtgcgccggccagggcctcaggcctttggagaygcagttttgctcttgttgcccaggctggagtccgatggcacgatctccgctcactgcaacccccacctcccgaattcaggcgattctcctgaatcctgaa

SEQ ID NO: 84309 - DNA, 201 bp, Homo sapiens
acagtgtgggccgtactgacatcgtggagaaccgctgcattagaatgaagtctcgaggtatctatgagaccccagcaggcaccatcctttaccacacctayttagatatcaaggtcttcaccatggactgggaagtgcataaagtcaaacaggcctcggcttgaaatttgctgagctgatatatactggtttctagcacag

SEQ ID NO: 84310 - DNA, 201 bp, Homo sapiens
ccgtactgacatcgtggagaaccgctgcattagaatgaagtctcgaggtatctatgagaccccagcaggcaccatcctttaccacacctatttagatatcraggtcttcaccatggactgggaagtgcataaagtcaaacaggcctcggcttgaaatttgctgagctgatatatactggtttctagcacagccctgagtgt

SEQ ID NO: 84311 - DNA, 201 bp, Homo sapiens
acagtgtgggccgtactgacatcgtggagaaccgctgcattagaatgaagtctcgaggtatctatgagaccccagcaggcaccatcctttaccacacctayttagatatcaaggtcttcaccatggactgggaacacagccctgagtgtgaatttgcccaccactgcatcgccaagtcccaggagcgagtggaagggaaag

SEQ ID NO: 84312 - DNA, 201 bp, Homo sapiens
ccgtactgacatcgtggagaaccgctgcattagaatgaagtctcgaggtatctatgagaccccagcaggcaccatcctttaccacacctatttagatatcraggtcttcaccatggactgggaacacagccctgagtgtgaatttgcccaccactgcatcgccaagtcccaggagcgagtggaagggaaagtacaggtgtc

SEQ ID NO: 84313 - DNA, 201 bp, Homo sapiens
gagtactgccagcatggcgtgaaggaaggggccacactggtctgcggcgggaatcaggtccctcggccagggttcttctttgagccaactgttttcacagrcgtggaagaccacatgttcatagccaaggaggagtccttcgggcctgtcatgatcatctctcggtttgctgatggggacttggatgccgtgctgtctcgg

SEQ ID NO: 84314 - DNA, 201 bp, Homo sapiens
aagtgtcatctgccaggtatccctggcccaagtcaccgacgtcgacaaggcagtggccgcagccaaggatgcctttgagaatggacggtgggggaagatcrgtgcgcgggaccggggccggctgatgtacaggttggcagatctcatggagcagcaccaggaggagctggccaccattgaggccctggatgcgggtgccgt

SEQ ID NO: 84315 - DNA, 201 bp, Homo sapiens
tggcaaaatgatcctggcctcgaacttctttaagggggcagccagcagtgtccttgagctgacagaggcagagctggttactgcggaggctgtgcggagtktttggcagcggatcctccccaaagtcctggaggttgaagactccactgatttcttcaagtcaggggccgcgtctgtggacgttgtgaggctggtggagga

SEQ ID NO: 84316 - DNA, 201 bp, Homo sapiens
caacgtcctgcccttctgcagccaattcatccccatggagataatcagtgccccccggcatggctccatcatctatcacccgtcactgctccctaggcacygaggggcctcggccatcaactggaccctcattcacggagataagaaaggggggttttccatcttctgggcggatgatggtctggacaccggagacctgct

SEQ ID NO: 84317 - DNA, 195 bp, Homo sapiens
gcccctccctcgtggctggggccccctccctcttgagcctgggtgcacagcacctcccacctggggggctagtggaagccctcctgcctgcacaccatgtytgcatcttggacgccctctgtccagtcagaagcagcccttggctgggtgaggtgtgcccctcccagggagaataaagcttctgaagagagaccg

SEQ ID NO: 84318 - DNA, 201 bp, Homo sapiens
aggaagtgaaggagctgtgtgatggcctggagttagaaaatgaagatgtgtacatggcatccacctttggggacttcatccagctgttagtgaggaagctkcgaggggacgatgaggagggcgagtgcagcattgactacgtggaaatggcagtgaacaagcgcactgtccgcatgccccaccagctcttcattggggggg

SEQ ID NO: 84319 - DNA, 201 bp, Homo sapiens
cttcaggcctggtgcccgagggagacgctttgcccatcccaggagcccatcggccaggggtggtcaccaaagcaggactcatcctctttgggaatgatgayaaaatgctgctggtgaagaatattcagctggaggatggcaaaatgatcctggcctcgaacttctttaagggggcagccagcagtgtccttgagctgacag

SEQ ID NO: 84320 - DNA, 201 bp, Homo sapiens
gggccgcgtctgtggacgttgtgaggctggtggaggaagtgaaggagctgtgtgatggcctggagttagaaaatgaagatgtgtacatggcatccaccttyggggacttcatccagctgttagtgaggaagctgcgaggggacgatgaggagggcgagtgcagcattgactacgtggaaatggcagtgaacaagcgcactg

SEQ ID NO: 84321 - DNA, 201 bp, Homo sapiens
ggtccctcggccagggttcttctttgagccaactgttttcacagacgtggaagaccacatgttcatagccaaggaggagtccttcgggcctgtcatgatcrtctctcggtttgctgatggggacttggatgccgtgctgtctcgggccaatgccacggaatttggcctggcttctggtgtcttcaccagggacatcaacaa

SEQ ID NO: 84322 - DNA, 201 bp, Homo sapiens
cgaggggacgatgaggagggcgagtgcagcattgactacgtggaaatggcagtgaacaagcgcactgtccgcatgccccaccagctcttcattgggggggmgttcgtggatgccgagggcgccaagacctctgagaccatcaatcccaccgatggaagtgtcatctgccaggtatccctggcccaagtcaccgacgtcgac

SEQ ID NO: 84323 - DNA, 201 bp, Homo sapiens
cacaactggatccgcgggaacgacaaggtgccgggagcctggacagaggcctgtgaacagaaactgacatttttcaactcaacgctgaacacttcaggccyggtgcccgagggagacgctttgcccatcccaggagcccatcggccaggggtggtcaccaaagcaggactcatcctctttgggaatgatgacaaaatgctg

SEQ ID NO: 84324 - DNA, 201 bp, Homo sapiens
cgagggagacgctttgcccatcccaggagcccatcggccaggggtggtcaccaaagcaggactcatcctctttgggaatgatgacaaaatggtaagggcayggctgtgggtcacttgcctgctcaaagccacccatgctcctgtccttggactcaggcctcacaggaagaccctaggctcctctggagaaaatggaaaaaa

SEQ ID NO: 84325 - DNA, 201 bp, Homo sapiens
cacaactggatccgcgggaacgacaaggtgccgggagcctggacagaggcctgtgaacagaaactgacatttttcaactcaacgctgaacacttcaggccyggtgcccgagggagacgctttgcccatcccaggagcccatcggccaggggtggtcaccaaagcaggactcatcctctttgggaatgatgacaaaatggta

SEQ ID NO: 84326 - DNA, 201 bp, Homo sapiens; identical to SEQ ID NO: 84316

SEQ ID NO: 84327 - DNA, 201 bp, Homo sapiens
cccatcccaggagcccatcggccaggggtggtcaccaaagcaggactcatcctctttgggaatgatgacaaaatggtaagggcacggctgtgggtcacttrcctgctcaaagccacccatgctcctgtccttggactcaggcctcacaggaagaccctaggctcctctggagaaaatggaaaaaaccagacccaggaagga

SEQ ID NO: 84328 - DNA, 201 bp, Homo sapiens
cttcaggcctggtgcccgagggagacgctttgcccatcccaggagcccatcggccaggggtggtcaccaaagcaggactcatcctctttgggaatgatgayaaaatggtaagggcacggctgtgggtcacttgcctgctcaaagccacccatgctcctgtccttggactcaggcctcacaggaagaccctaggctcctctg

SEQ ID NO: 84329 - DNA, 175 bp, Homo sapiens
aagtgtcatctgccaggtatccctggcccaagtcaccgacgtcgacaaggcagtggccgcagccaaggatgcctttgagaatggacggtgggggaagatcrgtgcgcgggaccggggccggctgatgtacagggctccaccatccccatcaaccaggccagacccaaccgcaacc

SEQ ID NO: 84330 - DNA, 201 bp, Homo sapiens; identical to SEQ ID NO: 84315

SEQ ID NO: 84331 - DNA, 201 bp, Homo sapiens; identical to SEQ ID NO: 84316

SEQ ID NO: 84332 - DNA, 201 bp, Homo sapiens; identical to SEQ ID NO: 84318

SEQ ID NO: 84333 - DNA, 201 bp, Homo sapiens; identical to SEQ ID NO: 84319

SEQ ID NO: 84334 - DNA, 201 bp, Homo sapiens; identical to SEQ ID NO: 84320

SEQ ID NO: 84335 - DNA, 201 bp, Homo sapiens; identical to SEQ ID NO: 84322

SEQ ID NO: 84336 - DNA, 201 bp, Homo sapiens; identical to SEQ ID NO: 84323

SEQ ID NO: 84337 - DNA, 201 bp, Homo sapiens
ctgagaaggacttggtggataaggctcgtcagatcaacatccacaacctctctgcattttatgacagtgagctcttcaggatgaacaagttcagccacgayctgaaaaggaaaatgatcctgcagcagttctgaggccctatgccatccataaggattccttgggattctggtttggggtggtcagtgccctctgtgcttt

SEQ ID NO: 84338 - DNA, 201 bp, Homo sapiens
gcgacatgtgcaaagagaaccgtgagagcctggtggtgaactatgaggacttggcagccagggagcacgtgctggcctacttcctgcctgaggcaccggcrgagctgctgcagatctttgatgaggctgccctggaggtggtactggccatgtaccccaagtacgaccgcatcaccaaccacatccatgtccgcatctccc

SEQ ID NO: 84339 - DNA, 201 bp, Homo sapiens
ctgatgccctcacctccagccctggccgtgaccttccaccatttgaggatgagtccgaggggctcctaggcacagaggggcccctggaggaagaagaggakggagaggagctcattggagatggcatggaaagggactaccgcgccatcccagagctggacgcctatgaggccgagggactggctctggatgatgaggacg

SEQ ID NO: 84340 - DNA, 201 bp, Homo sapiens
ggaggggctggccaatggcagcgctgctgagcccgccatgcccaacacgtatggcgtggagcccctgccccaggaggtcctgaagaagtacatcatctacrccaaggagagggtccacccgaagctcaaccagatggaccaggacaaggtggccaagatgtacagtgacctgaggaaagaatctatggcgacaggcagcat

SEQ ID NO: 84341 - DNA, 201 bp, Homo sapiens
aggagggcgctacgacccctcgctgactttctctgagaacgtggacctcacagagcccatcatctcacgctttgacatcctgtgtgtggtgagggacaccrtggacccagtccaggacgagatgctggcccgcttcgtggtgggcagccacgtcagacaccaccccagcaacaaggaggaggaggggctggccaatggcag

SEQ ID NO: 84342 - DNA, 201 bp, Homo sapiens
gaggacgtagaggagctgacggccagtcagagggaggcagcagagcgggccatgcggcagcgtgaccgggaggctggccggggcctgggccgcatgcgccrtgggctcctgtatgacagcgatgaggaggacgaggagcgccctgcccgcaagcgccgccaggtggagcgggccacggaggacggcgaggaggacgaggag

SEQ ID NO: 84343 - DNA, 201 bp, Homo sapiens
gcctgggccgcatgcgccgtgggctcctgtatgacagcgatgaggaggacgaggagcgccctgcccgcaagcgccgccaggtggagcgggccacggaggayggcgaggaggacgaggagatgattgagagcatcgagaacctggaggatctcaaaggccactctgtgcgcgagtgggtgagcatggcgggcccccggctgg

SEQ ID NO: 84344 - DNA, 201 bp, Homo sapiens
tgtttgtaatcgttttcagtctcctgcaggtttctgtgcccctgtggtggaagagggcacgacagtgccagcgcagcgttctgggctcctcagtcgcaggrgtgggatgtgagtcatgcggattatccactcgccacagttatcagctgccattgctccctgtctgtttccccactctcttatttgtgcattcggtttggt

SEQ ID NO: 84345 - DNA, 201 bp, Homo sapiens
ccgtgggctcctgtatgacagcgatgaggaggacgaggagcgccctgcccgcaagcgccgccaggtggagcgggccacggaggacggcgaggaggacgagsagatgattgagagcatcgagaacctggaggatctcaaaggccactctgtgcgcgagtgggtgagcatggcgggcccccggctggagatccaccaccgctt

SEQ ID NO: 84346 - DNA, 201 bp, Homo sapiens
aggagaccatctatcagaactaccagcgtatccgaatccaggagagtccaggcaaagtggcggctggccggctgccccgctccaaggacgccattctcctygcagatctggtggacagctgcaagccaggagacgagatagagctgactggcatctatcacaacaactatgatggctccctcaacactgccaatggcttcc

SEQ ID NO: 84347 - DNA, 201 bp, Homo sapiens
ggtcaacatggaggagaccatctatcagaactaccagcgtatccgaatccaggagagtccaggcaaagtggcggctggccggctgccccgctccaaggacrccattctcctcgcagatctggtggacagctgcaagccaggagacgagatagagctgactggcatctatcacaacaactatgatggctccctcaacactgc

SEQ ID NO: 84348 - DNA, 201 bp, Homo sapiens
tcctgtatgacagcgatgaggaggacgaggagcgccctgcccgcaagcgccgccaggtggagcgggccacggaggacggcgaggaggacgaggagatgatygagagcatcgagaacctggaggatctcaaaggccactctgtgcgcgagtgggtgagcatggcgggcccccggctggagatccaccaccgcttcaagaact

SEQ ID NO: 84349 - DNA, 201 bp, Homo sapiens
gccatgcggcagcgtgaccgggaggctggccggggcctgggccgcatgcgccgtgggctcctgtatgacagcgatgaggaggacgaggagcgccctgcccrcaagcgccgccaggtggagcgggccacggaggacggcgaggaggacgaggagatgattgagagcatcgagaacctggaggatctcaaaggccactctgtg

SEQ ID NO: 84350 - DNA, 201 bp, Homo sapiens
cgtagaggagctgacggccagtcagagggaggcagcagagcgggccatgcggcagcgtgaccgggaggctggccggggcctgggccgcatgcgccgtgggytcctgtatgacagcgatgaggaggacgaggagcgccctgcccgcaagcgccgccaggtggagcgggccacggaggacggcgaggaggacgaggagatgat

SEQ ID NO: 84351 - DNA, 201 bp, Homo sapiens
agggactggctctggatgatgaggacgtagaggagctgacggccagtcagagggaggcagcagagcgggccatgcggcagcgtgaccgggaggctggccgrggcctgggccgcatgcgccgtgggctcctgtatgacagcgatgaggaggacgaggagcgccctgcccgcaagcgccgccaggtggagcgggccacggagg

SEQ ID NO: 84352 - DNA, 201 bp, Homo sapiens; identical to SEQ ID NO: 84337

SEQ ID NO: 84353 - DNA, 201 bp, Homo sapiens; identical to SEQ ID NO: 84338

SEQ ID NO: 84354 - DNA, 201 bp, Homo sapiens; identical to SEQ ID NO: 84339

SEQ ID NO: 84355 - DNA, 201 bp, Homo sapiens; identical to SEQ ID NO: 84340

SEQ ID NO: 84356 - DNA, 201 bp, Homo sapiens; identical to SEQ ID NO: 84341

SEQ ID NO: 84357 - DNA, 201 bp, Homo sapiens; identical to SEQ ID NO: 84342

SEQ ID NO: 84358 - DNA, 201 bp, Homo sapiens; identical to SEQ ID NO: 84343

SEQ ID NO: 84359 - DNA, 201 bp, Homo sapiens; identical to SEQ ID NO: 84344

SEQ ID NO: 84360 - DNA, 201 bp, Homo sapiens; identical to SEQ ID NO: 84345

SEQ ID NO: 84361 - DNA, 201 bp, Homo sapiens; identical to SEQ ID NO: 84346

SEQ ID NO: 84362 - DNA, 201 bp, Homo sapiens; identical to SEQ ID NO: 84347

SEQ ID NO: 84363 - DNA, 201 bp, Homo sapiens; identical to SEQ ID NO: 84348

SEQ ID NO: 84364 - DNA, 201 bp, Homo sapiens; identical to SEQ ID NO: 84349

SEQ ID NO: 84365 - DNA, 201 bp, Homo sapiens; identical to SEQ ID NO: 84350

SEQ ID NO: 84366 - DNA, 201 bp, Homo sapiens; identical to SEQ ID NO: 84351

SEQ ID NO: 84367 - DNA, 108 bp, Homo sapiens
gagggackcgccggagcgggaccgacgggaccgagcgagcgaccgacgcgccacccgccgacgcctcagccgcttggggcccgcacggaccctctacttcagtgtaga

SEQ ID NO: 84368 - DNA, 201 bp, Homo sapiens
gaacatccccagaaggcaaccaccgagctgcccttgctgcgtgcggccctcaaggagaccttgcggctctaccctgtgggtctgtttctggagcgagtggygagctcagacttggtgcttcagaactaccacatcccagctgggacattggtgcgcgtgttcctctactctctgggtcgcaaccccgccttgttcccgagg

SEQ ID NO: 84369 - DNA, 201 bp, Homo sapiens
ctgatcgtgtcagcctcatgccccaggcctcatctttcatggaccaggccttgttccaggagtgggtgttgggtcctctgcttcctgtgctgtcccctggrgaaggtcccgaggatgctgtcaggagatggaagagtcatgtggggtgggaacctggggtgtggttccagaaatgtttttggcaacaggagagacaggatt

SEQ ID NO: 84370 - DNA, 201 bp, Homo sapiens
gtgtgttccccagctgatcgtgtcagcctcatgccccaggcctcatctttcatggaccaggccttgttccaggagtgggtgttgggtcctctgcttcctgwgctgtcccctggggaaggtcccgaggatgctgtcaggagatggaagagtcatgtggggtgggaacctggggtgtggttccagaaatgtttttggcaacag

SEQ ID NO: 84371 - DNA, 201 bp, Homo sapiens
gatacaactgagtctcgagggacgtgtgttccccagctgatcgtgtcagcctcatgccccaggcctcatctttcatggaccaggccttgttccaggagtgrgtgttgggtcctctgcttcctgtgctgtcccctggggaaggtcccgaggatgctgtcaggagatggaagagtcatgtggggtgggaacctggggtgtggt

SEQ ID NO: 84372 - DNA, 201 bp, Homo sapiens
caagtgatacaactgagtctcgagggacgtgtgttccccagctgatcgtgtcagcctcatgccccaggcctcatctttcatggaccaggccttgttccagsagtgggtgttgggtcctctgcttcctgtgctgtcccctggggaaggtcccgaggatgctgtcaggagatggaagagtcatgtggggtgggaacctggggt

SEQ ID NO: 84373 - DNA, 201 bp, Homo sapiens
atccccattttcaagtgatacaactgagtctcgagggacgtgtgttccccagctgatcgtgtcagcctcatgccccaggcctcatctttcatggaccaggycttgttccaggagtgggtgttgggtcctctgcttcctgtgctgtcccctggggaaggtcccgaggatgctgtcaggagatggaagagtcatgtggggtgg

SEQ ID NO: 84374 - DNA, 201 bp, Homo sapiens
gtggcgtgttcttgctgaatgggcctgaatggcgcttcaaccgattgcggctgaatccagaagtgctgtcgcccaacgctgtgcagaggttcctcccgatsgtggatgcagtggccagggacttctcccaggccctgaagaagaaggtgctgcagaacgcccgggggagcctgaccctggacgtccagcccagcatcttcc

SEQ ID NO: 84375 - DNA, 201 bp, Homo sapiens
ggtggaaaagggcaagacagctcacagagacctcttttataaggacgccagttccattcaagagggcactgcctgcattcccttcccccctcaaaggccckgccctgctattatcgtcaccttggtgactagatttcagcctatgaattctggaggcggacacaaaaattcagattaaactactctgcttctgtttctcta

SEQ ID NO: 84376 - DNA, 201 bp, Homo sapiens
gtttctggagcgagtggcgagctcagacttggtgcttcagaactaccacatcccagctgggacattggtgcgcgtgttcctctactctctgggtcgcaacsccgccttgttcccgaggcctgagcgctataacccccagcgctggctagacatcaggggctccggcaggaacttctaccacgtgccctttggctttggcat

SEQ ID NO: 84377 - DNA, 201 bp, Homo sapiens
agaccttgcggctctaccctgtgggtctgtttctggagcgagtggcgagctcagacttggtgcttcagaactaccacatcccagctgggacattggtgcgsgtgttcctctactctctgggtcgcaaccccgccttgttcccgaggcctgagcgctataacccccagcgctggctagacatcaggggctccggcaggaact

SEQ ID NO: 84378 - DNA, 201 bp, Homo sapiens
cacagccccagttctgccagcctgaacttcctccatgccctggaggtcatgttcaaatccaccgtccagctcatgttcatgcccaggagcctgtctcgctrgaccagccccaaggtgtggaaggagcactttgaggcctgggactgcatcttccagtacggcgacaactgtatccagaaaatctatcaggaactggccttc

SEQ ID NO: 84379 - DNA, 201 bp, Homo sapiens
aactaccacatcccagctgggacattggtgcgcgtgttcctctactctctgggtcgcaaccccgccttgttcccgaggcctgagcgctataacccccagcrctggctagacatcaggggctccggcaggaacttctaccacgtgccctttggctttggcatgcgccagtgccttgggcggcgcctggcagaggcagagatg

SEQ ID NO: 84380 - DNA, 201 bp, Homo sapiens
gaagctgcaacaggtggacagcctgcatccccacaggatgagcctggagccctgggtggcctacagacaacatcgtgggcacaaatgtggcgtgttcttgytgaatgggcctgaatggcgcttcaaccgattgcggctgaatccagaagtgctgtcgcccaacgctgtgcagaggttcctcccgatggtggatgcagtggc

SEQ ID NO: 84381 - DNA, 201 bp, Homo sapiens
tggtcacttgtcctgacatccccattttcaagtgatacaactgagtctcgagggacgtgtgttccccagctgatcgtgtcagcctcatgccccaggcctcrtctttcatggaccaggccttgttccaggagtgggtgttgggtcctctgcttcctgtgctgtcccctggggaaggtcccgaggatgctgtcaggagatgga

SEQ ID NO: 84382 - DNA, 201 bp, Homo sapiens
taaaaaggcccctgtggtcacttgtcctgacatccccattttcaagtgatacaactgagtctcgagggacgtgtgttccccagctgatcgtgtcagcctcrtgccccaggcctcatctttcatggaccaggccttgttccaggagtgggtgttgggtcctctgcttcctgtgctgtcccctggggaaggtcccgaggatgc

SEQ ID NO: 84383 - DNA, 201 bp, Homo sapiens
gcagggtagaataaaaaggcccctgtggtcacttgtcctgacatccccattttcaagtgatacaactgagtctcgagggacgtgtgttccccagctgatcrtgtcagcctcatgccccaggcctcatctttcatggaccaggccttgttccaggagtgggtgttgggtcctctgcttcctgtgctgtcccctggggaaggt

SEQ ID NO: 84384 - DNA, 201 bp, Homo sapiens
gtcaccctggaatagggtcctgcagggtagaataaaaaggcccctgtggtcacttgtcctgacatccccattttcaagtgatacaactgagtctcgagggrcgtgtgttccccagctgatcgtgtcagcctcatgccccaggcctcatctttcatggaccaggccttgttccaggagtgggtgttgggtcctctgcttcct

SEQ ID NO: 84385 - DNA, 162 bp, Homo sapiens
cattggaatggcactcagggcaaaggcagaggtgtgcatggcagtgccctggctgtccctgyaaagggcacaggcactgggcacgagagccgcccgggtccccaggacagtgctgccctttgaagccatgccccggcgtccaggcaacaggtggctgaggct

SEQ ID NO: 84386 - DNA, 201 bp, Homo sapiens
ccaacaaggactcagacgagttttattgactcatttctctggttgatacggagccatgtcatgtgccacgacctggggtgggcacagggaggctgcagttycctgcgtgaacctgccttgggcctcatctgctcctagcccagcagagagagttgacccctcctgaactggccactccccagtgctcccgtgcagggagag

SEQ ID NO: 84387 - DNA, 201 bp, Homo sapiens
cattaagcgggatcccagcatctcagagtccagtcaagttccctcctgcagcctgacccctaggcagctcgagcatgccctgagctctctgaaagttgtcrccctggaatagggtcctgcagggtagaataaaaaggcccctgtggtcacttgtcctgacatccccattttcaagtgatacaactgagtctcgagggacgt

SEQ ID NO: 84388 - DNA, 201 bp, Homo sapiens
cagcctcatgccccaggcctcatctttcatggaccaggccttgttccaggagtgggtgttgggtcctctgcttcctgtgctgtcccctggggaaggtcccraggatgctgtcaggagatggaagagtcatgtggggtgggaacctggggtgtggttccagaaatgtttttggcaacaggagagacaggattgggccaacaa

SEQ ID NO: 84389 - DNA, 201 bp, Homo sapiens
tgcctagtctcacatgtccctgttcctcttcccctggccagggcccctgcgcagactgtcagagtcattaagcgggatcccagcatctcagagtccagtcmagttccctcctgcagcctgacccctaggcagctcgagcatgccctgagctctctgaaagttgtcaccctggaatagggtcctgcagggtagaataaaaag

SEQ ID NO: 84390 - DNA, 201 bp, Homo sapiens
tacaactgagtctcgagggacgtgtgttccccagctgatcgtgtcagcctcatgccccaggcctcatctttcatggaccaggccttgttccaggagtgggygttgggtcctctgcttcctgtgctgtcccctggggaaggtcccgaggatgctgtcaggagatggaagagtcatgtggggtgggaacctggggtgtggttc

SEQ ID NO: 84391 - DNA, 201 bp, Homo sapiens
accctgtgggtctgtttctggagcgagtggcgagctcagacttggtgcttcagaactaccacatcccagctgggacattggtgcgcgtgttcctctactckctgggtcgcaaccccgccttgttcccgaggcctgagcgctataacccccagcgctggctagacatcaggggctccggcaggaacttctaccacgtgccct

SEQ ID NO: 84392 - DNA, 201 bp, Homo sapiens
tgttcctcttcccctggccagggcccctgcgcagactgtcagagtcattaagcgggatcccagcatctcagagtccagtcaagttccctcctgcagcctgmcccctaggcagctcgagcatgccctgagctctctgaaagttgtcaccctggaatagggtcctgcagggtagaataaaaaggcccctgtggtcacttgtcc

SEQ ID NO: 84393 - DNA, 201 bp, Homo sapiens
gctttggcatgcgccagtgccttgggcggcgcctggcagaggcagagatgctgctgctgctgcaccatgtgctgaaacacctccaggtggagacactaacycaagaggacataaagatggtctacagcttcatattgaggcccagcatgttccccctcctcaccttcagagccatcaactaatcacgtctctgcacccagg

SEQ ID NO: 84394 - DNA, 201 bp, Homo sapiens
tggtgcttcagaactaccacatcccagctgggacattggtgcgcgtgttcctctactctctgggtcgcaaccccgccttgttcccgaggcctgagcgctakaacccccagcgctggctagacatcaggggctccggcaggaacttctaccacgtgccctttggctttggcatgcgccagtgccttgggcggcgcctggcag

SEQ ID NO: 84395 - DNA, 201 bp, Homo sapiens
cgaggcctgagcgctataacccccagcgctggctagacatcaggggctccggcaggaacttctaccacgtgccctttggctttggcatgcgccagtgcctygggcggcgcctggcagaggcagagatgctgctgctgctgcaccatgtgctgaaacacctccaggtggagacactaacccaagaggacataaagatggtct

SEQ ID NO: 84396 - DNA, 201 bp, Homo sapiens
gttcctctactctctgggtcgcaaccccgccttgttcccgaggcctgagcgctataacccccagcgctggctagacatcaggggctccggcaggaacttcyaccacgtgccctttggctttggcatgcgccagtgccttgggcggcgcctggcagaggcagagatgctgctgctgctgcaccatgtgctgaaacacctcca

SEQ ID NO: 84397 - DNA, 201 bp, Homo sapiens
agccagcatcagtgaacatccccagaaggcaaccaccgagctgcccttgctgcgtgcggccctcaaggagaccttgcggctctaccctgtgggtctgtttytggagcgagtggcgagctcagacttggtgcttcagaactaccacatcccagctgggacattggtgcgcgtgttcctctactctctgggtcgcaaccccgc

SEQ ID NO: 84398 - DNA, 201 bp, Homo sapiens
agccccagttctgccagcctgaacttcctccatgccctggaggtcatgttcaaatccaccgtccagctcatgttcatgcccaggagcctgtctcgctggaycagccccaaggtgtggaaggagcactttgaggcctgggactgcatcttccagtacggcgacaactgtatccagaaaatctatcaggaactggccttcagc

SEQ ID NO: 84399 - DNA, 201 bp, Homo sapiens
caccgtccagctcatgttcatgcccaggagcctgtctcgctggaccagccccaaggtgtggaaggagcactttgaggcctgggactgcatcttccagtacsgcgacaactgtatccagaaaatctatcaggaactggccttcagccgccctcaacagtacaccagcatcgtggcggagctcctgttgaatgcggaactgtc

SEQ ID NO: 84400 - DNA, 201 bp, Homo sapiens
accgtccagctcatgttcatgcccaggagcctgtctcgctggaccagccccaaggtgtggaaggagcactttgaggcctgggactgcatcttccagtacgrcgacaactgtatccagaaaatctatcaggaactggccttcagccgccctcaacagtacaccagcatcgtggcggagctcctgttgaatgcggaactgtcg

SEQ ID NO: 84401 - DNA, 201 bp, Homo sapiens
caggccctgcgccaggagagcctggccgccgcagccagcatcagtgaacatccccagaaggcaaccaccgagctgcccttgctgcgtgcggccctcaaggrgaccttgcggctctaccctgtgggtctgtttctggagcgagtggcgagctcagacttggtgcttcagaactaccacatcccagctgggacattggtgcgc

SEQ ID NO: 84402 - DNA, 201 bp, Homo sapiens
tactctctgggtcgcaaccccgccttgttcccgaggcctgagcgctataacccccagcgctggctagacatcaggggctccggcaggaacttctaccacgkgccctttggctttggcatgcgccagtgccttgggcggcgcctggcagaggcagagatgctgctgctgctgcaccatgtgctgaaacacctccaggtggag

SEQ ID NO: 84403 - DNA, 201 bp, Homo sapiens
cgccaggagagcctggccgccgcagccagcatcagtgaacatccccagaaggcaaccaccgagctgcccttgctgcgtgcggccctcaaggagaccttgcrgctctaccctgtgggtctgtttctggagcgagtggcgagctcagacttggtgcttcagaactaccacatcccagctgggacattggtgcgcgtgttcctc

SEQ ID NO: 84404 - DNA, 201 bp, Homo sapiens
acctgcacctggaagtacaccagaccttccaggaactagggcccattttcaggtacgacttgggaggagcaggcatggtgtgtgtgatgctgccggaggaygtggagaagctgcaacaggtggacagcctgcatccccacaggatgagcctggagccctgggtggcctacagacaacatcgtgggcacaaatgtggcgtgt

SEQ ID NO: 84405 - DNA, 201 bp, Homo sapiens
ggtggctgaggctgctgcagatctggagggagcagggttatgaggacctgcacctggaagtacaccagaccttccaggaactagggcccattttcaggtaygacttgggaggagcaggcatggtgtgtgtgatgctgccggaggacgtggagaagctgcaacaggtggacagcctgcatccccacaggatgagcctggagc

SEQ ID NO: 84406 - DNA, 201 bp, Homo sapiens
ccgggtccccaggacagtgctgccctttgaagccatgccccggcgtccaggcaacaggtggctgaggctgctgcagatctggagggagcagggttatgagsacctgcacctggaagtacaccagaccttccaggaactagggcccattttcaggtacgacttgggaggagcaggcatggtgtgtgtgatgctgccggagga

SEQ ID NO: 84407 - DNA, 106 bp, Homo sapiens
cattgraatggcactcagggcaaaggcagaggtgtgcatggcagtgccctggctgtccctgcaaagggcacaggcactgggcacgagagccgcccgggtccccagg

SEQ ID NO: 84408 - DNA, 201 bp, Homo sapiens
cttgctgatgacgctctttgagctggctcggaaccccaacgtgcagcaggccctgcgccaggagagcctggccgccgcagccagcatcagtgaacatcccyagaaggcaaccaccgagctgcccttgctgcgtgcggccctcaaggagaccttgcggctctaccctgtgggtctgtttctggagcgagtggcgagctcaga

SEQ ID NO: 84409 - DNA, 201 bp, Homo sapiens
attgtagtccaaagtgtgatttaaatgttatctgagtcaaacatgggtaagactcaaggtacaatttatcctgagtccaactgttcttgctgcgaacctakgaaatcaaacatgttatgtgcttccaaaatacagtggttggagaggcataggataaacattcccattccagaaaggagaaacaggaaagaagaaaggagt

SEQ ID NO: 84410 - DNA, 136 bp, Homo sapiens
cattggaatggcactcagggcaaaggcagaggtgtrcatggcagtgccctggctgtccctgcaaagggcacaggcactgggcacgagagccgcccgggtccccaggacagtgctgccctttgaagccatgccccgg

SEQ ID NO: 84411 - DNA, 201 bp, Homo sapiens
caaggactcagacgagttttattgactcatttctctggttgatacggagccatgtcatgtgccacgacctggggtgggcacagggaggctgcagtttcctrcgtgaacctgccttgggcctcatctgctcctagcccagcagagagagttgacccctcctgaactggccactccccagtgctcccgtgcagggagaggaag

SEQ ID NO: 84412 - DNA, 201 bp, Homo sapiens
gggcaaaggcagaggtgtgcatggcagtgccctggctgtccctgcaaagggcacaggcactgggcacgagagccgcccgggtccccaggacagtgctgccstttgaagccatgccccggcgtccaggcaacaggtggctgaggctgctgcagatctggagggagcagggttatgaggacctgcacctggaagtacaccaga

SEQ ID NO: 84413 - DNA, 201 bp, Homo sapiens
ggttctgtgtctggtgaggacccacctcttgtttcatagataaaaccttcttgctgtgtcctcacatggtggaaaagggcaagacagctcacagagacctyttttataaggacgccagttccattcaagagggcactgcctgcattcccttcccccctcaaaggcccggccctgctattatcgtcaccttggtgactagat

SEQ ID NO: 84414 - DNA, 201 bp, Homo sapiens
tttcctgcgtgaacctgccttgggcctcatctgctcctagcccagcagagagagttgacccctcctgaactggccactccccagtgctcccgtgcagggakaggaagcacccagtttgagagtgtacccagccagactgtctttatctccatggattttcatcagggcaaagatcacagcagccagctcctggtggctgat

SEQ ID NO: 84415 - DNA, 201 bp, Homo sapiens
ggagcctgtctcgctggaccagccccaaggtgtggaaggagcactttgaggcctgggactgcatcttccagtacggcgacaactgtatccagaaaatctaycaggaactggccttcagccgccctcaacagtacaccagcatcgtggcggagctcctgttgaatgcggaactgtcgccagatgccatcaaggccaactcta

SEQ ID NO: 84416 - DNA, 201 bp, Homo sapiens
gaggctgcagtttcctgcgtgaacctgccttgggcctcatctgctcctagcccagcagagagagttgacccctcctgaactggccactccccagtgctccygtgcagggagaggaagcacccagtttgagagtgtacccagccagactgtctttatctccatggattttcatcagggcaaagatcacagcagccagctcct

SEQ ID NO: 84417 - DNA, 201 bp, Homo sapiens
ccttgcggctctaccctgtgggtctgtttctggagcgagtggcgagctcagacttggtgcttcagaactaccacatcccagctgggacattggtgcgcgtkttcctctactctctgggtcgcaaccccgccttgttcccgaggcctgagcgctataacccccagcgctggctagacatcaggggctccggcaggaacttct

SEQ ID NO: 84418 - DNA, 201 bp, Homo sapiens
cccagcatctcagagtccagtcaagttccctcctgcagcctgacccctaggcagctcgagcatgccctgagctctctgaaagttgtcaccctggaataggrtcctgcagggtagaataaaaaggcccctgtggtcacttgtcctgacatccccattttcaagtgatacaactgagtctcgagggacgtgtgttccccagct

SEQ ID NO: 84419 - DNA, 201 bp, Homo sapiens
aggcctgggactgcatcttccagtacggcgacaactgtatccagaaaatctatcaggaactggccttcagccgccctcaacagtacaccagcatcgtggcrgagctcctgttgaatgcggaactgtcgccagatgccatcaaggccaactctatggaactcactgcagggagcgtggacacgacggtgtttcccttgctga

SEQ ID NO: 84420 - DNA, 201 bp, Homo sapiens
ctgggactgcatcttccagtacggcgacaactgtatccagaaaatctatcaggaactggccttcagccgccctcaacagtacaccagcatcgtggcggagstcctgttgaatgcggaactgtcgccagatgccatcaaggccaactctatggaactcactgcagggagcgtggacacgacggtgtttcccttgctgatgac

SEQ ID NO: 84421 - DNA, 201 bp, Homo sapiens
gctggctcggaaccccaacgtgcagcaggccctgcgccaggagagcctggccgccgcagccagcatcagtgaacatccccagaaggcaaccaccgagctgsccttgctgcgtgcggccctcaaggagaccttgcggctctaccctgtgggtctgtttctggagcgagtggcgagctcagacttggtgcttcagaactacca

SEQ ID NO: 84422 - DNA, 201 bp, Homo sapiens
tccagtcaagttccctcctgcagcctgacccctaggcagctcgagcatgccctgagctctctgaaagttgtcaccctggaatagggtcctgcagggtagamtaaaaaggcccctgtggtcacttgtcctgacatccccattttcaagtgatacaactgagtctcgagggacgtgtgttccccagctgatcgtgtcagcctc

SEQ ID NO: 84423 - DNA, 201 bp, Homo sapiens
gagcgtggacacgacggtgtttcccttgctgatgacgctctttgagctggctcggaaccccaacgtgcagcaggccctgcgccaggagagcctggccgccrcagccagcatcagtgaacatccccagaaggcaaccaccgagctgcccttgctgcgtgcggccctcaaggagaccttgcggctctaccctgtgggtctgtt

SEQ ID NO: 84424 - DNA, 201 bp, Homo sapiens
atcccagcatctcagagtccagtcaagttccctcctgcagcctgacccctaggcagctcgagcatgccctgagctctctgaaagttgtcaccctggaatasggtcctgcagggtagaataaaaaggcccctgtggtcacttgtcctgacatccccattttcaagtgatacaactgagtctcgagggacgtgtgttccccag

SEQ ID NO: 84425 - DNA, 201 bp, Homo sapiens
ctctatggaactcactgcagggagcgtggacacgacggtgtttcccttgctgatgacgctctttgagctggctcggaaccccaacgtgcagcaggccctgmgccaggagagcctggccgccgcagccagcatcagtgaacatccccagaaggcaaccaccgagctgcccttgctgcgtgcggccctcaaggagaccttgcg

SEQ ID NO: 84426 - DNA, 201 bp, Homo sapiens
ggtgtgcatggcagtgccctggctgtccctgcaaagggcacaggcactgggcacgagagccgcccgggtccccaggacagtgctgccctttgaagccatgycccggcgtccaggcaacaggtggctgaggctgctgcagatctggagggagcagggttatgaggacctgcacctggaagtacaccagaccttccaggaact

SEQ ID NO: 84427 - DNA, 201 bp, Homo sapiens
ttgggaggagcaggcatggtgtgtgtgatgctgccggaggacgtggagaagctgcaacaggtggacagcctgcatccccacaggatgagcctggagccctrggtggcctacagacaacatcgtgggcacaaatgtggcgtgttcttgctgaatgggcctgaatggcgcttcaaccgattgcggctgaatccagaagtgctg

SEQ ID NO: 84428 - DNA, 201 bp, Homo sapiens
gtccccagccccacctggccctttctccagcaagcactgtcctctgggcagtttgcccccatccctcccagtgctggctccaggctcctcgtgtggccatrcaagggtgctgtggttttgtcccttgccttcctgcctagtctcacatgtccctgttcctcttcccctggccagggcccctgcgcagactgtcagagtcat

SEQ ID NO: 84429 - DNA, 201 bp, Homo sapiens
ctgtctaaccagccccagcacaaatggaactcccgagggcctctaggaccagggtttgccaggctaagcagcaatgccagggcacagctggggaagatctkgctgaccttgtccccagccccacctggccctttctccagcaagcactgtcctctgggcagtttgcccccatccctcccagtgctggctccaggctcctcg

SEQ ID NO: 84430 - DNA, 201 bp, Homo sapiens
cccggcgtccaggcaacaggtggctgaggctgctgcagatctggagggagcagggttatgaggacctgcacctggaagtacaccagaccttccaggaactrgggcccattttcaggtacgacttgggaggagcaggcatggtgtgtgtgatgctgccggaggacgtggagaagctgcaacaggtggacagcctgcatcccc

SEQ ID NO: 84431 - DNA, 201 bp, Homo sapiens
tgcatggcagtgccctggctgtccctgcaaagggcacaggcactgggcacgagagccgcccgggtccccaggacagtgctgccctttgaagccatgccccrgcgtccaggcaacaggtggctgaggctgctgcagatctggagggagcagggttatgaggacctgcacctggaagtacaccagaccttccaggaactaggg

SEQ ID NO: 84432 - DNA, 201 bp, Homo sapiens
gccttgttcccgaggcctgagcgctataacccccagcgctggctagacatcaggggctccggcaggaacttctaccacgtgccctttggctttggcatgcrccagtgccttgggcggcgcctggcagaggcagagatgctgctgctgctgcaccatgtgctgaaacacctccaggtggagacactaacccaagaggacata

SEQ ID NO: 84433 - DNA, 201 bp, Homo sapiens
cgccttgttcccgaggcctgagcgctataacccccagcgctggctagacatcaggggctccggcaggaacttctaccacgtgccctttggctttggcatgygccagtgccttgggcggcgcctggcagaggcagagatgctgctgctgctgcaccatgtgctgaaacacctccaggtggagacactaacccaagaggacat

SEQ ID NO: 84434 - DNA, 201 bp, Homo sapiens
gagaccttgcggctctaccctgtgggtctgtttctggagcgagtggcgagctcagacttggtgcttcagaactaccacatcccagctgggacattggtgcrcgtgttcctctactctctgggtcgcaaccccgccttgttcccgaggcctgagcgctataacccccagcgctggctagacatcaggggctccggcaggaac

SEQ ID NO: 84435 - DNA, 201 bp, Homo sapiens
ggctgaggctgctgcagatctggagggagcagggttatgaggacctgcacctggaagtacaccagaccttccaggaactagggcccattttcaggtacgayttgggaggagcaggcatggtgtgtgtgatgctgccggaggacgtggagaagctgcaacaggtggacagcctgcatccccacaggatgagcctggagccct

SEQ ID NO: 84436 - DNA, 201 bp, Homo sapiens
aaccgattgcggctgaatccagaagtgctgtcgcccaacgctgtgcagaggttcctcccgatggtggatgcagtggccagggacttctcccaggccctgargaagaaggtgctgcagaacgcccgggggagcctgaccctggacgtccagcccagcatcttccactacaccatagaagccagcaacttggctctttttgga

SEQ ID NO: 84437 - DNA, 201 bp, Homo sapiens
accagccccaaggtgtggaaggagcactttgaggcctgggactgcatcttccagtacggcgacaactgtatccagaaaatctatcaggaactggccttcarccgccctcaacagtacaccagcatcgtggcggagctcctgttgaatgcggaactgtcgccagatgccatcaaggccaactctatggaactcactgcaggg

SEQ ID NO: 84438 - DNA, 201 bp, Homo sapiens
ccaccagcctccctttctgcctgaccccaggccacccctcttctctcccacatgcacagcttcctgagtcacccctctgtctaaccagccccagcacaaayggaactcccgagggcctctaggaccagggtttgccaggctaagcagcaatgccagggcacagctggggaagatcttgctgaccttgtccccagccccacc

SEQ ID NO: 84439 - DNA, 201 bp, Homo sapiens
caaggccaactctatggaactcactgcagggagcgtggacacgacggtgtttcccttgctgatgacgctctttgagctggctcggaaccccaacgtgcagyaggccctgcgccaggagagcctggccgccgcagccagcatcagtgaacatccccagaaggcaaccaccgagctgcccttgctgcgtgcggccctcaagga

SEQ ID NO: 84440 - DNA, 201 bp, Homo sapiens
ctgacccctaggcagctcgagcatgccctgagctctctgaaagttgtcaccctggaatagggtcctgcagggtagaataaaaaggcccctgtggtcacttrtcctgacatccccattttcaagtgatacaactgagtctcgagggacgtgtgttccccagctgatcgtgtcagcctcatgccccaggcctcatctttcatg

SEQ ID NO: 84441 - DNA, 201 bp, Homo sapiens; identical to SEQ ID NO: 84368

SEQ ID NO: 84442 - DNA, 201 bp, Homo sapiens; identical to SEQ ID NO: 84369

SEQ ID NO: 84443 - DNA, 201 bp, Homo sapiens; identical to SEQ ID NO: 84370

SEQ ID NO: 84444 - DNA, 201 bp, Homo sapiens
tagaataaaaagtctcgagggacgtgtgttccccagctgatcgtgtcagcctcatgccccaggcctcatctttcatggaccaggccttgttccaggagtgrgtgttgggtcctctgcttcctgtgctgtcccctggggaaggtcccgaggatgctgtcaggagatggaagagtcatgtggggtgggaacctggggtgtggt

SEQ ID NO: 84445 - DNA, 201 bp, Homo sapiens
cagggtagaataaaaagtctcgagggacgtgtgttccccagctgatcgtgtcagcctcatgccccaggcctcatctttcatggaccaggccttgttccagsagtgggtgttgggtcctctgcttcctgtgctgtcccctggggaaggtcccgaggatgctgtcaggagatggaagagtcatgtggggtgggaacctggggt

SEQ ID NO: 84446 - DNA, 201 bp, Homo sapiens
atagggtcctgcagggtagaataaaaagtctcgagggacgtgtgttccccagctgatcgtgtcagcctcatgccccaggcctcatctttcatggaccaggycttgttccaggagtgggtgttgggtcctctgcttcctgtgctgtcccctggggaaggtcccgaggatgctgtcaggagatggaagagtcatgtggggtgg

SEQ ID NO: 84447 - DNA, 201 bp, Homo sapiens; identical to SEQ ID NO: 84374

SEQ ID NO: 84448 - DNA, 201 bp, Homo sapiens; identical to SEQ ID NO: 84375

SEQ ID NO: 84449 - DNA, 201 bp, Homo sapiens; identical to SEQ ID NO: 84376

SEQ ID NO: 84450 - DNA, 201 bp, Homo sapiens; identical to SEQ ID NO: 84377

SEQ ID NO: 84451 - DNA, 201 bp, Homo sapiens; identical to SEQ ID NO: 84378

SEQ ID NO: 84452 - DNA, 201 bp, Homo sapiens; identical to SEQ ID NO: 84379

SEQ ID NO: 84453 - DNA, 201 bp, Homo sapiens; identical to SEQ ID NO: 84380

SEQ ID NO: 84454 - DNA, 201 bp, Homo sapiens
aaagttgtcaccctggaatagggtcctgcagggtagaataaaaagtctcgagggacgtgtgttccccagctgatcgtgtcagcctcatgccccaggcctcrtctttcatggaccaggccttgttccaggagtgggtgttgggtcctctgcttcctgtgctgtcccctggggaaggtcccgaggatgctgtcaggagatgga

SEQ ID NO: 84455 - DNA, 201 bp, Homo sapiens
ccctgagctctctgaaagttgtcaccctggaatagggtcctgcagggtagaataaaaagtctcgagggacgtgtgttccccagctgatcgtgtcagcctcrtgccccaggcctcatctttcatggaccaggccttgttccaggagtgggtgttgggtcctctgcttcctgtgctgtcccctggggaaggtcccgaggatgc

SEQ ID NO: 84456 - DNA, 201 bp, Homo sapiens
gctcgagcatgccctgagctctctgaaagttgtcaccctggaatagggtcctgcagggtagaataaaaagtctcgagggacgtgtgttccccagctgatcrtgtcagcctcatgccccaggcctcatctttcatggaccaggccttgttccaggagtgggtgttgggtcctctgcttcctgtgctgtcccctggggaaggt

SEQ ID NO: 84457 - DNA, 201 bp, Homo sapiens
ctgcagcctgacccctaggcagctcgagcatgccctgagctctctgaaagttgtcaccctggaatagggtcctgcagggtagaataaaaagtctcgagggrcgtgtgttccccagctgatcgtgtcagcctcatgccccaggcctcatctttcatggaccaggccttgttccaggagtgggtgttgggtcctctgcttcct

SEQ ID NO: 84458 - DNA, 162 bp, Homo sapiens; identical to SEQ ID NO: 84385

SEQ ID NO: 84459 - DNA, 201 bp, Homo sapiens; identical to SEQ ID NO: 84386

SEQ ID NO: 84460 - DNA, 201 bp, Homo sapiens
cattaagcgggatcccagcatctcagagtccagtcaagttccctcctgcagcctgacccctaggcagctcgagcatgccctgagctctctgaaagttgtcrccctggaatagggtcctgcagggtagaataaaaagtctcgagggacgtgtgttccccagctgatcgtgtcagcctcatgccccaggcctcatctttcatg

SEQ ID NO: 84461 - DNA, 201 bp, Homo sapiens; identical to SEQ ID NO: 84388

SEQ ID NO: 84462 - DNA, 201 bp, Homo sapiens; identical to SEQ ID NO: 84389

SEQ ID NO: 84463 - DNA, 201 bp, Homo sapiens
gaataaaaagtctcgagggacgtgtgttccccagctgatcgtgtcagcctcatgccccaggcctcatctttcatggaccaggccttgttccaggagtgggygttgggtcctctgcttcctgtgctgtcccctggggaaggtcccgaggatgctgtcaggagatggaagagtcatgtggggtgggaacctggggtgtggttc

SEQ ID NO: 84464 - DNA, 201 bp, Homo sapiens; identical to SEQ ID NO: 84391

SEQ ID NO: 84465 - DNA, 201 bp, Homo sapiens
tgttcctcttcccctggccagggcccctgcgcagactgtcagagtcattaagcgggatcccagcatctcagagtccagtcaagttccctcctgcagcctgmcccctaggcagctcgagcatgccctgagctctctgaaagttgtcaccctggaatagggtcctgcagggtagaataaaaagtctcgagggacgtgtgttcc

SEQ ID NO: 84466 - DNA, 201 bp, Homo sapiens; identical to SEQ ID NO: 84393

SEQ ID NO: 84467 - DNA, 201 bp, Homo sapiens; identical to SEQ ID NO: 84394

SEQ ID NO: 84468 - DNA, 201 bp, Homo sapiens; identical to SEQ ID NO: 84395

SEQ ID NO: 84469 - DNA, 201 bp, Homo sapiens; identical to SEQ ID NO: 84396

SEQ ID NO: 84470 - DNA, 201 bp, Homo sapiens; identical to SEQ ID NO: 84397

SEQ ID NO: 84471 - DNA, 201 bp, Homo sapiens; identical to SEQ ID NO: 84398

SEQ ID NO: 84472 - DNA, 201 bp, Homo sapiens; identical to SEQ ID NO: 84399

SEQ ID NO: 84473 - DNA, 201 bp, Homo sapiens; identical to SEQ ID NO: 84400

SEQ ID NO: 84474 - DNA, 201 bp, Homo sapiens; identical to SEQ ID NO: 84401

SEQ ID NO: 84475 - DNA, 201 bp, Homo sapiens; identical to SEQ ID NO: 84402

SEQ ID NO: 84476 - DNA, 201 bp, Homo sapiens; identical to SEQ ID NO: 84403

SEQ ID NO: 84477 - DNA, 201 bp, Homo sapiens; identical to SEQ ID NO: 84404

SEQ ID NO: 84478 - DNA, 201 bp, Homo sapiens; identical to SEQ ID NO: 84405

SEQ ID NO: 84479 - DNA, 201 bp, Homo sapiens; identical to SEQ ID NO: 84406

SEQ ID NO: 84480 - DNA, 106 bp, Homo sapiens; identical to SEQ ID NO: 84407

SEQ ID NO: 84481 - DNA, 201 bp, Homo sapiens; identical to SEQ ID NO: 84408

SEQ ID NO: 84482 - DNA, 201 bp, Homo sapiens; identical to SEQ ID NO: 84409

SEQ ID NO: 84483 - DNA, 136 bp, Homo sapiens; identical to SEQ ID NO: 84410

SEQ ID NO: 84484 - DNA, 201 bp, Homo sapiens; identical to SEQ ID NO: 84411

SEQ ID NO: 84485 - DNA, 201 bp, Homo sapiens; identical to SEQ ID NO: 84412

SEQ ID NO: 84486 - DNA, 201 bp, Homo sapiens; identical to SEQ ID NO: 84413

SEQ ID NO: 84487 - DNA, 201 bp, Homo sapiens; identical to SEQ ID NO: 84414

SEQ ID NO: 84488 - DNA, 201 bp, Homo sapiens; identical to SEQ ID NO: 84415

SEQ ID NO: 84489 - DNA, 201 bp, Homo sapiens; identical to SEQ ID NO: 84416

SEQ ID NO: 84490 - DNA, 201 bp, Homo sapiens; identical to SEQ ID NO: 84417

SEQ ID NO: 84491 - DNA, 201 bp, Homo sapiens
cccagcatctcagagtccagtcaagttccctcctgcagcctgacccctaggcagctcgagcatgccctgagctctctgaaagttgtcaccctggaataggrtcctgcagggtagaataaaaagtctcgagggacgtgtgttccccagctgatcgtgtcagcctcatgccccaggcctcatctttcatggaccaggccttgt

SEQ ID NO: 84492 - DNA, 201 bp, Homo sapiens; identical to SEQ ID NO: 84419

SEQ ID NO: 84493 - DNA, 201 bp, Homo sapiens; identical to SEQ ID NO: 84420

SEQ ID NO: 84494 - DNA, 201 bp, Homo sapiens; identical to SEQ ID NO: 84421

SEQ ID NO: 84495 - DNA, 201 bp, Homo sapiens
tccagtcaagttccctcctgcagcctgacccctaggcagctcgagcatgccctgagctctctgaaagttgtcaccctggaatagggtcctgcagggtagamtaaaaagtctcgagggacgtgtgttccccagctgatcgtgtcagcctcatgccccaggcctcatctttcatggaccaggccttgttccaggagtgggtgt

SEQ ID NO: 84496 - DNA, 201 bp, Homo sapiens; identical to SEQ ID NO: 84423

SEQ ID NO: 84497 - DNA, 201 bp, Homo sapiens
atcccagcatctcagagtccagtcaagttccctcctgcagcctgacccctaggcagctcgagcatgccctgagctctctgaaagttgtcaccctggaatasggtcctgcagggtagaataaaaagtctcgagggacgtgtgttccccagctgatcgtgtcagcctcatgccccaggcctcatctttcatggaccaggcctt

SEQ ID NO: 84498 - DNA, 201 bp, Homo sapiens; identical to SEQ ID NO: 84425

SEQ ID NO: 84499 - DNA, 201 bp, Homo sapiens; identical to SEQ ID NO: 84426

SEQ ID NO: 84500 - DNA, 201 bp, Homo sapiens; identical to SEQ ID NO: 84427

SEQ ID NO: 84501 - DNA, 201 bp, Homo sapiens; identical to SEQ ID NO: 84428

SEQ ID NO: 84502 - DNA, 201 bp, Homo sapiens; identical to SEQ ID NO: 84429

SEQ ID NO: 84503 - DNA, 201 bp, Homo sapiens; identical to SEQ ID NO: 84430

SEQ ID NO: 84504 - DNA, 201 bp, Homo sapiens; identical to SEQ ID NO: 84431

SEQ ID NO: 84505 - DNA, 201 bp, Homo sapiens; identical to SEQ ID NO: 84432

SEQ ID NO: 84506 - DNA, 201 bp, Homo sapiens; identical to SEQ ID NO: 84433

SEQ ID NO: 84507 - DNA, 201 bp, Homo sapiens; identical to SEQ ID NO: 84434

SEQ ID NO: 84508 - DNA, 201 bp, Homo sapiens; identical to SEQ ID NO: 84435

SEQ ID NO: 84509 - DNA, 201 bp, Homo sapiens; identical to SEQ ID NO: 84436

SEQ ID NO: 84510 - DNA, 201 bp, Homo sapiens; identical to SEQ ID NO: 84437

SEQ ID NO: 84511 - DNA, 201 bp, Homo sapiens; identical to SEQ ID NO: 84438

SEQ ID NO: 84512 - DNA, 201 bp, Homo sapiens; identical to SEQ ID NO: 84439

SEQ ID NO: 84513 - DNA, 201 bp, Homo sapiens; identical to SEQ ID NO: 84368

SEQ ID NO: 84514 - DNA, 201 bp, Homo sapiens; identical to SEQ ID NO: 84369

SEQ ID NO: 84515 - DNA, 201 bp, Homo sapiens; identical to SEQ ID NO: 84370

SEQ ID NO: 84516 - DNA, 201 bp, Homo sapiens; identical to SEQ ID NO: 84371

SEQ ID NO: 84517 - DNA, 201 bp, Homo sapiens; identical to SEQ ID NO: 84372

SEQ ID NO: 84518 - DNA, 201 bp, Homo sapiens; identical to SEQ ID NO: 84373

SEQ ID NO: 84519 - DNA, 201 bp, Homo sapiens; identical to SEQ ID NO: 84374

SEQ ID NO: 84520 - DNA, 201 bp, Homo sapiens; identical to SEQ ID NO: 84375

SEQ ID NO: 84521 - DNA, 201 bp, Homo sapiens; identical to SEQ ID NO: 84376

SEQ ID NO: 84522 - DNA, 201 bp, Homo sapiens; identical to SEQ ID NO: 84377

SEQ ID NO: 84523 - DNA, 201 bp, Homo sapiens; identical to SEQ ID NO: 84378

SEQ ID NO: 84524 - DNA, 201 bp, Homo sapiens; identical to SEQ ID NO: 84379

SEQ ID NO: 84525 - DNA, 201 bp, Homo sapiens; identical to SEQ ID NO: 84380

SEQ ID NO: 84526 - DNA, 201 bp, Homo sapiens; identical to SEQ ID NO: 84381

SEQ ID NO: 84527 - DNA, 201 bp, Homo sapiens; identical to SEQ ID NO: 84382

SEQ ID NO: 84528 - DNA, 201 bp, Homo sapiens; identical to SEQ ID NO: 84383

SEQ ID NO: 84529 - DNA, 201 bp, Homo sapiens; identical to SEQ ID NO: 84384

SEQ ID NO: 84530 - DNA, 162 bp, Homo sapiens; identical to SEQ ID NO: 84385

SEQ ID NO: 84531 - DNA, 201 bp, Homo sapiens; identical to SEQ ID NO: 84386

SEQ ID NO: 84532 - DNA, 201 bp, Homo sapiens; identical to SEQ ID NO: 84387

SEQ ID NO: 84533 - DNA, 201 bp, Homo sapiens; identical to SEQ ID NO: 84388

SEQ ID NO: 84534 - DNA, 201 bp, Homo sapiens; identical to SEQ ID NO: 84389

SEQ ID NO: 84535 - DNA, 201 bp, Homo sapiens; identical to SEQ ID NO: 84390

SEQ ID NO: 84536 - DNA, 201 bp, Homo sapiens; identical to SEQ ID NO: 84391

SEQ ID NO: 84537 - DNA, 201 bp, Homo sapiens; identical to SEQ ID NO: 84392

SEQ ID NO: 84538 - DNA, 201 bp, Homo sapiens; identical to SEQ ID NO: 84393

SEQ ID NO: 84539 - DNA, 201 bp, Homo sapiens; identical to SEQ ID NO: 84394

SEQ ID NO: 84540 - DNA, 201 bp, Homo sapiens; identical to SEQ ID NO: 84395

SEQ ID NO: 84541 - DNA, 201 bp, Homo sapiens; identical to SEQ ID NO: 84396

SEQ ID NO: 84542 - DNA, 201 bp, Homo sapiens; identical to SEQ ID NO: 84397

SEQ ID NO: 84543 - DNA, 201 bp, Homo sapiens; identical to SEQ ID NO: 84398

SEQ ID NO: 84544 - DNA, 201 bp, Homo sapiens; identical to SEQ ID NO: 84399

SEQ ID NO: 84545 - DNA, 201 bp, Homo sapiens; identical to SEQ ID NO: 84400

SEQ ID NO: 84546 - DNA, 201 bp, Homo sapiens; identical to SEQ ID NO: 84401

SEQ ID NO: 84547 - DNA, 201 bp, Homo sapiens; identical to SEQ ID NO: 84402

SEQ ID NO: 84548 - DNA, 201 bp, Homo sapiens; identical to SEQ ID NO: 84403

SEQ ID NO: 84549 - DNA, 201 bp, Homo sapiens; identical to SEQ ID NO: 84404

SEQ ID NO: 84550 - DNA, 201 bp, Homo sapiens; identical to SEQ ID NO: 84405

SEQ ID NO: 84551 - DNA, 201 bp, Homo sapiens; identical to SEQ ID NO: 84406

SEQ ID NO: 84552 - DNA, 106 bp, Homo sapiens; identical to SEQ ID NO: 84407

SEQ ID NO: 84553 - DNA, 201 bp, Homo sapiens; identical to SEQ ID NO: 84408

SEQ ID NO: 84554 - DNA, 201 bp, Homo sapiens; identical to SEQ ID NO: 84409

SEQ ID NO: 84555 - DNA, 136 bp, Homo sapiens; identical to SEQ ID NO: 84410

SEQ ID NO: 84556 - DNA, 201 bp, Homo sapiens; identical to SEQ ID NO: 84411

SEQ ID NO: 84557 - DNA, 201 bp, Homo sapiens; identical to SEQ ID NO: 84412

SEQ ID NO: 84558 - DNA, 201 bp, Homo sapiens; identical to SEQ ID NO: 84413

SEQ ID NO: 84559 - DNA, 201 bp, Homo sapiens; identical to SEQ ID NO: 84414

SEQ ID NO: 84560 - DNA, 201 bp, Homo sapiens; identical to SEQ ID NO: 84415

SEQ ID NO: 84561 - DNA, 201 bp, Homo sapiens; identical to SEQ ID NO: 84416

SEQ ID NO: 84562 - DNA, 201 bp, Homo sapiens; identical to SEQ ID NO: 84417

SEQ ID NO: 84563 - DNA, 201 bp, Homo sapiens; identical to SEQ ID NO: 84418

SEQ ID NO: 84564 - DNA, 201 bp, Homo sapiens; identical to SEQ ID NO: 84419

SEQ ID NO: 84565 - DNA, 201 bp, Homo sapiens; identical to SEQ ID NO: 84420

SEQ ID NO: 84566 - DNA, 201 bp, Homo sapiens; identical to SEQ ID NO: 84421

SEQ ID NO: 84567 - DNA, 201 bp, Homo sapiens; identical to SEQ ID NO: 84422

SEQ ID NO: 84568 - DNA, 201 bp, Homo sapiens; identical to SEQ ID NO: 84423

SEQ ID NO: 84569 - DNA, 201 bp, Homo sapiens; identical to SEQ ID NO: 84424

SEQ ID NO: 84570 - DNA, 201 bp, Homo sapiens; identical to SEQ ID NO: 84425

SEQ ID NO: 84571 - DNA, 201 bp, Homo sapiens; identical to SEQ ID NO: 84426

SEQ ID NO: 84572 - DNA, 201 bp, Homo sapiens; identical to SEQ ID NO: 84427

SEQ ID NO: 84573 - DNA, 201 bp, Homo sapiens; identical to SEQ ID NO: 84428

SEQ ID NO: 84574 - DNA, 201 bp, Homo sapiens; identical to SEQ ID NO: 84429

SEQ ID NO: 84575 - DNA, 201 bp, Homo sapiens; identical to SEQ ID NO: 84430

SEQ ID NO: 84576 - DNA, 201 bp, Homo sapiens; identical to SEQ ID NO: 84431

SEQ ID NO: 84577 - DNA, 201 bp, Homo sapiens; identical to SEQ ID NO: 84432

SEQ ID NO: 84578 - DNA, 201 bp, Homo sapiens; identical to SEQ ID NO: 84433

SEQ ID NO: 84579 - DNA, 201 bp, Homo sapiens; identical to SEQ ID NO: 84434

SEQ ID NO: 84580 - DNA, 201 bp, Homo sapiens; identical to SEQ ID NO: 84435

SEQ ID NO: 84581 - DNA, 201 bp, Homo sapiens; identical to SEQ ID NO: 84436

SEQ ID NO: 84582 - DNA, 201 bp, Homo sapiens; identical to SEQ ID NO: 84437

SEQ ID NO: 84583 - DNA, 201 bp, Homo sapiens; identical to SEQ ID NO: 84438

SEQ ID NO: 84584 - DNA, 201 bp, Homo sapiens; identical to SEQ ID NO: 84439

SEQ ID NO: 84585 - DNA, 201 bp, Homo sapiens; identical to SEQ ID NO: 84440

SEQ ID NO: 84586 - DNA, 201 bp, Homo sapiens
aaggtcatcatctctgccccctctgtcgacgtccccatgtttgtaatgggtgtgaaccatgagaagtacaaaaacggcctcaagattgtcagtaatgcctyctgtaccaccaattgctcagttcccctggccaaggtcatccatgacaattctggcatcatggaagaattcatgaccacagtccatgccatcacggacacc

SEQ ID NO: 84587 - DNA, 149 bp, Homo sapiens
aaggtcatccctgagctgaacaggaaggtcactggcatgatcttccatgtctcccaccaccactgtgtctgtcagtcatggatctgatctgctatctagaraaacctggcaaatataatgacatcaagaaggtagtgaaacaggctacg

SEQ ID NO: 84588 - DNA, 201 bp, Homo sapiens
gcggcagcgactgctgctgcggatgggagggggccggctcggcgcgcccatggagcgccacggcagggcttccgccacctccgtctcgtcggctggggagyaggcggccggggaccccgaagggcggcggcaggagccactgcggcgccgggcgagcagcgcgtcggtgcccgcggtcggggcctcggctgagggcacgag

SEQ ID NO: 84589 - DNA, 201 bp, Homo sapiens
ggcggcggcaggagccactgcggcgccgggcgagcagcgcgtcggtgcccgcggtcggggcctcggctgagggcacgaggcgggatcgactgggctcttasagcggccccacctcggtctcccgccagcgcgtcgaaagcctgaggaaaaagcggccgctttttccatggtttggactggatatcggtggaactctggtca

SEQ ID NO: 84590 - DNA, 201 bp, Homo sapiens
cgtcgaaagcctgaggaaaaagcggccgctttttccatggtttggactggatatcggtggaactctggtcaagctggtatattttgaacccaaagacatcrctgctgaagaagaagaggaagaagtggaaagtcttaaaagcattcggaagtacctgacctccaatgtggcttatgggtctacaggcattcgggacgtgca

SEQ ID NO: 84591 - DNA, 201 bp, Homo sapiens
agcgtacaaatttgagcaggattttctcacaataggtgatcttcagctttgcaaactggatgaactagattgcttgatcaaaggaattttatacattgacycagtcggattcaatggacggtcacagtgctattactttgaaaaccctgctgattctgaaaagtgtcagaagttaccatttgatttgaaaaatccgtatcc

SEQ ID NO: 84592 - DNA, 201 bp, Homo sapiens
caaagacatcactgctgaagaagaagaggaagaagtggaaagtcttaaaagcattcggaagtacctgacctccaatgtggcttatgggtctacaggcattygggacgtgcacctcgagctgaaggacctgactctgtgtggacgcaaaggcaatctgcactttatacgctttcccactcatgacatgcctgcttttattca

SEQ ID NO: 84593 - DNA, 201 bp, Homo sapiens
gagcaggattttctcacaataggtgatcttcagctttgcaaactggatgaactagattgcttgatcaaaggaattttatacattgactcagtcggattcartggacggtcacagtgctattactttgaaaaccctgctgattctgaaaagtgtcagaagttaccatttgatttgaaaaatccgtatcctctgcttctggtg

SEQ ID NO: 84594 - DNA, 201 bp, Homo sapiens
tcttaaaagcattcggaagtacctgacctccaatgtggcttatgggtctacaggcattcgggacgtgcacctcgagctgaaggacctgactctgtgtggaygcaaaggcaatctgcactttatacgctttcccactcatgacatgcctgcttttattcaaatgggcagagataaaaacttctcgagtctccacactgtctt

SEQ ID NO: 84595 - DNA, 201 bp, Homo sapiens
tcggaagtacctgacctccaatgtggcttatgggtctacaggcattcgggacgtgcacctcgagctgaaggacctgactctgtgtggacgcaaaggcaatstgcactttatacgctttcccactcatgacatgcctgcttttattcaaatgggcagagataaaaacttctcgagtctccacactgtcttttgtgccactgg

SEQ ID NO: 84596 - DNA, 201 bp, Homo sapiens
tttttttggtctctgctgtcttcttactggctgtaccacttttgaagaagctcttgaaatggcatctcgtggagatagcaccaaagtggataaactagtaygagatatttatggaggggactatgagaggtttggactgccaggctgggctgtggcttcaagctttggaaacatgatgagcaaggagaagcgagaggctgt

SEQ ID NO: 84597 - DNA, 201 bp, Homo sapiens
gacctccaatgtggcttatgggtctacaggcattcgggacgtgcacctcgagctgaaggacctgactctgtgtggacgcaaaggcaatctgcactttataygctttcccactcatgacatgcctgcttttattcaaatgggcagagataaaaacttctcgagtctccacactgtcttttgtgccactggaggtggagcgta

SEQ ID NO: 84598 - DNA, 189 bp, Homo sapiens
tctggctggactgccgcggaggaggcgagaaggaatccgacgctggggggcttgctcgggcggcagcgactgctgctgcggatgggagsgggccggctcggcgcgcccatggagcgccacggcagggcttccgccacctccgtctcgtcggctggggagcaggcggccggggaccccgaagggcggcgg

SEQ ID NO: 84599 - DNA, 201 bp, Homo sapiens
cttttgtgccactggaggtggagcgtacaaatttgagcaggattttctcacaataggtgatcttcagctttgcaaactggatgaactagattgcttgatcwaaggaattttatacattgactcagtcggattcaatggacggtcacagtgctattactttgaaaaccctgctgattctgaaaagtgtcagaagttaccatt

SEQ ID NO: 84600 - DNA, 201 bp, Homo sapiens; identical to SEQ ID NO: 84591

SEQ ID NO: 84601 - DNA, 201 bp, Homo sapiens
cggaactaggccgagggacaaaggctaagtttttccatggtttggactggatatcggtggaactctggtcaagctggtatattttgaacccaaagacatcrctgctgaagaagaagaggaagaagtggaaagtcttaaaagcattcggaagtacctgacctccaatgtggcttatgggtctacaggcattcgggacgtgca

SEQ ID NO: 84602 - DNA, 201 bp, Homo sapiens; identical to SEQ ID NO: 84593

SEQ ID NO: 84603 - DNA, 201 bp, Homo sapiens; identical to SEQ ID NO: 84592

SEQ ID NO: 84604 - DNA, 201 bp, Homo sapiens; identical to SEQ ID NO: 84594

SEQ ID NO: 84605 - DNA, 201 bp, Homo sapiens; identical to SEQ ID NO: 84596

SEQ ID NO: 84606 - DNA, 201 bp, Homo sapiens; identical to SEQ ID NO: 84595

SEQ ID NO: 84607 - DNA, 201 bp, Homo sapiens; identical to SEQ ID NO: 84597

SEQ ID NO: 84608 - DNA, 201 bp, Homo sapiens; identical to SEQ ID NO: 84599

SEQ ID NO: 84609 - DNA, 201 bp, Homo sapiens
ctacaagcaatccattgaccacttacttggtgctgcacacaaatgttggtgctatgggacccaaagatgagcaattagtattccagtcttcattgcctgtrcttacaaaagaagacctcacttccctaaacatctagttatggcggctcaagcccgtacctgcctacagagaagtgtctgcagttactcactattagtttc

SEQ ID NO: 84610 - DNA, 201 bp, Homo sapiens
atcaggcttcacctccaaggacacctatctaagccattttaaccctcgggattacctagaaaaatattacaagtttggttctaggcactctgcagaaagcmagattcttaagcaccttctgaaaaatcttttcaagatattctgcctagacggtgtgaagggagacctgctgattgacatcggctctggccccactatcta

SEQ ID NO: 84611 - DNA, 201 bp, Homo sapiens
agggcagtgctccagtggtacagaagtgagacataatggaatcaggcttcacctccaaggacacctatctaagccattttaaccctcgggattacctagaraaatattacaagtttggttctaggcactctgcagaaagccagattcttaagcaccttctgaaaaatcttttcaagatattctgcctagacggtgtgaagg

SEQ ID NO: 84612 - DNA, 201 bp, Homo sapiens
ctccagcctccccctgggccgggaggcagtagaggctgctgtgaaagaggctggctacacaatcgaatggtttgaggtgatctcgcaaagttattcttccmccatggccaacaacgaaggacttttctccctggtggcgaggaagctgagcagacccctgtgatgcctgtgacctcaattaaagcaattcctttgacctgt

SEQ ID NO: 84613 - DNA, 201 bp, Homo sapiens
cctcaattaaagcaattcctttgacctgtccagttgactttagtccttgtttctaactgccaagtcatgtgctgagtagaggctcagtggttggggcccartggttcatctaggacgggactagagaggtcagtctacaagcaatccattgaccacttacttggtgctgcacacaaatgttggtgctatgggacccaaaga

SEQ ID NO: 84614 - DNA, 201 bp, Homo sapiens
tggggtcgcggcggcgcgggcgctgggggagaggagtgtggtcttcagcatagagtgagcttctagtgacacgagctggagggaaagaggaagtgcatcakgacggctcgtccaatggacaagaagggctgaactgatggaaggaatgctgttagcctgagactcaggaagacaacttctgcagggtcactccctggcttc

SEQ ID NO: 84615 - DNA, 201 bp, Homo sapiens; identical to SEQ ID NO: 84609

SEQ ID NO: 84616 - DNA, 201 bp, Homo sapiens; identical to SEQ ID NO: 84610

SEQ ID NO: 84617 - DNA, 201 bp, Homo sapiens; identical to SEQ ID NO: 84611

SEQ ID NO: 84618 - DNA, 201 bp, Homo sapiens
ttcatggcaagaacgagaagaatgatggtgcttgttaggggatgtcctgtctctctgaactttggggtcctatgcattaaataattttcctgacgagctcwagtgctccctctggtctacaatccctggcggctggccttcatcccttgggcaagcattgcatacagctcatggccctccctctaccataccctccacccc

SEQ ID NO: 84619 - DNA, 201 bp, Homo sapiens; identical to SEQ ID NO: 84613

SEQ ID NO: 84620 - DNA, 201 bp, Homo sapiens
tttttttcctttcttttacatgtttaaatttaaaccattcttcgtgaccccttttcttgggagattcatggcaagaacgagaagaatgatggtgcttgttrggggatgtcctgtctctctgaactttggggtcctatgcattaaataattttcctgacgagctcaagtgctccctctggtctacaatccctggcggctggc

SEQ ID NO: 84621 - DNA, 201 bp, Homo sapiens
ttaaaattactctttccagacttcatctgagactccttcttcagccaacattccttagccctgaatacatttcctatcctcatctttcccttctttttttycctttcttttacatgtttaaatttaaaccattcttcgtgaccccttttcttgggagattcatggcaagaacgagaagaatgatggtgcttgttaggggat

SEQ ID NO: 84622 - DNA, 201 bp, Homo sapiens; identical to SEQ ID NO: 84612

SEQ ID NO: 84623 - DNA, 201 bp, Homo sapiens
tggggtcgcggcggcgcgggcgctgggggagaggagtgtggtcttcagcatagagtgagcttctagtgacacgagctggagggaaagaggaagtgcatcakgacggctcgtccaatggacaaggaacgtgtgaacagaggaaacctgtgccctttccctgggcatagcctagaaagtgtcaagactccagactcatctcta

SEQ ID NO: 84624 - DNA, 201 bp, Homo sapiens; identical to SEQ ID NO: 84609

SEQ ID NO: 84625 - DNA, 201 bp, Homo sapiens; identical to SEQ ID NO: 84610

SEQ ID NO: 84626 - DNA, 201 bp, Homo sapiens; identical to SEQ ID NO: 84611

SEQ ID NO: 84627 - DNA, 201 bp, Homo sapiens; identical to SEQ ID NO: 84612

SEQ ID NO: 84628 - DNA, 201 bp, Homo sapiens; identical to SEQ ID NO: 84613

SEQ ID NO: 84629 - DNA, 201 bp, Homo sapiens
gtagccctggagagaggaaaaggtatttacttatgggatgtagaaggcagaaaatattttgacttcctgagttcttacagtgctgtcaaccaagggcattktcaccccaagattgtgaatgctctgaagagtcaagtggacaaattgaccttaacatctagagctttctataataacgtacttggtgaatatgaggagtat

SEQ ID NO: 84630 - DNA, 201 bp, Homo sapiens
atggttaagtgtatataaaatactaatattaagtaaacttcatattggccaacaccagggttgtattctatggatgtcattattttgaattaagaattagygtttaacattcctaaattgttttgagtgcttgattataatttgtaaaaaatgtttattttcaatacttctttaaatttaaaataaagcttatatttcaaa

SEQ ID NO: 84631 - DNA, 201 bp, Homo sapiens
ttgctgaaaatgcagacaaattgggcattatcttgagaaatgaactcatgaagctaccttctgatgttgtaactgccgtaagaggaaaaggattattaaaygctattgtcattaaagaaaccaaagattgggatgcttggaaggtgtgtctacgacttcgagataatggacttctggccaagccaacccatggcgacatta

SEQ ID NO: 84632 - DNA, 201 bp, Homo sapiens
atcctttacctgtagccctggagagaggaaaaggtatttacttatgggatgtagaaggcagaaaatattttgacttcctgagttcttacagtgctgtcaamcaagggcattgtcaccccaagattgtgaatgctctgaagagtcaagtggacaaattgaccttaacatctagagctttctataataacgtacttggtgaat

SEQ ID NO: 84633 - DNA, 201 bp, Homo sapiens
tcctttacctgtagccctggagagaggaaaaggtatttacttatgggatgtagaaggcagaaaatattttgacttcctgagttcttacagtgctgtcaacsaagggcattgtcaccccaagattgtgaatgctctgaagagtcaagtggacaaattgaccttaacatctagagctttctataataacgtacttggtgaata

SEQ ID NO: 84634 - DNA, 201 bp, Homo sapiens
atccaggttacctaatgggagtgcgagagctctgcaccaggcaccaggttctctttattgctgatgaaatacagacaggattggccagaactggtagatgrctggctgttgattatgaaaatgtcagacctgatatagtcctccttggaaaggccctttctgggggcttataccctgtgtctgcagtgctgtgtgatgatg

SEQ ID NO: 84635 - DNA, 201 bp, Homo sapiens
acctgatatagtcctccttggaaaggccctttctgggggcttataccctgtgtctgcagtgctgtgtgatgatgacatcatgctgaccattaagccagggragcatgggtccacatacggtggcaatccactaggctgccgagtggccatcgcagcccttgaggttttagaagaagaaaaccttgctgaaaatgcagacaa

SEQ ID NO: 84636 - DNA, 168 bp, Homo sapiens
ttacggaagcagaaccttccttacagtaacgtgcagatctgtggtttttctacttgaaggacacaatrttttccaaactagcacatttgcagaggtttgctgtacttagtcgcggagttcattcttcagtggcttctgctacatctgttgcaactaaaaaaacagtcc

SEQ ID NO: 84637 - DNA, 123 bp, Homo sapiens
ttacggaagcagaaccttccttmcagtaacgtgcagatctgtggtttttctacttgaaggacacaatgttttccaaactagcacatttgcagaggtttgctgtacttagtcgcggagttcatt

SEQ ID NO: 84638 - DNA, 201 bp, Homo sapiens
actgccgtaagaggaaaaggattattaaatgctattgtcattaaagaaaccaaagattgggatgcttggaaggtgtgtctacgacttcgagataatggacytctggccaagccaacccatggcgacattatcaggtttgcgcctccgctggtgatcaaggaggatgagcttcgagagtccattgaaattattaacaagacc

SEQ ID NO: 84639 - DNA, 201 bp, Homo sapiens
gcaactaaaaaaacagtccaaggccctccaacctctgatgacatttttgaaagggaatataagtatggtgcacacaactaccatcctttacctgtagcccyggagagaggaaaaggtatttacttatgggatgtagaaggcagaaaatattttgacttcctgagttcttacagtgctgtcaaccaagggcattgtcacccc

SEQ ID NO: 84640 - DNA, 201 bp, Homo sapiens
ggtgaatatgaggagtatattactaaacttttcaactaccacaaagttcttcctatgaatacaggagtggaggctggagagactgcctgtaaactagctcktaagtggggctataccgtgaagggcattcagaaatacaaagcaaagattgtttttgcagctgggaacttctggggtaggacgttgtctgctatctccagt

SEQ ID NO: 84641 - DNA, 201 bp, Homo sapiens
ccctataatgatctgcccgcactggagcgtgctcttcaggatccaaatgtggctgcgttcatggtagaaccaattcagggtgaagcaggcgttgttgttcyggatccaggttacctaatgggagtgcgagagctctgcaccaggcaccaggttctctttattgctgatgaaatacagacaggattggccagaactggtaga

SEQ ID NO: 84642 - DNA, 201 bp, Homo sapiens
ctggagagactgcctgtaaactagctcgtaagtggggctataccgtgaagggcattcagaaatacaaagcaaagattgtttttgcagctgggaacttctgrggtaggacgttgtctgctatctccagttccacagacccaaccagttacgatggttttggaccatttatgccgggattcgacatcattccctataatgatc

SEQ ID NO: 84643 - DNA, 201 bp, Homo sapiens
ttccactcccatgagtcttcaaaaactttttttttgaatatatttttttcagttgatacataatagaacaacgtttatgaacctgccgtttgctttgtaaygtaactaaataatgtaatggcatctatattcagttgaagtgttttgatgtgcatgtgtacttcctaaggtgaaatgcatctatatacagacagcctctaa

SEQ ID NO: 84644 - DNA, 201 bp, Homo sapiens
ctgcccgcactggagcgtgctcttcaggatccaaatgtggctgcgttcatggtagaaccaattcagggtgaagcaggcgttgttgttccggatccaggttrcctaatgggagtgcgagagctctgcaccaggcaccaggttctctttattgctgatgaaatacagacaggattggccagaactggtagatggctggctgtt

SEQ ID NO: 84645 - DNA, 201 bp, Homo sapiens
gagactgcctgtaaactagctcgtaagtggggctataccgtgaagggcattcagaaatacaaagcaaagattgtttttgcagctgggaacttctggggtasgacgttgtctgctatctccagttccacagacccaaccagttacgatggttttggaccatttatgccgggattcgacatcattccctataatgatctgccc

SEQ ID NO: 84646 - DNA, 201 bp, Homo sapiens
tggtgaatatgaggagtatattactaaacttttcaactaccacaaagttcttcctatgaatacaggagtggaggctggagagactgcctgtaaactagctygtaagtggggctataccgtgaagggcattcagaaatacaaagcaaagattgtttttgcagctgggaacttctggggtaggacgttgtctgctatctccag

SEQ ID NO: 84647 - DNA, 201 bp, Homo sapiens
gggtccacatacggtggcaatccactaggctgccgagtggccatcgcagcccttgaggttttagaagaagaaaaccttgctgaaaatgcagacaaattggrcattatcttgagaaatgaactcatgaagctaccttctgatgttgtaactgccgtaagaggaaaaggattattaaatgctattgtcattaaagaaaccaaa

SEQ ID NO: 84648 - DNA, 201 bp, Homo sapiens
acttctggggtaggacgttgtctgctatctccagttccacagacccaaccagttacgatggttttggaccatttatgccgggattcgacatcattccctawaatgatctgcccgcactggagcgtgctcttcaggatccaaatgtggctgcgttcatggtagaaccaattcagggtgaagcaggcgttgttgttccggatc

SEQ ID NO: 84649 - DNA, 201 bp, Homo sapiens
cgtgctcttcaggatccaaatgtggctgcgttcatggtagaaccaattcagggtgaagcaggcgttgttgttccggatccaggttacctaatgggagtgcsagagctctgcaccaggcaccaggttctctttattgctgatgaaatacagacaggattggccagaactggtagatggctggctgttgattatgaaaatgtc

SEQ ID NO: 84650 - DNA, 201 bp, Homo sapiens
tttatgccgggattcgacatcattccctataatgatctgcccgcactggagcgtgctcttcaggatccaaatgtggctgcgttcatggtagaaccaattcrgggtgaagcaggcgttgttgttccggatccaggttacctaatgggagtgcgagagctctgcaccaggcaccaggttctctttattgctgatgaaatacag

SEQ ID NO: 84651 - DNA, 201 bp, Homo sapiens
gaaaccaaagattgggatgcttggaaggtgtgtctacgacttcgagataatggacttctggccaagccaacccatggcgacattatcaggtttgcgcctcygctggtgatcaaggaggatgagcttcgagagtccattgaaattattaacaagaccatcttgtctttctgagggtagccagctgttttcagtggtccctgg

SEQ ID NO: 84652 - DNA, 201 bp, Homo sapiens
gttgttgttccggatccaggttacctaatgggagtgcgagagctctgcaccaggcaccaggttctctttattgctgatgaaatacagacaggattggccaraactggtagatggctggctgttgattatgaaaatgtcagacctgatatagtcctccttggaaaggccctttctgggggcttataccctgtgtctgcagtg

SEQ ID NO: 84653 - DNA, 201 bp, Homo sapiens
ggtgtgtctacgacttcgagataatggacttctggccaagccaacccatggcgacattatcaggtttgcgcctccgctggtgatcaaggaggatgagcttygagagtccattgaaattattaacaagaccatcttgtctttctgagggtagccagctgttttcagtggtccctgggagccagctggagacaggtggtcctg

SEQ ID NO: 84654 - DNA, 201 bp, Homo sapiens
ccaagccaacccatggcgacattatcaggtttgcgcctccgctggtgatcaaggaggatgagcttcgagagtccattgaaattattaacaagaccatcttbtctttctgagggtagccagctgttttcagtggtccctgggagccagctggagacaggtggtcctgtaaaagctttattcctaatgtgggcacattccact

SEQ ID NO: 84655 - DNA, 201 bp, Homo sapiens
gtaaaagctttattcctaatgtgggcacattccactcccatgagtcttcaaaaactttttttttgaatatatttttttcagttgatacataatagaacaacgtttatgaacctgccgtttgctttgtaacgtaactaaataatgtaatggcatctatattcagttgaagtgttttgatgtgcatgtgtacttcctaaggtg

SEQ ID NO: 84656 - DNA, 201 bp, Homo sapiens
tgatatagtcctccttggaaaggccctttctgggggcttataccctgtgtctgcagtgctgtgtgatgatgacatcatgctgaccattaagccaggggagyatgggtccacatacggtggcaatccactaggctgccgagtggccatcgcagcccttgaggttttagaagaagaaaaccttgctgaaaatgcagacaaatt

SEQ ID NO: 84657 - DNA, 201 bp, Homo sapiens
tacaaagcaaagattgtttttgcagctgggaacttctggggtaggacgttgtctgctatctccagttccacagacccaaccagttacgatggttttggacmatttatgccgggattcgacatcattccctataatgatctgcccgcactggagcgtgctcttcaggatccaaatgtggctgcgttcatggtagaaccaatt

SEQ ID NO: 84658 - DNA, 201 bp, Homo sapiens
tgtaactgccgtaagaggaaaaggattattaaatgctattgtcattaaagaaaccaaagattgggatgcttggaaggtgtgtctacgacttcgagataatkgacttctggccaagccaacccatggcgacattatcaggtttgcgcctccgctggtgatcaaggaggatgagcttcgagagtccattgaaattattaacaa

SEQ ID NO: 84659 - DNA, 201 bp, Homo sapiens; identical to SEQ ID NO: 84629

SEQ ID NO: 84660 - DNA, 198 bp, Homo sapiens
atggttaagtgtatataaaatactaatattaagtaaacttcatattggccaacaccagggttgtattctatggatgtcattattttgaattaagaattagygtttaacattcctaaattgttttgagtgcttgattataatttgtaaaaaatgtttattttcaatacttctttaaatttaaaataaagcttatatttc

SEQ ID NO: 84661 - DNA, 201 bp, Homo sapiens; identical to SEQ ID NO: 84631

SEQ ID NO: 84662 - DNA, 201 bp, Homo sapiens; identical to SEQ ID NO: 84632

SEQ ID NO: 84663 - DNA, 201 bp, Homo sapiens; identical to SEQ ID NO: 84633

SEQ ID NO: 84664 - DNA, 201 bp, Homo sapiens; identical to SEQ ID NO: 84634

SEQ ID NO: 84665 - DNA, 201 bp, Homo sapiens; identical to SEQ ID NO: 84635

SEQ ID NO: 84666 - DNA, 168 bp, Homo sapiens; identical to SEQ ID NO: 84636

SEQ ID NO: 84667 - DNA, 123 bp, Homo sapiens; identical to SEQ ID NO: 84637

SEQ ID NO: 84668 - DNA, 201 bp, Homo sapiens; identical to SEQ ID NO: 84638

SEQ ID NO: 84669 - DNA, 201 bp, Homo sapiens; identical to SEQ ID NO: 84639

SEQ ID NO: 84670 - DNA, 201 bp, Homo sapiens; identical to SEQ ID NO: 84640

SEQ ID NO: 84671 - DNA, 201 bp, Homo sapiens; identical to SEQ ID NO: 84641

SEQ ID NO: 84672 - DNA, 201 bp, Homo sapiens; identical to SEQ ID NO: 84642

SEQ ID NO: 84673 - DNA, 201 bp, Homo sapiens; identical to SEQ ID NO: 84643

SEQ ID NO: 84674 - DNA, 201 bp, Homo sapiens; identical to SEQ ID NO: 84644

SEQ ID NO: 84675 - DNA, 201 bp, Homo sapiens; identical to SEQ ID NO: 84645

SEQ ID NO: 84676 - DNA, 201 bp, Homo sapiens; identical to SEQ ID NO: 84646

SEQ ID NO: 84677 - DNA, 201 bp, Homo sapiens; identical to SEQ ID NO: 84647

SEQ ID NO: 84678 - DNA, 201 bp, Homo sapiens; identical to SEQ ID NO: 84648

SEQ ID NO: 84679 - DNA, 201 bp, Homo sapiens; identical to SEQ ID NO: 84649

SEQ ID NO: 84680 - DNA, 201 bp, Homo sapiens; identical to SEQ ID NO: 84650

SEQ ID NO: 84681 - DNA, 201 bp, Homo sapiens; identical to SEQ ID NO: 84651

SEQ ID NO: 84682 - DNA, 201 bp, Homo sapiens; identical to SEQ ID NO: 84652

SEQ ID NO: 84683 - DNA, 201 bp, Homo sapiens; identical to SEQ ID NO: 84653

SEQ ID NO: 84684 - DNA, 201 bp, Homo sapiens; identical to SEQ ID NO: 84654

SEQ ID NO: 84685 - DNA, 201 bp, Homo sapiens; identical to SEQ ID NO: 84655

SEQ ID NO: 84686 - DNA, 201 bp, Homo sapiens; identical to SEQ ID NO: 84656

SEQ ID NO: 84687 - DNA, 201 bp, Homo sapiens; identical to SEQ ID NO: 84657

SEQ ID NO: 84688 - DNA, 201 bp, Homo sapiens; identical to SEQ ID NO: 84658

SEQ ID NO: 84689 - DNA, 201 bp, Homo sapiens; identical to SEQ ID NO: 84629

SEQ ID NO: 84690 - DNA, 201 bp, Homo sapiens; identical to SEQ ID NO: 84630

SEQ ID NO: 84691 - DNA, 201 bp, Homo sapiens; identical to SEQ ID NO: 84631

SEQ ID NO: 84692 - DNA, 201 bp, Homo sapiens; identical to SEQ ID NO: 84632

SEQ ID NO: 84693 - DNA, 201 bp, Homo sapiens; identical to SEQ ID NO: 84633

SEQ ID NO: 84694 - DNA, 201 bp, Homo sapiens; identical to SEQ ID NO: 84634

SEQ ID NO: 84695 - DNA, 201 bp, Homo sapiens; identical to SEQ ID NO: 84635

SEQ ID NO: 84696 - DNA, 201 bp, Homo sapiens
tgacgctccggcgtcactgttgcgcttcatagacgccgcgtgtacccggttgtcctcaggcgctgtcagatctgtggtttttctacttgaaggacacaatrttttccaaactagcacatttgcagaggtttgctgtacttagtcgcggagttcattcttcagtggcttctgctacatctgttgcaactaaaaaaacagtcc

SEQ ID NO: 84697 - DNA, 201 bp, Homo sapiens; identical to SEQ ID NO: 84638

SEQ ID NO: 84698 - DNA, 201 bp, Homo sapiens; identical to SEQ ID NO: 84639

SEQ ID NO: 84699 - DNA, 201 bp, Homo sapiens; identical to SEQ ID NO: 84640

SEQ ID NO: 84700 - DNA, 201 bp, Homo sapiens; identical to SEQ ID NO: 84641

SEQ ID NO: 84701 - DNA, 201 bp, Homo sapiens; identical to SEQ ID NO: 84642

SEQ ID NO: 84702 - DNA, 201 bp, Homo sapiens; identical to SEQ ID NO: 84643

SEQ ID NO: 84703 - DNA, 201 bp, Homo sapiens; identical to SEQ ID NO: 84644

SEQ ID NO: 84704 - DNA, 201 bp, Homo sapiens; identical to SEQ ID NO: 84645

SEQ ID NO: 84705 - DNA, 201 bp, Homo sapiens; identical to SEQ ID NO: 84646

SEQ ID NO: 84706 - DNA, 201 bp, Homo sapiens; identical to SEQ ID NO: 84647

SEQ ID NO: 84707 - DNA, 201 bp, Homo sapiens; identical to SEQ ID NO: 84648

SEQ ID NO: 84708 - DNA, 201 bp, Homo sapiens; identical to SEQ ID NO: 84649

SEQ ID NO: 84709 - DNA, 201 bp, Homo sapiens; identical to SEQ ID NO: 84650

SEQ ID NO: 84710 - DNA, 201 bp, Homo sapiens; identical to SEQ ID NO: 84651

SEQ ID NO: 84711 - DNA, 201 bp, Homo sapiens; identical to SEQ ID NO: 84652

SEQ ID NO: 84712 - DNA, 201 bp, Homo sapiens; identical to SEQ ID NO: 84653

SEQ ID NO: 84713 - DNA, 201 bp, Homo sapiens; identical to SEQ ID NO: 84654

SEQ ID NO: 84714 - DNA, 114 bp, Homo sapiens
aagttgcagtgackctccggcgtcactgttgcgcttcatagacgccgcgtgtacccggttgtcctcaggcgctgtcagatctgtggtttttctacttgaaggacacaatgtttt

SEQ ID NO: 84715 - DNA, 201 bp, Homo sapiens; identical to SEQ ID NO: 84655

SEQ ID NO: 84716 - DNA, 201 bp, Homo sapiens; identical to SEQ ID NO: 84656

SEQ ID NO: 84717 - DNA, 201 bp, Homo sapiens; identical to SEQ ID NO: 84657

SEQ ID NO: 84718 - DNA, 201 bp, Homo sapiens; identical to SEQ ID NO: 84658

SEQ ID NO: 84719 - DNA, 201 bp, Homo sapiens; identical to SEQ ID NO: 84629

SEQ ID NO: 84720 - DNA, 201 bp, Homo sapiens; identical to SEQ ID NO: 84630

SEQ ID NO: 84721 - DNA, 201 bp, Homo sapiens; identical to SEQ ID NO: 84631

SEQ ID NO: 84722 - DNA, 201 bp, Homo sapiens; identical to SEQ ID NO: 84632

SEQ ID NO: 84723 - DNA, 201 bp, Homo sapiens; identical to SEQ ID NO: 84633

SEQ ID NO: 84724 - DNA, 201 bp, Homo sapiens; identical to SEQ ID NO: 84634

SEQ ID NO: 84725 - DNA, 201 bp, Homo sapiens; identical to SEQ ID NO: 84635

SEQ ID NO: 84726 - DNA, 132 bp, Homo sapiens
atctgtggtttttctacttgaaggacacaatrttttccaaactagcacatttgcagaggtttgctgtacttagtcgcggagttcattcttcagtggcttctgctacatctgttgcaactaaaaaaacagtcc

SEQ ID NO: 84727 - DNA, 201 bp, Homo sapiens; identical to SEQ ID NO: 84638

SEQ ID NO: 84728 - DNA, 201 bp, Homo sapiens; identical to SEQ ID NO: 84639

SEQ ID NO: 84729 - DNA, 201 bp, Homo sapiens; identical to SEQ ID NO: 84640

SEQ ID NO: 84730 - DNA, 201 bp, Homo sapiens; identical to SEQ ID NO: 84641

SEQ ID NO: 84731 - DNA, 201 bp, Homo sapiens; identical to SEQ ID NO: 84642

SEQ ID NO: 84732 - DNA, 201 bp, Homo sapiens; identical to SEQ ID NO: 84643

SEQ ID NO: 84733 - DNA, 201 bp, Homo sapiens; identical to SEQ ID NO: 84644

SEQ ID NO: 84734 - DNA, 201 bp, Homo sapiens; identical to SEQ ID NO: 84645

SEQ ID NO: 84735 - DNA, 201 bp, Homo sapiens; identical to SEQ ID NO: 84646

SEQ ID NO: 84736 - DNA, 201 bp, Homo sapiens; identical to SEQ ID NO: 84647

SEQ ID NO: 84737 - DNA, 201 bp, Homo sapiens; identical to SEQ ID NO: 84648

SEQ ID NO: 84738 - DNA, 201 bp, Homo sapiens; identical to SEQ ID NO: 84649

SEQ ID NO: 84739 - DNA, 201 bp, Homo sapiens; identical to SEQ ID NO: 84650

SEQ ID NO: 84740 - DNA, 201 bp, Homo sapiens; identical to SEQ ID NO: 84651

SEQ ID NO: 84741 - DNA, 201 bp, Homo sapiens; identical to SEQ ID NO: 84652

SEQ ID NO: 84742 - DNA, 201 bp, Homo sapiens; identical to SEQ ID NO: 84653

SEQ ID NO: 84743 - DNA, 201 bp, Homo sapiens; identical to SEQ ID NO: 84654

SEQ ID NO: 84744 - DNA, 201 bp, Homo sapiens; identical to SEQ ID NO: 84655

SEQ ID NO: 84745 - DNA, 201 bp, Homo sapiens; identical to SEQ ID NO: 84656

SEQ ID NO: 84746 - DNA, 201 bp, Homo sapiens; identical to SEQ ID NO: 84657

SEQ ID NO: 84747 - DNA, 201 bp, Homo sapiens; identical to SEQ ID NO: 84658

SEQ ID NO: 84748 - DNA, 201 bp, Homo sapiens; identical to SEQ ID NO: 84629

SEQ ID NO: 84749 - DNA, 201 bp, Homo sapiens; identical to SEQ ID NO: 84630

SEQ ID NO: 84750 - DNA, 201 bp, Homo sapiens; identical to SEQ ID NO: 84631

SEQ ID NO: 84751 - DNA, 201 bp, Homo sapiens; identical to SEQ ID NO: 84632

SEQ ID NO: 84752 - DNA, 201 bp, Homo sapiens; identical to SEQ ID NO: 84633

SEQ ID NO: 84753 - DNA, 201 bp, Homo sapiens; identical to SEQ ID NO: 84634

SEQ ID NO: 84754 - DNA, 201 bp, Homo sapiens; identical to SEQ ID NO: 84635

SEQ ID NO: 84755 - DNA, 201 bp, Homo sapiens
gattatacatggtttgacttgtcattggtagacttctgttgaaacatgaattaactagtcttttagaaaatctgtggtttttctacttgaaggacacaatrttttccaaactagcacatttgcagaggtttgctgtacttagtcgcggagttcattcttcagtggcttctgctacatctgttgcaactaaaaaaacagtcc

SEQ ID NO: 84756 - DNA, 201 bp, Homo sapiens; identical to SEQ ID NO: 84638

SEQ ID NO: 84757 - DNA, 201 bp, Homo sapiens; identical to SEQ ID NO: 84639

SEQ ID NO: 84758 - DNA, 201 bp, Homo sapiens; identical to SEQ ID NO: 84640

SEQ ID NO: 84759 - DNA, 201 bp, Homo sapiens; identical to SEQ ID NO: 84641

SEQ ID NO: 84760 - DNA, 201 bp, Homo sapiens; identical to SEQ ID NO: 84642

SEQ ID NO: 84761 - DNA, 201 bp, Homo sapiens; identical to SEQ ID NO: 84643

SEQ ID NO: 84762 - DNA, 201 bp, Homo sapiens; identical to SEQ ID NO: 84644

SEQ ID NO: 84763 - DNA, 201 bp, Homo sapiens; identical to SEQ ID NO: 84645

SEQ ID NO: 84764 - DNA, 201 bp, Homo sapiens; identical to SEQ ID NO: 84646

SEQ ID NO: 84765 - DNA, 201 bp, Homo sapiens; identical to SEQ ID NO: 84647

SEQ ID NO: 84766 - DNA, 201 bp, Homo sapiens; identical to SEQ ID NO: 84648

SEQ ID NO: 84767 - DNA, 201 bp, Homo sapiens; identical to SEQ ID NO: 84649

SEQ ID NO: 84768 - DNA, 201 bp, Homo sapiens; identical to SEQ ID NO: 84650

SEQ ID NO: 84769 - DNA, 201 bp, Homo sapiens; identical to SEQ ID NO: 84651

SEQ ID NO: 84770 - DNA, 201 bp, Homo sapiens; identical to SEQ ID NO: 84652

SEQ ID NO: 84771 - DNA, 201 bp, Homo sapiens; identical to SEQ ID NO: 84653

SEQ ID NO: 84772 - DNA, 201 bp, Homo sapiens; identical to SEQ ID NO: 84654

SEQ ID NO: 84773 - DNA, 201 bp, Homo sapiens; identical to SEQ ID NO: 84655

SEQ ID NO: 84774 - DNA, 201 bp, Homo sapiens; identical to SEQ ID NO: 84656

SEQ ID NO: 84775 - DNA, 201 bp, Homo sapiens; identical to SEQ ID NO: 84657

SEQ ID NO: 84776 - DNA, 201 bp, Homo sapiens; identical to SEQ ID NO: 84658

SEQ ID NO: 84777 - DNA, 201 bp, Homo sapiens
acattgcaccgcgcccctcgtggggtcgcgttgccaccccacgcggactccccagctggcgcgcccctcccatttgcctgtcctggtcaggcccccacccmccttcccacctgaccagccatgggggctgcggtgtttttcggctgcactttcgtcgcgttcggcccggccttcgcgcttttcttgatcactgtggctggg

SEQ ID NO: 84778 - DNA, 201 bp, Homo sapiens
tttcctaacctggcaaccactgatttccaagcatagccttggtgcaagggcagaaatctgggctagtggtttaacatgtctgaaactttgggttaagtgtyttcccagaagcttatctttccttccaggggtgggataaaaggagttaatcacccatgcttcttttccccatcctttgcccatctttaccacctgagggat

SEQ ID NO: 84779 - DNA, 201 bp, Homo sapiens
ccagcctgctgcccatctatgcagtcactgtttccatggggctctgggccttcatcacagctggagggtccctccgaagtattcagcgcagcctcttgtgscgacggcaggaggacagtcgggtgatggtgtattctgccctgcgcatcccacccgaggactgagggaacctaggggggacccctgggcctggggtgccct

SEQ ID NO: 84780 - DNA, 201 bp, Homo sapiens
tgctccataccttttggggagttgtgttctttgatgcctgtgagaggagacggtactgggctttgggcctggtggttgggagtcacctactgacatcgggmctgacattcctgaacccctggtatgaggccagcctgctgcccatctatgcagtcactgtttccatggggctctgggccttcatcacagctggagggtccc

SEQ ID NO: 84781 - DNA, 201 bp, Homo sapiens; identical to SEQ ID NO: 84777

SEQ ID NO: 84782 - DNA, 201 bp, Homo sapiens; identical to SEQ ID NO: 84778

SEQ ID NO: 84783 - DNA, 201 bp, Homo sapiens
ccccaccacctggggacccccttgttgtgtccaggactccccctgtgtcagtgctctgctctcaccctgcccaagactcacctcccttcccctctgcaggscgacggcaggaggacagtcgggtgatggtgtattctgccctgcgcatcccacccgaggactgagggaacctaggggggacccctgggcctggggtgccct

SEQ ID NO: 84784 - DNA, 201 bp, Homo sapiens; identical to SEQ ID NO: 84780

SEQ ID NO: 84785 - DNA, 201 bp, Homo sapiens
ctccagggttttgctttgtccttttgtgaccgttagtctctaagctttaccaggagcagcctgggttcagccagtcagtgactggtgggtttgaatctgcrcttatccccaccacctggggacccccttgttgtgtccaggactccccctgtgtcagtgctctgctctcaccctgcccaagactcacctcccttcccctct

SEQ ID NO: 84786 - DNA, 201 bp, Homo sapiens; identical to SEQ ID NO: 84777

SEQ ID NO: 84787 - DNA, 201 bp, Homo sapiens; identical to SEQ ID NO: 84778

SEQ ID NO: 84788 - DNA, 201 bp, Homo sapiens; identical to SEQ ID NO: 84783

SEQ ID NO: 84789 - DNA, 201 bp, Homo sapiens; identical to SEQ ID NO: 84780

SEQ ID NO: 84790 - DNA, 201 bp, Homo sapiens; identical to SEQ ID NO: 84785

SEQ ID NO: 84791 - DNA, 201 bp, Homo sapiens
aggatcctcgtataccacaggaagaagaggctggaaaaccgaaagagtgtggtcttcacctcagcacaagccacgactgaggcataaattccttctcagayaccatggatgtggatgacttcccttcatgcctatcaggaagcctctaaaatggggtgtaggatctggccagaaacactgtaggagtagtaagcagatgtc

SEQ ID NO: 84792 - DNA, 201 bp, Homo sapiens
ccagtctgttctccccagatcagaagacctcagtgcctcccttcaacctaagagagctgctccccaaacagctggggcagtacttccgctacaatggctcrctcacaactcccccttgctaccagagtgtgctctggacagttttttatagaaggtcccagatttcaatggaacaggtaagtggtggagaaacgaggtgag

SEQ ID NO: 84793 - DNA, 201 bp, Homo sapiens
atccctcaggtggtaaagatgggcaaaggatggggaaaagaagcatgggtgattaactccttttatcccacccctggaaggaaagataagcttctgggaaracacttaacccaaagtttcagacatgttaaaccactagcccagatttctgcccttgcaccaaggctatgcttggaaatcagtggttgccaggttaggaaa

SEQ ID NO: 84794 - DNA, 201 bp, Homo sapiens
atatgaccagcctggcaccgagcctttggacctgcacaacaatggccacacagctccacattgtacattatgactctgattcctatgacagcttgagtgargctgctgagaggcctcagggcctggctgtcctgggcatcctaattgaggtgggtgagactaagaatatagcttatgaacacattctgagtcacttgcatg

SEQ ID NO: 84795 - DNA, 201 bp, Homo sapiens
ggcctcagggcctggctgtcctgggcatcctaattgaggtgggtgagactaagaatatagcttatgaacacattctgagtcacttgcatgaagtcaggcayaaaggtgagccttaaaaatctatagcaggaagtaagattagactttcaaaaactatccttaaaagccttgggatgaagcaattacatagagccaaggaat

SEQ ID NO: 84796 - DNA, 201 bp, Homo sapiens
tgcaactctctctgccctctaccctgtatctgggtggacttccccgaaaatatgtagctgcccagctccacctgcactggggtcagaaaggatccccaggkgggtcagaacaccagatcaacagtgaagccacatttgcagagctccacattgtacattatgactctgattcctatgacagcttgagtgaggctgctgaga

SEQ ID NO: 84797 - DNA, 201 bp, Homo sapiens
ttcattgctagaaagattcggaagaagaggctggaaaaccgaaagagtgtggtcttcacctcagcacaagccacgactgaggcataaattccttctcagayaccatggatgtggatgacttcccttcatgcctatcaggaagcctctaaaatggggtgtaggatctggccagaaacactgtaggagtagtaagcagatgtc

SEQ ID NO: 84798 - DNA, 201 bp, Homo sapiens
atgaagtcaggcataaagatcagaagacctcagtgcctcccttcaacctaagagagctgctccccaaacagctggggcagtacttccgctacaatggctcrctcacaactcccccttgctaccagagtgtgctctggacagttttttatagaaggtcccagatttcaatggaacagctggaaaagcttcaggggacattgt

SEQ ID NO: 84799 - DNA, 201 bp, Homo sapiens; identical to SEQ ID NO: 84793

SEQ ID NO: 84800 - DNA, 201 bp, Homo sapiens
gatccccaggggggtcagaacaccagatcaacagtgaagccacatttgcagagctccacattgtacattatgactctgattcctatgacagcttgagtgargctgctgagaggcctcagggcctggctgtcctgggcatcctaattgaggtgggtgagactaagaatatagcttatgaacacattctgagtcacttgcatg

SEQ ID NO: 84801 - DNA, 201 bp, Homo sapiens
ggcctcagggcctggctgtcctgggcatcctaattgaggtgggtgagactaagaatatagcttatgaacacattctgagtcacttgcatgaagtcaggcayaaagatcagaagacctcagtgcctcccttcaacctaagagagctgctccccaaacagctggggcagtacttccgctacaatggctcgctcacaactcccc

SEQ ID NO: 84802 - DNA, 201 bp, Homo sapiens; identical to SEQ ID NO: 84796

SEQ ID NO: 84803 - DNA, 201 bp, Homo sapiens; identical to SEQ ID NO: 84797

SEQ ID NO: 84804 - DNA, 201 bp, Homo sapiens; identical to SEQ ID NO: 84798

SEQ ID NO: 84805 - DNA, 201 bp, Homo sapiens; identical to SEQ ID NO: 84793

SEQ ID NO: 84806 - DNA, 201 bp, Homo sapiens; identical to SEQ ID NO: 84800

SEQ ID NO: 84807 - DNA, 201 bp, Homo sapiens; identical to SEQ ID NO: 84801

SEQ ID NO: 84808 - DNA, 201 bp, Homo sapiens; identical to SEQ ID NO: 84796

SEQ ID NO: 84809 - DNA, 201 bp, Homo sapiens; identical to SEQ ID NO: 84797

SEQ ID NO: 84810 - DNA, 201 bp, Homo sapiens; identical to SEQ ID NO: 84798

SEQ ID NO: 84811 - DNA, 201 bp, Homo sapiens; identical to SEQ ID NO: 84793

SEQ ID NO: 84812 - DNA, 201 bp, Homo sapiens; identical to SEQ ID NO: 84800

SEQ ID NO: 84813 - DNA, 201 bp, Homo sapiens; identical to SEQ ID NO: 84801

SEQ ID NO: 84814 - DNA, 201 bp, Homo sapiens; identical to SEQ ID NO: 84796

SEQ ID NO: 84815 - DNA, 201 bp, Homo sapiens; identical to SEQ ID NO: 84797

SEQ ID NO: 84816 - DNA, 201 bp, Homo sapiens; identical to SEQ ID NO: 84798

SEQ ID NO: 84817 - DNA, 201 bp, Homo sapiens; identical to SEQ ID NO: 84793

SEQ ID NO: 84818 - DNA, 201 bp, Homo sapiens; identical to SEQ ID NO: 84800

SEQ ID NO: 84819 - DNA, 201 bp, Homo sapiens; identical to SEQ ID NO: 84801

SEQ ID NO: 84820 - DNA, 201 bp, Homo sapiens
accatgtgggccttctcggaattgcccatgccgctgctgatcaatttgatcgtctcgctgctgggatttgtggccacagtcaccctcatcccggccttcckgggccacttcattgctgcgcgcctctgtggtcaggacctcaacaaaaccagccgacagcagatcccagaatcccagggagtgatcagcggtgctgttttc

SEQ ID NO: 84821 - DNA, 201 bp, Homo sapiens
cttgcccaggcctctctcactcttcatactcctccagattttgttctcagcattttcctttctctgtgatcattggcatcctgggcgtttcttgccctctrctgactactgattggattttacctatggctttctgcaacttgctactctctccctctccatcccatctttgcagcctcatagggtgggatacagcagctt

SEQ ID NO: 84822 - DNA, 201 bp, Homo sapiens
tgtgggaagagcctgcctgtggggagcggccactccatactgctgaggcctcaggactgctgctcagcttgcccgttacctgaagaggcggcggagccggscccctgaccggtcaccatgtgggccttctcggaattgcccatgccgctgctgatcaatttgatcgtctcgctgctgggatttgtggccacagtcaccctc

SEQ ID NO: 84823 - DNA, 179 bp, Homo sapiens
tcctgactctcaaggaaccactggtttttgggatagaacttgggccagggctaggaacacaggctccacggtgacatgtcatttgattgtaaattaagtgytctgattagtaagaactaagcagggggccacatgctctcaatggagacaataaagtgttgtctttttcttattgttta

SEQ ID NO: 84824 - DNA, 201 bp, Homo sapiens
caacatgaccctcatcaacttgctacttaaagtccttgggcccatacatgagagaaacctcacattgctcctgctgctgctgcagatcctgggcagtgccrtcaccttctccattcgatatcagctcgttcgactcttctatgatgtctgagtcccttgatcattgtcctttacctcacagtctctaggattcctgactca

SEQ ID NO: 84825 - DNA, 201 bp, Homo sapiens
tacttggcctgcatctggacttgggaatcctgtactatgtctacatggggctgctggcagtgttctgtaccaatgccatcaatatcctagcaggaattaayggcctagaggctggccagtcactagtcatttctgcttccatcattgtcttcaacctggtagagttggaaggtgattgtcgggatgatcatgtcttttccc

SEQ ID NO: 84826 - DNA, 201 bp, Homo sapiens; identical to SEQ ID NO: 84820

SEQ ID NO: 84827 - DNA, 201 bp, Homo sapiens
acagtctctaggattcctgactcaggctgacctctctctctggtcccagacattttcctttctctgtgatcattggcatcctgggcgtttcttgccctctrctgactactgattggattttacctatggctttctgcaacttgctactctctccctctccatcccatctttgcagcctcatagggtgggatacagcagctt

SEQ ID NO: 84828 - DNA, 201 bp, Homo sapiens; identical to SEQ ID NO: 84822

SEQ ID NO: 84829 - DNA, 179 bp, Homo sapiens; identical to SEQ ID NO: 84823

SEQ ID NO: 84830 - DNA, 201 bp, Homo sapiens; identical to SEQ ID NO: 84824

SEQ ID NO: 84831 - DNA, 201 bp, Homo sapiens; identical to SEQ ID NO: 84825

SEQ ID NO: 84832 - DNA, 201 bp, Homo sapiens; identical to SEQ ID NO: 84820

SEQ ID NO: 84833 - DNA, 201 bp, Homo sapiens; identical to SEQ ID NO: 84821

SEQ ID NO: 84834 - DNA, 201 bp, Homo sapiens; identical to SEQ ID NO: 84822

SEQ ID NO: 84835 - DNA, 179 bp, Homo sapiens; identical to SEQ ID NO: 84823

SEQ ID NO: 84836 - DNA, 201 bp, Homo sapiens; identical to SEQ ID NO: 84824

SEQ ID NO: 84837 - DNA, 201 bp, Homo sapiens; identical to SEQ ID NO: 84825

SEQ ID NO: 84838 - DNA, 201 bp, Homo sapiens; identical to SEQ ID NO: 84820

SEQ ID NO: 84839 - DNA, 201 bp, Homo sapiens; identical to SEQ ID NO: 84821

SEQ ID NO: 84840 - DNA, 201 bp, Homo sapiens; identical to SEQ ID NO: 84822

SEQ ID NO: 84841 - DNA, 179 bp, Homo sapiens; identical to SEQ ID NO: 84823

SEQ ID NO: 84842 - DNA, 201 bp, Homo sapiens; identical to SEQ ID NO: 84824

SEQ ID NO: 84843 - DNA, 201 bp, Homo sapiens; identical to SEQ ID NO: 84825

SEQ ID NO: 84844 - DNA, 201 bp, Homo sapiens; identical to SEQ ID NO: 84820

SEQ ID NO: 84845 - DNA, 201 bp, Homo sapiens; identical to SEQ ID NO: 84821

SEQ ID NO: 84846 - DNA, 201 bp, Homo sapiens; identical to SEQ ID NO: 84822

SEQ ID NO: 84847 - DNA, 179 bp, Homo sapiens; identical to SEQ ID NO: 84823

SEQ ID NO: 84848 - DNA, 201 bp, Homo sapiens; identical to SEQ ID NO: 84824

SEQ ID NO: 84849 - DNA, 201 bp, Homo sapiens; identical to SEQ ID NO: 84825

SEQ ID NO: 84850 - DNA, 201 bp, Homo sapiens; identical to SEQ ID NO: 84820

SEQ ID NO: 84851 - DNA, 201 bp, Homo sapiens; identical to SEQ ID NO: 84821

SEQ ID NO: 84852 - DNA, 201 bp, Homo sapiens
agagaggttccccggtgtcccgacggcggctcaagtcagagttgctgggttttgctcagattggtgtgggaagagcctgcctgtggggcggcggagccggscccctgaccggtcaccatgtgggccttctcggaattgcccatgccgctgctgatcaatttgatcgtctcgctgctgggatttgtggccacagtcaccctc

SEQ ID NO: 84853 - DNA, 179 bp, Homo sapiens; identical to SEQ ID NO: 84823

SEQ ID NO: 84854 - DNA, 201 bp, Homo sapiens; identical to SEQ ID NO: 84824

SEQ ID NO: 84855 - DNA, 201 bp, Homo sapiens; identical to SEQ ID NO: 84825

SEQ ID NO: 84856 - DNA, 201 bp, Homo sapiens
agagaaagttcccgcatctggagttcaggagtattcggggaaacctcaacacccggcttcggaagctggacgagcagcaggagttcagtgccatcatcctrgcaacagctggcctgcagcgcatgggctggcacaaccgggtggggcagatcctgcaccctgaggaatgcatgtatgctgtgggccagggggccttgggcg

SEQ ID NO: 84857 - DNA, 201 bp, Homo sapiens
acagcctactttccaagcggagccatgtctggtaacggcaatgcggctgcaacggcggaagaaaacagcccaaagatgagagtgattcgcgtgggtacccrcaagagccagcttgctcgcatacagacggacagtgtggtggcaacattgaaagcctcgtaccctggcctgcagtttgaaatcattgctatgtccaccaca

SEQ ID NO: 84858 - DNA, 201 bp, Homo sapiens
tactttccaagcggagccatgtctggtaacggcaatgcggctgcaacggcggaagaaaacagcccaaagatgagagtgattcgcgtgggtacccgcaagarccagcttgctcgcatacagacggacagtgtggtggcaacattgaaagcctcgtaccctggcctgcagtttgaaatcattgctatgtccaccacaggggac

SEQ ID NO: 84859 - DNA, 201 bp, Homo sapiens
gccttgggcgtggaagtgcgagccaaggaccaggacatcttggatctggtgggtgtgctgcacgatcccgagactctgcttcgctgcatcgctgaaagggycttcctgaggcacctggaaggaggctgcagtgtgccagtagccgtgcatacagctatgaaggatgggcaactgtacctgactggaggagtctggagtcta

SEQ ID NO: 84860 - DNA, 201 bp, Homo sapiens
catgtctggtaacggcaatgcggctgcaacggcggaagaaaacagcccaaagatgagagtgattcgcgtgggtacccgcaagagccagcttgctcgcatahagacggacagtgtggtggcaacattgaaagcctcgtaccctggcctgcagtttgaaatcattgctatgtccaccacaggggacaagattcttgatactgc

SEQ ID NO: 84861 - DNA, 201 bp, Homo sapiens
atgtctggtaacggcaatgcggctgcaacggcggaagaaaacagcccaaagatgagagtgattcgcgtgggtacccgcaagagccagcttgctcgcatacmgacggacagtgtggtggcaacattgaaagcctcgtaccctggcctgcagtttgaaatcattgctatgtccaccacaggggacaagattcttgatactgca

SEQ ID NO: 84862 - DNA, 201 bp, Homo sapiens
ggaagtgcgagccaaggaccaggacatcttggatctggtgggtgtgctgcacgatcccgagactctgcttcgctgcatcgctgaaagggccttcctgagghacctggaaggaggctgcagtgtgccagtagccgtgcatacagctatgaaggatgggcaactgtacctgactggaggagtctggagtctagacggctcaga

SEQ ID NO: 84863 - DNA, 201 bp, Homo sapiens
tctggtaacggcaatgcggctgcaacggcggaagaaaacagcccaaagatgagagtgattcgcgtgggtacccgcaagagccagcttgctcgcatacagayggacagtgtggtggcaacattgaaagcctcgtaccctggcctgcagtttgaaatcattgctatgtccaccacaggggacaagattcttgatactgcactc

SEQ ID NO: 84864 - DNA, 201 bp, Homo sapiens
tcccgagactctgcttcgctgcatcgctgaaagggccttcctgaggcacctggaaggaggctgcagtgtgccagtagccgtgcatacagctatgaaggatrggcaactgtacctgactggaggagtctggagtctagacggctcagatagcatacaagagaccatgcaggctaccatccatgtccctgcccagcatgaaga

SEQ ID NO: 84865 - DNA, 201 bp, Homo sapiens
tcgcgtgggtacccgcaagagccagcttgctcgcatacagacggacagtgtggtggcaacattgaaagcctcgtaccctggcctgcagtttgaaatcattkctatgtccaccacaggggacaagattcttgatactgcactctctaagattggagagaaaagcctgtttaccaaggagcttgaacatgccctggagaagaa

SEQ ID NO: 84866 - DNA, 201 bp, Homo sapiens
cgagactctgcttcgctgcatcgctgaaagggccttcctgaggcacctggaaggaggctgcagtgtgccagtagccgtgcatacagctatgaaggatgggyaactgtacctgactggaggagtctggagtctagacggctcagatagcatacaagagaccatgcaggctaccatccatgtccctgcccagcatgaagatgg

SEQ ID NO: 84867 - DNA, 201 bp, Homo sapiens
gaaatcattgctatgtccaccacaggggacaagattcttgatactgcactctctaagattggagagaaaagcctgtttaccaaggagcttgaacatgccckggagaagaatgaagtggacctggttgttcactccttgaaggacctgcccactgtgcttcctcctggcttcaccatcggagccatctgcaagcgggaaaac

SEQ ID NO: 84868 - DNA, 201 bp, Homo sapiens
cttcgctgcatcgctgaaagggccttcctgaggcacctggaaggaggctgcagtgtgccagtagccgtgcatacagctatgaaggatgggcaactgtaccygactggaggagtctggagtctagacggctcagatagcatacaagagaccatgcaggctaccatccatgtccctgcccagcatgaagatggccctgaggat

SEQ ID NO: 84869 - DNA, 201 bp, Homo sapiens
tccaccacaggggacaagattcttgatactgcactctctaagattggagagaaaagcctgtttaccaaggagcttgaacatgccctggagaagaatgaagkggacctggttgttcactccttgaaggacctgcccactgtgcttcctcctggcttcaccatcggagccatctgcaagcgggaaaaccctcatgatgctgtt

SEQ ID NO: 84870 - DNA, 201 bp, Homo sapiens
ctgcatcgctgaaagggccttcctgaggcacctggaaggaggctgcagtgtgccagtagccgtgcatacagctatgaaggatgggcaactgtacctgactrgaggagtctggagtctagacggctcagatagcatacaagagaccatgcaggctaccatccatgtccctgcccagcatgaagatggccctgaggatgaccc

SEQ ID NO: 84871 - DNA, 201 bp, Homo sapiens
atgatgctgttgtctttcacccaaaatttgttgggaagaccctagaaaccctgccagagaagagtgtggtgggaaccagctccctgcgaagagcagcccasctgcagagaaagttcccgcatctggagttcaggagtattcggggaaacctcaacacccggcttcggaagctggacgagcagcaggagttcagtgccatca

SEQ ID NO: 84872 - DNA, 201 bp, Homo sapiens
cctgcccagcatgaagatggccctgaggatgacccacagttggtaggcatcactgctcgtaacattccacgagggccccagttggctgcccagaacttggrcatcagcctggccaacttgttgctgagcaaaggagccaaaaacatcctggatgttgcacggcagcttaacgatgcccattaactggtttgtggggcacag

SEQ ID NO: 84873 - DNA, 201 bp, Homo sapiens
aggggacaagattcttgatactgcactctctaagattggagagaaaagcctgtttaccaaggagcttgaacatgccctggagaagaatgaagtggacctgkttgttcactccttgaaggacctgcccactgtgcttcctcctggcttcaccatcggagccatctgcaagcgggaaaaccctcatgatgctgttgtctttca

SEQ ID NO: 84874 - DNA, 201 bp, Homo sapiens
taccaaggagcttgaacatgccctggagaagaatgaagtggacctggttgttcactccttgaaggacctgcccactgtgcttcctcctggcttcaccatcrgagccatctgcaagcgggaaaaccctcatgatgctgttgtctttcacccaaaatttgttgggaagaccctagaaaccctgccagagaagagtgtggtggg

SEQ ID NO: 84875 - DNA, 201 bp, Homo sapiens
ttgaacatgccctggagaagaatgaagtggacctggttgttcactccttgaaggacctgcccactgtgcttcctcctggcttcaccatcggagccatctgmaagcgggaaaaccctcatgatgctgttgtctttcacccaaaatttgttgggaagaccctagaaaccctgccagagaagagtgtggtgggaaccagctccc

SEQ ID NO: 84876 - DNA, 201 bp, Homo sapiens
acaagagaccatgcaggctaccatccatgtccctgcccagcatgaagatggccctgaggatgacccacagttggtaggcatcactgctcgtaacattccaygagggccccagttggctgcccagaacttgggcatcagcctggccaacttgttgctgagcaaaggagccaaaaacatcctggatgttgcacggcagcttaa

SEQ ID NO: 84877 - DNA, 201 bp, Homo sapiens
catgccctggagaagaatgaagtggacctggttgttcactccttgaaggacctgcccactgtgcttcctcctggcttcaccatcggagccatctgcaagcrggaaaaccctcatgatgctgttgtctttcacccaaaatttgttgggaagaccctagaaaccctgccagagaagagtgtggtgggaaccagctccctgcga

SEQ ID NO: 84878 - DNA, 201 bp, Homo sapiens
acatgccctggagaagaatgaagtggacctggttgttcactccttgaaggacctgcccactgtgcttcctcctggcttcaccatcggagccatctgcaagygggaaaaccctcatgatgctgttgtctttcacccaaaatttgttgggaagaccctagaaaccctgccagagaagagtgtggtgggaaccagctccctgcg

SEQ ID NO: 84879 - DNA, 201 bp, Homo sapiens
gagaagaatgaagtggacctggttgttcactccttgaaggacctgcccactgtgcttcctcctggcttcaccatcggagccatctgcaagcgggaaaaccytcatgatgctgttgtctttcacccaaaatttgttgggaagaccctagaaaccctgccagagaagagtgtggtgggaaccagctccctgcgaagagcagcc

SEQ ID NO: 84880 - DNA, 201 bp, Homo sapiens
ctagaaaccctgccagagaagagtgtggtgggaaccagctccctgcgaagagcagcccagctgcagagaaagttcccgcatctggagttcaggagtattcrgggaaacctcaacacccggcttcggaagctggacgagcagcaggagttcagtgccatcatcctggcaacagctggcctgcagcgcatgggctggcacaac

SEQ ID NO: 84881 - DNA, 201 bp, Homo sapiens
aaagatgagagtgattcgcgtgggtacccgcaagagccagcttgctcgcatacagacggacagtgtggtggcaacattgaaagcctcgtaccctggcctgyagtttgaaatcattgctatgtccaccacaggggacaagattcttgatactgcactctctaagattggagagaaaagcctgtttaccaaggagcttgaaca

SEQ ID NO: 84882 - DNA, 201 bp, Homo sapiens
cctagaaaccctgccagagaagagtgtggtgggaaccagctccctgcgaagagcagcccagctgcagagaaagttcccgcatctggagttcaggagtattyggggaaacctcaacacccggcttcggaagctggacgagcagcaggagttcagtgccatcatcctggcaacagctggcctgcagcgcatgggctggcacaa

SEQ ID NO: 84883 - DNA, 201 bp, Homo sapiens
atcattgctatgtccaccacaggggacaagattcttgatactgcactctctaagattggagagaaaagcctgtttaccaaggagcttgaacatgccctggwgaagaatgaagtggacctggttgttcactccttgaaggacctgcccactgtgcttcctcctggcttcaccatcggagccatctgcaagcgggaaaaccct

SEQ ID NO: 84884 - DNA, 201 bp, Homo sapiens
gaagagtgtggtgggaaccagctccctgcgaagagcagcccagctgcagagaaagttcccgcatctggagttcaggagtattcggggaaacctcaacaccyggcttcggaagctggacgagcagcaggagttcagtgccatcatcctggcaacagctggcctgcagcgcatgggctggcacaaccgggtggggcagatcct

SEQ ID NO: 84885 - DNA, 201 bp, Homo sapiens
acaggggacaagattcttgatactgcactctctaagattggagagaaaagcctgtttaccaaggagcttgaacatgccctggagaagaatgaagtggaccyggttgttcactccttgaaggacctgcccactgtgcttcctcctggcttcaccatcggagccatctgcaagcgggaaaaccctcatgatgctgttgtcttt

SEQ ID NO: 84886 - DNA, 201 bp, Homo sapiens
ggccttgggcgtggaagtgcgagccaaggaccaggacatcttggatctggtgggtgtgctgcacgatcccgagactctgcttcgctgcatcgctgaaaggrccttcctgaggcacctggaaggaggctgcagtgtgccagtagccgtgcatacagctatgaaggatgggcaactgtacctgactggaggagtctggagtct

SEQ ID NO: 84887 - DNA, 201 bp, Homo sapiens
aagcggagccatgtctggtaacggcaatgcggctgcaacggcggaagaaaacagcccaaagatgagagtgattcgcgtgggtacccgcaagagccagcttvctcgcatacagacggacagtgtggtggcaacattgaaagcctcgtaccctggcctgcagtttgaaatcattgctatgtccaccacaggggacaagattct

SEQ ID NO: 84888 - DNA, 201 bp, Homo sapiens
gagcttgaacatgccctggagaagaatgaagtggacctggttgttcactccttgaaggacctgcccactgtgcttcctcctggcttcaccatcggagccayctgcaagcgggaaaaccctcatgatgctgttgtctttcacccaaaatttgttgggaagaccctagaaaccctgccagagaagagtgtggtgggaaccagc

SEQ ID NO: 84889 - DNA, 201 bp, Homo sapiens
aagagtgtggtgggaaccagctccctgcgaagagcagcccagctgcagagaaagttcccgcatctggagttcaggagtattcggggaaacctcaacacccrgcttcggaagctggacgagcagcaggagttcagtgccatcatcctggcaacagctggcctgcagcgcatgggctggcacaaccgggtggggcagatcctg

SEQ ID NO: 84890 - DNA, 201 bp, Homo sapiens
aaggaccaggacatcttggatctggtgggtgtgctgcacgatcccgagactctgcttcgctgcatcgctgaaagggccttcctgaggcacctggaaggagrctgcagtgtgccagtagccgtgcatacagctatgaaggatgggcaactgtacctgactggaggagtctggagtctagacggctcagatagcatacaagag

SEQ ID NO: 84891 - DNA, 201 bp, Homo sapiens
cttaacgatgcccattaactggtttgtggggcacagatgcctgggttgctgctgtccagtgcctacatcccgggcctcagtgccccattctcactgctatytggggagtgattaccccgggagactgaactgcagggttcaagccttccagggatttgcctcaccttggggccttgatgactgccttgcctcctcagtatg

SEQ ID NO: 84892 - DNA, 201 bp, Homo sapiens
gaggatgacccacagttggtaggcatcactgctcgtaacattccacgagggccccagttggctgcccagaacttgggcatcagcctggccaacttgttgcygagcaaaggagccaaaaacatcctggatgttgcacggcagcttaacgatgcccattaactggtttgtggggcacagatgcctgggttgctgctgtccagt

SEQ ID NO: 84893 - DNA, 201 bp, Homo sapiens
gggaaccagctccctgcgaagagcagcccagctgcagagaaagttcccgcatctggagttcaggagtattcggggaaacctcaacacccggcttcggaagmtggacgagcagcaggagttcagtgccatcatcctggcaacagctggcctgcagcgcatgggctggcacaaccgggtggggcagatcctgcaccctgagga

SEQ ID NO: 84894 - DNA, 201 bp, Homo sapiens
atcctgcaccctgaggaatgcatgtatgctgtgggccagggggccttgggcgtggaagtgcgagccaaggaccaggacatcttggatctggtgggtgtgckgcacgatcccgagactctgcttcgctgcatcgctgaaagggccttcctgaggcacctggaaggaggctgcagtgtgccagtagccgtgcatacagctatg

SEQ ID NO: 84895 - DNA, 201 bp, Homo sapiens
atcctactaataaaccagttctgaaggtgttgtgtgtgcgcgtgtggagttggcgggaagataggaacaaacacaaagccctttcatccttacctcagagrctgggacttttgcccagagttctcctggtacgtcctttctgcttctgcctcaatagttttcatttcacacagaataaattgtctcccaggaacaccaaga

SEQ ID NO: 84896 - DNA, 201 bp, Homo sapiens
ggagttcaggagtattcggggaaacctcaacacccggcttcggaagctggacgagcagcaggagttcagtgccatcatcctggcaacagctggcctgcagygcatgggctggcacaaccgggtggggcagatcctgcaccctgaggaatgcatgtatgctgtgggccagggggccttgggcgtggaagtgcgagccaagga

SEQ ID NO: 84897 - DNA, 201 bp, Homo sapiens
cctgcgaagagcagcccagctgcagagaaagttcccgcatctggagttcaggagtattcggggaaacctcaacacccggcttcggaagctggacgagcagyaggagttcagtgccatcatcctggcaacagctggcctgcagcgcatgggctggcacaaccgggtggggcagatcctgcaccctgaggaatgcatgtatgc

SEQ ID NO: 84898 - DNA, 201 bp, Homo sapiens
ccctgcccagcatgaagatggccctgaggatgacccacagttggtaggcatcactgctcgtaacattccacgagggccccagttggctgcccagaacttgrgcatcagcctggccaacttgttgctgagcaaaggagccaaaaacatcctggatgttgcacggcagcttaacgatgcccattaactggtttgtggggcaca

SEQ ID NO: 84899 - DNA, 201 bp, Homo sapiens
acctcaacacccggcttcggaagctggacgagcagcaggagttcagtgccatcatcctggcaacagctggcctgcagcgcatgggctggcacaaccgggtkgggcagatcctgcaccctgaggaatgcatgtatgctgtgggccagggggccttgggcgtggaagtgcgagccaaggaccaggacatcttggatctggtgg

SEQ ID NO: 84900 - DNA, 193 bp, Homo sapiens
ccggaagtgacgcgaggctctgcggagaccaggagtcagactgtaggacgacctcgggtcccacgtgtccccggtactcgccggccggagccyccggcttcccggggccgggggaccttagcggcacccacacacagcctactttccaagcggagccatgtctggtaacggcaatgcggctgcaacggcggaa

SEQ ID NO: 84901 - DNA, 201 bp, Homo sapiens; identical to SEQ ID NO: 84857

SEQ ID NO: 84902 - DNA, 201 bp, Homo sapiens; identical to SEQ ID NO: 84858

SEQ ID NO: 84903 - DNA, 201 bp, Homo sapiens; identical to SEQ ID NO: 84860

SEQ ID NO: 84904 - DNA, 201 bp, Homo sapiens; identical to SEQ ID NO: 84859

SEQ ID NO: 84905 - DNA, 201 bp, Homo sapiens; identical to SEQ ID NO: 84861

SEQ ID NO: 84906 - DNA, 201 bp, Homo sapiens; identical to SEQ ID NO: 84862

SEQ ID NO: 84907 - DNA, 201 bp, Homo sapiens; identical to SEQ ID NO: 84863

SEQ ID NO: 84908 - DNA, 201 bp, Homo sapiens; identical to SEQ ID NO: 84864

SEQ ID NO: 84909 - DNA, 201 bp, Homo sapiens; identical to SEQ ID NO: 84865

SEQ ID NO: 84910 - DNA, 201 bp, Homo sapiens; identical to SEQ ID NO: 84866

SEQ ID NO: 84911 - DNA, 201 bp, Homo sapiens; identical to SEQ ID NO: 84867

SEQ ID NO: 84912 - DNA, 201 bp, Homo sapiens; identical to SEQ ID NO: 84868

SEQ ID NO: 84913 - DNA, 201 bp, Homo sapiens; identical to SEQ ID NO: 84869

SEQ ID NO: 84914 - DNA, 201 bp, Homo sapiens; identical to SEQ ID NO: 84870

SEQ ID NO: 84915 - DNA, 201 bp, Homo sapiens
atgatgctgttgtctttcacccaaaatttgttgggaagaccctagaaaccctgccagagaagagtgtggtgggaaccagctccctgcgaagagcagcccasctgcagagaaagttcccgcatctggagttcaggagtattgatgtaaccctattgtaagtcaaggaccatctgtcttcacttcttgaccaccccacctcta

SEQ ID NO: 84916 - DNA, 201 bp, Homo sapiens; identical to SEQ ID NO: 84872

SEQ ID NO: 84917 - DNA, 201 bp, Homo sapiens; identical to SEQ ID NO: 84873

SEQ ID NO: 84918 - DNA, 201 bp, Homo sapiens
ccagactcacacttaggcctacccaggctttctagatgatagggaactcccatctcactgccaggtgcttttagacacccccgtgtccacccttttgactmcctgttccgcctccacagatcctgcaccctgaggaatgcatgtatgctgtgggccaggtacacttgaccagggaagccacatggtgacatatgccttccc

SEQ ID NO: 84919 - DNA, 201 bp, Homo sapiens; identical to SEQ ID NO: 84874

SEQ ID NO: 84920 - DNA, 201 bp, Homo sapiens; identical to SEQ ID NO: 84875

SEQ ID NO: 84921 - DNA, 201 bp, Homo sapiens; identical to SEQ ID NO: 84876

SEQ ID NO: 84922 - DNA, 201 bp, Homo sapiens; identical to SEQ ID NO: 84877

SEQ ID NO: 84923 - DNA, 201 bp, Homo sapiens; identical to SEQ ID NO: 84878

SEQ ID NO: 84924 - DNA, 201 bp, Homo sapiens
aaaaaaaagaggccagactcacacttaggcctacccaggctttctagatgatagggaactcccatctcactgccaggtgcttttagacacccccgtgtccrcccttttgactccctgttccgcctccacagatcctgcaccctgaggaatgcatgtatgctgtgggccaggtacacttgaccagggaagccacatggtgac

SEQ ID NO: 84925 - DNA, 201 bp, Homo sapiens; identical to SEQ ID NO: 84879

SEQ ID NO: 84926 - DNA, 201 bp, Homo sapiens; identical to SEQ ID NO: 84881

SEQ ID NO: 84927 - DNA, 201 bp, Homo sapiens; identical to SEQ ID NO: 84883

SEQ ID NO: 84928 - DNA, 201 bp, Homo sapiens; identical to SEQ ID NO: 84886

SEQ ID NO: 84929 - DNA, 201 bp, Homo sapiens; identical to SEQ ID NO: 84885

SEQ ID NO: 84930 - DNA, 201 bp, Homo sapiens; identical to SEQ ID NO: 84887

SEQ ID NO: 84931 - DNA, 201 bp, Homo sapiens; identical to SEQ ID NO: 84888

SEQ ID NO: 84932 - DNA, 201 bp, Homo sapiens; identical to SEQ ID NO: 84890

SEQ ID NO: 84933 - DNA, 201 bp, Homo sapiens; identical to SEQ ID NO: 84891

SEQ ID NO: 84934 - DNA, 201 bp, Homo sapiens; identical to SEQ ID NO: 84892

SEQ ID NO: 84935 - DNA, 201 bp, Homo sapiens
ccatctgtcttcacttcttgaccaccccacctctaacaccgtaggctgggaagattgtgaatcagaggccagactctaggctttcatggagaaaatttacaaaaaaaaaaaaaagaggccagactcacacttaggcctacccaggctttctagatgatagggaactcccatctcactgccaggtgcttttagacacccccg

SEQ ID NO: 84936 - DNA, 201 bp, Homo sapiens
aaagatcaggcctgatgtcctaggatgtttttccatcagggggccttgggcgtggaagtgcgagccaaggaccaggacatcttggatctggtgggtgtgckgcacgatcccgagactctgcttcgctgcatcgctgaaagggccttcctgaggcacctggaaggaggctgcagtgtgccagtagccgtgcatacagctatg

SEQ ID NO: 84937 - DNA, 201 bp, Homo sapiens; identical to SEQ ID NO: 84895

SEQ ID NO: 84938 - DNA, 201 bp, Homo sapiens; identical to SEQ ID NO: 84898

SEQ ID NO: 84939 - DNA, 193 bp, Homo sapiens; identical to SEQ ID NO: 84900

SEQ ID NO: 84940 - DNA, 143 bp, Homo sapiens
cctggagggaccgaaggtgccgagggctccgcatcgcaaccawggcgctgcgctggggcatcgtgtctgtcggcctcatctccagcgacttcacagccgtgctgcagacgctgcctcgctctgagcaccaggtggtggcggtg

SEQ ID NO: 84941 - DNA, 201 bp, Homo sapiens
ggcccgatcccgagccctcttccttatggaggccatctggacccgcttctttcctgcctccgaggctctgaggtctgttttggcccagggaactctaggasacctccgggtggctcgggcagaatttgggaagaatctcatccacgttccccgggccgtagaccgggcccaggctgggggggccctgctggacatcggcat

SEQ ID NO: 84942 - DNA, 201 bp, Homo sapiens
tagaccgggcccaggctgggggggccctgctggacatcggcatctactgtgtccagttcacctccatggtctttggagggcagaagccagagaagatttcygtcgtgggaaggcgtcatgaaacaggtgtggatgacactgtcacggtgctcctgcagtacccaggggaggtccatggcagcttcacctgcagcatcaccg

SEQ ID NO: 84943 - DNA, 201 bp, Homo sapiens
cgtgggaaggcgtcatgaaacaggtgtggatgacactgtcacggtgctcctgcagtacccaggggaggtccatggcagcttcacctgcagcatcaccgtgyagctctccaacacggcctccgtgagcggcaccaagggcatggtacagctcctcaacccctgctggtgcccgaccgagctggtggtgaagggggagcataa

SEQ ID NO: 84944 - DNA, 201 bp, Homo sapiens
gcggtggcggcccgcgatctgagccgtgcgaaggagtttgcacagaaacacgacatccccaaggcctacggctcctatgaggagctggccaaggacccgarcgtggaggtggcctacattggcacccagcacccccagcacaaggcggcggtgatgctgtgcttggcggcgggcaaggccgttctgtgcgagaagcccacg

SEQ ID NO: 84945 - DNA, 201 bp, Homo sapiens
gggcatggtacagctcctcaacccctgctggtgcccgaccgagctggtggtgaagggggagcataaggagttcccgctgcccccagtcccaaaggactgcrattttgacaacggggcaggcatgagttatgaggccaagcacgtctgggagtgcctacgcaagggtatgaaggaaagtcctgtgattcccctgtcggaaag

SEQ ID NO: 84946 - DNA, 201 bp, Homo sapiens
ggagctggccaaggacccgagcgtggaggtggcctacattggcacccagcacccccagcacaaggcggcggtgatgctgtgcttggcggcgggcaaggccrttctgtgcgagaagcccacgggcgtgaacgcggcggaagttcgcgagatggtcgcggaggcccgatcccgagccctcttccttatggaggccatctggac

SEQ ID NO: 84947 - DNA, 201 bp, Homo sapiens
cctacattggcacccagcacccccagcacaaggcggcggtgatgctgtgcttggcggcgggcaaggccgttctgtgcgagaagcccacgggcgtgaacgcrgcggaagttcgcgagatggtcgcggaggcccgatcccgagccctcttccttatggaggccatctggacccgcttctttcctgcctccgaggctctgaggt

SEQ ID NO: 84948 - DNA, 201 bp, Homo sapiens
aggagctggccaaggacccgagcgtggaggtggcctacattggcacccagcacccccagcacaaggcggcggtgatgctgtgcttggcggcgggcaaggcsgttctgtgcgagaagcccacgggcgtgaacgcggcggaagttcgcgagatggtcgcggaggcccgatcccgagccctcttccttatggaggccatctgga

SEQ ID NO: 84949 - DNA, 201 bp, Homo sapiens
gctcctcaacccctgctggtgcccgaccgagctggtggtgaagggggagcataaggagttcccgctgcccccagtcccaaaggactgcaattttgacaacrgggcaggcatgagttatgaggccaagcacgtctgggagtgcctacgcaagggtatgaaggaaagtcctgtgattcccctgtcggaaagtgagctcctggc

SEQ ID NO: 84950 - DNA, 145 bp, Homo sapiens
cctggagggaccgaaggtgccgagggctccgcatcgcaaccatgscgctgcgctggggcatcgtgtctgtcggcctcatctccagcgacttcacagccgtgctgcagacgctgcctcgctctgagcaccaggtggtggcggtggc

SEQ ID NO: 84951 - DNA, 201 bp, Homo sapiens
gtgctcctgcagtacccaggggaggtccatggcagcttcacctgcagcatcaccgtgcagctctccaacacggcctccgtgagcggcaccaagggcatggyacagctcctcaacccctgctggtgcccgaccgagctggtggtgaagggggagcataaggagttcccgctgcccccagtcccaaaggactgcaattttgac

SEQ ID NO: 84952 - DNA, 201 bp, Homo sapiens
ccaaaggactgcaattttgacaacggggcaggcatgagttatgaggccaagcacgtctgggagtgcctacgcaagggtatgaaggaaagtcctgtgattcycctgtcggaaagtgagctcctggctgacatccttgaagaggtgaggaaggccattggagtcaccttcccccaagacaaacgctgatgtatccccgaataa

SEQ ID NO: 84953 - DNA, 201 bp, Homo sapiens
cgggcgtgaacgcggcggaagttcgcgagatggtcgcggaggcccgatcccgagccctcttccttatggaggccatctggacccgcttctttcctgcctcygaggctctgaggtctgttttggcccagggaactctaggagacctccgggtggctcgggcagaatttgggaagaatctcatccacgttccccgggccgtag

SEQ ID NO: 84954 - DNA, 201 bp, Homo sapiens
atcaagtcacctgacacatttgtgagaactatttatgcaggaaatgctctatgtacagtgaagtgtgatgagaaagtgaaagtgttttctgtccgtggaayatcctttgatgctgcagcaacaagtggcggtagtgccagttcagaaaaggcatcaagtacttcaccagtggaaatatcagagtggcttgaccagaaatta

SEQ ID NO: 84955 - DNA, 201 bp, Homo sapiens
ttgcagatttatttaaggtagttcctgaaatgactgagatattgaagaaaaaatgaatcaggatcatgccttaaaaagaaaacttttgttaaagtattccmctgaaatcacagatatttgtgggtattataacaatcattggaaagcatggagagctacatttcataatttgagggaaaatttctaacagatgccagaatg

SEQ ID NO: 84956 - DNA, 114 bp, Homo sapiens
agcattaggtgacyggctgaggcggcgccagttggccgggcacggggctgctgtaaggccgaggttgcggcggaagcggagaccatgttccgagcggcggctccggggcagctc

SEQ ID NO: 84957 - DNA, 201 bp, Homo sapiens
tgtgtacaaaggcctacttccagaggaactgacaccattgattttggcaactcagaagcagttcaattacacacacatctgtgctggagcatctgccttcrgaaagaaccttttgcccagagtagcagccaaacttgaggttgccccgatttctgacatcattgcaatcaagtcacctgacacatttgtgagaactattta

SEQ ID NO: 84958 - DNA, 129 bp, Homo sapiens
agcattaggtgactggctgaggcggcgcmagttggccgggcacggggctgctgtaaggccgaggttgcggcggaagcggagaccatgttccgagcggcggctccggggcagctccggcgggcggcctca

SEQ ID NO: 84959 - DNA, 201 bp, Homo sapiens
tattccactgaaatcacagatatttgtgggtattataacaatcattggaaagcatggagagctacatttcataatttgagggaaaatttctaacagatgcsagaatgcttgtttatgggattgctgtgtttccttttaattatttgtggttccaaacaattattgtttgaacttttttaattctgtactaaaatctataat

SEQ ID NO: 84960 - DNA, 201 bp, Homo sapiens
gagggaaaatttctaacagatgccagaatgcttgtttatgggattgctgtgtttccttttaattatttgtggttccaaacaattattgtttgaactttttwaattctgtactaaaatctataataaagcttttccacagctttaaaactatcagaaatatgcctagcctctagagaaaattgaagaaaaggagtaaaaatt

SEQ ID NO: 84961 - DNA, 201 bp, Homo sapiens
gcagccaaacttgaggttgccccgatttctgacatcattgcaatcaagtcacctgacacatttgtgagaactatttatgcaggaaatgctctatgtacagkgaagtgtgatgagaaagtgaaagtgttttctgtccgtggaacatcctttgatgctgcagcaacaagtggcggtagtgccagttcagaaaaggcatcaagt

SEQ ID NO: 84962 - DNA, 201 bp, Homo sapiens
tataacaatcattggaaagcatggagagctacatttcataatttgagggaaaatttctaacagatgccagaatgcttgtttatgggattgctgtgtttccytttaattatttgtggttccaaacaattattgtttgaacttttttaattctgtactaaaatctataataaagcttttccacagctttaaaactatcagaaa

SEQ ID NO: 84963 - DNA, 201 bp, Homo sapiens
gaactttaagttgttatatgacttggcagatcaactacatgctgcagttggtgcttcccgtgctgctgttgatgctggctttgttcccaatgacatgcaakttggacagacgggaaaaatagtagcaccagaactttatattgctgttggaatatctggagccatccaacatttagctgggatgaaagacagcaagacaat

SEQ ID NO: 84964 - DNA, 201 bp, Homo sapiens
cttgaagagtggagagaactttaagttgttatatgacttggcagatcaactacatgctgcagttggtgcttcccgtgctgctgttgatgctggctttgttmccaatgacatgcaagttggacagacgggaaaaatagtagcaccagaactttatattgctgttggaatatctggagccatccaacatttagctgggatgaa

SEQ ID NO: 84965 - DNA, 201 bp, Homo sapiens
agacttgggcagtctccttttgaaataggttgtctgtacatgttctaatgttttgtagaacacgtgtgcctgtttaagtgtattgatgtgaataatattamatatcctaattatttaattcattgtattgtttctgagaagttgggaaattaccattatacatttacaacctaatgacttttgtattttatttttcaaaat

SEQ ID NO: 84966 - DNA, 158 bp, Homo sapiens
tctcgctacattccccagcctgggctcaaacgatccttctgcctcagcctcccaaagtactaaaattacaggtgtgagccacggtgcttggcctgcattaycattttgtagtgaagttttctttttatttcaagagagaacctattgccatccacttt

SEQ ID NO: 84967 - DNA, 201 bp, Homo sapiens
cattatgacgtttgttttcaaggagagggtttaaaaatgggatcctgtaagcagacttgggcagtctccttttgaaataggttgtctgtacatgttctaakgttttgtagaacacgtgtgcctgtttaagtgtattgatgtgaataatattaaatatcctaattatttaattcattgtattgtttctgagaagttgggaaa

SEQ ID NO: 84968 - DNA, 201 bp, Homo sapiens; identical to SEQ ID NO: 84965

SEQ ID NO: 84969 - DNA, 158 bp, Homo sapiens; identical to SEQ ID NO: 84966

SEQ ID NO: 84970 - DNA, 201 bp, Homo sapiens; identical to SEQ ID NO: 84967

SEQ ID NO: 84971 - DNA, 201 bp, Homo sapiens; identical to SEQ ID NO: 84965

SEQ ID NO: 84972 - DNA, 158 bp, Homo sapiens; identical to SEQ ID NO: 84966

SEQ ID NO: 84973 - DNA, 201 bp, Homo sapiens; identical to SEQ ID NO: 84967

SEQ ID NO: 84974 - DNA, 201 bp, Homo sapiens; identical to SEQ ID NO: 84965

SEQ ID NO: 84975 - DNA, 158 bp, Homo sapiens; identical to SEQ ID NO: 84966

SEQ ID NO: 84976 - DNA, 201 bp, Homo sapiens; identical to SEQ ID NO: 84967

SEQ ID NO: 84977 - DNA, 201 bp, Homo sapiens
tttcttgttttataattcctattgcaacctcgtgcactgctcgagacacaagtgctgctgtagttagcgcttagtgacacgcgggcctttggtgggtgagygggactgtgtgtgagtgtgtgcgcgtatgtgcgcacatatgtgtatgtgtggagtatgtgtgtttgcttctccgtggatgaaatagaaactcctcattgt

SEQ ID NO: 84978 - DNA, 201 bp, Homo sapiens
gcatcttgtgcgcaccatactggctagagaatgttcacatgctttacaagctgaggatgctcaccaagccctgttggagactatgcaaaacaagtttatcmgttcacctttccttgccagtgaagatggcgtgcttggcggagtgattgtcctccgttcatgcagatgttctgccgagcctgactcctcccaaaataagca

SEQ ID NO: 84979 - DNA, 201 bp, Homo sapiens
agtgtgtgcgcgtatgtgcgcacatatgtgtatgtgtggagtatgtgtgtttgcttctccgtggatgaaatagaaactcctcattgtgtgaccaggaatgrttaaatcatctttacaaaatgtgtgctttaactgtttacaagtaaaacctaaagttgcaggaaacattttttatttcgtaaagaggtaccaactgtcgct

SEQ ID NO: 84980 - DNA, 201 bp, Homo sapiens; identical to SEQ ID NO: 84977

SEQ ID NO: 84981 - DNA, 201 bp, Homo sapiens; identical to SEQ ID NO: 84978

SEQ ID NO: 84982 - DNA, 201 bp, Homo sapiens; identical to SEQ ID NO: 84979

SEQ ID NO: 84983 - DNA, 103 bp, Homo sapiens
gtttattgaagccaatattctattttagagatttgtgttatgtttttgacaagtaactgtactgtaattatgtggctttcaattaaaaaatgtgaaaactrtt

SEQ ID NO: 84984 - DNA, 201 bp, Homo sapiens; identical to SEQ ID NO: 84977

SEQ ID NO: 84985 - DNA, 201 bp, Homo sapiens; identical to SEQ ID NO: 84978

SEQ ID NO: 84986 - DNA, 201 bp, Homo sapiens; identical to SEQ ID NO: 84979

SEQ ID NO: 84987 - DNA, 201 bp, Homo sapiens; identical to SEQ ID NO: 84977

SEQ ID NO: 84988 - DNA, 201 bp, Homo sapiens; identical to SEQ ID NO: 84978

SEQ ID NO: 84989 - DNA, 201 bp, Homo sapiens; identical to SEQ ID NO: 84979

SEQ ID NO: 84990 - DNA, 201 bp, Homo sapiens
aatatgatgatatcaagaaggtggtgaagcaggtgtcagagggccccctcaagggcatcctggactacactgagcaccagattgtctcctccaacagtgayacccactcttccatcttccatgctggggctggcaatgccctcaacaaccaccttgtcaagctcatttcctggtgtgacaacgaatttggctacagcaata

SEQ ID NO: 84991 - DNA, 201 bp, Homo sapiens
ggtgaaggccaaagtaaaaagatttggcagtatcgggcgctggtcaccagggctgcttttaactctggtaaagcagatgttctcaccatcagtgacccctyccttgacctcaactacatagtctacatgttcccatatgattccacccatggcaaatcccatggcaccatcaaggctgagaatgggaagcttgtcatcaat

SEQ ID NO: 84992 - DNA, 201 bp, Homo sapiens
tgtaactaactcaagaatttctaaactctcccaggtcacactgattcattcttaacaagatatttatatgttattaaacaggtggttctttttattttaamcagttatttttattattgagtctgtccagataagttatttataatgggcattactgaatttttaaaatgccgattacacccaaatattgtgcacatttaa

SEQ ID NO: 84993 - DNA, 201 bp, Homo sapiens
ctattacagtcttcccccgcatcagaaggttccattgccttctctttcccccacaatgcaggcaggcaccatagcccgttgggaaaaaaaagagggggacmaaatcaatgaaggtgacctaattgcagaggttgaaactgataaagccactgttggatttgagagcctggaggagtgttatatggcaaagatacttgttgc

SEQ ID NO: 84994 - DNA, 201 bp, Homo sapiens
cctctaggaaccccactctgtatcattgtagaaaaagaggcagatatatcagcatttgctgactataggccaaccgaagtaacagatttaaaaccacaagygccaccacctaccccacccccggtggccgctgttcctccaactccccagcctttagctcctacaccttcagcaccctgcccagctactcctgctggacca

SEQ ID NO: 84995 - DNA, 201 bp, Homo sapiens
aggtgtcttcacagatatcccaatcagcaacattcgtcgggttattgcacagcgattaatgcaatcaaagcaaaccatacctcattattacctttctatcratgtaaatatgggagaagttttgttggtacggaaagaacttaataagatattagaagggagaagcaaaatttctgtcaatgacttcatcataaaagcttc

SEQ ID NO: 84996 - DNA, 201 bp, Homo sapiens
ctgccactgcttcgccacctacaccttctgctcaggctcctggtagctcatatccccctcacatgcaggtacttcttcctgccctctctcccaccatgacyatgggcacagttcagagatgggaaaaaaaagtgggtgagaagctaagtgaaggagacttactggcagagatagaaactgacaaagccactataggttttg

SEQ ID NO: 84997 - DNA, 201 bp, Homo sapiens
ctaaagacaagtacataaaggtgaccctgatgaaaccttgaagttctgaaatttaactgcctaaaatgttctccttagatgtgagagaaagagaaatcagraaaattaattctcttgggggaagggcttgaattgaagctttactttagaatttagccctggtttgaaattttccattacatgatcttggtttatcatcga

SEQ ID NO: 84998 - DNA, 201 bp, Homo sapiens
cagaatgtagccccatgggcgggactcgaggctcggtggacggccttgcaggaggtacccggaactccacgagtgacctcgcgatctggcccggctcccgytcgtcgcaacagcgtgactacagggtatggcggggtccgggcactgtgcggctggacccccagttctggggccacgccgcggaaccgcttactgctgcag

SEQ ID NO: 84999 - DNA, 201 bp, Homo sapiens
tggggccacgccgcggaaccgcttactgctgcagcttttggggtcgcccggccgccgctattacagtcttcccccgcatcagaaggttccattgccttctytttcccccacaatgcaggcaggcaccatagcccgttgggaaaaaaaagagggggacaaaatcaatgaaggtgacctaattgcagaggttgaaactgataa

SEQ ID NO: 85000 - DNA, 201 bp, Homo sapiens
ccgggtggtggatggagcagttggagcccagtggcttgctgagtttagaaagtaccttgaaaaacctatcactatgttgttgtaactaactcaagaatttytaaactctcccaggtcacactgattcattcttaacaagatatttatatgttattaaacaggtggttctttttattttaaccagttatttttattattgag

SEQ ID NO: 85001 - DNA, 201 bp, Homo sapiens
tctggggccacgccgcggaaccgcttactgctgcagcttttggggtcgcccggccgccgctattacagtcttcccccgcatcagaaggttccattgccttytctttcccccacaatgcaggcaggcaccatagcccgttgggaaaaaaaagagggggacaaaatcaatgaaggtgacctaattgcagaggttgaaactgat

SEQ ID NO: 85002 - DNA, 201 bp, Homo sapiens
agagaaaaaattaactaggttgctactttatttgcctaaatacttttttctattttgttagattttgcctttcttttggaaggaaggaggcgatattctgsattataaaaatgaattgggaacattatcacaattccagactttctattaatatttatgtgttttaataaacgtttgaaattatttatgactacttaaaat

SEQ ID NO: 85003 - DNA, 201 bp, Homo sapiens; identical to SEQ ID NO: 84992

SEQ ID NO: 85004 - DNA, 201 bp, Homo sapiens; identical to SEQ ID NO: 84993

SEQ ID NO: 85005 - DNA, 201 bp, Homo sapiens; identical to SEQ ID NO: 84994

SEQ ID NO: 85006 - DNA, 201 bp, Homo sapiens; identical to SEQ ID NO: 84995

SEQ ID NO: 85007 - DNA, 201 bp, Homo sapiens; identical to SEQ ID NO: 84996

SEQ ID NO: 85008 - DNA, 201 bp, Homo sapiens; identical to SEQ ID NO: 84997

SEQ ID NO: 85009 - DNA, 201 bp, Homo sapiens; identical to SEQ ID NO: 84998

SEQ ID NO: 85010 - DNA, 201 bp, Homo sapiens; identical to SEQ ID NO: 84999

SEQ ID NO: 85011 - DNA, 201 bp, Homo sapiens; identical to SEQ ID NO: 85000

SEQ ID NO: 85012 - DNA, 201 bp, Homo sapiens; identical to SEQ ID NO: 85001

SEQ ID NO: 85013 - DNA, 201 bp, Homo sapiens; identical to SEQ ID NO: 85002

SEQ ID NO: 85014 - DNA, 201 bp, Homo sapiens
ttcatccttggcagcttacatcagttgtttgtttgattagaaaaatgaagcagacacacacacacacacacacacacacacacacacacacacacacaaayatataacctatgccaataaaaatgtctcagcaacagtggaattcaccttggtgtttctctctgtaatttgtgtggggtttacccctcacaggtttaagag

SEQ ID NO: 85015 - DNA, 201 bp, Homo sapiens
ggtccgcctggccatcattgagtatatgccgctgctggcaggccagctgggtgtggaattctttgatgaaaagctgaattctttatgtatggcttggctcrtggaccatgtatacgccatccgagaagctgccaccaacaacctcatgaaactagttcagaagtttggtacagagtgggcccaaaatactattgttcccaa

SEQ ID NO: 85016 - DNA, 201 bp, Homo sapiens
tgacacctagtccttgctgcattgtacagtagcttttcaaactgcagttttattgctaagtttttagtatgggtgatactggagtcttatcatttgaagtstttgcttttctacttttacagtaaaacctcattaattctgaaatttaagataatgagttaagctgaagagtttactgaagcaaattaatagtgaggaagc

SEQ ID NO: 85017 - DNA, 201 bp, Homo sapiens
atcattgagtatatgccgctgctggcaggccagctgggtgtggaattctttgatgaaaagctgaattctttatgtatggcttggctcgtggaccatgtatrcgccatccgagaagctgccaccaacaacctcatgaaactagttcagaagtttggtacagagtgggcccaaaatactattgttcccaaagtgttagtaatg

SEQ ID NO: 85018 - DNA, 173 bp, Homo sapiens
gtcttcttgagttcagacctacaactcctgcagtgggggtcagaagggagccttaatcatcgggacagaaackcggctccccaacttcggctaaaccagcgtggcggccttcgtccctactgcctgggcgcggggcggggcctgggcgcggggcggggcctgggcgcggggcg

SEQ ID NO: 85019 - DNA, 201 bp, Homo sapiens
cctatttttttttttaactaccttaaacttaagggaaaagttctcctatcttgatttcactggaatataggctttaggagctctgtaaggctggtattttkgtctgttttatcttctactgtatcgccagtgcctggaacagtgtctggtgcacataataggtgctcaataaaaatgtgttcaatggatgaatttctaaaa

SEQ ID NO: 85020 - DNA, 201 bp, Homo sapiens
atgttgtttttcatccttggcagcttacatcagttgtttgtttgattagaaaaatgaagcagacacacacacacacacacacacacacacacacacacacacacacaaacatataacctatgccaataaaaatgtctcagcaacagtggaattcaccttggtgtttctctctgtaatttgtgtggggtttacccctcacag

SEQ ID NO: 85021 - DNA, 201 bp, Homo sapiens
ttgagctggcttgtccaggcattcaggttgcttgcgtagacttccagggaagcaagcctgtccttcctgacccggcggttaacctggtgcacttttgttcytttgttaactgttgtgttgtcactaaactgaaaggctggggcttgcccttagacgtcacattggctctgtccctgtggcgatggcagggcagggtggcca

SEQ ID NO: 85022 - DNA, 201 bp, Homo sapiens
aatgttgtttttcatccttggcagcttacatcagttgtttgtttgattagaaaaatgaagcagacacacacacacacacacacacacacacacacacacacacacacaaacatataacctatgccaataaaaatgtctcagcaacagtggaattcaccttggtgtttctctctgtaatttgtgtggggtttacccctcaca

SEQ ID NO: 85023 - DNA, 201 bp, Homo sapiens
taatgttgtttttcatccttggcagcttacatcagttgtttgtttgattagaaaaatgaagcagacacacacacacacacacacacacacacacacacacmcacacacaaacatataacctatgccaataaaaatgtctcagcaacagtggaattcaccttggtgtttctctctgtaatttgtgtggggtttacccctcac

SEQ ID NO: 85024 - DNA, 201 bp, Homo sapiens
gtaatgttgtttttcatccttggcagcttacatcagttgtttgtttgattagaaaaatgaagcagacacacacacacacacacacacacacacacacacacacacacacaaacatataacctatgccaataaaaatgtctcagcaacagtggaattcaccttggtgtttctctctgtaatttgtgtggggtttacccctca

SEQ ID NO: 85025 - DNA, 201 bp, Homo sapiens
gaaaggacccgaagtgaattgttgccatttcttacagatacaatttatgatgaagatgaggtactattagctcttgctgagcagctgggaaatttcactgrcctagtgggaggtcctgactttgcccactgtctgctgcctcctttggaaaatctggcaactgtggaagagactgttgttcgtgacaaggctgtggagtcc

SEQ ID NO: 85026 - DNA, 201 bp, Homo sapiens
ggatgtcaaatactttgcacaggaagctataagtgttcttgcattggcataatgaggagcaggagggaaaaggcctttactagattcttgtcacaaatttmtagtcaatgtgttcttaactgggtggagaaagaatggaaaaccttcaagatctcatccaagcaaatggcaacaacttagaagaaatcatttagtgactta

SEQ ID NO: 85027 - DNA, 201 bp, Homo sapiens
ctctgtgtctctccatcattccaaagctaaatgtacatgtttagaataacttattttataaactcttcgggagacatgttgagatttgaccgtaatgaaarccacattttcctgaattatgatggtctgcattagtctcatgtgaaaggggaatgtggaagctcagggttaatgtagtggttgttttggtttttatttgct

SEQ ID NO: 85028 - DNA, 201 bp, Homo sapiens; identical to SEQ ID NO: 85015

SEQ ID NO: 85029 - DNA, 201 bp, Homo sapiens; identical to SEQ ID NO: 85017

SEQ ID NO: 85030 - DNA, 201 bp, Homo sapiens
aaatgatgttctttatttcacgaaatcatcaatcttaagcacgagcaggaataaacaactcccagaagaagcttaattcattcttcctggattttcactgkgtgttattaaatcacaaaaatgacagtccccacactgccctttcccactgacaccaagtccaaccgtgagcacagtgcctctgcgaagcatcctggcacc

SEQ ID NO: 85031 - DNA, 173 bp, Homo sapiens; identical to SEQ ID NO: 85018

SEQ ID NO: 85032 - DNA, 201 bp, Homo sapiens; identical to SEQ ID NO: 85025

SEQ ID NO: 85033 - DNA, 201 bp, Homo sapiens
agtagtgtacacactgctaacgtgaatcagactggaaagcaagtcagtacttcagagtagccccgcagaaaaagagcgatactaagccttcttagtgtttygtttgttagtagtgatgaagagaaaactgcttggaagcttccatgggtcactagttagggacagagcagcacaggtgatcagacagggctgagcaaacac

SEQ ID NO: 85034 - DNA, 201 bp, Homo sapiens
ccctcacaaccttgcggaattttgggatggggaagaggagcattgaggaccgtgttcaagaggaagctcactgccttgtggaggagttgagaaaaaccaargcttcaccctgtgatcccactttcatcctgggctgtgctccctgcaatgtgatctgctccgttgttttccagaaacgatttgattataaagatcagaatt

SEQ ID NO: 85035 - DNA, 201 bp, Homo sapiens
cccctttttttattaggaatcatttccagcaatggaaagagatggaaggagatccggcgtttctccctcacaaccttgcggaattttgggatggggaagargagcattgaggaccgtgttcaagaggaagctcactgccttgtggaggagttgagaaaaaccaaggcttcaccctgtgatcccactttcatcctgggctgt

SEQ ID NO: 85036 - DNA, 201 bp, Homo sapiens
acctcaatactactgcagttaccaaagggattgtttctctgccaccctcataccagatctgcttcatccctgtctgaagaatgctagcccatctggctgcygatctgctatcacctgcaactctttttttatcaaggacattcccactattatgtcttctctgacctctcatcaaatcttcccattcactcaatatcccat

SEQ ID NO: 85037 - DNA, 201 bp, Homo sapiens
cacatatttctgtgtcagctttggtaactggggtgagggggatggaaaacagagccctaaaaagcttctcagcagagcttagcctatctgcatggctgccragtgttgcagcactttcttccttggctgtgaattctcccagtttctgcccctttttttattaggaatcatttccagcaatggaaagagatggaaggagat

SEQ ID NO: 85038 - DNA, 201 bp, Homo sapiens
acaaagtgcttaaaaatgttgctcttacacgaagttacattagggagaaagtaaaagaacaccaagcatcactggatgttaacaatcctcgggactttatsgattgcttcctgatcaaaatggagcaggaaaaggacaaccaaaagtcagaattcaatattgaaaacttggttggcactgtagctgatctatttgttgctg

SEQ ID NO: 85039 - DNA, 201 bp, Homo sapiens
gtgccccatgcagtgaccactgatactaagttcagaaactacctcatccccaagggcacaaccataatggcattactgacttccgtgctacatgatgacaragaatttcctaatccaaatatctttgaccctggccactttctagataagaatggcaactttaagaaaagtgactacttcatgcctttctcagcaggaaaa

SEQ ID NO: 85040 - DNA, 201 bp, Homo sapiens
gaccactgatactaagttcagaaactacctcatccccaagggcacaaccataatggcattactgacttccgtgctacatgatgacaaagaatttcctaatscaaatatctttgaccctggccactttctagataagaatggcaactttaagaaaagtgactacttcatgcctttctcagcaggaaaacgaatttgtgcagg

SEQ ID NO: 85041 - DNA, 201 bp, Homo sapiens; identical to SEQ ID NO: 85034

SEQ ID NO: 85042 - DNA, 110 bp, Homo sapiens
acatgtcaamgagacacacactaaattagcagggagtgttataaaaactttggagtgcaagctcacagctgtcttaataagaagagaaggcttcaatggaaccttttgtg

SEQ ID NO: 85043 - DNA, 201 bp, Homo sapiens
attactaaaggacttggaatcatttccagcaatggaaagagatggaaggagatccggcgtttctccctcacaaccttgcggaattttgggatggggaagargagcattgaggaccgtgttcaagaggaagctcactgccttgtggaggagttgagaaaaaccaaggcttcaccctgtgatcccactttcatcctgggctgt

SEQ ID NO: 85044 - DNA, 201 bp, Homo sapiens; identical to SEQ ID NO: 85036

SEQ ID NO: 85045 - DNA, 201 bp, Homo sapiens; identical to SEQ ID NO: 85038

SEQ ID NO: 85046 - DNA, 201 bp, Homo sapiens
tacctcatccccaagagctttgataacaagataatgctggctgcataaaactagggcacaaccataatggcattactgacttccgtgctacatgatgacaragaatttcctaatccaaatatctttgaccctggccactttctagataagaatggcaactttaagaaaagtgactacttcatgcctttctcagcaggaaaa

SEQ ID NO: 85047 - DNA, 201 bp, Homo sapiens
gagctttgataacaagataatgctggctgcataaaactagggcacaaccataatggcattactgacttccgtgctacatgatgacaaagaatttcctaatscaaatatctttgaccctggccactttctagataagaatggcaactttaagaaaagtgactacttcatgcctttctcagcaggaaaacgaatttgtgcagg

SEQ ID NO: 85048 - DNA, 201 bp, Homo sapiens; identical to SEQ ID NO: 85034

SEQ ID NO: 85049 - DNA, 110 bp, Homo sapiens; identical to SEQ ID NO: 85042

SEQ ID NO: 85050 - DNA, 201 bp, Homo sapiens; identical to SEQ ID NO: 85043

SEQ ID NO: 85051 - DNA, 201 bp, Homo sapiens; identical to SEQ ID NO: 85036

SEQ ID NO: 85052 - DNA, 201 bp, Homo sapiens; identical to SEQ ID NO: 85038

SEQ ID NO: 85053 - DNA, 201 bp, Homo sapiens; identical to SEQ ID NO: 85039

SEQ ID NO: 85054 - DNA, 201 bp, Homo sapiens; identical to SEQ ID NO: 85040

SEQ ID NO: 85055 - DNA, 201 bp, Homo sapiens
gcatggagctgtttttattcctgacctccattttacagaactttaacctgaaatctctggttgacccaaagaaccttgacaccactccagttgtcaatggwtttgcctctgtgccgcccttctaccagctgtgcttcattcctgtctgaagaagagcagatggcctggctgctgctgtgcagtccctgcagctctctttcc

SEQ ID NO: 85056 - DNA, 201 bp, Homo sapiens
ttgaacgtgtgattggcagaaaccggagcccctgcatgcaagacaggagccacatgccctacacagatgctgtggtgcacgaggtccagagatacattgascttctccccaccagcctgccccatgcagtgacctgtgacattaaattcagaaactatctcattcccaagggcacaaccatattaatttccctgacttctg

SEQ ID NO: 85057 - DNA, 201 bp, Homo sapiens
ggaaagaaatggaaggagatccggcgtttctccctcatgacgctgcggaattttgggatggggaagaggagcattgaggaccgtgttcaagaggaagcccrctgccttgtggaggagttgagaaaaaccaaggcctcaccctgtgatcccactttcatcctgggctgtgctccctgcaatgtgatctgctccattattttc

SEQ ID NO: 85058 - DNA, 201 bp, Homo sapiens
accctcatcactttctggatgaaggtggcaattttaagaaaagtaaatacttcatgcctttctcagcaggaaaacggatttgtgtgggagaagccctggcyggcatggagctgtttttattcctgacctccattttacagaactttaacctgaaatctctggttgacccaaagaaccttgacaccactccagttgtcaatg

SEQ ID NO: 85059 - DNA, 201 bp, Homo sapiens
tggaattgttttcagcaatggaaagaaatggaaggagatccggcgtttctccctcatgacgctgcggaattttgggatggggaagaggagcattgaggacygtgttcaagaggaagcccgctgccttgtggaggagttgagaaaaaccaaggcctcaccctgtgatcccactttcatcctgggctgtgctccctgcaatgt

SEQ ID NO: 85060 - DNA, 201 bp, Homo sapiens
agagattgaacgtgtgattggcagaaaccggagcccctgcatgcaagacaggagccacatgccctacacagatgctgtggtgcacgaggtccagagatacmttgaccttctccccaccagcctgccccatgcagtgacctgtgacattaaattcagaaactatctcattcccaagggcacaaccatattaatttccctgac

SEQ ID NO: 85061 - DNA, 201 bp, Homo sapiens
ggagaggagttttctggaagaggcattttcccactggctgaaagagctaacagaggatttggaattgttttcagcaatggaaagaaatggaaggagatccrgcgtttctccctcatgacgctgcggaattttgggatggggaagaggagcattgaggaccgtgttcaagaggaagcccgctgccttgtggaggagttgaga

SEQ ID NO: 85062 - DNA, 201 bp, Homo sapiens
gaagagattgaacgtgtgattggcagaaaccggagcccctgcatgcaagacaggagccacatgccctacacagatgctgtggtgcacgaggtccagagatrcattgaccttctccccaccagcctgccccatgcagtgacctgtgacattaaattcagaaactatctcattcccaagggcacaaccatattaatttccctg

SEQ ID NO: 85063 - DNA, 201 bp, Homo sapiens
aatttttctcctatcattgattacttcccgggaactcacaacaaattacttaaaaacgttgcttttatgaaaagttatattttggaaaaagtaaaagaacrccaagaatcaatggacatgaacaaccctcaggactttattgattgcttcctgatgaaaatggagaaggaaaagcacaaccaaccatctgaatttactatt

SEQ ID NO: 85064 - DNA, 201 bp, Homo sapiens
ctgcaatgtgatctgctccattattttccataaacgttttgattataaagatcagcaatttcttaacttaatggaaaagttgaatgaaaacatcaagattktgagcagcccctggatccagatctgcaataatttttctcctatcattgattacttcccgggaactcacaacaaattacttaaaaacgttgcttttatgaa

SEQ ID NO: 85065 - DNA, 201 bp, Homo sapiens
ggaaagaaatggaaggagatccggcgtttctccctcatgacgctgcggaattttgggatggggaagaggagcattgaggaccgtgttcaagaggaagcccrctgccttgtggaggagttgagaaaaaccaagggtgggtgaccctactccatatcactgaccttactggactactatcttctctactgacattcttggaaa

SEQ ID NO: 85066 - DNA, 201 bp, Homo sapiens
ctgagagccaagggaatttgcacatatttgtgctgtgtgtgtacaggcatgattgtgcgtacagtgtgggtataaaaggttcatttaatcccatgttctcytgaactttgcttttttgctttcaaataagaaatgatgaatatagattttgagttcattttttgaaagagttaaagagcagtgtttttcccattacctatt

SEQ ID NO: 85067 - DNA, 201 bp, Homo sapiens
tggaattgttttcagcaatggaaagaaatggaaggagatccggcgtttctccctcatgacgctgcggaattttgggatggggaagaggagcattgaggacygtgttcaagaggaagcccgctgccttgtggaggagttgagaaaaaccaagggtgggtgaccctactccatatcactgaccttactggactactatcttct

SEQ ID NO: 85068 - DNA, 201 bp, Homo sapiens
atgagtcctggttgttagctcatgtgaagcgggggtttgaagctgagagccaagggaatttgcacatatttgtgctgtgtgtgtacaggcatgattgtgcrtacagtgtgggtataaaaggttcatttaatcccatgttctcctgaactttgcttttttgctttcaaataagaaatgatgaatatagattttgagttcatt

SEQ ID NO: 85069 - DNA, 201 bp, Homo sapiens; identical to SEQ ID NO: 85061

SEQ ID NO: 85070 - DNA, 201 bp, Homo sapiens
atgggtaatgttctacaaggaggtgaaggacaagctcctacaaggcaggcagtattgggtgcaggcttacctatttctactccatgtaccaccataaacaragtttgtgcttcaggaatgaaagccatcatgatggcctctcaaagtcttatgtgtggacatcagatcaagcaagagacaggctccttagcaaaaatatgc

SEQ ID NO: 85071 - DNA, 201 bp, Homo sapiens
gttctacaaggaggtgaaggacaagctcctacaaggcaggcagtattgggtgcaggcttacctatttctactccatgtaccaccataaacaaagtttgtgyttcaggaatgaaagccatcatgatggcctctcaaagtcttatgtgtggacatcagatcaagcaagagacaggctccttagcaaaaatatgctgtcatgtc

SEQ ID NO: 85072 - DNA, 156 bp, Homo sapiens
gggccgctaggggtgcggggttggggaggaggccgctagtctacgcctgtggagcsgatactcagccctctgcgaccatggctgtgctggcggcacttctgcgcagcggcgcccgcagccgcagccccctgctccggaggctggtgcaggaaataa

SEQ ID NO: 85073 - DNA, 201 bp, Homo sapiens
aggcttacctatttctactccatgtaccaccataaacaaagtttgtgcttcaggaatgaaagccatcatgatggcctctcaaagtcttatgtgtggacatsagatcaagcaagagacaggctccttagcaaaaatatgctgtcatgtcaggaggtgagacctggacacacagaagaatcaagattctctcagatctgagcc

SEQ ID NO: 85074 - DNA, 190 bp, Homo sapiens
gggccgctaggggtgcggggttggggaggaggccgctagtctacgcctgtggagccgatactcagccctctgcgaccatggctgtgctgscggcacttctgcgcagcggcgcccgcagccgcagccccctgctccggaggctggtgcaggaaataagatatgtggaacggagttatgtatcaaaacccac

SEQ ID NO: 85075 - DNA, 169 bp, Homo sapiens
gggccgctaggggtgcggggttggggaggaggccgctagtctacgcctgtggagccgatactcagcccwctgcgaccatggctgtgctggcggcacttctgcgcagcggcgcccgcagccgcagccccctgctccggaggctggtgcaggaaataagatatgtggaacg

SEQ ID NO: 85076 - DNA, 201 bp, Homo sapiens
tccttgctgccagccactaagcttggttccattgcaattcagggagccattgaaaaggcagggattccaaaagaagaagtgaaagaagcatacatgggtartgttctacaaggaggtgaaggacaagctcctacaaggcaggcagtattgggtgcaggcttacctatttctactccatgtaccaccataaacaaagtttgt

SEQ ID NO: 85077 - DNA, 163 bp, Homo sapiens
gggccgctaggggtgcggggttggggaggaggccgctagtctacgcctgtggagccgatactsagccctctgcgaccatggctgtgctggcggcacttctgcgcagcggcgcccgcagccgcagccccctgctccggaggctggtgcaggaaataagatatgt

SEQ ID NO: 85078 - DNA, 179 bp, Homo sapiens
gggccgctaggggtgcggggttggggaggaggccgctagtctacgcctgtggagccgatactcagccctctgcgaccawggctgtgctggcggcacttctgcgcagcggcgcccgcagccgcagccccctgctccggaggctggtgcaggaaataagatatgtggaacggagttatgta

SEQ ID NO: 85079 - DNA, 201 bp, Homo sapiens
tgtaccaccataaacaaagtttgtgcttcaggaatgaaagccatcatgatggcctctcaaagtcttatgtgtggacatcaggatgtgatggtggcaggtgsgatggagagcatgtccaatgttccatatgtaatgaacagaggatcaacaccatatggtggggtaaagcttgaagatttgattgtaaaagacgggctaact

SEQ ID NO: 85080 - DNA, 201 bp, Homo sapiens
cacagttacagtaaaaggtcaaccagatgtagtggtgaaagaagatgaagaatataaacgtgttgattttagcaaagttccaaagctgaagacagttttcyagaaagaaaatggcacagtaacagctgccaatgccagtacactgaatgatggagcagctgctctggttctcatgacggcagatgcagcgaagaggctcaa

SEQ ID NO: 85081 - DNA, 201 bp, Homo sapiens
acagctgccaatgccagtacactgaatgatggagcagctgctctggttctcatgacggcagatgcagcgaagaggctcaatgttacaccactggcaagaayagtagcatttgctgacgctgctgtagaacctattgattttccaattgctcctgtatatgctgcatctatggttcttaaagatgtgggattgaaaaaagaa

SEQ ID NO: 85082 - DNA, 201 bp, Homo sapiens
tgcagcgaagaggctcaatgttacaccactggcaagaatagtagcatttgctgacgctgctgtagaacctattgattttccaattgctcctgtatatgctscatctatggttcttaaagatgtgggattgaaaaaagaagatattgcaatgtgggaagtaaatgaagcctttagtctggttgtactagcaaacattaaaat

SEQ ID NO: 85083 - DNA, 201 bp, Homo sapiens; identical to SEQ ID NO: 85076

SEQ ID NO: 85084 - DNA, 201 bp, Homo sapiens
tgatgtctacaataaaattcatatgggcagctgtgctgagaatacagcaaagaagctgaatattgcacgaaatgaacaggacgcttatgctattaattctyataccagaagtaaagcagcatgggaagctgggaaatttggaaatgaagttattcctgtcacagttacagtaaaaggtcaaccagatgtagtggtgaaaga

SEQ ID NO: 85085 - DNA, 163 bp, Homo sapiens; identical to SEQ ID NO: 85077

SEQ ID NO: 85086 - DNA, 201 bp, Homo sapiens
gaacctattgattttccaattgctcctgtatatgctgcatctatggttcttaaagatgtgggattgaaaaaagaagatattgcaatgtgggaagtaaatgwagcctttagtctggttgtactagcaaacattaaaatgttggagattgatccccaaaaagtgaatatcaatggaggagctgtttctctgggacatccaatt

SEQ ID NO: 85087 - DNA, 201 bp, Homo sapiens
gttccaaagctgaagacagttttccagaaagaaaatggcacagtaacagctgccaatgccagtacactgaatgatggagcagctgctctggttctcatgayggcagatgcagcgaagaggctcaatgttacaccactggcaagaatagtagcatttgctgacgctgctgtagaacctattgattttccaattgctcctgta

SEQ ID NO: 85088 - DNA, 201 bp, Homo sapiens
agaaacaagacagaagcccatgtcctcagggtctagagtgggggcaatttcttataacctcaacattcagggttgggggaggtcaagcagaaaaccctggmgtttgggctctgaattactatagcagcatagagagtgggaagggaggtagaaactgatatgctgaatggatatataaaaaagggaacagatcaccacttc

SEQ ID NO: 85089 - DNA, 201 bp, Homo sapiens
atgggtaatgttctacaaggaggtgaaggacaagctcctacaaggcaggcagtattgggtgcaggcttacctatttctactccatgtaccaccataaacaragtttgtgcttcaggaatgaaagccatcatgatggcctctcaaagtcttatgtgtggacatcaggatgtgatggtggcaggtgggatggagagcatgtcc

SEQ ID NO: 85090 - DNA, 201 bp, Homo sapiens
gttctacaaggaggtgaaggacaagctcctacaaggcaggcagtattgggtgcaggcttacctatttctactccatgtaccaccataaacaaagtttgtgyttcaggaatgaaagccatcatgatggcctctcaaagtcttatgtgtggacatcaggatgtgatggtggcaggtgggatggagagcatgtccaatgttcca

SEQ ID NO: 85091 - DNA, 156 bp, Homo sapiens; identical to SEQ ID NO: 85072

SEQ ID NO: 85092 - DNA, 201 bp, Homo sapiens
aggcttacctatttctactccatgtaccaccataaacaaagtttgtgcttcaggaatgaaagccatcatgatggcctctcaaagtcttatgtgtggacatsaggatgtgatggtggcaggtgggatggagagcatgtccaatgttccatatgtaatgaacagaggatcaacaccatatggtggggtaaagcttgaagattt

SEQ ID NO: 85093 - DNA, 190 bp, Homo sapiens; identical to SEQ ID NO: 85074

SEQ ID NO: 85094 - DNA, 169 bp, Homo sapiens; identical to SEQ ID NO: 85075

SEQ ID NO: 85095 - DNA, 201 bp, Homo sapiens
aagtttgtgcttcaggaatgaaagccatcatgatggcctctcaaagtcttatgtgtggacatcaggatgtgatggtggcaggtgggatggagagcatgtcmaatgttccatatgtaatgaacagaggatcaacaccatatggtggggtaaagcttgaagatttgattgtaaaagacgggctaactgatgtctacaataaaa

SEQ ID NO: 85096 - DNA, 179 bp, Homo sapiens; identical to SEQ ID NO: 85078

SEQ ID NO: 85097 - DNA, 201 bp, Homo sapiens
gattatgcgggccttcagccgcgaggcactcgaatgctacgtgccggtgatcaccgaggaagtgggcagcagcctggagcagtggctgagctgcggcgagmgcggcctcctggtctaccccgaggtgaagcgcctcatgttccgaatcgccatgcgcatcctactgggctgcgaaccccaactggcgggcgacggggactc

SEQ ID NO: 85098 - DNA, 201 bp, Homo sapiens
actggccagcgtcggtgcgcaccattctgggatctggctgcctctctaacctgcacgactcctcgcacaagcagcgcaagaaggtgattatgcgggccttyagccgcgaggcactcgaatgctacgtgccggtgatcaccgaggaagtgggcagcagcctggagcagtggctgagctgcggcgagcgcggcctcctggtct

SEQ ID NO: 85099 - DNA, 201 bp, Homo sapiens
cagagatcttcaccaacaaggaagaatttaatcctgaccgattcatgctgcctcacccagaggatgcatccaggttcagcttcattccatttggaggaggscttaggagctgtgtaggcaaagaatttgcaaaaattcttctcaaaatatttacagtggagctggccaggcattgtgactggcagcttctaaatggacctc

SEQ ID NO: 85100 - DNA, 201 bp, Homo sapiens; identical to SEQ ID NO: 85097

SEQ ID NO: 85101 - DNA, 201 bp, Homo sapiens; identical to SEQ ID NO: 85098

SEQ ID NO: 85102 - DNA, 201 bp, Homo sapiens; identical to SEQ ID NO: 85099

SEQ ID NO: 85103 - DNA, 201 bp, Homo sapiens
ggaggagccgaaaaagctgctgaagattcaggaggtggtgatgacaaaaagtccaaaacatgtttaatgttgtaatattatctaactggtctaaacttcaratatcattttacctttgaagaaaaccagaaaacattcaaaagaacttcaacaaatcatcacgtaacaggatcttcagaaaaactaccctgtgactatgaa

SEQ ID NO: 85104 - DNA, 201 bp, Homo sapiens
ataaatgtggtggagaaattcaaagtacctgtagaggttcttaccagatggatgtacactgtgaggaaagggtaccgagctgtcacttaccacaattggcrgcatgggttcaacgtggggcagaccatgtttactttgctgatgacaggaagattaaagaagtactacacagatctcgaagcctttgccatgcttgctgct

SEQ ID NO: 85105 - DNA, 201 bp, Homo sapiens
tgattccgacgcctcctgcagaccactggacactcattagtgggttgccaacatatgttgctgaaaatggatttatctgtaacatgatgaatgcccctgcrgatgaatacttcacatttcagaaaggacctgtagacgaaactggttgggtcattaagaatgttttgtccctgcctattgtcaacaagaaagaagatattg

SEQ ID NO: 85106 - DNA, 201 bp, Homo sapiens
tgtgcttggagctgctgtggaccgtgcaggaggaggggggcaccccagagcagggggttcacagggccctgcagaggctggcccacctgctccaggctgaycgctgcagcatgttcctgtgccggtcccggaacggcatacctgaggtggcctctaggttgctggatgtcacccccacctccaagtttgaggacaacctgg

SEQ ID NO: 85107 - DNA, 201 bp, Homo sapiens
ctgagctgacccaggtggaggagtcagccctgtgcttggagctgctgtggaccgtgcaggaggaggggggcaccccagagcagggggttcacagggccctrcagaggctggcccacctgctccaggctgaccgctgcagcatgttcctgtgccggtcccggaacggcatacctgaggtggcctctaggttgctggatgtca

SEQ ID NO: 85108 - DNA, 201 bp, Homo sapiens
atcccgaagaagccagatccttatgtggtcagccaataaagtatttgaagaactcacagatgttgagcgacagtttcacaaagcgctctacacggttagawcatatctgaactgtgaacgatactccattggactgctggacatgaccaaggagaaggaattctacgatgaatggccaatcaagcttggagaagtagagcc

SEQ ID NO: 85109 - DNA, 201 bp, Homo sapiens
aatttcttggatggtctcttttaaatactgacacctacgataagatgaataagctagaaaacagaaaggacattgctcaggaaatgctcatgaaccaaacsaaagccactcctgaagaaattaagtccattttgaaatttcaagagaagttaaatgttgatgtaattgacgactgtgaagaaaaacaacttgttgcaattt

SEQ ID NO: 85110 - DNA, 201 bp, Homo sapiens
gaaatcttcaagaacagccaggtgccagtccagtccagcatgtccttctctgagctgacccaggtggaggagtcagccctgtgcttggagctgctgtggaycgtgcaggaggaggggggcaccccagagcagggggttcacagggccctgcagaggctggcccacctgctccaggctgaccgctgcagcatgttcctgtgc

SEQ ID NO: 85111 - DNA, 201 bp, Homo sapiens; identical to SEQ ID NO: 85103

SEQ ID NO: 85112 - DNA, 201 bp, Homo sapiens
ataaatgtggtggagaaattcaaagtacctgtagaggttcttaccagatggatgtacactgtgaggaaagggtaccgagctgtcacttaccacaattggcrgcatgggttcaacgtggggcagaccatgtttactttgctgatggtaggaagattaaagaagtactacacagatctcgaagcctttgccatgcttgctgct

SEQ ID NO: 85113 - DNA, 201 bp, Homo sapiens; identical to SEQ ID NO: 85105

SEQ ID NO: 85114 - DNA, 201 bp, Homo sapiens; identical to SEQ ID NO: 85106

SEQ ID NO: 85115 - DNA, 201 bp, Homo sapiens; identical to SEQ ID NO: 85107

SEQ ID NO: 85116 - DNA, 201 bp, Homo sapiens; identical to SEQ ID NO: 85108

SEQ ID NO: 85117 - DNA, 201 bp, Homo sapiens; identical to SEQ ID NO: 85109

SEQ ID NO: 85118 - DNA, 201 bp, Homo sapiens; identical to SEQ ID NO: 85110

SEQ ID NO: 85119 - DNA, 201 bp, Homo sapiens
ggcggcgcggagcgaccctggcagagctggcgcaaacagggcgagaggtcgctgggcagcgttcgaggaccagagggagctcggccacagaagaccccagygatctgatcccgggatcccggctccaagctctcctcgcattttacagatttcacccccgcgactatctccccaaaacggagcctttatatcaagagaagg

SEQ ID NO: 85120 - DNA, 201 bp, Homo sapiens
gatttgaaaataggatccaaaacacggctgggtttcagcatccaccaatgaactgaaaggtgaataaaggacgttcatgagaaatcgactaccagctgatraaatacctgcaaagtgctctaaaaattaaatattttgactttaagggtcctagtaagtgccacttccactaagaatacagtttgaatgtataatcagtag

SEQ ID NO: 85121 - DNA, 171 bp, Homo sapiens
tgacgcccccgaacccagctgcagaagctgccgccacctccaatgcacaaggtgtctcatctgaaaagaaacctgagccccagggaggcggcgcggagcgaccctggcagagctggcgcaaacagggcgagaggtcgctgggcagcgttcgaggaccagagggagctcggc

SEQ ID NO: 85122 - DNA, 168 bp, Homo sapiens
tgacgcccccgaacccagctgcagaagctgccgccacctccaatgcacaaggtgtctcatctgaaaagaaacctgagccccagggaggcggcgcggagcgaccctggcagagctggcgcaaacagggcgagaggtcgctgggcagcgttcgaggaccagagggagctc

SEQ ID NO: 85123 - DNA, 170 bp, Homo sapiens
tgacgcccccgaacccagctgcagaagctgccgccacctccaatgcacaaggtgtctcatctgaaaagaaacctgagccccagggaggcggcgcggagcgaccctggcagagctggcgcaaacagggcgagaggtcgctgggcagcgttcgaggaccagagggagctcgg

SEQ ID NO: 85124 - DNA, 201 bp, Homo sapiens
tccagtggtgtagaaggtaccagctaaagtgaaccactatgtaatattaggccattctaaaggaaagatgttccatgtcatcagagatggtaaaataggcmgggaaaaaaaaatctttggtaccaaagattacacttgtgtttctacacagcaaaccatttttctttcatgaaaataatatattattaacatgaatatatt

SEQ ID NO: 85125 - DNA, 131 bp, Homo sapiens
atttttaaataaagtcttaaaagcataaataggtaactacttttaaaaaaaaagtcatgagaaatcacactcaagcattatcaagtgaagaaaattcatartagcaaataaaactgcaaacattttacctt

SEQ ID NO: 85126 - DNA, 201 bp, Homo sapiens; identical to SEQ ID NO: 85119

SEQ ID NO: 85127 - DNA, 201 bp, Homo sapiens
acagaaacatggatattgaaatatgaaatagtacaatataaagatagatagaaaagtatgctgagttgacatgttgaaaaacacagtctcttgaagatatrctggaatacattatttttgaatattttgaatattttttgaatatttttaaataaagtcttaaaagcataaataggtaactacttttaaaaaaaaagtcat

SEQ ID NO: 85128 - DNA, 171 bp, Homo sapiens; identical to SEQ ID NO: 85121

SEQ ID NO: 85129 - DNA, 168 bp, Homo sapiens; identical to SEQ ID NO: 85122

SEQ ID NO: 85130 - DNA, 170 bp, Homo sapiens; identical to SEQ ID NO: 85123

SEQ ID NO: 85131 - DNA, 171 bp, Homo sapiens
ttcatcctggcgtttgcctgcagcaagatggcggcggtgtcaatgtcagtggtactgaggcagacgttgtrgcggagaagggcagtggctgtagctgccctttccgtttccagggttccgaccaggtcgttgaggacttccacatggagattggcacaggaccagactcaa

SEQ ID NO: 85132 - DNA, 178 bp, Homo sapiens
gtcttatggtgcaaacttttcttggaacaaaagaacaagagtatccacaaaataggttggcactgactatatctctgcttgactgtgaataaagtcagctrtgcagtatttatagtccatgtataataaatacatctcttaatctcctaataaattggacctttaaactacagataca

SEQ ID NO: 85133 - DNA, 139 bp, Homo sapiens
ttcatcctggcgtttgcctgcagcaagatggcggcggtstcaatgtcagtggtactgaggcagacgttgtggcggagaagggcagtggctgtagctgccctttccgtttccagggttccgaccaggtcgttgaggactt

SEQ ID NO: 85134 - DNA, 201 bp, Homo sapiens
aaatggatggagctatgacattgaagagaggaaggttccaaaacccaagtccaagtcttatggtgcaaacttttcttggaacaaaagaacaagagtatccmcaaaataggttggcactgactatatctctgcttgactgtgaataaagtcagctgtgcagtatttatagtccatgtataataaatacatctcttaatctcc

SEQ ID NO: 85135 - DNA, 201 bp, Homo sapiens
atataaaaactagaaaagtcaggatctttgttcctgctcgcaataacatgcagtctggagtaaacaacacaaagaaatggaagatggagtttgataccagrgagcgatgggaaaatcctttgatgggttgggcatcaacggctgatcccttatccaacatggttctaaccttcagtactaaagaagatgcagtttcctttg

SEQ ID NO: 85136 - DNA, 201 bp, Homo sapiens
ggtcgttgaggacttccacatggagattggcacaggaccagactcaagacacacaactcataacagttgatgaaaaattggatatcactactttaactggmgttccagaagagcatataaaaactagaaaagtcaggatctttgttcctgctcgcaataacatgcagtctggagtaaacaacacaaagaaatggaagatgg

SEQ ID NO: 85137 - DNA, 201 bp, Homo sapiens
catctttgagggcgtcgatatcaagaatggaactgaagaccttccctatgccatgaaacccattgactactacacagagactaagatcttacaggagaggscagttctgggcgccaacgatcctgagaagaatttcttaaccacagccatccgccctcatggcattttcggcccaagggacccgcagttggtacccatcct

SEQ ID NO: 85138 - DNA, 201 bp, Homo sapiens
ctacacagagactaagatcttacaggagagggcagttctgggcgccaacgatcctgagaagaatttcttaaccacagccatccgccctcatggcattttcrgcccaagggacccgcagttggtacccatcctcatcgaggcagccaggaacggcaagatgaagttcgtgattggaaatgggaagaacttggtggacttcac

SEQ ID NO: 85139 - DNA, 201 bp, Homo sapiens
gatcttacaggagagggcagttctgggcgccaacgatcctgagaagaatttcttaaccacagccatccgccctcatggcattttcggcccaagggacccgyagttggtacccatcctcatcgaggcagccaggaacggcaagatgaagttcgtgattggaaatgggaagaacttggtggacttcacctttgtggagaacgt

SEQ ID NO: 85140 - DNA, 201 bp, Homo sapiens
gctgaggccagacaggggggcgcctacggacggaaaagaaaagttgattacaaacgggaccatattttgcttcgaaatggaaccagcagttagcgagccartgagagaccaagtcgcacggactcatttgacagaggacactcccaaagtgaatgctgacatagaaaaggttaaccagaatcaggccaagagatgcacagt

SEQ ID NO: 85141 - DNA, 201 bp, Homo sapiens
accaagtcgcacggactcatttgacagaggacactcccaaagtgaatgctgacatagaaaaggttaaccagaatcaggccaagagatgcacagtgatcggkggctctggattcctggggcagcacatggtggagcagttgctggcaagaggatatgctgtcaatgtatttgatatccagcaagggtttgataatccccagg

SEQ ID NO: 85142 - DNA, 201 bp, Homo sapiens
gcatcctgacaggcctcaattatgaggcccccaagtaccacatcccctactgggtggcctactacctggccctcctgctatccctgctggtgatggtgatyagtcctgtcatccagctgcagcccaccttcacacccatgcgggtcgcactggctggcacattccactactacagctgcgagagagccaaaaaggccatgg

SEQ ID NO: 85143 - DNA, 201 bp, Homo sapiens
aatggaaccagcagttagcgagccaatgagagaccaagtcgcacggactcatttgacagaggacactcccaaagtgaatgctgacatagaaaaggttaacsagaatcaggccaagagatgcacagtgatcgggggctctggattcctggggcagcacatggtggagcagttgctggcaagaggatatgctgtcaatgtatt

SEQ ID NO: 85144 - DNA, 201 bp, Homo sapiens
gggtttgataatccccaggtgcggttctttctgggtgacctctgcagccgacaggatctgtacccagctctgaaaggtgtaaacacagttttccactgtgygtcacccccaccatccagtaacaacaaggagctcttttatagagtgaattacattggcaccaagaatgtcattgaaacttgcaaagaggctggggttcag

SEQ ID NO: 85145 - DNA, 201 bp, Homo sapiens; identical to SEQ ID NO: 85137

SEQ ID NO: 85146 - DNA, 201 bp, Homo sapiens; identical to SEQ ID NO: 85138

SEQ ID NO: 85147 - DNA, 201 bp, Homo sapiens; identical to SEQ ID NO: 85139

SEQ ID NO: 85148 - DNA, 201 bp, Homo sapiens
tcagcagagtcacaggagttttggaagtgagagaaaagaaaagttgattacaaacgggaccatattttgcttcgaaatggaaccagcagttagcgagccartgagagaccaagtcgcacggactcatttgacagaggacactcccaaagtgaatgctgacatagaaaaggttaaccagaatcaggccaagagatgcacagt

SEQ ID NO: 85149 - DNA, 201 bp, Homo sapiens; identical to SEQ ID NO: 85141

SEQ ID NO: 85150 - DNA, 201 bp, Homo sapiens; identical to SEQ ID NO: 85142

SEQ ID NO: 85151 - DNA, 201 bp, Homo sapiens; identical to SEQ ID NO: 85143

SEQ ID NO: 85152 - DNA, 201 bp, Homo sapiens; identical to SEQ ID NO: 85144

SEQ ID NO: 85153 - DNA, 201 bp, Homo sapiens
ccaccagccagctcaagtgcctgaaggaagccgggcacgggcccgggaaggacgagatgaccgacgaggagctggccgaaggcgaggaagagatcgaccaygccgagcgggagctccgcaggggccagatcctctggttccggggcctgaaccggattcagacgcagatccgggtggtgaaagcgttccgtagctcgctct

SEQ ID NO: 85154 - DNA, 201 bp, Homo sapiens
tctgtgtggtgctggtcacggccttcaatgactggagcaaggagaagcagttccgaggcctgcagagccgaattgagcaggagcagaagttcacggtcatscggaacgggcagctcctccaggtccccgtggctgcgctggtggtgggggacattgcccaggtcaagtacggcgacctgctgccagccgacggcgtgctca

SEQ ID NO: 85155 - DNA, 201 bp, Homo sapiens
ccggaacgggcagctcctccaggtccccgtggctgcgctggtggtgggggacattgcccaggtcaagtacggcgacctgctgccagccgacggcgtgctcmtccaggccaatgacctcaagatcgacgagagctccctgacgggcgagtctgaccacgtgcgcaagtcagctgacaaagatcccatgctgctctcaggcac

SEQ ID NO: 85156 - DNA, 201 bp, Homo sapiens
tggtccatgccatctccatcaacagtgcctataccaccaaaatactacctcctgagaaggaaggcgccctcccacgccaggtgggcaataagacggagtgygccctgctgggcttcgtcttggacctgaagcgggacttccagcccgtgcgcgagcagatcccggaagacaagctttacaaagtgtacaccttcaactcgg

SEQ ID NO: 85157 - DNA, 201 bp, Homo sapiens
acctggagaagcgcaggcagatctacgggcagaacttcatccccccaaagcaacccaagaccttcctgcagctggtgtgggaggccctgcaggacgtgacmctcatcatcctggaggtggctgccatcgtctctctgggcctctcgttctatgcgccgccaggagaggagagtgaagcctgtgggaatgtgtcgggaggcg

SEQ ID NO: 85158 - DNA, 201 bp, Homo sapiens
aaggccggacatggctggcagagtgcacgccggtctatgtacaatacttcgtgaagttcttcatcattggtgtcactgtgctggtcgtggctgtcccagarggcctgcctcttgctgtcaccatctccttagcttactctgtcaagaaaatgatgaaagacaacaacctggtgcgccacctggatgcctgcgagaccatgg

SEQ ID NO: 85159 - DNA, 201 bp, Homo sapiens
acttcaccagcatcgtcaaggcagtcatgtggggccgtaacgtctatgacagcatctccaagttcctgcagtttcaactgacggtcaatgtggtggctgtsatcgtggccttcacaggtgcctgcattactcaggactctcctctcaaagccgtgcagatgttgtgggtgaacttgatcatggacacatttgcctctctgg

SEQ ID NO: 85160 - DNA, 201 bp, Homo sapiens
tggatgcctgcgagaccatgggcaacgccacagccatctgctccgacaagacgggcacgctcaccaccaaccgtatgaccgtggtccagtcctacctaggrgacacccactacaaagagattccggcccccagcgccctgacccctaagatcctcgacctcctggtccatgccatctccatcaacagtgcctataccacca

SEQ ID NO: 85161 - DNA, 201 bp, Homo sapiens
ccaccagccagctcaagtgcctgaaggaagccgggcacgggcccgggaaggacgagatgaccgacgaggagctggccgaaggcgaggaagagatcgaccaygccgagcgggagctccgcaggggccagatcctctggttccggggcctgaaccggattcagacgcagatggaggtagtgagtaccttcaagagaagcggtt

SEQ ID NO: 85162 - DNA, 201 bp, Homo sapiens; identical to SEQ ID NO: 85154

SEQ ID NO: 85163 - DNA, 201 bp, Homo sapiens; identical to SEQ ID NO: 85155

SEQ ID NO: 85164 - DNA, 201 bp, Homo sapiens; identical to SEQ ID NO: 85156

SEQ ID NO: 85165 - DNA, 201 bp, Homo sapiens; identical to SEQ ID NO: 85157

SEQ ID NO: 85166 - DNA, 201 bp, Homo sapiens; identical to SEQ ID NO: 85158

SEQ ID NO: 85167 - DNA, 201 bp, Homo sapiens; identical to SEQ ID NO: 85159

SEQ ID NO: 85168 - DNA, 201 bp, Homo sapiens; identical to SEQ ID NO: 85160

SEQ ID NO: 85169 - DNA, 201 bp, Homo sapiens; identical to SEQ ID NO: 85161

SEQ ID NO: 85170 - DNA, 201 bp, Homo sapiens; identical to SEQ ID NO: 85154

SEQ ID NO: 85171 - DNA, 201 bp, Homo sapiens; identical to SEQ ID NO: 85155

SEQ ID NO: 85172 - DNA, 201 bp, Homo sapiens; identical to SEQ ID NO: 85156

SEQ ID NO: 85173 - DNA, 201 bp, Homo sapiens; identical to SEQ ID NO: 85157

SEQ ID NO: 85174 - DNA, 201 bp, Homo sapiens; identical to SEQ ID NO: 85158

SEQ ID NO: 85175 - DNA, 201 bp, Homo sapiens; identical to SEQ ID NO: 85159

SEQ ID NO: 85176 - DNA, 201 bp, Homo sapiens; identical to SEQ ID NO: 85160

SEQ ID NO: 85177 - DNA, 201 bp, Homo sapiens
tcggctgctctcctcctccggctgggaggggccgtagctcggggccgtcgccagccccggcccgggctcgagaatcaagggcctcggccgccgtcccgcasctcagtccatcgcccttgccgggcagcccgggcagagaccatgtttgacaagacgcggctgccgtacgtggccctcgatgtgctctgcgtgttgctggct

SEQ ID NO: 85178 - DNA, 129 bp, Homo sapiens
caccaacaactgggaatcactatccgagcaatcaccagccttgaaaggcagcagggtgcccaggtgaagctggcctgttttctaaaggaaaatgacttctrctgctgctatgcctcttggatgcacact

SEQ ID NO: 85179 - DNA, 201 bp, Homo sapiens
cagcccgccctcggctgctctcctcctccggctgggaggggccgtagctcggggccgtcgccagccccggcccgggctcgagaatcaagggcctcggccgycgtcccgcagctcagtccatcgcccttgccgggcagcccgggcagagaccatgtttgacaagacgcggctgccgtacgtggccctcgatgtgctctgcgt

SEQ ID NO: 85180 - DNA, 201 bp, Homo sapiens
tgggagcgccgcccggtctcagcccgccctcggctgctctcctcctccggctgggaggggccgtagctcggggccgtcgccagccccggcccgggctcgakaatcaagggcctcggccgccgtcccgcagctcagtccatcgcccttgccgggcagcccgggcagagaccatgtttgacaagacgcggctgccgtacgtgg

SEQ ID NO: 85181 - DNA, 201 bp, Homo sapiens
gcgctgattggctgaccgccgcggcctggggtttccctggccccgcccctgctgcactccccccgcccgcgaacccgcgcgctgcccggtcctgcgctgcycagcgggaggggctggaccccgcgttcctcctccctgccggtccccatccttaaagcgagagtctggacgccccgcctgtgggagagagcgccgggatcc

SEQ ID NO: 85182 - DNA, 201 bp, Homo sapiens; identical to SEQ ID NO: 85177

SEQ ID NO: 85183 - DNA, 201 bp, Homo sapiens
ggtgcccaggtgaagctggcctgttttctaaaggaaaatgattgccacaaggcaagaggatgcatctttcttcctggtgtacaagcctttaaagacttctrctgctgctatgcctcttggatgcacactttgtgtgtacatagttacctttaactcagtggttatctaatagctctaaactcattaaaaaaactccaagcc

SEQ ID NO: 85184 - DNA, 201 bp, Homo sapiens; identical to SEQ ID NO: 85179

SEQ ID NO: 85185 - DNA, 201 bp, Homo sapiens
ctttcttcctggtgtacaagcctttaaagacttctgctgctgctatgcctcttggatgcacactttgtgtgtacatagttacctttaactcagtggttatytaatagctctaaactcattaaaaaaactccaagccttccaccaaaacagtgccccacctgtatacatttttattaaaaaaatgtaatgcttatgtataaa

SEQ ID NO: 85186 - DNA, 201 bp, Homo sapiens; identical to SEQ ID NO: 85180

SEQ ID NO: 85187 - DNA, 201 bp, Homo sapiens; identical to SEQ ID NO: 85181

SEQ ID NO: 85188 - DNA, 201 bp, Homo sapiens
ctgctatgcctcttggatgcacactttgtgtgtacatagttacctttaactcagtggttatctaatagctctaaactcattaaaaaaactccaagccttcyaccaaaacagtgccccacctgtatacatttttattaaaaaaatgtaatgcttatgtataaacatgtatgtaatatgctttctatgaatgatgtttgattt

SEQ ID NO: 85189 - DNA, 201 bp, Homo sapiens
tcagagaggctttttctgtaaagacaacagcatcaactatccgtaccatgacagtaccgtcacatccactgtcctcatcctagtgggggttggcttgcccrtttcctctattattcttggagaaaccctgtctgtttactgtaaccttttgcactcaaattcctttatcaggaataactacatagccactatttacaaagc

SEQ ID NO: 85190 - DNA, 201 bp, Homo sapiens; identical to SEQ ID NO: 85177

SEQ ID NO: 85191 - DNA, 129 bp, Homo sapiens; identical to SEQ ID NO: 85178

SEQ ID NO: 85192 - DNA, 201 bp, Homo sapiens; identical to SEQ ID NO: 85179

SEQ ID NO: 85193 - DNA, 201 bp, Homo sapiens; identical to SEQ ID NO: 85180

SEQ ID NO: 85194 - DNA, 201 bp, Homo sapiens; identical to SEQ ID NO: 85181

SEQ ID NO: 85195 - DNA, 201 bp, Homo sapiens
tcttggcgatgaggatgaagcagaggaagaagaggaggaggacaacttggctgctggtgtggatgaggagagaagtgaggccaatgatcaggggcccccargagaggacggtgtgacccgggaggaagtagagcctgaggaggctgaagaaggcatctctgagcaaccctgcccagctgacacagaggtggtggaagactc

SEQ ID NO: 85196 - DNA, 201 bp, Homo sapiens
acccctgaagctgtgactgccaaacatctcaaatgaaatgttgtggccatcagagactcaaaaggaagtaaggattttacaagacagattaaaaaaaaatkgttttgtccaaaatatagttgttgttgatttttttttaagttttctaagcaatatttttcaagccagaagtcctctaagtcttgccagtacaaggtagtc

SEQ ID NO: 85197 - DNA, 201 bp, Homo sapiens
gaggcagcgtaaaagtcagcatgctgacaagggactgtagatttaatgatgcgttttcaagaatacacaccaaaacaatatgtcagcttccctttggcctkcagtttgtaccaaatccttaatttttcctgaatgagcaagcttctcttaaaagatgctctctagtcatttggtctcatggcagtaagcctcatgtatact

SEQ ID NO: 85198 - DNA, 201 bp, Homo sapiens
acatgaactgtgtttgttcattctgacctaaggggtttagataatcagtaaccataacccctgaagctgtgactgccaaacatctcaaatgaaatgttgtrgccatcagagactcaaaaggaagtaaggattttacaagacagattaaaaaaaaattgttttgtccaaaatatagttgttgttgatttttttttaagtttt

SEQ ID NO: 85199 - DNA, 186 bp, Homo sapiens
atttgattttgtttccatcttctgtaatcttccaaagaattatatctttgtaaatctctcaatactcaatctactgtaagtacccagggaggctaatttcyttaaaaaaaaaaaatctatccatctacttctctcttacctgatttatgtgttagaataaattcatgaaattcgattccaagcata

SEQ ID NO: 85200 - DNA, 201 bp, Homo sapiens
tgtctggaatggctggtctttttagcatctctggcaagatatggcatcttcacaactatttcacagtgactcttggaattcctgcttggtgttcttatgtstttttcgtcatagccaccttggtttttggcctttttatgggtctggtcttggtggtaatatcagaatgtttctatgtgccacttccaaggcatttatctg

SEQ ID NO: 85201 - DNA, 180 bp, Homo sapiens
ggggcgtggcctcgacgggcaagcggcgataagaggtggcgtcctccgcggcattgcgagcaccgccagtctgcgccgcyaggcgtaggcggggtggcccttgcgtctcccgcttccttgaaaaacccggcgggcgagcgaggctgcgggccggccgctgcccttccccacactccccgc

SEQ ID NO: 85202 - DNA, 201 bp, Homo sapiens
ggaattcctgcttggtgttcttatgtctttttcgtcatagccaccttggtttttggcctttttatgggtctggtcttggtggtaatatcagaatgtttctrtgtgccacttccaaggcatttatctgagcgttctgagcagaatcggagatcagaggaggctcatagagctgaacagttgcaggatgcggaggaggaaaaa

SEQ ID NO: 85203 - DNA, 201 bp, Homo sapiens
gaatgagcaagcttctcttaaaagatgctctctagtcatttggtctcatggcagtaagcctcatgtatactaaggagagtcttccaggtgtgacaatcagkatatagaaaaacaaacgtagtgttgggatctgtttggagactgggatgggaacaagttcatttacttaggggtcagagagtctcgaccagaggaggccat

SEQ ID NO: 85204 - DNA, 201 bp, Homo sapiens
tccgccgttatcgtggcccaggaatcttcgaagacctgcagaattatatcttagagaagaaatggcaatcagtcgagcctctgactggctggaaatccccrgcttctctaacgatgtctggaatggctggtctttttagcatctctggcaagatatggcatcttcacaactatttcacagtgactcttggaattcctgctt

SEQ ID NO: 85205 - DNA, 201 bp, Homo sapiens
cagcagactgattcagaatgggaggcttttgcaaagaatggtgaaatacttcagatcagtgtggggaaggtagatgtcattcaagaaccaggtttgagtgrccgcttctttgtcaccactctcccagcattttttcatgcaaaggatgggatattccgccgttatcgtggcccaggaatcttcgaagacctgcagaattat

SEQ ID NO: 85206 - DNA, 201 bp, Homo sapiens; identical to SEQ ID NO: 85195

SEQ ID NO: 85207 - DNA, 201 bp, Homo sapiens; identical to SEQ ID NO: 85196

SEQ ID NO: 85208 - DNA, 201 bp, Homo sapiens; identical to SEQ ID NO: 85197

SEQ ID NO: 85209 - DNA, 201 bp, Homo sapiens; identical to SEQ ID NO: 85198

SEQ ID NO: 85210 - DNA, 186 bp, Homo sapiens; identical to SEQ ID NO: 85199

SEQ ID NO: 85211 - DNA, 201 bp, Homo sapiens; identical to SEQ ID NO: 85200

SEQ ID NO: 85212 - DNA, 201 bp, Homo sapiens; identical to SEQ ID NO: 85202

SEQ ID NO: 85213 - DNA, 201 bp, Homo sapiens; identical to SEQ ID NO: 85203

SEQ ID NO: 85214 - DNA, 201 bp, Homo sapiens; identical to SEQ ID NO: 85204

SEQ ID NO: 85215 - DNA, 201 bp, Homo sapiens; identical to SEQ ID NO: 85205

SEQ ID NO: 85216 - DNA, 201 bp, Homo sapiens; identical to SEQ ID NO: 85195

SEQ ID NO: 85217 - DNA, 201 bp, Homo sapiens; identical to SEQ ID NO: 85196

SEQ ID NO: 85218 - DNA, 201 bp, Homo sapiens; identical to SEQ ID NO: 85197

SEQ ID NO: 85219 - DNA, 201 bp, Homo sapiens; identical to SEQ ID NO: 85198

SEQ ID NO: 85220 - DNA, 186 bp, Homo sapiens; identical to SEQ ID NO: 85199

SEQ ID NO: 85221 - DNA, 201 bp, Homo sapiens; identical to SEQ ID NO: 85200

SEQ ID NO: 85222 - DNA, 201 bp, Homo sapiens; identical to SEQ ID NO: 85202

SEQ ID NO: 85223 - DNA, 201 bp, Homo sapiens; identical to SEQ ID NO: 85203

SEQ ID NO: 85224 - DNA, 201 bp, Homo sapiens; identical to SEQ ID NO: 85204

SEQ ID NO: 85225 - DNA, 201 bp, Homo sapiens; identical to SEQ ID NO: 85205

SEQ ID NO: 85226 - DNA, 201 bp, Homo sapiens
ccagggggagaaaggtgttcaagatgtcctcgagatactaaaggaagaattccggttggccatggctctgagtgggtgccagaatgtgaaagtcatcgacragacattggggttgtgaaagacaaaagaagaaattatctgaaatggatctgaagagttctcagaggaagtgactcatgttgaagaggaagtgacaaagca

SEQ ID NO: 85227 - DNA, 201 bp, Homo sapiens
atgtcctcgagatactaaaggaagaattccggttggccatggctctgagtgggtgccagaatgtgaaagtcatcgacaagacattggggttgtgaaagacraaagaagaaattatctgaaatggatctgaagagttctcagaggaagtgactcatgttgaagaggaagtgacaaagcaggtggtagtggcggggaaagatg

SEQ ID NO: 85228 - DNA, 201 bp, Homo sapiens
tactaaaggaagaattccggttggccatggctctgagtgggtgccagaatgtgaaagtcatcgacaagacattggggttgtgaaagacaaaagaagaaatyatctgaaatggatctgaagagttctcagaggaagtgactcatgttgaagaggaagtgacaaagcaggtggtagtggcggggaaagatgaaggagagaact

SEQ ID NO: 85229 - DNA, 201 bp, Homo sapiens
agcaataacctgtgaaaatgctcccccggctaatttgtatcaatgattatgaacaacatgctaaatcagtacttccaaagtctatatatgactattacagrtctggggcaaatgatgaagaaactttggctgataatattgcagcattttccagatggaagctgtatccaaggatgctccggaatgttgctgaaacagatc

SEQ ID NO: 85230 - DNA, 201 bp, Homo sapiens
tggatgatgtgcgtaacagattcaaactgccgccacaactcaggatgaaaaattttgaaaccagtactttatcattttctcctgaggaaaattttggagaygacagtggacttgctgcatatgtggctaaagcaatagacccatctatcagctgggaagatatcaaatggctgagaagactgacatcattgccaattgttg

SEQ ID NO: 85231 - DNA, 201 bp, Homo sapiens
tctgtgaaataagggggctggaccaggatagggacaaacatgagctgtgaaaaatcagaaagctatcatcgtgttattccttttcaaatatgacagtaagmacacacacacacacacacacacacacacacacacacacactaaacctagctgaaaaatgtatgcaagtaatacatgctcacggtgtaaaaatgaacaccc

SEQ ID NO: 85232 - DNA, 201 bp, Homo sapiens
ccagggggagaaaggtgttcaagatgtcctcgagatactaaaggaagaattccggttggccatggctctgagtgggtgccagaatgtgaaagtcatcgacragacattggtgaggaaaaatcctttggccgtttccaagatctgacagtgcacaatattttcccatctgtattattttttttcagcatgtattacttgaca

SEQ ID NO: 85233 - DNA, 201 bp, Homo sapiens
atcccttttatttcattgcttttgacttttcaatgggtgtcctaggaaccttttagaaagaaatggactttcatcctggaaatatattaactgttaaaaakaaaacattgaaaatgtgtttagacaacgtcatcccctggcaggctaaagtgctgtatcctttagtaaaattggaggtagcaaacactaaggtgaaaagat

SEQ ID NO: 85234 - DNA, 201 bp, Homo sapiens; identical to SEQ ID NO: 85229

SEQ ID NO: 85235 - DNA, 201 bp, Homo sapiens; identical to SEQ ID NO: 85230

SEQ ID NO: 85236 - DNA, 201 bp, Homo sapiens; identical to SEQ ID NO: 85232

SEQ ID NO: 85237 - DNA, 201 bp, Homo sapiens; identical to SEQ ID NO: 85233

SEQ ID NO: 85238 - DNA, 201 bp, Homo sapiens; identical to SEQ ID NO: 85229

SEQ ID NO: 85239 - DNA, 201 bp, Homo sapiens; identical to SEQ ID NO: 85230

SEQ ID NO: 85240 - DNA, 201 bp, Homo sapiens
accagacaggtgttatggaagctgctgaaggttgtgaaattcggagaagtgatttcttaccagcaattagcagccctggcaggcaaccccaaagccgcgcragcagtgggaggagcaatgagaggcaatcctgtccccatcctcatcccgtgccacagagtggtctgcagcagcggagccgtgggcaactactccggagga

SEQ ID NO: 85241 - DNA, 201 bp, Homo sapiens
tgggcaagacaggtgggggtgactttctgttctgaaaatgacctcctccccttcttcctcccctcaatgccgtggaggtcccagcccccgctgcggttctyggaggtccggagcccctgatgcagtgcacagcctggctgaatgcctatttccaccagcccgaggctatcgaagagttccccgtgccggctcttcaccatc

SEQ ID NO: 85242 - DNA, 201 bp, Homo sapiens
tgcggttctcggaggtccggagcccctgatgcagtgcacagcctggctgaatgcctatttccaccagcccgaggctatcgaagagttccccgtgccggctyttcaccatcccgttttccagcaagagtcgttcaccagacaggtgttatggaagctgctgaaggttgtgaaattcggagaagtgatttcttaccagcaatt

SEQ ID NO: 85243 - DNA, 201 bp, Homo sapiens
agggtctgcacgaaataaagctcctgggcaaggggacgtctgcagctgagccccttctggttctcccgtgcctcggtgtgatcattaggaggatggatcawcctggtgctatcgggaacgcactgcgttaatggcctcagtgcccagcaatggagaactttccactgagtatccgcatgcagcgtgcccggcggaaggtga

SEQ ID NO: 85244 - DNA, 201 bp, Homo sapiens
gtctgcacgaaataaagctcctgggcaaggggacgtctgcagctgagccccttctggttctcccgtgcctcggtgtgatcattaggaggatggatcaaccyggtgctatcgggaacgcactgcgttaatggcctcagtgcccagcaatggagaactttccactgagtatccgcatgcagcgtgcccggcggaaggtgaaag

SEQ ID NO: 85245 - DNA, 201 bp, Homo sapiens
ggtcaggcgcacagggcagcggcgctgccggaggaccagggccggcgtgccggcgtccagcgaggatgcgcagactgcctcaggcccggcgccgccgcacwgggcatgcgccgacccggtcgggcgggaacaccccgcccctcccgggctccgccccagctccgcccccgcgcgccccggccccgcccccgcgcgctctct

SEQ ID NO: 85246 - DNA, 201 bp, Homo sapiens
aatgacctcctccccttcttcctcccctcaatgccgtggaggtcccagcccccgctgcggttctcggaggtccggagcccctgatgcagtgcacagcctgsctgaatgcctatttccaccagcccgaggctatcgaagagttccccgtgccggctcttcaccatcccgttttccagcaagagtcgttcaccagacaggtgt

SEQ ID NO: 85247 - DNA, 201 bp, Homo sapiens
ccggcgtgccggcgtccagcgaggatgcgcagactgcctcaggcccggcgccgccgcactgggcatgcgccgacccggtcgggcgggaacaccccgcccckcccgggctccgccccagctccgcccccgcgcgccccggccccgcccccgcgcgctctcttgcttttctcaggtcctcggctccgccccgctctagacccc

SEQ ID NO: 85248 - DNA, 201 bp, Homo sapiens
tgggggtgactttctgttctgaaaatgacctcctccccttcttcctcccctcaatgccgtggaggtcccagcccccgctgcggttctcggaggtccggagyccctgatgcagtgcacagcctggctgaatgcctatttccaccagcccgaggctatcgaagagttccccgtgccggctcttcaccatcccgttttccagca

SEQ ID NO: 85249 - DNA, 201 bp, Homo sapiens
tgaaggaatggcttctggcccatgaaggccaccggttggggaagccaggcttgggagggagctcaggtctggcaggggcctggctcaagggagcgggagcwacctcgggctccccgcctgctggccgaaactgagtatgtgcagtaggatggatgtttgagcgacacacacgtgtaacactgcatcggatgcggggcgtgg

SEQ ID NO: 85250 - DNA, 201 bp, Homo sapiens
ggtacttggaaaaatggacaaggattgtgaaatgaaacgcaccacactggacagccctttggggaagctggagctgtctggttgtgagcagggtctgcacraaataaagctcctgggcaaggggacgtctgcagctgagccccttctggttctcccgtgcctcggtgtgatcattaggaggatggatcaacctggtgctat

SEQ ID NO: 85251 - DNA, 201 bp, Homo sapiens
agaagtgatttcttaccagcaattagcagccctggcaggcaaccccaaagccgcgcgagcagtgggaggagcaatgagaggcaatcctgtccccatcctcrtcccgtgccacagagtggtctgcagcagcggagccgtgggcaactactccggaggactggccgtgaaggaatggcttctggcccatgaaggccaccggtt

SEQ ID NO: 85252 - DNA, 201 bp, Homo sapiens
tgggaggagcaatgagaggcaatcctgtccccatcctcatcccgtgccacagagtggtctgcagcagcggagccgtgggcaactactccggaggactggcygtgaaggaatggcttctggcccatgaaggccaccggttggggaagccaggcttgggagggagctcaggtctggcaggggcctggctcaagggagcgggag

SEQ ID NO: 85253 - DNA, 201 bp, Homo sapiens
caatgagaggcaatcctgtccccatcctcatcccgtgccacagagtggtctgcagcagcggagccgtgggcaactactccggaggactggccgtgaaggawtggcttctggcccatgaaggccaccggttggggaagccaggcttgggagggagctcaggtctggcaggggcctggctcaagggagcgggagctacctcgg

SEQ ID NO: 85254 - DNA, 138 bp, Homo sapiens
gggtcaggcgcacagggcagcggcgctgccggaggacmagggccggcgtgccggcgtccagcgaggatgcgcagactgcctcaggcccggcgccgccgcactgggcatgcgccgacccggtcgggcgggaacaccccg

SEQ ID NO: 85255 - DNA, 201 bp, Homo sapiens
tgccacagagtggtctgcagcagcggagccgtgggcaactactccggaggactggccgtgaaggaatggcttctggcccatgaaggccaccggttggggargccaggcttgggagggagctcaggtctggcaggggcctggctcaagggagcgggagctacctcgggctccccgcctgctggccgaaactgagtatgtgca

SEQ ID NO: 85256 - DNA, 201 bp, Homo sapiens
cgcgcgagcagtgggaggagcaatgagaggcaatcctgtccccatcctcatcccgtgccacagagtggtctgcagcagcggagccgtgggcaactactccrgaggactggccgtgaaggaatggcttctggcccatgaaggccaccggttggggaagccaggcttgggagggagctcaggtctggcaggggcctggctcaa

SEQ ID NO: 85257 - DNA, 201 bp, Homo sapiens; identical to SEQ ID NO: 85240

SEQ ID NO: 85258 - DNA, 201 bp, Homo sapiens; identical to SEQ ID NO: 85249

SEQ ID NO: 85259 - DNA, 201 bp, Homo sapiens
tgagcagggtctgcacgaaataaagctcctgggcaaggggacgtctgcagctgatgccgtggaggtcccagcccccgctgcggttctcggaggtccggagyccctgatgcagtgcacagcctggctgaatgcctatttccaccagcccgaggctatcgaagagttccccgtgccggctcttcaccatcccgttttccagca

SEQ ID NO: 85260 - DNA, 201 bp, Homo sapiens
ggtacttggaaaaatggacaaggattgtgaaatgaaacgcaccacactggacagccctttggggaagctggagctgtctggttgtgagcagggtctgcacraaataaagctcctgggcaaggggacgtctgcagctgatgccgtggaggtcccagcccccgctgcggttctcggaggtccggagcccctgatgcagtgcac

SEQ ID NO: 85261 - DNA, 201 bp, Homo sapiens; identical to SEQ ID NO: 85252

SEQ ID NO: 85262 - DNA, 201 bp, Homo sapiens; identical to SEQ ID NO: 85251

SEQ ID NO: 85263 - DNA, 201 bp, Homo sapiens; identical to SEQ ID NO: 85253

SEQ ID NO: 85264 - DNA, 201 bp, Homo sapiens
agctgtctggttgtgagcagggtctgcacgaaataaagctcctgggcaaggggacgtctgcagctgatgccgtggaggtcccagcccccgctgcggttctyggaggtccggagcccctgatgcagtgcacagcctggctgaatgcctatttccaccagcccgaggctatcgaagagttccccgtgccggctcttcaccatc

SEQ ID NO: 85265 - DNA, 201 bp, Homo sapiens; identical to SEQ ID NO: 85242

SEQ ID NO: 85266 - DNA, 201 bp, Homo sapiens; identical to SEQ ID NO: 85255

SEQ ID NO: 85267 - DNA, 201 bp, Homo sapiens; identical to SEQ ID NO: 85256

SEQ ID NO: 85268 - DNA, 201 bp, Homo sapiens
agctcctgggcaaggggacgtctgcagctgatgccgtggaggtcccagcccccgctgcggttctcggaggtccggagcccctgatgcagtgcacagcctgsctgaatgcctatttccaccagcccgaggctatcgaagagttccccgtgccggctcttcaccatcccgttttccagcaagagtcgttcaccagacaggtgt

SEQ ID NO: 85269 - DNA, 201 bp, Homo sapiens; identical to SEQ ID NO: 85240

SEQ ID NO: 85270 - DNA, 201 bp, Homo sapiens; identical to SEQ ID NO: 85249

SEQ ID NO: 85271 - DNA, 201 bp, Homo sapiens; identical to SEQ ID NO: 85248

SEQ ID NO: 85272 - DNA, 201 bp, Homo sapiens; identical to SEQ ID NO: 85250

SEQ ID NO: 85273 - DNA, 201 bp, Homo sapiens; identical to SEQ ID NO: 85252

SEQ ID NO: 85274 - DNA, 201 bp, Homo sapiens; identical to SEQ ID NO: 85251

SEQ ID NO: 85275 - DNA, 201 bp, Homo sapiens; identical to SEQ ID NO: 85253

SEQ ID NO: 85276 - DNA, 201 bp, Homo sapiens; identical to SEQ ID NO: 85241

SEQ ID NO: 85277 - DNA, 201 bp, Homo sapiens; identical to SEQ ID NO: 85242

SEQ ID NO: 85278 - DNA, 201 bp, Homo sapiens; identical to SEQ ID NO: 85243

SEQ ID NO: 85279 - DNA, 201 bp, Homo sapiens; identical to SEQ ID NO: 85244

SEQ ID NO: 85280 - DNA, 201 bp, Homo sapiens; identical to SEQ ID NO: 85255

SEQ ID NO: 85281 - DNA, 201 bp, Homo sapiens; identical to SEQ ID NO: 85256

SEQ ID NO: 85282 - DNA, 201 bp, Homo sapiens; identical to SEQ ID NO: 85246

SEQ ID NO: 85283 - DNA, 201 bp, Homo sapiens
tcattgttaaaatgacagactcgttcactgagcaggctgaccaggtgactgctgaggttggaaagctcttgggtgaagagaaggtggatgcaattctttgygttgctggaggatgggccgggggcaatgccaaatccaagtctctctttaagaactgtgacctgatgtggaagcagagcatatggacatcgaccatctcca

SEQ ID NO: 85284 - DNA, 201 bp, Homo sapiens
gggcgcggcgctccggctcgaggcattcggagctgcgggagccgggctggcaggagcaggatggcggcggcggcggctgcaggcgaggcgcgccgggtgcyggtgtacggcggcaggggcgctctgggttctcgatgcgtgcaggcttttcgggcccgcaactggtgggttgccagcgttgatgtggtggagaatgaagag

SEQ ID NO: 85285 - DNA, 201 bp, Homo sapiens
tggcagcgcgctaggcggcagcagcgggcgcggagcggggcgcggccgccgcgcgttccctcttggcggggttggccggccggggcggggcgcggcgctcsggctcgaggcattcggagctgcgggagccgggctggcaggagcaggatggcggcggcggcggctgcaggcgaggcgcgccgggtgctggtgtacggcggc

SEQ ID NO: 85286 - DNA, 201 bp, Homo sapiens
gcaggatggcggcggcggcggctgcaggcgaggcgcgccgggtgctggtgtacggcggcaggggcgctctgggttctcgatgcgtgcaggcttttcgggcycgcaactggtgggttgccagcgttgatgtggtggagaatgaagaggccagcgctagcatcattgttaaaatgacagactcgttcactgagcaggctgacc

SEQ ID NO: 85287 - DNA, 201 bp, Homo sapiens
tagttttcgcatccttgaattaaactgccttaactccttttgtggtataagcaaaactacatggactctgtcctggtatccttttcctgtgtggttgcccygtgtcctctggcctagggttaagtgtgcaagataactactcgtgagtattcagaatgttgttcctaataaatgcacttgttgtctgtcttctttaatcaa

SEQ ID NO: 85288 - DNA, 201 bp, Homo sapiens
actgtgacctgatgtggaagcagagcatatggacatcgaccatctccagccatctggctaccaagcatctcaaggaaggaggcctcctgaccttggctggygcaaaggctgccctggatgggactcctggtatgatcgggtacggcatggccaagggtgctgttcaccagctctgccagagcctggctgggaagaacagcg

SEQ ID NO: 85289 - DNA, 201 bp, Homo sapiens
gatgtggtggagaatgaagaggccagcgctagcatcattgttaaaatgacagactcgttcactgagcaggctgaccaggtgactgctgaggttggaaagcycttgggtgaagagaaggtggatgcaattctttgcgttgctggaggatgggccgggggcaatgccaaatccaagtctctctttaagaactgtgacctgatg

SEQ ID NO: 85290 - DNA, 201 bp, Homo sapiens
ttttctctcacataatatgcatttgctctcctaggacagtgtaatacatttatgtgaagtaaagacatgcgagactggtggcctgcaaatagcatccgttratctgtgttaactgcatagggagggctctgcatagcacctgctatagcggtgtcatgttggatcgcttttgtgactgttcatctgtccttgacagtggct

SEQ ID NO: 85291 - DNA, 201 bp, Homo sapiens
aaggctgagttatttttgaatgtcatgtttatgtcatagacgtagttttcgcatccttgaattaaactgccttaactccttttgtggtataagcaaaactmcatggactctgtcctggtatccttttcctgtgtggttgccctgtgtcctctggcctagggttaagtgtgcaagataactactcgtgagtattcagaatgt

SEQ ID NO: 85292 - DNA, 201 bp, Homo sapiens
ccgcccggggcagccgccatcgctgtgctcccggttaccctggataccccgatgaacaggaaatcaatgcctgaggctgacttcagctcctggacaccctkagaattcctagttgaaactttccatgactggatcacagggaaaaaccgaccgagctcaggaagcctaatccaggtggtaaccacagaaggaaggacggaa

SEQ ID NO: 85293 - DNA, 201 bp, Homo sapiens
tttttctctcacataatatgcatttgctctcctaggacagtgtaatacatttatgtgaagtaaagacatgcgagactggtggcctgcaaatagcatccgtygatctgtgttaactgcatagggagggctctgcatagcacctgctatagcggtgtcatgttggatcgcttttgtgactgttcatctgtccttgacagtggc

SEQ ID NO: 85294 - DNA, 201 bp, Homo sapiens
gctgtgctcccggttaccctggataccccgatgaacaggaaatcaatgcctgaggctgacttcagctcctggacacccttagaattcctagttgaaacttkccatgactggatcacagggaaaaaccgaccgagctcaggaagcctaatccaggtggtaaccacagaaggaaggacggaactcaccccagcatatttttag

SEQ ID NO: 85295 - DNA, 201 bp, Homo sapiens
ccttgacagtggctgtcatcttgactactttgttgatttgttggtattggggacattttaaaggctgagttatttttgaatgtcatgtttatgtcatagaygtagttttcgcatccttgaattaaactgccttaactccttttgtggtataagcaaaactacatggactctgtcctggtatccttttcctgtgtggttgcc

SEQ ID NO: 85296 - DNA, 201 bp, Homo sapiens
tctgtccttgacagtggctgtcatcttgactactttgttgatttgttggtattggggacattttaaaggctgagttatttttgaatgtcatgtttatgtcrtagacgtagttttcgcatccttgaattaaactgccttaactccttttgtggtataagcaaaactacatggactctgtcctggtatccttttcctgtgtgg

SEQ ID NO: 85297 - DNA, 201 bp, Homo sapiens
gctccggctcgaggcattcggagctgcgggagccgggctggcaggagcaggatggcggcggcggcggctgcaggcgaggcgcgccgggtgctggtgtacgkcggcaggggcgctctgggttctcgatgcgtgcaggcttttcgggcccgcaactggtgggttgccagcgttgatgtggtggagaatgaagaggccagcgct

SEQ ID NO: 85298 - DNA, 201 bp, Homo sapiens
ggcggcggcggctgcaggcgaggcgcgccgggtgctggtgtacggcggcaggggcgctctgggttctcgatgcgtgcaggcttttcgggcccgcaactggygggttgccagcgttgatgtggtggagaatgaagaggccagcgctagcatcattgttaaaatgacagactcgttcactgagcaggctgaccaggtgactgc

SEQ ID NO: 85299 - DNA, 201 bp, Homo sapiens
cgcaactggtgggttgccagcgttgatgtggtggagaatgaagaggccagcgctagcatcattgttaaaatgacagactcgttcactgagcaggctgaccrggtgactgctgaggttggaaagctcttgggtgaagagaaggtggatgcaattctttgcgttgctggaggatgggccgggggcaatgccaaatccaagtct

SEQ ID NO: 85300 - DNA, 201 bp, Homo sapiens
caattctttgcgttgctggaggatgggccgggggcaatgccaaatccaagtctctctttaagaactgtgacctgatgtggaagcagagcatatggacatcraccatctccagccatctggctaccaagcatctcaaggaaggaggcctcctgaccttggctggcgcaaaggctgccctggatgggactcctggtatgatcg

SEQ ID NO: 85301 - DNA, 201 bp, Homo sapiens
cgctccggctcgaggcattcggagctgcgggagccgggctggcaggagcaggatggcggcggcggcggctgcaggcgaggcgcgccgggtgctggtgtacsgcggcaggggcgctctgggttctcgatgcgtgcaggcttttcgggcccgcaactggtgggttgccagcgttgatgtggtggagaatgaagaggccagcgc

SEQ ID NO: 85302 - DNA, 201 bp, Homo sapiens
ccggctcgaggcattcggagctgcgggagccgggctggcaggagcaggatggcggcggcggcggctgcaggcgaggcgcgccgggtgctggtgtacggcgrcaggggcgctctgggttctcgatgcgtgcaggcttttcgggcccgcaactggtgggttgccagcgttgatgtggtggagaatgaagaggccagcgctagc

SEQ ID NO: 85303 - DNA, 201 bp, Homo sapiens
ctctctttaagaactgtgacctgatgtggaagcagagcatatggacatcgaccatctccagccatctggctaccaagcatctcaaggaaggaggcctcctraccttggctggcgcaaaggctgccctggatgggactcctggtatgatcgggtacggcatggccaagggtgctgttcaccagctctgccagagcctggctg

SEQ ID NO: 85304 - DNA, 201 bp, Homo sapiens
tacagtccctccgggtggcggggcgccccgagcgtggcagcgcgctaggcggcagcagcgggcgcggagcggggcgcggccgccgcgcgttccctcttggyggggttggccggccggggcggggcgcggcgctccggctcgaggcattcggagctgcgggagccgggctggcaggagcaggatggcggcggcggcggctgc

SEQ ID NO: 85305 - DNA, 201 bp, Homo sapiens; identical to SEQ ID NO: 85283

SEQ ID NO: 85306 - DNA, 201 bp, Homo sapiens; identical to SEQ ID NO: 85284

SEQ ID NO: 85307 - DNA, 201 bp, Homo sapiens; identical to SEQ ID NO: 85285

SEQ ID NO: 85308 - DNA, 201 bp, Homo sapiens; identical to SEQ ID NO: 85286

SEQ ID NO: 85309 - DNA, 201 bp, Homo sapiens
cctgattctgccttggacatgtcaaaatctgggggtgatgggatggccctgtgcatttagaagcagctctccacatatggccaatgtaggctgtcctggtygagaactagtagtggtttaatccaacccgatcattttacagatgaggaaactgaggcccagagagacattaccttgttgccagtaactggcagagctaag

SEQ ID NO: 85310 - DNA, 201 bp, Homo sapiens; identical to SEQ ID NO: 85287

SEQ ID NO: 85311 - DNA, 201 bp, Homo sapiens; identical to SEQ ID NO: 85288

SEQ ID NO: 85312 - DNA, 201 bp, Homo sapiens
aagcccagatctctagtcaccagacagttgctgtttttaaaggcctttaccacgtattttctttctttttttagtgaggtgaaattcacataatttttttwttttttttttgagacagagtcttaccctgtcgcccaggctggagtgcagtggcgccatctcggttcactgcaagctccgcctcctgggttcacaccattc

SEQ ID NO: 85313 - DNA, 201 bp, Homo sapiens; identical to SEQ ID NO: 85289

SEQ ID NO: 85314 - DNA, 201 bp, Homo sapiens; identical to SEQ ID NO: 85290

SEQ ID NO: 85315 - DNA, 201 bp, Homo sapiens; identical to SEQ ID NO: 85291

SEQ ID NO: 85316 - DNA, 201 bp, Homo sapiens
ttgtctgtcttctttaatcaaatcacatcttatatacagcagtcagagatgagtatactagaatcatggattgctggaggtcttttaatctgatgttctcrgaagggggtggatttaaatcctgaaataaatatttcaacacaagaacacaggcctgattctgccttggacatgtcaaaatctgggggtgatgggatggcc

SEQ ID NO: 85317 - DNA, 201 bp, Homo sapiens; identical to SEQ ID NO: 85292

SEQ ID NO: 85318 - DNA, 201 bp, Homo sapiens; identical to SEQ ID NO: 85293

SEQ ID NO: 85319 - DNA, 201 bp, Homo sapiens
cctagggttaagtgtgcaagataactactcgtgagtattcagaatgttgttcctaataaatgcacttgttgtctgtcttctttaatcaaatcacatcttayatacagcagtcagagatgagtatactagaatcatggattgctggaggtcttttaatctgatgttctcagaagggggtggatttaaatcctgaaataaata

SEQ ID NO: 85320 - DNA, 201 bp, Homo sapiens; identical to SEQ ID NO: 85294

SEQ ID NO: 85321 - DNA, 201 bp, Homo sapiens; identical to SEQ ID NO: 85295

SEQ ID NO: 85322 - DNA, 201 bp, Homo sapiens; identical to SEQ ID NO: 85296

SEQ ID NO: 85323 - DNA, 201 bp, Homo sapiens; identical to SEQ ID NO: 85297

SEQ ID NO: 85324 - DNA, 201 bp, Homo sapiens; identical to SEQ ID NO: 85298

SEQ ID NO: 85325 - DNA, 201 bp, Homo sapiens; identical to SEQ ID NO: 85299

SEQ ID NO: 85326 - DNA, 201 bp, Homo sapiens; identical to SEQ ID NO: 85300

SEQ ID NO: 85327 - DNA, 201 bp, Homo sapiens; identical to SEQ ID NO: 85301

SEQ ID NO: 85328 - DNA, 201 bp, Homo sapiens; identical to SEQ ID NO: 85302

SEQ ID NO: 85329 - DNA, 201 bp, Homo sapiens; identical to SEQ ID NO: 85303

SEQ ID NO: 85330 - DNA, 201 bp, Homo sapiens; identical to SEQ ID NO: 85304

SEQ ID NO: 85331 - DNA, 201 bp, Homo sapiens
tgcacttgttgtctgtcttctttaatcaaatcacatcttatatacagcagtcagagatgagtatactagaatcatggattgctggaggtcttttaatctgrtgttctcagaagggggtggatttaaatcctgaaataaatatttcaacacaagaacacaggcctgattctgccttggacatgtcaaaatctgggggtgatg

SEQ ID NO: 85332 - DNA, 201 bp, Homo sapiens
aagagaagtcgactcatgagaaaatcctagagaaggcaatgaagaagaaggggggaagtaattgtctcgaaatgaaaaaagaaacagaaatcaaaattcaracgctgacatcagatcacaaatctaaggtcaaagagattgtagcacagcacacaaaggaatggtcagaaatgatcaatacccacagtgctgaggagcaag

SEQ ID NO: 85333 - DNA, 201 bp, Homo sapiens
tcaaatttggaaatgaactttctgctgatgacttgggtcacaaggaagctgttgcaaatagcgtcaagaagggcctggtcactgtagaagatgagcaggcrtggatggcatcttataaatatgtaggtgctaccactaatatccatccatatttgtccacaatgatcaactacgcccagcctgtaaagtttcaaggtttcc

SEQ ID NO: 85334 - DNA, 201 bp, Homo sapiens
ttccttggccaaacaaaaatagctacaaatccacaaaaatttactattccagtaaggcagagtccaaccattgataatacaacttaaacatgtttgctatraaataccatcacaagtaaatgagcttggtgtgaacaactctcctttgtgatgccttaggacatgtttgaactgcagcaaaaaacaaaaacaaaaaacagt

SEQ ID NO: 85335 - DNA, 201 bp, Homo sapiens
tcgtggatgctttatcagatccaaagaaatttctctcaattacagaaaagagagcagaccaaatgagagctatgggcattgaaactagtgacatagccgaygtgcccagtgacacttccaaaaatgacaagaaaggaaaggccaacaccgccaaagcaaatgtgacccctcagagtagctctgagctcagaccaaccacca

SEQ ID NO: 85336 - DNA, 201 bp, Homo sapiens
agagagcagaccaaatgagagctatgggcattgaaactagtgacatagccgacgtgcccagtgacacttccaaaaatgacaagaaaggaaaggccaacacygccaaagcaaatgtgacccctcagagtagctctgagctcagaccaaccaccacggctgccctggcctctggtgtggaagccaagaaaggtattgaactta

SEQ ID NO: 85337 - DNA, 201 bp, Homo sapiens; identical to SEQ ID NO: 85332

SEQ ID NO: 85338 - DNA, 201 bp, Homo sapiens; identical to SEQ ID NO: 85333

SEQ ID NO: 85339 - DNA, 201 bp, Homo sapiens; identical to SEQ ID NO: 85334

SEQ ID NO: 85340 - DNA, 201 bp, Homo sapiens; identical to SEQ ID NO: 85335

SEQ ID NO: 85341 - DNA, 201 bp, Homo sapiens; identical to SEQ ID NO: 85336

SEQ ID NO: 85342 - DNA, 201 bp, Homo sapiens; identical to SEQ ID NO: 85332

SEQ ID NO: 85343 - DNA, 201 bp, Homo sapiens; identical to SEQ ID NO: 85333

SEQ ID NO: 85344 - DNA, 201 bp, Homo sapiens; identical to SEQ ID NO: 85334

SEQ ID NO: 85345 - DNA, 201 bp, Homo sapiens; identical to SEQ ID NO: 85335

SEQ ID NO: 85346 - DNA, 201 bp, Homo sapiens; identical to SEQ ID NO: 85336

SEQ ID NO: 85347 - DNA, 201 bp, Homo sapiens; identical to SEQ ID NO: 85332

SEQ ID NO: 85348 - DNA, 201 bp, Homo sapiens; identical to SEQ ID NO: 85333

SEQ ID NO: 85349 - DNA, 201 bp, Homo sapiens; identical to SEQ ID NO: 85334

SEQ ID NO: 85350 - DNA, 201 bp, Homo sapiens; identical to SEQ ID NO: 85335

SEQ ID NO: 85351 - DNA, 201 bp, Homo sapiens; identical to SEQ ID NO: 85336

SEQ ID NO: 85352 - DNA, 201 bp, Homo sapiens; identical to SEQ ID NO: 85332

SEQ ID NO: 85353 - DNA, 201 bp, Homo sapiens; identical to SEQ ID NO: 85333

SEQ ID NO: 85354 - DNA, 201 bp, Homo sapiens; identical to SEQ ID NO: 85334

SEQ ID NO: 85355 - DNA, 201 bp, Homo sapiens; identical to SEQ ID NO: 85335

SEQ ID NO: 85356 - DNA, 201 bp, Homo sapiens; identical to SEQ ID NO: 85336

SEQ ID NO: 85357 - DNA, 201 bp, Homo sapiens
tgctgtcggcttccaacatgctgcggcatcttaatcttgagtatcactccagcatgatcgcagatgcggtgaagaaggtgatcaaagttggcaaggtgcgractcgagacatgggcggctacagcaccacaaccgacttcatcaagtctgtcatcggtcacctgcagactaaagggagctagagccctttatttcttccaa

SEQ ID NO: 85358 - DNA, 135 bp, Homo sapiens
cttcccacgcgacttcctgcgggaaacatggcggyattgagcggagtccgctggctgacccgagcgctggtctccgccgggaaccctggggcatggagaggtctgagtacctcggccgcggcgcacgctgcatcg

SEQ ID NO: 85359 - DNA, 201 bp, Homo sapiens
ccacactccccatacccttcagtgcagtgtaccagggaagagaccttgtgcctctaagcagtggaccatggtcaccttgctgggtagagcctaggttcgarcctctgacatgggtggctatgctacttgccatgacttcactgaggctgtcattgctgccttgccccacccataggccctgtccatacccatgtaaggtgt

SEQ ID NO: 85360 - DNA, 201 bp, Homo sapiens; identical to SEQ ID NO: 85357

SEQ ID NO: 85361 - DNA, 135 bp, Homo sapiens; identical to SEQ ID NO: 85358

SEQ ID NO: 85362 - DNA, 201 bp, Homo sapiens
ggccggcttccttaggggacagactgttgggtggtgatggggattgttaggatggagcccaggccacatggatgatgatgattctcccccacaggttcgarcctctgacatgggtggctatgctacttgccatgacttcactgaggctgtcattgctgccttgccccacccataggccctgtccatacccatgtaaggtgt

SEQ ID NO: 85363 - DNA, 201 bp, Homo sapiens; identical to SEQ ID NO: 85357

SEQ ID NO: 85364 - DNA, 135 bp, Homo sapiens; identical to SEQ ID NO: 85358

SEQ ID NO: 85365 - DNA, 201 bp, Homo sapiens; identical to SEQ ID NO: 85359

SEQ ID NO: 85366 - DNA, 201 bp, Homo sapiens
gctgtcggcttccaacatgctgcggcatcttaatcttgagtatcactccagcatgatcgcagatgcggtgaagaaggtgatcaaagttggcaaggttcgarcctctgacatgggtggctatgctacttgccatgacttcactgaggctgtcattgctgccttgccccacccataggccctgtccatacccatgtaaggtgt

SEQ ID NO: 85367 - DNA, 135 bp, Homo sapiens; identical to SEQ ID NO: 85358

SEQ ID NO: 85368 - DNA, 201 bp, Homo sapiens
tgctgtcggcttccaacatgctgcggcatcttaatcttgagtatcactccagcatgatcgcagatgcggtgaagaaggtgatcaaagttggcaaggtgcgractcgagacatgggcggctacagcaccacaaccgacttcatcaagtctgtcatcggtcacctgcagactaaaggttcgaacctctgacatgggtggctat

SEQ ID NO: 85369 - DNA, 201 bp, Homo sapiens
atcaaagttggcaaggtgcggactcgagacatgggcggctacagcaccacaaccgacttcatcaagtctgtcatcggtcacctgcagactaaaggttcgarcctctgacatgggtggctatgctacttgccatgacttcactgaggctgtcattgctgccttgccccacccataggccctgtccatacccatgtaaggtgt

SEQ ID NO: 85370 - DNA, 135 bp, Homo sapiens; identical to SEQ ID NO: 85358

SEQ ID NO: 85371 - DNA, 201 bp, Homo sapiens
acaggctgttcggcgtggaagcctctggaaggagaatctggatccgcagggctgggggtcgctgtctctggcgtgacgacctcctggagcctgccaccaarcccagcatcgctggcaagttcaaggtgctagagcctcccatgctgggccacgacctgagactggccctgtgcttggccaacctcacctcccgggcccagc

SEQ ID NO: 85372 - DNA, 201 bp, Homo sapiens
agcatcgctggcaagttcaaggtgctagagcctcccatgctgggccacgacctgagactggccctgtgcttggccaacctcacctcccgggcccagcgggwgagggtcaacctgagcggtgccaccatcctctatacccgcaagccagtggcagagatcctgcatgaatcccacgccgtgaggctggggccgcaagaaggt

SEQ ID NO: 85373 - DNA, 201 bp, Homo sapiens
ctggtttgcccggcaggacctaggcccctcttacaatggctggcaggttctggatgccaccccccaggaggagagtgaaggtgtgttccggtgcggcccarcctcagtcaccgccatccgcgagggtgatgtgcacctggctcacgatggccccttcgtgtttgcggaggtcaacgccgactacatcacctggctgtggca

SEQ ID NO: 85374 - DNA, 201 bp, Homo sapiens
gtacccctgccctgagctggtggttcgcaggggccagtcgttcagcctcacgctggagctgagcagagccctggactgtgaggagatcctcatcttcacgrtggagacaggaccccgggcttctgaggccctccacaccaaagctgtgttccagacatcggagctggagcggggtgagggctggacagcagcaagggaggc

SEQ ID NO: 85375 - DNA, 152 bp, Homo sapiens
atggacattcactggctgaatcgaggagaggagaaaatgttgaacggatatmaggaaactcacagaccagctggaaatattagggaatcaggcttagaaaacacgcaggcgcaaagagtgaccatgaagcccagcactacagccaaaactgc

SEQ ID NO: 85376 - DNA, 201 bp, Homo sapiens
accgaggtgtggtgcaaggacagtggcagggcaagtacggcggcggcaccagcccgctgcactggcgcggcagcgtggccattctgcagaagtggctcaarggcaggtacaagccagtcaagtacggccagtgctgggtcttcgccggagtcctgtgcacagtcctcaggtgcttggggatagccacacgggtcgtgtcca

SEQ ID NO: 85377 - DNA, 201 bp, Homo sapiens
ggagcctcaggagagggcctcagtccagtttgacatcaccccctccaaaagtggcccaaggcagctgcaggtggaccttccccagtggaaagcagaagccrccccaacagccaatgagaaagccctgcttgtgagtgggagaggtagagaaattgacagaagacagcttagaagtccaagggagagtgtgagtgggaatgt

SEQ ID NO: 85378 - DNA, 145 bp, Homo sapiens
atggacattcactggctgaatcgaggagaggagaaaatgttgaamggatatcaggaaactcacagaccagctggaaatattagggaatcaggcttagaaaacacgcaggcgcaaagagtgaccatgaagcccagcactacagcca

SEQ ID NO: 85379 - DNA, 201 bp, Homo sapiens
gcacagcctctctggggagcagtttgaggaggacatcctgaacatctgcctctccatcctggatcgaagccccggtcaccaaaacaacccagccaccgacrtgtcctgccgccacaaccccatctacgtcaccagggtcatcagtgccatggtgaacagcaacaacgaccgaggtgtggtgcaaggacagtggcagggcaa

SEQ ID NO: 85380 - DNA, 201 bp, Homo sapiens
aaactatcaaattatggaagattaccgaacgagataaaaggcccgaaggatacaacctgaaggatgaagaggggaaacttaaggacctgtccacggtgacrtcactgcaggtgccagtgctgaagcccatggatctgatggtggaggtgagccctcggaggatctttgccaatggccacacctaccacatcaactccatct

SEQ ID NO: 85381 - DNA, 201 bp, Homo sapiens
gtggtgtttccatggtagatgctcctgttctggtgataccaaacctgcccacccctctgagtcgtctttgctcatggacttgcagcagagccacgtagttkggcattttgattcagaaagtggggagcagagacccagccaaatccaaactttttttttggttttgttttgttttgttttttacaagatataacataaccc

SEQ ID NO: 85382 - DNA, 201 bp, Homo sapiens
gacatgaccttcacgaccgcaatgcaaggaggggaagaaagtcacagcactgatgaggacagctgcagaggtggcagtgtgtggacacaggaagtttgggycccctccctgccccagctttcctaggccagaattgtgtttggcagtaattgtctgtttaaaaaaataaaaaggaaaggaagcgttcaccgccacaaatca

SEQ ID NO: 85383 - DNA, 201 bp, Homo sapiens
gccacacctaccacatcaactccatctccgtcaacagtgactgcgagacctacatgtcggcggatgacctgcgcatcaacctctggcacctggccatcacygacaggagcttcaacatcgtggacatcaagccggccaacatggaggaccttacggaggtgatcacagcatctgagttccatccgcaccactgcaacctct

SEQ ID NO: 85384 - DNA, 201 bp, Homo sapiens
tataaatggggcaattcgccctgtctcagagctgatgacctcaccgttgttttttggatggtgaattcatgctgagaatttgcagatgcaagctcctctcmtaggtcttctgaatgtcttgaaacatcccaggtcccaggtctggtgcggtttcccgagaggagcggagtggggtttgtcttctgtgtgcctgtgtcctca

SEQ ID NO: 85385 - DNA, 201 bp, Homo sapiens
gtttgggccccctccctgccccagctttcctaggccagaattgtgtttggcagtaattgtctgtttaaaaaaataaaaaggaaaggaagcgttcaccgccrcaaatcataaaatggacatgactgtggagtcttacagttcagggttctttcattcacgtcccttcctgtctcggtctgcggtctttaccacatcaatagg

SEQ ID NO: 85386 - DNA, 201 bp, Homo sapiens
agtgtgtggacacaggaagtttgggccccctccctgccccagctttcctaggccagaattgtgtttggcagtaattgtctgtttaaaaaaataaaaaggaraggaagcgttcaccgccacaaatcataaaatggacatgactgtggagtcttacagttcagggttctttcattcacgtcccttcctgtctcggtctgcggt

SEQ ID NO: 85387 - DNA, 201 bp, Homo sapiens
gggaaacagagagaaaggtgtggcctctccacttctgtggacaccccaaataggaagaagggtgcacacaaagcaccgcttcctccacgaagccctcctcrggcacatcgaggagaaccagctgcccaagctcttggctgctgcccttctgaggcctgcctgatttgggccacatagatctggttttggccattgactggc

SEQ ID NO: 85388 - DNA, 201 bp, Homo sapiens
gcctggcacccggctgagaacatcattgccatcgccgccaccaacaacctgtacatcttccaggacaaggtaaactctgacatgcactaggtatgtgcagwtcccggcccctgccacccagcctcatgcaagtcatccccgacatgaccttcacgaccgcaatgcaaggaggggaagaaagtcacagcactgatgaggaca

SEQ ID NO: 85389 - DNA, 201 bp, Homo sapiens
ggggcaagcgccggcgtgatgacatcagtgtggacagcttggacttcaccaagaagatcctgcacacggcctggcacccggctgagaacatcattgccatygccgccaccaacaacctgtacatcttccaggacaaggtaaactctgacatgcactaggtatgtgcagttcccggcccctgccacccagcctcatgcaagt

SEQ ID NO: 85390 - DNA, 201 bp, Homo sapiens; identical to SEQ ID NO: 85380

SEQ ID NO: 85391 - DNA, 201 bp, Homo sapiens; identical to SEQ ID NO: 85381

SEQ ID NO: 85392 - DNA, 201 bp, Homo sapiens; identical to SEQ ID NO: 85382

SEQ ID NO: 85393 - DNA, 201 bp, Homo sapiens; identical to SEQ ID NO: 85383

SEQ ID NO: 85394 - DNA, 201 bp, Homo sapiens; identical to SEQ ID NO: 85384

SEQ ID NO: 85395 - DNA, 201 bp, Homo sapiens; identical to SEQ ID NO: 85385

SEQ ID NO: 85396 - DNA, 201 bp, Homo sapiens; identical to SEQ ID NO: 85386

SEQ ID NO: 85397 - DNA, 201 bp, Homo sapiens; identical to SEQ ID NO: 85388

SEQ ID NO: 85398 - DNA, 201 bp, Homo sapiens; identical to SEQ ID NO: 85389

SEQ ID NO: 85399 - DNA, 201 bp, Homo sapiens; identical to SEQ ID NO: 85380

SEQ ID NO: 85400 - DNA, 201 bp, Homo sapiens; identical to SEQ ID NO: 85381

SEQ ID NO: 85401 - DNA, 201 bp, Homo sapiens; identical to SEQ ID NO: 85382

SEQ ID NO: 85402 - DNA, 201 bp, Homo sapiens; identical to SEQ ID NO: 85383

SEQ ID NO: 85403 - DNA, 201 bp, Homo sapiens
gcggcaaagggccctcgcccgtggggttcactctcatcacccagaagcagggagaagggcctgcggctgcaggcctggctgccacaccggcctccagacarcacacagcagaagtaaaatagaaagaagaccttttttgaaatgacctgtgttagtcacctctctcaggatgcgtgaggcggacacgttgaggccacctca

SEQ ID NO: 85404 - DNA, 201 bp, Homo sapiens; identical to SEQ ID NO: 85384

SEQ ID NO: 85405 - DNA, 201 bp, Homo sapiens; identical to SEQ ID NO: 85385

SEQ ID NO: 85406 - DNA, 201 bp, Homo sapiens; identical to SEQ ID NO: 85386

SEQ ID NO: 85407 - DNA, 201 bp, Homo sapiens; identical to SEQ ID NO: 85388

SEQ ID NO: 85408 - DNA, 201 bp, Homo sapiens; identical to SEQ ID NO: 85389

SEQ ID NO: 85409 - DNA, 201 bp, Homo sapiens
tgcgagcttcaacaaatgctatgcttatcagtgctggattaccacctttgaaagcttcccattcagctcactcaacccactcagcacattcaacgcattcwacacattctgctcattcaacgcatgccggacatgcaggtcacacgtcacttccacagtgcattaatccgttcaccaacttaccccatactcctcgatact

SEQ ID NO: 85410 - DNA, 201 bp, Homo sapiens
aggagttgcgagcttcaacaaatgctatgcttatcagtgctggattaccacctttgaaagcttcccattcagctcactcaacccactcagcacattcaacrcattcaacacattctgctcattcaacgcatgccggacatgcaggtcacacgtcacttccacagtgcattaatccgttcaccaacttaccccatactcctc

SEQ ID NO: 85411 - DNA, 201 bp, Homo sapiens
tggattaccacctttgaaagcttcccattcagctcactcaacccactcagcacattcaacgcattcaacacattctgctcattcaacgcatgccggacatkcaggtcacacgtcacttccacagtgcattaatccgttcaccaacttaccccatactcctcgatactatgatattctaaagaaacgtcttcagctccctgt

SEQ ID NO: 85412 - DNA, 201 bp, Homo sapiens
gaatggttggtgaaaattgcccctcaatattatgacatgagcaatttcccacagtgtgaagcaaagagacagttggaccgcatcattgccaaacttcaatycaaggaatattcacagtactgaattcagtgcttagaactgaagttattgagaggacagctttaaaagatgaatgaactcaaaagttcgagttgtgctctt

SEQ ID NO: 85413 - DNA, 201 bp, Homo sapiens
agggagatcttcttcttttcttaactggtcaagaggaaattgatgaagcctgtaagagaataaagcgtgaagttgatgatttgggccctgaagttggtgayattaaaatcattccattgtattctacacttccacctcagcagcagcaacgcatttttgagcctccacctcccaaaaaacagaatggagcaattggaagaa

SEQ ID NO: 85414 - DNA, 201 bp, Homo sapiens
atctgacactgctgaacgtctaccatgcttttaaacaaaatcatgaatcggttcagtggtgttatgacaacttcattaactacaggtccctgatgtccgcrgacaatgtacgccagcagctatctcgaattatggacagatttaatttgcctcgtcgaagtactgactttacaagcagggactattatattaatataagaa

SEQ ID NO: 85415 - DNA, 201 bp, Homo sapiens
cactgtagctcatactggaaaagtcgatcaatgttttgcagtttattgaaagtagttctatatataacaatgttataagcatttctttagaaatggttgawaatgcttctaaaatgtgattatcgaccatggtatgcatgatcgttgtaattgttgacattccttttagaagttgtgaaatgttacaacttgtgcttatgt

SEQ ID NO: 85416 - DNA, 201 bp, Homo sapiens
gagaggacagctttaaaagatgaatgaactcaaaagttcgagttgtgctcttcacgttggttcgataatggcctttatttgaaagctttttaatttttctytacagtaaatattccattctgatttcataaattaaacatttatgcctcccttttgtgttgacactgtagctcatactggaaaagtcgatcaatgttttgc

SEQ ID NO: 85417 - DNA, 201 bp, Homo sapiens
caaaccccaccaccctgtgagcactctactggctgtccctgagcctctagttcctcactcttccttttcagaacctgatgcccagtaggggttgtcctggygacacccctcctttttccagtgcccagaggcctggtggagccataacctctcccacagccagtgccaagtcctccccctgcccattctcatggggcagga

SEQ ID NO: 85418 - DNA, 201 bp, Homo sapiens
gtggttggtgaaagccattcttagttgtgtctctgcaatgctgtgggcacaaaagaaggggcaccagagtccctgtgcaaacacctagactcacttcatgkattccaaagctctcagcttcattttattagttacgttaggtaagggggttcaagggtcatggtcctcatcacacacatgtcatcagggccctctgcactc

SEQ ID NO: 85419 - DNA, 201 bp, Homo sapiens
ggtcatcgctgacgacagcgacaagccagagcgcgttagtggcccctacgtggaacactatctcatgcccttcggcaagggctggttcgcaggccggaacytggccgtgtctcaagtaaccaccaagtacgtgctgtgggtggacgacgacttcgtcttcacggcgcggacgcggctggagaggcttgtggacgtgctgga

SEQ ID NO: 85420 - DNA, 201 bp, Homo sapiens
gtggctgggccgccgggccctgtgcgctctggtccttctgctcgcctgcgcctcgctggggctcctgtacgcgagcacccgggacgcgcccggcctccggstacctcttgcgccgtgggcgcccccgcaaagcccccgcaggcccgagctgccagatcttgctcctgagccccgctacgcacacatcccggtcaggatcaa

SEQ ID NO: 85421 - DNA, 201 bp, Homo sapiens
agcccctgccaactccccgctccagtaccccctacagggtgtggaagttcagcccctcaggagcatcttggtgccagggctgagccttcaggcagcttctsgtcaggaggtataccaggtgaacctgactgcctccctaggcacctgggacgtggcaggggaagtgactggagttactctcactggagagggtcaggcaga

SEQ ID NO: 85422 - DNA, 201 bp, Homo sapiens
gcgctgccagtgggacgcggagccagggatccccggctttgccccggggctggggtgcaacagactcttaacttggtcctcgcgccccgccaaccgccccmgggcaggaaacgcccagaaccaccaccgcgccgcgctccacaaaagccccgggagttccaagacgggagggatcgggcgcgctccagaggcaggagggtc

SEQ ID NO: 85423 - DNA, 165 bp, Homo sapiens
cttcttgatcttcctcagaccctttcccaaacccctctccctgggtctccagccacttacccctgcctcacttgccgcagcccagtgcctcctggctcccrctcctggtgctactgccccttaccaggctccccagggcataagcagctgcatcctgcacactca

SEQ ID NO: 85424 - DNA, 142 bp, Homo sapiens
ttcccaaacccctctccctgggtctccagccacttacccctgcctcacttgccgcagcccagtgcctcctggctcccgctcctggtgctactgccccttamcaggctccccagggcataagcagctgcatcctgcacactca

SEQ ID NO: 85425 - DNA, 201 bp, Homo sapiens
gccaaagagcccagagggactctaagaacctaaggtggaaacactgtcctctcatcttgggaccgagggggtggggaagttccccaacacataatcccaaractgtgcccctcatctgcatcttcagatccagtactctgtgtacctgctccagccccacccccacagagagaacttgtggctctggggctggggtgaggg

SEQ ID NO: 85426 - DNA, 201 bp, Homo sapiens
gcccggtaccgttacccaggatcactggacgagagccagatggccaaacaccggctgctcttcttcaaacaccggctgcagtgcatgacctcccagtgatrgcccgctggggatttctgactgtcaggctgggcctgcctccttgtccctgccaggaatttccaacaaaccccaccaccctgtgagcactctactggctgt

SEQ ID NO: 85427 - DNA, 201 bp, Homo sapiens
tggcaggggaagtgactggagttactctcactggagagggtcaggcagatctcacccttgtcagcccagggctggaccaactcaacaggcaactacaactkgtcacttacagcagccgaagctaccagaccaacacagcagacacagtccggttctccaccgagggacatgaggctgctttcactatccgcataagacacc

SEQ ID NO: 85428 - DNA, 201 bp, Homo sapiens
catgcatccaaactgaagctgccttggacatcaagggatgccggagcagagacttacgcccggtaccgttacccaggatcactggacgagagccagatggycaaacaccggctgctcttcttcaaacaccggctgcagtgcatgacctcccagtgatggcccgctggggatttctgactgtcaggctgggcctgcctcctt

SEQ ID NO: 85429 - DNA, 201 bp, Homo sapiens; identical to SEQ ID NO: 85417

SEQ ID NO: 85430 - DNA, 201 bp, Homo sapiens; identical to SEQ ID NO: 85418

SEQ ID NO: 85431 - DNA, 201 bp, Homo sapiens; identical to SEQ ID NO: 85419

SEQ ID NO: 85432 - DNA, 201 bp, Homo sapiens; identical to SEQ ID NO: 85420

SEQ ID NO: 85433 - DNA, 201 bp, Homo sapiens; identical to SEQ ID NO: 85421

SEQ ID NO: 85434 - DNA, 201 bp, Homo sapiens; identical to SEQ ID NO: 85422

SEQ ID NO: 85435 - DNA, 165 bp, Homo sapiens; identical to SEQ ID NO: 85423

SEQ ID NO: 85436 - DNA, 142 bp, Homo sapiens; identical to SEQ ID NO: 85424

SEQ ID NO: 85437 - DNA, 201 bp, Homo sapiens; identical to SEQ ID NO: 85425

SEQ ID NO: 85438 - DNA, 201 bp, Homo sapiens; identical to SEQ ID NO: 85426

SEQ ID NO: 85439 - DNA, 201 bp, Homo sapiens; identical to SEQ ID NO: 85427

SEQ ID NO: 85440 - DNA, 201 bp, Homo sapiens; identical to SEQ ID NO: 85428

SEQ ID NO: 85441 - DNA, 135 bp, Homo sapiens
cgtcctgcctcgccctgttcgcgcgtccgctgtcyggcctccggtcacgtgacagcagcgcaggtgagcgccgcttccggggtcgggcgcctggatagctgccggctccggcttccacttggtcggttgcgcggg

SEQ ID NO: 85442 - DNA, 201 bp, Homo sapiens
agtccttcattgatgtctatgccatccggagtgctgaaggagccccccagaaggaggtctacttcatgggcctcattgatatccttacacagtatgatgcyaagaagaaagcagctcatgcagccaaaactgtcaagcatggggctggggcagagatctctactgtccatccggagcagtatgctaagcgattcctggatt

SEQ ID NO: 85443 - DNA, 201 bp, Homo sapiens
agaaccctgatgagatacattgtcttcctctccctacaatgcctctggggccaaggcacccattcttcttgctatcctccatcccccttgaggcttccactttttttttttttagacataaagctgggcatcagcaactggcctgtggtgatgcaaagctgctttgctctgtatctggctggactgatctgtctcacaaga

SEQ ID NO: 85444 - DNA, 201 bp, Homo sapiens
tctcctaggggacagatggccttctttgtcatcttcactctccacccccagagaggagtcagagccataactcaatcactcagcccctccaaagatagttratgtgtgataatctcataatgttgagaaccctgatgagatacattgtcttcctctccctacaatgcctctggggccaaggcacccattcttcttgctatc

SEQ ID NO: 85445 - DNA, 201 bp, Homo sapiens
acgacatcattcggggctctgaaccagaggaggaagcgcccgtgcgggaggatgagtcagaggtggatggggactgcagcctgactggacctcctgctctkgtgggctcctatggcacctccccagagggtatcggaggctacatccattcccatcggcccctgggcccaggagagtttgagtccttcattgatgtctatg

SEQ ID NO: 85446 - DNA, 201 bp, Homo sapiens
aagagagatgtggagtttctagtgcagctgaagatcatggactacagccttctgctaggcatccacgacatcattcggggctctgaaccagaggaggaagsgcccgtgcgggaggatgagtcagaggtggatggggactgcagcctgactggacctcctgctctggtgggctcctatggcacctccccagagggtatcgga

SEQ ID NO: 85447 - DNA, 201 bp, Homo sapiens
gtcctgtcttatactgcaactgtgtctcctaggggacagatggccttctttgtcatcttcactctccacccccagagaggagtcagagccataactcaatmactcagcccctccaaagatagttgatgtgtgataatctcataatgttgagaaccctgatgagatacattgtcttcctctccctacaatgcctctggggcc

SEQ ID NO: 85448 - DNA, 201 bp, Homo sapiens; identical to SEQ ID NO: 85442

SEQ ID NO: 85449 - DNA, 201 bp, Homo sapiens; identical to SEQ ID NO: 85443

SEQ ID NO: 85450 - DNA, 201 bp, Homo sapiens; identical to SEQ ID NO: 85444

SEQ ID NO: 85451 - DNA, 201 bp, Homo sapiens; identical to SEQ ID NO: 85445

SEQ ID NO: 85452 - DNA, 201 bp, Homo sapiens; identical to SEQ ID NO: 85446

SEQ ID NO: 85453 - DNA, 201 bp, Homo sapiens; identical to SEQ ID NO: 85447

SEQ ID NO: 85454 - DNA, 201 bp, Homo sapiens
gccgaagccgtgtaaatgcgttttaagcagaggcctcggctccgcaactgccactcctcctcggggtgttgcacaagtttcgaggtcaccggcgacccccsctagcagcgcgcctggctctggcccccgcgaaggaggacggagtttgtgtgttgcatactttctaaggcggcggctgcagcagcggctccatccagcccg

SEQ ID NO: 85455 - DNA, 201 bp, Homo sapiens
gtcaccggcgaccccccctagcagcgcgcctggctctggcccccgcgaaggaggacggagtttgtgtgttgcatactttctaaggcggcggctgcagcagmggctccatccagcccgtcagctcctcctgcaaggcatggctggctacctgagtgaatcggactttgtgatggtggaggagggcttcagtacccgagacct

SEQ ID NO: 85456 - DNA, 201 bp, Homo sapiens
gggtctgtggctgctgggctggcggggcgcaggccgcgggacccgagcccggggaagcgagagagcggaggcgccgaggatccgattcactccctggggasacctatgggccgaagccgtgtaaatgcgttttaagcagaggcctcggctccgcaactgccactcctcctcggggtgttgcacaagtttcgaggtcaccgg

SEQ ID NO: 85457 - DNA, 201 bp, Homo sapiens
cgaagccgtgtaaatgcgttttaagcagaggcctcggctccgcaactgccactcctcctcggggtgttgcacaagtttcgaggtcaccggcgacccccccyagcagcgcgcctggctctggcccccgcgaaggaggacggagtttgtgtgttgcatactttctaaggcggcggctgcagcagcggctccatccagcccgtc

SEQ ID NO: 85458 - DNA, 201 bp, Homo sapiens
ggcggggttatataagccagcggcgggcggaaggcggggcgtgggggtctgtggctgctgggctggcggggcgcaggccgcgggacccgagcccggggaarcgagagagcggaggcgccgaggatccgattcactccctggggagacctatgggccgaagccgtgtaaatgcgttttaagcagaggcctcggctccgcaac

SEQ ID NO: 85459 - DNA, 201 bp, Homo sapiens
gcggggcgtgggggtctgtggctgctgggctggcggggcgcaggccgcgggacccgagcccggggaagcgagagagcggaggcgccgaggatccgattcaytccctggggagacctatgggccgaagccgtgtaaatgcgttttaagcagaggcctcggctccgcaactgccactcctcctcggggtgttgcacaagtttc

SEQ ID NO: 85460 - DNA, 201 bp, Homo sapiens
gtgcattgctaccgatgactcccactccctgagctgcctgagcctaaagtttggagtgtcactgaaatcctgcagacacctgcttgaaaatgcgaagaagmaccatgtggaggtggtgggtgtgagttttcacattggcagtggctgtcctgaccctcaggcctatgctcagtccatcgcagacgcccggctcgtgtttga

SEQ ID NO: 85461 - DNA, 201 bp, Homo sapiens; identical to SEQ ID NO: 85454

SEQ ID NO: 85462 - DNA, 201 bp, Homo sapiens; identical to SEQ ID NO: 85455

SEQ ID NO: 85463 - DNA, 201 bp, Homo sapiens; identical to SEQ ID NO: 85456

SEQ ID NO: 85464 - DNA, 201 bp, Homo sapiens; identical to SEQ ID NO: 85457

SEQ ID NO: 85465 - DNA, 201 bp, Homo sapiens; identical to SEQ ID NO: 85458

SEQ ID NO: 85466 - DNA, 201 bp, Homo sapiens; identical to SEQ ID NO: 85459

SEQ ID NO: 85467 - DNA, 201 bp, Homo sapiens; identical to SEQ ID NO: 85460

SEQ ID NO: 85468 - DNA, 201 bp, Homo sapiens; identical to SEQ ID NO: 85454

SEQ ID NO: 85469 - DNA, 201 bp, Homo sapiens; identical to SEQ ID NO: 85455

SEQ ID NO: 85470 - DNA, 201 bp, Homo sapiens; identical to SEQ ID NO: 85456

SEQ ID NO: 85471 - DNA, 201 bp, Homo sapiens; identical to SEQ ID NO: 85457

SEQ ID NO: 85472 - DNA, 201 bp, Homo sapiens; identical to SEQ ID NO: 85458

SEQ ID NO: 85473 - DNA, 201 bp, Homo sapiens; identical to SEQ ID NO: 85459

SEQ ID NO: 85474 - DNA, 201 bp, Homo sapiens
gagtgggcctcgttccccccggagaatcccagcggggcctcagagatgcatctgggagaggtggggaagatggcaggcaagggtacccttggccaggactytggtgcccaccctgccacccccgcgctccacctgcagtgtttctgccctgtaaataggaccagtcttacactcgctgtagttcaagtatgcaacataaat

SEQ ID NO: 85475 - DNA, 201 bp, Homo sapiens; identical to SEQ ID NO: 85460

SEQ ID NO: 85476 - DNA, 201 bp, Homo sapiens; identical to SEQ ID NO: 85454

SEQ ID NO: 85477 - DNA, 201 bp, Homo sapiens
acagacaccctgtgcgtgggccctgtcttcaccccagcgagcatcatgtgagtgggcctcgttccccccggagaatcccagcggggcctcagagatgcatytgggagaggtggggaagatggcaggcaagggtacccttggccaggactctggtgcccaccctgccacccccgcgctccacctgcagtgtttctgccctgt

SEQ ID NO: 85478 - DNA, 201 bp, Homo sapiens
ggcagctgatggctgcagaacaggaggatgacgtggagggtgtgtgcaagcctctgtcctgcggctgggagatcacagacaccctgtgcgtgggccctgtyttcaccccagcgagcatcatgtgagtgggcctcgttccccccggagaatcccagcggggcctcagagatgcatctgggagaggtggggaagatggcaggc

SEQ ID NO: 85479 - DNA, 201 bp, Homo sapiens; identical to SEQ ID NO: 85455

SEQ ID NO: 85480 - DNA, 201 bp, Homo sapiens; identical to SEQ ID NO: 85456

SEQ ID NO: 85481 - DNA, 201 bp, Homo sapiens; identical to SEQ ID NO: 85458

SEQ ID NO: 85482 - DNA, 201 bp, Homo sapiens; identical to SEQ ID NO: 85457

SEQ ID NO: 85483 - DNA, 201 bp, Homo sapiens; identical to SEQ ID NO: 85459

SEQ ID NO: 85484 - DNA, 201 bp, Homo sapiens
gcctgtggggcccggcggttgatggctgtgattgcgtggctgagggcctgtggctgccgcaactacacgtaggggactggctggtctttgacaacatgggygcctacactgtgggcatgggttcccccttttgggggacccaggcctgccacatcacctatgccatgtcccgggtggcctgggaagcgctgcgaaggcagc

SEQ ID NO: 85485 - DNA, 201 bp, Homo sapiens; identical to SEQ ID NO: 85474

SEQ ID NO: 85486 - DNA, 201 bp, Homo sapiens; identical to SEQ ID NO: 85460

SEQ ID NO: 85487 - DNA, 201 bp, Homo sapiens; identical to SEQ ID NO: 85454

SEQ ID NO: 85488 - DNA, 201 bp, Homo sapiens; identical to SEQ ID NO: 85477

SEQ ID NO: 85489 - DNA, 201 bp, Homo sapiens; identical to SEQ ID NO: 85478

SEQ ID NO: 85490 - DNA, 201 bp, Homo sapiens; identical to SEQ ID NO: 85455

SEQ ID NO: 85491 - DNA, 201 bp, Homo sapiens; identical to SEQ ID NO: 85456

SEQ ID NO: 85492 - DNA, 201 bp, Homo sapiens; identical to SEQ ID NO: 85458

SEQ ID NO: 85493 - DNA, 201 bp, Homo sapiens; identical to SEQ ID NO: 85457

SEQ ID NO: 85494 - DNA, 201 bp, Homo sapiens; identical to SEQ ID NO: 85459

SEQ ID NO: 85495 - DNA, 201 bp, Homo sapiens; identical to SEQ ID NO: 85484

SEQ ID NO: 85496 - DNA, 201 bp, Homo sapiens; identical to SEQ ID NO: 85474

SEQ ID NO: 85497 - DNA, 201 bp, Homo sapiens
ggccgaagccgtgtaaatgcgttttaaggcgagcctcggctccgcaactgccactcctcctcggggtgttgcacaagtttcgaggtcaccggcgacccccsctagcagcgcgcctggctctggcccccgcgaaggaggacggagtttgtgtgttgcatactttctaaggcggcggctgcagcagcggctccatccagcccg

SEQ ID NO: 85498 - DNA, 201 bp, Homo sapiens; identical to SEQ ID NO: 85477

SEQ ID NO: 85499 - DNA, 201 bp, Homo sapiens; identical to SEQ ID NO: 85478

SEQ ID NO: 85500 - DNA, 201 bp, Homo sapiens; identical to SEQ ID NO: 85455

SEQ ID NO: 85501 - DNA, 201 bp, Homo sapiens
gggtctgtggctgctgggctggcggggcgcaggccgcgggacccgagcccggggaagcgagagagcggaggcgccgaggatccgattcactccctggggasacctatgggccgaagccgtgtaaatgcgttttaaggcgagcctcggctccgcaactgccactcctcctcggggtgttgcacaagtttcgaggtcaccggc

SEQ ID NO: 85502 - DNA, 201 bp, Homo sapiens
ccgaagccgtgtaaatgcgttttaaggcgagcctcggctccgcaactgccactcctcctcggggtgttgcacaagtttcgaggtcaccggcgacccccccyagcagcgcgcctggctctggcccccgcgaaggaggacggagtttgtgtgttgcatactttctaaggcggcggctgcagcagcggctccatccagcccgtc

SEQ ID NO: 85503 - DNA, 201 bp, Homo sapiens
ggcggggttatataagccagcggcgggcggaaggcggggcgtgggggtctgtggctgctgggctggcggggcgcaggccgcgggacccgagcccggggaarcgagagagcggaggcgccgaggatccgattcactccctggggagacctatgggccgaagccgtgtaaatgcgttttaaggcgagcctcggctccgcaact

SEQ ID NO: 85504 - DNA, 201 bp, Homo sapiens
gcggggcgtgggggtctgtggctgctgggctggcggggcgcaggccgcgggacccgagcccggggaagcgagagagcggaggcgccgaggatccgattcaytccctggggagacctatgggccgaagccgtgtaaatgcgttttaaggcgagcctcggctccgcaactgccactcctcctcggggtgttgcacaagtttcg

SEQ ID NO: 85505 - DNA, 201 bp, Homo sapiens; identical to SEQ ID NO: 85484

SEQ ID NO: 85506 - DNA, 201 bp, Homo sapiens; identical to SEQ ID NO: 85474

SEQ ID NO: 85507 - DNA, 201 bp, Homo sapiens; identical to SEQ ID NO: 85460

SEQ ID NO: 85508 - DNA, 201 bp, Homo sapiens; identical to SEQ ID NO: 85497

SEQ ID NO: 85509 - DNA, 201 bp, Homo sapiens; identical to SEQ ID NO: 85477

SEQ ID NO: 85510 - DNA, 201 bp, Homo sapiens; identical to SEQ ID NO: 85478

SEQ ID NO: 85511 - DNA, 201 bp, Homo sapiens; identical to SEQ ID NO: 85455

SEQ ID NO: 85512 - DNA, 201 bp, Homo sapiens; identical to SEQ ID NO: 85501

SEQ ID NO: 85513 - DNA, 201 bp, Homo sapiens; identical to SEQ ID NO: 85503

SEQ ID NO: 85514 - DNA, 201 bp, Homo sapiens; identical to SEQ ID NO: 85502

SEQ ID NO: 85515 - DNA, 201 bp, Homo sapiens; identical to SEQ ID NO: 85504

SEQ ID NO: 85516 - DNA, 201 bp, Homo sapiens; identical to SEQ ID NO: 85484

SEQ ID NO: 85517 - DNA, 201 bp, Homo sapiens; identical to SEQ ID NO: 85474

SEQ ID NO: 85518 - DNA, 201 bp, Homo sapiens; identical to SEQ ID NO: 85460

SEQ ID NO: 85519 - DNA, 201 bp, Homo sapiens; identical to SEQ ID NO: 85477

SEQ ID NO: 85520 - DNA, 201 bp, Homo sapiens
cagcagggtagctctgtggccagtactgaacctgggtcaggtacttggaaggatcacggatggcatgcacagggtgcgagctggatggggtctcacattcrtccacttcttgtcattcaggacgaggtagctgccttcttcgtggctgacctgggtgccatagtgaggaagcacttttgctttctgaagtgcctgccacga

SEQ ID NO: 85521 - DNA, 201 bp, Homo sapiens; identical to SEQ ID NO: 85478

SEQ ID NO: 85522 - DNA, 190 bp, Homo sapiens
cagcagggtagctctgtggccagtactgaacctgggtcaggtacttggaaggatcacggatggcatgcacagggtgcgagctggatgggrtctcacattcatccacttcttgtcattcaggacgaggtagctgccttcttcgtggctgacctgggtgccatagtgaggaagcacttttgctttctgaagt

SEQ ID NO: 85523 - DNA, 201 bp, Homo sapiens; identical to SEQ ID NO: 85484

SEQ ID NO: 85524 - DNA, 201 bp, Homo sapiens
cgcgcgagcggcgctggcaagacgtgtcgatggcgcgcatgcgcacgttgcacgcggcgctgggcgggctgccgggccgcgaggcgcacttcatgttctgmatggacgtggaccagcacttcagcggcacttttgggcccgaggcgctggccgagtcggtggcgcagctgcactcctggcactaccactggccgtcgtggc

SEQ ID NO: 85525 - DNA, 157 bp, Homo sapiens
atgcatcctctctcacacagtgaccctggcccagcccccttgctgagcgctgccctsagggcctggaagagaatcttctggcggcagatcctacttacacttggcctcttaggcctgtttctgtatggcctccctaaattcaggcatctggaagccc

SEQ ID NO: 85526 - DNA, 201 bp, Homo sapiens
ctacgtgttcaccgagcttccgggagcggtgccccgcgtggcgctgggcccgggacgccggctgcccgtggagcgcgtggcgcgcgagcggcgctggcaakacgtgtcgatggcgcgcatgcgcacgttgcacgcggcgctgggcgggctgccgggccgcgaggcgcacttcatgttctgcatggacgtggaccagcactt

SEQ ID NO: 85527 - DNA, 192 bp, Homo sapiens
cagggctcctggaatttcccttgatccagctaggctgggacactccctaaatcagctgcgtgttgttagcatcaggcagaatgaatggcagagagtgattytgtcttcatagagggtggggtacttctccataaggcatctcagtcaaatccccatcactgtcataaattcaaataaaatgtctgaacaagg

SEQ ID NO: 85528 - DNA, 201 bp, Homo sapiens
gagagaccaacccctaacaagggctgggccacagcagggagtccagccctaccttcttcccttggcagctggagaaatctggtttcaatataactcatttraaaatttatgccacagtccttataattggaaaaatactggtgcccaggttttcttggagttatccaagcagctgcgcccctagctgggatctggtacctg

SEQ ID NO: 85529 - DNA, 201 bp, Homo sapiens
tcccctaccccgagtcagccgggccaacaccagggggagggcaaaccagcagtgattggcaggaaaccgtcccgcctctaggagggttgtgccccgctcargcgcctcagccccgccctccgcaccgcccaccgtgcccactggctccaccttttcccgtctcatcgacctgctcgactctctgctgctcctcactttttc

SEQ ID NO: 85530 - DNA, 201 bp, Homo sapiens
tttaatacccctgccctgaaaaaactggccagcgctgcctacccagatccctcaaagcagaagccaatggccaaaggccctgccaagaattcagaaccagwggaggtcatcccatcccggctggatatccgtgtggggaaaatcatcactgtggagaagcacccagatgcagacagcctgtatgtagagaagattgacgtg

SEQ ID NO: 85531 - DNA, 201 bp, Homo sapiens
tctgttgaagtcgcactgaacaagttgctggatccaatccgggaaaagtttaatacccctgccctgaaaaaactggccagcgctgcctacccagatccctyaaagcagaagccaatggccaaaggccctgccaagaattcagaaccagaggaggtcatcccatcccggctggatatccgtgtggggaaaatcatcactgtg

SEQ ID NO: 85532 - DNA, 107 bp, Homo sapiens
cccccastgggcaggggactgcagacggcgctccccgactctcaagacgaccagggagcttcccttttcctcagcggggtgaggggcatctgtcgcccgccgacttg

SEQ ID NO: 85533 - DNA, 201 bp, Homo sapiens
agcttaccctccccagaacccaggatcatcctgtctggctgcagtgagagaccaacccctaacaagggctgggccacagcagggagtccagccctaccttyttcccttggcagctggagaaatctggtttcaatataactcatttaaaaatttatgccacagtccttataattggaaaaatactggtgcccaggttttctt

SEQ ID NO: 85534 - DNA, 181 bp, Homo sapiens
gaatttcccttgatccagctaggctgggacactccctaaatcagctgcgtgttgttagcatcaggcagaatgaatggcagagagtgattctgtcttcataragggtggggtacttctccataaggcatctcagtcaaatccccatcactgtcataaattcaaataaaatgtctgaacaagg

SEQ ID NO: 85535 - DNA, 201 bp, Homo sapiens
ggaaaatcatcactgtggagaagcacccagatgcagacagcctgtatgtagagaagattgacgtgggggaagctgaaccacggactgtggtgagcggcctsgtacagttcgtgcccaaggaggaactgcaggacaggctggtagtggtgctgtgcaacctgaaaccccagaagatgagaggagtcgagtcccaaggcatgc

SEQ ID NO: 85536 - DNA, 201 bp, Homo sapiens
cctccgtggtcacacagcacgattccaagaaggctggagctgaggtggtaaagcaggtggagcaccctttgctgagtggcctcttataccccggactgcakgctttggatgaagagtatttaaaagtagatgcccaatttggaggcattgatcagagaaagattttcacctttgcagagaagtacctccctgcacttggct

SEQ ID NO: 85537 - DNA, 145 bp, Homo sapiens
aatatttaagagtccctcttgagctcgtgtacttgagggaaagttcactttggttctgatcattagaacgtggaaatccaaagatgtgaaaggttgagttytgggttcccaaacatggcttaccttcagaatcatctagggaatt

SEQ ID NO: 85538 - DNA, 201 bp, Homo sapiens
acttgaatttagaaatcttcagcctcaatggagagattgaggactgaaaagaacagtgacctggctaactagaattctccaatatttgagttagaaggagscttacaccattcaattagtttagtggttcttgagtatcaaaggatccagagcagtcctgatgagatctaatcataacttaatggtttttgctgctgataa

SEQ ID NO: 85539 - DNA, 201 bp, Homo sapiens; identical to SEQ ID NO: 85529

SEQ ID NO: 85540 - DNA, 107 bp, Homo sapiens; identical to SEQ ID NO: 85532

SEQ ID NO: 85541 - DNA, 201 bp, Homo sapiens; identical to SEQ ID NO: 85536

SEQ ID NO: 85542 - DNA, 110 bp, Homo sapiens
agggaaagttcactttggttctgatcattagaacgtggaaatccaaagatgtgaaaggttgagttctgggttcccaaacatggcttaccttcagaatcatytagggaatt

SEQ ID NO: 85543 - DNA, 191 bp, Homo sapiens
cagggctcctggaatttcccttgatccagctaggctgggacactccctaaatcagctgcgtgttgttagcatcaggcagaatgaatggcagagagtgattytgtcttcatagagggtggggtacttctccataaggcatctcagtcaaatccccatcactgtcataaattcaaataaaatgtctgaacaag

SEQ ID NO: 85544 - DNA, 201 bp, Homo sapiens; identical to SEQ ID NO: 85528

SEQ ID NO: 85545 - DNA, 201 bp, Homo sapiens; identical to SEQ ID NO: 85529

SEQ ID NO: 85546 - DNA, 201 bp, Homo sapiens; identical to SEQ ID NO: 85530

SEQ ID NO: 85547 - DNA, 201 bp, Homo sapiens; identical to SEQ ID NO: 85531

SEQ ID NO: 85548 - DNA, 107 bp, Homo sapiens; identical to SEQ ID NO: 85532

SEQ ID NO: 85549 - DNA, 201 bp, Homo sapiens; identical to SEQ ID NO: 85533

SEQ ID NO: 85550 - DNA, 180 bp, Homo sapiens
gaatttcccttgatccagctaggctgggacactccctaaatcagctgcgtgttgttagcatcaggcagaatgaatggcagagagtgattctgtcttcataragggtggggtacttctccataaggcatctcagtcaaatccccatcactgtcataaattcaaataaaatgtctgaacaag

SEQ ID NO: 85551 - DNA, 201 bp, Homo sapiens; identical to SEQ ID NO: 85535

SEQ ID NO: 85552 - DNA, 201 bp, Homo sapiens; identical to SEQ ID NO: 85536

SEQ ID NO: 85553 - DNA, 201 bp, Homo sapiens
gtaatgcaacagaatgcccaagagtgacctcataaagcaaggattcccttcgtggccccttctctgctgcctctcagaatccagacgctaaggaaaatccstaagcagagattttctgttggatgctaaaagcaaggaataaaagttgaaaatttggaaaatgtctcaacaccgtcaccagcgccactcgagagtcatttc

SEQ ID NO: 85554 - DNA, 201 bp, Homo sapiens
attcccttcgtggccccttctctgctgcctctcagaatccagacgctaaggaaaatccctaagcagagattttctgttggatgctaaaagcaaggaataaragttgaaaatttggaaaatgtctcaacaccgtcaccagcgccactcgagagtcatttctagttcaccagttgacactacatcggtgggattttgcccaac

SEQ ID NO: 85555 - DNA, 201 bp, Homo sapiens
ttgctgtagaacatatttggagaagtttgtttgtctttggtgtttatttcatgaatagattgtgtgcccattttctcttggggtattcagttttttattaytgatgtgagcatgtgtatgggtgattatttgatgattatcagttttgcttagtagactggcaatatttagtcttgctgtcactgtgttcccagtgcctac

SEQ ID NO: 85556 - DNA, 201 bp, Homo sapiens
cctttgacctcttgcatgacctccacagatagcaaaccgggccgacacatggttgacgatgtccttttctacaatgaagttaatgaaagttctgaaaatartgattactttctgacattgataggatttaggaaacctctggataaatagcttaagcatggctgtttatgtttttgctatagacaaaaagcagcagcatgt

SEQ ID NO: 85557 - DNA, 201 bp, Homo sapiens
acaattttaatcaggaggaacgatgatgaatgtcgggcatttgtgaagagagtcataatgagccgtttctttaagataattatgattagcactgtcacatygaatgcgttttttatggccttgtggaccagttatgacataaggtaccgcttgttcagacttcttgagttctcggagatcttctttgtgtccatctgcaca

SEQ ID NO: 85558 - DNA, 127 bp, Homo sapiens
tagccagggcatccgggtgagtgcactgggggtgtcatggtgctgggagggcaggccgtaggcccatttgcccccaagacactaaggaaataatgactctmctaccatcttccagttgttgagtcca

SEQ ID NO: 85559 - DNA, 201 bp, Homo sapiens
cttccaaaatacatgaggaacgatgatgaatgtcgggcatttgtgaagagagtcataatgagccgtttctttaagataattatgattagcactgtcacatygaatgcgttttttatggccttgtggaccagttatgacataaggtaccgcttgttcagacttcttgagggtggtggtacagccattgaaaataacatgtat

SEQ ID NO: 85560 - DNA, 201 bp, Homo sapiens
gacaacacaggcaggattttggggaataagaagaaggatactatctggaacttccatgtctggaatgagtgctggatggcccggaaggatctgccccctgsatatggaggctggcaggtgctggacgccacacctcaggagatgagcaacggcgtctactgctgtggccctgcctctgtcagagccatcaaagaaggagaa

SEQ ID NO: 85561 - DNA, 201 bp, Homo sapiens
cagccacagactgtgctctgcggggaagccccgtctacgtcagcagagtggtgtgtgccatgatcaacagcaatgatgataatggggtgctcaatggaaastggagtgagaattacacagacggcgccaaccctgcggagtggacgggcagcgtggccatcctgaagcagtggaacgccacaggctgccagcccgtgcgct

SEQ ID NO: 85562 - DNA, 141 bp, Homo sapiens
attgcagggctagaagtggccctcacagacctccagagctscagaaataatgtgcggcaccacacggaggagatcactgtggaccacctgcttgttcgccggggccaggccttcaacctcaccctgtacttcaggaaccgg

SEQ ID NO: 85563 - DNA, 201 bp, Homo sapiens
aagacaaaatcatagacatctgcctgaagctgctagacaagagcctgcacttccagactgacccagccacagactgtgctctgcggggaagccccgtctaygtcagcagagtggtgtgtgccatgatcaacagcaatgatgataatggggtgctcaatggaaactggagtgagaattacacagacggcgccaaccctgcgg

SEQ ID NO: 85564 - DNA, 201 bp, Homo sapiens
tggctcccaaagaggagcagagttgcaaccttccaggcccacatcactgagccaggacagccctcggagcctgcatacaccttcccttcgacccagtgatrtggtgcaagtctccctgaaattcaagctgctcgacccgcccaacatgggccaggatatatgctttgtcctgctggccctcaacatgtcctcccagttcaa

SEQ ID NO: 85565 - DNA, 201 bp, Homo sapiens
cagtgatgaggtgtctggggatccctacccgtgtgatcaccaacttcgactctggccacgatacagatggaaacctgatcatagatgagtattatgacaayacaggcaggattttggggaataagaagaaggatactatctggaacttccatgtctggaatgagtgctggatggcccggaaggatctgccccctgcatatg

SEQ ID NO: 85566 - DNA, 201 bp, Homo sapiens
caggacagccctcggagcctgcatacaccttcccttcgacccagtgatgtggtgcaagtctccctgaaattcaagctgctcgacccgcccaacatgggccrggatatatgctttgtcctgctggccctcaacatgtcctcccagttcaaggacctcaaagtgaacctgagtgcccagtctctgctgcacgatggcagcccc

SEQ ID NO: 85567 - DNA, 201 bp, Homo sapiens; identical to SEQ ID NO: 85560

SEQ ID NO: 85568 - DNA, 201 bp, Homo sapiens; identical to SEQ ID NO: 85561

SEQ ID NO: 85569 - DNA, 135 bp, Homo sapiens
gggctagaagtggccctcacagacctccagagctscagaaataatgtgcggcaccacacggaggagatcactgtggaccacctgcttgttcgccggggccaggccttcaacctcaccctgtacttcaggaaccgg

SEQ ID NO: 85570 - DNA, 201 bp, Homo sapiens; identical to SEQ ID NO: 85563

SEQ ID NO: 85571 - DNA, 201 bp, Homo sapiens; identical to SEQ ID NO: 85564

SEQ ID NO: 85572 - DNA, 201 bp, Homo sapiens; identical to SEQ ID NO: 85565

SEQ ID NO: 85573 - DNA, 201 bp, Homo sapiens; identical to SEQ ID NO: 85566

SEQ ID NO: 85574 - DNA, 201 bp, Homo sapiens; identical to SEQ ID NO: 85560

SEQ ID NO: 85575 - DNA, 201 bp, Homo sapiens; identical to SEQ ID NO: 85561

SEQ ID NO: 85576 - DNA, 150 bp, Homo sapiens
ggctgccccattgcagggctagaagtggccctcacagacctccagagctscagaaataatgtgcggcaccacacggaggagatcactgtggaccacctgcttgttcgccggggccaggccttcaacctcaccctgtacttcaggaaccgg

SEQ ID NO: 85577 - DNA, 201 bp, Homo sapiens; identical to SEQ ID NO: 85563

SEQ ID NO: 85578 - DNA, 201 bp, Homo sapiens; identical to SEQ ID NO: 85564

SEQ ID NO: 85579 - DNA, 201 bp, Homo sapiens; identical to SEQ ID NO: 85565

SEQ ID NO: 85580 - DNA, 201 bp, Homo sapiens; identical to SEQ ID NO: 85566

SEQ ID NO: 85581 - DNA, 201 bp, Homo sapiens; identical to SEQ ID NO: 85560

SEQ ID NO: 85582 - DNA, 201 bp, Homo sapiens; identical to SEQ ID NO: 85561

SEQ ID NO: 85583 - DNA, 141 bp, Homo sapiens; identical to SEQ ID NO: 85562

SEQ ID NO: 85584 - DNA, 201 bp, Homo sapiens; identical to SEQ ID NO: 85563

SEQ ID NO: 85585 - DNA, 201 bp, Homo sapiens; identical to SEQ ID NO: 85564

SEQ ID NO: 85586 - DNA, 201 bp, Homo sapiens; identical to SEQ ID NO: 85565

SEQ ID NO: 85587 - DNA, 201 bp, Homo sapiens; identical to SEQ ID NO: 85566

SEQ ID NO: 85588 - DNA, 201 bp, Homo sapiens
tgtggaactgctgcaagctttgttcctggtggcaaatgacatcacggattcattgctcaccgctggtaacagatctgctggtttcagaagccgggcgtggrtttggatgccatcagtgatgctatccttgtggaagcatgtatctactgcctgctgaagctctattgctgggagcagccctattgccagaacctgatccag

SEQ ID NO: 85589 - DNA, 201 bp, Homo sapiens
cccaggtgttgacgctgctggacggcgccagtggggaccgcgaggtcgtggttgtgggagccactaaccggccggacgctctagacccagcgctgcgtagrcccgggagatttgaccgagaggtggtcattgggactcccacacttaaacaaagaaaggaaattctgcaagtgattacctcgaagatgcccatctccagtc

SEQ ID NO: 85590 - DNA, 201 bp, Homo sapiens
tttcggaggcggccgactcgctgcgggagctcctccgcctcccgctccgctacccgcgcgccctgaccgcgctgggcttagcggtgcctcgcggggtgctmctggcggggccccccggagtgggcaagacccagctggtgcgggccgtggcgcgcgaggcgggcgcggagctgctggcagtcagcgccccggcgctgcagg

SEQ ID NO: 85591 - DNA, 145 bp, Homo sapiens
atctgcttccggcctgcgagctcggtgttccgctttttgtgggcygggtgggtttcctaatctggtttcgtctgcctggttcatctgtgtgcgatggctccggactcggatcccttccctgaagggccgctcttaaagctgctac

SEQ ID NO: 85592 - DNA, 201 bp, Homo sapiens
cggacccagcctcctcttcctggacgagatggacgccttgtgtccccagcggggcagtcgagcacccgagagccgcgtagtggcccaggtgttgacgctgytggacggcgccagtggggaccgcgaggtcgtggttgtgggagccactaaccggccggacgctctagacccagcgctgcgtagacccgggagatttgaccg

SEQ ID NO: 85593 - DNA, 176 bp, Homo sapiens
atctgcttccggcctgcgagctcggtgttccgctttttgtgggccgggtgggtttcctaatctggtttcgtctgcytggttcatctgtgtgcgatggctccggactcggatcccttccctgaagggccgctcttaaagctgctacccttagacgctagagaccggggcacccagcg

SEQ ID NO: 85594 - DNA, 201 bp, Homo sapiens
ggggcgtcgagatcccggaggagtctcagcctgaatcgcctcctcctagtgccctgtccgcccctgcggcgcgtcgccgtgtggccggtgttgcgagagcsggcaggcgcgcccggtgcccggaatacagccgcggtgctggaggcggcacaggagctgctgagaaaccgaccgatctccctgggccacgtggtggtcgct

SEQ ID NO: 85595 - DNA, 201 bp, Homo sapiens
taaagctgctacccttagacgctagagaccggggcacccagcgctgccgcctgggcccggccgccctccacgccctgggcgcgcgcttgggctcggcagtkaagatctcgctacccgacggcggctcctgcctctgcactgcctggcctcggcgggacggagcggacggctttgtgcagctggacccgctgtgcgcgagcc

SEQ ID NO: 85596 - DNA, 201 bp, Homo sapiens
atgaaatagacttccttgaagcttttaaaaatattcagccctcatcgtttcgaagcgtcattggattaatggatatcaagcctgttgactgggaggagatkggtggccttgaagatgtaaaactgaagttaaaacagagcattgagtggcctctgaaattcccttgggaatttgttagaatgggcctgacacaaccaaagg

SEQ ID NO: 85597 - DNA, 201 bp, Homo sapiens
gattcagaaaaagtgttgtctcagatatttcgacaagcaagagcaagcactccagcaattttgtttttggatgaaattgattcaatcttgggagctcgctyagccagcaagacaggatgtgatgttcaagaacgagttctttctgttctcctgaatgaattagatggtgttggacttaagacaatagagagaagaggaagt

SEQ ID NO: 85598 - DNA, 201 bp, Homo sapiens
tgcaagaaaatggactagacgcaactacagtgaaacaagagcactttctaaaatcacttaagactgtaaaaccgtcgttaagttgcaaggacttggctttrtatgaaaacttatttaagaaagaaggattttctaacgtggaaggtatttaaaaatcaccttaaactcttgttcagttcacattaattgaaatgtgaactt

SEQ ID NO: 85599 - DNA, 169 bp, Homo sapiens
atctgcttccggcctgcgagctcggtgttccgctttttgtgggccgggtgggtttcctaatctggtttygtctgcctggttcatctgtgtgcgatggctccggactcggatcccttccctgaagggccgctcttaaagctgctacccttagacgctagagaccggggca

SEQ ID NO: 85600 - DNA, 201 bp, Homo sapiens
ccgctccgctacccgcgcgccctgaccgcgctgggcttagcggtgcctcgcggggtgctactggcggggccccccggagtgggcaagacccagctggtgcrggccgtggcgcgcgaggcgggcgcggagctgctggcagtcagcgccccggcgctgcagggttcccggcctggggagaccgaggagaacgtgcggcgggtc

SEQ ID NO: 85601 - DNA, 201 bp, Homo sapiens; identical to SEQ ID NO: 85589

SEQ ID NO: 85602 - DNA, 201 bp, Homo sapiens; identical to SEQ ID NO: 85590

SEQ ID NO: 85603 - DNA, 145 bp, Homo sapiens; identical to SEQ ID NO: 85591

SEQ ID NO: 85604 - DNA, 201 bp, Homo sapiens; identical to SEQ ID NO: 85592

SEQ ID NO: 85605 - DNA, 176 bp, Homo sapiens; identical to SEQ ID NO: 85593

SEQ ID NO: 85606 - DNA, 201 bp, Homo sapiens; identical to SEQ ID NO: 85594

SEQ ID NO: 85607 - DNA, 201 bp, Homo sapiens; identical to SEQ ID NO: 85595

SEQ ID NO: 85608 - DNA, 201 bp, Homo sapiens; identical to SEQ ID NO: 85596

SEQ ID NO: 85609 - DNA, 201 bp, Homo sapiens; identical to SEQ ID NO: 85597

SEQ ID NO: 85610 - DNA, 201 bp, Homo sapiens; identical to SEQ ID NO: 85598

SEQ ID NO: 85611 - DNA, 169 bp, Homo sapiens; identical to SEQ ID NO: 85599

SEQ ID NO: 85612 - DNA, 201 bp, Homo sapiens; identical to SEQ ID NO: 85600

SEQ ID NO: 85613 - DNA, 201 bp, Homo sapiens
gctccatgctgttctgaaagggatggccacaagttctttcccagcctcttccattccctttcttttcatgcccatcccgatgaacctgcatcattccccgrcactgccaagccaaccctggaaaaggagttcgctggccattggctagaatcagggtggagaagttccctgaaccttcctgtctcccagggacatgtatgc

SEQ ID NO: 85614 - DNA, 201 bp, Homo sapiens
atgacaggacatttgacatgagtctccagatagatgtcgtggactccagctctacgtcccacattttagaataccccaccagcagaacaaactcagatctyatcagggtagcagcagaggcaggaccagaaggcaatcaagagcttccagaaatgccacacttgtgtgccacagagttccccgctgacccttggttagggg

SEQ ID NO: 85615 - DNA, 201 bp, Homo sapiens
tgggctaattatcatcaatctttatgtatttgttaaagaaacatctacaggatctttattggtgaccttttgtaagacattagtttgaggtactacctatstacttgaaaataataaagtggcatttctttatgaaaaaaaaagaaatctcttccataattcagatttctacactttatacttgcctccctcctaaatcgt

SEQ ID NO: 85616 - DNA, 201 bp, Homo sapiens
ctgcattgaagaaggctgacattggcattgccatgggcatctctggctctgacgtctctaagcaggcagccgacatgatcctgctggatgacaactttgcytccatcgtcacgggggtggaggagggccgcctgatctttgacaacttgaagaaatccatcgcctacaccctgaccagcaacatccccgagatcaccccct

SEQ ID NO: 85617 - DNA, 201 bp, Homo sapiens
gttcttctggtgagtgcaagagcctgagactggaaaaggtggacttgtctcccagtcgaggctggtaagggaccttcagggagagctgggcagacaggtgsgagatggaggtagggctggctggaggaaggaaacaacaaaggaagtgaggtagtgccaatgacaggacatttgacatgagtctccagatagatgtcgtgg

SEQ ID NO: 85618 - DNA, 201 bp, Homo sapiens
accctatcacagccaaggccattgccaaaggcgtgggcatcatatcagagggggtcagctgtctctgtccccacccaccctccagagaagccaaggcatgygtggtgcacggctctgacctgaaggacatgacatcggagcagctcgatgagatcctcaagaaccacacagagatcgtctttgctcgaacgtctccccagc

SEQ ID NO: 85619 - DNA, 201 bp, Homo sapiens
gctgggtggagaaggagacatactactgaccccattggaagaagaaccaggcatggaaagatggggagctctggaggtgttgtggggatggtgatggagarggatggaaataacgggtggcattgggtggcaacatttggggagagataatgaggcaactcagcaggctaagttgcggggtatataaattggggtgatgac

SEQ ID NO: 85620 - DNA, 201 bp, Homo sapiens
tgttccctccaggcaaatgcccttcaaaccgacgatcattgtgcccacttaccctgggctggagagttggtttcaggttcctacaggagatagctttcttycccttactccctatctaacacttttgctctgcaggcagccttgcccattctctaagcctggcttagaaggcactgggaatgtcctgtagagagagaccta

SEQ ID NO: 85621 - DNA, 201 bp, Homo sapiens
aaaatactaagagatttgctttttctgggtgcggtggctcatgcctgtaatcccagcactttgggaggccgaggcaggtggatcatgaggtcaggagttcraggcgagcctggccaacatggtgaaaccctgtctctactaaaagtacaaaaaattagccagtcatggtggcacacgcctgtaatctcagctactcaggag

SEQ ID NO: 85622 - DNA, 201 bp, Homo sapiens
ccagacgggctggtgtgggcttgggatcctcctggtgacctctcccgctaaggtccctcagccactctgccccaagatgggccgtggggctggccgtgagwactcacctgccgccaccacggcagagaatgggggcggcaagaagaaacagaaggagaaggaactggatgagctgaagaaggaggtggcaatggatgacca

SEQ ID NO: 85623 - DNA, 201 bp, Homo sapiens
cacctgccgccaccacggcagagaatgggggcggcaagaagaaacagaaggagaaggaactggatgagctgaagaaggaggtggcaatggatgaccacaarctgtccttggatgagctgggccgcaaataccaagtggacctgtccaagggcctcaccaaccagcgggctcaggacgttctggctcgagatgggcccaacg

SEQ ID NO: 85624 - DNA, 201 bp, Homo sapiens
tgtgcctgaccctgacagccaagcgcatggcacggaagaactgcctggtgaagaacctggaggcggtggagacgctgggctccacgtccaccatctgctcrgacaagacgggcaccctcacccagaaccgcatgaccgtcgcccacatgtggttcgacaaccaaatccatgaggctgacaccaccgaagatcagtctgggg

SEQ ID NO: 85625 - DNA, 201 bp, Homo sapiens
tgaccctgacagccaagcgcatggcacggaagaactgcctggtgaagaacctggaggcggtggagacgctgggctccacgtccaccatctgctcggacaaracgggcaccctcacccagaaccgcatgaccgtcgcccacatgtggttcgacaaccaaatccatgaggctgacaccaccgaagatcagtctggggccactt

SEQ ID NO: 85626 - DNA, 201 bp, Homo sapiens
aagagcataaacaatattgctagaggtggcatgtttagtctaccaaaaacaatacttttcaggcactttagaaatatccttttagaagcagcgagtgcatrggctaattatcatcaatctttatgtatttgttaaagaaacatctacaggatctttattggtgaccttttgtaagacattagtttgaggtactacctatgt

SEQ ID NO: 85627 - DNA, 201 bp, Homo sapiens
gatcgggatgatccaggcactgggtggcttcttcacctactttgtgatcctggcagagaacggtttcctgccatcacggctactgggaatccgcctcgacygggatgaccggaccatgaatgatctggaggacagctatggacaggagtggacctatgagcagcggaaggtggtggagttcacgtgccacacggcattctt

SEQ ID NO: 85628 - DNA, 201 bp, Homo sapiens
gctccatgctgttctgaaagggatggccacaagttctttcccagcctcttccattccctttcttttcatgcccatcccgatgaacctgcatcattccccgrcactgccaagccaacccttcctgtctcccagggacatgtatgcttccagggacaagcttaggtcatgaacatggtcagaacctttggacaagaggaaaaa

SEQ ID NO: 85629 - DNA, 201 bp, Homo sapiens; identical to SEQ ID NO: 85614

SEQ ID NO: 85630 - DNA, 201 bp, Homo sapiens; identical to SEQ ID NO: 85616

SEQ ID NO: 85631 - DNA, 201 bp, Homo sapiens; identical to SEQ ID NO: 85617

SEQ ID NO: 85632 - DNA, 201 bp, Homo sapiens
gcgtgggcatcatatcagagggtaacgagactgtggaggacattgcagcccggctcaacattcccatgagtcaagtcaaccccagagaagccaaggcatgygtggtgcacggctctgacctgaaggacatgacatcggagcagctcgatgagatcctcaagaaccacacagagatcgtctttgctcgaacgtctccccagc

SEQ ID NO: 85633 - DNA, 201 bp, Homo sapiens; identical to SEQ ID NO: 85619

SEQ ID NO: 85634 - DNA, 201 bp, Homo sapiens; identical to SEQ ID NO: 85621

SEQ ID NO: 85635 - DNA, 201 bp, Homo sapiens; identical to SEQ ID NO: 85622

SEQ ID NO: 85636 - DNA, 201 bp, Homo sapiens; identical to SEQ ID NO: 85623

SEQ ID NO: 85637 - DNA, 201 bp, Homo sapiens; identical to SEQ ID NO: 85624

SEQ ID NO: 85638 - DNA, 201 bp, Homo sapiens; identical to SEQ ID NO: 85625

SEQ ID NO: 85639 - DNA, 201 bp, Homo sapiens; identical to SEQ ID NO: 85627

SEQ ID NO: 85640 - DNA, 201 bp, Homo sapiens; identical to SEQ ID NO: 85613

SEQ ID NO: 85641 - DNA, 201 bp, Homo sapiens; identical to SEQ ID NO: 85614

SEQ ID NO: 85642 - DNA, 201 bp, Homo sapiens; identical to SEQ ID NO: 85615

SEQ ID NO: 85643 - DNA, 201 bp, Homo sapiens; identical to SEQ ID NO: 85616

SEQ ID NO: 85644 - DNA, 201 bp, Homo sapiens; identical to SEQ ID NO: 85617

SEQ ID NO: 85645 - DNA, 201 bp, Homo sapiens; identical to SEQ ID NO: 85632

SEQ ID NO: 85646 - DNA, 201 bp, Homo sapiens; identical to SEQ ID NO: 85619

SEQ ID NO: 85647 - DNA, 201 bp, Homo sapiens; identical to SEQ ID NO: 85620

SEQ ID NO: 85648 - DNA, 201 bp, Homo sapiens; identical to SEQ ID NO: 85621

SEQ ID NO: 85649 - DNA, 201 bp, Homo sapiens; identical to SEQ ID NO: 85622

SEQ ID NO: 85650 - DNA, 201 bp, Homo sapiens; identical to SEQ ID NO: 85623

SEQ ID NO: 85651 - DNA, 201 bp, Homo sapiens; identical to SEQ ID NO: 85624

SEQ ID NO: 85652 - DNA, 201 bp, Homo sapiens; identical to SEQ ID NO: 85625

SEQ ID NO: 85653 - DNA, 201 bp, Homo sapiens; identical to SEQ ID NO: 85626

SEQ ID NO: 85654 - DNA, 201 bp, Homo sapiens; identical to SEQ ID NO: 85627

SEQ ID NO: 85655 - DNA, 201 bp, Homo sapiens
acagtggagcatatgggtgggagacagatggagggtaccctatttacaactgagtcagccaagccactgatgggaatatacagatttaggtgctaaaccawttattttccacggatgagtcacaatctgaagaatcaaacttccatcctgaaaatctatatgtttcaaaaccacttgccatcctgttagattgccagttcc

SEQ ID NO: 85656 - DNA, 142 bp, Homo sapiens
cgctcgccgccggtgcacggcgcaccccgcgggaggcagggwtcagcaaagccgtgcgccccgaggcccgcccccgtctccgcacaaagaccgagctggaggatcttcagaagaagcctcccccatacctgcggaacctgtc

SEQ ID NO: 85657 - DNA, 201 bp, Homo sapiens
ccagcgatgatgccaatgtcctggtgtggcacgctctcctcctacccgaccaacctccctaccacctgaaagccttcaacctgcgcatcagcttcccgccrgagtatccgttcaagcctcccatgatcaaattcacaaccaagatctaccaccccaacgtggacgagaacggacagatttgcctgcccatcatcagcagtg

SEQ ID NO: 85658 - DNA, 145 bp, Homo sapiens
cgctcgccgccggtgcacggcgcaccccgcgggaggcagggatcmgcaaagccgtgcgccccgaggcccgcccccgtctccgcacaaagaccgagctggaggatcttcagaagaagcctcccccatacctgcggaacctgtccag

SEQ ID NO: 85659 - DNA, 201 bp, Homo sapiens
ccgtctccgcacaaagaccgagctggaggatcttcagaagaagcctcccccatacctgcggaacctgtccagcgatgatgccaatgtcctggtgtggcacrctctcctcctacccgaccaacctccctaccacctgaaagccttcaacctgcgcatcagcttcccgccggagtatccgttcaagcctcccatgatcaaatt

SEQ ID NO: 85660 - DNA, 201 bp, Homo sapiens
cagcagccaactcgaatccccctagggctcaggcactgagggcctggggacagtggagcatatgggtgggagacagatggagggtaccctatttacaactragtcagccaagccactgatgggaatatacagatttaggtgctaaaccatttattttccacggatgagtcacaatctgaagaatcaaacttccatcctgaa

SEQ ID NO: 85661 - DNA, 122 bp, Homo sapiens
cgctcgccgccggtgcacggcrcaccccgcgggaggcagggatcagcaaagccgtgcgccccgaggcccgcccccgtctccgcacaaagaccgagctggaggatcttcagaagaagcctccc

SEQ ID NO: 85662 - DNA, 130 bp, Homo sapiens
cgctcgccgccggtgcacggcgcaccccgsgggaggcagggatcagcaaagccgtgcgccccgaggcccgcccccgtctccgcacaaagaccgagctggaggatcttcagaagaagcctcccccatacct

SEQ ID NO: 85663 - DNA, 201 bp, Homo sapiens
gacagtggagcatatgggtgggagacagatggagggtaccctatttacaactgagtcagccaagccactgatgggaatatacagatttaggtgctaaaccrtttattttccacggatgagtcacaatctgaagaatcaaacttccatcctgaaaatctatatgtttcaaaaccacttgccatcctgttagattgccagttc

SEQ ID NO: 85664 - DNA, 201 bp, Homo sapiens
gagcatgcgagtggtgaaggagctggaggatcttcagaagaagcctcccccatacctgcggaacctgtccagcgatgatgccaatgtcctggtgtggcacrctctcctcctacccgaccaacctccctaccacctgaaagccttcaacctgcgcatcagcttcccgccggagtatccgttcaagcctcccatgatcaaatt

SEQ ID NO: 85665 - DNA, 201 bp, Homo sapiens; identical to SEQ ID NO: 85655

SEQ ID NO: 85666 - DNA, 201 bp, Homo sapiens; identical to SEQ ID NO: 85660

SEQ ID NO: 85667 - DNA, 201 bp, Homo sapiens; identical to SEQ ID NO: 85663

SEQ ID NO: 85668 - DNA, 201 bp, Homo sapiens; identical to SEQ ID NO: 85657

SEQ ID NO: 85669 - DNA, 201 bp, Homo sapiens
ggaataaaggatgatgtcttccttagtgttccttgcattttgggacagaatggaatctcagaccttgtgaaggtgactctgactcctgaggaagaggcccrtttgaagaagcgtgcagacacactttgggggatccgaaaagagctgcaattttaaagtcttctgatgtcatagcatttcactgtctatgctacaacagga

SEQ ID NO: 85670 - DNA, 201 bp, Homo sapiens
tgactctgactcctgaggaagaggcccgtttgaagaagcgtgcagacacactttgggggatccgaaaagagctgcaattttaaagtcttctgatgtcatarcatttcactgtctatgctacaacaggactttagttggaggttgtgcctgatatcctttttatctgatctgtgattaaagcagtaatattttaagatggac

SEQ ID NO: 85671 - DNA, 201 bp, Homo sapiens
ctgtacatgctgcatttgccccttgagccaggtggatgtttaccatgtgatatataacttcctggctccttcactgaacatgcctagtccaacattttttyccaatcagtcacatcctgggatccagtgtacaaatccaatatcgcatgtcttgtgcataattgttccaaaggatcttattttgtgaactatatatatcag

SEQ ID NO: 85672 - DNA, 201 bp, Homo sapiens
ctagaaccccccatttactagtcaggcctcactagagaaacagaaccaacaggatggagggagatgcagagatttgttttaaggaactggctcataggatkttgggggctggcaagtctaacatcttgagggcaggccagcatcctggagacccagggaagagctggggatgcaggctggaggcagaatttcctcctcctc

SEQ ID NO: 85673 - DNA, 201 bp, Homo sapiens
tgaggacgccgtcagcatcgccacggcagtgcttgtcgtggtcactgtcgccttcatccaggagtacaggtcggagaaatctctggaagagctgaccaagmtggttcctccagaatgtaactgcctaagagaaggaaaactccagcacctgcttgctcgagaactggttcctggtgatgtcgtatctctctcgatcggaga

SEQ ID NO: 85674 - DNA, 201 bp, Homo sapiens
caccgtgttcaacctgcccagccccctcaacgccatgcagatcctatggatcaacatcatcatggatgggccaccggcgcagagcttgggggtagagcccrttgacaaagacgccttcaggcagccaccacggagtgtgcgggacaccatcctcagcagagccctcatcctgaagatcctcatgtccgcggccatcatcat

SEQ ID NO: 85675 - DNA, 201 bp, Homo sapiens
tgttcttctgcctgaagccacgccagaaccaccaaagggaaccagaaggggaactccgtccccatctctcaggaaataaggccagagctagaaccccccakttactagtcaggcctcactagagaaacagaaccaacaggatggagggagatgcagagatttgttttaaggaactggctcataggatgttgggggctggca

SEQ ID NO: 85676 - DNA, 201 bp, Homo sapiens
ccgccctgagtctcatcactctgtccaccgtgttcaacctgcccagccccctcaacgccatgcagatcctatggatcaacatcatcatggatgggccaccrgcgcagagcttgggggtagagcccgttgacaaagacgccttcaggcagccaccacggagtgtgcgggacaccatcctcagcagagccctcatcctgaaga

SEQ ID NO: 85677 - DNA, 201 bp, Homo sapiens
gggaaagttagtggaggcgggctgtgttgccaacaatgcggtcatcagaaagaacgccgtgatggggcagcccaccgagggtgcattgatggccctggcgwtgaagatggacttaagtgatattaaaaattcatatataagaaaaaaagagattccattcagttcagagcagaagtggatggcggtgaaatgcagtctgaa

SEQ ID NO: 85678 - DNA, 201 bp, Homo sapiens
tcataaaatgagggacttttaaataaagtgctatgccgggggataattattttgatgtgtttacctagggtttttcatacaaggggccaggttggaaaccmacagccatgtgttaatggccacgtggggtgagcagcaatccatcatgaatggcctacaggaaggagagaggtctccatgctgttcttctgcctgaagcca

SEQ ID NO: 85679 - DNA, 201 bp, Homo sapiens
ccaccgtgttcaacctgcccagccccctcaacgccatgcagatcctatggatcaacatcatcatggatgggccaccggcgcagagcttgggggtagagccygttgacaaagacgccttcaggcagccaccacggagtgtgcgggacaccatcctcagcagagccctcatcctgaagatcctcatgtccgcggccatcatca

SEQ ID NO: 85680 - DNA, 201 bp, Homo sapiens
ctgaagactgaggatcaggaagacatttacttcatgaaaggggccttggaagaggtgatccgctactgcaccatgtacaacaacgggggcatccccctgcygctgacgccccagcagaggtcattctgcctgcaggaagagaagaggatggggtcgctcggtttgcgggtgctggccctggcttctgggcccgagctgggg

SEQ ID NO: 85681 - DNA, 201 bp, Homo sapiens
aggtgatccgctactgcaccatgtacaacaacgggggcatccccctgccgctgacgccccagcagaggtcattctgcctgcaggaagagaagaggatgggrtcgctcggtttgcgggtgctggccctggcttctgggcccgagctggggcggctgacgtttctaggtcttgtgggcatcattgaccccccgagagttggcg

SEQ ID NO: 85682 - DNA, 201 bp, Homo sapiens
tctcctttggcataatcggtctcatcatgctcattggctggtcgcaagggaaacaactcctgagtatgttcacgatcggggtcagcctggctgtggcggcyattccagagggtctgcccatcgtcgtcatggtgacgctggtcctgggagtgctgcggatggccaagaagcgggtcatcgtgaagaagttacccatcgtgg

SEQ ID NO: 85683 - DNA, 201 bp, Homo sapiens
cttgtgggcatcattgaccccccgagagttggcgtgaaggaagcagtccaggttctctccgagtctggtgtgtctgtgaagatgataacgggggatgcccwggagacggccttggccataggttcttctgaaggaagaaacatcggcctgtgcaacgggaagctgcaagccatgtccggggaggaggtggacagcgtggag

SEQ ID NO: 85684 - DNA, 201 bp, Homo sapiens
tcctttgcagaaaagcatggacaggctaggaaagcaactgacactcttctcctttggcataatcggtctcatcatgctcattggctggtcgcaagggaaasaactcctgagtatgttcacgatcggggtcagcctggctgtggcggccattccagagggtctgcccatcgtcgtcatggtgacgctggtcctgggagtgct

SEQ ID NO: 85685 - DNA, 201 bp, Homo sapiens
gatgataacgggggatgccctggagacggccttggccataggttcttctgaaggaagaaacatcggcctgtgcaacgggaagctgcaagccatgtccgggraggaggtggacagcgtggagaagggcgagctggccgaccgcgtggggaaggtgtccgtgttcttcaggaccagcccaaagcacaagctcaaaatcatcaa

SEQ ID NO: 85686 - DNA, 201 bp, Homo sapiens
gtcgctcggtttgcgggtgctggccctggcttctgggcccgagctggggcggctgacgtttctaggtcttgtgggcatcattgaccccccgagagttggcrtgaaggaagcagtccaggttctctccgagtctggtgtgtctgtgaagatgataacgggggatgccctggagacggccttggccataggttcttctgaagg

SEQ ID NO: 85687 - DNA, 201 bp, Homo sapiens
ttcccaagaccttttttttttttttttttttaagaagaaaagatgtgtttctgcatttctggaagtctatgctgcatttccatttgttgaaatttaagacyagagtcatcttttctgctgtaattataatggtcactggcttgtgccttttcctcctctctctgccccatctgcacggggtctttgaacaagtcccagcac

SEQ ID NO: 85688 - DNA, 201 bp, Homo sapiens
tatttgagatcggctttctcaggaaccacatgttcctctactccgtcctggggtccatcctggggcagctggcggtcatttacatccccccgctgcagagsgtcttccagacggagaacctgggagcgcttgatttgctgtttttaactggattggcctcatccgtcttcattttgtcagagctcctcaaactatgtgaaa

SEQ ID NO: 85689 - DNA, 201 bp, Homo sapiens
ccagcagaggtcattctgcctgcaggaagagaagaggatggggtcgctcggtttgcgggtgctggccctggcttctgggcccgagctggggcggctgacgyttctaggtcttgtgggcatcattgaccccccgagagttggcgtgaaggaagcagtccaggttctctccgagtctggtgtgtctgtgaagatgataacggg

SEQ ID NO: 85690 - DNA, 201 bp, Homo sapiens
agaggtcattctgcctgcaggaagagaagaggatggggtcgctcggtttgcgggtgctggccctggcttctgggcccgagctggggcggctgacgtttctmggtcttgtgggcatcattgaccccccgagagttggcgtgaaggaagcagtccaggttctctccgagtctggtgtgtctgtgaagatgataacgggggatg

SEQ ID NO: 85691 - DNA, 201 bp, Homo sapiens
gagtgtgcgggacaccatcctcagcagagccctcatcctgaagatcctcatgtccgcggccatcatcatcagcgggaccctctttatcttctggaaggagmtgcctgaagacagagcaagcactccccgcaccacgacgatgacgttcacttgttttgtgtttttcgatctcttcaacgccttgacctgccgctctcagac

SEQ ID NO: 85692 - DNA, 201 bp, Homo sapiens
ttttacattcccaagaccttttttttttttttttttttaagaagaaaagatgtgtttctgcatttctggaagtctatgctgcatttccatttgttgaaatytaagaccagagtcatcttttctgctgtaattataatggtcactggcttgtgccttttcctcctctctctgccccatctgcacggggtctttgaacaagtc

SEQ ID NO: 85693 - DNA, 201 bp, Homo sapiens
ggtggatgatgacttctcagccatcatgaatgcagtggaggaaggcaagggtattttttacaacatcaaaaactttgtccgattccagctgagcacgagcmtctccgccctgagtctcatcactctgtccaccgtgttcaacctgcccagccccctcaacgccatgcagatcctatggatcaacatcatcatggatgggcc

SEQ ID NO: 85694 - DNA, 201 bp, Homo sapiens
ccaagctggttcctccagaatgtaactgcctaagagaaggaaaactccagcacctgcttgctcgagaactggttcctggtgatgtcgtatctctctcgatyggagaccggatccctgcagacatccgactcactgaggtcacggacctcttggtggatgaatccagtttcaccggggaagccgagccatgtagtaaaacag

SEQ ID NO: 85695 - DNA, 201 bp, Homo sapiens
ttctgacaagacggggactctgactgccaatgaaatgacagtgacccagcttgtaacgtcagatgggcttcgtgccgaggtcagcggagttgggtatgacrgtcaagggactgtgtgtcttctaccatccaaggaagtcattaaggaattttccaatgtctcagtgggaaagttagtggaggcgggctgtgttgccaacaa

SEQ ID NO: 85696 - DNA, 201 bp, Homo sapiens
gaccttttttttttttttttttttaagaagaaaagatgtgtttctgcatttctggaagtctatgctgcatttccatttgttgaaatttaagaccagagtcrtcttttctgctgtaattataatggtcactggcttgtgccttttcctcctctctctgccccatctgcacggggtctttgaacaagtcccagcaccttggtg

SEQ ID NO: 85697 - DNA, 201 bp, Homo sapiens
ctcttggagccccactagcagttcctttgggtatataccccaaagtggaattgctggatctggtagctccctttttaattttttgaggaatcgccacacastttccataacagctgcaccattttacattcccaagaccttttttttttttttttttttaagaagaaaagatgtgtttctgcatttctggaagtctatgct

SEQ ID NO: 85698 - DNA, 201 bp, Homo sapiens
gtgctatgccgggggataattattttgatgtgtttacctagggtttttcatacaaggggccaggttggaaacccacagccatgtgttaatggccacgtggkgtgagcagcaatccatcatgaatggcctacaggaaggagagaggtctccatgctgttcttctgcctgaagccacgccagaaccaccaaagggaaccagaa

SEQ ID NO: 85699 - DNA, 201 bp, Homo sapiens
aatcacaatgatttttattaaccatgtctaactacgtatctgtgccacagcttgcagtgaggcaggccactcgtggcagatacaaggggctcctgagaggyagtgggtaggatggtcacactctgcccattgccctcctggaggccccatttcctcatcataaaatgagggacttttaaataaagtgctatgccgggggat

SEQ ID NO: 85700 - DNA, 201 bp, Homo sapiens
gtgtttctgcatttctggaagtctatgctgcatttccatttgttgaaatttaagaccagagtcatcttttctgctgtaattataatggtcactggcttgtkccttttcctcctctctctgccccatctgcacggggtctttgaacaagtcccagcaccttggtggacaagcctgtgtccctggcccatcatggaagccgct

SEQ ID NO: 85701 - DNA, 201 bp, Homo sapiens
caggaacctcgtgggctccagggacccaggcccacatccatccagcgttcccgctggctgtgggacagacagggaggggcctgtacagaaacaccacactrtttattaaatcacaatgatttttattaaccatgtctaactacgtatctgtgccacagcttgcagtgaggcaggccactcgtggcagatacaaggggctcc

SEQ ID NO: 85702 - DNA, 201 bp, Homo sapiens
ctgcacggggtctttgaacaagtcccagcaccttggtggacaagcctgtgtccctggcccatcatggaagccgctgcctttcagagtgggagtctgtaccstgttgcctcattccttgctgcgcccatgagtgagcttgtgcctgacctctccttccaggtggacttacacactgggctgtcggagttctcggtgacgcag

SEQ ID NO: 85703 - DNA, 112 bp, Homo sapiens
ggaagagctggggatgcaggctggaggcagaatttcctcctcctcaagggagttcagccttttcctcttatagtcctcaactgatcggatgaggcccactsacgttatgaag

SEQ ID NO: 85704 - DNA, 201 bp, Homo sapiens
gatcctatggatcaacatcatcatggatgggccaccggcgcagagcttgggggtagagcccgttgacaaagacgccttcaggcagccaccacggagtgtgygggacaccatcctcagcagagccctcatcctgaagatcctcatgtccgcggccatcatcatcagcgggaccctctttatcttctggaaggagatgcctga

SEQ ID NO: 85705 - DNA, 133 bp, Homo sapiens
gccagcatcctggagacccagggaagagctggggatgcaggctggaggcagaatttcctcctcctcaagggagttcagccttttcctcttatagtcctcawctgatcggatgaggcccactcacgttatgaag

SEQ ID NO: 85706 - DNA, 201 bp, Homo sapiens
atgttcctctactccgtcctggggtccatcctggggcagctggcggtcatttacatccccccgctgcagagggtcttccagacggagaacctgggagcgcytgatttgctgtttttaactggattggcctcatccgtcttcattttgtcagagctcctcaaactatgtgaaaaatactgttgcagccccaagagagtccag

SEQ ID NO: 85707 - DNA, 201 bp, Homo sapiens; identical to SEQ ID NO: 85674

SEQ ID NO: 85708 - DNA, 201 bp, Homo sapiens; identical to SEQ ID NO: 85676

SEQ ID NO: 85709 - DNA, 201 bp, Homo sapiens; identical to SEQ ID NO: 85677

SEQ ID NO: 85710 - DNA, 201 bp, Homo sapiens; identical to SEQ ID NO: 85680

SEQ ID NO: 85711 - DNA, 201 bp, Homo sapiens; identical to SEQ ID NO: 85681

SEQ ID NO: 85712 - DNA, 201 bp, Homo sapiens; identical to SEQ ID NO: 85693

SEQ ID NO: 85713 - DNA, 201 bp, Homo sapiens; identical to SEQ ID NO: 85695

SEQ ID NO: 85714 - DNA, 201 bp, Homo sapiens; identical to SEQ ID NO: 85696

SEQ ID NO: 85715 - DNA, 201 bp, Homo sapiens; identical to SEQ ID NO: 85697

SEQ ID NO: 85716 - DNA, 201 bp, Homo sapiens; identical to SEQ ID NO: 85700

SEQ ID NO: 85717 - DNA, 201 bp, Homo sapiens; identical to SEQ ID NO: 85702

SEQ ID NO: 85718 - DNA, 201 bp, Homo sapiens; identical to SEQ ID NO: 85706

SEQ ID NO: 85719 - DNA, 201 bp, Homo sapiens; identical to SEQ ID NO: 85673

SEQ ID NO: 85720 - DNA, 192 bp, Homo sapiens
ctcagaaagtggcccttctctccggaaccaggaactgtagtatctcctgctgcctgcagacaagcttgatttcccactgccccaaagacttccaaaaaccsatctgctcttccacgtgacagatggcagaggagagaggtctccatgctgttcttctgcctgaagccacgccagaaccaccaaagggaacca

SEQ ID NO: 85721 - DNA, 201 bp, Homo sapiens
tcataaaatgagggacttttaaataaagtgctatgccgggggataattattttgatgtgtttacctagggtttttcatacaaggggccaggttggaaaccmacagccatgtgttaatggccacgtggggtgagcagcaatccatcatgaatggcctacaggaaggcctcggcttttggagataaagagtagggctgggcat

SEQ ID NO: 85722 - DNA, 201 bp, Homo sapiens; identical to SEQ ID NO: 85679

SEQ ID NO: 85723 - DNA, 201 bp, Homo sapiens
cactttgcaaggccaaggcaggcagatcacttgaggccagcctggccaacacagcaaaaccctgtctgtctctactaaaagtttaaaaaaaaaaaaaaaaacagttgccaggcgtgatgatgcacacctgttaatcccagctactcgggaggctgaggcaggagaatggcttgagtccaggaggtggagattgtaccactg

SEQ ID NO: 85724 - DNA, 201 bp, Homo sapiens
cttgtgggcatcattgaccccccgagagttggcgtgaaggaagcagtccaggttctctccgagtctggtgtgtctgtgaagatgataacgggggatgcccwggagacggccttggccataggaagaaacatcggcctgtgcaacgggaagctgcaagccatgtccggggaggaggtggacagcgtggagaagggcgagctg

SEQ ID NO: 85725 - DNA, 201 bp, Homo sapiens; identical to SEQ ID NO: 85682

SEQ ID NO: 85726 - DNA, 201 bp, Homo sapiens; identical to SEQ ID NO: 85684

SEQ ID NO: 85727 - DNA, 201 bp, Homo sapiens
gtcgctcggtttgcgggtgctggccctggcttctgggcccgagctggggcggctgacgtttctaggtcttgtgggcatcattgaccccccgagagttggcrtgaaggaagcagtccaggttctctccgagtctggtgtgtctgtgaagatgataacgggggatgccctggagacggccttggccataggaagaaacatcgg

SEQ ID NO: 85728 - DNA, 201 bp, Homo sapiens
tgtgtctgtgaagatgataacgggggatgccctggagacggccttggccataggaagaaacatcggcctgtgcaacgggaagctgcaagccatgtccgggraggaggtggacagcgtggagaagggcgagctggccgaccgcgtggggaaggtgtccgtgttcttcaggaccagcccaaagcacaagctcaaaatcatcaa

SEQ ID NO: 85729 - DNA, 201 bp, Homo sapiens; identical to SEQ ID NO: 85687

SEQ ID NO: 85730 - DNA, 201 bp, Homo sapiens; identical to SEQ ID NO: 85688

SEQ ID NO: 85731 - DNA, 201 bp, Homo sapiens; identical to SEQ ID NO: 85689

SEQ ID NO: 85732 - DNA, 201 bp, Homo sapiens; identical to SEQ ID NO: 85691

SEQ ID NO: 85733 - DNA, 201 bp, Homo sapiens; identical to SEQ ID NO: 85690

SEQ ID NO: 85734 - DNA, 201 bp, Homo sapiens; identical to SEQ ID NO: 85692

SEQ ID NO: 85735 - DNA, 201 bp, Homo sapiens
caaggggccaggttggaaacccacagccatgtgttaatggccacgtggggtgagcagcaatccatcatgaatggcctacaggaaggcctcggcttttggasataaagagtagggctgggcatggtggctcacgcctgtaatcccagcactttgcaaggccaaggcaggcagatcacttgaggccagcctggccaacacagc

SEQ ID NO: 85736 - DNA, 201 bp, Homo sapiens; identical to SEQ ID NO: 85694

SEQ ID NO: 85737 - DNA, 201 bp, Homo sapiens; identical to SEQ ID NO: 85699

SEQ ID NO: 85738 - DNA, 201 bp, Homo sapiens
gtgctatgccgggggataattattttgatgtgtttacctagggtttttcatacaaggggccaggttggaaacccacagccatgtgttaatggccacgtggkgtgagcagcaatccatcatgaatggcctacaggaaggcctcggcttttggagataaagagtagggctgggcatggtggctcacgcctgtaatcccagcac

SEQ ID NO: 85739 - DNA, 201 bp, Homo sapiens; identical to SEQ ID NO: 85701

SEQ ID NO: 85740 - DNA, 201 bp, Homo sapiens; identical to SEQ ID NO: 85704

SEQ ID NO: 85741 - DNA, 201 bp, Homo sapiens
gtgcccgtgaggggctgtggctccacatcgatgctgcttatgcaggcactgccttcctgtgccccgagttccgggggtttctgaaggggattgagtatgcygactccttcacctttaatccttccaagtggatgatggtgcattttgactgtactgggttctgggtcaaggacaagtacaagctgcagcagaccttcagtg

SEQ ID NO: 85742 - DNA, 201 bp, Homo sapiens
gggtcagaatcttttccaggtttccagaagacatgatgatgctgaagaaaagtgccttcaaaaaactcatcaaattctacagcgtccccagctttcctgamtgcagctctcaatgtggactccagctgccctgttgccctctgcaggccatggtttagacacagggccttcagccagagtctgaggatatacttcagggac

SEQ ID NO: 85743 - DNA, 201 bp, Homo sapiens
ccaagggagatgatggagcctgaggagtacagagagagagggagagagatggtggattacatctgccagtacctgagcactgtgcgggagagacgtgtgaygccagacgtgcagcctggctacctgcgagcccagctgcctgagagtgctcctgaggaccccgacagctgggacagcatctttggggacattgaacgaatc

SEQ ID NO: 85744 - DNA, 201 bp, Homo sapiens
aaaaactcatcaaattctacagcgtccccagctttcctgaatgcagctctcaatgtggactccagctgccctgttgccctctgcaggccatggtttagacmcagggccttcagccagagtctgaggatatacttcagggactctgtgaacccctcacaattgtatgccaactttgtgtgcttatgtgtacatgcatttttc

SEQ ID NO: 85745 - DNA, 201 bp, Homo sapiens
tggggcgagttcataattttaatcaaattctcataggggttcatgacccacaataggatacaaacgaagagtttaagccagcatgatccagatgggttcakcagtctggtcagtgagaaagggccgagggtagacaggcagcttctgtggttcagcttgtgacatgatatataacacagaaataaattatgcttgtccctg

SEQ ID NO: 85746 - DNA, 201 bp, Homo sapiens
cccttcagtctgtcagtggggcaggagatgatccagtccaggccaggaagatcatcaagcagcctcagcgtgtgggagccggtcccatgaaaagggaaaayggcctccatcttgaaaccctgctggacccagttgatgactgcttttcagaagaggccccagatgccaccaagcacaagctgtcctccttcctgttcagtt

SEQ ID NO: 85747 - DNA, 201 bp, Homo sapiens
ccccagatgccaccaagcacaagctgtcctccttcctgttcagttacttgtctgtgcagactaagaagaagacggtgcgctccctcagttgcaacagtgtrccagtgagtgctcagaagccactgcccacagaggcctctgtgaagaatgggggctcctccagggtcagaatcttttccaggtttccagaagacatgatga

SEQ ID NO: 85748 - DNA, 201 bp, Homo sapiens
caactttgtgtgcttatgtgtacatgcatttttcttggggcgagttcataattttaatcaaattctcataggggttcatgacccacaataggatacaaacsaagagtttaagccagcatgatccagatgggttcagcagtctggtcagtgagaaagggccgagggtagacaggcagcttctgtggttcagcttgtgacatg

SEQ ID NO: 85749 - DNA, 201 bp, Homo sapiens
caggaagatcatcaagcagcctcagcgtgtgggagccggtcccatgaaaagggaaaatggcctccatcttgaaaccctgctggacccagttgatgactgcytttcagaagaggccccagatgccaccaagcacaagctgtcctccttcctgttcagttacttgtctgtgcagactaagaagaagacggtgcgctccctcag

SEQ ID NO: 85750 - DNA, 201 bp, Homo sapiens
ctttgattgccctgctggcagcaaggaagaacaaaatcctggaaatgaaaacgtctgagcccgatgctgatgagtcctgcctaaatgcccgactcgtggcytatgcctctgaccaggctcactcctctgtggaaaaggctggtttgatttcccttgtgaagatgaaatttctgcctgtggatgacaacttctcactccgag

SEQ ID NO: 85751 - DNA, 201 bp, Homo sapiens
ctttggggacattgaacgaatcatcatgcctggggtggtacattggcagagcccccatatgcacgcctactacccagccctcacctcttggccctccctgmtaggagacatgctggctgatgccatcaactgcttgggattcacctgggcatccagccctgcgtgtacagagctggagatgaacgtcatggactggttggc

SEQ ID NO: 85752 - DNA, 201 bp, Homo sapiens
gactggttgattttgtccaagaagtaaatgtttatggagtgcatgtgccagatcatgagggtcgcattggcatggcctccatcaaaatgaaagaaaaccaygaatttgatggaaagaaactctttcagcacattgctgattacctacctagttatgcaaggccccggtttctaagaatacaggacaccattgagatcactg

SEQ ID NO: 85753 - DNA, 201 bp, Homo sapiens
aagtgctaaaaccctgaaactctgaatattcccaggaggataactcaacatttccagaaagaaactgaatggacagccacttgatataatccaactttaawttgattgaagattgtgaggaaattttgtaggaaatttgcatacccgtaaagggagacttttttaaataacagttgagtctttgcaagtaaaaagatttag

SEQ ID NO: 85754 - DNA, 201 bp, Homo sapiens
caacatttccagaaagaaactgaatggacagccacttgatataatccaactttaatttgattgaagattgtgaggaaattttgtaggaaatttgcataccmgtaaagggagacttttttaaataacagttgagtctttgcaagtaaaaagatttagagattattatttttcagtgtgcacctactgtttgtatttgcaaac

SEQ ID NO: 85755 - DNA, 201 bp, Homo sapiens
tcctggagaaagcgcgccagacgccacacaagccttttctgctcttccgcgacgagactctcacctacgcgcaggtggaccggcgcagcaatcaagtggcycgggcgctgcacgaccacctcggcctgcgccagggagactgcgtggcgctccttatgggtaacgagccggcctacgtgtggctgtggctggggctggtga

SEQ ID NO: 85756 - DNA, 201 bp, Homo sapiens
cctgccgctcctggtgaacctctgctgcccatacttcttccaggacataggctacttcttgaaggtggccgccgtgggccggagggtgcgcagctacgggmagcggcggccggcgcgcaccatcctgcgggcgttcctggagaaagcgcgccagacgccacacaagccttttctgctcttccgcgacgagactctcaccta

SEQ ID NO: 85757 - DNA, 201 bp, Homo sapiens
gccgccgtgggccggagggtgcgcagctacgggcagcggcggccggcgcgcaccatcctgcgggcgttcctggagaaagcgcgccagacgccacacaagcyttttctgctcttccgcgacgagactctcacctacgcgcaggtggaccggcgcagcaatcaagtggcccgggcgctgcacgaccacctcggcctgcgccag

SEQ ID NO: 85758 - DNA, 201 bp, Homo sapiens
ggcggaagggttcgtgtaattgtcactggagctgcccccatgtccacttcagtcatgacattcttccgggcagcaatgggatgtcaggtgtatgaagcttrtggtcaaacagaatgcacaggtggctgtacatttacattacctggggactggacatcaggtcacgttggggtgcccctggcttgcaattacgtgaagctg

SEQ ID NO: 85759 - DNA, 201 bp, Homo sapiens
ctgaacaatcagtctgtgggaattgagggaggagcacggaagggggtttcccagaagaacaatgacctaacaagttgctgcttctcagatgccaagactaygtatgaggttttccaaagaggactcgctgtgtctgacaatgggccctgcttgggatatagaaaaccaaaccagccctacagatggctatcttacaaacag

SEQ ID NO: 85760 - DNA, 201 bp, Homo sapiens
tctttaactttttgttttccccacttccgaccccggcgttgatctgcatcctgacatttggagctgccatcttcttgtggctgatcaccagacctcaaccygtcttacctcttcttgacctgaacaatcagtctgtgggaattgagggaggagcacggaagggggtttcccagaagaacaatgacctaacaagttgctgct

SEQ ID NO: 85761 - DNA, 201 bp, Homo sapiens
tacatttacattacctggggactggacatcaggtcacgttggggtgcccctggcttgcaattacgtgaagctggaagatgtggctgacatgaactactttrcagtgaataatgaaggagaggtctgcatcaagggtacaaacgtgttcaaaggatacctgaaggaccctgagaagacacaggaagccctggacagtgatgg

SEQ ID NO: 85762 - DNA, 201 bp, Homo sapiens
cgaattggcttgttacacgtactctatggtagctgtacctctgtatgacaccttgggaccagaagccatcgtacatattgtcaacaaggctgatatcgccrtggtgatctgtgacacaccccaaaaggcattggtgctgatagggaatgtagagaaaggcttcaccccgagcctgaaggtgatcatccttatggacccctt

SEQ ID NO: 85763 - DNA, 152 bp, Homo sapiens
gatgcccacacaacaggcttattttctgtgaaggaaccaactgatctcccccacccttggattagagttcctgctctaccttacccacagataacacatgytgtttctacttgtaaatgtaaagtctttaaaataaactattacagatactt

SEQ ID NO: 85764 - DNA, 201 bp, Homo sapiens
attgtgtactgaagggaaaagtttgatcataccaaacatttcctaaactctctagttagatatctgacttgggagtattaaaaattgggtctatgacataytgtccaaaaggaatgctgttcttaaagcattatttacagtaggaactggggagtaaatctgttccctacagtttgctgctgagctggaagctgtggggga

SEQ ID NO: 85765 - DNA, 201 bp, Homo sapiens
ggctgtttccagtaaattcaaagagcttcaaaagggtatcatcaggcatgatagtttctgggacaagctcatctttgcaaagatccaggacagcctgggcrgaagggttcgtgtaattgtcactggagctgcccccatgtccacttcagtcatgacattcttccgggcagcaatgggatgtcaggtgtatgaagcttatgg

SEQ ID NO: 85766 - DNA, 201 bp, Homo sapiens; identical to SEQ ID NO: 85758

SEQ ID NO: 85767 - DNA, 201 bp, Homo sapiens; identical to SEQ ID NO: 85759

SEQ ID NO: 85768 - DNA, 201 bp, Homo sapiens; identical to SEQ ID NO: 85760

SEQ ID NO: 85769 - DNA, 201 bp, Homo sapiens; identical to SEQ ID NO: 85761

SEQ ID NO: 85770 - DNA, 201 bp, Homo sapiens; identical to SEQ ID NO: 85762

SEQ ID NO: 85771 - DNA, 120 bp, Homo sapiens
aacttttccagtaaatgaagcaagcactgaataaaaacctcctgaactgggaacaaagggattagagttcctgctctaccttacccacagataacacatgytgtttctacttgtaaatgt

SEQ ID NO: 85772 - DNA, 201 bp, Homo sapiens
attgtgtactgaagggaaaagtttgatcataccaaacatttcctaaactctctagttagatatctgacttgggagtattaaaaattgggtctatgacataytgtccaaaaggaatgctgttcttaaagcattatttacagtaggaactggggagtaaatctgttcccggcccagtgaacttttccagtaaatgaagcaagc

SEQ ID NO: 85773 - DNA, 201 bp, Homo sapiens; identical to SEQ ID NO: 85765

SEQ ID NO: 85774 - DNA, 201 bp, Homo sapiens; identical to SEQ ID NO: 85758

SEQ ID NO: 85775 - DNA, 201 bp, Homo sapiens
ctgaacaatcagtctgtgggaattgagggaggagcacggaagggggtttcccagaagaacaatgacctaacaagttgctgcttctcagatgccaagactaygtatgaggttttccaaagaggactcgctgtgtctggtaagcctggtggtctgtccttgcctgaagaagacaaggtgtctgatagagcagagtacctgggt

SEQ ID NO: 85776 - DNA, 201 bp, Homo sapiens; identical to SEQ ID NO: 85760

SEQ ID NO: 85777 - DNA, 201 bp, Homo sapiens; identical to SEQ ID NO: 85761

SEQ ID NO: 85778 - DNA, 201 bp, Homo sapiens; identical to SEQ ID NO: 85762

SEQ ID NO: 85779 - DNA, 152 bp, Homo sapiens; identical to SEQ ID NO: 85763

SEQ ID NO: 85780 - DNA, 201 bp, Homo sapiens; identical to SEQ ID NO: 85764

SEQ ID NO: 85781 - DNA, 201 bp, Homo sapiens; identical to SEQ ID NO: 85765

SEQ ID NO: 85782 - DNA, 201 bp, Homo sapiens; identical to SEQ ID NO: 85758

SEQ ID NO: 85783 - DNA, 201 bp, Homo sapiens; identical to SEQ ID NO: 85759

SEQ ID NO: 85784 - DNA, 201 bp, Homo sapiens; identical to SEQ ID NO: 85760

SEQ ID NO: 85785 - DNA, 201 bp, Homo sapiens; identical to SEQ ID NO: 85761

SEQ ID NO: 85786 - DNA, 201 bp, Homo sapiens; identical to SEQ ID NO: 85762

SEQ ID NO: 85787 - DNA, 152 bp, Homo sapiens; identical to SEQ ID NO: 85763

SEQ ID NO: 85788 - DNA, 201 bp, Homo sapiens; identical to SEQ ID NO: 85764

SEQ ID NO: 85789 - DNA, 201 bp, Homo sapiens; identical to SEQ ID NO: 85765

SEQ ID NO: 85790 - DNA, 201 bp, Homo sapiens; identical to SEQ ID NO: 85758

SEQ ID NO: 85791 - DNA, 201 bp, Homo sapiens; identical to SEQ ID NO: 85759

SEQ ID NO: 85792 - DNA, 201 bp, Homo sapiens; identical to SEQ ID NO: 85760

SEQ ID NO: 85793 - DNA, 201 bp, Homo sapiens; identical to SEQ ID NO: 85761

SEQ ID NO: 85794 - DNA, 201 bp, Homo sapiens; identical to SEQ ID NO: 85762

SEQ ID NO: 85795 - DNA, 120 bp, Homo sapiens; identical to SEQ ID NO: 85771

SEQ ID NO: 85796 - DNA, 201 bp, Homo sapiens; identical to SEQ ID NO: 85772

SEQ ID NO: 85797 - DNA, 201 bp, Homo sapiens; identical to SEQ ID NO: 85765

SEQ ID NO: 85798 - DNA, 201 bp, Homo sapiens; identical to SEQ ID NO: 85758

SEQ ID NO: 85799 - DNA, 201 bp, Homo sapiens; identical to SEQ ID NO: 85775

SEQ ID NO: 85800 - DNA, 201 bp, Homo sapiens; identical to SEQ ID NO: 85760

SEQ ID NO: 85801 - DNA, 201 bp, Homo sapiens; identical to SEQ ID NO: 85761

SEQ ID NO: 85802 - DNA, 201 bp, Homo sapiens; identical to SEQ ID NO: 85762

SEQ ID NO: 85803 - DNA, 152 bp, Homo sapiens; identical to SEQ ID NO: 85763

SEQ ID NO: 85804 - DNA, 201 bp, Homo sapiens; identical to SEQ ID NO: 85764

SEQ ID NO: 85805 - DNA, 201 bp, Homo sapiens; identical to SEQ ID NO: 85765

SEQ ID NO: 85806 - DNA, 201 bp, Homo sapiens; identical to SEQ ID NO: 85758

SEQ ID NO: 85807 - DNA, 201 bp, Homo sapiens; identical to SEQ ID NO: 85759

SEQ ID NO: 85808 - DNA, 201 bp, Homo sapiens; identical to SEQ ID NO: 85760

SEQ ID NO: 85809 - DNA, 201 bp, Homo sapiens; identical to SEQ ID NO: 85761

SEQ ID NO: 85810 - DNA, 201 bp, Homo sapiens; identical to SEQ ID NO: 85762

SEQ ID NO: 85811 - DNA, 120 bp, Homo sapiens; identical to SEQ ID NO: 85771

SEQ ID NO: 85812 - DNA, 201 bp, Homo sapiens; identical to SEQ ID NO: 85772

SEQ ID NO: 85813 - DNA, 201 bp, Homo sapiens; identical to SEQ ID NO: 85765

SEQ ID NO: 85814 - DNA, 201 bp, Homo sapiens
actccgtaacagtaccagatcctgaaggaaaattcaggcagaaggaagccgagaaggtggcctgggtgaaggcactatatgaggagctggatctaccagcygttttcttgcaatatgaggaagacacttacagtcacatcatgggtctcatcgaacagtatgcagcgctcctgcccccagccatctttctggggcttgcac

SEQ ID NO: 85815 - DNA, 201 bp, Homo sapiens
aagaggcacaaatctattgtcaagtacaagacagctttctactccttctaccttcctgtagctgcagccatgtacatggcaggaattgatggcaagaaggmgcacgccaatgccaagaagatcctgctggggatgggagagttccttcaggttcaggatgattaccttgacctctttggggaccccagtgtgaccggcaaa

SEQ ID NO: 85816 - DNA, 201 bp, Homo sapiens
ggtggcagatgacatcatggattcatccttcacctgccggggacagatctgctggtatcagaagccaggcatggatttagatgccatcaatgatgttatcyttctggaagcatgtatctaccacctgctgaagatctattgcatctaccacctgctgaagatctattgccgggagcagccctattacctgaacctgactgt

SEQ ID NO: 85817 - DNA, 201 bp, Homo sapiens
tctattgccgggagcagccctattacctgaacctgactgtgctcttcctgcagagttcctatcagactgagattaggcagaccctggacctcatcacagcmccccagggcaatgtggatcttggcagattcactgaaaagaggcacaaatctattgtcaagtacaagacagctttctactccttctaccttcctgtagctg

SEQ ID NO: 85818 - DNA, 201 bp, Homo sapiens
atggcaggaattgatggcaagaaggagcacgccaatgccaagaagatcctgctggggatgggagagttccttcaggttcaggatgattaccttgacctctytggggaccccagtgtgaccggcaaagttggcactgacatccaggacaacaaatgcagctggctggtggttcagtgtctgcaacaggccactccgtaacag

SEQ ID NO: 85819 - DNA, 201 bp, Homo sapiens
gtggttcagtgtctgcaacaggccactccgtaacagtaccagatcctgaaggaaaattcaggcagaaggaagccgagaaggtggcctgggtgaaggcactrtatgaggagctggatctaccagccgttttcttgcaatatgaggaagacacttacagtcacatcatgggtctcatcgaacagtatgcagcgctcctgcccc

SEQ ID NO: 85820 - DNA, 123 bp, Homo sapiens
gttttcttgcaatatgaggaagacacttacagtcacatcatgggtctcatcgaacagtatgcagcgctcctgcccccagccatctttctggggcttgcacrcaaaatctacaagcggaaaaag

SEQ ID NO: 85821 - DNA, 201 bp, Homo sapiens
gggtacccagagacaggagatgctattgcccagctcaaggaggtttgatgccattgaaggcaagtatcactgaggtttgatggtgctagtagcgttccagragctggtggagccaaggaaacaggttgctcatagtctccaatgggccctgactgtgggctcgtgtgtggaactgctgcaagctttcttcctggtggcaga

SEQ ID NO: 85822 - DNA, 201 bp, Homo sapiens
cgctttatgctgaagccctatgaatcatttgaagaacttacaggagaaaaggaaatgtctgcagagttggaagcactctatggtgacatcgatgctgtggrgctgtatcctgcccttctggtagaaaagcctcggccagatgccatctttggtgaaaccatggtagaagttggagcaccattctccttgaaaggacttatg

SEQ ID NO: 85823 - DNA, 201 bp, Homo sapiens
taaacttttgaagcaaacttttttttatccttgtgcactgcaggcctggtactcagattttgctatgaggttaatgaagtaccaagctgtgcttgaataaygatatgttttctcagattttctgttgtacagtttaatttagcagtccatatcacattgcaaaagtagcaatgacctcataaaatacctcttcaaaatgct

SEQ ID NO: 85824 - DNA, 201 bp, Homo sapiens
ttcaccaagagtataaacctttttagtgtgactgttaaaacttccttttaaatcaaaatgccaaatttattaaggtggtggagccactgcagtgttatctyaaaataagaatattttgttgagatattccagaatttgtttatatggctggtaacatgtaaaatctatatcagcaaaagggtctacctttaaaataagcaa

SEQ ID NO: 85825 - DNA, 201 bp, Homo sapiens
tctatcactggcatccccttctgcctgacacctttcaaattcatgaccagaaatacaactatcaacagtttatctacaacaactctatattgctggaacayggaattacccagtttgttgaatcattcaccaggcaaattgctggcagggttgctggtggtaggaatgttccacccgcagtacagaaagtatcacaggctt

SEQ ID NO: 85826 - DNA, 201 bp, Homo sapiens
agcatctacggtttgctgtggggcaggaggtctttggtctggtgcctggtctgatgatgtatgccacaatctggctgcgggaacacaacagagtatgcgaygtgcttaaacaggagcatcctgaatggggtgatgagcagttgttccagacaagcaggctaatactgataggagagactattaagattgtgattgaagatt

SEQ ID NO: 85827 - DNA, 201 bp, Homo sapiens
catctgcaataacgtgaagggctgtccctttacttcattcagtgttccagatccagagctcattaaaacagtcaccatcaatgcaagttcttcccgctccrgactagatgatatcaatcccacagtactactaaaagaacgttcgactgaactgtagaagtctaatgatcatatttatttatttatatgaaccatgtctat

SEQ ID NO: 85828 - DNA, 201 bp, Homo sapiens
ctctcatctgcaataacgtgaagggctgtccctttacttcattcagtgttccagatccagagctcattaaaacagtcaccatcaatgcaagttcttcccgmtccggactagatgatatcaatcccacagtactactaaaagaacgttcgactgaactgtagaagtctaatgatcatatttatttatttatatgaaccatgt

SEQ ID NO: 85829 - DNA, 201 bp, Homo sapiens
gaagcactctatggtgacatcgatgctgtggagctgtatcctgcccttctggtagaaaagcctcggccagatgccatctttggtgaaaccatggtagaagytggagcaccattctccttgaaaggacttatgggtaatgttatatgttctcctgcctactggaagccaagcacttttggtggagaagtgggttttcaaatc

SEQ ID NO: 85830 - DNA, 201 bp, Homo sapiens
caattatgagttatgtgttgacatccagatcacatttgattgacagtccaccaacttacaatgctgactatggctacaaaagctgggaagccttctctaayctctcctattatactagagcccttcctcctgtgcctgatgattgcccgactcccttgggtgtcaaaggtaaaaagcagcttcctgattcaaatgagattg

SEQ ID NO: 85831 - DNA, 201 bp, Homo sapiens
aatgtttgaaattttaaagtacttttggttatttttctgtcatcaaacaaaaacaggtatcagtgcattattaaatgaatatttaaattagacattaccartaatttcatgtctactttttaaaatcagcaatgaaacaataatttgaaatttctaaattcatagggtagaatcacctgtaaaagcttgtttgatttctta

SEQ ID NO: 85832 - DNA, 201 bp, Homo sapiens
cgtccaggaactcctcagcagcgcctccttcagctccacagccagacgccctcagacagcaaagcctacccccgcgccgcgccctgcccgccgctgcgatrctcgcccgcgccctgctgctgtgcgcggtcctggcgctcagccatacagcaaatccttgctgttcccacccatgtcaaaaccgaggtgtatgtatgagtg

SEQ ID NO: 85833 - DNA, 110 bp, Homo sapiens
caattgtcakacgacttgcagtgagcgtcaggagcacgtccaggaactcctcagcagcgcctccttcagctccacagccagacgccctcagacagcaaagcctacccccg

SEQ ID NO: 85834 - DNA, 201 bp, Homo sapiens
ccactccaaacacagtgcactacatacttacccacttcaagggattttggaacgttgtgaataacattcccttccttcgaaatgcaattatgagttatgtsttgacatccagatcacatttgattgacagtccaccaacttacaatgctgactatggctacaaaagctgggaagccttctctaacctctcctattatacta

SEQ ID NO: 85835 - DNA, 201 bp, Homo sapiens
gttttataaaccagagagaaatgagttttgacgtctttttacttgaatttcaacttatattataagaacgaaagtaaagatgtttgaatacttaaacactrtcacaagatggcaaaatgctgaaagtttttacactgtcgatgtttccaatgcatcttccatgatgcattagaagtaactaatgtttgaaattttaaagta

SEQ ID NO: 85836 - DNA, 201 bp, Homo sapiens
tttttcaagacagatcataagcgagggccagctttcaccaacgggctgggccatggggtggacttaaatcatatttacggtgaaactctggctagacagcrtaaactgcgccttttcaaggatggaaaaatgaaatatcagataattgatggagagatgtatcctcccacagtcaaagatactcaggcagagatgatctac

SEQ ID NO: 85837 - DNA, 201 bp, Homo sapiens
gcttgtataaaacactgttcactgttttttttaaaaaaaaaacttgatttgttattaacattgatctgctgacaaaacctgggaatttgggttgtgtatgygaatgtttcagtgcctcagacaaatgtgtatttaacttatgtaaaagataagtctggaaataaatgtctgtttatttttgtactatttaaaaattgacag

SEQ ID NO: 85838 - DNA, 201 bp, Homo sapiens
tttatataaataattgaaaaaaattttcttttgggaagagggagaaaatgaaataaatatcattaaagataactcaggagaatcttctttacaattttacrtttagaatgtttaaggttaagaaagaaatagtcaatatgcttgtataaaacactgttcactgttttttttaaaaaaaaaacttgatttgttattaacatt

SEQ ID NO: 85839 - DNA, 201 bp, Homo sapiens
aaatattctgtgtcaagcactgtgggttttaatatttttaaatcaaacgctgattacagataatagtatttatataaataattgaaaaaaattttcttttrggaagagggagaaaatgaaataaatatcattaaagataactcaggagaatcttctttacaattttacgtttagaatgtttaaggttaagaaagaaatagt

SEQ ID NO: 85840 - DNA, 201 bp, Homo sapiens
gagcacgtccaggaactcctcagcagcgcctccttcagctccacagccagacgccctcagacagcaaagcctacccccgcgccgcgccctgcccgccgctscgatgctcgcccgcgccctgctgctgtgcgcggtcctggcgctcagccatacagcaaatccttgctgttcccacccatgtcaaaaccgaggtgtatgtat

SEQ ID NO: 85841 - DNA, 201 bp, Homo sapiens
tattgagaaaatattctgtgtcaagcactgtgggttttaatatttttaaatcaaacgctgattacagataatagtatttatataaataattgaaaaaaatkttcttttgggaagagggagaaaatgaaataaatatcattaaagataactcaggagaatcttctttacaattttacgtttagaatgtttaaggttaagaaa

SEQ ID NO: 85842 - DNA, 201 bp, Homo sapiens
ggtagaatcacctgtaaaagcttgtttgatttcttaaagttattaaacttgtacatataccaaaaagaagctgtcttggatttaaatctgtaaaatcagtwgaaattttactacaattgcttgttaaaatattttataagtgatgttcctttttcaccaagagtataaacctttttagtgtgactgttaaaacttcctttt

SEQ ID NO: 85843 - DNA, 201 bp, Homo sapiens
gggtagaatcacctgtaaaagcttgtttgatttcttaaagttattaaacttgtacatataccaaaaagaagctgtcttggatttaaatctgtaaaatcagwagaaattttactacaattgcttgttaaaatattttataagtgatgttcctttttcaccaagagtataaacctttttagtgtgactgttaaaacttccttt

SEQ ID NO: 85844 - DNA, 201 bp, Homo sapiens
atggttataaactgtgtttaagcctacaatcattgatttttttttgttatgtcacaatcagtatattttctttggggttacctctctgaatattatgtaamcaatccaaagaaatgattgtattaagatttgtgaataaatttttagaaatctgattggcatattgagatatttaaggttgaatgtttgtccttaggatag

SEQ ID NO: 85845 - DNA, 201 bp, Homo sapiens
ttaaacaggagcatcctgaatggggtgatgagcagttgttccagacaagcaggctaatactgataggagagactattaagattgtgattgaagattatgtrcaacacttgagtggctatcacttcaaactgaaatttgacccagaactacttttcaacaaacaattccagtaccaaaatcgtattgctgctgaatttaaca

SEQ ID NO: 85846 - DNA, 201 bp, Homo sapiens
ttgaagattattatttatgtcttattaggacactatggttataaactgtgtttaagcctacaatcattgatttttttttgttatgtcacaatcagtatatyttctttggggttacctctctgaatattatgtaaacaatccaaagaaatgattgtattaagatttgtgaataaatttttagaaatctgattggcatattga

SEQ ID NO: 85847 - DNA, 201 bp, Homo sapiens
agcacgtccaggaactcctcagcagcgcctccttcagctccacagccagacgccctcagacagcaaagcctacccccgcgccgcgccctgcccgccgctgsgatgctcgcccgcgccctgctgctgtgcgcggtcctggcgctcagccatacagcaaatccttgctgttcccacccatgtcaaaaccgaggtgtatgtatg

SEQ ID NO: 85848 - DNA, 201 bp, Homo sapiens
ttaacaccctctatcactggcatccccttctgcctgacacctttcaaattcatgaccagaaatacaactatcaacagtttatctacaacaactctatattrctggaacatggaattacccagtttgttgaatcattcaccaggcaaattgctggcagggttgctggtggtaggaatgttccacccgcagtacagaaagtat

SEQ ID NO: 85849 - DNA, 201 bp, Homo sapiens
ttttttatccttgtgcactgcaggcctggtactcagattttgctatgaggttaatgaagtaccaagctgtgcttgaataacgatatgttttctcagatttyctgttgtacagtttaatttagcagtccatatcacattgcaaaagtagcaatgacctcataaaatacctcttcaaaatgcttaaattcatttcacacatta

SEQ ID NO: 85850 - DNA, 201 bp, Homo sapiens
tggcaaaatgctgaaagtttttacactgtcgatgtttccaatgcatcttccatgatgcattagaagtaactaatgtttgaaattttaaagtacttttggtyatttttctgtcatcaaacaaaaacaggtatcagtgcattattaaatgaatatttaaattagacattaccagtaatttcatgtctactttttaaaatcagc

SEQ ID NO: 85851 - DNA, 201 bp, Homo sapiens
ggcggtggagtacaacatcttcgagggtatggagtgccacggctccccactagtggtcatcagccagggcaagatcgtctttgaagacggaaacatcaacrtcaacaagggcatgggccgcttcattccgcggaaggcgttcccggagcacctgtaccagcgcgtcaaaatcaggaataaggtttttggattgcaaggggt

SEQ ID NO: 85852 - DNA, 201 bp, Homo sapiens
gcagcggccactgtccctacagcactgcccagaaggcggtgggcaaggacaactttaccctgatccccgagggtgtcaacgggatagaggagcggatgacsgtcgtctgggacaaggcggtggctactggcaaaatggatgagaaccagtttgtcgctgtcaccagcaccaatgcagccaagatctttaacctgtacccaa

SEQ ID NO: 85853 - DNA, 201 bp, Homo sapiens
ctccgtggcacttgtaactcaccgtgctgtcttctggtctgtgtgtgttcttcaagccagctctaggcttcaggccgagccaggttcacactcagaaagakgtctccccatccccattcggggctgacgatggggggctgatggctgcccctgcgtggcctgagtcctggtccctctgaggcagttgacggggcagtcaga

SEQ ID NO: 85854 - DNA, 201 bp, Homo sapiens
tgagcaagagtgcagccgacatcatcgctctggccaggaagaaagggcccctagtttttggagagcccattgccgccagcctggggaccgatggcacccaytactggagcaagaactgggccaaggctgcggcgttcgtgacttcccctcccctgagcccggaccctaccacgcccgactacttgacctccctactggcct

SEQ ID NO: 85855 - DNA, 201 bp, Homo sapiens
acccaaggaaagggcggattgccgtgggctcggatgccgacgtggtcatctgggaccccgacaagttgaagaccataacagccaaaagtcacaagtcggcrgtggagtacaacatcttcgagggtatggagtgccacggctccccactagtggtcatcagccagggcaagatcgtctttgaagacggaaacatcaacgtca

SEQ ID NO: 85856 - DNA, 201 bp, Homo sapiens; identical to SEQ ID NO: 85851

SEQ ID NO: 85857 - DNA, 201 bp, Homo sapiens; identical to SEQ ID NO: 85852

SEQ ID NO: 85858 - DNA, 201 bp, Homo sapiens; identical to SEQ ID NO: 85853

SEQ ID NO: 85859 - DNA, 201 bp, Homo sapiens
tgtacatcaccaaggtcatgagcaagagtgcagccgacatcatcgctctggccaggaagaaagagcccattgccgccagcctggggaccgatggcacccaytactggagcaagaactgggccaaggctgcggcgttcgtgacttcccctcccctgagcccggaccctaccacgcccgactacttgacctccctactggcct

SEQ ID NO: 85860 - DNA, 201 bp, Homo sapiens; identical to SEQ ID NO: 85855

SEQ ID NO: 85861 - DNA, 201 bp, Homo sapiens
ctctgaacagctaatcgataatatggaagctttctggaaacagatggcaaatatccagcactttcttgtggaccagtttaagtgttccagctccaaagccygacagctgatgatgactctgacggaaagaatgattgcagccgaagggctattgtgcgattctcaggagctgcaggctctggacgccctggagaggacgat

SEQ ID NO: 85862 - DNA, 201 bp, Homo sapiens
gatgccagcactcccaccattcgtggcaaccaaggatgtctccagacactgccccgtgtccatggggttatcacccactgtgctgagtcaaagggtgccttgccctggtctaatccaggacatagccgtggatacgtccaaaaatccccagaacctagtgagccctctggctctgggagcccctatctcaggaattttcag

SEQ ID NO: 85863 - DNA, 201 bp, Homo sapiens
tctaggctcttctgagagggacagagaaagaatagaaatgtgccctaaaagcataaatgagtatcacctgagaaaattaggcattcccgtcttggaaacamgtctctgtgagtttgcatttcatttggcttggagccctggctcgatgcctcatggatctttctccccaaggagggacgtcttgaggggtccgagcctcag

SEQ ID NO: 85864 - DNA, 201 bp, Homo sapiens
agccaagaggggcctttctcacctggagagaaacttccagaccagcccctcacaccaccgccaggagaggcctttcccaccgggagagaaacttccagacyagcccctcacaccacagccaggagaggcctttcccaccgggagagaaacttccagaccagccctctcactacagccagaagaggcctttcccaccgggag

SEQ ID NO: 85865 - DNA, 201 bp, Homo sapiens
tgggctgctagagaagcccctaaggactaaaaggaagaagcccctgccccaggaaagaggggacctgggggtgcccaacaatgaggaccttgcctccgggraccagacctcaggctcactcagcagcaaaaggctgagtcagcaagaaagtgaagctggggacagtgggaactcaaagaagatgctaaagagaagaagcaa

SEQ ID NO: 85866 - DNA, 201 bp, Homo sapiens
gaggggaagctgtccgggcggcagaaggaggagctgctcacgcagcagcacaaggccttctggcaggaggcagagcgcttcagccgggagtttgtccagcraggcaaagacctggtcaaggcgtctctggctcaccaggtggagggaacggcaaaactcacgctggcccaagaggaggaacagagaagcttcctggctgag

SEQ ID NO: 85867 - DNA, 201 bp, Homo sapiens
ctccctggcatgactggcctccccccggaagagtgtgactacttgaggcaggaagtccaggagaacgctgcctggcagctggggaagtcaaatcgcttccrgaggcagcagtggaaactcttccaggagctcctagagcaagaccagcaggtgtggatggaggagtgtgcgctgtccagcgtgctgcagacacacctgcgg

SEQ ID NO: 85868 - DNA, 201 bp, Homo sapiens
tggctcctcccggggaagcctgattttgtgacgtgtgtatagtaaatgcaggccctctggcagcaccataattggtcggttaccctgagcccagagctctraaagcatctgtggaatgatcacgggacccttctcctctgagaaggctcccggctgcctccccgccaccgagcttgtagcctgaatgcctggctgtcgcat

SEQ ID NO: 85869 - DNA, 201 bp, Homo sapiens
ctctgaaagcatctgtggaatgatcacgggacccttctcctctgagaaggctcccggctgcctccccgccaccgagcttgtagcctgaatgcctggctgtygcatggagcattttgcttctggggtgtcttccttagccaaagggaacgtgtcatttgctcgaccctggcccacccttgccgcccagctgttgtgctgggc

SEQ ID NO: 85870 - DNA, 201 bp, Homo sapiens
agctaatcgataatatggaagctttctggaaacagatggcaaatatccagcactttcttgtggaccagtttaagtgttccagctccaaagcccgacagctsatgatgactctgacggaaagaatgattgcagccgaagggctattgtgcgattctcaggagctgcaggctctggacgccctggagaggacgatggggcggg

SEQ ID NO: 85871 - DNA, 201 bp, Homo sapiens
taagtgttccagctccaaagcccgacagctgatgatgactctgacggaaagaatgattgcagccgaagggctattgtgcgattctcaggagctgcaggctytggacgccctggagaggacgatggggcgggcgcacatggcaaaagtgattgagtttctgaagctgcaagtccaggaggagaccaggtgccggctggctgc

SEQ ID NO: 85872 - DNA, 201 bp, Homo sapiens
gcccgacagctgatgatgactctgacggaaagaatgattgcagccgaagggctattgtgcgattctcaggagctgcaggctctggacgccctggagaggaygatggggcgggcgcacatggcaaaagtgattgagtttctgaagctgcaagtccaggaggagaccaggtgccggctggctgccatctcccacggcctggag

SEQ ID NO: 85873 - DNA, 201 bp, Homo sapiens
ggcaccatccgcggcgtcttgggccgactgggcggcctcactgaagagtccacgcggtgtgtcctgcaggggcatgacctgctgttgcgctcagccctccrgaggctggcactccgcggcaacgccctggccaccctgacgcagatgcggctatcggggaagaagcacctcctgcaggagctgcgggaacagcgtgcactg

SEQ ID NO: 85874 - DNA, 201 bp, Homo sapiens
ggcctcggcctttggcttggctgccgcgcgggccgccagcgcacgcgacaccagaaagacgacactcaaaatctgctcaagaatttggagtctaatgcgcmgaccccctcggaaactggctccccatcaaggaggaggaagagagaagtgcagatgtcgaaggacaaggaagctgttgatgaatgtgagccgccttccaac

SEQ ID NO: 85875 - DNA, 201 bp, Homo sapiens
actctgagtacatcaccctggctgatgtggaaaagaaggagagagaatactctgaacagctaatcgataatatggaagctttctggaaacagatggcaaayatccagcactttcttgtggaccagtttaagtgttccagctccaaagcccgacagctgatgatgactctgacggaaagaatgattgcagccgaagggctat

SEQ ID NO: 85876 - DNA, 201 bp, Homo sapiens
cgggccgccagcgcacgcgacaccagaaagacgacactcaaaatctgctcaagaatttggagtctaatgcgcagaccccctcggaaactggctccccatcraggaggaggaagagagaagtgcagatgtcgaaggacaaggaagctgttgatgaatgtgagccgccttccaacagcaatatcacagcattcgccctgaagg

SEQ ID NO: 85877 - DNA, 201 bp, Homo sapiens
tgacgttgatgtttccgtcttcaaagacgatcttgccctggctgatgaccactagtggggagccgtggcactccataccctcgaagatgttgtactccacygcctgcaccaacagcctcagcgttacttcccaggatttgctctgccccaaacgagctgttcataacagcgattttgcctaacattatatcataagcgtgt

SEQ ID NO: 85878 - DNA, 201 bp, Homo sapiens
atcagagcgcttccttcagttcctcacccatcagccagtgggctctccaaagttaaccaacagctccctcttgtggttcactaaaaaacttggttattccrtggagttgtgcaaagctatggcttccttggtgcaatattcttaaaacctgctttgcatagaaatcacttttgcccaggctggagtgcagtggcgtgatct

SEQ ID NO: 85879 - DNA, 201 bp, Homo sapiens
aaagggacttcaggtcaaactgtcaaacacagaaatgtcgggggctggtgactctgagtacatcaccctggctgatgtggaaaagaaggagagagaatacyctgaacagctaatcgataatatggaagctttctggaaacagatggcaaatatccagcactttcttgtggaccagtttaagtgttccagctccaaagcccg

SEQ ID NO: 85880 - DNA, 201 bp, Homo sapiens
tattcttaaaacctgctttgcatagaaatcacttttgcccaggctggagtgcagtggcgtgatctcggctcatggcaatctccatctcccgggttcaagcrattttcctgcctcagcctccccagtagctgggactacagacgtgtgccaccacgcctggctaaatcttttttgtattttattttagtagagacggggttt

SEQ ID NO: 85881 - DNA, 201 bp, Homo sapiens
ctcgaccctggcccacccttgccgcccagctgttgtgctgggcacagtctggggcacaggcctccatgatgaagacgcgtgggctgtcggtgctttcatcygtcacaaactggcacctgtacctgccagcaggagcatgatggggacttccatgctggaattgctccctgattaaaatgagatatggctatttggaagaca

SEQ ID NO: 85882 - DNA, 201 bp, Homo sapiens
gcgtgggctgctagagaagcccctaaggactaaaaggaagaagcccctgccccaggaaagaggggacctgggggtgcccaacaatgaggaccttgcctccrgggaccagacctcaggctcactcagcagcaaaaggctgagtcagcaagaaagtgaagctggggacagtgggaactcaaagaagatgctaaagagaagaag

SEQ ID NO: 85883 - DNA, 201 bp, Homo sapiens
caccataattggtcggttaccctgagcccagagctctgaaagcatctgtggaatgatcacgggacccttctcctctgagaaggctcccggctgcctccccrccaccgagcttgtagcctgaatgcctggctgtcgcatggagcattttgcttctggggtgtcttccttagccaaagggaacgtgtcatttgctcgaccctg

SEQ ID NO: 85884 - DNA, 201 bp, Homo sapiens
atggaagctttctggaaacagatggcaaatatccagcactttcttgtggaccagtttaagtgttccagctccaaagcccgacagctgatgatgactctgayggaaagaatgattgcagccgaagggctattgtgcgattctcaggagctgcaggctctggacgccctggagaggacgatggggcgggcgcacatggcaaaa

SEQ ID NO: 85885 - DNA, 201 bp, Homo sapiens
caaagacgatcttgccctggctgatgaccactagtggggagccgtggcactccataccctcgaagatgttgtactccaccgcctgcaccaacagcctcagygttacttcccaggatttgctctgccccaaacgagctgttcataacagcgattttgcctaacattatatcataagcgtgttccaatgtttttttttctctc

SEQ ID NO: 85886 - DNA, 201 bp, Homo sapiens
agcctgcagagccgtgagccaagtaaacctctttaattacccagcctcaggtgctccgggaacgccttccgcggaatgaagcggcccatgcccttgttgaygttgatgtttccgtcttcaaagacgatcttgccctggctgatgaccactagtggggagccgtggcactccataccctcgaagatgttgtactccaccgcc

SEQ ID NO: 85887 - DNA, 201 bp, Homo sapiens
agctcctagagcaagaccagcaggtgtggatggaggagtgtgcgctgtccagcgtgctgcagacacacctgcgggaggaccacgagggcaccatccgcggygtcttgggccgactgggcggcctcactgaagagtccacgcggtgtgtcctgcaggggcatgacctgctgttgcgctcagccctccggaggctggcactcc

SEQ ID NO: 85888 - DNA, 201 bp, Homo sapiens
agcagcaaaaggctgagtcagcaagaaagtgaagctggggacagtgggaactcaaagaagatgctaaagagaagaagcaacttgtagtttaagaccagtcrgtgggacaagacctgaagccctgggtctgggtgtgaattccaccttccctcctgcagtgctgagaggcagcgaggacggagaggacagcggcatctctag

SEQ ID NO: 85889 - DNA, 201 bp, Homo sapiens
cggcagaaggaggagctgctcacgcagcagcacaaggccttctggcaggaggcagagcgcttcagccgggagtttgtccagcgaggcaaagacctggtcamggcgtctctggctcaccaggtggagggaacggcaaaactcacgctggcccaagaggaggaacagagaagcttcctggctgaggcccagccgactgctgac

SEQ ID NO: 85890 - DNA, 201 bp, Homo sapiens
atataaccaacaactcaccgttgcgcatgtaggctgccggtggctttctataatcaaatcaatattgttctggggcatcacaaagaggaagggggtccccyggggttatgcaatgtggctgctttgactgtactggacataaaaataagtaaaatgttcttcattttacttaaaatgtgtctttaaataaaatttttttct

SEQ ID NO: 85891 - DNA, 201 bp, Homo sapiens
tccccatcaaggaggaggaagagagaagtgcagatgtcgaaggacaaggaagctgttgatgaatgtgagccgccttccaacagcaatatcacagcattcgycctgaaggccaaagtcatctaccccatcaatcagaagttccggcctctggccgatggctcctccaacccgtctctgcatgaaaacttaaagcaggctgtt

SEQ ID NO: 85892 - DNA, 201 bp, Homo sapiens
tgagacctcccaggcggtccaccagaggatgctgtcccagcagaagaggttcctggcccagttcccagtgcaccagcagatgcgtctgcacgcccagcagyagcaggcaggagtcatggaccttctggaagcccagctggagacccagctacaggaagctgaacagaacttcatctccgagctggcagccttggcccgagt

SEQ ID NO: 85893 - DNA, 201 bp, Homo sapiens
gacagtgggaactcaaagaagatgctaaagagaagaagcaacttgtagtttaagaccagtcagtgggacaagacctgaagccctgggtctgggtgtgaatyccaccttccctcctgcagtgctgagaggcagcgaggacggagaggacagcggcatctctaggctcttctgagagggacagagaaagaatagaaatgtgcc

SEQ ID NO: 85894 - DNA, 201 bp, Homo sapiens
gccgaggcccaggaggtggggcagcttctgcagcagcacatggagtgcgccattgggcaggcgctgctggtgcatgcacggaatgcagccaccaagagccrggccaaggacagggatgacttcaagaggacactgatggaggcggcagtggagagcgtctacgtgaccagcgctggtgtcagccgcctggtgcaggcgtat

SEQ ID NO: 85895 - DNA, 201 bp, Homo sapiens
atatccagcactttcttgtggaccagtttaagtgttccagctccaaagcccgacagctgatgatgactctgacggaaagaatgattgcagccgaagggctrttgtgcgattctcaggagctgcaggctctggacgccctggagaggacgatggggcgggcgcacatggcaaaagtgattgagtttctgaagctgcaagtcc

SEQ ID NO: 85896 - DNA, 201 bp, Homo sapiens
  misc_feature (1)...(201): n = A,T,C or G
ggacacggcactgaggcaggaaaagcatatgatgtttattcagatttttaaaatgtgcctccttgaccttcttcctaaaaagaagtcagatgatgaattanaccagaagatcctttcaaaacaagaaaaagatttggaggaactagaaaagggacttcaggtcaaactgtcaaacacagaaatgtcgggggctggtgactc

SEQ ID NO: 85897 - DNA, 201 bp, Homo sapiens
ataaactcttgacagagattggaaaagtagctggaacaccatcttttcttttaactttttatggtgcttctgttggcatagttggggaaagcacctacaasatgagttttatcatgaagcttcacagacactttcaaagaacagtcattctgcttgccactttttgtatggtgagcattattatttctgcttactacctgt

SEQ ID NO: 85898 - DNA, 201 bp, Homo sapiens
aagaccctgcagctctgaagtttagcttctacgaagtgatctcagcagggccccgtgcaccctcggagctcagagccttgcagaagagatgtttggtcccrgggtggtatgccagccacatcgagagatggcttgtttatttccccccatttcagttgctaattattgatgggcaacaactaagaactgatcctgctacag

SEQ ID NO: 85899 - DNA, 201 bp, Homo sapiens
ttggggaaagcacctacaacatgagttttatcatgaagcttcacagacactttcaaagaacagtcattctgcttgccactttttgtatggtgagcattatyatttctgcttactacctgtacagtggctacaaacaggaaaatgaactctctgagacggcttcagaagttgactgtggcgacctccaacacctaccatatc

SEQ ID NO: 85900 - DNA, 201 bp, Homo sapiens
ttattatttctgcttactacctgtacagtggctacaaacaggaaaatgaactctctgagacggcttcagaagttgactgtggcgacctccaacacctaccrtatcaactaatggaagtgaaagcaatgaagctttttgatgcctcaaggacagaccccacagtcctagtatttgtagagagccagtactcatctcttggtc

SEQ ID NO: 85901 - DNA, 201 bp, Homo sapiens
gagctgcttctctggttcccaaagccaagattatcaccattctcattgacccttcagaccgagcatactcctggtaccagcatcagcgatcacatgaagaycctgcagctctgaagtttagcttctacgaagtgatctcagcagggccccgtgcaccctcggagctcagagccttgcagaagagatgtttggtcccggggt

SEQ ID NO: 85902 - DNA, 201 bp, Homo sapiens
tttggtctaaagaaaaaacttgtgatcgcttaccaaaattcttggtaataggaccccagaaaactggtaccactgctttgtatttgttcctggttatgcayccttccatccttagtaactcccccagcccaaaaacctttgaggaggtacagttctttaatagaaataactaccacagggggattgattggtatatggatt

SEQ ID NO: 85903 - DNA, 201 bp, Homo sapiens
ggggtcctaaagagctggataagagtatccaaggaggagaacttttcttcactgtcgtcctcaaccctatcagcattttcatgacccatttgtccaactaygggaatgaccgactgggattatatacatttgttaatctggccaactttgtgaagagctggaccaacctgcgacttcagactctgcctccagtacaactgg

SEQ ID NO: 85904 - DNA, 201 bp, Homo sapiens
tcaacaaaaaatttgccttagagcacggcattccaacggacatgggctacgctgtggcccctcaccattcgggcgtctaccctgtacatgttcagctttaygaggcctggaagaaggtctggaatattaaaatcaccagcactgaagaatatccacatctgaagccagctagataccggaggggttttatccacaaaaaca

SEQ ID NO: 85905 - DNA, 201 bp, Homo sapiens
ttcttgtggatattgatgatatatttgtgggaaaagagggaacaagaatgaacaccaatgatgtaaaggccctgcttgatactcagaatcttttgcgtgcwcaaatcacaaattttacattcaacctgggattttcagggaaattttaccatacaggaactgaagaggaagatgaaggagatgactgtctgttggggtctg

SEQ ID NO: 85906 - DNA, 201 bp, Homo sapiens
agtgtgacgcggagcggataaagttggaagcagagcggtttgagaacctccgagagattgggaaccttctgcacccttctgtacccatcagtaacgatgarggggtcctggtgttcctggaacaggctctcatccagtatgcccttcgcaccttgggaagtcggggctacattcccatttataccccctttttcatgagga

SEQ ID NO: 85907 - DNA, 201 bp, Homo sapiens
cattcctgcctccctatttgccaggctttcatttctgtctgctgagatctcagagcctgcccaacagcagggaagccaagcacccattcatccccctgccsccatctgactgcgtagctgagaggggaacagtgccatgtaccacacagatgttcctgtctcctcgcatgggcatagggacccatcattgatgactgatga

SEQ ID NO: 85908 - DNA, 201 bp, Homo sapiens
agtgtgacgcggagcggataaagttggaagcagagcggtttgagaacctccgagagattgggaaccttctgcacccttctgtacccatcagtaacgatgargtgattggcaaaggcagtgaaaagtctgatgacaactcctatgatgagaagtacctgattgccacctcagagcagcccattgctgccctgcaccgggatg

SEQ ID NO: 85909 - DNA, 201 bp, Homo sapiens; identical to SEQ ID NO: 85907

SEQ ID NO: 85910 - DNA, 201 bp, Homo sapiens
agtgtgacgcggagcggataaagttggaagcagagcggtttgagaacctccgagagattgggaaccttctgcacccttctgtacccatcagtaacgatgargatgtggacaacaaagtagagaggatttggggtgattgtacagtcaggaagaagtactctcatgtggacctggtggtgatggtagatggctttgaaggcg

SEQ ID NO: 85911 - DNA, 201 bp, Homo sapiens; identical to SEQ ID NO: 85907

SEQ ID NO: 85912 - DNA, 201 bp, Homo sapiens; identical to SEQ ID NO: 85910

SEQ ID NO: 85913 - DNA, 201 bp, Homo sapiens; identical to SEQ ID NO: 85907

SEQ ID NO: 85914 - DNA, 201 bp, Homo sapiens
agtgtgacgcggagcggataaagttggaagcagagcggtttgagaacctccgagagattgggaaccttctgcacccttctgtacccatcagtaacgatgaraaattgaaggagttcatgccgccaggactgcaagaactgatcccctttgtgaagcctgcgcccattgagcaggagccatcaaagaagcagaagaagcaac

SEQ ID NO: 85915 - DNA, 201 bp, Homo sapiens; identical to SEQ ID NO: 85907

SEQ ID NO: 85916 - DNA, 201 bp, Homo sapiens
aaaaaaaaaatcctcgaaagaacaaatcatgaactatcttattataaaaggctgtacttctactgtttgaaaaaattatttctagggtttaagtaactacmagtaaaataaatttatttcttaaaaataagtgttaaaggaataactattctatgaagcagataacattaaggtaaaatataggcttagagtatgatttta

SEQ ID NO: 85917 - DNA, 169 bp, Homo sapiens
gccctgaaaagccataatggagatatcaatgcctccacctcagatatatgtagaaaaaactctggccawtatcaaaccagatattgttgacaaagaggaggagatacaagatattattcttagatccggattcaccattgttcagagaagaaaactacgcctcagccct

SEQ ID NO: 85918 - DNA, 201 bp, Homo sapiens
ggctgctgaaaaataatcctaacaaacccaaactttgtcaccatccaattgtagaagaaccttattaaaaaaaaaatcctcgaaagaacaaatcatgaacwatcttattataaaaggctgtacttctactgtttgaaaaaattatttctagggtttaagtaactacaagtaaaataaatttatttcttaaaaataagtgtt

SEQ ID NO: 85919 - DNA, 201 bp, Homo sapiens; identical to SEQ ID NO: 85916

SEQ ID NO: 85920 - DNA, 201 bp, Homo sapiens
gtctcctagcaacaagttgtaccatatgaggacggccgctgagccataatggagatatcaatgcctccacctcagatatatgtagaaaaaactctggccawtatcaaaccagatattgttgacaaagaggaggagatacaagatattattcttagatccggattcaccattgttcagagaagaaaactacgcctcagccct

SEQ ID NO: 85921 - DNA, 201 bp, Homo sapiens; identical to SEQ ID NO: 85918

SEQ ID NO: 85922 - DNA, 201 bp, Homo sapiens; identical to SEQ ID NO: 85916

SEQ ID NO: 85923 - DNA, 201 bp, Homo sapiens; identical to SEQ ID NO: 85920

SEQ ID NO: 85924 - DNA, 201 bp, Homo sapiens; identical to SEQ ID NO: 85918

SEQ ID NO: 85925 - DNA, 201 bp, Homo sapiens
gctgggaaacctcacccttgcaccgtcctcagcagtccacaaagcattttcatttctaatggcccatgggagccaggcccagaaagcaggaatggcttgcytaagacttgcccaagtcccagagcacctcacctcccgaagccaccatccccaccctgtcttccacagccgcctgaaagccacaatgagaatgatgcacac

SEQ ID NO: 85926 - DNA, 201 bp, Homo sapiens
ctgattaaaggtcagcacttaagcgatgcctttgcccaggtgaaccccctcaagaaggtgccagccttgaaggacggggacttcaccttgacggagaggtratgttccctgttttcctgggtgagccagtatctccccagacactggcagccaccctggcagagttggatgtgaccctgcagttgctcgaggacaagttcc

SEQ ID NO: 85927 - DNA, 201 bp, Homo sapiens
tgaaggacggggacttcaccttgacggagaggtgatgttccctgttttcctgggtgagccagtatctccccagacactggcagccaccctggcagagttgratgtgaccctgcagttgctcgaggacaagttcctccagaacaaggccttccttactggtcctcacatctccttagctgacctcgtagccatcacggagct

SEQ ID NO: 85928 - DNA, 201 bp, Homo sapiens
gttggatgtgaccctgcagttgctcgaggacaagttcctccagaacaaggccttccttactggtcctcacatctccttagctgacctcgtagccatcacgragctgatgcatcccgtgggtgctggctgccaagtcttcgaaggccgacccaagctggccacatggcggcagcgcgtggaggcagcagtgggggaggacct

SEQ ID NO: 85929 - DNA, 201 bp, Homo sapiens
caccctggcagagttggatgtgaccctgcagttgctcgaggacaagttcctccagaacaaggccttccttactggtcctcacatctccttagctgacctcrtagccatcacggagctgatgcatcccgtgggtgctggctgccaagtcttcgaaggccgacccaagctggccacatggcggcagcgcgtggaggcagcagt

SEQ ID NO: 85930 - DNA, 201 bp, Homo sapiens
gactccctctggtttccggtcaggtcggtcggtccccactatgggcctggagctgtacctggacctgctgtcccagccctgccgcgctgtttacatctttrccaagaagaacgacattcccttcgagctgcgcatcgtggatctgattaaaggtcagcacttaagcgatgcctttgcccaggtgaaccccctcaagaaggt

SEQ ID NO: 85931 - DNA, 201 bp, Homo sapiens; identical to SEQ ID NO: 85925

SEQ ID NO: 85932 - DNA, 201 bp, Homo sapiens
gtacctggacctgctgtcccagccctgccgcgctgtttacatctttgccaagaagaacgacattcccttcgagctgcgcatcgtggatctgattaaaggtratgttccctgttttcctgggtgagccagtatctccccagacactggcagccaccctggcagagttggatgtgaccctgcagttgctcgaggacaagttcc

SEQ ID NO: 85933 - DNA, 201 bp, Homo sapiens
ttcgagctgcgcatcgtggatctgattaaaggtgatgttccctgttttcctgggtgagccagtatctccccagacactggcagccaccctggcagagttgratgtgaccctgcagttgctcgaggacaagttcctccagaacaaggccttccttactggtcctcacatctccttagctgacctcgtagccatcacggagct

SEQ ID NO: 85934 - DNA, 201 bp, Homo sapiens; identical to SEQ ID NO: 85928

SEQ ID NO: 85935 - DNA, 201 bp, Homo sapiens; identical to SEQ ID NO: 85929

SEQ ID NO: 85936 - DNA, 201 bp, Homo sapiens
gactccctctggtttccggtcaggtcggtcggtccccactatgggcctggagctgtacctggacctgctgtcccagccctgccgcgctgtttacatctttrccaagaagaacgacattcccttcgagctgcgcatcgtggatctgattaaaggtgatgttccctgttttcctgggtgagccagtatctccccagacactgg

SEQ ID NO: 85937 - DNA, 201 bp, Homo sapiens; identical to SEQ ID NO: 85925

SEQ ID NO: 85938 - DNA, 201 bp, Homo sapiens
accctcaggacctgcaggcccgtgcccgtgtggatgagtacctggcatggcagcacacgactctgcggagaagctgcctccgggccttgtggcataaggtratgttccctgttttcctgggtgagccagtatctccccagacactggcagccaccctggcagagttggatgtgaccctgcagttgctcgaggacaagttcc

SEQ ID NO: 85939 - DNA, 201 bp, Homo sapiens
gagaagctgcctccgggccttgtggcataaggtgatgttccctgttttcctgggtgagccagtatctccccagacactggcagccaccctggcagagttgratgtgaccctgcagttgctcgaggacaagttcctccagaacaaggccttccttactggtcctcacatctccttagctgacctcgtagccatcacggagct

SEQ ID NO: 85940 - DNA, 201 bp, Homo sapiens; identical to SEQ ID NO: 85928

SEQ ID NO: 85941 - DNA, 201 bp, Homo sapiens; identical to SEQ ID NO: 85929

SEQ ID NO: 85942 - DNA, 201 bp, Homo sapiens
gactccctctggtttccggtcaggtcggtcggtccccactatgggcctggagctgtacctggacctgctgtcccagccctgccgcgctgtttacatctttrccaagaagaacgacattcccttcgagctgcgcatcgtggatctgattaaagtgtggccatcctgctctacctgacgcgcaaatataaggtccctgactac

SEQ ID NO: 85943 - DNA, 201 bp, Homo sapiens; identical to SEQ ID NO: 85925

SEQ ID NO: 85944 - DNA, 201 bp, Homo sapiens
acggagaggacctgcaggcccgtgcccgtgtggatgagtacctggcatggcagcacacgactctgcggagaagctgcctccgggccttgtggcataaggtratgttccctgttttcctgggtgagccagtatctccccagacactggcagccaccctggcagagttggatgtgaccctgcagttgctcgaggacaagttcc

SEQ ID NO: 85945 - DNA, 201 bp, Homo sapiens; identical to SEQ ID NO: 85939

SEQ ID NO: 85946 - DNA, 201 bp, Homo sapiens; identical to SEQ ID NO: 85928

SEQ ID NO: 85947 - DNA, 201 bp, Homo sapiens; identical to SEQ ID NO: 85929

SEQ ID NO: 85948 - DNA, 201 bp, Homo sapiens; identical to SEQ ID NO: 85930

SEQ ID NO: 85949 - DNA, 201 bp, Homo sapiens; identical to SEQ ID NO: 85925

SEQ ID NO: 85950 - DNA, 201 bp, Homo sapiens; identical to SEQ ID NO: 85938

SEQ ID NO: 85951 - DNA, 201 bp, Homo sapiens; identical to SEQ ID NO: 85939

SEQ ID NO: 85952 - DNA, 201 bp, Homo sapiens; identical to SEQ ID NO: 85928

SEQ ID NO: 85953 - DNA, 201 bp, Homo sapiens; identical to SEQ ID NO: 85929

SEQ ID NO: 85954 - DNA, 201 bp, Homo sapiens; identical to SEQ ID NO: 85930

SEQ ID NO: 85955 - DNA, 201 bp, Homo sapiens; identical to SEQ ID NO: 85925

SEQ ID NO: 85956 - DNA, 201 bp, Homo sapiens; identical to SEQ ID NO: 85938

SEQ ID NO: 85957 - DNA, 201 bp, Homo sapiens; identical to SEQ ID NO: 85939

SEQ ID NO: 85958 - DNA, 201 bp, Homo sapiens; identical to SEQ ID NO: 85928

SEQ ID NO: 85959 - DNA, 201 bp, Homo sapiens; identical to SEQ ID NO: 85929

SEQ ID NO: 85960 - DNA, 201 bp, Homo sapiens
gactccctctggtttccggtcaggtcggtcggtccccactatgggcctggagctgtacctggacctgctgtcccagccctgccgcgctgtttacatctttrccaagaagaacgacattcccttcgagctgcgcatcgtggatctgattaaagacggagtctcgctctgtcgcccaggctggagtgcagtggcaggatcaca

SEQ ID NO: 85961 - DNA, 201 bp, Homo sapiens; identical to SEQ ID NO: 85925

SEQ ID NO: 85962 - DNA, 201 bp, Homo sapiens; identical to SEQ ID NO: 85930

SEQ ID NO: 85963 - DNA, 201 bp, Homo sapiens
tttgatcatggctgtgattcactatcaacagtttttgtggttcttggaacttgtattgcagtgcagctggggacaaaccctgattggatgtttttttgttkttttgcggggacatttatgttctattgtgcgcactggcaaacgtatgtttctggaacattgcgatttggaataattgatgtgactgaagtgcaaatcttc

SEQ ID NO: 85964 - DNA, 201 bp, Homo sapiens
tgttggggtcaggtcatgctacttgattacttataattgttatctctaatcttttctaaatgaaatacaaatacttcagggattaaactcaaggtcctttrttagcagtcatcacttaacccacttttactttttttccttctacttcctcagttcatcaggacactctgctaatacatatatactgtcttaaagttaatt

SEQ ID NO: 85965 - DNA, 201 bp, Homo sapiens
atgtagattgaattagcaaggagaagtaaacctttcatttctttgccagactatattgggaaatgaaaatccgtcattacttttccttgctagcaattgtycgaatatctgggataaagaaatacatacaggaaaatgttagggcagaccaagtattaaaagctaggacagagcaggacaaaggaggaaggataattctac

SEQ ID NO: 85966 - DNA, 201 bp, Homo sapiens
taataatcaatgttgtataacttttattctttattattggtaacacgccctaactatcctgtgtgagaatgggaatttcaagtcccatcttgtaaattgtmtatgttgtcatgcagggtttgggccaagaaagcatgcagaaaaaaatgccatgtgattgtaattatcctggattcagaataatactgtgatggggagcca

SEQ ID NO: 85967 - DNA, 201 bp, Homo sapiens
tgacacagatacatcccactagcttgtgaggtggaactagtaataaagaccttgaatttggattgaaaagtttcctatctttacattgttgaggaagtccttttttttttttttttttttttaattgctcaagaaatgattctctcacaggcttgggaaatcctgttagcatgcagaataatgtggtaactttgtcaattt

SEQ ID NO: 85968 - DNA, 201 bp, Homo sapiens
ttaacagctttattgatgaatatattgtactttggattgccctggttttctctttctttgatttgatccgctactgtgtcagtgtttgcaatcagattgcrtctcacctgcacatacatgtcttcagaatcaaggtctctacagctcattctaatcatcattaatgatgtaattggtatataggaacatcatgttttctgc

SEQ ID NO: 85969 - DNA, 201 bp, Homo sapiens
tttgatcatggctgtgattcactatcaacagtttttgtggttcttggaacttgtattgcagtgcagctggggacaaaccctgattggatgtttttttgttkttttgcggggacatttatgttctattgtgcgcactggcaaacgtatgtttctggaacattgcgatttggaatattcgatgttacagagtcccagatcata

SEQ ID NO: 85970 - DNA, 159 bp, Homo sapiens
cgaagcactaggccgtttgaggatctccgctccgctttgcctgggaccaggaaaagacscgagagacggaactcggcatcaggcactgcttggggcaggaggagagtaggggaaaccaaggaagagaacagaaaggtaagcaccagccacaaaaaccta

SEQ ID NO: 85971 - DNA, 201 bp, Homo sapiens; identical to SEQ ID NO: 85965

SEQ ID NO: 85972 - DNA, 201 bp, Homo sapiens; identical to SEQ ID NO: 85966

SEQ ID NO: 85973 - DNA, 201 bp, Homo sapiens; identical to SEQ ID NO: 85967

SEQ ID NO: 85974 - DNA, 201 bp, Homo sapiens; identical to SEQ ID NO: 85968

SEQ ID NO: 85975 - DNA, 201 bp, Homo sapiens; identical to SEQ ID NO: 85963

SEQ ID NO: 85976 - DNA, 201 bp, Homo sapiens; identical to SEQ ID NO: 85965

SEQ ID NO: 85977 - DNA, 201 bp, Homo sapiens; identical to SEQ ID NO: 85966

SEQ ID NO: 85978 - DNA, 201 bp, Homo sapiens; identical to SEQ ID NO: 85967

SEQ ID NO: 85979 - DNA, 201 bp, Homo sapiens; identical to SEQ ID NO: 85968

SEQ ID NO: 85980 - DNA, 201 bp, Homo sapiens; identical to SEQ ID NO: 85963

SEQ ID NO: 85981 - DNA, 201 bp, Homo sapiens; identical to SEQ ID NO: 85965

SEQ ID NO: 85982 - DNA, 201 bp, Homo sapiens; identical to SEQ ID NO: 85966

SEQ ID NO: 85983 - DNA, 201 bp, Homo sapiens; identical to SEQ ID NO: 85967

SEQ ID NO: 85984 - DNA, 201 bp, Homo sapiens; identical to SEQ ID NO: 85968

SEQ ID NO: 85985 - DNA, 201 bp, Homo sapiens; identical to SEQ ID NO: 85963

SEQ ID NO: 85986 - DNA, 159 bp, Homo sapiens; identical to SEQ ID NO: 85970

SEQ ID NO: 85987 - DNA, 201 bp, Homo sapiens; identical to SEQ ID NO: 85965

SEQ ID NO: 85988 - DNA, 201 bp, Homo sapiens; identical to SEQ ID NO: 85966

SEQ ID NO: 85989 - DNA, 201 bp, Homo sapiens; identical to SEQ ID NO: 85967

SEQ ID NO: 85990 - DNA, 201 bp, Homo sapiens; identical to SEQ ID NO: 85968

SEQ ID NO: 85991 - DNA, 109 bp, Homo sapiens
tgttcccatctatggaaaccattcctctgtcaactcagtaacccctcaaacaagtcctctttctctaaaaaaagaaatcccagaaaactctgctgtggatsaagaagcc

SEQ ID NO: 85992 - DNA, 201 bp, Homo sapiens
gaggggagaatttgacttctgaggtgggcactcaccccaggatgggtaacttgggtcttcagatggaagctgaaaacaggatgatgctgtcctccagcccygtcatccagctcccggaacaaactcctctagcttttgacaaccgctttgttcccatctatggaaaccattcctctgtcaactcagtaacccctcaaacaa

SEQ ID NO: 85993 - DNA, 201 bp, Homo sapiens
agcacactgtgactgtcccctccagaaacatatcagtcacccctgaagggcagactatgcctttaagaggggagaatttgacttctgaggtgggcactcascccaggatgggtaacttgggtcttcagatggaagctgaaaacaggatgatgctgtcctccagccccgtcatccagctcccggaacaaactcctctagctt

SEQ ID NO: 85994 - DNA, 201 bp, Homo sapiens
ctcaccccaggatgggtaacttgggtcttcagatggaagctgaaaacaggatgatgctgtcctccagccccgtcatccagctcccggaacaaactcctctrgcttttgacaaccgctttgttcccatctatggaaaccattcctctgtcaactcagtaacccctcaaacaagtcctctttctctaaaaaaagaaatcccag

SEQ ID NO: 85995 - DNA, 201 bp, Homo sapiens
tcacccctgaagggcagactatgcctttaagaggggagaatttgacttctgaggtgggcactcaccccaggatgggtaacttgggtcttcagatggaagcygaaaacaggatgatgctgtcctccagccccgtcatccagctcccggaacaaactcctctagcttttgacaaccgctttgttcccatctatggaaaccatt

SEQ ID NO: 85996 - DNA, 201 bp, Homo sapiens
ccctagaggtacaactgtgacccctacaaaggaaactgtatcccttggaaagcacactgtagctctaggagagaagactgagatcactggggcaacgaccrtgacttctgtgggtcatcagtccatgacccctggagagaaggccctgacccctgtgggtcatcaatctgtgaccactggacagaagaccctgacctctgt

SEQ ID NO: 85997 - DNA, 201 bp, Homo sapiens; identical to SEQ ID NO: 85994

SEQ ID NO: 85998 - DNA, 201 bp, Homo sapiens
caatctgtgaccactggacagaagaccctgacctctgtgggttatcagtctgtgacccctggggaaaagaccctgacccctgtgggtcatcagtctgtgasccctgtgagtcatcagtctgtgagccctggaggaacgactatgacccctgtccattttcagactgagacccttagacagaatacagtggcccctagaagg

SEQ ID NO: 85999 - DNA, 201 bp, Homo sapiens
cactggacagaagaccctgacctctgtgggttatcagtctgtgacccctggggaaaagaccctgacccctgtgggtcatcagtctgtgacccctgtgagtyatcagtctgtgagccctggaggaacgactatgacccctgtccattttcagactgagacccttagacagaatacagtggcccctagaaggaaggctgtggc

SEQ ID NO: 86000 - DNA, 201 bp, Homo sapiens
accctgacctctgtgggttatcagtctgtgacccctggggaaaagaccctgacccctgtgggtcatcagtctgtgacccctgtgagtcatcagtctgtgasccctggaggaacgactatgacccctgtccattttcagactgagacccttagacagaatacagtggcccctagaaggaaggctgtggcccgtgaaaaggtg

SEQ ID NO: 86001 - DNA, 201 bp, Homo sapiens
aaacttctaagtggtgacactgagattcaaactttgaattcaaaccttggattcaaagcctaaatccaaagctatggtttaaactttttttaaaaattacrctgcttcccagccaataatcttttaataatagaattgctgctaccatatggggtttctcccccatattcagtccctgtggtactgaataccaggaagacc

SEQ ID NO: 86002 - DNA, 201 bp, Homo sapiens
tgttcccatctatggaaaccattcctctgtcaactcagtaacccctcaaacaagtcctctttctctaaaaaaagaaatcccagaaaactctgctgtggatsaagaagcctaagcccctctggtgtcagaaaccagggaaaacccttgtcttttcttctaagtgacatgttggaagccttctcatcccggggcaaagcaggc

SEQ ID NO: 86003 - DNA, 201 bp, Homo sapiens
atctgtgaccactggacagaagaccctgacctctgtgggttatcagtctgtgacccctggggaaaagaccctgacccctgtgggtcatcagtctgtgaccyctgtgagtcatcagtctgtgagccctggaggaacgactatgacccctgtccattttcagactgagacccttagacagaatacagtggcccctagaaggaa

SEQ ID NO: 86004 - DNA, 201 bp, Homo sapiens
attttgagatttgttcctttgtctggggagcgaagaagcactggattgattaccagtatgtcccgtatgccaacaaggggaaagagtgggttggctatgamaatgccatcagcttcagttacaaggcatggtttataaggcgagagcattttgggggggccatggtgtggacattggacatggatgacgtcaggggcacgt

SEQ ID NO: 86005 - DNA, 201 bp, Homo sapiens; identical to SEQ ID NO: 85992

SEQ ID NO: 86006 - DNA, 201 bp, Homo sapiens
agaggaacagagagctgaaaacactactgtccatcggcgggtggaactttggcacctcaagattcaccactatgttgtccacatttgccaaccgtgaaaartttattgcttcagttatatcccttctgaggacacatgactttgatggtcttgaccttttcttcttatatcctggactaagaggcagccccatgcatgacc

SEQ ID NO: 86007 - DNA, 201 bp, Homo sapiens
gtgaaaaggtgactgtcccctccagaaacatatcagtcacccctgaagggcagactatgcctttaagaggggagaatttgacttctgaggtgggcactcascccaggatgggtaacttgggtcttcagatggaagctgaaaacaggatgatgctgtcctccagccccgtcatccagctcccggaacaaactcctctagctt

SEQ ID NO: 86008 - DNA, 201 bp, Homo sapiens
atcaatttctagccctccaattctaggagctagtgctacacagagtgggtgccatacctattattatgttactttttcttttggaagtgtagcctccaagkctttaagccagagtctgaaattaaaatgtccataggaccaggcacctgccataaagattgaagcacgtgaaagcacatggccatttgcttaacagaacct

SEQ ID NO: 86009 - DNA, 201 bp, Homo sapiens
agtctgaaattaaaatgtccataggaccaggcacctgccataaagattgaagcacgtgaaagcacatggccatttgcttaacagaacctaggtcacatatraaacccttttgccttgacaaaaaaattagctgggcatgatggctcacgcctgtagtctcagctacttgggaggctaaagtgggaggatcacctgagccct

SEQ ID NO: 86010 - DNA, 201 bp, Homo sapiens
ttctgtgggtcatcagtccatgacccctggagagaaggccctgacccctgtgggtcatcaatctgtgaccactggacagaagaccctgacctctgtgggtyatcagtctgtgacccctggggaaaagaccctgacccctgtgggtcatcagtctgtgacccctgtgagtcatcagtctgtgagccctggaggaacgactat

SEQ ID NO: 86011 - DNA, 201 bp, Homo sapiens
aaaggtactttaaaaattattttcttatagtattaccttcacacttctgctaggtctcctctagaaacaccagttctcacacattaaaactttaatccacycagggaacattttcctaggcatgactgtccctcataagttgctatagacaccagatcaatttctagccctccaattctaggagctagtgctacacagagt

SEQ ID NO: 86012 - DNA, 201 bp, Homo sapiens
gaccactggacagaagaccctgacctctgtgggttatcagtctgtgacccctggggaaaagaccctgacccctgtgggtcatcagtctgtgacccctgtgrgtcatcagtctgtgagccctggaggaacgactatgacccctgtccattttcagactgagacccttagacagaatacagtggcccctagaaggaaggctgt

SEQ ID NO: 86013 - DNA, 103 bp, Homo sapiens
cctgagccctggagattgaggctgcattgagccacgatggtgccactgcactccagcctgggtgacaaagcaagaccctgtctcaaaataaataaataaawaa

SEQ ID NO: 86014 - DNA, 201 bp, Homo sapiens
ggtgtgtgtgtgtgtgtgtgtgtgtgtgtgtgtgtgtgtgtgtgtgtgtgtatgtgtagctgggctgtcccagcgctatccacagggaagctcctataaarggctgcatctctggactcacagctatcagaccattgagatgtggaagctgttgctgtgggttgggctggttcttgtgctgaaacaccacgatggtgctgc

SEQ ID NO: 86015 - DNA, 201 bp, Homo sapiens
gaccatgacttctgtgggtcatcagtccatgacccctggagagaaggccctgacccctgtgggtcatcaatctgtgaccactggacagaagaccctgaccyctgtgggttatcagtctgtgacccctggggaaaagaccctgacccctgtgggtcatcagtctgtgacccctgtgagtcatcagtctgtgagccctggagg

SEQ ID NO: 86016 - DNA, 201 bp, Homo sapiens
gtcgttctggggtcactgtgactctcataaattactgatcctggcactggggtgtgtgtgtgtgtgtgtgtgtgtgtgtgtgtgtgtgtgtgtgtgtgtgkatgtgtagctgggctgtcccagcgctatccacagggaagctcctataaagggctgcatctctggactcacagctatcagaccattgagatgtggaagctg

SEQ ID NO: 86017 - DNA, 201 bp, Homo sapiens
ctggtgcgggctgagttcagttcaacttctttaccacaattttggctgtcatctgctgtgaattcttcaagcactgaccctgaaaggctggctgtgaccayggcatggaccactgatagtaagattttgcccccaggaggagaggctggggtcactgagatccacggaaagtgtgaaaatatgactataacccctagaggt

SEQ ID NO: 86018 - DNA, 201 bp, Homo sapiens
ggccctgacccctgtgggtcatcaatctgtgaccactggacagaagaccctgacctctgtgggttatcagtctgtgacccctggggaaaagaccctgaccyctgtgggtcatcagtctgtgacccctgtgagtcatcagtctgtgagccctggaggaacgactatgacccctgtccattttcagactgagacccttagaca

SEQ ID NO: 86019 - DNA, 201 bp, Homo sapiens; identical to SEQ ID NO: 85995

SEQ ID NO: 86020 - DNA, 201 bp, Homo sapiens
cttctaagtggtgacactgagattcaaactttgaattcaaaccttggattcaaagcctaaatccaaagctatggtttaaactttttttaaaaattacgctrcttcccagccaataatcttttaataatagaattgctgctaccatatggggtttctcccccatattcagtccctgtggtactgaataccaggaagaccctc

SEQ ID NO: 86021 - DNA, 201 bp, Homo sapiens
tgtctgctgctgtttctggggtcccacacatcgtccaaacatcctatgatgtgcgctttctaggaagactcctggatttcatcaatgtcttgtcttatgayttacatggaagttgggaaaggttcacaggacataatagccccctcttctctctgcctgaagaccccaaatcttcggcatatgctatgaattattggagaa

SEQ ID NO: 86022 - DNA, 201 bp, Homo sapiens
ataacccctagaggtacaactgtgacccctacaaaggaaactgtatcccttggaaagcacactgtagctctaggagagaagactgagatcactggggcaaygaccatgacttctgtgggtcatcagtccatgacccctggagagaaggccctgacccctgtgggtcatcaatctgtgaccactggacagaagaccctgacc

SEQ ID NO: 86023 - DNA, 201 bp, Homo sapiens
caagattacaaaacttctaagtggtgacactgagattcaaactttgaattcaaaccttggattcaaagcctaaatccaaagctatggtttaaacttttttwaaaaattacgctgcttcccagccaataatcttttaataatagaattgctgctaccatatggggtttctcccccatattcagtccctgtggtactgaatac

SEQ ID NO: 86024 - DNA, 201 bp, Homo sapiens
gactcttctcgcgataattttttttaaaaatctcccaaggaaagttgaaggaagagtacaaaattttcatctcgcgagacttgtgagcggccatcttggtyctgccctgacagattctcctatcggggtcacagggacgctaagattgctacctggactttcgttgaccatgctgtcccgggtggtactttccgccgccgc

SEQ ID NO: 86025 - DNA, 201 bp, Homo sapiens
cttaccgggaacgactgtatagagtatataaggaagtaaagaatcgcctggactatcatatatctgtgcagaacatgatgcgtcgaaaggaacaagaacayatgataaattgggtggagaagcacgtggtgcaaagcatctccacacagcaggaaaaggagacaattgccaagtgcattgcggacctaaagctgctggcaa

SEQ ID NO: 86026 - DNA, 201 bp, Homo sapiens
ctcttcctgaatacggaggaaaagttcgttatggactgatccctgaggaattcttccagtttctttatcctaaaactggtgtaacaggaccctatgtactyggaactgggcttatcttgtacgctttatccaaagaaatatatgtgattagcgcagagaccttcactgccctatcagtactaggtgtaatggtctatggaa

SEQ ID NO: 86027 - DNA, 201 bp, Homo sapiens
ctcgcgagaattgcttctatggctccatcctgctttccggctgtcgccctcatgcgataggctctcagcgttacttgactcttctcgcgataatttttttwaaaaatctcccaaggaaagttgaaggaagagtacaaaattttcatctcgcgagacttgtgagcggccatcttggtcctgccctgacagattctcctatcg

SEQ ID NO: 86028 - DNA, 201 bp, Homo sapiens
accacctcttcctgaatacggaggaaaagttcgttatggactgatccctgaggaattcttccagtttctttatcctaaaactggtgtaacaggaccctatrtactcggaactgggcttatcttgtacgctttatccaaagaaatatatgtgattagcgcagagaccttcactgccctatcagtactaggtgtaatggtcta

SEQ ID NO: 86029 - DNA, 201 bp, Homo sapiens
cctctgagcctccgcccctctcccgagggaaccgcaactctacttctcgcgagaattgcttctatggctccatcctgctttccggctgtcgccctcatgcrataggctctcagcgttacttgactcttctcgcgataattttttttaaaaatctcccaaggaaagttgaaggaagagtacaaaattttcatctcgcgagac

SEQ ID NO: 86030 - DNA, 201 bp, Homo sapiens
tttgttgcagactttgctgataaactcaatgagcaaaaacttgcccaactagaagaggcgaagcaggcttccatccaacacatccagaatgcaattgatayggagaagtcacaacaggcactggttcagaagcgccattacctttttgatgtgcaaaggaataacattgctatggctttggaagttacttaccgggaacga

SEQ ID NO: 86031 - DNA, 201 bp, Homo sapiens
aggaagagtacaaaattttcatctcgcgagacttgtgagcggccatcttggtcctgccctgacagattctcctatcggggtcacagggacgctaagattgstacctggactttcgttgaccatgctgtcccgggtggtactttccgccgccgccacagcggccccctctctgaagaatgcagccttcctaggtccaggggt

SEQ ID NO: 86032 - DNA, 129 bp, Homo sapiens
actcaaactggacgccggccggagactcmgctccggcagcaaaccccacgtggtgcacctctgagcctccgcccctctcccgagggaaccgcaactctacttctcgcgagaattgcttctatggctcca

SEQ ID NO: 86033 - DNA, 201 bp, Homo sapiens; identical to SEQ ID NO: 86024

SEQ ID NO: 86034 - DNA, 201 bp, Homo sapiens; identical to SEQ ID NO: 86025

SEQ ID NO: 86035 - DNA, 201 bp, Homo sapiens; identical to SEQ ID NO: 86026

SEQ ID NO: 86036 - DNA, 201 bp, Homo sapiens; identical to SEQ ID NO: 86027

SEQ ID NO: 86037 - DNA, 201 bp, Homo sapiens; identical to SEQ ID NO: 86028

SEQ ID NO: 86038 - DNA, 201 bp, Homo sapiens; identical to SEQ ID NO: 86029

SEQ ID NO: 86039 - DNA, 201 bp, Homo sapiens; identical to SEQ ID NO: 86030

SEQ ID NO: 86040 - DNA, 201 bp, Homo sapiens; identical to SEQ ID NO: 86031

SEQ ID NO: 86041 - DNA, 201 bp, Homo sapiens
ttccggccgggtctggatctgagctcaggaacgcggggcagggctggggacagctcggtgacgcgacccaggactcaaactggacgccggccggagactcmgctccggcagcaaaccccacgtggtgcacctctgagcctccgcccctctcccgagggaaccgcaactctacttctcgcgagaattgcttctatggctcca

SEQ ID NO: 86042 - DNA, 201 bp, Homo sapiens; identical to SEQ ID NO: 86024

SEQ ID NO: 86043 - DNA, 201 bp, Homo sapiens; identical to SEQ ID NO: 86025

SEQ ID NO: 86044 - DNA, 201 bp, Homo sapiens; identical to SEQ ID NO: 86026

SEQ ID NO: 86045 - DNA, 201 bp, Homo sapiens; identical to SEQ ID NO: 86027

SEQ ID NO: 86046 - DNA, 201 bp, Homo sapiens; identical to SEQ ID NO: 86028

SEQ ID NO: 86047 - DNA, 201 bp, Homo sapiens; identical to SEQ ID NO: 86029

SEQ ID NO: 86048 - DNA, 201 bp, Homo sapiens; identical to SEQ ID NO: 86030

SEQ ID NO: 86049 - DNA, 201 bp, Homo sapiens; identical to SEQ ID NO: 86031

SEQ ID NO: 86050 - DNA, 201 bp, Homo sapiens; identical to SEQ ID NO: 86041

SEQ ID NO: 86051 - DNA, 191 bp, Homo sapiens
ataagaacacaaccccagccaatacctggattacagcctggtgagaccttgaagcagagaaccttgataaaacatgtccaagcttttaacccatagaaackataagataaatgtgtattgttttaagcctctaaatgtgtgatatgttaggcagcaatagaaaactaatacagcaaaggtctccaccatct

SEQ ID NO: 86052 - DNA, 201 bp, Homo sapiens
gtgcaagttgcacggctccagctcagcccattgagccaataactgctgctcccagtggcagcgggaacgggagcgggagtagcagctctggaggcagctcrggaggcagtggattctgtgctggcagagccaacggcctctaccccgtggcaaataacagaaatgccttctggcactgcgtgaatggagtcacgtaccagc

SEQ ID NO: 86053 - DNA, 201 bp, Homo sapiens
tattaaggctcaatggcttaagcacaacaaatctggaggcgccatggtctgggccattgatctggatgacttcactggcactttctgcaaccagggcaagyttcccctaatctccaccctgaagaaggccctcggcctgcagagtgcaagttgcacggctccagctcagcccattgagccaataactgctgctcccagtgg

SEQ ID NO: 86054 - DNA, 201 bp, Homo sapiens
agaagctcatcgttggattccctacctatggacacaacttcatcctgagcaacccctccaacactggaattggtgcccccacctctggtgctggtcctgckgggccctatgccaaggagtctgggatctgggcttactacgagatctgtaccttcctgaaaaatggagccactcagggatgggatgcccctcaggaagtgc

SEQ ID NO: 86055 - DNA, 201 bp, Homo sapiens
cctcaggaagtgccttatgcctatcagggcaatgtgtgggttggctatgacaacgtcaagagcttcgatattaaggctcaatggcttaagcacaacaaatytggaggcgccatggtctgggccattgatctggatgacttcactggcactttctgcaaccagggcaagtttcccctaatctccaccctgaagaaggccctc

SEQ ID NO: 86056 - DNA, 201 bp, Homo sapiens
ggatctgggcttactacgagatctgtaccttcctgaaaaatggagccactcagggatgggatgcccctcaggaagtgccttatgcctatcagggcaatgtrtgggttggctatgacaacgtcaagagcttcgatattaaggctcaatggcttaagcacaacaaatctggaggcgccatggtctgggccattgatctggatg

SEQ ID NO: 86057 - DNA, 201 bp, Homo sapiens
gatctgtaccttcctgaaaaatggagccactcagggatgggatgcccctcaggaagtgccttatgcctatcagggcaatgtgtgggttggctatgacaacrtcaagagcttcgatattaaggctcaatggcttaagcacaacaaatctggaggcgccatggtctgggccattgatctggatgacttcactggcactttctg

SEQ ID NO: 86058 - DNA, 201 bp, Homo sapiens
aggcgccatggtctgggccattgatctggatgacttcactggcactttctgcaaccagggcaagtttcccctaatctccaccctgaagaaggccctcggcytgcagagtgcaagttgcacggctccagctcagcccattgagccaataactgctgctcccagtggcagcgggaacgggagcgggagtagcagctctggagg

SEQ ID NO: 86059 - DNA, 201 bp, Homo sapiens
cagcccattgagccaataactgctgctcccagtggcagcgggaacgggagcgggagtagcagctctggaggcagctcgggaggcagtggattctgtgctgkcagagccaacggcctctaccccgtggcaaataacagaaatgccttctggcactgcgtgaatggagtcacgtaccagcagaactgccaggccgggcttgtc

SEQ ID NO: 86060 - DNA, 201 bp, Homo sapiens
actctcctggccattggaggctggaacttcgggactgcccctttcactgccatggtttctactcctgagaaccgccagactttcatcacctcagtcatcarattcctgcgccagtatgagtttgacgggctggactttgactgggagtaccctggctctcgtgggagccctcctcaggacaagcatctcttcactgtcctg

SEQ ID NO: 86061 - DNA, 201 bp, Homo sapiens
gcaccagctgagaagctcatcgttggattccctacctatggacacaacttcatcctgagcaacccctccaacactggaattggtgcccccacctctggtgytggtcctgctgggccctatgccaaggagtctgggatctgggcttactacgagatctgtaccttcctgaaaaatggagccactcagggatgggatgcccct

SEQ ID NO: 86062 - DNA, 201 bp, Homo sapiens
ctggaggcgccatggtctgggccattgatctggatgacttcactggcactttctgcaaccagggcaagtttcccctaatctccaccctgaagaaggccctyggcctgcagagtgcaagttgcacggctccagctcagcccattgagccaataactgctgctcccagtggcagcgggaacgggagcgggagtagcagctctg

SEQ ID NO: 86063 - DNA, 201 bp, Homo sapiens
ctctggagcccaggctgttgctttccagtctggtggtgaatcctccatagtctggaacagccagctgaaaactctcctggccattggaggctggaacttcrggactgcccctttcactgccatggtttctactcctgagaaccgccagactttcatcacctcagtcatcaaattcctgcgccagtatgagtttgacgggct

SEQ ID NO: 86064 - DNA, 201 bp, Homo sapiens
actgaatttgcagctcggctctgcctaccagctgacatgctacttcaccaactgggcccagtaccggccaggcctggggcgcttcatgcctgacaacatcracccctgcctctgtacccacctgatctacgcctttgctgggaggcagaacaacgagatcaccaccatcgaatggaatgatgtgactctctaccaagcttt

SEQ ID NO: 86065 - DNA, 201 bp, Homo sapiens; identical to SEQ ID NO: 86053

SEQ ID NO: 86066 - DNA, 201 bp, Homo sapiens; identical to SEQ ID NO: 86054

SEQ ID NO: 86067 - DNA, 201 bp, Homo sapiens; identical to SEQ ID NO: 86055

SEQ ID NO: 86068 - DNA, 201 bp, Homo sapiens; identical to SEQ ID NO: 86056

SEQ ID NO: 86069 - DNA, 201 bp, Homo sapiens; identical to SEQ ID NO: 86057

SEQ ID NO: 86070 - DNA, 201 bp, Homo sapiens; identical to SEQ ID NO: 86058

SEQ ID NO: 86071 - DNA, 195 bp, Homo sapiens
gccagacacaaaatgtccacaatagaaaatctgaccacagtatctaaacagttgcttatcagcccttggaactgccaaaaaagctattaaactgrtgttttccatggtgatggtctccaccaccctgttaggagccatgacattgttctgtccttgttgggcagagaaggtggtgatgctggtggtgggagggtg

SEQ ID NO: 86072 - DNA, 201 bp, Homo sapiens; identical to SEQ ID NO: 86059

SEQ ID NO: 86073 - DNA, 201 bp, Homo sapiens; identical to SEQ ID NO: 86061

SEQ ID NO: 86074 - DNA, 201 bp, Homo sapiens; identical to SEQ ID NO: 86062

SEQ ID NO: 86075 - DNA, 201 bp, Homo sapiens
tgaccacagtatctaaacagttgcttatcagcccttggaactgccaaaaaagctattaaactggtgttttccatggtgatggtctccaccaccctgttagragccatgacattgttctgtccttgttgggcagagaaggtggtgatgctggtggtgggagggtgtaggttgaaggtcttgggagggtgtttgtagaagaga

SEQ ID NO: 86076 - DNA, 201 bp, Homo sapiens
aatgatgtgactctctaccaagctttcaatggcctgaaaaataagaacagccagctgaaaactctcctggccattggaggctggaacttcgggactgcccrtttcactgccatggtttctactcctgagaaccgccagactttcatcacctcagtcatcaaattcctgcgccagtatgagtttgacgggctggactttgac

SEQ ID NO: 86077 - DNA, 201 bp, Homo sapiens
catcgaatggaatgatgtgactctctaccaagctttcaatggcctgaaaaataagaacagccagctgaaaactctcctggccattggaggctggaacttcrggactgcccctttcactgccatggtttctactcctgagaaccgccagactttcatcacctcagtcatcaaattcctgcgccagtatgagtttgacgggct

SEQ ID NO: 86078 - DNA, 201 bp, Homo sapiens
gacaaagcttattctcctcacaggtcttgtccttatactgaatttgcagctcggctctgcctaccagctgacatgctacttcaccaactgggcccagtacyggccaggcctggggcgcttcatgcctgacaacatcgacccctgcctctgtacccacctgatctacgcctttgctgggaggcagaacaacgagatcaccac

SEQ ID NO: 86079 - DNA, 163 bp, Homo sapiens
gccagacacaaaatgtccacaatagaaaatctgaccacagtatctaaacagttgcttatcagyccttggaactgccaaaaaagctattaaactggtgttttccatggtgatggtctccaccaccctgttaggagccatgacattgttctgtccttgttgggca

SEQ ID NO: 86080 - DNA, 201 bp, Homo sapiens; identical to SEQ ID NO: 86052

SEQ ID NO: 86081 - DNA, 201 bp, Homo sapiens
ttcaccaactgggcccagtaccggccaggcctggggcgcttcatgcctgacaacatcgacccctgcctctgtacccacctgatctacgcctttgctgggakgcagaacaacgagatcaccaccatcgaatggaatgatgtgactctctaccaagctttcaatggcctgaaaaataagaacagccagctgaaaactctcctg

SEQ ID NO: 86082 - DNA, 201 bp, Homo sapiens
ccttatactgaatttgcagctcggctctgcctaccagctgacatgctacttcaccaactgggcccagtaccggccaggcctggggcgcttcatgcctgacracatcgacccctgcctctgtacccacctgatctacgcctttgctgggaggcagaacaacgagatcaccaccatcgaatggaatgatgtgactctctacca

SEQ ID NO: 86083 - DNA, 201 bp, Homo sapiens; identical to SEQ ID NO: 86060

SEQ ID NO: 86084 - DNA, 201 bp, Homo sapiens
cctaccagctgacatgctacttcaccaactgggcccagtaccggccaggcctggggcgcttcatgcctgacaacatcgacccctgcctctgtacccacctsatctacgcctttgctgggaggcagaacaacgagatcaccaccatcgaatggaatgatgtgactctctaccaagctttcaatggcctgaaaaataagaaca

SEQ ID NO: 86085 - DNA, 201 bp, Homo sapiens
ctcagcttgtgagacaacacaggagccttctatagtatgttgatatgctagatctgtgccgttaataggcatcgtctctcagcctgagggaggctggattytgggttcctgtagtcacagggaggaaaagctttcttaaaaatggacatgtatgtgcgtgtgagtgtgtgtgtagatttatagtttttggtagtggcagga

SEQ ID NO: 86086 - DNA, 201 bp, Homo sapiens
gtatgttgatatgctagatctgtgccgttaataggcatcgtctctcagcctgagggaggctggattctgggttcctgtagtcacagggaggaaaagctttyttaaaaatggacatgtatgtgcgtgtgagtgtgtgtgtagatttatagtttttggtagtggcaggaataaaaaaaatccatcctacatcttccctaagca

SEQ ID NO: 86087 - DNA, 201 bp, Homo sapiens
gagcttaaaggtgtttcaattaagttagaaaactgacacaggctgttgagaattctttgccacttttcccaccccaaaacagcatggggcctgacatcttytgccctggtcccctttctcttgatgtggaaagtctgaatgcagtatttatagacttctaaggttttaaaatccagtatcaagaagaaaatcagaaatact

SEQ ID NO: 86088 - DNA, 201 bp, Homo sapiens
ggagagcttaaaggtgtttcaattaagttagaaaactgacacaggctgttgagaattctttgccacttttcccaccccaaaacagcatggggcctgacatyttctgccctggtcccctttctcttgatgtggaaagtctgaatgcagtatttatagacttctaaggttttaaaatccagtatcaagaagaaaatcagaaat

SEQ ID NO: 86089 - DNA, 201 bp, Homo sapiens
acaccataggggaaagtttggggatgaaggagagcttaaaggtgtttcaattaagttagaaaactgacacaggctgttgagaattctttgccacttttccmaccccaaaacagcatggggcctgacatcttctgccctggtcccctttctcttgatgtggaaagtctgaatgcagtatttatagacttctaaggttttaaa

SEQ ID NO: 86090 - DNA, 111 bp, Homo sapiens
ggagatttttwaaaaaaattatcgcgagaagagtcaagtaacgctgagagcctatcgcatgagggcgacagccggaaagcaggatggagccatagaagcaattctcgcgag

SEQ ID NO: 86091 - DNA, 201 bp, Homo sapiens
gtttggcttgcctgtgtaatgcccactcccttccccctggctccctagtgatgggacatatatgagagagaagtgtttttctatcatagacaccatagggraaagtttggggatgaaggagagcttaaaggtgtttcaattaagttagaaaactgacacaggctgttgagaattctttgccacttttcccaccccaaaaca

SEQ ID NO: 86092 - DNA, 201 bp, Homo sapiens
atcagaaatccattttctggctgaataaaaagtttggcttgcctgtgtaatgcccactcccttccccctggctccctagtgatgggacatatatgagagaraagtgtttttctatcatagacaccataggggaaagtttggggatgaaggagagcttaaaggtgtttcaattaagttagaaaactgacacaggctgttgag

SEQ ID NO: 86093 - DNA, 156 bp, Homo sapiens
ggagatttttaaaaaaaattatcgcgagaagagtcaagtaacgctgagagcctatygcatgagggcgacagccggaaagcaggatggagccatagaagcaattctcgcgagaagtagagttgcggttccctcgggagaggggcggaggctcagagg

SEQ ID NO: 86094 - DNA, 201 bp, Homo sapiens
tgccacttttcccaccccaaaacagcatggggcctgacatcttctgccctggtcccctttctcttgatgtggaaagtctgaatgcagtatttatagacttytaaggttttaaaatccagtatcaagaagaaaatcagaaatactggttggtgaaataaagagtttaggcattgttggcctgtcttttttgaagcatgtgtg

SEQ ID NO: 86095 - DNA, 192 bp, Homo sapiens
ggatcaattactgattatattgaaagtaaatataatcaattatgtacttttgagctttgcaggttcaatttaggtaaaaatcacattatgaaactgggaawgtctgaaggaatatgggcaaaatatttctcagtaaagcttccatgcttcacccttgacatgattacccttgagtaaaacatgggaatttgt

SEQ ID NO: 86096 - DNA, 201 bp, Homo sapiens
aaaaagtttggcttgcctgtgtaatgcccactcccttccccctggctccctagtgatgggacatatatgagagagaagtgtttttctatcatagacaccayaggggaaagtttggggatgaaggagagcttaaaggtgtttcaattaagttagaaaactgacacaggctgttgagaattctttgccacttttcccacccca

SEQ ID NO: 86097 - DNA, 201 bp, Homo sapiens
tggagccatagaagcaattctcgcgagaagtagagttgcggttccctcgggagaggggcggaggctcagaggtgcaccacgtggggtttgctgccggagckgagtctccggccggcgtccagtttgagtctaggttggagttggaaccgtggagatgcggaaggaaaccccaccccccctagtgcccccggcggcccggga

SEQ ID NO: 86098 - DNA, 111 bp, Homo sapiens; identical to SEQ ID NO: 86090

SEQ ID NO: 86099 - DNA, 201 bp, Homo sapiens
tttggacagcgtgagtaatggtcacactgaacacattagaatcagttgtgaaattgattttgtttcaaaaaaggataagcaagctgtagtctcaattttgrgttaattgaaatttctcaagaacttcatcagcagctcacatgatacagttttggaagagtaaacaaggtaagcagacaaccctgggaccccaaacacatt

SEQ ID NO: 86100 - DNA, 156 bp, Homo sapiens; identical to SEQ ID NO: 86093

SEQ ID NO: 86101 - DNA, 201 bp, Homo sapiens; identical to SEQ ID NO: 86097

SEQ ID NO: 86102 - DNA, 201 bp, Homo sapiens
agagactgtcacagccctggccattgtgggaaccctcaagttcaacccagagaccaactacctgacaggcaaggatggcaagaagttcaagctggaggctscggatgcagatgagcttccccaagcagagtttggcccagggcaggacacctaccagcacccccgcatgggtggtgccatcaacattgaaaatggcaaggc

SEQ ID NO: 86103 - DNA, 201 bp, Homo sapiens
tgggaaattcaaagaagatttcatcagtgcatttaactatgatggtactcctgctgtgagacaagaatggcagaatgactcccatgccctgacagttggamgagatcaagctcccaaggcgccgtctgctttcatgggtttggcctgccagggaagagctcagcaaatccagctgaaagaggtgatgaagtcagacctact

SEQ ID NO: 86104 - DNA, 201 bp, Homo sapiens
tccctctctggttggacctcacccaaagatgtgatcctgaaggtggcaggcatcctcaccatgaaaggtggcacaggtgcaatcgtggaataccacgggcytgttgtagactccatctcctgcactggcatggtgacagtctgcaacatgggcttagaaattgggacaaccacttccgtgttccattacaacctcaggatg

SEQ ID NO: 86105 - DNA, 201 bp, Homo sapiens
ctatgacctgctagagaagaacattaacattcctggggggcatctgcattggagttgggggtgccgagctgtggatgtcatgactgggatcccctgggagytgaagtgccccaaggtgattggcgtgaagctgatgggctccctctctggttggacctcacccaaagatgtgatcctgaaggtggcaggcatcctcaccat

SEQ ID NO: 86106 - DNA, 201 bp, Homo sapiens
gtggcacaggtgcaatcgtggaataccacgggcctgttgtagactccatctcctgcactggcatggtgacagtctgcaacatgggcttagaaattgggacmaccacttccgtgttccattacaacctcaggatgaagaagtacatgagcaagacctgccaggcagacattgccaatctagctgatgaattcaaagatcact

SEQ ID NO: 86107 - DNA, 201 bp, Homo sapiens
agagactgtcacagccctggccattgtgggaaccctcaagttcaacccagagaccaactacctgacaggcaaggatggcaagaagttcaagctggaggctscggatgcagatgagcttccccaagcagagtttggcccagggcaggacacctaccagcacccccgcatggggtaccactgaccacatctcagctgccggcc

SEQ ID NO: 86108 - DNA, 201 bp, Homo sapiens
aaccggcctctgaccctctcagagaagatcgtgtacagacacccggatgaccccaccagccaggaaattgagcggggcgggacgtacctgcagcagtggcyggacagcgtgaccatgcaggatggacggcccagatggccatgctgcagttcatcagcagcaggctcccaaggtgaccatgccatccaccatccactgtga

SEQ ID NO: 86109 - DNA, 201 bp, Homo sapiens; identical to SEQ ID NO: 86104

SEQ ID NO: 86110 - DNA, 201 bp, Homo sapiens
gcactgactcccacacccccaatggtggcagcctggggggcatctgcattggagttgggggtgccgagctgtggatgtcatgactgggatcccctgggagytgaagtgccccaaggtgattggcgtgaagctgatgggctccctctctggttggacctcacccaaagatgtgatcctgaaggtggcaggcatcctcaccat

SEQ ID NO: 86111 - DNA, 201 bp, Homo sapiens
accggcctctgaccctctcagagaagatcgtgtacagacacccggatgaccccaccagccaggaaattgagcggggcgggacgtacctgcagcagtggccrgacagcgtgaccatgcaggatggacggcccagatggccatgctgcagttcatcagcagcaggctcccaaggtgaccatgccatccaccatccactgtgac

SEQ ID NO: 86112 - DNA, 201 bp, Homo sapiens; identical to SEQ ID NO: 86106

SEQ ID NO: 86113 - DNA, 201 bp, Homo sapiens
agtcaacgcctgcctcctctcgagcgtcctcagcgcagccgccgcccgcggagccagcacgaacgagcccagcaccggccggatggagcgtccgcaacccsacagcatgccccaggatttgtcagaggccctgaaggaggccaccaaggaggtgcacacccaggcagagaatgctgagttcatgaggaactttcagaaggg

SEQ ID NO: 86114 - DNA, 201 bp, Homo sapiens
gcaccagggcttcgccagcgggccagcaacaaagtgcaagattctgcccccgtggagactcccagagggaagcccccactcaacacccgctcccaggctcygcttctccgatgggtccttacactcagctttctggtggcgacagttgctgtagggctttatgccatgtgaatgcaggcatgctggctcccagggccatga

SEQ ID NO: 86115 - DNA, 201 bp, Homo sapiens
ccttccccaacattgccagtgccaccaagttcaagcagctctaccgctcccgcatgaactccctggagatgactcccgcagtcaggcagagggtgatagargaggccaagactgcgttcctgctcaacatccagctctttgaggagttgcaggagctgctgacccatgacaccaaggaccagagcccctcacgggcaccag

SEQ ID NO: 86116 - DNA, 201 bp, Homo sapiens; identical to SEQ ID NO: 86113

SEQ ID NO: 86117 - DNA, 201 bp, Homo sapiens; identical to SEQ ID NO: 86114

SEQ ID NO: 86118 - DNA, 201 bp, Homo sapiens; identical to SEQ ID NO: 86115

SEQ ID NO: 86119 - DNA, 201 bp, Homo sapiens
ttatcttgatgaagcagatgtattttacctaaatcccttaaactggttacatagagagtttcatgatgatgcatcattgcctactcacttgatcaccttcrgcattttggaagaggaaataagcgctttcctaatttcaagcaattataaaagaactgctgttttcttccacactcacttgccagagggtcgaattggaag

SEQ ID NO: 86120 - DNA, 201 bp, Homo sapiens
catcttttagggaaagatagtgttcagttgctgatttggattcctagacttgcccaagcacttctgtctgctgtagcagatgtgagactttactcattaaygaagcaactagaaaatcaggaagtggcaagatgggtgtttttttgccagttgtgctcctggttcacatggtattgctgtaccagaacccttacaaacacc

SEQ ID NO: 86121 - DNA, 201 bp, Homo sapiens
aaaagaactgctgttttcttccacactcacttgccagagggtcgaattggaagtcacatatatgtctatgaacggaagttaaaagggaaattcaacatgamgatgaaattctgaactttcctagataaattaacattgctgggtggaaatattcagatgctgcttaaatacttcggtaaacactgggtaagattcatggaa

SEQ ID NO: 86122 - DNA, 201 bp, Homo sapiens
gcgaaagagaaagtctaccttgtacttcaacacccaggagaagagcgccaggcgccgcggggatcttcttggagaaaatatttatctgctcttgtttaccwtagctttacgaatattaaactgctttttagtgcagacaagttttgttccagatgaatactggcagtctcttgaagtttcacatcacatggttttcaatta

SEQ ID NO: 86123 - DNA, 201 bp, Homo sapiens
acttcggtaaacactgggtaagattcatggaacttagaaaaaagctgtatgaactgctttaccaaatatcactactgaggaaatgtataaaataccacatrgtataaaattacatgttaatacaatgccagattttaaataaagacctttagttttcctcatggtgtagttttattgtttcttccacgatattcagatgtg

SEQ ID NO: 86124 - DNA, 201 bp, Homo sapiens
ccttaatctttgcaagcatttacaagattcttcatcttttagggaaagatagtgttcagttgctgatttggattcctagacttgcccaagcacttctgtcygctgtagcagatgtgagactttactcattaatgaagcaactagaaaatcaggaagtggcaagatgggtgtttttttgccagttgtgctcctggttcacat

SEQ ID NO: 86125 - DNA, 201 bp, Homo sapiens
tttacctaaatcccttaaactggttacatagagagtttcatgatgatgcatcattgcctactcacttgatcaccttcagcattttggaagaggaaataagygctttcctaatttcaagcaattataaaagaactgctgttttcttccacactcacttgccagagggtcgaattggaagtcacatatatgtctatgaacgga

SEQ ID NO: 86126 - DNA, 201 bp, Homo sapiens
tttgttactttgagtttgtctctgatgattgatcgtattttttttggccaatggactctggttcaatttaattttttgaaatttaacgtgctgcagaactkgggaacattttatggttctcatccatggcactggtacttcagtcaaggatttccagttatcttgggtactcacttacccttctttattcatggctgctat

SEQ ID NO: 86127 - DNA, 201 bp, Homo sapiens
aacctaacagatgctgagaatggcaacattcaactgcaagcacaacgtgcatttaccaccaggcggcagatatccgaggaaacagaaagtgttgacaaccragagtcttccgagaactgggaaattataagagaagatgaagccaccatgtatagcagccaggccttcccatcacctccaccgtcaagtaacttggatgtt

SEQ ID NO: 86128 - DNA, 201 bp, Homo sapiens
accaggcggcagatatccgaggaaacagaaagtgttgacaaccaagagtcttccgagaactgggaaattataagagaagatgaagccaccatgtatagcarccaggccttcccatcacctccaccgtcaagtaacttggatgttccaactcatcttgcagaagaattgaatgccagactcaccatttttggaaattcagcc

SEQ ID NO: 86129 - DNA, 201 bp, Homo sapiens
aaatgtatgtttacagggtttatcatgtttacagattaagctaatttctgtagtcgcatttttatatttttagtatcactctagtaaaaaaaccaaataakttgtttaaaataaccaaagagttgttataatgcataatttgtattaaatttattactatttcttatgccttttaaaatactgtttactatgaagacaatg

SEQ ID NO: 86130 - DNA, 201 bp, Homo sapiens
agtatttggcttttgttaatatgcagttttactaaacagatggttcataagacatgtgaagcaaattcatatttgcaatgggtaaaaagtattaaagcctktctcttgcctgcatatcctattgaccattggtatagtcatcactttttcatattttagtgtagttagaagaattccttcttcaaacattaaagatccaca

SEQ ID NO: 86131 - DNA, 201 bp, Homo sapiens
ttctgtgactcatagaacatgatgttaaatgagaccagactcaactgccaccagtccccagctgcagaccttcatccccttcatctcccactaggggctcrtggtctggaagaaacatgtatcaagcaacacagccccttatcccagatagaaaagtgtctcaaatgcattctactgcgggacagtcagtaggatcatttt

SEQ ID NO: 86132 - DNA, 201 bp, Homo sapiens
tgggtttttatttataatgctgaagttattccatataagtatcaagttaaacacaattcattttgattataaactatttgactttttaaaatcttctgacmcagtaaatatatatatcaagattgatgtatcaaaatttattgcacactttaaagtgtaaaatcattttttaaaatcttgaatccacaaataaagttctat

SEQ ID NO: 86133 - DNA, 180 bp, Homo sapiens
ttaaacacaattcattttgattataaactatttgactttttaaaatcttctgacacagtaaatatatatatcaagattgatgtatcaaaatttattgcacmctttaaagtgtaaaatcattttttaaaatcttgaatccacaaataaagttctattctgattttaaaaaacaaaacaaaa

SEQ ID NO: 86134 - DNA, 201 bp, Homo sapiens
agtgttatacaatcagaaggtgctttgtgctgaccgtcagattgtgtcaagtcaggtgtgcaaattgaccacactcccaaagaatcatttaaaagtaaagtgacttctaagagacaaggaagtaggaacatttctgatattaaatatataaataatatggatacacatgtgtatatctgtatatggatcttaccatcataa

SEQ ID NO: 86135 - DNA, 201 bp, Homo sapiens
acgaggaaaattcacgaattgtgagagtaagagttatagccggaataggccttgccaagaaggatatattgggagctagtgatccttacgtgagagtgacrttatatgacccaatgaatggagttcttacaagtgtgcaaacaaaaaccattaaaaagagtttgaatccaaagtggaatgaagaaatattattcagagttc

SEQ ID NO: 86136 - DNA, 201 bp, Homo sapiens
aagtgttatacaatcagaaggtgctttgtgctgaccgtcagattgtgtcaagtcaggtgtgcaaattgaccacactcccaaagaatcatttaaaagtaaagtgacttctaagagacaaggaagtaggaacatttctgatattaaatatataaataatatggatacacatgtgtatatctgtatatggatcttaccatcata

SEQ ID NO: 86137 - DNA, 201 bp, Homo sapiens
aaagtgttatacaatcagaaggtgctttgtgctgaccgtcagattgtgtcaagtcaggtgtgcaaattgaccacactcccaaagaatcatttaaaagtaaagtgacttctaagagacaaggaagtaggaacatttctgatattaaatatataaataatatggatacacatgtgtatatctgtatatggatcttaccatcat

SEQ ID NO: 86138 - DNA, 201 bp, Homo sapiens
atcttgaagaaaatcatataaaaagcatttgaagaaatagtacgacaacttatttttaatcacttttaaataatgtgttgcatttacacagttgtttcatkctgtctttagagttaggtgcctgcctaaagccaggcaccaccacacctggctttagagttcacacaataggatataagtcctgtatgacttaaatagtga

SEQ ID NO: 86139 - DNA, 201 bp, Homo sapiens
taaagtgttatacaatcagaaggtgctttgtgctgaccgtcagattgtgtcaagtcaggtgtgcaaattgaccacactcccaaagaatcatttaaaagtaaagtgacttctaagagacaaggaagtaggaacatttctgatattaaatatataaataatatggatacacatgtgtatatctgtatatggatcttaccatca

SEQ ID NO: 86140 - DNA, 201 bp, Homo sapiens
ttgaagaagcagaatgacattccaaacaaatttgaaatgaaacttcgccgagcaactgttcttgaagactcttaccggagaattatgggtgtcaagagagmagacttcctgaaggctcgactgtggattgagtttgatggtgaaaagggattggattatggaggagttgccagagaatggttcttcctgatctcaaaggaa

SEQ ID NO: 86141 - DNA, 201 bp, Homo sapiens
gtaaagtgttatacaatcagaaggtgctttgtgctgaccgtcagattgtgtcaagtcaggtgtgcaaattgaccacactcccaaagaatcatttaaaagtaaagtgacttctaagagacaaggaagtaggaacatttctgatattaaatatataaataatatggatacacatgtgtatatctgtatatggatcttaccatc

SEQ ID NO: 86142 - DNA, 201 bp, Homo sapiens
tgctctggggtaagagttgtcagcttcagagaagctgagtcctgatcctcaaggaacttgcaaatgtgtctatgaatttgtaaaacaatcaaaagtaggcrtaagcagaataaggcaaaagggaaagtgttctaggttccagcacacctgcaaagataaagtgtgccaagactgtatttatatttcatacttatattgttt

SEQ ID NO: 86143 - DNA, 201 bp, Homo sapiens; identical to SEQ ID NO: 86135

SEQ ID NO: 86144 - DNA, 201 bp, Homo sapiens; identical to SEQ ID NO: 86134

SEQ ID NO: 86145 - DNA, 201 bp, Homo sapiens; identical to SEQ ID NO: 86136

SEQ ID NO: 86146 - DNA, 201 bp, Homo sapiens; identical to SEQ ID NO: 86127

SEQ ID NO: 86147 - DNA, 201 bp, Homo sapiens; identical to SEQ ID NO: 86137

SEQ ID NO: 86148 - DNA, 201 bp, Homo sapiens; identical to SEQ ID NO: 86140

SEQ ID NO: 86149 - DNA, 201 bp, Homo sapiens; identical to SEQ ID NO: 86139

SEQ ID NO: 86150 - DNA, 201 bp, Homo sapiens; identical to SEQ ID NO: 86138

SEQ ID NO: 86151 - DNA, 201 bp, Homo sapiens; identical to SEQ ID NO: 86128

SEQ ID NO: 86152 - DNA, 201 bp, Homo sapiens; identical to SEQ ID NO: 86141

SEQ ID NO: 86153 - DNA, 201 bp, Homo sapiens; identical to SEQ ID NO: 86129

SEQ ID NO: 86154 - DNA, 201 bp, Homo sapiens; identical to SEQ ID NO: 86130

SEQ ID NO: 86155 - DNA, 201 bp, Homo sapiens; identical to SEQ ID NO: 86131

SEQ ID NO: 86156 - DNA, 201 bp, Homo sapiens; identical to SEQ ID NO: 86142

SEQ ID NO: 86157 - DNA, 201 bp, Homo sapiens
atctgtgccaggaaaattgttaaagagacacaaggaatgaactattggcaaggctggaagaaacattgtgagggcagagacctgtccgagtggaaaaaagrctgtgaggtttcctaaactggaactggacccaggatgctttgcagcaacgccctaggatttgcagtgaatgtccaaatgcctgtgtcatcttgtcccgtt

SEQ ID NO: 86158 - DNA, 195 bp, Homo sapiens
tcttgagctaggaaaggattactcgcgcctcgttagaatcagacatggcttcaggggatgcaggacgctcccctgagctgcctgtcaccgactargtggagcagtgtttcttccgcagactcaactgagaagtcagcctctggggcaggcaccaggaatctgccttttcagttctgtctccggcaggctttgagg

SEQ ID NO: 86159 - DNA, 177 bp, Homo sapiens
tttcctaaactggaactggacccaggatgctttgcagcaacgccctaggatttgcagtgaatgtccaaatgcctgtgtcatcttgtcccgtttcctcccartattccttctcaaacttggagagggaaaattaagctatacttttaagaaaataaatatttccatttaaatgtcttc

SEQ ID NO: 86160 - DNA, 188 bp, Homo sapiens
aggctgtgaggtttcctaaactggaactggacccaggatgctttgcagcaacgccctaggatttgcagtgaatgtccaaatgcctgtgtcatcttgtcccrtttcctcccaatattccttctcaaacttggagagggaaaattaagctatacttttaagaaaataaatatttccatttaaatgtcttc

SEQ ID NO: 86161 - DNA, 201 bp, Homo sapiens
acgcctcctggcaaacctcaaggagatggaggaaccctttgaaaaacagcagattggctcaagtgcgatgccatataagcggaatcccatgcgttcagaaygttgctgcagtcttgcccgccacctgatgacccttgtcatggacccgctacagacagcatctgtccagtggtttgaacgcacactggatgatagtgccaa

SEQ ID NO: 86162 - DNA, 201 bp, Homo sapiens
tttggccgaggcatttcttaccgcagatactatattgaatacgctgcagaacatttctgaaggattggtcgtgtaccccaaagtaattgaacggcgcattyggcaagagctgcctttcatggccacagagaacatcatcatggccatggtcaaagctggaggtagccgccaggtgcagagattcttagaagaggaggtgta

SEQ ID NO: 86163 - DNA, 201 bp, Homo sapiens
ttcgcccgacagctaccgctcacctcttgcctcccgctatgccagcccggagatgtgcttcgtgtttagcgacaggtataaattccggacatggcggcagytgtggctgtggctggcggaggccgagcagacattgggtttgcctatcacagatgaacaaatccaggagatgaaatcaaacctggagaacatcgacttcaa

SEQ ID NO: 86164 - DNA, 201 bp, Homo sapiens
gaaaagtggatattgaagtactgtctgtgctggctagcttgggggcatcagtgcacaagatttgcaccgacatacgcctcctggcaaacctcaaggagatkgaggaaccctttgaaaaacagcagattggctcaagtgcgatgccatataagcggaatcccatgcgttcagaacgttgctgcagtcttgcccgccacctga

SEQ ID NO: 86165 - DNA, 166 bp, Homo sapiens
ccaggtttccgcttccgctcttccctggtccagtccaccctggcggggtcgcagggttgggatggyggctggaggcgatcatggttcgcccgacagctaccgctcacctcttgcctcccgctatgccagcccggagatgtgcttcgtgtttagcgacaggtataaa

SEQ ID NO: 86166 - DNA, 201 bp, Homo sapiens
atggcggcagctgtggctgtggctggcggaggccgagcagacattgggtttgcctatcacagatgaacaaatccaggagatgaaatcaaacctggagaacrtcgacttcaagatggcagctgaggaagagaaacgtttacgacatgatgtgatggctcacgtgcacacatttggccactgctgtccaaaagctgcaggcat

SEQ ID NO: 86167 - DNA, 169 bp, Homo sapiens
ccaggtttccgcttccgctcttccctggtccagtccaccctggcggggtcgcagggttgggatggcggytggaggcgatcatggttcgcccgacagctaccgctcacctcttgcctcccgctatgccagcccggagatgtgcttcgtgtttagcgacaggtataaattc

SEQ ID NO: 86168 - DNA, 201 bp, Homo sapiens
ccagcctgcacagctgaccacagttgggaaacgttgctgtctttggattcaggatctttgcatggatctccagaacttgaagcgtgtccgagatgacctgygcttccggggagtaaagggtaccactggcactcaggccagtttcctgcagctctttgagggagatgaccataaggtagagcagcttgacaagatggtgac

SEQ ID NO: 86169 - DNA, 201 bp, Homo sapiens
ttcacacatttccagcctgcacagctgaccacagttgggaaacgttgctgtctttggattcaggatctttgcatggatctccagaacttgaagcgtgtccragatgacctgcgcttccggggagtaaagggtaccactggcactcaggccagtttcctgcagctctttgagggagatgaccataaggtagagcagcttgac

SEQ ID NO: 86170 - DNA, 201 bp, Homo sapiens
agagaaacgtttacgacatgatgtgatggctcacgtgcacacatttggccactgctgtccaaaagctgcaggcattattcaccttggtgctacttcttgcyatgttggagacaatactgacttgattattcttagaaatgcacttgacctgcttttgccaaagcttgccagagtgatctctcggcttgccgactttgctaa

SEQ ID NO: 86171 - DNA, 201 bp, Homo sapiens
ccttggtgctacttcttgctatgttggagacaatactgacttgattattcttagaaatgcacttgacctgcttttgccaaagcttgccagagtgatctctyggcttgccgactttgctaaggaacgagccagtctacccacattaggtttcacacatttccagcctgcacagctgaccacagttgggaaacgttgctgtct

SEQ ID NO: 86172 - DNA, 201 bp, Homo sapiens
agctttcatcatcacagggcagacatatacacgaaaagtggatattgaagtactgtctgtgctggctagcttgggggcatcagtgcacaagatttgcaccracatacgcctcctggcaaacctcaaggagatggaggaaccctttgaaaaacagcagattggctcaagtgcgatgccatataagcggaatcccatgcgttc

SEQ ID NO: 86173 - DNA, 201 bp, Homo sapiens
ttgctgcagtcttgcccgccacctgatgacccttgtcatggacccgctacagacagcatctgtccagtggtttgaacgcacactggatgatagtgccaacygacggatctgtttggccgaggcatttcttaccgcagatactatattgaatacgctgcagaacatttctgaaggattggtcgtgtaccccaaagtaattga

SEQ ID NO: 86174 - DNA, 201 bp, Homo sapiens
atcaaacctggagaacatcgacttcaagatggcagctgaggaagagaaacgtttacgacatgatgtgatggctcacgtgcacacatttggccactgctgtscaaaagctgcaggcattattcaccttggtgctacttcttgctatgttggagacaatactgacttgattattcttagaaatgcacttgacctgcttttgcc

SEQ ID NO: 86175 - DNA, 201 bp, Homo sapiens
tggtcgtgtaccccaaagtaattgaacggcgcattcggcaagagctgcctttcatggccacagagaacatcatcatggccatggtcaaagctggaggtagmcgccaggtgcagagattcttagaagaggaggtgtatcccctgttaaaaccatatgaaagcgtgatgaaggtgaaagcagaattatgtctgtagagttgga

SEQ ID NO: 86176 - DNA, 201 bp, Homo sapiens
ttgcaccgacatacgcctcctggcaaacctcaaggagatggaggaaccctttgaaaaacagcagattggctcaagtgcgatgccatataagcggaatcccrtgcgttcagaacgttgctgcagtcttgcccgccacctgatgacccttgtcatggacccgctacagacagcatctgtccagtggtttgaacgcacactgga

SEQ ID NO: 86177 - DNA, 201 bp, Homo sapiens
accctggcggggtcgcagggttgggatggcggctggaggcgatcatggttcgcccgacagctaccgctcacctcttgcctcccgctatgccagcccggagwtgtgcttcgtgtttagcgacaggtataaattccggacatggcggcagctgtggctgtggctggcggaggccgagcagacattgggtttgcctatcacaga

SEQ ID NO: 86178 - DNA, 201 bp, Homo sapiens
tatgttggagacaatactgacttgattattcttagaaatgcacttgacctgcttttgccaaagcttgccagagtgatctctcggcttgccgactttgctawggaacgagccagtctacccacattaggtttcacacatttccagcctgcacagctgaccacagttgggaaacgttgctgtctttggattcaggatctttgc

SEQ ID NO: 86179 - DNA, 201 bp, Homo sapiens; identical to SEQ ID NO: 86161

SEQ ID NO: 86180 - DNA, 201 bp, Homo sapiens; identical to SEQ ID NO: 86163

SEQ ID NO: 86181 - DNA, 201 bp, Homo sapiens; identical to SEQ ID NO: 86164

SEQ ID NO: 86182 - DNA, 166 bp, Homo sapiens; identical to SEQ ID NO: 86165

SEQ ID NO: 86183 - DNA, 201 bp, Homo sapiens; identical to SEQ ID NO: 86166

SEQ ID NO: 86184 - DNA, 169 bp, Homo sapiens; identical to SEQ ID NO: 86167

SEQ ID NO: 86185 - DNA, 201 bp, Homo sapiens; identical to SEQ ID NO: 86169

SEQ ID NO: 86186 - DNA, 201 bp, Homo sapiens; identical to SEQ ID NO: 86170

SEQ ID NO: 86187 - DNA, 201 bp, Homo sapiens; identical to SEQ ID NO: 86171

SEQ ID NO: 86188 - DNA, 201 bp, Homo sapiens
ggaggtagccgccaggattgccatgagaaaatcagagtgctttctcagcaggcagcttctgtggttaagcaggaagggggtgacaatgacctcatagagcrtatccaggttgatgcctacttcagtcccattcactcccagttggatcatttactggatccttcttctttcactggtcgtgcctcccagcaggtgcagaga

SEQ ID NO: 86189 - DNA, 201 bp, Homo sapiens; identical to SEQ ID NO: 86172

SEQ ID NO: 86190 - DNA, 201 bp, Homo sapiens; identical to SEQ ID NO: 86173

SEQ ID NO: 86191 - DNA, 201 bp, Homo sapiens
tggtcgtgtaccccaaagtaattgaacggcgcattcggcaagagctgcctttcatggccacagagaacatcatcatggccatggtcaaagctggaggtagmcgccaggattgccatgagaaaatcagagtgctttctcagcaggcagcttctgtggttaagcaggaagggggtgacaatgacctcatagagcgtatccagg

SEQ ID NO: 86192 - DNA, 201 bp, Homo sapiens
gaagggggtgacaatgacctcatagagcgtatccaggttgatgcctacttcagtcccattcactcccagttggatcatttactggatccttcttctttcastggtcgtgcctcccagcaggtgcagagattcttagaagaggaggtgtatcccctgttaaaaccatatgaaagcgtgatgaaggtgaaagcagaattatgt

SEQ ID NO: 86193 - DNA, 201 bp, Homo sapiens; identical to SEQ ID NO: 86176

SEQ ID NO: 86194 - DNA, 201 bp, Homo sapiens; identical to SEQ ID NO: 86178

SEQ ID NO: 86195 - DNA, 201 bp, Homo sapiens
tttggccgaggcatttcttaccgcagatactatattgaatacgctgcagaacatttctgaaggattggtcgtgtaccccaaagtaattgaacggcgcattyggcaagagctgcctttcatggccacagagaacatcatcatggccatggtcaaagctggaggtagccgccaggattgccatgagaaaatcagagtgctttc

SEQ ID NO: 86196 - DNA, 201 bp, Homo sapiens; identical to SEQ ID NO: 86168

SEQ ID NO: 86197 - DNA, 201 bp, Homo sapiens
agtgctttctcagcaggcagcttctgtggttaagcaggaagggggtgacaatgacctcatagagcgtatccaggttgatgcctacttcagtcccattcacycccagttggatcatttactggatccttcttctttcactggtcgtgcctcccagcaggtgcagagattcttagaagaggaggtgtatcccctgttaaaacc

SEQ ID NO: 86198 - DNA, 201 bp, Homo sapiens
ccaggattgccatgagaaaatcagagtgctttctcagcaggcagcttctgtggttaagcaggaagggggtgacaatgacctcatagagcgtatccaggttratgcctacttcagtcccattcactcccagttggatcatttactggatccttcttctttcactggtcgtgcctcccagcaggtgcagagattcttagaaga

SEQ ID NO: 86199 - DNA, 201 bp, Homo sapiens; identical to SEQ ID NO: 86174

SEQ ID NO: 86200 - DNA, 201 bp, Homo sapiens
catggtcaaagctggaggtagccgccaggattgccatgagaaaatcagagtgctttctcagcaggcagcttctgtggttaagcaggaagggggtgacaatkacctcatagagcgtatccaggttgatgcctacttcagtcccattcactcccagttggatcatttactggatccttcttctttcactggtcgtgcctccca

SEQ ID NO: 86201 - DNA, 201 bp, Homo sapiens; identical to SEQ ID NO: 86177

SEQ ID NO: 86202 - DNA, 201 bp, Homo sapiens; identical to SEQ ID NO: 86161

SEQ ID NO: 86203 - DNA, 201 bp, Homo sapiens; identical to SEQ ID NO: 86162

SEQ ID NO: 86204 - DNA, 201 bp, Homo sapiens; identical to SEQ ID NO: 86163

SEQ ID NO: 86205 - DNA, 201 bp, Homo sapiens; identical to SEQ ID NO: 86164

SEQ ID NO: 86206 - DNA, 166 bp, Homo sapiens; identical to SEQ ID NO: 86165

SEQ ID NO: 86207 - DNA, 201 bp, Homo sapiens; identical to SEQ ID NO: 86166

SEQ ID NO: 86208 - DNA, 169 bp, Homo sapiens; identical to SEQ ID NO: 86167

SEQ ID NO: 86209 - DNA, 201 bp, Homo sapiens; identical to SEQ ID NO: 86168

SEQ ID NO: 86210 - DNA, 201 bp, Homo sapiens; identical to SEQ ID NO: 86169

SEQ ID NO: 86211 - DNA, 201 bp, Homo sapiens
agagaaacgtttacgacatgatgtgatggctcacgtgcacacatttggccactgctgtccaaaagctgcaggcattattcaccttggtgctacttcttgcyatgttggagacaatactcttgccagagtgatctctcggcttgccgactttgctaaggaacgagccagtctacccacattaggtttcacacatttccagcc

SEQ ID NO: 86212 - DNA, 201 bp, Homo sapiens
gcacacatttggccactgctgtccaaaagctgcaggcattattcaccttggtgctacttcttgctatgttggagacaatactcttgccagagtgatctctyggcttgccgactttgctaaggaacgagccagtctacccacattaggtttcacacatttccagcctgcacagctgaccacagttgggaaacgttgctgtct

SEQ ID NO: 86213 - DNA, 201 bp, Homo sapiens; identical to SEQ ID NO: 86172

SEQ ID NO: 86214 - DNA, 201 bp, Homo sapiens; identical to SEQ ID NO: 86173

SEQ ID NO: 86215 - DNA, 201 bp, Homo sapiens
atcaaacctggagaacatcgacttcaagatggcagctgaggaagagaaacgtttacgacatgatgtgatggctcacgtgcacacatttggccactgctgtscaaaagctgcaggcattattcaccttggtgctacttcttgctatgttggagacaatactcttgccagagtgatctctcggcttgccgactttgctaagga

SEQ ID NO: 86216 - DNA, 201 bp, Homo sapiens; identical to SEQ ID NO: 86175

SEQ ID NO: 86217 - DNA, 201 bp, Homo sapiens; identical to SEQ ID NO: 86176

SEQ ID NO: 86218 - DNA, 201 bp, Homo sapiens; identical to SEQ ID NO: 86177

SEQ ID NO: 86219 - DNA, 201 bp, Homo sapiens
tgtccaaaagctgcaggcattattcaccttggtgctacttcttgctatgttggagacaatactcttgccagagtgatctctcggcttgccgactttgctawggaacgagccagtctacccacattaggtttcacacatttccagcctgcacagctgaccacagttgggaaacgttgctgtctttggattcaggatctttgc

SEQ ID NO: 86220 - DNA, 201 bp, Homo sapiens
aggcagcagaggaagccctacccaggattgttgaactgatgggcagggaactgaattgggatgattataagaagcaggaacaacttgaaacagccaggaaktttctatattatgaaatgggctataaatctcgatcagaacagttaacagatcgctctgaaattagcctactgccttcagacattgacaggtataagaaga

SEQ ID NO: 86221 - DNA, 201 bp, Homo sapiens
gccattgctctgactgctgccaggtatggggctgccacagccaattacatggaggtagtgagcttgctcaagaagacagacccccagacagggaaagtgcrtgtgagcggcgcacggtgcaaggatgtcctcacagggcaggaatttgacgtgagagccaaatgtgttatcaatgccacgggacctttcacggactctgtg

SEQ ID NO: 86222 - DNA, 201 bp, Homo sapiens
tcatgttgttgatatcagtgagagtggccttattactatagcaggtggaaagtggacaacttatcggtctatggcagaagataccataaatgctgctgtcmaaactcataatttaaaagcaggaccaagtagaacagttgggcttttccttcaagggggtaaagattggagccccacactctacattaggcttgtgcagga

SEQ ID NO: 86223 - DNA, 201 bp, Homo sapiens
cagagatgactgaaaccactctgaaataatgaatgtggatagctgccttttttaacactagaaaacattccaaaactttaaggtgttggtgtatttgccasctttatttgctgtactttatttgtatttgccattcagtctagcttttaagtatatttttttctttttctcattttcaatgcacattagttttgcatctgt

SEQ ID NO: 86224 - DNA, 201 bp, Homo sapiens
caggtggaaagtggacaacttatcggtctatggcagaagataccataaatgctgctgtcaaaactcataatttaaaagcaggaccaagtagaacagttggrcttttccttcaagggggtaaagattggagccccacactctacattaggcttgtgcaggattatggacttgaaagcgaggtggcacagcatcttgccgcca

SEQ ID NO: 86225 - DNA, 201 bp, Homo sapiens
gaaatgggctataaatctcgatcagaacagttaacagatcgctctgaaattagcctactgccttcagacattgacaggtataagaagagatttcataagtytgatgcagaccagaaaggctttattaccattgttgatgttcagcgtgtattagagagtatcaatgtccaaatggatgaaaatacactccatgaaattcta

SEQ ID NO: 86226 - DNA, 201 bp, Homo sapiens
aacataatattttggcaaaaattgaaaaaagctggagacattttgtgacatgcatacagatagcatgtgttattaaaaagagttgcctattgaaatgatcrtgtttctggagaaattaagcttatagacagcatgtgttattaaaaagagttacctattgaaatgatagtgtttctggagatttctcagccccatcttcct

SEQ ID NO: 86227 - DNA, 201 bp, Homo sapiens
cagtgctagagtggatatacacaccgcatgttttcatatgtggcacttttatgtatcatgttgggttattgttctagactggactgttaaatactatgttygaggctgggttgtcatttttataactgtcttggtgttttatggccattatttattacttttgatacacagaatgagctgcatgcatttatagagcaataa

SEQ ID NO: 86228 - DNA, 201 bp, Homo sapiens; identical to SEQ ID NO: 86221

SEQ ID NO: 86229 - DNA, 201 bp, Homo sapiens; identical to SEQ ID NO: 86226

SEQ ID NO: 86230 - DNA, 201 bp, Homo sapiens
tttcaaaatatgtagcttcctcttttgtacaacaaaaaactcattctcacttttactaaatatactgtaggagtcatcattgatgttatttttctcttatrtatctgtaaagatttttggcatatgaatgtaatattaaagtcaatgatgctataacttgcgatgtttgcatcatgtcaacctttttgaaggagtgaaaaa

SEQ ID NO: 86231 - DNA, 201 bp, Homo sapiens; identical to SEQ ID NO: 86220

SEQ ID NO: 86232 - DNA, 201 bp, Homo sapiens
atctgcttttactttaaatctgctaatttctaaaatgtagagtccttcaccaatcccagagactcaatttggaaatgaactgatttcaagccgttactgtsaataaagcaccccagcattttgtataagctcttaattaaacctgtacagcttctttacctgatttaagaaagggagacaagcaataggggggaataagct

SEQ ID NO: 86233 - DNA, 201 bp, Homo sapiens; identical to SEQ ID NO: 86223

SEQ ID NO: 86234 - DNA, 201 bp, Homo sapiens
cttaaagtctttccccttctgtactccatggaaatattctcagtaaaccaaaaacaaaaatggaaaaataatcaccaacccccatcccgacacacacacasagtccaaagcaaaagtcagtgtgtattgaatttaacaagtaatgcagtttgggatgcttttgctacattttggtggcattttaactagttatctgaatat

SEQ ID NO: 86235 - DNA, 201 bp, Homo sapiens; identical to SEQ ID NO: 86222

SEQ ID NO: 86236 - DNA, 201 bp, Homo sapiens; identical to SEQ ID NO: 86225

SEQ ID NO: 86237 - DNA, 201 bp, Homo sapiens; identical to SEQ ID NO: 86224

SEQ ID NO: 86238 - DNA, 201 bp, Homo sapiens
aaaatggtctatttgctagcattttgatgttacttgcagtcagataactttgattactgttgaagtttaaaaaaagtttgaaaatatttttacaaactgtktttttgatgacacaaaagtgaaatatctacagagatagatgtaattttataagactgccagaattatttgtattaatttgttgctgtagcctttagggca

SEQ ID NO: 86239 - DNA, 201 bp, Homo sapiens; identical to SEQ ID NO: 86227

SEQ ID NO: 86240 - DNA, 201 bp, Homo sapiens; identical to SEQ ID NO: 86221

SEQ ID NO: 86241 - DNA, 201 bp, Homo sapiens; identical to SEQ ID NO: 86226

SEQ ID NO: 86242 - DNA, 201 bp, Homo sapiens; identical to SEQ ID NO: 86230

SEQ ID NO: 86243 - DNA, 201 bp, Homo sapiens; identical to SEQ ID NO: 86220

SEQ ID NO: 86244 - DNA, 201 bp, Homo sapiens; identical to SEQ ID NO: 86232

SEQ ID NO: 86245 - DNA, 201 bp, Homo sapiens; identical to SEQ ID NO: 86223

SEQ ID NO: 86246 - DNA, 201 bp, Homo sapiens; identical to SEQ ID NO: 86234

SEQ ID NO: 86247 - DNA, 201 bp, Homo sapiens; identical to SEQ ID NO: 86222

SEQ ID NO: 86248 - DNA, 201 bp, Homo sapiens; identical to SEQ ID NO: 86225

SEQ ID NO: 86249 - DNA, 201 bp, Homo sapiens; identical to SEQ ID NO: 86224

SEQ ID NO: 86250 - DNA, 201 bp, Homo sapiens; identical to SEQ ID NO: 86238

SEQ ID NO: 86251 - DNA, 201 bp, Homo sapiens; identical to SEQ ID NO: 86227

SEQ ID NO: 86252 - DNA, 201 bp, Homo sapiens; identical to SEQ ID NO: 86221

SEQ ID NO: 86253 - DNA, 201 bp, Homo sapiens; identical to SEQ ID NO: 86226

SEQ ID NO: 86254 - DNA, 201 bp, Homo sapiens; identical to SEQ ID NO: 86230

SEQ ID NO: 86255 - DNA, 201 bp, Homo sapiens; identical to SEQ ID NO: 86220

SEQ ID NO: 86256 - DNA, 201 bp, Homo sapiens; identical to SEQ ID NO: 86232

SEQ ID NO: 86257 - DNA, 201 bp, Homo sapiens; identical to SEQ ID NO: 86223

SEQ ID NO: 86258 - DNA, 201 bp, Homo sapiens; identical to SEQ ID NO: 86234

SEQ ID NO: 86259 - DNA, 201 bp, Homo sapiens; identical to SEQ ID NO: 86222

SEQ ID NO: 86260 - DNA, 201 bp, Homo sapiens; identical to SEQ ID NO: 86225

SEQ ID NO: 86261 - DNA, 201 bp, Homo sapiens; identical to SEQ ID NO: 86224

SEQ ID NO: 86262 - DNA, 201 bp, Homo sapiens; identical to SEQ ID NO: 86238

SEQ ID NO: 86263 - DNA, 201 bp, Homo sapiens
atttaccttctacgatacaactaatgttaacgcataaagtatcttactggtaacaaaaatcataatgatctgaatttgagatgttgcaaatgaattgtggkgtccggtagtttcttcttacattttcctttgcctttatactttaggggtcttactccattaattcatttgttacattagtaaaattcagtatgaataaat

SEQ ID NO: 86264 - DNA, 156 bp, Homo sapiens
caaaaatcataatgatctgaatttgagatgttgcaaatgaattgtggtgtccggtagtttcttcttacattttcctttgcctttatactttaggggtcttrctccattaattcatttgttacattagtaaaattcagtatgaataaatatttggat

SEQ ID NO: 86265 - DNA, 201 bp, Homo sapiens
cataatcacaagcttggcaagaaatgaagcacctgcattcacgatagacaacagatcaagctgggaaaacataaagtttgaagattctgtgggtcttcagrtggtatcccattgcaccaccagaaagatcaaaagtgattcaccaaaatcagctcaaaaattttctctaatccttaaaatattgtccatgatttataaatt

SEQ ID NO: 86266 - DNA, 201 bp, Homo sapiens
accaccagaaagatcaaaagtgattcaccaaaatcagctcaaaaattttctctaatccttaaaatattgtccatgatttataaattagtacagagcaacasttatgcaaccaaaagggacatatattacactgacagtcaactctttggtaaccagactgtcgtcgacaatattatcaatgacatttcttgcatgttaaaa

SEQ ID NO: 86267 - DNA, 201 bp, Homo sapiens
attagttttgttttgattggcaaatactattgtggaaagaacatatattatattcttaattctgtaaaagtgaaataaaataactttccgttaattatatwtttttgtcaaaacaaatgctgtactccaattttctttgcaaggccttattcttgcctctatagagacagatttctgtcctatcttctaaagcaaattata

SEQ ID NO: 86268 - DNA, 201 bp, Homo sapiens; identical to SEQ ID NO: 86263

SEQ ID NO: 86269 - DNA, 156 bp, Homo sapiens; identical to SEQ ID NO: 86264

SEQ ID NO: 86270 - DNA, 201 bp, Homo sapiens
cagggagtccctgctggctgccctgaggagaggtggcagggagcccccaactgggggaagccgcctggcctccaggtttgaagattctgtgggtcttcagrtggtatcccattgcaccaccagaaagatcaaaagtgattcaccaaaatcagctcaaaaattttctctaatccttaaaatattgtccatgatttataaatt

SEQ ID NO: 86271 - DNA, 201 bp, Homo sapiens; identical to SEQ ID NO: 86266

SEQ ID NO: 86272 - DNA, 201 bp, Homo sapiens; identical to SEQ ID NO: 86267

SEQ ID NO: 86273 - DNA, 201 bp, Homo sapiens
aaagtgggagattcttcacagtcaagctcccagttgctcttgatcctggggccaagatttcagtcattgtggaaacagtctacacccatgtgcttcatccrtatccaacccagatcacccagtcagagaaacagtttgtggtgtttgaggggaaccattatttctactctccctatccaacgaagacacaaaccatgcgtg

SEQ ID NO: 86274 - DNA, 201 bp, Homo sapiens
ctgtgaagatcatcctgcctgaaggagccaagaacattgaaattgatagtccctatgaaatcagccgtgccccagatgagctgcactacacctatctggayacatttggccgccctgtgattgttgcctacaagaaaaatctggtagaacagcacattcaggacattgtggtccactacacgttcaacaaggtgctcatgc

SEQ ID NO: 86275 - DNA, 201 bp, Homo sapiens
aagctgacatctgtaaaaggccttcaaggaagagaaaccaggccctgcgtcaggcagtgtgagtttgccgtttgtccttaactttcttttttttttttttwaaaaaaagaaaactttaaaaaaactcccattaaaaacaaaacatctttgtgttttgaacaaaggaattttcaatatttgattggtattctgttctgaagt

SEQ ID NO: 86276 - DNA, 201 bp, Homo sapiens
agggtgcctgcactttgctgtggcaggcagattgggtggtagtgggaggttgtgcatggaggccagtgaaagctgacatctgtaaaaggccttcaaggaaragaaaccaggccctgcgtcaggcagtgtgagtttgccgtttgtccttaactttctttttttttttttttaaaaaaagaaaactttaaaaaaactcccatt

SEQ ID NO: 86277 - DNA, 201 bp, Homo sapiens
agctgacatctgtaaaaggccttcaaggaagagaaaccaggccctgcgtcaggcagtgtgagtttgccgtttgtccttaactttctttttttttttttttwaaaaaagaaaactttaaaaaaactcccattaaaaacaaaacatctttgtgttttgaacaaaggaattttcaatatttgattggtattctgttctgaagtc

SEQ ID NO: 86278 - DNA, 201 bp, Homo sapiens
aaaagaaaactttaaaaaaactcccattaaaaacaaaacatctttgtgttttgaacaaaggaattttcaatatttgattggtattctgttctgaagtctargatatttttcagcctataaagccccctgttttatgcccttctaattctgatgtttgggtattgtgtgagtgcatgtgtttttttttttttttttaaagcg

SEQ ID NO: 86279 - DNA, 149 bp, Homo sapiens
tgaacaaatggaaataaagcagggactgtgaacatttgtttttggtctgttgaagatctctcataatttaattcttaattttgggaatagtgcttttatcragtgctttttattcattaaataatggatttgcttctcagcaggtttgc

SEQ ID NO: 86280 - DNA, 201 bp, Homo sapiens
agaatgagaagctcatctcaggaaagcgccaggagctggtcaccaagatcgaccacatcctggatgccctgtagcccctgcccgcatcctccagggggccyagggtgcctgcactttgctgtggcaggcagattgggtggtagtgggaggttgtgcatggaggccagtgaaagctgacatctgtaaaaggccttcaaggaa

SEQ ID NO: 86281 - DNA, 201 bp, Homo sapiens
gttttgaacaaaggaattttcaatatttgattggtattctgttctgaagtctaagatatttttcagcctataaagccccctgttttatgcccttctaattytgatgtttgggtattgtgtgagtgcatgtgtttttttttttttttttaaagcgtgtgtgaacaaatggaaataaagcagggactgtgaacatttgttttt

SEQ ID NO: 86282 - DNA, 201 bp, Homo sapiens
agaagagcctggagactgaacacaaggccttgaccagtgagattgcactgctgcagtccaggctgaagacagagggctctgatctgtgcgacagagtgagygaaatgcagaagctggatgcacaggtcaaggagctggtgctgaagtcggcggtggaggctgagcgcctggtggctggcaagctcaagaaagacacgtaca

SEQ ID NO: 86283 - DNA, 201 bp, Homo sapiens; identical to SEQ ID NO: 86273

SEQ ID NO: 86284 - DNA, 201 bp, Homo sapiens; identical to SEQ ID NO: 86274

SEQ ID NO: 86285 - DNA, 201 bp, Homo sapiens
agggtgcctgcactttgctgtggcaggcagattgggtggtagtgggaggttgtgcatggaggccagtgaaagctgacatctgtaaaaggccttcaaggaaragaaaccaggccctgcgtcaggcagtgtgagtttgccgtttgtccttaactttctttaagaaaactttaaaaaaactcccattaaaaacaaaacatcttt

SEQ ID NO: 86286 - DNA, 140 bp, Homo sapiens
ttaagaaaactttaaaaaaactcccattaaaaacaaaacatctttgtgttttgaacaaaggaattttcaatatttgattggtattctgttctgaagtctargatatttttcagcctataaagccccctgttttatgccct

SEQ ID NO: 86287 - DNA, 201 bp, Homo sapiens; identical to SEQ ID NO: 86280

SEQ ID NO: 86288 - DNA, 201 bp, Homo sapiens; identical to SEQ ID NO: 86282

SEQ ID NO: 86289 - DNA, 118 bp, Homo sapiens
tggagagcggaggtgttyccgcttccaccaatggaaagccggtctaggcgggcctttgcaaattgccctagtaacggccgcatggtaactcaggcgccgggcgcactgtcctagctgc

SEQ ID NO: 86290 - DNA, 201 bp, Homo sapiens
tcccgggtgtgctgtttgttgatgaggtccacatgctggacattgagtgcttcacctacctgcaccgcgccctggagtcttctatcgctcccatcgtcatytttgcatccaaccgaggcaactgtgtcatcagaggcactgaggacatcacatcccctcacggcatccctcttgaccttctggaccgagtgatgataatcc

SEQ ID NO: 86291 - DNA, 118 bp, Homo sapiens; identical to SEQ ID NO: 86289

SEQ ID NO: 86292 - DNA, 201 bp, Homo sapiens; identical to SEQ ID NO: 86290

SEQ ID NO: 86293 - DNA, 201 bp, Homo sapiens
tttggttctttgaagtgatgagctagcgcaaccacaaaccatacattccttttgtagaaaaacccgtgcctcgaatgaggcgagactcagagaggacccasgcgcggggcggacccctccaattccttcctcgcgcccccgaaagagcggcgcaccagcagccgaactgccggcgcccaggctccctggtccggccgggat

SEQ ID NO: 86294 - DNA, 201 bp, Homo sapiens
tggacgccggcgaccagtaccagggcactatctggttcaccgtgtacaagggcgccgaggtggcgcacttcatgaacgccctgcgctacgatgccatggcrctgggaaatcatgaatttgataatggtgtggaaggactgatcgagccactcctcaaagaggccaaatttccaattctgagtgcaaacattaaagcaaagg

SEQ ID NO: 86295 - DNA, 201 bp, Homo sapiens
ggagctcctctgcccggcctctctttactcctcctctctgcccctcagctcgctcatctttcttcccgccccctctcttttccttctttggttctttgaartgatgagctagcgcaaccacaaaccatacattccttttgtagaaaaacccgtgcctcgaatgaggcgagactcagagaggacccaggcgcggggcggacc

SEQ ID NO: 86296 - DNA, 201 bp, Homo sapiens
aattgtctatctggatggctcctctcaatcatgccgctttagagaatgcaacatgggcaacctgatttgtgatgcaatgattaacaacaacctgagacacrcggatgaaatgttctggaaccacgtatccatgtgcattttaaatggaggtggtatccggtcgcccattgatgaacgcaacaatggcacaattacctggga

SEQ ID NO: 86297 - DNA, 201 bp, Homo sapiens; identical to SEQ ID NO: 86293

SEQ ID NO: 86298 - DNA, 201 bp, Homo sapiens
cctcccaaacttcctggccaatggtggagatgggttccagatgataaaagatgaattattaagacatgactctggtgaccaagatatcaacgtggtttctrcatatatctccaaaatgaaagtaatttatccagcagttgaaggtcggatcaagttttccacaggaagtcactgccatggaagcttttctttaatatttct

SEQ ID NO: 86299 - DNA, 201 bp, Homo sapiens
tataaaagttgttgcagcaaaataatagcctcggttctatgcatatatggattagctataaaaaatgtcaataagattgtacaaggaaaattagagaaagkcacatttagggtttattttttacacttggccagtaaaatagggtaaatcctattagaattttttaaagaactttttttaagtttcctaaatctgtgtgtg

SEQ ID NO: 86300 - DNA, 201 bp, Homo sapiens
tagtcacttctgatgatgggcggaaggttcctgtagtccaggcctatgcttttggcaaatacctaggctatctgaagatcgagtttgatgaaagaggaaaygtcatctcttcccatggaaatcccattcttctaaacagcagcattcctgaagatccaagcataaaagcagacattaacaaatggaggataaaattggata

SEQ ID NO: 86301 - DNA, 201 bp, Homo sapiens; identical to SEQ ID NO: 86294

SEQ ID NO: 86302 - DNA, 201 bp, Homo sapiens
ctggatggctcctctcaatcatgccgctttagagaatgcaacatgggcaacctgatttgtgatgcaatgattaacaacaacctgagacacgcggatgaaaygttctggaaccacgtatccatgtgcattttaaatggaggtggtatccggtcgcccattgatgaacgcaacaatggcacaattacctgggagaacctggct

SEQ ID NO: 86303 - DNA, 201 bp, Homo sapiens; identical to SEQ ID NO: 86295

SEQ ID NO: 86304 - DNA, 201 bp, Homo sapiens
aggttgcagacaggagagttattagcactaccgatgctgaaagacaagcagttacacccccaggattacaggaggcaatcaatgacctggtgaagaagtayaagctttctcgagcttttgtccggccctctggtacagaagatgtcgtccgagtatatgcagaagcagactcacaagaaagtgcagatcaccttgcacatg

SEQ ID NO: 86305 - DNA, 201 bp, Homo sapiens
atgtgtatatatatagctctcttaggcaccataatcagtatgagccaacaatatttaaacttgattcaggccacattcagacatttgctcttatatacaartatttaaattaaatacaatctgaaatgtgttctgttacatacaaaaaaggaaaaactatacaacgcagagcagtgtgtgtgttttaaataattacattta

SEQ ID NO: 86306 - DNA, 201 bp, Homo sapiens
gagtgcttattgacatcagcgagaaagaagctgtgaatctgcaacaagatgcctttgtagttattggtagagataccaggcccagcagtgagaaactttcmcaatctgtaatagatggtgtgactgttctaggaggtcaattccatgattatggcttgttaacaacaccccagctgcactacatggtgtattgtcgaaaca

SEQ ID NO: 86307 - DNA, 201 bp, Homo sapiens
agctcctggtggagattggagaaagtttgaatattggtgttgtacaaactgcatatgcaaatggaagttcaacacggtatcttgaagaagttatgaaggtrcctgtctattgcactaagactggtgtaaaacatttgcaccacaaggctcaagagtttgacattggagtttattttgaagcaaatgggcatggcactgcac

SEQ ID NO: 86308 - DNA, 201 bp, Homo sapiens
caattcagtcactaactgtacagttttatgtggggaacaattcatgcaggctactggaaaattaaatcttattaccaactccttgtgatatctttgccatyaccatcacatgagcaagatgatgttttgcagcattccccattgctgatacaaatggagagggcagagaagactttatacaaccagtttttccattgcaga

SEQ ID NO: 86309 - DNA, 201 bp, Homo sapiens
tggaagataagaaaagaaaagctgctaagatgcttgaaaacattattgacttgtttaaccaggcagctggtgatgctatttctgacatgctggtgattgargcaatcttggctctgaagggcttgactgtacaacagtgggatgctctctatacagatcttccaaacagacaacttaaagttcaggttgcagacaggagag

SEQ ID NO: 86310 - DNA, 201 bp, Homo sapiens
atgattatggcttgttaacaacaccccagctgcactacatggtgtattgtcgaaacacgggtggccgatatggaaaggcaactatagaaggttactaccaraaactctctaaggcttttgtggaactcaccaaacaggcttcttgcagtggagatgaatacagatcacttaaggttgactgtgcaaatggcataggggccc

SEQ ID NO: 86311 - DNA, 201 bp, Homo sapiens
gaagggcttgactgtacaacagtgggatgctctctatacagatcttccaaacagacaacttaaagttcaggttgcagacaggagagttattagcactaccratgctgaaagacaagcagttacacccccaggattacaggaggcaatcaatgacctggtgaagaagtacaagctttctcgagcttttgtccggccctctgg

SEQ ID NO: 86312 - DNA, 201 bp, Homo sapiens
cttcctctggatttttctgcagaaaacaaaaagtgaactggtattaatacaacagacaatgtggtatgttagaaaaattaaaaatatataaactttggcarttggtcaagaaatgaatacaaatgacattaagtttctaactcctgacctgatcaaaacccttggtgcttctgagaccttttactgccatttattagtttt

SEQ ID NO: 86313 - DNA, 201 bp, Homo sapiens
tatgcaaatggaagttcaacacggtatcttgaagaagttatgaaggtacctgtctattgcactaagactggtgtaaaacatttgcaccacaaggctcaagwgtttgacattggagtttattttgaagcaaatgggcatggcactgcactgtttagtacagctgttgaaatgaagataaaacaatcagcagaacaactggaa

SEQ ID NO: 86314 - DNA, 201 bp, Homo sapiens; identical to SEQ ID NO: 86304

SEQ ID NO: 86315 - DNA, 201 bp, Homo sapiens
aggcatctcagcaacgttttgcagggaaattgcttccacaactagcaggacacagaaaatgctttccaagagttcgtcaaatttggaagcatggatttttrtgctacaggagtaaacaaacttatttctcattggcaaaaatgtgttgattgtaatggttcctattttaattaataaagatttgtgtgaacctagttataa

SEQ ID NO: 86316 - DNA, 201 bp, Homo sapiens; identical to SEQ ID NO: 86306

SEQ ID NO: 86317 - DNA, 201 bp, Homo sapiens; identical to SEQ ID NO: 86307

SEQ ID NO: 86318 - DNA, 201 bp, Homo sapiens
cttaagtttgcttcctagcaattatttagcttccagtctagattacaggatatataaaactttctttctttctttcttaactatgacactggcaccaatgrgagtcctgtgactgactttcacatttccaccattactcaattactggtaccataccacctctaatcccctaaatcaaactgcaattcaacaataaagggc

SEQ ID NO: 86319 - DNA, 201 bp, Homo sapiens
gtgtgggtgcatacaaaattaaagtggagacgtcctggcctggtggcttccttctaatagtggcagctggtgatgctatttctgacatgctggtgattgargcaatcttggctctgaagggcttgactgtacaacagtgggatgctctctatacagatcttccaaacagacaacttaaagttcaggttgcagacaggagag

SEQ ID NO: 86320 - DNA, 201 bp, Homo sapiens; identical to SEQ ID NO: 86310

SEQ ID NO: 86321 - DNA, 201 bp, Homo sapiens; identical to SEQ ID NO: 86311

SEQ ID NO: 86322 - DNA, 201 bp, Homo sapiens; identical to SEQ ID NO: 86313

SEQ ID NO: 86323 - DNA, 201 bp, Homo sapiens
tgcaccacaaggctcaagagtttgacattggagtttattttgaagcaaatgggcatggcactgcagctggtgatgctatttctgacatgctggtgattgargcaatcttggctctgaagggcttgactgtacaacagtgggatgctctctatacagatcttccaaacagacaacttaaagttcaggttgcagacaggagag

SEQ ID NO: 86324 - DNA, 201 bp, Homo sapiens; identical to SEQ ID NO: 86310

SEQ ID NO: 86325 - DNA, 201 bp, Homo sapiens; identical to SEQ ID NO: 86304

SEQ ID NO: 86326 - DNA, 201 bp, Homo sapiens; identical to SEQ ID NO: 86305

SEQ ID NO: 86327 - DNA, 201 bp, Homo sapiens; identical to SEQ ID NO: 86311

SEQ ID NO: 86328 - DNA, 201 bp, Homo sapiens; identical to SEQ ID NO: 86306

SEQ ID NO: 86329 - DNA, 201 bp, Homo sapiens
agctcctggtggagattggagaaagtttgaatattggtgttgtacaaactgcatatgcaaatggaagttcaacacggtatcttgaagaagttatgaaggtrcctgtctattgcactaagactggtgtaaaacatttgcaccacaaggctcaagagtttgacattggagtttattttgaagcaaatgggcatggcactgcag

SEQ ID NO: 86330 - DNA, 201 bp, Homo sapiens
tatgcaaatggaagttcaacacggtatcttgaagaagttatgaaggtacctgtctattgcactaagactggtgtaaaacatttgcaccacaaggctcaagwgtttgacattggagtttattttgaagcaaatgggcatggcactgcagctggtgatgctatttctgacatgctggtgattgaagcaatcttggctctgaag

SEQ ID NO: 86331 - DNA, 201 bp, Homo sapiens; identical to SEQ ID NO: 86309

SEQ ID NO: 86332 - DNA, 201 bp, Homo sapiens; identical to SEQ ID NO: 86310

SEQ ID NO: 86333 - DNA, 201 bp, Homo sapiens; identical to SEQ ID NO: 86304

SEQ ID NO: 86334 - DNA, 201 bp, Homo sapiens; identical to SEQ ID NO: 86305

SEQ ID NO: 86335 - DNA, 201 bp, Homo sapiens; identical to SEQ ID NO: 86311

SEQ ID NO: 86336 - DNA, 201 bp, Homo sapiens; identical to SEQ ID NO: 86306

SEQ ID NO: 86337 - DNA, 201 bp, Homo sapiens; identical to SEQ ID NO: 86307

SEQ ID NO: 86338 - DNA, 201 bp, Homo sapiens; identical to SEQ ID NO: 86313

SEQ ID NO: 86339 - DNA, 201 bp, Homo sapiens
aaagagtgggaagacaaaaaggtaattttaactattatttttgtttctcatgaaaatcctactgaagtgtttgaagatggagaaaatccaccaagtagtcratcatcagagagtggattcactgagtttatacaatatcaagcagaccgaactgatgatattgacagagaactgagtgagggccagggggcagctgccatc

SEQ ID NO: 86340 - DNA, 201 bp, Homo sapiens
taaatgtaattatttaaaacacacacactgctctgcgttgtatagtttttccttttttgtatgtaacagaacacatttcagattgtatttaatttaaatayttgtatataagagcaaatgtctgaatgtggcctgaatcaagtttaaatattgttggctcatactgattatggtgcctaagagagctatatatatacacat

SEQ ID NO: 86341 - DNA, 201 bp, Homo sapiens
tctgcaatggaaaaactggttgtataaagtcttctctgccctctccatttgtatcagcaatggggaatgctgcaaaacatcatcttgctcatgtgatggtratggcaaagatatcacaaggagttggtaataagatttaattttccagtagcctgcatgaattgttccccacataaaactgtacagttagtgactgaattg

SEQ ID NO: 86342 - DNA, 201 bp, Homo sapiens
aacaattcagtcaaagagtgggaagacaaaaaggtatcatcagtttctcatgaaaatcctactgaagtgtttgaagatggagaaaatccaccaagtagtcratcatcagagagtggattcactgagtttatacaatatcaagcagaccgaactgatgatattgacagagaactgagtgagggccagggggcagctgccatc

SEQ ID NO: 86343 - DNA, 201 bp, Homo sapiens; identical to SEQ ID NO: 86340

SEQ ID NO: 86344 - DNA, 201 bp, Homo sapiens
ctaaataagaactatcccagcttacttgtgagtctgcttctgcatatactcggacgacatcttctgtaccagagggccggacaaaagctcgagaaagcttrtacttcttcaccaggtcattgattgcctcctgtaatcctgggggtgtaactgcttgtctttcagcatcggtagtgctaataactctcctgtctgcaacct

SEQ ID NO: 86345 - DNA, 147 bp, Homo sapiens
ccagagggccggacaaaagctcgagaaagcttgtacttcttcaccaggtcattgattgcctcctgtaatcctgggggtgtaactgcttgtctttcagcatyggtagtgctaataactctcctgtctgcaacctaagtgcaagcattt

SEQ ID NO: 86346 - DNA, 201 bp, Homo sapiens; identical to SEQ ID NO: 86342

SEQ ID NO: 86347 - DNA, 201 bp, Homo sapiens; identical to SEQ ID NO: 86340

SEQ ID NO: 86348 - DNA, 201 bp, Homo sapiens; identical to SEQ ID NO: 86344

SEQ ID NO: 86349 - DNA, 147 bp, Homo sapiens; identical to SEQ ID NO: 86345

SEQ ID NO: 86350 - DNA, 201 bp, Homo sapiens; identical to SEQ ID NO: 86339

SEQ ID NO: 86351 - DNA, 201 bp, Homo sapiens; identical to SEQ ID NO: 86340

SEQ ID NO: 86352 - DNA, 201 bp, Homo sapiens; identical to SEQ ID NO: 86344

SEQ ID NO: 86353 - DNA, 147 bp, Homo sapiens; identical to SEQ ID NO: 86345

SEQ ID NO: 86354 - DNA, 201 bp, Homo sapiens; identical to SEQ ID NO: 86342

SEQ ID NO: 86355 - DNA, 201 bp, Homo sapiens; identical to SEQ ID NO: 86340

SEQ ID NO: 86356 - DNA, 201 bp, Homo sapiens; identical to SEQ ID NO: 86341

SEQ ID NO: 86357 - DNA, 201 bp, Homo sapiens
ggaaggtcatccctgagctaaacgggaagctcactggcatggccttccgtgtccccactgccaacatgtcagtggtggacctgacctgccgtctggaaaamcctaccaaatatgatgacaccaagaaggtggtgaagcaggcgtcagaggaccccctcaaaggcatcctgggctactctgagcaccaggtggtctcctcca

SEQ ID NO: 86358 - DNA, 201 bp, Homo sapiens
gtcatccctgagctaaacgggaagctcactggcatggccttccgtgtccccactgccaacatgtcagtggtggacctgacctgccgtctggaaaaacctamcaaatatgatgacaccaagaaggtggtgaagcaggcgtcagaggaccccctcaaaggcatcctgggctactctgagcaccaggtggtctcctccaacttc

SEQ ID NO: 86359 - DNA, 201 bp, Homo sapiens
gagaaggctggggctcacttggagggaggagccaaaacggtcatcatctctgcaccctctgctgatgcccccatgttcgtgatgggtgtgaaccatgagamatatgacaacagctcaagattatcagcaatgcctcctgcaccaccagctgcttaacgcccctggccaaggtcatccatgacaactttggtaccgtggaag

SEQ ID NO: 86360 - DNA, 201 bp, Homo sapiens
cttatacatattgggctaagccatgaggttcaggaagatttttctgtgcgggttgttgagagtgtgggaaaaatagagattgttctacaaaaaaaagagartacttcttgggactttcttggccatcccctgaagaatcataattcacttattccaaggaaagatacaggtttgtactacagaaagtgccagttaatttcc

SEQ ID NO: 86361 - DNA, 201 bp, Homo sapiens
actctccatcccccactgcccggtgccagcgctcggcttcggtggattctcccgggtctgggctcacgtctcctctgcgcgccttgtgctcccctatcccrcagatacgcaggcttctggagaccctgggtggacgccggaggcaagaaagaagaggagacgccgaaccacgccgcggaggcgatgcccgatggccctgga

SEQ ID NO: 86362 - DNA, 201 bp, Homo sapiens
aatcacaaatttccttgccatttaaattatatcactgttctacaataagcacttgtgttttatgacatgataaagtaaatgatcacttcgatcatgtttcyatgctgtaaaatgtcttattagcaatacagattaaattttaccttgcactgttaactcaggaaatgatcatttatgtccttgttattaatgttaaaacat

SEQ ID NO: 86363 - DNA, 201 bp, Homo sapiens
caccagctcttctttctgaatttttgaaaagaaatttggacaaatccaaagttctcgtctgcatttgtggaccagtgccatttacagaacaaggagtaagrttgctgcatgatctcaacttttccaaaaatgagatccatagttttacagcataatgaagagctgtcattgtcctttattcaactagtttatctaaatttg

SEQ ID NO: 86364 - DNA, 201 bp, Homo sapiens
gcctgccggtggccataaaggtgccgacgcggcggatgtgtcctctggagcgatgggccacaggcacccagccgggagcgaggctgctgagagccctgggkttacattcccagcgggcacgaggaacactgggtcgtgcacgtttccactttctagaaggaggtgggtgataactggattcacttcctttcctctccagat

SEQ ID NO: 86365 - DNA, 201 bp, Homo sapiens
ggtaggggctcacggtcccacgtaaagggactgttgatgaatacatactcagtgaacttgatgaatatattacgaagagggaaaggggatgatatggtaaragagcggtgacatcttgtgctggcaaaacagtttttatttttaaatcctaaagggttcgaatgaaattgacttcgcatcaggcagagtgtgtatgctgct

SEQ ID NO: 86366 - DNA, 201 bp, Homo sapiens
gtctctctctctctctctgaaaatctggcttcaaggttacttatcttctcactcatcaaattgaaaaaggtaggggctcacggtcccacgtaaagggactrttgatgaatacatactcagtgaacttgatgaatatattacgaagagggaaaggggatgatatggtaagagagcggtgacatcttgtgctggcaaaacagt

SEQ ID NO: 86367 - DNA, 201 bp, Homo sapiens
gagcgaggctgctgagagccctggggttacattcccagcgggcacgaggaacactgggtcgtgcacgtttccactttctagaaggaggtgggtgataactrgattcacttcctttcctctccagatgcccgatggccctggaatgaccgcagcctcaggaaagctttaccaattcaggcacccagtcaggtgagtgacagg

SEQ ID NO: 86368 - DNA, 201 bp, Homo sapiens
attcgctcgacaaaaccctgtcccgggccatttgggagttgcacgcgttcacacccggggctcagcccggtgcgccttcacgcgcagcctttttgtttatscggctagcagggagaggggcggagaggcagcgaacctctcaatgtgcagcaggccgcgagggctatataaagctcgggtctcggacctactggaactggt

SEQ ID NO: 86369 - DNA, 201 bp, Homo sapiens
gcggctagcagggagaggggcggagaggcagcgaacctctcaatgtgcagcaggccgcgagggctatataaagctcgggtctcggacctactggaactggycaagattgcccgcgagctggcagcggccttccgcccagctctgcggcgtcatggagaacgcgggaggcgcagagggtacagagagtggagctgcggcgtg

SEQ ID NO: 86370 - DNA, 201 bp, Homo sapiens
actctccatcccccactgcccggtgccagcgctcggcttcggtggattctcccgggtctgggctcacgtctcctctgcgcgccttgtgctcccctatcccrcagatacgcaggcttctggagaccctgggtggacgccggaggcaagaaagaagaggagacgccgaaccacgccgcggaggcggtgagtgagccacgcgtc

SEQ ID NO: 86371 - DNA, 201 bp, Homo sapiens
gcctccgagagctgttaaatgaagagctggatgatgtttgtaaagtgcccctggtcataaataacacatagaagtcattacatctaatttcctaccgtgtrctagcactggtgaaggacacaggaaaaagtagtcacagcacatggcaagtgttgtaatggaatttagtttggttagttttacaagtatgggcagggcacg

SEQ ID NO: 86372 - DNA, 201 bp, Homo sapiens
gcgtgcgcggccaccgacggccctacgcggcgcgcgggcgcggactccgggtaggcttccccgcgctgctctgcgcctcccagcttcccccgtctctccckcctgcgcctccccagctcctcccctccaactctccatcccccactgcccggtgccagcgctcggcttcggtggattctcccgggtctgggctcacgtctc

SEQ ID NO: 86373 - DNA, 201 bp, Homo sapiens
cttatacatattgggctaagccatgaggttcaggaagatttttctgtgcgggttgttgagagtgtgggaaaaatagagattgttctacaaaaaaaagagartacttcttgggactttcttggccatcccctgaagaatcataattcacttattccaaggaaagatacagggtgggactgtaaagctaattggaaactgtgc

SEQ ID NO: 86374 - DNA, 201 bp, Homo sapiens
gcctgccggtggccataaaggtgccgacgcggcggatgtgtcctctggagcgatgggccacaggcacccagccgggagcgaggctgctgagagccctgggkttacattcccagcgggcacgaggaacactgggtcgtgcacgtttccactttctagaaggaggtacctttaaaacagggcagaagccttatggattggatt

SEQ ID NO: 86375 - DNA, 201 bp, Homo sapiens; identical to SEQ ID NO: 86370

SEQ ID NO: 86376 - DNA, 201 bp, Homo sapiens; identical to SEQ ID NO: 86362

SEQ ID NO: 86377 - DNA, 201 bp, Homo sapiens; identical to SEQ ID NO: 86363

SEQ ID NO: 86378 - DNA, 201 bp, Homo sapiens; identical to SEQ ID NO: 86369

SEQ ID NO: 86379 - DNA, 101 bp, Homo sapiens
scggctagcagggagaggggcggagaggcagcgaacctctcaatgtgcagcaggccgcgagggctatataaagctcgggtctcggacctactggaactggt

SEQ ID NO: 86380 - DNA, 201 bp, Homo sapiens; identical to SEQ ID NO: 86360

SEQ ID NO: 86381 - DNA, 201 bp, Homo sapiens; identical to SEQ ID NO: 86362

SEQ ID NO: 86382 - DNA, 201 bp, Homo sapiens; identical to SEQ ID NO: 86363

SEQ ID NO: 86383 - DNA, 201 bp, Homo sapiens; identical to SEQ ID NO: 86373

SEQ ID NO: 86384 - DNA, 201 bp, Homo sapiens; identical to SEQ ID NO: 86362

SEQ ID NO: 86385 - DNA, 101 bp, Homo sapiens
taaaacatagaatgttataacttattaagtgatccaaacatttttttgtgtgtgtatggcattgatgcagaatagaataaaattatacttaagttcttttr

SEQ ID NO: 86386 - DNA, 201 bp, Homo sapiens
ggcggggagcctgtgagcctgggctccctgcggggcaagggactacttatcgagaatgtggcgtccctcggaggcaccacgtctgggcatcaggagaacgmcaagaacgaagagattctgaattccctcaagtacgtccaacctggtggtgggttcgagcccagcttcatgctcttggagaagtgcgaggtgaacgccccc

SEQ ID NO: 86387 - DNA, 201 bp, Homo sapiens
agaacgaagagattctgaattccctcaagtacgtccaacctggtggtgggttcgagcccagcttcatgctcttggagaagtgcgaggtgaacgcccccagsgacgacgccactgagctcatgaccgaccccaagctcatcacctggtctccggtgtgtcgcaacgatgttgcctggaacttctttgagaagttcctggtgg

SEQ ID NO: 86388 - DNA, 111 bp, Homo sapiens
ttcctggtgggccctgacggtgtgcctgtatgcaggtatagctgccgcttccagaccattgacatcgagcctgacatcgaagccctgctgtctcaagggcycagatgtgcc

SEQ ID NO: 86389 - DNA, 201 bp, Homo sapiens
tgctgggctagcggcggcggctgcccagtcggtgtaagccttttccgcgcgcccgctggccggcggggagcctgtgagcctgggctccctgcggggcaagrgactacttatcgagaatgtggcgtccctcggaggcaccacgtctgggcatcaggagaacgccaagaacgaagagattctgaattccctcaagtacgtcca

SEQ ID NO: 86390 - DNA, 201 bp, Homo sapiens
ggacacgtttctgcttttggacgcgctcgaggcagcggctgccgaactggcaggagtggaaatatgcctggaagtagggtcagggtctggtgtagtatctkcattcctagcctctatgataggccctcaggctttgtacatgtgcactgatatcaaccctgaggcagcagcttgtaccctagagacagcacgctgtaacaa

SEQ ID NO: 86391 - DNA, 201 bp, Homo sapiens
gggagaacttcgctacgccgttccacgggcacgtgggccgcggcgccttcagcgacgtgtacgagcccgcggaggacacgtttctgcttttggacgcgctsgaggcagcggctgccgaactggcaggagtggaaatatgcctggaagtagggtcagggtctggtgtagtatctgcattcctagcctctatgataggccctc

SEQ ID NO: 86392 - DNA, 201 bp, Homo sapiens
tcattagatggatttacatcactggcttccctggttctcaagcctttggattcagactgaattataccacaggccttcctgggtctccagcttatagatgrcagatcatgggacctcttagcctccataatcatgtaagccactttcttgtagtactggtaaaagatatattagaccaatctataaaacagctagctatga

SEQ ID NO: 86393 - DNA, 146 bp, Homo sapiens
gcgcacgcgcatggaacgcagcgaaggactatggcaggggagaacytcgctacgccgttccacgggcacgtgggccgcggcgccttcagcgacgtgtacgagcccgcggaggacacgtttctgcttttggacgcgctcgaggcagc

SEQ ID NO: 86394 - DNA, 201 bp, Homo sapiens
tattagaccaatctataaaacagctagctatgaaagagaaaggtgacaggcacaagcctaggcaaatagagaagggttcctggagagcctctgacttgccyaggtcattgtgcacacgtggcttgcctgaatgaacatgcccactgtgaaagattccatttctcaacacatgtgcagtaagggaaataaatcaatgtggct

SEQ ID NO: 86395 - DNA, 201 bp, Homo sapiens
ttatagatgacagatcatgggacctcttagcctccataatcatgtaagccactttcttgtagtactggtaaaagatatattagaccaatctataaaacagmtagctatgaaagagaaaggtgacaggcacaagcctaggcaaatagagaagggttcctggagagcctctgacttgcctaggtcattgtgcacacgtggctt

SEQ ID NO: 86396 - DNA, 201 bp, Homo sapiens
tatggcaggggagaacttcgctacgccgttccacgggcacgtgggccgcggcgccttcagcgacgtgtacgagcccgcggaggacacgtttctgcttttgracgcgctcgaggcagcggctgccgaactggcaggagtggaaatatgcctggaagtagggtcagggtctggtgtagtatctgcattcctagcctctatgat

SEQ ID NO: 86397 - DNA, 201 bp, Homo sapiens
tgggacctcttagcctccataatcatgtaagccactttcttgtagtactggtaaaagatatattagaccaatctataaaacagctagctatgaaagagaarggtgacaggcacaagcctaggcaaatagagaagggttcctggagagcctctgacttgcctaggtcattgtgcacacgtggcttgcctgaatgaacatgcc

SEQ ID NO: 86398 - DNA, 201 bp, Homo sapiens
ccagttattacagatttggtaggaagtcacggaatagaggcagcttgggctggtggcagaaatggtcgggaagtcatggacaggttttttcccctggttcyagatctcctttcaccaagaggattattctatttagttaccattaaagaaaacaacccagaagaaattttgaaaataatgaagacaaaaggtctgcaagga

SEQ ID NO: 86399 - DNA, 101 bp, Homo sapiens
tgcaggggagaagccgtgcctcttcagctcgtgtgtggtggcctggcattcaatttgtgaggtgtaaaacctgcatgaaggacccctctttttgtggagar

SEQ ID NO: 86400 - DNA, 201 bp, Homo sapiens
gtaggaagtcacggaatagaggcagcttgggctggtggcagaaatggtcgggaagtcatggacaggttttttcccctggttccagatctcctttcaccaaraggattattctatttagttaccattaaagaaaacaacccagaagaaattttgaaaataatgaagacaaaaggtctgcaaggaaccactgcactttccaga

SEQ ID NO: 86401 - DNA, 201 bp, Homo sapiens
tgtaccctagagacagcacgctgtaacaaagttcacattcaaccagttattacagatttggtaggaagtcacggaatagaggcagcttgggctggtggcaraaatggtcgggaagtcatggacaggttttttcccctggttccagatctcctttcaccaagaggattattctatttagttaccattaaagaaaacaaccca

SEQ ID NO: 86402 - DNA, 201 bp, Homo sapiens
acatgcccactgtgaaagattccatttctcaacacatgtgcagtaagggaaataaatcaatgtggctcagactaagcgcccacacatggggtggagccacraggagtttgctccttatgcaggggagaagccgtgcctcttcagctcgtgtgtggtggcctggcattcaatttgtgaggtgtaaaacctgcatgaaggacc

SEQ ID NO: 86403 - DNA, 201 bp, Homo sapiens
gtcattgtgcacacgtggcttgcctgaatgaacatgcccactgtgaaagattccatttctcaacacatgtgcagtaagggaaataaatcaatgtggctcaractaagcgcccacacatggggtggagccacgaggagtttgctccttatgcaggggagaagccgtgcctcttcagctcgtgtgtggtggcctggcattcaa

SEQ ID NO: 86404 - DNA, 201 bp, Homo sapiens
gtgcacacgtggcttgcctgaatgaacatgcccactgtgaaagattccatttctcaacacatgtgcagtaagggaaataaatcaatgtggctcagactaascgcccacacatggggtggagccacgaggagtttgctccttatgcaggggagaagccgtgcctcttcagctcgtgtgtggtggcctggcattcaatttgtg

SEQ ID NO: 86405 - DNA, 201 bp, Homo sapiens
ccttcctgggtctccagcttatagatgacagatcatgggacctcttagcctccataatcatgtaagccactttcttgtagtactggtaaaagatatattaraccaatctataaaacagctagctatgaaagagaaaggtgacaggcacaagcctaggcaaatagagaagggttcctggagagcctctgacttgcctaggtc

SEQ ID NO: 86406 - DNA, 201 bp, Homo sapiens; identical to SEQ ID NO: 86400

SEQ ID NO: 86407 - DNA, 201 bp, Homo sapiens; identical to SEQ ID NO: 86390

SEQ ID NO: 86408 - DNA, 201 bp, Homo sapiens; identical to SEQ ID NO: 86391

SEQ ID NO: 86409 - DNA, 201 bp, Homo sapiens
accgaaaaagttgatcttctggtgtttaatcccccctatgtagtgactccacctcaagaggtaggaagtcacggaatagaggcagcttgggctggtggcaraaatggtcgggaagtcatggacaggttttttcccctggttccagatctcctttcaccaagaggattattctatttagttaccattaaagaaaacaaccca

SEQ ID NO: 86410 - DNA, 146 bp, Homo sapiens; identical to SEQ ID NO: 86393

SEQ ID NO: 86411 - DNA, 201 bp, Homo sapiens; identical to SEQ ID NO: 86396

SEQ ID NO: 86412 - DNA, 201 bp, Homo sapiens
gtgactccacctcaagaggtaggaagtcacggaatagaggcagcttgggctggtggcagaaatggtcgggaagtcatggacaggttttttcccctggttcyagatctcctttcaccaagaggattattctatttagttaccattaaagaaaacaacccagaagaaattttgaaaataatgaagacaaaaggtctgcaagga

SEQ ID NO: 86413 - DNA, 201 bp, Homo sapiens; identical to SEQ ID NO: 86390

SEQ ID NO: 86414 - DNA, 201 bp, Homo sapiens; identical to SEQ ID NO: 86391

SEQ ID NO: 86415 - DNA, 201 bp, Homo sapiens; identical to SEQ ID NO: 86392

SEQ ID NO: 86416 - DNA, 146 bp, Homo sapiens; identical to SEQ ID NO: 86393

SEQ ID NO: 86417 - DNA, 201 bp, Homo sapiens; identical to SEQ ID NO: 86394

SEQ ID NO: 86418 - DNA, 201 bp, Homo sapiens; identical to SEQ ID NO: 86395

SEQ ID NO: 86419 - DNA, 201 bp, Homo sapiens; identical to SEQ ID NO: 86396

SEQ ID NO: 86420 - DNA, 201 bp, Homo sapiens; identical to SEQ ID NO: 86397

SEQ ID NO: 86421 - DNA, 201 bp, Homo sapiens; identical to SEQ ID NO: 86412

SEQ ID NO: 86422 - DNA, 101 bp, Homo sapiens; identical to SEQ ID NO: 86399

SEQ ID NO: 86423 - DNA, 201 bp, Homo sapiens; identical to SEQ ID NO: 86400

SEQ ID NO: 86424 - DNA, 201 bp, Homo sapiens; identical to SEQ ID NO: 86409

SEQ ID NO: 86425 - DNA, 201 bp, Homo sapiens; identical to SEQ ID NO: 86402

SEQ ID NO: 86426 - DNA, 201 bp, Homo sapiens; identical to SEQ ID NO: 86403

SEQ ID NO: 86427 - DNA, 201 bp, Homo sapiens; identical to SEQ ID NO: 86404

SEQ ID NO: 86428 - DNA, 201 bp, Homo sapiens; identical to SEQ ID NO: 86405

SEQ ID NO: 86429 - DNA, 201 bp, Homo sapiens
cacaaattgatattgttatctccaacaaagccgcagtagctgggttagataaagcggaaagagctggtattcccactagagtaattaatcataaactgtayaaaaatcgtgtagaatttgacagtgcaattgacctagtccttgaagagttctccatagacatagtctgtcttgcaggattcatgagaattctttctggcc

SEQ ID NO: 86430 - DNA, 201 bp, Homo sapiens
tgcagtcacagccatccgggaaaatctcatatcagcccttgaggaagccaagaaaggactagctgctataaagtttgagggagcaatttataggaaagacrtcggctttcgtgccatagctttcctccagcagcccaggagtttgacttacaaggaatctggagtagatatcgcagctggaaatatgctggtcaagaaaat

SEQ ID NO: 86431 - DNA, 201 bp, Homo sapiens
accaaacctgaagaagcctgcagcttcattttgagtgcagacttccctgctttggttgtgaaggccagtggtcttgcagctggaaaaggggtgattgttgsaaagagcaaagaagaggcctgcaaagctgtacaagagatcatgcaggagaaagcctttggggcagctggagaaacaattgtcattgaagaacttcttgac

SEQ ID NO: 86432 - DNA, 201 bp, Homo sapiens
ctccctcacctggaaagaatcactgagggtgatgttgttgttggaatagcttcatctggtcttcatagcaatggatttagccttgtgaggaaaatcgtggyaaaatcttccctccagtactcctctccagcacctgatggttgtggtgaccagactttaggggacttacttctcacgcctaccagaatctacagccattca

SEQ ID NO: 86433 - DNA, 201 bp, Homo sapiens
actaaaaacaagactagttagtgcagcatatctgagacatacagttttcttggtcttttttatgctctttttctaaccgtcaccccctctttttttttttrgtattgcctgacaacatgatgaatcacctccatgtttataagttttatgttttcagctgggcacagtggctcacgcctgtaatcccagcactttgggagg

SEQ ID NO: 86434 - DNA, 201 bp, Homo sapiens
gggtgatgttgttgttggaatagcttcatctggtcttcatagcaatggatttagccttgtgaggaaaatcgtggcaaaatcttccctccagtactcctctscagcacctgatggttgtggtgaccagactttaggggacttacttctcacgcctaccagaatctacagccattcactgttacctgtcctacgttcaggaca

SEQ ID NO: 86435 - DNA, 201 bp, Homo sapiens
atgcccatgagcaagccctggaaaccggagtcacagttactgggtgcactgtacactttgtagctgaagatgtggatgctggacagattattttgcaagawgctgttcccgtgaagaggggtgatactgtcgcaactctttctgaaagagtaaaattagcagaacataaaatatttcctgcagcccttcagctggtggcca

SEQ ID NO: 86436 - DNA, 201 bp, Homo sapiens
gaaggacacctctctgaggaagagatggccagaacatttaactgtggggttggcgctgtccttgtggtatcaaaggagcagacagagcagattctgagggrtatccagcagcacaaggaagaagcctgggtgattggcagtgtggttgcacgagctgaaggttccccacgtgtgaaagtcaagaatctgattgaaagcatg

SEQ ID NO: 86437 - DNA, 201 bp, Homo sapiens
tttcattttcctttggaatttctgctttacagacagaacaatggcagcccgagtacttataattggcagtggaggaagggaacatacgctggcctggaaayttgcacagtctcatcatgtcaaacaagtgttggttgccccaggaaacgcaggcactgcctgctctgaaaagatttcaaataccgccatctcaatcagtga

SEQ ID NO: 86438 - DNA, 201 bp, Homo sapiens
tgctttggttgtgaaggccagtggtcttgcagctggaaaaggggtgattgttgcaaagagcaaagaagaggcctgcaaagctgtacaagagatcatgcagsagaaagcctttggggcagctggagaaacaattgtcattgaagaacttcttgacggagaagaggtgtcgtgtctgtgtttcactgatggcaagactgtggc

SEQ ID NO: 86439 - DNA, 201 bp, Homo sapiens
tttgatttaaaagcagctggtttcaaagatccccttctggcctctggaacagatggcgttggaactaaactaaagattgcccagctatgcaataaacatgrtaccattggtcaagatttggtagcaatgtgtgttaatgatattctggcacaaggagcagagcccctcttcttccttgattacttttcctgtggaaaactt

SEQ ID NO: 86440 - DNA, 201 bp, Homo sapiens; identical to SEQ ID NO: 86430

SEQ ID NO: 86441 - DNA, 201 bp, Homo sapiens; identical to SEQ ID NO: 86434

SEQ ID NO: 86442 - DNA, 201 bp, Homo sapiens; identical to SEQ ID NO: 86435

SEQ ID NO: 86443 - DNA, 201 bp, Homo sapiens; identical to SEQ ID NO: 86438

SEQ ID NO: 86444 - DNA, 201 bp, Homo sapiens; identical to SEQ ID NO: 86439

SEQ ID NO: 86445 - DNA, 201 bp, Homo sapiens; identical to SEQ ID NO: 86429

SEQ ID NO: 86446 - DNA, 201 bp, Homo sapiens; identical to SEQ ID NO: 86431

SEQ ID NO: 86447 - DNA, 201 bp, Homo sapiens; identical to SEQ ID NO: 86433

SEQ ID NO: 86448 - DNA, 201 bp, Homo sapiens; identical to SEQ ID NO: 86432

SEQ ID NO: 86449 - DNA, 106 bp, Homo sapiens
agccgyctctcttgaggcgaccgtgtccgcataagttgtcagtccccagcagtgtttgggagccttaacaggcttgctaagtgcctgagattaaaggcgaagagga

SEQ ID NO: 86450 - DNA, 201 bp, Homo sapiens
ttcaggcgctctcaggtggcgccaagttcagtttcgacagggatatgcatccgggagagaatttttcagcccccgcccccactggcatgtgagaggaggarctcgctgttgccctgtgtcttccccaacagaacaatggcagcccgagtacttataattggcagtggaggaagggaacatacgctggcctggaaacttgca

SEQ ID NO: 86451 - DNA, 201 bp, Homo sapiens; identical to SEQ ID NO: 86436

SEQ ID NO: 86452 - DNA, 201 bp, Homo sapiens
gaggaactcgctgttgccctgtgtcttccccaacagaacaatggcagcccgagtacttataattggcagtggaggaagggaacatacgctggcctggaaayttgcacagtctcatcatgtcaaacaagtgttggttgccccaggaaacgcaggcactgcctgctctgaaaagatttcaaataccgccatctcaatcagtga

SEQ ID NO: 86453 - DNA, 201 bp, Homo sapiens
tgcagtcacagccatccgggaaaatctcatatcagcccttgaggaagccaagaaaggactagctgctataaagtttgagggagcaatttataggaaagacrtcggctttcgtgccatagctttcctccagcagcccaggtaaaactctaagcaagttagctgtagtgccatttcagaaactggcctaaatggctatgtaga

SEQ ID NO: 86454 - DNA, 201 bp, Homo sapiens; identical to SEQ ID NO: 86431

SEQ ID NO: 86455 - DNA, 108 bp, Homo sapiens
ggagccgyctctcttgaggcgaccgtgtccgcataagttgtcagtccccagcagtgtttgggagccttaacaggcttgctaagtgcctgagattaaaggcgaagagga

SEQ ID NO: 86456 - DNA, 201 bp, Homo sapiens
atagttcatggttttatcaaagaactgaagatgagaatactggtcatctaactttgtaatttgatttgattatactgtaaagtttgacagtctcattttawcactgcgtttgtatctattactaaaatgtattttttgacctcttactgattcattgttggtatgtacaaactgttgacttgtaaaatcaataaagtctta

SEQ ID NO: 86457 - DNA, 201 bp, Homo sapiens
tgtttgaatcaaaactggttatagcaatactcaaatggaaaaaacttcatgatagcgtaagtttggaaagtttagcaaaatcacagtggtactgatttttwtttgttttctattttttttattttatatttttaatttttttaacagggtcttcctctctcgcccaagttctcatgcctcagcctcccaaatagctgggac

SEQ ID NO: 86458 - DNA, 201 bp, Homo sapiens
caagttagctgtagtgccatttcagaaactggcctaaatggctatgtagaacatttcattaaccctataagtcattcagtattcttttctctctgtgggastgatacagtcttggtttgtattttgtttgaatcaaaactggttatagcaatactcaaatggaaaaaacttcatgatagcgtaagtttggaaagtttagca

SEQ ID NO: 86459 - DNA, 201 bp, Homo sapiens
gtgtttaacacacggctttcaggcgctctcagacagaacaatggcagcccgagtacttataattggcagtggaggaagggaacatacgctggcctggaaayttgcacagtctcatcatgtcaaacaagtgttggttgccccaggaaacgcaggcactgcctgctctgaaaagatttcaaataccgccatctcaatcagtga

SEQ ID NO: 86460 - DNA, 201 bp, Homo sapiens; identical to SEQ ID NO: 86438

SEQ ID NO: 86461 - DNA, 201 bp, Homo sapiens
atagcaatactcaaatggaaaaaacttcatgatagcgtaagtttggaaagtttagcaaaatcacagtggtactgatttttatttgttttctattttttttwttttatatttttaatttttttaacagggtcttcctctctcgcccaagttctcatgcctcagcctcccaaatagctgggactacaggcacaggccaccaca

SEQ ID NO: 86462 - DNA, 201 bp, Homo sapiens; identical to SEQ ID NO: 86430

SEQ ID NO: 86463 - DNA, 201 bp, Homo sapiens; identical to SEQ ID NO: 86431

SEQ ID NO: 86464 - DNA, 201 bp, Homo sapiens; identical to SEQ ID NO: 86437

SEQ ID NO: 86465 - DNA, 201 bp, Homo sapiens; identical to SEQ ID NO: 86438

SEQ ID NO: 86466 - DNA, 201 bp, Homo sapiens; identical to SEQ ID NO: 86453

SEQ ID NO: 86467 - DNA, 201 bp, Homo sapiens; identical to SEQ ID NO: 86431

SEQ ID NO: 86468 - DNA, 201 bp, Homo sapiens; identical to SEQ ID NO: 86456

SEQ ID NO: 86469 - DNA, 201 bp, Homo sapiens; identical to SEQ ID NO: 86457

SEQ ID NO: 86470 - DNA, 201 bp, Homo sapiens; identical to SEQ ID NO: 86458

SEQ ID NO: 86471 - DNA, 201 bp, Homo sapiens; identical to SEQ ID NO: 86437

SEQ ID NO: 86472 - DNA, 201 bp, Homo sapiens; identical to SEQ ID NO: 86438

SEQ ID NO: 86473 - DNA, 201 bp, Homo sapiens; identical to SEQ ID NO: 86461

SEQ ID NO: 86474 - DNA, 201 bp, Homo sapiens; identical to SEQ ID NO: 86429

SEQ ID NO: 86475 - DNA, 201 bp, Homo sapiens; identical to SEQ ID NO: 86430

SEQ ID NO: 86476 - DNA, 201 bp, Homo sapiens; identical to SEQ ID NO: 86431

SEQ ID NO: 86477 - DNA, 201 bp, Homo sapiens; identical to SEQ ID NO: 86432

SEQ ID NO: 86478 - DNA, 201 bp, Homo sapiens; identical to SEQ ID NO: 86433

SEQ ID NO: 86479 - DNA, 201 bp, Homo sapiens; identical to SEQ ID NO: 86434

SEQ ID NO: 86480 - DNA, 201 bp, Homo sapiens; identical to SEQ ID NO: 86435

SEQ ID NO: 86481 - DNA, 201 bp, Homo sapiens; identical to SEQ ID NO: 86436

SEQ ID NO: 86482 - DNA, 201 bp, Homo sapiens; identical to SEQ ID NO: 86437

SEQ ID NO: 86483 - DNA, 201 bp, Homo sapiens; identical to SEQ ID NO: 86438

SEQ ID NO: 86484 - DNA, 201 bp, Homo sapiens; identical to SEQ ID NO: 86439

SEQ ID NO: 86485 - DNA, 201 bp, Homo sapiens; identical to SEQ ID NO: 86429

SEQ ID NO: 86486 - DNA, 201 bp, Homo sapiens; identical to SEQ ID NO: 86430

SEQ ID NO: 86487 - DNA, 201 bp, Homo sapiens; identical to SEQ ID NO: 86431

SEQ ID NO: 86488 - DNA, 201 bp, Homo sapiens; identical to SEQ ID NO: 86432

SEQ ID NO: 86489 - DNA, 201 bp, Homo sapiens; identical to SEQ ID NO: 86433

SEQ ID NO: 86490 - DNA, 201 bp, Homo sapiens; identical to SEQ ID NO: 86434

SEQ ID NO: 86491 - DNA, 201 bp, Homo sapiens; identical to SEQ ID NO: 86435

SEQ ID NO: 86492 - DNA, 201 bp, Homo sapiens; identical to SEQ ID NO: 86436

SEQ ID NO: 86493 - DNA, 201 bp, Homo sapiens; identical to SEQ ID NO: 86437

SEQ ID NO: 86494 - DNA, 201 bp, Homo sapiens; identical to SEQ ID NO: 86438

SEQ ID NO: 86495 - DNA, 201 bp, Homo sapiens; identical to SEQ ID NO: 86439

SEQ ID NO: 86496 - DNA, 102 bp, Homo sapiens
asgcggcggcggcggcggcggcggcgtgaagtcactgctgctctgggttcgggttggcgactgaaggcggtggaaatttaaaattgtttacagtcaacactg

SEQ ID NO: 86497 - DNA, 201 bp, Homo sapiens
cagaagttagatatgtgattgattattatgatggtggtgaagtcaacaaggactaccagttcaccatcctggacgtccgtcctgccttagattcactttcrgcagtatgggacagaatgaaagtcgcttggtggcgttggacctcgtaaagcactgtttcagatggaaaaatataaactatttttttctgagcgatacatt

SEQ ID NO: 86498 - DNA, 201 bp, Homo sapiens
acagagccatctggcccaacctgtgagaagaaaacatactctgtgcctgcccaccaggaacgcgcctatgagtacgtggagtgtcccattaggggcactgyggctgagaataaggagaacctagatccttcaaatctgatgccaccaccaaatcaaacaccagctccagatcagccatttgcattgtctactgtcagagaa

SEQ ID NO: 86499 - DNA, 156 bp, Homo sapiens
gtgcgtgagaacgccggcggtgaccgcagccacagcggtgaccgagtgagaggaasgcggcggcggcggcggcggcggcgtgaagtcactgctgctctgggttcgggttggcgactgaaggcggtaccggcctcccggaacagcccgggggagggc

SEQ ID NO: 86500 - DNA, 201 bp, Homo sapiens; identical to SEQ ID NO: 86497

SEQ ID NO: 86501 - DNA, 201 bp, Homo sapiens; identical to SEQ ID NO: 86498

SEQ ID NO: 86502 - DNA, 201 bp, Homo sapiens
ttgcaagtgggatctcatcgtgtccgtatgtcaaggggatttgaagccaatgcacctgcttttgacaggcattttagaacacttaagaacttatatggtaracaaataatagtaaatttgcttggatctaaggaaggtgaacatatgctaagtaaagctttccagagtcatttgaaagcttctgaacatgctgctgatatc

SEQ ID NO: 86503 - DNA, 201 bp, Homo sapiens
aataactagccattattctatgtattattaaatatttactagttctgttaaaagcagagcagaagttagacactaaggatctctttgtgaactctgtgttctctatattagattgctgtttatatgtaagaattttattgcttatgtggcatacaatatttataactataaactttatagaagtacagtattaaagtcagt

SEQ ID NO: 86504 - DNA, 201 bp, Homo sapiens
tgaattaacttgttgaaactgtggctttaacatccatgtgactagtgtatatggtatttgctctccattagcaaaataattcattgttaggtaaacttcaytagtgcaaattgcagatctgtgagcaatgtttcctattgaatataaactactgtctaaaatatacatatcagcagcccagcctttatcaggaaaattata

SEQ ID NO: 86505 - DNA, 201 bp, Homo sapiens
tgaaagggaagtcaaagtcagcttgttcagacttactgggtaatcagccaagttcattttctggctccaacctgacattgaatgatgactggaataaaggkacaaatgtctccttctgtgtgttgccgtcaagaagacctcctccacctcctgtccctctgctcccgcccggcaccagccctccagtagatcctttcacga

SEQ ID NO: 86506 - DNA, 201 bp, Homo sapiens
agccctggaacaacaaggaaagataatataggacgcagtcagccttcacctcaagcaggacttgcaggcccaggacctgctggatacagtacagccagacygacgattcctcctcgtgctggagttatcagtgccccacagagccacgcgcgggcatctgctggaagactgactcctgaaagccaaagcaaaacatcagaa

SEQ ID NO: 86507 - DNA, 201 bp, Homo sapiens
tggtgaagatgcagaggttgcagcagattttgatatggaaggtgatgttgatgactatagtgctgaagtggaggaacttcttcctcagcatctccagccaycttcaagttccggccttggtacttcccccagctcttcaccccgaactagtccctgccagtcacctacaatatcagagggtcctgtaccttcccttcccat

SEQ ID NO: 86508 - DNA, 201 bp, Homo sapiens
tccaacctgacattgaatgatgactggaataaaggtacaaatgtctccttctgtgtgttgccgtcaagaagacctcctccacctcctgtccctctgctccygcccggcaccagccctccagtagatcctttcacgaccttggcctctaaggcttcacccacactggactttacagaaagataacgccatgcaatagaaaac

SEQ ID NO: 86509 - DNA, 201 bp, Homo sapiens
aaaattgggattctcttatagcaggagatcaacttatcaatcagaaaaatgctggacaggtttttagaggatttttagaaggaaaggtaacctttgctccracatataagtatgacttgttttctgacgactatgacaccagtgaaaagtgccgcacccctgcctggacagaccgtgtcctttggagaaggaggaaatggc

SEQ ID NO: 86510 - DNA, 201 bp, Homo sapiens
cccacagagccacgcgcgggcatctgctggaagactgactcctgaaagccaaagcaaaacatcagaaacgtcgaaaggttcaactttccttcctgaaccaytgaagcctcaggctgcttttcctccgcagtcttctttgcccccgcctgctcaaaggttgcaagagcctcttgtccctgtggcagcacctatgcctcagtc

SEQ ID NO: 86511 - DNA, 201 bp, Homo sapiens
gggagcagttgcaatccgaatgctcttccatacaaccagcctttgcttcgtctgtagccactttgctgcagggcagtcacaagtcaaagaaagaaatgaasattttatagaaatagcacgaaaattgagttttcctatgggaaggatgctattttcccatgactatgtattttggtgtggtgatttcaactatcgaatcga

SEQ ID NO: 86512 - DNA, 201 bp, Homo sapiens
ttttctggaatcagtctttgcatttgcatctcaaacactatggcgtgaattgtgatgactggttattacgtcttatgtgtggaggagtagaaatcagaacratttatgctgctcataaacaggcgaaggcttgcctcatttcaagattaagctgtgaacgagctgggaccaggtttaatgtccggggaacaaatgatgatg

SEQ ID NO: 86513 - DNA, 201 bp, Homo sapiens; identical to SEQ ID NO: 86502

SEQ ID NO: 86514 - DNA, 201 bp, Homo sapiens; identical to SEQ ID NO: 86503

SEQ ID NO: 86515 - DNA, 201 bp, Homo sapiens; identical to SEQ ID NO: 86504

SEQ ID NO: 86516 - DNA, 201 bp, Homo sapiens; identical to SEQ ID NO: 86505

SEQ ID NO: 86517 - DNA, 201 bp, Homo sapiens; identical to SEQ ID NO: 86506

SEQ ID NO: 86518 - DNA, 201 bp, Homo sapiens; identical to SEQ ID NO: 86507

SEQ ID NO: 86519 - DNA, 201 bp, Homo sapiens; identical to SEQ ID NO: 86508

SEQ ID NO: 86520 - DNA, 201 bp, Homo sapiens; identical to SEQ ID NO: 86509

SEQ ID NO: 86521 - DNA, 201 bp, Homo sapiens; identical to SEQ ID NO: 86510

SEQ ID NO: 86522 - DNA, 201 bp, Homo sapiens; identical to SEQ ID NO: 86511

SEQ ID NO: 86523 - DNA, 201 bp, Homo sapiens; identical to SEQ ID NO: 86512

SEQ ID NO: 86524 - DNA, 201 bp, Homo sapiens; identical to SEQ ID NO: 86502

SEQ ID NO: 86525 - DNA, 201 bp, Homo sapiens; identical to SEQ ID NO: 86503

SEQ ID NO: 86526 - DNA, 201 bp, Homo sapiens; identical to SEQ ID NO: 86504

SEQ ID NO: 86527 - DNA, 201 bp, Homo sapiens; identical to SEQ ID NO: 86505

SEQ ID NO: 86528 - DNA, 201 bp, Homo sapiens; identical to SEQ ID NO: 86506

SEQ ID NO: 86529 - DNA, 201 bp, Homo sapiens; identical to SEQ ID NO: 86507

SEQ ID NO: 86530 - DNA, 201 bp, Homo sapiens; identical to SEQ ID NO: 86508

SEQ ID NO: 86531 - DNA, 201 bp, Homo sapiens; identical to SEQ ID NO: 86509

SEQ ID NO: 86532 - DNA, 201 bp, Homo sapiens; identical to SEQ ID NO: 86510

SEQ ID NO: 86533 - DNA, 201 bp, Homo sapiens; identical to SEQ ID NO: 86511

SEQ ID NO: 86534 - DNA, 201 bp, Homo sapiens; identical to SEQ ID NO: 86512

SEQ ID NO: 86535 - DNA, 201 bp, Homo sapiens
taaagtagatattatcgccatcaatgacccattcattgacctcagctacatggtctacatgttccagtatgatcccacccatggtaaattccatggcaccrtcaaggctgagaacgggaagcttgtcatcaatggaaatcccatcactatcttccaggagccagatccctccaaaatcaagtggggtgatgctggcactga

SEQ ID NO: 86536 - DNA, 161 bp, Homo sapiens
atggggaaagtgaaggttggagtcaatggatttggttgtattgggcgcctggtcatcaggrctgcttgtaattctggtaaagtagatattatcgccatcaatgacccattcattgacctcagctacatggtctacatgttccagtatgatcccacccatgg

SEQ ID NO: 86537 - DNA, 201 bp, Homo sapiens
tagcgcccctggccaaagtcatcactgacaactttggtatcgtggaaggactcatgaccacagtccacgccatcactgccacccagaagactgtgaatggmccctccaggaaactgtggcgtgacagccacagggctctccagaacatcatccctgccactactgggctgccaaggctgtgaggaaggtcatccctgagct

SEQ ID NO: 86538 - DNA, 201 bp, Homo sapiens
atgctggggctcacttgcagtggggagccaaaagggtcatcatctctgccccctctgctgatccccccatgttcacgatgggtgtgaaccatgagaagtaygacaacagcctcaagatcatcagcaatgccacctgaaccaccaactgcctagcgcccctggccaaagtcatcactgacaactttggtatcgtggaaggac

SEQ ID NO: 86539 - DNA, 201 bp, Homo sapiens; identical to SEQ ID NO: 86535

SEQ ID NO: 86540 - DNA, 161 bp, Homo sapiens; identical to SEQ ID NO: 86536

SEQ ID NO: 86541 - DNA, 201 bp, Homo sapiens
atgtcatggagtccactggcatcttcaccaccatggagaatgctggggctcacttgcagtggggagccaaaagggtcatcatctctgccccctctgctgayccccccatgttcacgatgggtgtgaaccatgagaagtatgacaacagcctcaagatcatcagcaatgccacctgaaccaccaactgcctagcgcccctgg

SEQ ID NO: 86542 - DNA, 201 bp, Homo sapiens
agctaagcctgggatgaccaaattcaccccagctccttcattcacagggctggatgtagctgggattgagtccatgttatcggctcggtactcaacacaarccaagtttcatccgaggaaatgtccccgcagtggatgcagctcacatgctgaggaacacccagctctggacagagttcttataaatgtataaattaggct

SEQ ID NO: 86543 - DNA, 201 bp, Homo sapiens
aagtcactgattagttcccacttggtgccccaggcaataataggcccgtctcttgggcacgcacactcttcatactaagtgtttgacatacacctggattrttgcatttcaggggtcagtatcctatgacatgatgggtgttaccatcctaattttacaggcaaggacacagcagctgcgagaggtacagaaacttgtccc

SEQ ID NO: 86544 - DNA, 201 bp, Homo sapiens
tgaaatccacgccagaatgtcggtgttcatgaagtcactgattagttcccacttggtgccccaggcaataataggcccgtctcttgggcacgcacactctrcatactaagtgtttgacatacacctggatttttgcatttcaggggtcagtatcctatgacatgatgggtgttaccatcctaattttacaggcaaggacac

SEQ ID NO: 86545 - DNA, 201 bp, Homo sapiens
ggcatagaatgggtccatcgcttttgtcctcaggcggcgtttgtgatgaaaacagactcagacatgttcatcaatgttgactatctgactgaactgcttcygaagaaaaacagaacaaccaggtttttcactggcttcttgaaactcaatgagtttcccatcaggcagccattcagcaagtggtttgtcagtaaatctgaa

SEQ ID NO: 86546 - DNA, 201 bp, Homo sapiens
tgtttgtattttagcatgtacagtctaaatcctttcaaagaacagtcctttgtttacaagaaagacgggaacttccttaagctcccagatacagactgcargcagacacctcccttcctcgtcctgctggtgacctcatcccacaaacagttggctgagcgcatggccatccggcagacgtgggggaaagagaggacggtg

SEQ ID NO: 86547 - DNA, 201 bp, Homo sapiens
aagacgtgtttgtggggctctgcctcgaaaggctgaacatcagattggaggagctccactcccagccgaccttttttccagggggcttacgcttctccgtytgcctcttcaggaggatcgtggcctgccacttcatcaagcctcggactctcttggactactggcaggctctagagaattcccggggggaagattgtccgc

SEQ ID NO: 86548 - DNA, 201 bp, Homo sapiens; identical to SEQ ID NO: 86542

SEQ ID NO: 86549 - DNA, 201 bp, Homo sapiens; identical to SEQ ID NO: 86543

SEQ ID NO: 86550 - DNA, 201 bp, Homo sapiens; identical to SEQ ID NO: 86544

SEQ ID NO: 86551 - DNA, 201 bp, Homo sapiens; identical to SEQ ID NO: 86545

SEQ ID NO: 86552 - DNA, 201 bp, Homo sapiens; identical to SEQ ID NO: 86546

SEQ ID NO: 86553 - DNA, 201 bp, Homo sapiens; identical to SEQ ID NO: 86547

SEQ ID NO: 86554 - DNA, 201 bp, Homo sapiens
gcaaggacacagcagctgcgagaggtacagaaacttgtcccaaggctcacagccagtaggcataggagcgggaatgaaaatcgagcactgtcagaatctgrtgggcagcccctgacttgaaccactcccacgtgctgcctcccttaggaggggacactgatgatgaggtctcggagccggcatccttccatccctgtcgag

SEQ ID NO: 86555 - DNA, 201 bp, Homo sapiens
ccagctctggacagagttcttataaatgtataaattaggctcagaaaccactgcattctgacctgctgtacagactgcccacactgctgacctgcctagcragcaggacatcccttctgagccatctgctgctctctcatttcatcaccccaactgtcccttgtttttgatcaatggggaccagccactgccccaggagca

SEQ ID NO: 86556 - DNA, 201 bp, Homo sapiens
catgatgggtgttaccatcctaattttacaggcaaggacacagcagctgcgagaggtacagaaacttgtcccaaggctcacagccagtaggcataggagcrggaatgaaaatcgagcactgtcagaatctggtgggcagcccctgacttgaaccactcccacgtgctgcctcccttaggaggggacactgatgatgaggtc

SEQ ID NO: 86557 - DNA, 201 bp, Homo sapiens
tcaggcagccattcagcaagtggtttgtcagtaaatctgaatatccgtgggacaggtacccaccattctgctccggcaccggctacgtgttttctggcgaygtggcgagtcaggtgtacaatgtctccaagagcgtcccatacattaaactggaagacgtgtttgtggggctctgcctcgaaaggctgaacatcagattgg

SEQ ID NO: 86558 - DNA, 201 bp, Homo sapiens
  misc_feature (1)...(201): n = A,T,C or G
tgcaggcagacacctcccttcctcgtcctgctggtgacctcatcccacaaacagttggctgagcgcatggccatccggcagacgtgggggaaagagagganggtgaagggaaagcagctgaagacattcttcctcctggggaccaccagcagtgcagcggaaacaaaagaggtggaccaggagagccagcgacacggggac

SEQ ID NO: 86559 - DNA, 201 bp, Homo sapiens
gcatggccatccggcagacgtgggggaaagagaggacggtgaagggaaagcagctgaagacattcttcctcctggggaccaccagcagtgcagcggaaacraaagaggtggaccaggagagccagcgacacggggacattatccagaaggatttcctagacgtctattacaatctgaccctgaagaccatgatgggcatag

SEQ ID NO: 86560 - DNA, 201 bp, Homo sapiens
ctggcaggctctagagaattcccggggggaagattgtccgcctgtctgaggggagcccagaggcacatccggacaagtttcagataacccgtggggatagyttttgctagattttggaagagggggcgggacagaggatgctgttcttcagtgctgaaatccacgccagaatgtcggtgttcatgaagtcactgattagtt

SEQ ID NO: 86561 - DNA, 201 bp, Homo sapiens
tgttcatcaatgttgactatctgactgaactgcttctgaagaaaaacagaacaaccaggtttttcactggcttcttgaaactcaatgagtttcccatcagrcagccattcagcaagtggtttgtcagtaaatctgaatatccgtgggacaggtacccaccattctgctccggcaccggctacgtgttttctggcgacgtgg

SEQ ID NO: 86562 - DNA, 201 bp, Homo sapiens
caggagagccagcgacacggggacattatccagaaggatttcctagacgtctattacaatctgaccctgaagaccatgatgggcatagaatgggtccatcrcttttgtcctcaggcggcgtttgtgatgaaaacagactcagacatgttcatcaatgttgactatctgactgaactgcttctgaagaaaaacagaacaacc

SEQ ID NO: 86563 - DNA, 201 bp, Homo sapiens; identical to SEQ ID NO: 86542

SEQ ID NO: 86564 - DNA, 201 bp, Homo sapiens; identical to SEQ ID NO: 86543

SEQ ID NO: 86565 - DNA, 201 bp, Homo sapiens; identical to SEQ ID NO: 86544

SEQ ID NO: 86566 - DNA, 201 bp, Homo sapiens; identical to SEQ ID NO: 86545

SEQ ID NO: 86567 - DNA, 201 bp, Homo sapiens; identical to SEQ ID NO: 86546

SEQ ID NO: 86568 - DNA, 201 bp, Homo sapiens; identical to SEQ ID NO: 86547

SEQ ID NO: 86569 - DNA, 201 bp, Homo sapiens; identical to SEQ ID NO: 86555

SEQ ID NO: 86570 - DNA, 201 bp, Homo sapiens
tcagatcagagactgtaaaaagtaacttaaaaaaaaataattctggcagagacagaatttgaaggtacttgtgcacatcagaacactggacttgcttttttctgggagcaggaatgctgcttaattagatcagagaagaatgcaagtggtccatacatttagatctacaatgcgtggtttccagacctgcagcttgttttg

SEQ ID NO: 86571 - DNA, 201 bp, Homo sapiens; identical to SEQ ID NO: 86560

SEQ ID NO: 86572 - DNA, 201 bp, Homo sapiens; identical to SEQ ID NO: 86562

SEQ ID NO: 86573 - DNA, 201 bp, Homo sapiens; identical to SEQ ID NO: 86554

SEQ ID NO: 86574 - DNA, 201 bp, Homo sapiens; identical to SEQ ID NO: 86556

SEQ ID NO: 86575 - DNA, 201 bp, Homo sapiens; identical to SEQ ID NO: 86557

SEQ ID NO: 86576 - DNA, 201 bp, Homo sapiens; identical to SEQ ID NO: 86558
  misc_feature (1)...(201): n = A,T,C or G

SEQ ID NO: 86577 - DNA, 201 bp, Homo sapiens; identical to SEQ ID NO: 86559

SEQ ID NO: 86578 - DNA, 201 bp, Homo sapiens; identical to SEQ ID NO: 86561

SEQ ID NO: 86579 - DNA, 201 bp, Homo sapiens
aggctgaggatgggcactggacgggtgattatggtggcccacttttcctcctgccaggcctcctgatcacttgccacgtggcacgcatccctctgccagcyggatacagagaagagattgtgcggtacctgcggtcagtgcagctccctgacggtggctggggcctgcacattgaggataagtccaccgtgtttgggactg

SEQ ID NO: 86580 - DNA, 201 bp, Homo sapiens
tcactctccctcaggcagtggagatctgcgtctggacaccctcagatcctgtcattgcctgcccagagtccttcaggggcacccctctgccttggtgtgcrgtccagggctctcacccaggtgccgcaccctctggggtcttctgtccagctcccttgccccatgtgctgtcactgactctccttgggactcgcctgcctg

SEQ ID NO: 86581 - DNA, 201 bp, Homo sapiens
tcaggtcctggctttgcctttgcctgatgtggatgagcagctcacatgctcagggccacctgagactgtcactgctctcccctggctactgggaggagtcrctgagagcttcgttacccctgctgccttgcccagggcacaccctatacctcctcatctgctcttcccctccctgccgccttctgggcaggtagcagtccc

SEQ ID NO: 86582 - DNA, 201 bp, Homo sapiens
tttcctgactgggcaccggcacacccctccacactctggtgccactgccggcaggtgtacctgcccatgagctactgctacgccgttcggctgagtgccgyggaagacccgctggtccagagcctccgccaggagctctatgtggaggacttcgccagcattgactggctggcgcagaggaacaacgtggcccccgacgag

SEQ ID NO: 86583 - DNA, 201 bp, Homo sapiens
gccacctgagactgtcactgctctcccctggctactgggaggagtcactgagagcttcgttacccctgctgccttgcccagggcacaccctatacctcctyatctgctcttcccctccctgccgccttctgggcaggtagcagtccctggcctctccccctggctgatcactctccctcaggcagtggagatctgcgtctg

SEQ ID NO: 86584 - DNA, 201 bp, Homo sapiens
ggcctgcacattgaggataagtccaccgtgtttgggactgcgctcaactatgtgtctctcagaattctgggtgttgggcctgacgatcctgacctggtacragcccggaacattcttcacaagaaaggtggtgctgtggccatcccctcctgggggaagttctggctggctgtcctgaatgtttacagctgggaaggcctc

SEQ ID NO: 86585 - DNA, 201 bp, Homo sapiens
acagaaatgcacaggggaggccgagcataaccaggggtgaggggcaggcagcagttgtagttactgccgcggggcactgctatgtgcagggacagccagcrcccagcccatcaccactccctgggctggctggcaggtatggcaccctgggagcccggcatatacccagggcacccctacggctgccgccagtctcatgcc

SEQ ID NO: 86586 - DNA, 201 bp, Homo sapiens
tggtccagagcctccgccaggagctctatgtggaggacttcgccagcattgactggctggcgcagaggaacaacgtggcccccgacgagctgtacacgccscacagctggctgctccgcgtggtatatgcgctcctcaacctgtatgagcaccaccacagtgcccacctgcggcagcgggccgtgcagaagctgtatgaac

SEQ ID NO: 86587 - DNA, 201 bp, Homo sapiens
tacctgctgggtgccgtctgtgcgttccagtgaggccaaggggtcctggccgggttggggagccctcccataaccctgtcttgggctccaacccctcaacytctatctcatagatgtgaatctgggggccaggctggaggcagggatggggacagggtgggtggcttagactcttgatttttactgtaggttcatttctga

SEQ ID NO: 86588 - DNA, 201 bp, Homo sapiens
ctgtgcagaggtctcccgggcctgtgacttcctgctgtcccggcagatggcagacggaggctggggggaggactttgagtcctgcgaggagcggcgttatktgcagagtgcccagtcccagatccataacacatgctgggccatgatggggctgatggccgttcggcatcctgacatcgaggcccaggagagaggagtccg

SEQ ID NO: 86589 - DNA, 201 bp, Homo sapiens
acctggtttggcctggaggccttcgcctgtatggggcagacctaccgagatgggactgcctgtgcagaggtctcccgggcctgtgacttcctgctgtcccrgcagatggcagacggaggctggggggaggactttgagtcctgcgaggagcggcgttatttgcagagtgcccagtcccagatccataacacatgctgggcc

SEQ ID NO: 86590 - DNA, 201 bp, Homo sapiens
ctggggagtttgcttcacctacggcacctggtttggcctggaggccttcgcctgtatggggcagacctaccgagatgggactgcctgtgcagaggtctccygggcctgtgacttcctgctgtcccggcagatggcagacggaggctggggggaggactttgagtcctgcgaggagcggcgttatttgcagagtgcccagtc

SEQ ID NO: 86591 - DNA, 201 bp, Homo sapiens
aggaacaacgtggcccccgacgagctgtacacgccgcacagctggctgctccgcgtggtatatgcgctcctcaacctgtatgagcaccaccacagtgcccrcctgcggcagcgggccgtgcagaagctgtatgaacacattgtggccgacgaccgattcaccaagagcatcagcatcggcccgatctcgaaaaccatcaac

SEQ ID NO: 86592 - DNA, 201 bp, Homo sapiens
acttcctgctgtcccggcagatggcagacggaggctggggggaggactttgagtcctgcgaggagcggcgttatttgcagagtgcccagtcccagatccayaacacatgctgggccatgatggggctgatggccgttcggcatcctgacatcgaggcccaggagagaggagtccggtgtctacttgagaaacagctcccca

SEQ ID NO: 86593 - DNA, 201 bp, Homo sapiens; identical to SEQ ID NO: 86579

SEQ ID NO: 86594 - DNA, 201 bp, Homo sapiens; identical to SEQ ID NO: 86580

SEQ ID NO: 86595 - DNA, 201 bp, Homo sapiens; identical to SEQ ID NO: 86581

SEQ ID NO: 86596 - DNA, 201 bp, Homo sapiens; identical to SEQ ID NO: 86582

SEQ ID NO: 86597 - DNA, 201 bp, Homo sapiens; identical to SEQ ID NO: 86583

SEQ ID NO: 86598 - DNA, 201 bp, Homo sapiens; identical to SEQ ID NO: 86584

SEQ ID NO: 86599 - DNA, 201 bp, Homo sapiens; identical to SEQ ID NO: 86585

SEQ ID NO: 86600 - DNA, 201 bp, Homo sapiens; identical to SEQ ID NO: 86586

SEQ ID NO: 86601 - DNA, 201 bp, Homo sapiens; identical to SEQ ID NO: 86587

SEQ ID NO: 86602 - DNA, 176 bp, Homo sapiens
tgggcggcgtagagcactgcagcagcaatgacggagggcacgtgagtcccctcgccccgggctcctgacgaatgcrgggtggtcctaggtgtctgcggcgccgagggggcccctacaagaccgagcccgccaccgacctcggccgctggcgactcaactgcgagaggggccggcag

SEQ ID NO: 86603 - DNA, 201 bp, Homo sapiens; identical to SEQ ID NO: 86588

SEQ ID NO: 86604 - DNA, 201 bp, Homo sapiens; identical to SEQ ID NO: 86589

SEQ ID NO: 86605 - DNA, 201 bp, Homo sapiens; identical to SEQ ID NO: 86590

SEQ ID NO: 86606 - DNA, 201 bp, Homo sapiens; identical to SEQ ID NO: 86591

SEQ ID NO: 86607 - DNA, 201 bp, Homo sapiens; identical to SEQ ID NO: 86592

SEQ ID NO: 86608 - DNA, 201 bp, Homo sapiens; identical to SEQ ID NO: 86579

SEQ ID NO: 86609 - DNA, 201 bp, Homo sapiens; identical to SEQ ID NO: 86581

SEQ ID NO: 86610 - DNA, 201 bp, Homo sapiens; identical to SEQ ID NO: 86582

SEQ ID NO: 86611 - DNA, 201 bp, Homo sapiens
gccacctgagactgtcactgctctcccctggctactgggaggagtcactgagagcttcgttacccctgctgccttgcccagggcacaccctatacctcctyatctgctcttcccctccctgccgccttctgggcaggtagcagtccctggcctctccccctggctgctgtccctgggactcctagccatggtcagactgta

SEQ ID NO: 86612 - DNA, 201 bp, Homo sapiens; identical to SEQ ID NO: 86584

SEQ ID NO: 86613 - DNA, 201 bp, Homo sapiens; identical to SEQ ID NO: 86585

SEQ ID NO: 86614 - DNA, 201 bp, Homo sapiens; identical to SEQ ID NO: 86587

SEQ ID NO: 86615 - DNA, 201 bp, Homo sapiens; identical to SEQ ID NO: 86586

SEQ ID NO: 86616 - DNA, 201 bp, Homo sapiens; identical to SEQ ID NO: 86588

SEQ ID NO: 86617 - DNA, 201 bp, Homo sapiens; identical to SEQ ID NO: 86589

SEQ ID NO: 86618 - DNA, 201 bp, Homo sapiens; identical to SEQ ID NO: 86590

SEQ ID NO: 86619 - DNA, 201 bp, Homo sapiens; identical to SEQ ID NO: 86591

SEQ ID NO: 86620 - DNA, 201 bp, Homo sapiens; identical to SEQ ID NO: 86592

SEQ ID NO: 86621 - DNA, 201 bp, Homo sapiens; identical to SEQ ID NO: 86579

SEQ ID NO: 86622 - DNA, 201 bp, Homo sapiens; identical to SEQ ID NO: 86580

SEQ ID NO: 86623 - DNA, 201 bp, Homo sapiens; identical to SEQ ID NO: 86581

SEQ ID NO: 86624 - DNA, 201 bp, Homo sapiens; identical to SEQ ID NO: 86582

SEQ ID NO: 86625 - DNA, 201 bp, Homo sapiens; identical to SEQ ID NO: 86583

SEQ ID NO: 86626 - DNA, 201 bp, Homo sapiens; identical to SEQ ID NO: 86584

SEQ ID NO: 86627 - DNA, 201 bp, Homo sapiens; identical to SEQ ID NO: 86585

SEQ ID NO: 86628 - DNA, 201 bp, Homo sapiens; identical to SEQ ID NO: 86586

SEQ ID NO: 86629 - DNA, 201 bp, Homo sapiens; identical to SEQ ID NO: 86587

SEQ ID NO: 86630 - DNA, 201 bp, Homo sapiens; identical to SEQ ID NO: 86588

SEQ ID NO: 86631 - DNA, 201 bp, Homo sapiens; identical to SEQ ID NO: 86589

SEQ ID NO: 86632 - DNA, 201 bp, Homo sapiens; identical to SEQ ID NO: 86590

SEQ ID NO: 86633 - DNA, 201 bp, Homo sapiens; identical to SEQ ID NO: 86591

SEQ ID NO: 86634 - DNA, 201 bp, Homo sapiens; identical to SEQ ID NO: 86592

SEQ ID NO: 86635 - DNA, 201 bp, Homo sapiens; identical to SEQ ID NO: 86579

SEQ ID NO: 86636 - DNA, 201 bp, Homo sapiens; identical to SEQ ID NO: 86582

SEQ ID NO: 86637 - DNA, 201 bp, Homo sapiens
aggcaggacttcagtgtcagtatccctgccttcagtcttctttagaaatcacatctgtgttcaatccattgtttagagggagtgtatttttcctgttccaygaagaggactttttgttcacaattggatcacaatgcagaggagtctgttcctcccccgtcggcttctcggtgctgggagggtgacctgtcccagatgact

SEQ ID NO: 86638 - DNA, 201 bp, Homo sapiens; identical to SEQ ID NO: 86584

SEQ ID NO: 86639 - DNA, 201 bp, Homo sapiens
aggactttttgttcacaattggatcacaatgcagaggagtctgttcctcccccgtcggcttctcggtgctgggagggtgacctgtcccagatgactcatcmccctgacatgctcttgacaaaggacaccaccaagaggagatggcagctgtaccggtgcagcctctgtctgagggggatatttgcctcagtgtgattaaaa

SEQ ID NO: 86640 - DNA, 201 bp, Homo sapiens; identical to SEQ ID NO: 86586

SEQ ID NO: 86641 - DNA, 201 bp, Homo sapiens; identical to SEQ ID NO: 86588

SEQ ID NO: 86642 - DNA, 201 bp, Homo sapiens; identical to SEQ ID NO: 86589

SEQ ID NO: 86643 - DNA, 201 bp, Homo sapiens; identical to SEQ ID NO: 86590

SEQ ID NO: 86644 - DNA, 201 bp, Homo sapiens; identical to SEQ ID NO: 86591

SEQ ID NO: 86645 - DNA, 201 bp, Homo sapiens; identical to SEQ ID NO: 86592

SEQ ID NO: 86646 - DNA, 201 bp, Homo sapiens
ggctcctggaaaggaccgtccacccctccgcgctggcggtgtggacgcggaactcagcggagaaacgcgattgagagcagtgtgtggattacactatcacyggaaaaatacgaattgagaagaaggaaaagactggaagatgcagaccttggttcctgttagtggaaacactgtaaggtcccagaaatggaaaagaaaatg

SEQ ID NO: 86647 - DNA, 185 bp, Homo sapiens
gcggggcgccgggccctgggcggggccttcccggctgacggcctgcgtgcactgcgcttgcgcgggttgagggcggtggctcagkctcctggaaaggaccgtccacccctccgcgctggcggtgtggacgcggaactcagcggagaaacgcgattgagagcagtgtgtggattacactatcactg

SEQ ID NO: 86648 - DNA, 201 bp, Homo sapiens
tgccgtcgctcatccactcgtgtgggacgtaggattgcacagggctgtgccagtggcgtgtagggaacactgccctggctcagcgtgcgagctaaggtggygatgtatgcgatgggactctgcatgggatagtacagttgtgtagacgtcttccaaataaattatgtgttggtccatcgcacatgctcaataaatattttt

SEQ ID NO: 86649 - DNA, 116 bp, Homo sapiens
caccctctcaagggtgatgtcctgacttgtaactgtcgattactcttgcctgaatggagttgtacacgtgttcttttgtgtctgccttctttaattaaacattgtttgtgagactc

SEQ ID NO: 86650 - DNA, 201 bp, Homo sapiens
ctgccgtcgctcatccactcgtgtgggacgtaggattgcacagggctgtgccagtggcgtgtagggaacactgccctggctcagcgtgcgagctaaggtgktgatgtatgcgatgggactctgcatgggatagtacagttgtgtagacgtcttccaaataaattatgtgttggtccatcgcacatgctcaataaatatttt

SEQ ID NO: 86651 - DNA, 201 bp, Homo sapiens
ggattgcactgctgcactccagcgtgggtgacagagcaagaccctgtctcaaaaaccccaaaaaacaaaactgaaatatcaaatatatattgaaaacagtkctagtcatgggtacatagatgatggcattttataaagtggacgcacatgtaaccagcatccaggccaggacacactacagattccccgattccccttcca

SEQ ID NO: 86652 - DNA, 201 bp, Homo sapiens
ggtcggagctccatgttcctaagctaggtctaggtctacactcctaggacgcacgcatatcagcccgtgtaccctgtgacagtgactgtccccacctcctrtgttagtggtgcccttactgccgtcgctcatccactcgtgtgggacgtaggattgcacagggctgtgccagtggcgtgtagggaacactgccctggctca

SEQ ID NO: 86653 - DNA, 185 bp, Homo sapiens; identical to SEQ ID NO: 86647

SEQ ID NO: 86654 - DNA, 201 bp, Homo sapiens
tgttattttttgtaattacaggatcatactatatgcattgctttataagtttttctcaatattgtgaaaaaacttccacatcagtagatacatgtccatamtttttttttgtattgttttgatttttattaaattttattgaaatataggctgggtgcagtggcttacctctgtaatcccaacactttgagaggctgaggt

SEQ ID NO: 86655 - DNA, 201 bp, Homo sapiens; identical to SEQ ID NO: 86646

SEQ ID NO: 86656 - DNA, 201 bp, Homo sapiens
cctggctcagcgtgcgagctaaggtggtgatgtatgcgatgggactctgcatgggatagtacagttgtgtagacgtcttccaaataaattatgtgttggtscatcgcacatgctcaataaatatttttaaatgagtgaatgtcattgtgtatcctgttttatgcatatatgttattttttgtaattacaggatcatactat

SEQ ID NO: 86657 - DNA, 201 bp, Homo sapiens
ggctgtgtttccaggtgttcacccgtggtctaggtctacactcctaggacgcacgcatatcagcccgtgtaccctgtgacagtgactgtccccacctcctrtgttagtggtgcccttactgccgtcgctcatccactcgtgtgggacgtaggattgcacagggctgtgccagtggcgtgtagggaacactgccctggctca

SEQ ID NO: 86658 - DNA, 201 bp, Homo sapiens; identical to SEQ ID NO: 86657

SEQ ID NO: 86659 - DNA, 201 bp, Homo sapiens
gaataaaccgtgtatacagaatggatgtttgcttgcataaataaatttatataaatatgtctgggggataaaaataagtatatcacaatgctaagacaggmatatggggaatttaagcttttctttatacttgtccatagtttccaatttttaaatttgtaattttttatcagaaaaataaatgtgtaaatatagtggaat

SEQ ID NO: 86660 - DNA, 201 bp, Homo sapiens
agcactgctgtgtgtctgttaaaaaagaaaccataggtttttagggatatgtaatgatatttagaaagggtttaagagacagtaaagcttggcagaataamccgtgtatacagaatggatgtttgcttgcataaataaatttatataaatatgtctgggggataaaaataagtatatcacaatgctaagacaggcatatgg

SEQ ID NO: 86661 - DNA, 201 bp, Homo sapiens
acagtaaagcttggcagaataaaccgtgtatacagaatggatgtttgcttgcataaataaatttatataaatatgtctgggggataaaaataagtatatcmcaatgctaagacaggcatatggggaatttaagcttttctttatacttgtccatagtttccaatttttaaatttgtaattttttatcagaaaaataaatgt

SEQ ID NO: 86662 - DNA, 201 bp, Homo sapiens
ctggcagtggcagggaggtgtggctgccagggccttagaggttggcatcaggctgcccaccccagtcactgccagagcctcccacctgagtgttcctcccrgcactggaagccagtggccgtccagaggaacgtgattgaattgctgtatatccatctggtggagcactgctgtgtgtctgttaaaaaagaaaccataggt

SEQ ID NO: 86663 - DNA, 154 bp, Homo sapiens
cggctgacggcctgcgtgcactgcgcttgcgcgggttgagggcggtggctcagkctcctggaaaggaccgtccacccctccgcgctggcggtgtggacgcggaactcagcggagaaacgcgattgagaaatggaaaagaaaatgaaataaatca

SEQ ID NO: 86664 - DNA, 201 bp, Homo sapiens
tcttggaatcaattagaaagagatgactagccagatggaattgcagcccaatcatgtgaacaggcaaaccgcaaaaaataaataaaattaccaataaatayatgaaaaattataatgttgttagtagttaaaatgcgaattaaaatacatgctgttttccctaccagacaagcaaagagtaaattaaaatagtagcccagg

SEQ ID NO: 86665 - DNA, 201 bp, Homo sapiens; identical to SEQ ID NO: 86648

SEQ ID NO: 86666 - DNA, 116 bp, Homo sapiens; identical to SEQ ID NO: 86649

SEQ ID NO: 86667 - DNA, 201 bp, Homo sapiens; identical to SEQ ID NO: 86650

SEQ ID NO: 86668 - DNA, 201 bp, Homo sapiens; identical to SEQ ID NO: 86651

SEQ ID NO: 86669 - DNA, 201 bp, Homo sapiens; identical to SEQ ID NO: 86652

SEQ ID NO: 86670 - DNA, 154 bp, Homo sapiens; identical to SEQ ID NO: 86663

SEQ ID NO: 86671 - DNA, 201 bp, Homo sapiens; identical to SEQ ID NO: 86654

SEQ ID NO: 86672 - DNA, 201 bp, Homo sapiens; identical to SEQ ID NO: 86656

SEQ ID NO: 86673 - DNA, 201 bp, Homo sapiens
aggaaaaggacaggcgcacggcggccctacaggagggtctgaggcgggcagtctctgtgccgctgacgctggcggagacggtggcctcgctgtggccggcsctgcaggaactggcccggtgtgggaacctggcctgccggtcagacctccaggtggcggccaaagccctggagatgggcgtgtttggcgcatatttcaacg

SEQ ID NO: 86674 - DNA, 201 bp, Homo sapiens
ggaaggcctcccagaaggcagcacagggtcacgagggtcacccgcagtggcacagggaggcctcgtcacgacaggattccagccaggctggcctgatgctmctgggggtcctcggcacatgccccttcaccctggcatgtgcttcttttccgggaacccacactctggctgagtggagccatcccctctgggtcaacagca

SEQ ID NO: 86675 - DNA, 201 bp, Homo sapiens
ccccgtgaggggcgtcagcgtggatgagtgtgtgctctgcgcccaggcctttggccagaggctggcagaggagctggacgtgccagtttacctgtacggcraggcagccaggatggacagtcgccggaccctgccggccatccgggccggggagtacgaggccctccctaagaagctccagcaggccgactgggcgcccga

SEQ ID NO: 86676 - DNA, 201 bp, Homo sapiens
tctgcgcccaggcctttggccagaggctggcagaggagctggacgtgccagtttacctgtacggcgaggcagccaggatggacagtcgccggaccctgccrgccatccgggccggggagtacgaggccctccctaagaagctccagcaggccgactgggcgcccgactttggtcccagctcctttgtccccagttgggggg

SEQ ID NO: 86677 - DNA, 201 bp, Homo sapiens
cctcgtcacgacaggattccagccaggctggcctgatgctcctgggggtcctcggcacatgccccttcaccctggcatgtgcttcttttccgggaacccayactctggctgagtggagccatcccctctgggtcaacagcacccggggtggctctgcagcaccccactccgcggctgcacagggaccttggccccactgct

SEQ ID NO: 86678 - DNA, 201 bp, Homo sapiens
acgggctgcctggaaggcctcccagaaggcagcacagggtcacgagggtcacccgcagtggcacagggaggcctcgtcacgacaggattccagccaggctsgcctgatgctcctgggggtcctcggcacatgccccttcaccctggcatgtgcttcttttccgggaacccacactctggctgagtggagccatcccctctg

SEQ ID NO: 86679 - DNA, 201 bp, Homo sapiens
gcaatgaggctccccaagaacacacctgaggaaaaggacaggcgcacggcggccctacaggagggtctgaggcgggcagtctctgtgccgctgacgctggyggagacggtggcctcgctgtggccggcgctgcaggaactggcccggtgtgggaacctggcctgccggtcagacctccaggtggcggccaaagccctggag

SEQ ID NO: 86680 - DNA, 192 bp, Homo sapiens
gcatttaaggaccagcctcctgcaggaagccaagacccaggctgcactggtgctggactgcttggagacccggcaggagtgacggtgcgggaggcctctcygggctctgtggcccctccctcgcccatccccagagggcagagctgtgacctcgaaaccccagggacagcaggaccttcgacgctggaagga

SEQ ID NO: 86681 - DNA, 201 bp, Homo sapiens
ctaaccacgctggtggatgccgacgccgaggccttcaccgcctacctggaagcaatgaggctccccaagaacacacctgaggaaaaggacaggcgcacggyggccctacaggagggtctgaggcgggcagtctctgtgccgctgacgctggcggagacggtggcctcgctgtggccggcgctgcaggaactggcccggtgt

SEQ ID NO: 86682 - DNA, 201 bp, Homo sapiens
ggtagcttcccgacttatcgacatgagcaggcaccaaggagagcacccccgcatgggggccctagacgtctgccccttcatccccgtgaggggcgtcagcrtggatgagtgtgtgctctgcgcccaggcctttggccagaggctggcagaggagctggacgtgccagtttacctgtacggcgaggcagccaggatggacag

SEQ ID NO: 86683 - DNA, 201 bp, Homo sapiens
cggtggcctcgctgtggccggcgctgcaggaactggcccggtgtgggaacctggcctgccggtcagacctccaggtggcggccaaagccctggagatgggygtgtttggcgcatatttcaacgtgctcatcaacctgagggacatcacagacgaggcatttaaggaccagcctcctgcaggaagccaagacccaggctgca

SEQ ID NO: 86684 - DNA, 201 bp, Homo sapiens
ggaagaaccaggaggtgatcgacgccatctctggagccatcacacagaccccgggctgcgtgctgctggatgtggacgcaggcccttccaccaaccgcacygtgtacaccttcgtggggccgccggagtgcgtggtggagggggccctcaacgctgcccgggtagcttcccgacttatcgacatgagcaggcaccaaggag

SEQ ID NO: 86685 - DNA, 201 bp, Homo sapiens
gccttgctggttaatgagaagccggtggggaggtgctgccggtgagcgtataaaggccctggcggcggctgcggagcactggccctgtccttccatctgcycagagaggagcatctggatcaaggtgctggccatgtcccagctggtggaatgcgtccccaacttttcggaggggaagaaccaggaggtgatcgacgccat

SEQ ID NO: 86686 - DNA, 201 bp, Homo sapiens
gctggcggagacggtggcctcgctgtggccggcgctgcaggaactggcccggtgtgggaacctggcctgccggtcagacctccaggtggcggccaaagccytggagatgggcgtgtttggcgcatatttcaacgtgctcatcaacctgagggacatcacagacgaggcatttaaggaccagcctcctgcaggaagccaaga

SEQ ID NO: 86687 - DNA, 201 bp, Homo sapiens
acggcggccctacaggagggtctgaggcgggcagtctctgtgccgctgacgctggcggagacggtggcctcgctgtggccggcgctgcaggaactggcccrgtgtgggaacctggcctgccggtcagacctccaggtggcggccaaagccctggagatgggcgtgtttggcgcatatttcaacgtgctcatcaacctgagg

SEQ ID NO: 86688 - DNA, 201 bp, Homo sapiens
gccccaggggtccaggctcctccaggaacaaacgcaggccccacgggctgcctggaaggcctcccagaaggcagcacagggtcacgagggtcacccgcagkggcacagggaggcctcgtcacgacaggattccagccaggctggcctgatgctcctgggggtcctcggcacatgccccttcaccctggcatgtgcttcttt

SEQ ID NO: 86689 - DNA, 201 bp, Homo sapiens; identical to SEQ ID NO: 86676

SEQ ID NO: 86690 - DNA, 201 bp, Homo sapiens; identical to SEQ ID NO: 86677

SEQ ID NO: 86691 - DNA, 201 bp, Homo sapiens; identical to SEQ ID NO: 86678

SEQ ID NO: 86692 - DNA, 201 bp, Homo sapiens; identical to SEQ ID NO: 86682

SEQ ID NO: 86693 - DNA, 201 bp, Homo sapiens; identical to SEQ ID NO: 86684

SEQ ID NO: 86694 - DNA, 201 bp, Homo sapiens; identical to SEQ ID NO: 86685

SEQ ID NO: 86695 - DNA, 201 bp, Homo sapiens; identical to SEQ ID NO: 86675

SEQ ID NO: 86696 - DNA, 201 bp, Homo sapiens; identical to SEQ ID NO: 86674

SEQ ID NO: 86697 - DNA, 201 bp, Homo sapiens; identical to SEQ ID NO: 86688

SEQ ID NO: 86698 - DNA, 201 bp, Homo sapiens
ccgaggccttcaccgcctacctggaagcaatgaggctccccaagaacacactctctgtgccgctgacgctggcggagacggtggcctcgctgtggccggcsctgcaggaactggcccggtgtgggaacctggcctgccggtcagacctccaggtggcggccaaagccctggagatgggcgtgtttggcgcatatttcaacg

SEQ ID NO: 86699 - DNA, 201 bp, Homo sapiens; identical to SEQ ID NO: 86674

SEQ ID NO: 86700 - DNA, 201 bp, Homo sapiens
gagtgtgtgctctgcgcccaggcctttggccagaggctggcagaggagctggacgtgccaggcctgaccgccgggctctcctgcagtttacctgtacggcraggcagccaggatggacagtcgccggaccctgccggccatccgggccggggagtacgaggccctccctaagaagctccagcaggccgactgggcgcccga

SEQ ID NO: 86701 - DNA, 201 bp, Homo sapiens
aggcatttaaggaccagatccaccatcgtgtttccagcctcctgcaggaagccaagacccaggctgcactggtgctggactgcttggagacccggcaggartgacggtgcgggaggcctctccgggctctgtggcccctccctcgcccatccccagagggcagagctgtgacctcggtggggacacagcttgttcgtgtgg

SEQ ID NO: 86702 - DNA, 201 bp, Homo sapiens
gctggcagaggagctggacgtgccaggcctgaccgccgggctctcctgcagtttacctgtacggcgaggcagccaggatggacagtcgccggaccctgccrgccatccgggccggggagtacgaggccctccctaagaagctccagcaggccgactgggcgcccgactttggtcccagctcctttgtccccagttgggggg

SEQ ID NO: 86703 - DNA, 201 bp, Homo sapiens; identical to SEQ ID NO: 86677

SEQ ID NO: 86704 - DNA, 201 bp, Homo sapiens; identical to SEQ ID NO: 86678

SEQ ID NO: 86705 - DNA, 201 bp, Homo sapiens
ccatcgtgtttccagcctcctgcaggaagccaagacccaggctgcactggtgctggactgcttggagacccggcaggagtgacggtgcgggaggcctctcygggctctgtggcccctccctcgcccatccccagagggcagagctgtgacctcggtggggacacagcttgttcgtgtggggcccggaggaaaccccaggga

SEQ ID NO: 86706 - DNA, 201 bp, Homo sapiens
aagctaaccacgctggtggatgccgacgccgaggccttcaccgcctacctggaagcaatgaggctccccaagaacacactctctgtgccgctgacgctggyggagacggtggcctcgctgtggccggcgctgcaggaactggcccggtgtgggaacctggcctgccggtcagacctccaggtggcggccaaagccctggag

SEQ ID NO: 86707 - DNA, 201 bp, Homo sapiens
caggagtgacggtgcgggaggcctctccgggctctgtggcccctccctcgcccatccccagagggcagagctgtgacctcggtggggacacagcttgttcrtgtggggcccggaggaaaccccagggacagcaggaccttcgacgctggaaggatagcctcgcttcccaggtgcagctcccggcaggtctggacagttcca

SEQ ID NO: 86708 - DNA, 201 bp, Homo sapiens
cggtggcctcgctgtggccggcgctgcaggaactggcccggtgtgggaacctggcctgccggtcagacctccaggtggcggccaaagccctggagatgggygtgtttggcgcatatttcaacgtgctcatcaacctgagggacatcacagacgaggcatttaaggaccagatccaccatcgtgtttccagcctcctgcagg

SEQ ID NO: 86709 - DNA, 201 bp, Homo sapiens
ggtagcttcccgacttatcgacatgagcaggcaccaaggagagcacccccgcatgggggccctagacgtctgccccttcatccccgtgaggggcgtcagcrtggatgagtgtgtgctctgcgcccaggcctttggccagaggctggcagaggagctggacgtgccaggcctgaccgccgggctctcctgcagtttacctgt

SEQ ID NO: 86710 - DNA, 201 bp, Homo sapiens; identical to SEQ ID NO: 86684

SEQ ID NO: 86711 - DNA, 201 bp, Homo sapiens; identical to SEQ ID NO: 86685

SEQ ID NO: 86712 - DNA, 201 bp, Homo sapiens
gctggcggagacggtggcctcgctgtggccggcgctgcaggaactggcccggtgtgggaacctggcctgccggtcagacctccaggtggcggccaaagccytggagatgggcgtgtttggcgcatatttcaacgtgctcatcaacctgagggacatcacagacgaggcatttaaggaccagatccaccatcgtgtttccag

SEQ ID NO: 86713 - DNA, 201 bp, Homo sapiens
tacctggaagcaatgaggctccccaagaacacactctctgtgccgctgacgctggcggagacggtggcctcgctgtggccggcgctgcaggaactggcccrgtgtgggaacctggcctgccggtcagacctccaggtggcggccaaagccctggagatgggcgtgtttggcgcatatttcaacgtgctcatcaacctgagg

SEQ ID NO: 86714 - DNA, 201 bp, Homo sapiens; identical to SEQ ID NO: 86688

SEQ ID NO: 86715 - DNA, 201 bp, Homo sapiens; identical to SEQ ID NO: 86676

SEQ ID NO: 86716 - DNA, 201 bp, Homo sapiens; identical to SEQ ID NO: 86677

SEQ ID NO: 86717 - DNA, 201 bp, Homo sapiens; identical to SEQ ID NO: 86678

SEQ ID NO: 86718 - DNA, 201 bp, Homo sapiens; identical to SEQ ID NO: 86679

SEQ ID NO: 86719 - DNA, 201 bp, Homo sapiens; identical to SEQ ID NO: 86681

SEQ ID NO: 86720 - DNA, 201 bp, Homo sapiens; identical to SEQ ID NO: 86708

SEQ ID NO: 86721 - DNA, 201 bp, Homo sapiens; identical to SEQ ID NO: 86682

SEQ ID NO: 86722 - DNA, 201 bp, Homo sapiens; identical to SEQ ID NO: 86684

SEQ ID NO: 86723 - DNA, 201 bp, Homo sapiens; identical to SEQ ID NO: 86673

SEQ ID NO: 86724 - DNA, 201 bp, Homo sapiens; identical to SEQ ID NO: 86685

SEQ ID NO: 86725 - DNA, 201 bp, Homo sapiens; identical to SEQ ID NO: 86712

SEQ ID NO: 86726 - DNA, 201 bp, Homo sapiens; identical to SEQ ID NO: 86687

SEQ ID NO: 86727 - DNA, 201 bp, Homo sapiens; identical to SEQ ID NO: 86675

SEQ ID NO: 86728 - DNA, 201 bp, Homo sapiens; identical to SEQ ID NO: 86674

SEQ ID NO: 86729 - DNA, 201 bp, Homo sapiens; identical to SEQ ID NO: 86688

SEQ ID NO: 86730 - DNA, 201 bp, Homo sapiens
caccgcctacctggcgcacggcggccctacaggagggtctgaggcgggcagtctctgtgccgctgacgctggcggagacggtggcctcgctgtggccggcsctgcaggaactggcccggtgtgggaacctggcctgccggtcagacctccaggtggcggccaaagccctggagatgggcgtgtttggcgcatatttcaacg

SEQ ID NO: 86731 - DNA, 201 bp, Homo sapiens; identical to SEQ ID NO: 86675

SEQ ID NO: 86732 - DNA, 201 bp, Homo sapiens; identical to SEQ ID NO: 86674

SEQ ID NO: 86733 - DNA, 201 bp, Homo sapiens
cggtcagacctccaggtggcggccaaagccctggagatgggcgtgtttggcgcatatttcaacgtgctcatcaacctgagggacatcacagacgaggcatrtaaggaccagatccaccatcgtgtttccagcctcctgcaggaagccaagacccaggctgcactggtgctggactgcttggagacccggcaggagtgacgg

SEQ ID NO: 86734 - DNA, 201 bp, Homo sapiens; identical to SEQ ID NO: 86676

SEQ ID NO: 86735 - DNA, 201 bp, Homo sapiens; identical to SEQ ID NO: 86677

SEQ ID NO: 86736 - DNA, 201 bp, Homo sapiens; identical to SEQ ID NO: 86678

SEQ ID NO: 86737 - DNA, 201 bp, Homo sapiens; identical to SEQ ID NO: 86705

SEQ ID NO: 86738 - DNA, 201 bp, Homo sapiens
cgctggtggatgccgacgccgaggccttcaccgcctacctggcgcacggcggccctacaggagggtctgaggcgggcagtctctgtgccgctgacgctggyggagacggtggcctcgctgtggccggcgctgcaggaactggcccggtgtgggaacctggcctgccggtcagacctccaggtggcggccaaagccctggag

SEQ ID NO: 86739 - DNA, 201 bp, Homo sapiens; identical to SEQ ID NO: 86707

SEQ ID NO: 86740 - DNA, 201 bp, Homo sapiens
cgatgcggcgcctgatcccgcccttccgcgaggcttcggccaagctaaccacgctggtggatgccgacgccgaggccttcaccgcctacctggcgcacggyggccctacaggagggtctgaggcgggcagtctctgtgccgctgacgctggcggagacggtggcctcgctgtggccggcgctgcaggaactggcccggtgt

SEQ ID NO: 86741 - DNA, 201 bp, Homo sapiens; identical to SEQ ID NO: 86682

SEQ ID NO: 86742 - DNA, 201 bp, Homo sapiens; identical to SEQ ID NO: 86708

SEQ ID NO: 86743 - DNA, 201 bp, Homo sapiens; identical to SEQ ID NO: 86684

SEQ ID NO: 86744 - DNA, 201 bp, Homo sapiens; identical to SEQ ID NO: 86685

SEQ ID NO: 86745 - DNA, 201 bp, Homo sapiens; identical to SEQ ID NO: 86712

SEQ ID NO: 86746 - DNA, 201 bp, Homo sapiens; identical to SEQ ID NO: 86687

SEQ ID NO: 86747 - DNA, 201 bp, Homo sapiens; identical to SEQ ID NO: 86688

SEQ ID NO: 86748 - DNA, 109 bp, Homo sapiens
cctcgtcacgacaggattccagccaggctggcctgatgctcctgggggtcctcggcacatgccccttcaccctggcatgtgcttcttttccgggaacccayactctggc

SEQ ID NO: 86749 - DNA, 180 bp, Homo sapiens
acgggctgcctggaaggcctcccagaaggcagcacagggtcacgagggtcacccgcagtggcacagggaggcctcgtcacgacaggattccagccaggctsgcctgatgctcctgggggtcctcggcacatgccccttcaccctggcatgtgcttcttttccgggaacccacactctggc

SEQ ID NO: 86750 - DNA, 169 bp, Homo sapiens
ggaaggcctcccagaaggcagcacagggtcacgagggtcacccgcagtggcacagggaggcctcgtcacgacaggattccagccaggctggcctgatgctmctgggggtcctcggcacatgccccttcaccctggcatgtgcttcttttccgggaacccacactctggc

SEQ ID NO: 86751 - DNA, 201 bp, Homo sapiens; identical to SEQ ID NO: 86688

SEQ ID NO: 86752 - DNA, 201 bp, Homo sapiens; identical to SEQ ID NO: 86673

SEQ ID NO: 86753 - DNA, 201 bp, Homo sapiens; identical to SEQ ID NO: 86675

SEQ ID NO: 86754 - DNA, 201 bp, Homo sapiens; identical to SEQ ID NO: 86674

SEQ ID NO: 86755 - DNA, 201 bp, Homo sapiens
ggaggcctctccgggctctgtggcccctccctcgcccatccccagagggcagagctgtgacctcggtggggacacagcttgttcgtgtggggcccggaggrtaggtgggcaggcagcggggcatcgcctgggaatggaggcgctggcagggacagaaggcccctagtcccatgtgacctccagtaaagttttggcaccaaa

SEQ ID NO: 86756 - DNA, 201 bp, Homo sapiens; identical to SEQ ID NO: 86676

SEQ ID NO: 86757 - DNA, 201 bp, Homo sapiens; identical to SEQ ID NO: 86677

SEQ ID NO: 86758 - DNA, 201 bp, Homo sapiens; identical to SEQ ID NO: 86678

SEQ ID NO: 86759 - DNA, 201 bp, Homo sapiens
ccatcgtgtttccagcctcctgcaggaagccaagacccaggctgcactggtgctggactgcttggagacccggcaggagtgacggtgcgggaggcctctcygggctctgtggcccctccctcgcccatccccagagggcagagctgtgacctcggtggggacacagcttgttcgtgtggggcccggagggtaggtgggcag

SEQ ID NO: 86760 - DNA, 201 bp, Homo sapiens; identical to SEQ ID NO: 86679

SEQ ID NO: 86761 - DNA, 201 bp, Homo sapiens
caggagtgacggtgcgggaggcctctccgggctctgtggcccctccctcgcccatccccagagggcagagctgtgacctcggtggggacacagcttgttcrtgtggggcccggagggtaggtgggcaggcagcggggcatcgcctgggaatggaggcgctggcagggacagaaggcccctagtcccatgtgacctccagta

SEQ ID NO: 86762 - DNA, 201 bp, Homo sapiens; identical to SEQ ID NO: 86681

SEQ ID NO: 86763 - DNA, 201 bp, Homo sapiens; identical to SEQ ID NO: 86682

SEQ ID NO: 86764 - DNA, 201 bp, Homo sapiens; identical to SEQ ID NO: 86708

SEQ ID NO: 86765 - DNA, 201 bp, Homo sapiens; identical to SEQ ID NO: 86684

SEQ ID NO: 86766 - DNA, 201 bp, Homo sapiens; identical to SEQ ID NO: 86685

SEQ ID NO: 86767 - DNA, 201 bp, Homo sapiens; identical to SEQ ID NO: 86712

SEQ ID NO: 86768 - DNA, 201 bp, Homo sapiens; identical to SEQ ID NO: 86687

SEQ ID NO: 86769 - DNA, 201 bp, Homo sapiens; identical to SEQ ID NO: 86688

SEQ ID NO: 86770 - DNA, 201 bp, Homo sapiens; identical to SEQ ID NO: 86673

SEQ ID NO: 86771 - DNA, 201 bp, Homo sapiens; identical to SEQ ID NO: 86675

SEQ ID NO: 86772 - DNA, 201 bp, Homo sapiens; identical to SEQ ID NO: 86674

SEQ ID NO: 86773 - DNA, 201 bp, Homo sapiens; identical to SEQ ID NO: 86701

SEQ ID NO: 86774 - DNA, 201 bp, Homo sapiens; identical to SEQ ID NO: 86676

SEQ ID NO: 86775 - DNA, 201 bp, Homo sapiens; identical to SEQ ID NO: 86677

SEQ ID NO: 86776 - DNA, 201 bp, Homo sapiens; identical to SEQ ID NO: 86678

SEQ ID NO: 86777 - DNA, 201 bp, Homo sapiens; identical to SEQ ID NO: 86705

SEQ ID NO: 86778 - DNA, 201 bp, Homo sapiens; identical to SEQ ID NO: 86679

SEQ ID NO: 86779 - DNA, 201 bp, Homo sapiens; identical to SEQ ID NO: 86707

SEQ ID NO: 86780 - DNA, 201 bp, Homo sapiens; identical to SEQ ID NO: 86681

SEQ ID NO: 86781 - DNA, 201 bp, Homo sapiens; identical to SEQ ID NO: 86682

SEQ ID NO: 86782 - DNA, 201 bp, Homo sapiens; identical to SEQ ID NO: 86708

SEQ ID NO: 86783 - DNA, 201 bp, Homo sapiens; identical to SEQ ID NO: 86684

SEQ ID NO: 86784 - DNA, 201 bp, Homo sapiens; identical to SEQ ID NO: 86685

SEQ ID NO: 86785 - DNA, 201 bp, Homo sapiens; identical to SEQ ID NO: 86712

SEQ ID NO: 86786 - DNA, 201 bp, Homo sapiens; identical to SEQ ID NO: 86687

SEQ ID NO: 86787 - DNA, 201 bp, Homo sapiens; identical to SEQ ID NO: 86688

SEQ ID NO: 86788 - DNA, 201 bp, Homo sapiens
ccaatgagatgctgagctgcctggagcacatgtaccacgacctcgggctggtcagggacttcagcatcaaccctgtcaccctcaggaggtggctgttctgygtccacgacaactacagaaacaaccccttccacaacttccggcactgcttctgcgtggcccagatgatgtacagcatggtctggctctgcagtctccagg

SEQ ID NO: 86789 - DNA, 201 bp, Homo sapiens
aggtccgtccaatggaagtcgcagagccttgggtggactgtttattagaggaatattttatgcagagcgaccgtgagaagtcagaaggccttcctgtggcmccgttcatggaccgagacaaagtgaccaaggccacagcccagattgggttcatcaagtttgtcctgatcccaatgtttgaaacagtgaccaagctcttcc

SEQ ID NO: 86790 - DNA, 201 bp, Homo sapiens
ctaacgaggtccgtccaatggaagtcgcagagccttgggtggactgtttattagaggaatattttatgcagagcgaccgtgagaagtcagaaggccttccygtggcaccgttcatggaccgagacaaagtgaccaaggccacagcccagattgggttcatcaagtttgtcctgatcccaatgtttgaaacagtgaccaagc

SEQ ID NO: 86791 - DNA, 201 bp, Homo sapiens
cccccagatgtatcttagagcaattgaccagtgtgatgcggtgcgtacgtccctgtaaattcagcattaaatgtcagcacggtgccctgagtgcaaggacrtgcacgggtcctgtgtttctgagcagagggggacgtcagtgccgtgtgtgggacatctggggactgaggcaggttggccagactgtaggtcgtgtgtcgg

SEQ ID NO: 86792 - DNA, 201 bp, Homo sapiens
gaggaaagcggggggcgtggctgcagttctggacgggctggccgagctgcgcgggatccttgtgcagggaagagctgccctgggcacctggcaccacaagrccatgttttctaagaaccattttgttcactgatacaaaaaaaaaaaaaggaattcatgatgctgtacagaattttatttttaaactgtcttttaaataat

SEQ ID NO: 86793 - DNA, 201 bp, Homo sapiens; identical to SEQ ID NO: 86788

SEQ ID NO: 86794 - DNA, 201 bp, Homo sapiens; identical to SEQ ID NO: 86789

SEQ ID NO: 86795 - DNA, 201 bp, Homo sapiens; identical to SEQ ID NO: 86790

SEQ ID NO: 86796 - DNA, 201 bp, Homo sapiens; identical to SEQ ID NO: 86791

SEQ ID NO: 86797 - DNA, 201 bp, Homo sapiens; identical to SEQ ID NO: 86792

SEQ ID NO: 86798 - DNA, 201 bp, Homo sapiens; identical to SEQ ID NO: 86788

SEQ ID NO: 86799 - DNA, 201 bp, Homo sapiens; identical to SEQ ID NO: 86789

SEQ ID NO: 86800 - DNA, 201 bp, Homo sapiens; identical to SEQ ID NO: 86790

SEQ ID NO: 86801 - DNA, 201 bp, Homo sapiens; identical to SEQ ID NO: 86791

SEQ ID NO: 86802 - DNA, 201 bp, Homo sapiens
caagccgtggccagtctgctgagagaccactgagggacagacgggttgtgggcctggagcagccccggagggaaggagcatttgaaagtggacaggtagarcccaggcccagagagccccagggctgctaccaggaaggccagcgcatccctccagagagagaagaattaatccagagcgtgctggcgcaggttgcagagc

SEQ ID NO: 86803 - DNA, 201 bp, Homo sapiens; identical to SEQ ID NO: 86792

SEQ ID NO: 86804 - DNA, 201 bp, Homo sapiens
aaaattggccatctttcccacctctaaattctgtaaaattatagacttgctcaaaagattcctttttatcatccccacgctgtgtaagtggaaagggcatkgtgttccgtgtgtgtccagtttacagcgtctctgccccctagcgtgttttgtgacaatctccctgggtgaggagtgggtgcacccagccccgaggccagt

SEQ ID NO: 86805 - DNA, 201 bp, Homo sapiens
acggttaaaagcacagtctatggaacgctaatggagtcagcccctaaagctgtttgctttttcaggctttggattacatgcttttaatttgattttagaayctggacactttctatgaatgtaattcggctgagaaacatgttgctgagatgcaatcctcagtgttctctgtatgtaaatctgtgtatacaccacacgtta

SEQ ID NO: 86806 - DNA, 201 bp, Homo sapiens
agtatgacttcctctccgagagcggggagagccatgccaagagcttcgtcatgtctgtggtcgtggatggtcagttctttgaaggctcggggagaaacaaraagcttgccaaggcccgggctgcgcagtctgccctggccgccatttttaacttgcacttggatcagacgccatctcgccagcctattcccagtgagggtc

SEQ ID NO: 86807 - DNA, 201 bp, Homo sapiens
aattagagaaaactctgacctgccgggttccagggactggtggaggtggatggcaggtccgactcgaccatgacttagttgtaagggtgtgtcggcttttycagtctcatgtgaaaatcctcctgtctctggcagcactgtctgcactttcttgtttactgtttgaagggacgagtaccaagccacaagaacacttctttt

SEQ ID NO: 86808 - DNA, 201 bp, Homo sapiens
atgggggtggtggtggccccggcagaaagcggcccctggaggagggcagcaatggccactccaagtaccgcctgaagaaaaggaggaaaacaccagggccygtcctccccaagaacgccctgatgcagctgaatgagatcaagcctggtttgcagtacacactcctgtcccagactgggcccgtgcacgcgcctttgtttg

SEQ ID NO: 86809 - DNA, 201 bp, Homo sapiens
cggcaaaggagtaccaggccgccaaggcgcgtctgttcacagccttcatcaaggcggggctgggggcctgggtggagaagcccaccgagcaggaccagttytcactcacgccctgacccgggcagacatgatggggggtgcagggggctgtgggcatccagcgtcatcctccagaacctcacatctgaactgggggcaggt

SEQ ID NO: 86810 - DNA, 201 bp, Homo sapiens
ccctgtctgtcaacacggacttcacatctgaccaggccgacttccctgacacgctcttcaatggttttgaaactcctgacaaggcggagcctcccttttaygtgggctccaatggggatgactccttcagttccagcggggacctcagcttgtctgcttccccggtgcctgccagcctagcccagcctcctctccctgtct

SEQ ID NO: 86811 - DNA, 201 bp, Homo sapiens
ttttctccgtaggtacctccctgggtagttccacacactaggttgtaacagtctctccctgaggagcagactcccagcatggtgtagcgtggccctgtcaygcacatggggtcccgcagcagtgactgtgtgtcctgcagaggcgtgacccaggcccctgtagccctcagcctcctctagaagcttctgtactccttgtag

SEQ ID NO: 86812 - DNA, 201 bp, Homo sapiens
agaagcaggtggtctgccccaggcataaagaaggaaaattggccatctttcccacctctaaattctgtaaaattatagacttgctcaaaagattccttttkatcatccccacgctgtgtaagtggaaagggcattgtgttccgtgtgtgtccagtttacagcgtctctgccccctagcgtgttttgtgacaatctccctgg

SEQ ID NO: 86813 - DNA, 201 bp, Homo sapiens
tgggccgcgcgtcccgcctgtgtaagcacgcgttgtactgtcgctggatgcgtgtgcacggcaaggttccctcccacttactacgctccaagattaccaarcccaacgtgtaccatgagtccaagctggcggcaaaggagtaccaggccgccaaggcgcgtctgttcacagccttcatcaaggcggggctgggggcctggg

SEQ ID NO: 86814 - DNA, 201 bp, Homo sapiens
aggggatggggtgcgtcagggcccagcatcgccgcctggcatctctctgccgcagcatttccccttctgaaccgtccagtgactgctttcaatctcggttyacgtttagaaattgagttctactgagtagggcttccttaagtttaggaaaatagaaattactttgtgtgaaattcttgaataaataatttattcagagct

SEQ ID NO: 86815 - DNA, 201 bp, Homo sapiens; identical to SEQ ID NO: 86804

SEQ ID NO: 86816 - DNA, 201 bp, Homo sapiens; identical to SEQ ID NO: 86805

SEQ ID NO: 86817 - DNA, 201 bp, Homo sapiens; identical to SEQ ID NO: 86806

SEQ ID NO: 86818 - DNA, 201 bp, Homo sapiens; identical to SEQ ID NO: 86807

SEQ ID NO: 86819 - DNA, 201 bp, Homo sapiens; identical to SEQ ID NO: 86808

SEQ ID NO: 86820 - DNA, 201 bp, Homo sapiens; identical to SEQ ID NO: 86809

SEQ ID NO: 86821 - DNA, 201 bp, Homo sapiens; identical to SEQ ID NO: 86810

SEQ ID NO: 86822 - DNA, 201 bp, Homo sapiens; identical to SEQ ID NO: 86811

SEQ ID NO: 86823 - DNA, 201 bp, Homo sapiens; identical to SEQ ID NO: 86812

SEQ ID NO: 86824 - DNA, 201 bp, Homo sapiens; identical to SEQ ID NO: 86813

SEQ ID NO: 86825 - DNA, 201 bp, Homo sapiens; identical to SEQ ID NO: 86814

SEQ ID NO: 86826 - DNA, 201 bp, Homo sapiens
tatcgagccgacatccgggaacaccgggatcgggctggccctggctgcggcagtgaggggctatcgctgcatcatcgtgatgccagagaagatgagctccragaaggtggacgtgctgcgggcactgggggctgagattgtgaggacgcccaccaatgccaggttcgactccccggagtcacacgtgggggtggcctggcg

SEQ ID NO: 86827 - DNA, 201 bp, Homo sapiens
tgccccggcaaaatctccaaaaatcttgccagatattctgaagaaaatcggggacacccctatggtcagaatcaacaagattgggaagaagttcggcctgmagtgtgagctcttggccaagtgtgagttcttcaacgcgggcgggagcgtgaaggaccgcatcagcctgcggatgattgaggatgctgagcgcgacgggac

SEQ ID NO: 86828 - DNA, 201 bp, Homo sapiens
tccgggaacaccgggatcgggctggccctggctgcggcagtgaggggctatcgctgcatcatcgtgatgccagagaagatgagctccgagaaggtggacgygctgcgggcactgggggctgagattgtgaggacgcccaccaatgccaggttcgactccccggagtcacacgtgggggtggcctggcggctgaagaacgaa

SEQ ID NO: 86829 - DNA, 201 bp, Homo sapiens
acgcccaccaatgccaggttcgactccccggagtcacacgtgggggtggcctggcggctgaagaacgaaatccccaattctcacatcctagaccagtaccrcaacgccagcaaccccctggctcactacgacaccaccgctgatgagatcctgcagcagtgtgatgggaagctggacatgctggtggcttcagtgggcacg

SEQ ID NO: 86830 - DNA, 201 bp, Homo sapiens
gcgggaccagaagtgaagtccggagcgctgggcggatgtttcaccaaggaaatattgagagagaagtcggccaggtaggatgaacacaggcaatgactgcrcagagtggattaaaggcaaaagagagaagagtccaggaaggggcggggagaagcctgggtggctcagcatcctccacgggctgcgccgtctgctcggggc

SEQ ID NO: 86831 - DNA, 201 bp, Homo sapiens
gaaggagaagtgtcctggatgcaggatcattggggtggatcccgaagggtccatcctcgcagagccggaggagctgaaccagacggagcagacaacctacraggtggaagggatcggctacgacttcatccccacggtgctggacaggacggtggtggacaagtggttcaagagcaacgatgaggaggcgttcacctttgc

SEQ ID NO: 86832 - DNA, 201 bp, Homo sapiens
ccgcatgctgatcgcgcaagaggggctgctgtgcggtggcagtgctggcagcacggtggcggtggccgtgaaggccgcgcaggagctgcaggagggccagygctgcgtggtcattctgcccgactcagtgcggaactacatgaccaagttcctgagcgacaggtggatgctgcagaagggctttctgaaggaggaggacct

SEQ ID NO: 86833 - DNA, 201 bp, Homo sapiens
ccggctttattgttcttcgtgtcagttcctgccagtggacatttaattctaattcacgtctcactccctcccctactgtgagccccacgtggcagagaccscggcggagctgcgcgggccggaggaggctgcggagcatcgctctgacctgagccggggacgctgcggaggcgcagcacgttcctctgcccagagctgatg

SEQ ID NO: 86834 - DNA, 201 bp, Homo sapiens
acgtgctgcgggcactgggggctgagattgtgaggacgcccaccaatgccaggttcgactccccggagtcacacgtgggggtggcctggcggctgaagaaygaaatccccaattctcacatcctagaccagtaccgcaacgccagcaaccccctggctcactacgacaccaccgctgatgagatcctgcagcagtgtgatg

SEQ ID NO: 86835 - DNA, 201 bp, Homo sapiens
tggacatttaattctaattcacgtctcactccctcccctactgtgagccccacgtggcagagaccgcggcggagctgcgcgggccggaggaggctgcggarcatcgctctgacctgagccggggacgctgcggaggcgcagcacgttcctctgcccagagctgatgggcaccgtccgtgtctttcgctgcaggatcccatg

SEQ ID NO: 86836 - DNA, 201 bp, Homo sapiens
ggggcggggagaagcctgggtggctcagcatcctccacgggctgcgccgtctgctcggggctgagctggcgggagcagtttgcgtgtttgggttttttaaytgagatgaaattcaaataacctaaaaatcaatcacttgaaagtgaacaatcagcggcatttagtacatccagaaagttgtgtaggcaccacctctgtcac

SEQ ID NO: 86837 - DNA, 201 bp, Homo sapiens
tgcatcatcgtgatgccagagaagatgagctccgagaaggtggacgtgctgcgggcactgggggctgagattgtgaggacgcccaccaatgccaggttcgwctccccggagtcacacgtgggggtggcctggcggctgaagaacgaaatccccaattctcacatcctagaccagtaccgcaacgccagcaaccccctggct

SEQ ID NO: 86838 - DNA, 201 bp, Homo sapiens
gcggcagtgaggggctatcgctgcatcatcgtgatgccagagaagatgagctccgagaaggtggacgtgctgcgggcactgggggctgagattgtgaggaygcccaccaatgccaggttcgactccccggagtcacacgtgggggtggcctggcggctgaagaacgaaatccccaattctcacatcctagaccagtaccgc

SEQ ID NO: 86839 - DNA, 201 bp, Homo sapiens
ggtggcctggcggctgaagaacgaaatccccaattctcacatcctagaccagtaccgcaacgccagcaaccccctggctcactacgacaccaccgctgatragatcctgcagcagtgtgatgggaagctggacatgctggtggcttcagtgggcacgggcggcaccatcacgggcattgccaggaagctgaaggagaagtg

SEQ ID NO: 86840 - DNA, 201 bp, Homo sapiens
ctcgcagagccggaggagctgaaccagacggagcagacaacctacgaggtggaagggatcggctacgacttcatccccacggtgctggacaggacggtggyggacaagtggttcaagagcaacgatgaggaggcgttcacctttgcccgcatgctgatcgcgcaagaggggctgctgtgcggtggcagtgctggcagcacg

SEQ ID NO: 86841 - DNA, 201 bp, Homo sapiens
gtggtggacaagtggttcaagagcaacgatgaggaggcgttcacctttgcccgcatgctgatcgcgcaagaggggctgctgtgcggtggcagtgctggcarcacggtggcggtggccgtgaaggccgcgcaggagctgcaggagggccagcgctgcgtggtcattctgcccgactcagtgcggaactacatgaccaagttc

SEQ ID NO: 86842 - DNA, 201 bp, Homo sapiens
aggatcccatgacagattctgttgtcacgtctccttacagagtttgagcggtgctgaactgtcagcaccatctgtccggtcccagcatgccttctgagacyccccaggcagaagtggggcccacaggctgcccccaccgctcagggccacactcggcgaaggggagcctggagaaggggtccccagaggataaggaagcca

SEQ ID NO: 86843 - DNA, 201 bp, Homo sapiens
gtggacaagtggttcaagagcaacgatgaggaggcgttcacctttgcccgcatgctgatcgcgcaagaggggctgctgtgcggtggcagtgctggcagcayggtggcggtggccgtgaaggccgcgcaggagctgcaggagggccagcgctgcgtggtcattctgcccgactcagtgcggaactacatgaccaagttcctg

SEQ ID NO: 86844 - DNA, 201 bp, Homo sapiens
ggacaagtggttcaagagcaacgatgaggaggcgttcacctttgcccgcatgctgatcgcgcaagaggggctgctgtgcggtggcagtgctggcagcacgrtggcggtggccgtgaaggccgcgcaggagctgcaggagggccagcgctgcgtggtcattctgcccgactcagtgcggaactacatgaccaagttcctgag

SEQ ID NO: 86845 - DNA, 201 bp, Homo sapiens
caagtggttcaagagcaacgatgaggaggcgttcacctttgcccgcatgctgatcgcgcaagaggggctgctgtgcggtggcagtgctggcagcacggtgscggtggccgtgaaggccgcgcaggagctgcaggagggccagcgctgcgtggtcattctgcccgactcagtgcggaactacatgaccaagttcctgagcga

SEQ ID NO: 86846 - DNA, 201 bp, Homo sapiens
aatcttgccagatattctgaagaaaatcggggacacccctatggtcagaatcaacaagattgggaagaagttcggcctgaagtgtgagctcttggccaagygtgagttcttcaacgcgggcgggagcgtgaaggaccgcatcagcctgcggatgattgaggatgctgagcgcgacgggacgctgaagcccggggacacgat

SEQ ID NO: 86847 - DNA, 201 bp, Homo sapiens
aagccctggtggtggcacctccgtgttcaggagctgggcctgtcagccccgctgaccgtgctcccgaccatcacctgtgggcacaccatcgagatcctccrggagaagggcttcgaccaggcgcccgtggtggatgaggcgggggtaatcctgggaatggtgacgcttgggaacatgctctcgtccctgcttgccgggaag

SEQ ID NO: 86848 - DNA, 201 bp, Homo sapiens
gcagcacggtggcggtggccgtgaaggccgcgcaggagctgcaggagggccagcgctgcgtggtcattctgcccgactcagtgcggaactacatgaccaasttcctgagcgacaggtggatgctgcagaagggctttctgaaggaggaggacctcacggagaagaagccctggtggtggcacctccgtgttcaggagctgg

SEQ ID NO: 86849 - DNA, 201 bp, Homo sapiens
aatcaatcacttgaaagtgaacaatcagcggcatttagtacatccagaaagttgtgtaggcaccacctctgtcacgttctggaacattctgtcatcacccygtgaagcaatcatttcccctcccgtcttcctcctcccctggcaactgctgatcgactttgtgtctctgttgtctaaaataggttttccctgttctggaca

SEQ ID NO: 86850 - DNA, 201 bp, Homo sapiens
tggcagcacggtggcggtggccgtgaaggccgcgcaggagctgcaggagggccagcgctgcgtggtcattctgcccgactcagtgcggaactacatgaccragttcctgagcgacaggtggatgctgcagaagggctttctgaaggaggaggacctcacggagaagaagccctggtggtggcacctccgtgttcaggagct

SEQ ID NO: 86851 - DNA, 201 bp, Homo sapiens
atgaaattcaaataacctaaaaatcaatcacttgaaagtgaacaatcagcggcatttagtacatccagaaagttgtgtaggcaccacctctgtcacgttcyggaacattctgtcatcaccccgtgaagcaatcatttcccctcccgtcttcctcctcccctggcaactgctgatcgactttgtgtctctgttgtctaaaat

SEQ ID NO: 86852 - DNA, 201 bp, Homo sapiens
gactcagtgcggaactacatgaccaagttcctgagcgacaggtggatgctgcagaagggctttctgaaggaggaggacctcacggagaagaagccctggtrgtggcacctccgtgttcaggagctgggcctgtcagccccgctgaccgtgctcccgaccatcacctgtgggcacaccatcgagatcctccgggagaagggc

SEQ ID NO: 86853 - DNA, 201 bp, Homo sapiens
cgagcaggtgcacctggcagctgggccggcctgcctccgagtccccacatcaccacactgccccggcaaaatctccaaaaatcttgccagatattctgaaraaaatcggggacacccctatggtcagaatcaacaagattgggaagaagttcggcctgaagtgtgagctcttggccaagtgtgagttcttcaacgcgggcg

SEQ ID NO: 86854 - DNA, 201 bp, Homo sapiens
tggacaagtggttcaagagcaacgatgaggaggcgttcacctttgcccgcatgctgatcgcgcaagaggggctgctgtgcggtggcagtgctggcagcacrgtggcggtggccgtgaaggccgcgcaggagctgcaggagggccagcgctgcgtggtcattctgcccgactcagtgcggaactacatgaccaagttcctga

SEQ ID NO: 86855 - DNA, 201 bp, Homo sapiens
gccccgctgaccgtgctcccgaccatcacctgtgggcacaccatcgagatcctccgggagaagggcttcgaccaggcgcccgtggtggatgaggcgggggwaatcctgggaatggtgacgcttgggaacatgctctcgtccctgcttgccgggaaggtgcagccgtcagaccaagttggcaaagtcatctacaagcagttc

SEQ ID NO: 86856 - DNA, 201 bp, Homo sapiens
gctgggccggcctgcctccgagtccccacatcaccacactgccccggcaaaatctccaaaaatcttgccagatattctgaagaaaatcggggacacccctwtggtcagaatcaacaagattgggaagaagttcggcctgaagtgtgagctcttggccaagtgtgagttcttcaacgcgggcgggagcgtgaaggaccgcat

SEQ ID NO: 86857 - DNA, 201 bp, Homo sapiens
atcaacaagattgggaagaagttcggcctgaagtgtgagctcttggccaagtgtgagttcttcaacgcgggcgggagcgtgaaggaccgcatcagcctgcvgatgattgaggatgctgagcgcgacgggacgctgaagcccggggacacgattatcgagccgacatccgggaacaccgggatcgggctggccctggctgcg

SEQ ID NO: 86858 - DNA, 201 bp, Homo sapiens
ctcacggagaagaagccctggtggtggcacctccgtgttcaggagctgggcctgtcagccccgctgaccgtgctcccgaccatcacctgtgggcacaccaycgagatcctccgggagaagggcttcgaccaggcgcccgtggtggatgaggcgggggtaatcctgggaatggtgacgcttgggaacatgctctcgtccctg

SEQ ID NO: 86859 - DNA, 201 bp, Homo sapiens
gacctcacggagaagaagccctggtggtggcacctccgtgttcaggagctgggcctgtcagccccgctgaccgtgctcccgaccatcacctgtgggcacamcatcgagatcctccgggagaagggcttcgaccaggcgcccgtggtggatgaggcgggggtaatcctgggaatggtgacgcttgggaacatgctctcgtcc

SEQ ID NO: 86860 - DNA, 201 bp, Homo sapiens
agttcggcctgaagtgtgagctcttggccaagtgtgagttcttcaacgcgggcgggagcgtgaaggaccgcatcagcctgcggatgattgaggatgctgascgcgacgggacgctgaagcccggggacacgattatcgagccgacatccgggaacaccgggatcgggctggccctggctgcggcagtgaggggctatcgct

SEQ ID NO: 86861 - DNA, 201 bp, Homo sapiens
tggatcccgaagggtccatcctcgcagagccggaggagctgaaccagacggagcagacaacctacgaggtggaagggatcggctacgacttcatccccacrgtgctggacaggacggtggtggacaagtggttcaagagcaacgatgaggaggcgttcacctttgcccgcatgctgatcgcgcaagaggggctgctgtgcg

SEQ ID NO: 86862 - DNA, 201 bp, Homo sapiens
ccaggttcgactccccggagtcacacgtgggggtggcctggcggctgaagaacgaaatccccaattctcacatcctagaccagtaccgcaacgccagcaavcccctggctcactacgacaccaccgctgatgagatcctgcagcagtgtgatgggaagctggacatgctggtggcttcagtgggcacgggcggcaccatca

SEQ ID NO: 86863 - DNA, 201 bp, Homo sapiens
ggtgctggacaggacggtggtggacaagtggttcaagagcaacgatgaggaggcgttcacctttgcccgcatgctgatcgcgcaagaggggctgctgtgcrgtggcagtgctggcagcacggtggcggtggccgtgaaggccgcgcaggagctgcaggagggccagcgctgcgtggtcattctgcccgactcagtgcggaa

SEQ ID NO: 86864 - DNA, 201 bp, Homo sapiens
caacaagattgggaagaagttcggcctgaagtgtgagctcttggccaagtgtgagttcttcaacgcgggcgggagcgtgaaggaccgcatcagcctgcggrtgattgaggatgctgagcgcgacgggacgctgaagcccggggacacgattatcgagccgacatccgggaacaccgggatcgggctggccctggctgcggc

SEQ ID NO: 86865 - DNA, 201 bp, Homo sapiens
cctatggtcagaatcaacaagattgggaagaagttcggcctgaagtgtgagctcttggccaagtgtgagttcttcaacgcgggcgggagcgtgaaggaccdcatcagcctgcggatgattgaggatgctgagcgcgacgggacgctgaagcccggggacacgattatcgagccgacatccgggaacaccgggatcgggctg

SEQ ID NO: 86866 - DNA, 201 bp, Homo sapiens
aatggtgacgcttgggaacatgctctcgtccctgcttgccgggaaggtgcagccgtcagaccaagttggcaaagtcatctacaagcagttcaaacagatcygcctcacggacacgctgggcaggctctcgcacatcctggagatggaccacttcgccctggtggtgcacgagcagatccagtcgcaggaccaggcctgggc

SEQ ID NO: 86867 - DNA, 201 bp, Homo sapiens
ccctatggtcagaatcaacaagattgggaagaagttcggcctgaagtgtgagctcttggccaagtgtgagttcttcaacgcgggcgggagcgtgaaggacygcatcagcctgcggatgattgaggatgctgagcgcgacgggacgctgaagcccggggacacgattatcgagccgacatccgggaacaccgggatcgggct

SEQ ID NO: 86868 - DNA, 201 bp, Homo sapiens
aatcaacaagattgggaagaagttcggcctgaagtgtgagctcttggccaagtgtgagttcttcaacgcgggcgggagcgtgaaggaccgcatcagcctgyggatgattgaggatgctgagcgcgacgggacgctgaagcccggggacacgattatcgagccgacatccgggaacaccgggatcgggctggccctggctgc

SEQ ID NO: 86869 - DNA, 201 bp, Homo sapiens
ttgggaagaagttcggcctgaagtgtgagctcttggccaagtgtgagttcttcaacgcgggcgggagcgtgaaggaccgcatcagcctgcggatgattgasgatgctgagcgcgacgggacgctgaagcccggggacacgattatcgagccgacatccgggaacaccgggatcgggctggccctggctgcggcagtgaggg

SEQ ID NO: 86870 - DNA, 201 bp, Homo sapiens
cgcatgctgatcgcgcaagaggggctgctgtgcggtggcagtgctggcagcacggtggcggtggccgtgaaggccgcgcaggagctgcaggagggccagcrctgcgtggtcattctgcccgactcagtgcggaactacatgaccaagttcctgagcgacaggtggatgctgcagaagggctttctgaaggaggaggacctc

SEQ ID NO: 86871 - DNA, 201 bp, Homo sapiens
acgatgaggaggcgttcacctttgcccgcatgctgatcgcgcaagaggggctgctgtgcggtggcagtgctggcagcacggtggcggtggccgtgaaggcygcgcaggagctgcaggagggccagcgctgcgtggtcattctgcccgactcagtgcggaactacatgaccaagttcctgagcgacaggtggatgctgcaga

SEQ ID NO: 86872 - DNA, 201 bp, Homo sapiens
gaccaggcctgggcaggcgtggtgggggggcctgcagaccacagcaccgggaagtccagtcagcggcagatggtgttcggggtggtcaccgccattgactygctgaacttcgtggccgcccaggagcgggaccagaagtgaagtccggagcgctgggcggatgtttcaccaaggaaatattgagagagaagtcggccaggt

SEQ ID NO: 86873 - DNA, 201 bp, Homo sapiens
gcagctgggccggcctgcctccgagtccccacatcaccacactgccccggcaaaatctccaaaaatcttgccagatattctgaagaaaatcggggacaccyctatggtcagaatcaacaagattgggaagaagttcggcctgaagtgtgagctcttggccaagtgtgagttcttcaacgcgggcgggagcgtgaaggaccg

SEQ ID NO: 86874 - DNA, 201 bp, Homo sapiens
gtgcacctggcagctgggccggcctgcctccgagtccccacatcaccacactgccccggcaaaatctccaaaaatcttgccagatattctgaagaaaatcrgggacacccctatggtcagaatcaacaagattgggaagaagttcggcctgaagtgtgagctcttggccaagtgtgagttcttcaacgcgggcgggagcgt

SEQ ID NO: 86875 - DNA, 201 bp, Homo sapiens
tccccagaggataaggaagccaaggagcccctgtggatccggcccgatgctccgagcaggtgcacctggcagctgggccggcctgcctccgagtccccacrtcaccacactgccccggcaaaatctccaaaaatcttgccagatattctgaagaaaatcggggacacccctatggtcagaatcaacaagattgggaagaag

SEQ ID NO: 86876 - DNA, 201 bp, Homo sapiens
cgatgaggaggcgttcacctttgcccgcatgctgatcgcgcaagaggggctgctgtgcggtggcagtgctggcagcacggtggcggtggccgtgaaggccrcgcaggagctgcaggagggccagcgctgcgtggtcattctgcccgactcagtgcggaactacatgaccaagttcctgagcgacaggtggatgctgcagaa

SEQ ID NO: 86877 - DNA, 201 bp, Homo sapiens
actgccccggcaaaatctccaaaaatcttgccagatattctgaagaaaatcggggacacccctatggtcagaatcaacaagattgggaagaagttcggccygaagtgtgagctcttggccaagtgtgagttcttcaacgcgggcgggagcgtgaaggaccgcatcagcctgcggatgattgaggatgctgagcgcgacggg

SEQ ID NO: 86878 - DNA, 201 bp, Homo sapiens
cggagtcacacgtgggggtggcctggcggctgaagaacgaaatccccaattctcacatcctagaccagtaccgcaacgccagcaaccccctggctcactaygacaccaccgctgatgagatcctgcagcagtgtgatgggaagctggacatgctggtggcttcagtgggcacgggcggcaccatcacgggcattgccagga

SEQ ID NO: 86879 - DNA, 201 bp, Homo sapiens
gaagtccagtcagcggcagatggtgttcggggtggtcaccgccattgacttgctgaacttcgtggccgcccaggagcgggaccagaagtgaagtccggagmgctgggcggatgtttcaccaaggaaatattgagagagaagtcggccaggtaggatgaacacaggcaatgactgcgcagagtggattaaaggcaaaagaga

SEQ ID NO: 86880 - DNA, 201 bp, Homo sapiens
cccctggctcactacgacaccaccgctgatgagatcctgcagcagtgtgatgggaagctggacatgctggtggcttcagtgggcacgggcggcaccatcabgggcattgccaggaagctgaaggagaagtgtcctggatgcaggatcattggggtggatcccgaagggtccatcctcgcagagccggaggagctgaaccag

SEQ ID NO: 86881 - DNA, 201 bp, Homo sapiens
ccccaccgctcagggccacactcggcgaaggggagcctggagaaggggtccccagaggataaggaagccaaggagcccctgtggatccggcccgatgctcygagcaggtgcacctggcagctgggccggcctgcctccgagtccccacatcaccacactgccccggcaaaatctccaaaaatcttgccagatattctgaag

SEQ ID NO: 86882 - DNA, 201 bp, Homo sapiens
cagatccagtcgcaggaccaggcctgggcaggcgtggtgggggggcctgcagaccacagcaccgggaagtccagtcagcggcagatggtgttcggggtggwcaccgccattgacttgctgaacttcgtggccgcccaggagcgggaccagaagtgaagtccggagcgctgggcggatgtttcaccaaggaaatattgagag

SEQ ID NO: 86883 - DNA, 201 bp, Homo sapiens
acgggcggcaccatcacgggcattgccaggaagctgaaggagaagtgtcctggatgcaggatcattggggtggatcccgaagggtccatcctcgcagagcyggaggagctgaaccagacggagcagacaacctacgaggtggaagggatcggctacgacttcatccccacggtgctggacaggacggtggtggacaagtgg

SEQ ID NO: 86884 - DNA, 201 bp, Homo sapiens
gatgggaagctggacatgctggtggcttcagtgggcacgggcggcaccatcacgggcattgccaggaagctgaaggagaagtgtcctggatgcaggatcaytggggtggatcccgaagggtccatcctcgcagagccggaggagctgaaccagacggagcagacaacctacgaggtggaagggatcggctacgacttcatc

SEQ ID NO: 86885 - DNA, 201 bp, Homo sapiens
ccccggcaaaatctccaaaaatcttgccagatattctgaagaaaatcggggacacccctatggtcagaatcaacaagattgggaagaagttcggcctgaastgtgagctcttggccaagtgtgagttcttcaacgcgggcgggagcgtgaaggaccgcatcagcctgcggatgattgaggatgctgagcgcgacgggacgc

SEQ ID NO: 86886 - DNA, 201 bp, Homo sapiens
gttcttcaacgcgggcgggagcgtgaaggaccgcatcagcctgcggatgattgaggatgctgagcgcgacgggacgctgaagcccggggacacgattatcragccgacatccgggaacaccgggatcgggctggccctggctgcggcagtgaggggctatcgctgcatcatcgtgatgccagagaagatgagctccgagaa

SEQ ID NO: 86887 - DNA, 201 bp, Homo sapiens
ttcaacgcgggcgggagcgtgaaggaccgcatcagcctgcggatgattgaggatgctgagcgcgacgggacgctgaagcccggggacacgattatcgagcygacatccgggaacaccgggatcgggctggccctggctgcggcagtgaggggctatcgctgcatcatcgtgatgccagagaagatgagctccgagaaggtg

SEQ ID NO: 86888 - DNA, 201 bp, Homo sapiens
gggcgggagcgtgaaggaccgcatcagcctgcggatgattgaggatgctgagcgcgacgggacgctgaagcccggggacacgattatcgagccgacatccrggaacaccgggatcgggctggccctggctgcggcagtgaggggctatcgctgcatcatcgtgatgccagagaagatgagctccgagaaggtggacgtgct

SEQ ID NO: 86889 - DNA, 201 bp, Homo sapiens
gtgtcctggatgcaggatcattggggtggatcccgaagggtccatcctcgcagagccggaggagctgaaccagacggagcagacaacctacgaggtggaarggatcggctacgacttcatccccacggtgctggacaggacggtggtggacaagtggttcaagagcaacgatgaggaggcgttcacctttgcccgcatgct

SEQ ID NO: 86890 - DNA, 201 bp, Homo sapiens
cgtgaaggaccgcatcagcctgcggatgattgaggatgctgagcgcgacgggacgctgaagcccggggacacgattatcgagccgacatccgggaacaccrggatcgggctggccctggctgcggcagtgaggggctatcgctgcatcatcgtgatgccagagaagatgagctccgagaaggtggacgtgctgcgggcact

SEQ ID NO: 86891 - DNA, 201 bp, Homo sapiens
ctgagcgcgacgggacgctgaagcccggggacacgattatcgagccgacatccgggaacaccgggatcgggctggccctggctgcggcagtgaggggctaycgctgcatcatcgtgatgccagagaagatgagctccgagaaggtggacgtgctgcgggcactgggggctgagattgtgaggacgcccaccaatgccaggt

SEQ ID NO: 86892 - DNA, 201 bp, Homo sapiens
aggaccgcatcagcctgcggatgattgaggatgctgagcgcgacgggacgctgaagcccggggacacgattatcgagccgacatccgggaacaccgggatsgggctggccctggctgcggcagtgaggggctatcgctgcatcatcgtgatgccagagaagatgagctccgagaaggtggacgtgctgcgggcactggggg

SEQ ID NO: 86893 - DNA, 201 bp, Homo sapiens
catcagcctgcggatgattgaggatgctgagcgcgacgggacgctgaagcccggggacacgattatcgagccgacatccgggaacaccgggatcgggctgrccctggctgcggcagtgaggggctatcgctgcatcatcgtgatgccagagaagatgagctccgagaaggtggacgtgctgcgggcactgggggctgagat

SEQ ID NO: 86894 - DNA, 201 bp, Homo sapiens; identical to SEQ ID NO: 86826

SEQ ID NO: 86895 - DNA, 201 bp, Homo sapiens; identical to SEQ ID NO: 86827

SEQ ID NO: 86896 - DNA, 201 bp, Homo sapiens; identical to SEQ ID NO: 86828

SEQ ID NO: 86897 - DNA, 201 bp, Homo sapiens; identical to SEQ ID NO: 86829

SEQ ID NO: 86898 - DNA, 201 bp, Homo sapiens
atatgtgattttctctaatgtaacttcctcttaggatgtttcaccaaggaaatattgagagagaagtcggccaggtaggatgaacacaggcaatgactgcrcagagtggattaaaggcaaaagagagaagagtccaggaaggggcggggagaagcctgggtggctcagcatcctccacgggctgcgccgtctgctcggggc

SEQ ID NO: 86899 - DNA, 201 bp, Homo sapiens; identical to SEQ ID NO: 86831

SEQ ID NO: 86900 - DNA, 201 bp, Homo sapiens
aggagcgggaccagaagtgaagtccggagcgctgggcggtgcggagcgggcccgccacccttgcccacttctccttcgctttcctgagccctaaacacacrcgtgattggtaactgcctggcctggcaccgttatccctgcacacggcacagagcatccgtctcccctcgttaacacatggcttcctaaatggccctgttt

SEQ ID NO: 86901 - DNA, 201 bp, Homo sapiens; identical to SEQ ID NO: 86832

SEQ ID NO: 86902 - DNA, 201 bp, Homo sapiens; identical to SEQ ID NO: 86834

SEQ ID NO: 86903 - DNA, 201 bp, Homo sapiens; identical to SEQ ID NO: 86836

SEQ ID NO: 86904 - DNA, 201 bp, Homo sapiens
ggagcgggcccgccacccttgcccacttctccttcgctttcctgagccctaaacacacgcgtgattggtaactgcctggcctggcaccgttatccctgcasacggcacagagcatccgtctcccctcgttaacacatggcttcctaaatggccctgtttacggcctatgagatgaaatatgtgattttctctaatgtaact

SEQ ID NO: 86905 - DNA, 201 bp, Homo sapiens
gcggcagatggtgttcggggtggtcaccgccattgacttgctgaacttcgtggccgcccaggagcgggaccagaagtgaagtccggagcgctgggcggtgyggagcgggcccgccacccttgcccacttctccttcgctttcctgagccctaaacacacgcgtgattggtaactgcctggcctggcaccgttatccctgca

SEQ ID NO: 86906 - DNA, 201 bp, Homo sapiens; identical to SEQ ID NO: 86837

SEQ ID NO: 86907 - DNA, 201 bp, Homo sapiens; identical to SEQ ID NO: 86838

SEQ ID NO: 86908 - DNA, 201 bp, Homo sapiens; identical to SEQ ID NO: 86839

SEQ ID NO: 86909 - DNA, 201 bp, Homo sapiens; identical to SEQ ID NO: 86840

SEQ ID NO: 86910 - DNA, 201 bp, Homo sapiens; identical to SEQ ID NO: 86841

SEQ ID NO: 86911 - DNA, 201 bp, Homo sapiens; identical to SEQ ID NO: 86842

SEQ ID NO: 86912 - DNA, 201 bp, Homo sapiens; identical to SEQ ID NO: 86843

SEQ ID NO: 86913 - DNA, 201 bp, Homo sapiens; identical to SEQ ID NO: 86844

SEQ ID NO: 86914 - DNA, 201 bp, Homo sapiens; identical to SEQ ID NO: 86845

SEQ ID NO: 86915 - DNA, 201 bp, Homo sapiens; identical to SEQ ID NO: 86846

SEQ ID NO: 86916 - DNA, 201 bp, Homo sapiens; identical to SEQ ID NO: 86847

SEQ ID NO: 86917 - DNA, 201 bp, Homo sapiens; identical to SEQ ID NO: 86848

SEQ ID NO: 86918 - DNA, 201 bp, Homo sapiens; identical to SEQ ID NO: 86849

SEQ ID NO: 86919 - DNA, 201 bp, Homo sapiens; identical to SEQ ID NO: 86850

SEQ ID NO: 86920 - DNA, 201 bp, Homo sapiens; identical to SEQ ID NO: 86851

SEQ ID NO: 86921 - DNA, 201 bp, Homo sapiens; identical to SEQ ID NO: 86852

SEQ ID NO: 86922 - DNA, 201 bp, Homo sapiens; identical to SEQ ID NO: 86853

SEQ ID NO: 86923 - DNA, 201 bp, Homo sapiens; identical to SEQ ID NO: 86854

SEQ ID NO: 86924 - DNA, 201 bp, Homo sapiens; identical to SEQ ID NO: 86855

SEQ ID NO: 86925 - DNA, 201 bp, Homo sapiens; identical to SEQ ID NO: 86856

SEQ ID NO: 86926 - DNA, 201 bp, Homo sapiens; identical to SEQ ID NO: 86857

SEQ ID NO: 86927 - DNA, 201 bp, Homo sapiens; identical to SEQ ID NO: 86858

SEQ ID NO: 86928 - DNA, 201 bp, Homo sapiens; identical to SEQ ID NO: 86859

SEQ ID NO: 86929 - DNA, 201 bp, Homo sapiens; identical to SEQ ID NO: 86860

SEQ ID NO: 86930 - DNA, 201 bp, Homo sapiens; identical to SEQ ID NO: 86861

SEQ ID NO: 86931 - DNA, 201 bp, Homo sapiens; identical to SEQ ID NO: 86862

SEQ ID NO: 86932 - DNA, 201 bp, Homo sapiens; identical to SEQ ID NO: 86863

SEQ ID NO: 86933 - DNA, 201 bp, Homo sapiens; identical to SEQ ID NO: 86864

SEQ ID NO: 86934 - DNA, 201 bp, Homo sapiens; identical to SEQ ID NO: 86865

SEQ ID NO: 86935 - DNA, 201 bp, Homo sapiens
aatggtgacgcttgggaacatgctctcgtccctgcttgccgggaaggtgcagccgtcagaccaagttggcaaagtcatctacaagcagttcaaacagatcygcctcacggacacgctgggcaggctctcgcacatcctggagatggaccacttcgccctggtggtgcacgagcagatccagtaccacagcaccgggaagtc

SEQ ID NO: 86936 - DNA, 201 bp, Homo sapiens; identical to SEQ ID NO: 86867

SEQ ID NO: 86937 - DNA, 201 bp, Homo sapiens; identical to SEQ ID NO: 86868

SEQ ID NO: 86938 - DNA, 201 bp, Homo sapiens; identical to SEQ ID NO: 86869

SEQ ID NO: 86939 - DNA, 201 bp, Homo sapiens; identical to SEQ ID NO: 86870

SEQ ID NO: 86940 - DNA, 201 bp, Homo sapiens; identical to SEQ ID NO: 86871

SEQ ID NO: 86941 - DNA, 201 bp, Homo sapiens
gaccacttcgccctggtggtgcacgagcagatccagtaccacagcaccgggaagtccagtcagcggcagatggtgttcggggtggtcaccgccattgactygctgaacttcgtggccgcccaggagcgggaccagaagtgaagtccggagcgctgggcggtgcggagcgggcccgccacccttgcccacttctccttcgct

SEQ ID NO: 86942 - DNA, 201 bp, Homo sapiens; identical to SEQ ID NO: 86873

SEQ ID NO: 86943 - DNA, 201 bp, Homo sapiens; identical to SEQ ID NO: 86874

SEQ ID NO: 86944 - DNA, 201 bp, Homo sapiens; identical to SEQ ID NO: 86875

SEQ ID NO: 86945 - DNA, 201 bp, Homo sapiens; identical to SEQ ID NO: 86876

SEQ ID NO: 86946 - DNA, 201 bp, Homo sapiens; identical to SEQ ID NO: 86877

SEQ ID NO: 86947 - DNA, 201 bp, Homo sapiens; identical to SEQ ID NO: 86878

SEQ ID NO: 86948 - DNA, 201 bp, Homo sapiens
gaagtccagtcagcggcagatggtgttcggggtggtcaccgccattgacttgctgaacttcgtggccgcccaggagcgggaccagaagtgaagtccggagmgctgggcggtgcggagcgggcccgccacccttgcccacttctccttcgctttcctgagccctaaacacacgcgtgattggtaactgcctggcctggcacc

SEQ ID NO: 86949 - DNA, 201 bp, Homo sapiens; identical to SEQ ID NO: 86880

SEQ ID NO: 86950 - DNA, 201 bp, Homo sapiens; identical to SEQ ID NO: 86881

SEQ ID NO: 86951 - DNA, 201 bp, Homo sapiens
cacatcctggagatggaccacttcgccctggtggtgcacgagcagatccagtaccacagcaccgggaagtccagtcagcggcagatggtgttcggggtggwcaccgccattgacttgctgaacttcgtggccgcccaggagcgggaccagaagtgaagtccggagcgctgggcggtgcggagcgggcccgccacccttgcc

SEQ ID NO: 86952 - DNA, 201 bp, Homo sapiens; identical to SEQ ID NO: 86883

SEQ ID NO: 86953 - DNA, 201 bp, Homo sapiens; identical to SEQ ID NO: 86884

SEQ ID NO: 86954 - DNA, 201 bp, Homo sapiens; identical to SEQ ID NO: 86885

SEQ ID NO: 86955 - DNA, 201 bp, Homo sapiens; identical to SEQ ID NO: 86886

SEQ ID NO: 86956 - DNA, 201 bp, Homo sapiens; identical to SEQ ID NO: 86887

SEQ ID NO: 86957 - DNA, 201 bp, Homo sapiens; identical to SEQ ID NO: 86888

SEQ ID NO: 86958 - DNA, 201 bp, Homo sapiens; identical to SEQ ID NO: 86889

SEQ ID NO: 86959 - DNA, 201 bp, Homo sapiens; identical to SEQ ID NO: 86890

SEQ ID NO: 86960 - DNA, 201 bp, Homo sapiens; identical to SEQ ID NO: 86891

SEQ ID NO: 86961 - DNA, 201 bp, Homo sapiens; identical to SEQ ID NO: 86892

SEQ ID NO: 86962 - DNA, 201 bp, Homo sapiens; identical to SEQ ID NO: 86893

SEQ ID NO: 86963 - DNA, 201 bp, Homo sapiens; identical to SEQ ID NO: 86826

SEQ ID NO: 86964 - DNA, 201 bp, Homo sapiens
acggaatttcgtatttcagatgaccaaggccaatggccaagtgtgagttcttcaacgcgggcgggagcgtgaaggaccgcatcagcctgcggatgattgasgatgctgagcgcgacgggacgctgaagcccggggacacgattatcgagccgacatccgggaacaccgggatcgggctggccctggctgcggcagtgaggg

SEQ ID NO: 86965 - DNA, 201 bp, Homo sapiens; identical to SEQ ID NO: 86828

SEQ ID NO: 86966 - DNA, 201 bp, Homo sapiens; identical to SEQ ID NO: 86829

SEQ ID NO: 86967 - DNA, 134 bp, Homo sapiens
aaggccctgggatcagaaaactcgctggttaatragtggccaagaacatatcagcttaagtttgggaaaaacacacaacagggcattgtgtcagagggtgaccaaagtgactccccagcagatggaccagggaa

SEQ ID NO: 86968 - DNA, 201 bp, Homo sapiens; identical to SEQ ID NO: 86898

SEQ ID NO: 86969 - DNA, 201 bp, Homo sapiens; identical to SEQ ID NO: 86831

SEQ ID NO: 86970 - DNA, 201 bp, Homo sapiens; identical to SEQ ID NO: 86900

SEQ ID NO: 86971 - DNA, 201 bp, Homo sapiens; identical to SEQ ID NO: 86870

SEQ ID NO: 86972 - DNA, 201 bp, Homo sapiens; identical to SEQ ID NO: 86871

SEQ ID NO: 86973 - DNA, 201 bp, Homo sapiens
agagccctggtagacctcagcatcgtcacagagaaagctgtgggtgcagaggccttggggacaaggcggggacggaatttcgtatttcagatgaccaaggycaatggccaagtgtgagttcttcaacgcgggcgggagcgtgaaggaccgcatcagcctgcggatgattgaggatgctgagcgcgacgggacgctgaagcc

SEQ ID NO: 86974 - DNA, 201 bp, Homo sapiens; identical to SEQ ID NO: 86832

SEQ ID NO: 86975 - DNA, 201 bp, Homo sapiens
ggctggcctcgtcctgggtgcgcagggggtcacctgaggtgtggtctgaggcctccggggaagggcatttctttgcaggacgcagtttccaggctcaagarcgtggagggaattcctaagggtcgctcttcaccaagagcgcagagccctggtagacctcagcatcgtcacagagaaagctgtgggtgcagaggccttggg

SEQ ID NO: 86976 - DNA, 201 bp, Homo sapiens
gttaatgagtggccaagaacatatcagcttaagtttgggaaaaacacacaacagggcattgtgtcagagggtgaccaaagtgactccccagcagatggacmagggaacgaacaggtgacctttgaactgaggccggagtggaagcagcgagggtgtgaagggccgggtgagggtcaaaggcagaagcaagcaggtggggag

SEQ ID NO: 86977 - DNA, 201 bp, Homo sapiens; identical to SEQ ID NO: 86834

SEQ ID NO: 86978 - DNA, 201 bp, Homo sapiens; identical to SEQ ID NO: 86941

SEQ ID NO: 86979 - DNA, 201 bp, Homo sapiens; identical to SEQ ID NO: 86836

SEQ ID NO: 86980 - DNA, 201 bp, Homo sapiens; identical to SEQ ID NO: 86904

SEQ ID NO: 86981 - DNA, 201 bp, Homo sapiens; identical to SEQ ID NO: 86905

SEQ ID NO: 86982 - DNA, 201 bp, Homo sapiens; identical to SEQ ID NO: 86837

SEQ ID NO: 86983 - DNA, 201 bp, Homo sapiens; identical to SEQ ID NO: 86838

SEQ ID NO: 86984 - DNA, 201 bp, Homo sapiens; identical to SEQ ID NO: 86839

SEQ ID NO: 86985 - DNA, 201 bp, Homo sapiens; identical to SEQ ID NO: 86840

SEQ ID NO: 86986 - DNA, 201 bp, Homo sapiens; identical to SEQ ID NO: 86841

SEQ ID NO: 86987 - DNA, 201 bp, Homo sapiens; identical to SEQ ID NO: 86843

SEQ ID NO: 86988 - DNA, 201 bp, Homo sapiens; identical to SEQ ID NO: 86844

SEQ ID NO: 86989 - DNA, 201 bp, Homo sapiens; identical to SEQ ID NO: 86845

SEQ ID NO: 86990 - DNA, 201 bp, Homo sapiens; identical to SEQ ID NO: 86876

SEQ ID NO: 86991 - DNA, 201 bp, Homo sapiens; identical to SEQ ID NO: 86847

SEQ ID NO: 86992 - DNA, 201 bp, Homo sapiens
gacctcagcatcgtcacagagaaagctgtgggtgcagaggccttggggacaaggcggggacggaatttcgtatttcagatgaccaaggccaatggccaagygtgagttcttcaacgcgggcgggagcgtgaaggaccgcatcagcctgcggatgattgaggatgctgagcgcgacgggacgctgaagcccggggacacgat

SEQ ID NO: 86993 - DNA, 201 bp, Homo sapiens; identical to SEQ ID NO: 86848

SEQ ID NO: 86994 - DNA, 201 bp, Homo sapiens; identical to SEQ ID NO: 86849

SEQ ID NO: 86995 - DNA, 201 bp, Homo sapiens; identical to SEQ ID NO: 86850

SEQ ID NO: 86996 - DNA, 201 bp, Homo sapiens; identical to SEQ ID NO: 86851

SEQ ID NO: 86997 - DNA, 201 bp, Homo sapiens; identical to SEQ ID NO: 86852

SEQ ID NO: 86998 - DNA, 201 bp, Homo sapiens; identical to SEQ ID NO: 86854

SEQ ID NO: 86999 - DNA, 201 bp, Homo sapiens; identical to SEQ ID NO: 86855

SEQ ID NO: 87000 - DNA, 201 bp, Homo sapiens; identical to SEQ ID NO: 86878

SEQ ID NO: 87001 - DNA, 201 bp, Homo sapiens; identical to SEQ ID NO: 86948

SEQ ID NO: 87002 - DNA, 201 bp, Homo sapiens; identical to SEQ ID NO: 86880

SEQ ID NO: 87003 - DNA, 201 bp, Homo sapiens
caaggcggggacggaatttcgtatttcagatgaccaaggccaatggccaagtgtgagttcttcaacgcgggcgggagcgtgaaggaccgcatcagcctgcvgatgattgaggatgctgagcgcgacgggacgctgaagcccggggacacgattatcgagccgacatccgggaacaccgggatcgggctggccctggctgcg

SEQ ID NO: 87004 - DNA, 201 bp, Homo sapiens; identical to SEQ ID NO: 86858

SEQ ID NO: 87005 - DNA, 201 bp, Homo sapiens; identical to SEQ ID NO: 86951

SEQ ID NO: 87006 - DNA, 201 bp, Homo sapiens; identical to SEQ ID NO: 86859

SEQ ID NO: 87007 - DNA, 201 bp, Homo sapiens; identical to SEQ ID NO: 86883

SEQ ID NO: 87008 - DNA, 201 bp, Homo sapiens; identical to SEQ ID NO: 86884

SEQ ID NO: 87009 - DNA, 201 bp, Homo sapiens
cgtatttcagatgaccaaggccaatggccaagtgtgagttcttcaacgcgggcgggagcgtgaaggaccgcatcagcctgcggatgattgaggatgctgascgcgacgggacgctgaagcccggggacacgattatcgagccgacatccgggaacaccgggatcgggctggccctggctgcggcagtgaggggctatcgct

SEQ ID NO: 87010 - DNA, 201 bp, Homo sapiens; identical to SEQ ID NO: 86862

SEQ ID NO: 87011 - DNA, 201 bp, Homo sapiens; identical to SEQ ID NO: 86861

SEQ ID NO: 87012 - DNA, 201 bp, Homo sapiens; identical to SEQ ID NO: 86886

SEQ ID NO: 87013 - DNA, 201 bp, Homo sapiens; identical to SEQ ID NO: 86863

SEQ ID NO: 87014 - DNA, 201 bp, Homo sapiens; identical to SEQ ID NO: 86887

SEQ ID NO: 87015 - DNA, 201 bp, Homo sapiens
aggcggggacggaatttcgtatttcagatgaccaaggccaatggccaagtgtgagttcttcaacgcgggcgggagcgtgaaggaccgcatcagcctgcggrtgattgaggatgctgagcgcgacgggacgctgaagcccggggacacgattatcgagccgacatccgggaacaccgggatcgggctggccctggctgcggc

SEQ ID NO: 87016 - DNA, 201 bp, Homo sapiens; identical to SEQ ID NO: 86888

SEQ ID NO: 87017 - DNA, 201 bp, Homo sapiens; identical to SEQ ID NO: 86889

SEQ ID NO: 87018 - DNA, 201 bp, Homo sapiens
aggccttggggacaaggcggggacggaatttcgtatttcagatgaccaaggccaatggccaagtgtgagttcttcaacgcgggcgggagcgtgaaggaccdcatcagcctgcggatgattgaggatgctgagcgcgacgggacgctgaagcccggggacacgattatcgagccgacatccgggaacaccgggatcgggctg

SEQ ID NO: 87019 - DNA, 201 bp, Homo sapiens; identical to SEQ ID NO: 86890

SEQ ID NO: 87020 - DNA, 201 bp, Homo sapiens; identical to SEQ ID NO: 86935

SEQ ID NO: 87021 - DNA, 201 bp, Homo sapiens
gaggccttggggacaaggcggggacggaatttcgtatttcagatgaccaaggccaatggccaagtgtgagttcttcaacgcgggcgggagcgtgaaggacygcatcagcctgcggatgattgaggatgctgagcgcgacgggacgctgaagcccggggacacgattatcgagccgacatccgggaacaccgggatcgggct

SEQ ID NO: 87022 - DNA, 201 bp, Homo sapiens; identical to SEQ ID NO: 86891

SEQ ID NO: 87023 - DNA, 201 bp, Homo sapiens
acaaggcggggacggaatttcgtatttcagatgaccaaggccaatggccaagtgtgagttcttcaacgcgggcgggagcgtgaaggaccgcatcagcctgyggatgattgaggatgctgagcgcgacgggacgctgaagcccggggacacgattatcgagccgacatccgggaacaccgggatcgggctggccctggctgc

SEQ ID NO: 87024 - DNA, 201 bp, Homo sapiens; identical to SEQ ID NO: 86892

SEQ ID NO: 87025 - DNA, 201 bp, Homo sapiens; identical to SEQ ID NO: 86893

SEQ ID NO: 87026 - DNA, 201 bp, Homo sapiens; identical to SEQ ID NO: 86877

SEQ ID NO: 87027 - DNA, 201 bp, Homo sapiens; identical to SEQ ID NO: 86846

SEQ ID NO: 87028 - DNA, 201 bp, Homo sapiens; identical to SEQ ID NO: 86826

SEQ ID NO: 87029 - DNA, 201 bp, Homo sapiens; identical to SEQ ID NO: 86869

SEQ ID NO: 87030 - DNA, 201 bp, Homo sapiens; identical to SEQ ID NO: 86827

SEQ ID NO: 87031 - DNA, 201 bp, Homo sapiens; identical to SEQ ID NO: 86828

SEQ ID NO: 87032 - DNA, 201 bp, Homo sapiens; identical to SEQ ID NO: 86829

SEQ ID NO: 87033 - DNA, 201 bp, Homo sapiens; identical to SEQ ID NO: 86853

SEQ ID NO: 87034 - DNA, 201 bp, Homo sapiens; identical to SEQ ID NO: 86856

SEQ ID NO: 87035 - DNA, 201 bp, Homo sapiens; identical to SEQ ID NO: 86878

SEQ ID NO: 87036 - DNA, 190 bp, Homo sapiens
cccctggctcactacgacaccaccgctgatgagatcctgcagcagtgtgatgggaagctggacatgctggtggcttcagtgggcacgggcggcaccatcabgggcattgccaggaagctgaaggagaagtgtcctggatgcatcattggggtggatcccgaagggtccatcctcgcagagccggaggagc

SEQ ID NO: 87037 - DNA, 201 bp, Homo sapiens; identical to SEQ ID NO: 86857

SEQ ID NO: 87038 - DNA, 201 bp, Homo sapiens; identical to SEQ ID NO: 86833

SEQ ID NO: 87039 - DNA, 201 bp, Homo sapiens; identical to SEQ ID NO: 86881

SEQ ID NO: 87040 - DNA, 201 bp, Homo sapiens; identical to SEQ ID NO: 86834

SEQ ID NO: 87041 - DNA, 201 bp, Homo sapiens; identical to SEQ ID NO: 86835

SEQ ID NO: 87042 - DNA, 109 bp, Homo sapiens
ggcacgggcggcaccatcacgggcattgccaggaagctgaaggagaagtgtcctggatgcatcattggggtggatcccgaagggtccatcctcgcagagcyggaggagc

SEQ ID NO: 87043 - DNA, 145 bp, Homo sapiens
tgtgatgggaagctggacatgctggtggcttcagtgggcacgggcggcaccatcacgggcattgccaggaagctgaaggagaagtgtcctggatgcatcaytggggtggatcccgaagggtccatcctcgcagagccggaggagc

SEQ ID NO: 87044 - DNA, 201 bp, Homo sapiens; identical to SEQ ID NO: 86837

SEQ ID NO: 87045 - DNA, 201 bp, Homo sapiens; identical to SEQ ID NO: 86838

SEQ ID NO: 87046 - DNA, 201 bp, Homo sapiens; identical to SEQ ID NO: 86860

SEQ ID NO: 87047 - DNA, 201 bp, Homo sapiens; identical to SEQ ID NO: 86885

SEQ ID NO: 87048 - DNA, 201 bp, Homo sapiens; identical to SEQ ID NO: 86862

SEQ ID NO: 87049 - DNA, 201 bp, Homo sapiens; identical to SEQ ID NO: 86886

SEQ ID NO: 87050 - DNA, 201 bp, Homo sapiens; identical to SEQ ID NO: 86887

SEQ ID NO: 87051 - DNA, 201 bp, Homo sapiens; identical to SEQ ID NO: 86839

SEQ ID NO: 87052 - DNA, 201 bp, Homo sapiens; identical to SEQ ID NO: 86888

SEQ ID NO: 87053 - DNA, 201 bp, Homo sapiens; identical to SEQ ID NO: 86864

SEQ ID NO: 87054 - DNA, 201 bp, Homo sapiens; identical to SEQ ID NO: 86873

SEQ ID NO: 87055 - DNA, 201 bp, Homo sapiens; identical to SEQ ID NO: 86890

SEQ ID NO: 87056 - DNA, 201 bp, Homo sapiens; identical to SEQ ID NO: 86865

SEQ ID NO: 87057 - DNA, 201 bp, Homo sapiens; identical to SEQ ID NO: 86874

SEQ ID NO: 87058 - DNA, 201 bp, Homo sapiens; identical to SEQ ID NO: 86892

SEQ ID NO: 87059 - DNA, 201 bp, Homo sapiens; identical to SEQ ID NO: 86868

SEQ ID NO: 87060 - DNA, 201 bp, Homo sapiens; identical to SEQ ID NO: 86867

SEQ ID NO: 87061 - DNA, 201 bp, Homo sapiens; identical to SEQ ID NO: 86891

SEQ ID NO: 87062 - DNA, 201 bp, Homo sapiens; identical to SEQ ID NO: 86842

SEQ ID NO: 87063 - DNA, 201 bp, Homo sapiens; identical to SEQ ID NO: 86893

SEQ ID NO: 87064 - DNA, 201 bp, Homo sapiens; identical to SEQ ID NO: 86875

SEQ ID NO: 87065 - DNA, 201 bp, Homo sapiens
agacggcacggcccccaagacctaaaataccaccagctggcccttgtcggaaagtcccctggctggccctagtccattgactctgggccgagctgccaggrccacagaagcctgcggcactcagggctcccagggctcccttctccaacagttgctgtgcctccgtttccccaaaatgcaaggagctgatctcatctgtgt

SEQ ID NO: 87066 - DNA, 201 bp, Homo sapiens; identical to SEQ ID NO: 86826

SEQ ID NO: 87067 - DNA, 201 bp, Homo sapiens
ctcataacagagacggcacggcccccaagacctaaaataccaccagctggcccttgtcggaaagtcccctggctggccctagtccattgactctgggccgrgctgccagggccacagaagcctgcggcactcagggctcccagggctcccttctccaacagttgctgtgcctccgtttccccaaaatgcaaggagctgatc

SEQ ID NO: 87068 - DNA, 201 bp, Homo sapiens; identical to SEQ ID NO: 86869

SEQ ID NO: 87069 - DNA, 201 bp, Homo sapiens; identical to SEQ ID NO: 86827

SEQ ID NO: 87070 - DNA, 201 bp, Homo sapiens; identical to SEQ ID NO: 86828

SEQ ID NO: 87071 - DNA, 201 bp, Homo sapiens
ccccaaatcaagtcttcctggagcatgtccacgcttgtcaccaccgtctgtggctgctttcaagcacgtcagggctgcgtgctcataacagagacggcacrgcccccaagacctaaaataccaccagctggcccttgtcggaaagtcccctggctggccctagtccattgactctgggccgagctgccagggccacagaag

SEQ ID NO: 87072 - DNA, 201 bp, Homo sapiens; identical to SEQ ID NO: 86829

SEQ ID NO: 87073 - DNA, 201 bp, Homo sapiens; identical to SEQ ID NO: 86831

SEQ ID NO: 87074 - DNA, 201 bp, Homo sapiens; identical to SEQ ID NO: 86870

SEQ ID NO: 87075 - DNA, 201 bp, Homo sapiens; identical to SEQ ID NO: 86871

SEQ ID NO: 87076 - DNA, 201 bp, Homo sapiens; identical to SEQ ID NO: 86832

SEQ ID NO: 87077 - DNA, 201 bp, Homo sapiens; identical to SEQ ID NO: 86834

SEQ ID NO: 87078 - DNA, 201 bp, Homo sapiens; identical to SEQ ID NO: 86837

SEQ ID NO: 87079 - DNA, 201 bp, Homo sapiens; identical to SEQ ID NO: 86838

SEQ ID NO: 87080 - DNA, 201 bp, Homo sapiens; identical to SEQ ID NO: 86839

SEQ ID NO: 87081 - DNA, 201 bp, Homo sapiens; identical to SEQ ID NO: 86873

SEQ ID NO: 87082 - DNA, 201 bp, Homo sapiens; identical to SEQ ID NO: 86840

SEQ ID NO: 87083 - DNA, 201 bp, Homo sapiens; identical to SEQ ID NO: 86874

SEQ ID NO: 87084 - DNA, 201 bp, Homo sapiens; identical to SEQ ID NO: 86841

SEQ ID NO: 87085 - DNA, 201 bp, Homo sapiens; identical to SEQ ID NO: 86843

SEQ ID NO: 87086 - DNA, 201 bp, Homo sapiens
ggggcagccgctcgcccctcttttccatgtatccgtccagagtttgagcggtgctgaactgtcagcaccatctgtccggtcccagcatgccttctgagacyccccaggcagaagtggggcccacaggctgcccccaccgctcagggccacactcggcgaaggggagcctggagaaggggtccccagaggataaggaagcca

SEQ ID NO: 87087 - DNA, 201 bp, Homo sapiens; identical to SEQ ID NO: 86875

SEQ ID NO: 87088 - DNA, 201 bp, Homo sapiens; identical to SEQ ID NO: 86844

SEQ ID NO: 87089 - DNA, 201 bp, Homo sapiens; identical to SEQ ID NO: 86877

SEQ ID NO: 87090 - DNA, 201 bp, Homo sapiens; identical to SEQ ID NO: 86876

SEQ ID NO: 87091 - DNA, 201 bp, Homo sapiens; identical to SEQ ID NO: 86845

SEQ ID NO: 87092 - DNA, 201 bp, Homo sapiens; identical to SEQ ID NO: 86846

SEQ ID NO: 87093 - DNA, 201 bp, Homo sapiens; identical to SEQ ID NO: 86847

SEQ ID NO: 87094 - DNA, 201 bp, Homo sapiens; identical to SEQ ID NO: 86848

SEQ ID NO: 87095 - DNA, 201 bp, Homo sapiens; identical to SEQ ID NO: 86850

SEQ ID NO: 87096 - DNA, 201 bp, Homo sapiens; identical to SEQ ID NO: 86852

SEQ ID NO: 87097 - DNA, 201 bp, Homo sapiens; identical to SEQ ID NO: 86853

SEQ ID NO: 87098 - DNA, 201 bp, Homo sapiens; identical to SEQ ID NO: 86854

SEQ ID NO: 87099 - DNA, 201 bp, Homo sapiens; identical to SEQ ID NO: 86878

SEQ ID NO: 87100 - DNA, 201 bp, Homo sapiens
ctgatccttctgcctcagtctcccaagtagctgggaccacaagcgtgtgccaccatgctcgactaatttatttttaaaaatattctgtagagacagggtcwcaatatgttgcccaggctggtcccagacttccgggcttaaatgatcctcccaccttggcctcccacagcgctgggatcacaggtgtgagccactgtgccc

SEQ ID NO: 87101 - DNA, 201 bp, Homo sapiens; identical to SEQ ID NO: 86855

SEQ ID NO: 87102 - DNA, 201 bp, Homo sapiens; identical to SEQ ID NO: 86856

SEQ ID NO: 87103 - DNA, 201 bp, Homo sapiens
cctgctgtgctcaactgatccttctgcctcagtctcccaagtagctgggaccacaagcgtgtgccaccatgctcgactaatttatttttaaaaatattctrtagagacagggtctcaatatgttgcccaggctggtcccagacttccgggcttaaatgatcctcccaccttggcctcccacagcgctgggatcacaggtgt

SEQ ID NO: 87104 - DNA, 201 bp, Homo sapiens
gaagcctgcggcactcagggctcccagggctcccttctccaacagttgctgtgcctccgtttccccaaaatgcaaggagctgatctcatctgtgttccctrtcttttcctggggctctaagtgggccaccccaagggacctctgcctacaaagagaggagtgacagccgtggcggagttgggacgggctccgagggctctt

SEQ ID NO: 87105 - DNA, 201 bp, Homo sapiens; identical to SEQ ID NO: 86880

SEQ ID NO: 87106 - DNA, 201 bp, Homo sapiens; identical to SEQ ID NO: 86857

SEQ ID NO: 87107 - DNA, 201 bp, Homo sapiens; identical to SEQ ID NO: 86881

SEQ ID NO: 87108 - DNA, 201 bp, Homo sapiens; identical to SEQ ID NO: 86858

SEQ ID NO: 87109 - DNA, 201 bp, Homo sapiens; identical to SEQ ID NO: 86859

SEQ ID NO: 87110 - DNA, 201 bp, Homo sapiens
ttcgccctggtggtgcacgagcagatccagtcgcaggaccaggcctgggcaggcgtggtgggggggcctgcagggtccccaaatcaagtcttcctggagcrtgtccacgcttgtcaccaccgtctgtggctgctttcaagcacgtcagggctgcgtgctcataacagagacggcacggcccccaagacctaaaataccacc

SEQ ID NO: 87111 - DNA, 201 bp, Homo sapiens; identical to SEQ ID NO: 86883

SEQ ID NO: 87112 - DNA, 201 bp, Homo sapiens; identical to SEQ ID NO: 86884

SEQ ID NO: 87113 - DNA, 201 bp, Homo sapiens; identical to SEQ ID NO: 86860

SEQ ID NO: 87114 - DNA, 201 bp, Homo sapiens; identical to SEQ ID NO: 86885

SEQ ID NO: 87115 - DNA, 201 bp, Homo sapiens; identical to SEQ ID NO: 86861

SEQ ID NO: 87116 - DNA, 201 bp, Homo sapiens; identical to SEQ ID NO: 86862

SEQ ID NO: 87117 - DNA, 201 bp, Homo sapiens; identical to SEQ ID NO: 86886

SEQ ID NO: 87118 - DNA, 201 bp, Homo sapiens; identical to SEQ ID NO: 86863

SEQ ID NO: 87119 - DNA, 201 bp, Homo sapiens; identical to SEQ ID NO: 86887

SEQ ID NO: 87120 - DNA, 201 bp, Homo sapiens; identical to SEQ ID NO: 86888

SEQ ID NO: 87121 - DNA, 201 bp, Homo sapiens; identical to SEQ ID NO: 86864

SEQ ID NO: 87122 - DNA, 201 bp, Homo sapiens; identical to SEQ ID NO: 86890

SEQ ID NO: 87123 - DNA, 201 bp, Homo sapiens; identical to SEQ ID NO: 86889

SEQ ID NO: 87124 - DNA, 201 bp, Homo sapiens; identical to SEQ ID NO: 86865

SEQ ID NO: 87125 - DNA, 201 bp, Homo sapiens; identical to SEQ ID NO: 86866

SEQ ID NO: 87126 - DNA, 201 bp, Homo sapiens; identical to SEQ ID NO: 86892

SEQ ID NO: 87127 - DNA, 201 bp, Homo sapiens; identical to SEQ ID NO: 86891

SEQ ID NO: 87128 - DNA, 201 bp, Homo sapiens; identical to SEQ ID NO: 86867

SEQ ID NO: 87129 - DNA, 201 bp, Homo sapiens; identical to SEQ ID NO: 86868

SEQ ID NO: 87130 - DNA, 201 bp, Homo sapiens; identical to SEQ ID NO: 86893

SEQ ID NO: 87131 - DNA, 197 bp, Homo sapiens
gctgggatcacaggtgtgagccactgtgcccggccctgtaagcgggtttgaatttcatgcccacaccggctctgaagtcatgagtgcctcaggagctcagmcggtgggccagggaagggtgtgtcctgacctgcggtgggtggagcctggcctggggcccaggggactcacgtggtgggtagaacctggcctggggg

SEQ ID NO: 87132 - DNA, 201 bp, Homo sapiens
tccattgactctgggccgagctgccagggccacagaagcctgcggcactcagggctcccagggctcccttctccaacagttgctgtgcctccgtttccccraaatgcaaggagctgatctcatctgtgttccctatcttttcctggggctctaagtgggccaccccaagggacctctgcctacaaagagaggagtgacagc

SEQ ID NO: 87133 - DNA, 201 bp, Homo sapiens; identical to SEQ ID NO: 86826

SEQ ID NO: 87134 - DNA, 201 bp, Homo sapiens; identical to SEQ ID NO: 86827

SEQ ID NO: 87135 - DNA, 201 bp, Homo sapiens; identical to SEQ ID NO: 86828

SEQ ID NO: 87136 - DNA, 201 bp, Homo sapiens; identical to SEQ ID NO: 86829

SEQ ID NO: 87137 - DNA, 201 bp, Homo sapiens; identical to SEQ ID NO: 86898

SEQ ID NO: 87138 - DNA, 201 bp, Homo sapiens; identical to SEQ ID NO: 86831

SEQ ID NO: 87139 - DNA, 201 bp, Homo sapiens; identical to SEQ ID NO: 86900

SEQ ID NO: 87140 - DNA, 201 bp, Homo sapiens
gactggggtgggggcatgccggggtcccggggagggcgggggtcgggcaggccggagggtcccaggctgcggcggggtggggaaggggtgggggggagggscccgggctgggtggggtggaggaggggctgggggggcgggtgctctgccacgagacattggccggcgccggcctccgcccccgcctctccgccaatcacc

SEQ ID NO: 87141 - DNA, 201 bp, Homo sapiens; identical to SEQ ID NO: 86832

SEQ ID NO: 87142 - DNA, 201 bp, Homo sapiens
taccaccctgcgcggagtcggccccgtccccgagagcgcccggcagcccctggccgtgggccgcaccggagccgcgcaaggcgactgttctgcgcctcggmtcggggttcggacccggctctgggcgcggtcacgcggggcgctgcgcacggcgtccggcggccacagagcgcggccatcgagtcccgccccggcgcggcg

SEQ ID NO: 87143 - DNA, 201 bp, Homo sapiens; identical to SEQ ID NO: 86834

SEQ ID NO: 87144 - DNA, 201 bp, Homo sapiens; identical to SEQ ID NO: 86836

SEQ ID NO: 87145 - DNA, 201 bp, Homo sapiens; identical to SEQ ID NO: 86904

SEQ ID NO: 87146 - DNA, 201 bp, Homo sapiens; identical to SEQ ID NO: 86905

SEQ ID NO: 87147 - DNA, 201 bp, Homo sapiens; identical to SEQ ID NO: 86837

SEQ ID NO: 87148 - DNA, 201 bp, Homo sapiens; identical to SEQ ID NO: 86838

SEQ ID NO: 87149 - DNA, 201 bp, Homo sapiens; identical to SEQ ID NO: 86839

SEQ ID NO: 87150 - DNA, 201 bp, Homo sapiens; identical to SEQ ID NO: 86840

SEQ ID NO: 87151 - DNA, 201 bp, Homo sapiens; identical to SEQ ID NO: 86841

SEQ ID NO: 87152 - DNA, 201 bp, Homo sapiens; identical to SEQ ID NO: 86842

SEQ ID NO: 87153 - DNA, 201 bp, Homo sapiens; identical to SEQ ID NO: 86843

SEQ ID NO: 87154 - DNA, 201 bp, Homo sapiens; identical to SEQ ID NO: 86844

SEQ ID NO: 87155 - DNA, 201 bp, Homo sapiens; identical to SEQ ID NO: 86845

SEQ ID NO: 87156 - DNA, 201 bp, Homo sapiens; identical to SEQ ID NO: 86846

SEQ ID NO: 87157 - DNA, 201 bp, Homo sapiens; identical to SEQ ID NO: 86847

SEQ ID NO: 87158 - DNA, 201 bp, Homo sapiens; identical to SEQ ID NO: 86848

SEQ ID NO: 87159 - DNA, 201 bp, Homo sapiens; identical to SEQ ID NO: 86849

SEQ ID NO: 87160 - DNA, 201 bp, Homo sapiens; identical to SEQ ID NO: 86850

SEQ ID NO: 87161 - DNA, 201 bp, Homo sapiens; identical to SEQ ID NO: 86851

SEQ ID NO: 87162 - DNA, 201 bp, Homo sapiens; identical to SEQ ID NO: 86852

SEQ ID NO: 87163 - DNA, 201 bp, Homo sapiens; identical to SEQ ID NO: 86853

SEQ ID NO: 87164 - DNA, 201 bp, Homo sapiens; identical to SEQ ID NO: 86854

SEQ ID NO: 87165 - DNA, 201 bp, Homo sapiens; identical to SEQ ID NO: 86855

SEQ ID NO: 87166 - DNA, 201 bp, Homo sapiens; identical to SEQ ID NO: 86856

SEQ ID NO: 87167 - DNA, 201 bp, Homo sapiens; identical to SEQ ID NO: 86857

SEQ ID NO: 87168 - DNA, 197 bp, Homo sapiens
ggatcccccatttagccatagggcggggggatcaggttcagcctctgaaagtccagagcacgatgtttgggaaacggccccgcccgcggcctccggsacctggcgaaggagccccgcggggcgcccctgctaccaccctgcgcggagtcggccccgtccccgagagcgcccggcagcccctggccgtgggccgcacc

SEQ ID NO: 87169 - DNA, 201 bp, Homo sapiens; identical to SEQ ID NO: 86858

SEQ ID NO: 87170 - DNA, 201 bp, Homo sapiens; identical to SEQ ID NO: 86859

SEQ ID NO: 87171 - DNA, 201 bp, Homo sapiens; identical to SEQ ID NO: 86860

SEQ ID NO: 87172 - DNA, 201 bp, Homo sapiens; identical to SEQ ID NO: 86861

SEQ ID NO: 87173 - DNA, 201 bp, Homo sapiens; identical to SEQ ID NO: 86862

SEQ ID NO: 87174 - DNA, 201 bp, Homo sapiens; identical to SEQ ID NO: 86863

SEQ ID NO: 87175 - DNA, 201 bp, Homo sapiens; identical to SEQ ID NO: 86864

SEQ ID NO: 87176 - DNA, 201 bp, Homo sapiens; identical to SEQ ID NO: 86865

SEQ ID NO: 87177 - DNA, 201 bp, Homo sapiens; identical to SEQ ID NO: 86935

SEQ ID NO: 87178 - DNA, 201 bp, Homo sapiens; identical to SEQ ID NO: 86867

SEQ ID NO: 87179 - DNA, 201 bp, Homo sapiens; identical to SEQ ID NO: 86868

SEQ ID NO: 87180 - DNA, 201 bp, Homo sapiens; identical to SEQ ID NO: 86869

SEQ ID NO: 87181 - DNA, 201 bp, Homo sapiens; identical to SEQ ID NO: 86870

SEQ ID NO: 87182 - DNA, 201 bp, Homo sapiens; identical to SEQ ID NO: 86871

SEQ ID NO: 87183 - DNA, 201 bp, Homo sapiens; identical to SEQ ID NO: 86941

SEQ ID NO: 87184 - DNA, 201 bp, Homo sapiens; identical to SEQ ID NO: 86873

SEQ ID NO: 87185 - DNA, 201 bp, Homo sapiens; identical to SEQ ID NO: 86874

SEQ ID NO: 87186 - DNA, 201 bp, Homo sapiens; identical to SEQ ID NO: 86875

SEQ ID NO: 87187 - DNA, 201 bp, Homo sapiens; identical to SEQ ID NO: 86876

SEQ ID NO: 87188 - DNA, 201 bp, Homo sapiens; identical to SEQ ID NO: 86877

SEQ ID NO: 87189 - DNA, 201 bp, Homo sapiens; identical to SEQ ID NO: 86878

SEQ ID NO: 87190 - DNA, 201 bp, Homo sapiens; identical to SEQ ID NO: 86948

SEQ ID NO: 87191 - DNA, 201 bp, Homo sapiens; identical to SEQ ID NO: 86880

SEQ ID NO: 87192 - DNA, 201 bp, Homo sapiens; identical to SEQ ID NO: 86881

SEQ ID NO: 87193 - DNA, 201 bp, Homo sapiens; identical to SEQ ID NO: 86951

SEQ ID NO: 87194 - DNA, 201 bp, Homo sapiens; identical to SEQ ID NO: 86883

SEQ ID NO: 87195 - DNA, 201 bp, Homo sapiens; identical to SEQ ID NO: 86884

SEQ ID NO: 87196 - DNA, 201 bp, Homo sapiens
gggcgggggtcgggcaggccggagggtcccaggctgcggcggggtggggaaggggtgggggggaggggcccgggctgggtggggtggaggaggggctgggsgggcgggtgctctgccacgagacattggccggcgccggcctccgcccccgcctctccgccaatcaccgcccgcctgctcccctcgccgtgggtccccgcg

SEQ ID NO: 87197 - DNA, 201 bp, Homo sapiens; identical to SEQ ID NO: 86885

SEQ ID NO: 87198 - DNA, 201 bp, Homo sapiens; identical to SEQ ID NO: 86886

SEQ ID NO: 87199 - DNA, 201 bp, Homo sapiens; identical to SEQ ID NO: 86887

SEQ ID NO: 87200 - DNA, 201 bp, Homo sapiens; identical to SEQ ID NO: 86888

SEQ ID NO: 87201 - DNA, 201 bp, Homo sapiens; identical to SEQ ID NO: 86890

SEQ ID NO: 87202 - DNA, 201 bp, Homo sapiens; identical to SEQ ID NO: 86889

SEQ ID NO: 87203 - DNA, 201 bp, Homo sapiens; identical to SEQ ID NO: 86892

SEQ ID NO: 87204 - DNA, 201 bp, Homo sapiens; identical to SEQ ID NO: 86891

SEQ ID NO: 87205 - DNA, 201 bp, Homo sapiens; identical to SEQ ID NO: 86893

SEQ ID NO: 87206 - DNA, 201 bp, Homo sapiens; identical to SEQ ID NO: 86826

SEQ ID NO: 87207 - DNA, 201 bp, Homo sapiens; identical to SEQ ID NO: 86827

SEQ ID NO: 87208 - DNA, 201 bp, Homo sapiens; identical to SEQ ID NO: 86828

SEQ ID NO: 87209 - DNA, 201 bp, Homo sapiens; identical to SEQ ID NO: 86829

SEQ ID NO: 87210 - DNA, 201 bp, Homo sapiens; identical to SEQ ID NO: 86830

SEQ ID NO: 87211 - DNA, 201 bp, Homo sapiens; identical to SEQ ID NO: 86831

SEQ ID NO: 87212 - DNA, 201 bp, Homo sapiens; identical to SEQ ID NO: 86832

SEQ ID NO: 87213 - DNA, 201 bp, Homo sapiens; identical to SEQ ID NO: 86833

SEQ ID NO: 87214 - DNA, 201 bp, Homo sapiens; identical to SEQ ID NO: 86834

SEQ ID NO: 87215 - DNA, 201 bp, Homo sapiens; identical to SEQ ID NO: 86835

SEQ ID NO: 87216 - DNA, 201 bp, Homo sapiens; identical to SEQ ID NO: 86836

SEQ ID NO: 87217 - DNA, 201 bp, Homo sapiens; identical to SEQ ID NO: 86837

SEQ ID NO: 87218 - DNA, 201 bp, Homo sapiens; identical to SEQ ID NO: 86838

SEQ ID NO: 87219 - DNA, 201 bp, Homo sapiens; identical to SEQ ID NO: 86839

SEQ ID NO: 87220 - DNA, 201 bp, Homo sapiens; identical to SEQ ID NO: 86840

SEQ ID NO: 87221 - DNA, 201 bp, Homo sapiens; identical to SEQ ID NO: 86841

SEQ ID NO: 87222 - DNA, 201 bp, Homo sapiens; identical to SEQ ID NO: 86842

SEQ ID NO: 87223 - DNA, 201 bp, Homo sapiens; identical to SEQ ID NO: 86843

SEQ ID NO: 87224 - DNA, 201 bp, Homo sapiens; identical to SEQ ID NO: 86844

SEQ ID NO: 87225 - DNA, 201 bp, Homo sapiens; identical to SEQ ID NO: 86845

SEQ ID NO: 87226 - DNA, 201 bp, Homo sapiens; identical to SEQ ID NO: 86846

SEQ ID NO: 87227 - DNA, 201 bp, Homo sapiens; identical to SEQ ID NO: 86847

SEQ ID NO: 87228 - DNA, 201 bp, Homo sapiens; identical to SEQ ID NO: 86848

SEQ ID NO: 87229 - DNA, 201 bp, Homo sapiens; identical to SEQ ID NO: 86849

SEQ ID NO: 87230 - DNA, 201 bp, Homo sapiens; identical to SEQ ID NO: 86850

SEQ ID NO: 87231 - DNA, 201 bp, Homo sapiens; identical to SEQ ID NO: 86851

SEQ ID NO: 87232 - DNA, 201 bp, Homo sapiens; identical to SEQ ID NO: 86852

SEQ ID NO: 87233 - DNA, 201 bp, Homo sapiens; identical to SEQ ID NO: 86853

SEQ ID NO: 87234 - DNA, 201 bp, Homo sapiens; identical to SEQ ID NO: 86854

SEQ ID NO: 87235 - DNA, 201 bp, Homo sapiens; identical to SEQ ID NO: 86855

SEQ ID NO: 87236 - DNA, 201 bp, Homo sapiens; identical to SEQ ID NO: 86856

SEQ ID NO: 87237 - DNA, 201 bp, Homo sapiens; identical to SEQ ID NO: 86857

SEQ ID NO: 87238 - DNA, 201 bp, Homo sapiens; identical to SEQ ID NO: 86858

SEQ ID NO: 87239 - DNA, 201 bp, Homo sapiens; identical to SEQ ID NO: 86859

SEQ ID NO: 87240 - DNA, 201 bp, Homo sapiens; identical to SEQ ID NO: 86860

SEQ ID NO: 87241 - DNA, 201 bp, Homo sapiens; identical to SEQ ID NO: 86861

SEQ ID NO: 87242 - DNA, 201 bp, Homo sapiens; identical to SEQ ID NO: 86862

SEQ ID NO: 87243 - DNA, 201 bp, Homo sapiens; identical to SEQ ID NO: 86863

SEQ ID NO: 87244 - DNA, 201 bp, Homo sapiens; identical to SEQ ID NO: 86864

SEQ ID NO: 87245 - DNA, 201 bp, Homo sapiens; identical to SEQ ID NO: 86865

SEQ ID NO: 87246 - DNA, 201 bp, Homo sapiens; identical to SEQ ID NO: 86935

SEQ ID NO: 87247 - DNA, 201 bp, Homo sapiens; identical to SEQ ID NO: 86867

SEQ ID NO: 87248 - DNA, 201 bp, Homo sapiens; identical to SEQ ID NO: 86868

SEQ ID NO: 87249 - DNA, 201 bp, Homo sapiens; identical to SEQ ID NO: 86869

SEQ ID NO: 87250 - DNA, 201 bp, Homo sapiens; identical to SEQ ID NO: 86870

SEQ ID NO: 87251 - DNA, 201 bp, Homo sapiens; identical to SEQ ID NO: 86871

SEQ ID NO: 87252 - DNA, 201 bp, Homo sapiens
gaccacttcgccctggtggtgcacgagcagatccagtaccacagcaccgggaagtccagtcagcggcagatggtgttcggggtggtcaccgccattgactygctgaacttcgtggccgcccaggagcgggaccagaagtgaagtccggagcgctgggcggatgtttcaccaaggaaatattgagagagaagtcggccaggt

SEQ ID NO: 87253 - DNA, 201 bp, Homo sapiens; identical to SEQ ID NO: 86873

SEQ ID NO: 87254 - DNA, 201 bp, Homo sapiens; identical to SEQ ID NO: 86874

SEQ ID NO: 87255 - DNA, 201 bp, Homo sapiens; identical to SEQ ID NO: 86875

SEQ ID NO: 87256 - DNA, 201 bp, Homo sapiens; identical to SEQ ID NO: 86876

SEQ ID NO: 87257 - DNA, 201 bp, Homo sapiens; identical to SEQ ID NO: 86877

SEQ ID NO: 87258 - DNA, 201 bp, Homo sapiens; identical to SEQ ID NO: 86878

SEQ ID NO: 87259 - DNA, 201 bp, Homo sapiens; identical to SEQ ID NO: 86879

SEQ ID NO: 87260 - DNA, 201 bp, Homo sapiens; identical to SEQ ID NO: 86880

SEQ ID NO: 87261 - DNA, 201 bp, Homo sapiens; identical to SEQ ID NO: 86881

SEQ ID NO: 87262 - DNA, 201 bp, Homo sapiens
cacatcctggagatggaccacttcgccctggtggtgcacgagcagatccagtaccacagcaccgggaagtccagtcagcggcagatggtgttcggggtggwcaccgccattgacttgctgaacttcgtggccgcccaggagcgggaccagaagtgaagtccggagcgctgggcggatgtttcaccaaggaaatattgagag

SEQ ID NO: 87263 - DNA, 201 bp, Homo sapiens; identical to SEQ ID NO: 86883

SEQ ID NO: 87264 - DNA, 201 bp, Homo sapiens; identical to SEQ ID NO: 86884

SEQ ID NO: 87265 - DNA, 201 bp, Homo sapiens; identical to SEQ ID NO: 86885

SEQ ID NO: 87266 - DNA, 201 bp, Homo sapiens; identical to SEQ ID NO: 86886

SEQ ID NO: 87267 - DNA, 201 bp, Homo sapiens; identical to SEQ ID NO: 86887

SEQ ID NO: 87268 - DNA, 201 bp, Homo sapiens; identical to SEQ ID NO: 86888

SEQ ID NO: 87269 - DNA, 201 bp, Homo sapiens; identical to SEQ ID NO: 86889

SEQ ID NO: 87270 - DNA, 201 bp, Homo sapiens; identical to SEQ ID NO: 86890

SEQ ID NO: 87271 - DNA, 201 bp, Homo sapiens; identical to SEQ ID NO: 86891

SEQ ID NO: 87272 - DNA, 201 bp, Homo sapiens; identical to SEQ ID NO: 86892

SEQ ID NO: 87273 - DNA, 201 bp, Homo sapiens; identical to SEQ ID NO: 86893

SEQ ID NO: 87274 - DNA, 201 bp, Homo sapiens
aagtcttgtcagccctaagccagggaagcctggagcgtggcctggcgggtctgggtggacaccgtccccactccggactcccagcacaggggaggagaccwgagcctgtatggccctgtagccctgggcagagctgggcctgtcgtgtgttcctgcctggcaggtgcaggtgctggccatctgcaggtggaaggaggtggg

SEQ ID NO: 87275 - DNA, 201 bp, Homo sapiens
gaagtcttgtcagccctaagccagggaagcctggagcgtggcctggcgggtctgggtggacaccgtccccactccggactcccagcacaggggaggagacstgagcctgtatggccctgtagccctgggcagagctgggcctgtcgtgtgttcctgcctggcaggtgcaggtgctggccatctgcaggtggaaggaggtgg

SEQ ID NO: 87276 - DNA, 201 bp, Homo sapiens
acgccgtctttgtgggcactggggacctgtttgctgccatgctcctggcgtggacacacaagcaccccaataacctcaaggtggcctgtgagaagaccgtstctaccttgcaccacgttctgcagaggaccatccagtgtgcaaaagcccaggccggggaaggagtgaggcccagccccatgcagctggagctgcggatgg

SEQ ID NO: 87277 - DNA, 201 bp, Homo sapiens
ctgggaaacctgtcctaagtaaaactatggacctcgcctcgcccaccggcctgcaaagccagcatctccgtgaaggtggatggaagcgcctttgtcctcaytttgagctgcaagctgggtcagcggctctgaagccctcgagtgactttctaacccaagacccagcccctggcaggaggaggggtgggtgcagggctggtg

SEQ ID NO: 87278 - DNA, 201 bp, Homo sapiens
taaaaatgtatattagtaagaagttcttcctggaatttttctttcgattctggcagaataaacaggtgtttttagttttcccactgtctgagccaagcagsaccctgtcccagagcaagagatgtccccttccatctctgacccttgcctgggacaagctttgatggggggccccagcttcaaggctgtggtgggaacagc

SEQ ID NO: 87279 - DNA, 201 bp, Homo sapiens
ggcgtgcagtggtgtgatctcggctcactgcaaactccgcttcctgggttcaagtggttctcctgccccagcctcccaagtagctgggattacaggcatgmgccaccacgctcagctgatttttgtatttttagtagagatggggtttcaccatgttggccaagctggtctcaaactcctgacctcaagtgatctgcccgc

SEQ ID NO: 87280 - DNA, 201 bp, Homo sapiens
aggcccagccccatgcagctggagctgcggatggtgcagagcaaaagggacatcgaggacccagagatcgtcgtccaggccacggtgctgtgagggccccsccgcttgcccgtgacacgcagcgcgttggtgtctccgtgtttgtccctgtgaaaacatgtaacgtctgccttagagccatgaccgaaacttgatattttt

SEQ ID NO: 87281 - DNA, 201 bp, Homo sapiens
tggcctgtgtcccctgtccctgcaggacccagcaggcatcgtggcgtgacagctgtgtccaagccactgcccgggcatcccatcacccaccagggtgcacrgtctctcctgctgggggctttctgtcgcatgtgtgtctcctgtcgactctgcagtttgttctcagagcagaatgtttcctgttctcagtgcacaaagaca

SEQ ID NO: 87282 - DNA, 201 bp, Homo sapiens
agccccatgcagctggagctgcggatggtgcagagcaaaagggacatcgaggacccagagatcgtcgtccaggccacggtgctgtgagggccccgccgctygcccgtgacacgcagcgcgttggtgtctccgtgtttgtccctgtgaaaacatgtaacgtctgccttagagccatgaccgaaacttgatatttttttcttt

SEQ ID NO: 87283 - DNA, 201 bp, Homo sapiens
cctgtttgccatctcgggggtgttccctgtgggagggtgagtgggtgaggccgagcctgctgcgtgtggagcctcgagtgggccctggctgccactaccgyacagaggccgtgtcgcgctgggctgggcctgggtggcctctgtctttgcatctctgagaaggagtcgggtggtaacggttggggtcaggaagaattctgc

SEQ ID NO: 87284 - DNA, 201 bp, Homo sapiens
ggcatcaaagcacctgtcgcctccgtggtccccctgctgagggagtgcggcctctgcaaggttcgggggtggcttcgtttgcctggagtggccggccctgyttgtgccatgtggatgtttgtgagcctcggtcctacagcactgtgtaggctgcatctgtttcgtgctggtcctgttgacttgtatgatatccacaaataa

SEQ ID NO: 87285 - DNA, 201 bp, Homo sapiens
tgggatatgccttccagtgccacagggccactcaccccatgcatctctgtcctgcccgtcagtgctgggacggacagcaagggcaagcccagtgtctggcrgataggtgggtgggaacagagaggggagaatgccgtcctaagcttctgcttggggatcccccacacgacctgggtactgcctgggaaacctgtcctaagt

SEQ ID NO: 87286 - DNA, 201 bp, Homo sapiens
agtccccaccgctacccgaggtaaaacaataaaagctatgtggttgagctcaggcctctcgtgcctggtgtcagagaaggcagagcccacagtaggtgcasggtgcaaggccctgggagggcactggccagggaaggtggtatagatggccctcagattgcggggccccgagcagctccccactctgcccgtccaccttcc

SEQ ID NO: 87287 - DNA, 201 bp, Homo sapiens
agtccggcatcccctccccagactgcctgctgtcaaaccacggagcagctggagcctgccctgtccacggcccgtttccacccgggcatgttcgtctctcmtgacttcggcagaggcccctggtggccttcagtttcagtttctcatccaggaaggtaaccttgggcattggcagtgggtttccctatggcttggatccag

SEQ ID NO: 87288 - DNA, 201 bp, Homo sapiens
tgtacgtgtgtgatccagtcttgggtgacaagtgggacggcgaaggctcgatgtacgtcccggaggacctccttcccgtctacaaagaaaaagtggtgccrcttgcagacattatcacgcccaaccagtttgaggccgagttactgagtggccggaagatccacagccaggaggaagccttgcgggtgatggacatgctgc

SEQ ID NO: 87289 - DNA, 201 bp, Homo sapiens
ggcggcagtgcctgtccctggcctgccttgatttcagccacacccctgcagccctgcatcccagctctggggtgtgcagaggtttgtgtctccagggaacmcacggctggagagaaatagggagatgcaggaagtgggggcccatggggcccccaagaagcggactctccaaggggtacccccaccccgctaccttcccca

SEQ ID NO: 87290 - DNA, 201 bp, Homo sapiens
ggaccaatgggaggacggcggcgcagcccgctccctccgtggaatggagctcagctcttcggaggcatcaaagcacctgtcgcctccgtggtccccctgcygagggagtgcggcctctgcaaggttcgggggtggcttcgtttgcctggagtggccggccctgcttgtgccatgtggatgtttgtgagcctcggtcctaca

SEQ ID NO: 87291 - DNA, 201 bp, Homo sapiens
cggaagtcttgtcagccctaagccagggaagcctggagcgtggcctggcgggtctgggtggacaccgtccccactccggactcccagcacaggggaggagrcctgagcctgtatggccctgtagccctgggcagagctgggcctgtcgtgtgttcctgcctggcaggtgcaggtgctggccatctgcaggtggaaggaggt

SEQ ID NO: 87292 - DNA, 201 bp, Homo sapiens
actcctgacctcaagtgatctgcccgcctcggcctcccagagtgctgggattacaggcatgagccagtgcacccggcggaatcttggaatttttatagacrgcacctcagtttctgactccagccgcacacctcctgcctctgccagcaggggttgccgccagaccagagccagggccaggtccctgcgtccatccccccc

SEQ ID NO: 87293 - DNA, 201 bp, Homo sapiens
ccgacaccgtggtcatcaccagctccgacctgccctccccgcagggcagcaactacctgattgtgctggggagtcagaggaggaggaatcccgctggctcygtggtgatggaacgcatccggatggacattcgcaaagtggacgccgtctttgtgggcactggggacctgtttgctgccatgctcctggcgtggacacaca

SEQ ID NO: 87294 - DNA, 201 bp, Homo sapiens
gtcctaagcttctgcttggggatcccccacacgacctgggtactgcctgggaaacctgtcctaagtaaaactatggacctcgcctcgcccaccggcctgcraagccagcatctccgtgaaggtggatggaagcgcctttgtcctcattttgagctgcaagctgggtcagcggctctgaagccctcgagtgactttctaacc

SEQ ID NO: 87295 - DNA, 201 bp, Homo sapiens
ggaagtcttgtcagccctaagccagggaagcctggagcgtggcctggcgggtctgggtggacaccgtccccactccggactcccagcacaggggaggagasctgagcctgtatggccctgtagccctgggcagagctgggcctgtcgtgtgttcctgcctggcaggtgcaggtgctggccatctgcaggtggaaggaggtg

SEQ ID NO: 87296 - DNA, 201 bp, Homo sapiens
ccctccccgcagggcagcaactacctgattgtgctggggagtcagaggaggaggaatcccgctggctccgtggtgatggaacgcatccggatggacattcscaaagtggacgccgtctttgtgggcactggggacctgtttgctgccatgctcctggcgtggacacacaagcaccccaataacctcaaggtggcctgtgag

SEQ ID NO: 87297 - DNA, 201 bp, Homo sapiens
acattgtgcaggagctgaagcagcagaaccccaggctggtgtacgtgtgtgatccagtcttgggtgacaagtgggacggcgaaggctcgatgtacgtcccrgaggacctccttcccgtctacaaagaaaaagtggtgccgcttgcagacattatcacgcccaaccagtttgaggccgagttactgagtggccggaagatcc

SEQ ID NO: 87298 - DNA, 201 bp, Homo sapiens
gtagccctgggcagagctgggcctgtcgtgtgttcctgcctggcaggtgcaggtgctggccatctgcaggtggaaggaggtgggaatcttggattttttgkttttttttgtttttttttttttgagatgaagtctcgctctgacacccaggctggcgtgcagtggtgtgatctcggctcactgcaaactccgcttcctggg

SEQ ID NO: 87299 - DNA, 201 bp, Homo sapiens
tgggagggtgagtgggtgaggccgagcctgctgcgtgtggagcctcgagtgggccctggctgccactaccgtacagaggccgtgtcgcgctgggctgggcytgggtggcctctgtctttgcatctctgagaaggagtcgggtggtaacggttggggtcaggaagaattctgccaagtatctttactgtcattctgaccata

SEQ ID NO: 87300 - DNA, 201 bp, Homo sapiens
ccggaagtcttgtcagccctaagccagggaagcctggagcgtggcctggcgggtctgggtggacaccgtccccactccggactcccagcacaggggaggakacctgagcctgtatggccctgtagccctgggcagagctgggcctgtcgtgtgttcctgcctggcaggtgcaggtgctggccatctgcaggtggaaggagg

SEQ ID NO: 87301 - DNA, 201 bp, Homo sapiens
cgtgtgttcctgcctggcaggtgcaggtgctggccatctgcaggtggaaggaggtgggaatcttggattttttggttttttttgtttttttttttttgagrtgaagtctcgctctgacacccaggctggcgtgcagtggtgtgatctcggctcactgcaaactccgcttcctgggttcaagtggttctcctgccccagcct

SEQ ID NO: 87302 - DNA, 201 bp, Homo sapiens
cagagctgggcctgtcgtgtgttcctgcctggcaggtgcaggtgctggccatctgcaggtggaaggaggtgggaatcttggattttttggttttttttgtytttttttttttgagatgaagtctcgctctgacacccaggctggcgtgcagtggtgtgatctcggctcactgcaaactccgcttcctgggttcaagtggtt

SEQ ID NO: 87303 - DNA, 201 bp, Homo sapiens
gccccagcttcaaggctgtggtgggaacagcacccccaaatgccagcctctcctttcttcccatccaccagtatactgcggggccatttctggtctttgtscaacaggaaacccatttctggtgggatatgccttccagtgccacagggccactcaccccatgcatctctgtcctgcccgtcagtgctgggacggacagca

SEQ ID NO: 87304 - DNA, 201 bp, Homo sapiens
gtgctggaagtgatgggccggcactgcgggtacctggcgctggtatctgcactggcctcaggggccgactggctgttcatccccgaggctccacccgaggwcggctgggagaacttcatgtgtgagaggctgggtgagactcggagccgtgggtcccgactgaacatcatcatcatcgctgagggtgccattgaccgcaac

SEQ ID NO: 87305 - DNA, 201 bp, Homo sapiens
gggtacctggcgctggtatctgcactggcctcaggggccgactggctgttcatccccgaggctccacccgaggacggctgggagaacttcatgtgtgagakgctgggtgagactcggagccgtgggtcccgactgaacatcatcatcatcgctgagggtgccattgaccgcaacgggaagcccatctcgtccagctacgtg

SEQ ID NO: 87306 - DNA, 201 bp, Homo sapiens
gcttcgaaggcctagccaagggtcaggtgcaagaagtaggctggcacgacgtggccggctggttggggcgtggtggctccatgctggggaccaagaggacyctgcccaagggccagctggagtccattgtggagaacatccgcatctatggtattcacgccctgctggtggtcggtgggtttgaggcctatgaaggggtgc

SEQ ID NO: 87307 - DNA, 201 bp, Homo sapiens
ttgaggcctatgaaggggtgctgcagctggtggaggctcgcgggcgctacgaggagctctgcatcgtcatgtgtgtcatcccagccaccatcagcaacaaygtccctggcaccgacttcagcctgggctccgacactgctgtaaatgccgccatggagagctgtgaccgcatcaaacagtctgcctcggggaccaagcgcc

SEQ ID NO: 87308 - DNA, 201 bp, Homo sapiens
gcctgggctgttgtgtctggagcctgcaggcaggtgggggctgcgtccctgctcagcccatcccctgcctctatccctggccacctgccaggcctccctcsggctggtgtcttgagaccagcctgccaggccctccagcaggaggacagagtgccctggggcatccaccttcctgcccaggggacgtggcgctgtcggtgt

SEQ ID NO: 87309 - DNA, 201 bp, Homo sapiens
acgaggagctctgcatcgtcatgtgtgtcatcccagccaccatcagcaacaacgtccctggcaccgacttcagcctgggctccgacactgctgtaaatgcygccatggagagctgtgaccgcatcaaacagtctgcctcggggaccaagcgccgtgtgttcatcgtggagaccatggggggttactgtggctacctggcca

SEQ ID NO: 87310 - DNA, 201 bp, Homo sapiens
gcaaggcctttaccaccagggaggggcgccgggcagcggcctacaacctggtccagcacggcatcaccaacctgtgcgtcatcggcggggatggcagcctyacaggtgccaacatcttccgcagcgagtggggcagcctgctggaggagctggtggcggaaggtaagatctcagagactacagcccggacctactcgcacc

SEQ ID NO: 87311 - DNA, 163 bp, Homo sapiens
acctggccggtaggctgctggcgcctaggttgtgttgagagggggatgcccctggccctgcctcactgtgacctgctcctgcccacgtgcagcacctgtcmccttttctagaaataaaatcaccctgactgtggggtgcatcggtctccggagagcacagcct

SEQ ID NO: 87312 - DNA, 201 bp, Homo sapiens; identical to SEQ ID NO: 87304

SEQ ID NO: 87313 - DNA, 201 bp, Homo sapiens; identical to SEQ ID NO: 87305

SEQ ID NO: 87314 - DNA, 201 bp, Homo sapiens; identical to SEQ ID NO: 87306

SEQ ID NO: 87315 - DNA, 201 bp, Homo sapiens; identical to SEQ ID NO: 87307

SEQ ID NO: 87316 - DNA, 201 bp, Homo sapiens; identical to SEQ ID NO: 87308

SEQ ID NO: 87317 - DNA, 201 bp, Homo sapiens; identical to SEQ ID NO: 87309

SEQ ID NO: 87318 - DNA, 201 bp, Homo sapiens
gagagtcctctcgtgggggtctccatgttcaagggagctgccgaggcttgagcaggagcccccagcaggaaactggctttgccaaggcccccgctgggacrgactgtttctttcactgcagtcctgggagccgagggcaaggggacaggaaagaggaagtgacctcagagcctggtggcaccagcatcatgtccaggctgg

SEQ ID NO: 87319 - DNA, 201 bp, Homo sapiens; identical to SEQ ID NO: 87310

SEQ ID NO: 87320 - DNA, 163 bp, Homo sapiens; identical to SEQ ID NO: 87311

SEQ ID NO: 87321 - DNA, 201 bp, Homo sapiens
ccaccaagctggtgaagaactgctttctccccctaagagaatatttcaagtatttttcaacagaactcacttcctctttataaatgagtcactatactgtraagaaaaagacttttcctagaacaaaggcaactttcctcacgttgtctctttcctcttcggattcttgtttttttgcgtctccgtcgtcactgcagaccc

SEQ ID NO: 87322 - DNA, 201 bp, Homo sapiens
catctcgcttcctggagatggagccagtcaccatcccagatgtccacggcggatccttgcagaatgctgtccgcgtgtggagcaacatcccagccataagragcagcaggcactgggctctggtttcggaagaagaattgtccctgctggcccagaacaagcagagctcgaagctcgcggccaagtggcccaccaagctgg

SEQ ID NO: 87323 - DNA, 201 bp, Homo sapiens
taaccagcgaaatatagaagacatctgcatctgctgcggaagtctccaggttcacacacagcaccctctgtttgagggagggatctgcgccccatgtaaggacaagttcctggatgccctcttcctgtacgacgatgacgggtaccaatcctactgctccatctgctgctccggagagacgctgctcatctgcggaaaccc

SEQ ID NO: 87324 - DNA, 201 bp, Homo sapiens
aaaccgtgcctgtgtggaggagacagccagtccgggtgctgtccctttttgaagacatcaagaaagagctgacgagtttgggctttttggaaagtggttcygacccgggacaactgaagcatgtggttgatgtcacagacacagtgaggaaggatgtggaggagtggggacccttcgatcttgtgtacggcgccacacctc

SEQ ID NO: 87325 - DNA, 201 bp, Homo sapiens
acgccatgagcaactgggtgtgctacctgtgcctgccgtcctcccgaagcgggctgctgcagcgtcggaggaagtggcgcagccagctcaaggccttctaygaccgagagtcggagaatccccttgagatgttcgaaaccgtgcctgtgtggaggagacagccagtccgggtgctgtccctttttgaagacatcaagaaag

SEQ ID NO: 87326 - DNA, 201 bp, Homo sapiens; identical to SEQ ID NO: 87321

SEQ ID NO: 87327 - DNA, 201 bp, Homo sapiens; identical to SEQ ID NO: 87322

SEQ ID NO: 87328 - DNA, 201 bp, Homo sapiens; identical to SEQ ID NO: 87323

SEQ ID NO: 87329 - DNA, 201 bp, Homo sapiens; identical to SEQ ID NO: 87324

SEQ ID NO: 87330 - DNA, 201 bp, Homo sapiens; identical to SEQ ID NO: 87325

SEQ ID NO: 87331 - DNA, 201 bp, Homo sapiens
tgctggagatggtggagtccgtcatgccggtggtggtgtgcacattgagccccggtatagacagttcccccagctgaccagatcccaggtgttccagagcragttcttcagcggactcatgtggttctggattctctggcgcttttggcatgactcagaagaggtgctgggtcactttccgtatcctgatccttcccagtg

SEQ ID NO: 87332 - DNA, 201 bp, Homo sapiens
gtcaggagcggctgccggctcccccactcctggagatgagcgactctgtgacgtcacgggaggcgcggggcggagcgccggggaagcgaagtaggcagggrcgaggcggctggggaccgcggggcggacgggagcgagtatgtccgctctgactcggctggcgtctttcgctcgcgttggaggccgccttttcagaagcgg

SEQ ID NO: 87333 - DNA, 201 bp, Homo sapiens; identical to SEQ ID NO: 87331

SEQ ID NO: 87334 - DNA, 201 bp, Homo sapiens; identical to SEQ ID NO: 87332

SEQ ID NO: 87335 - DNA, 201 bp, Homo sapiens
tggccaagctacaaatcatcacctgaggcagagatgctactaccctcttctggggctcaactaccgatgggcatcagtaatccatcccagtataacatttyaaggatgtgctggagacaatacatggactttctctttcaatggtgaggaatgaaacaagatacaagaaccacagcatggaatatgttttcttttacatcc

SEQ ID NO: 87336 - DNA, 201 bp, Homo sapiens
gggggaatgccgatcttccctgagtgccggtggtggtgtgcacattgagccccggtatagacagttcccccagctgaccagatcccaggtgttccagagcragttcttcagcggactcatgtggttctggattctctggcgcttttggcatgactcagaagaggtgctgggtcactttccgtatcctgatccttcccagtg

SEQ ID NO: 87337 - DNA, 201 bp, Homo sapiens; identical to SEQ ID NO: 87335

SEQ ID NO: 87338 - DNA, 201 bp, Homo sapiens; identical to SEQ ID NO: 87331

SEQ ID NO: 87339 - DNA, 201 bp, Homo sapiens; identical to SEQ ID NO: 87332

SEQ ID NO: 87340 - DNA, 201 bp, Homo sapiens; identical to SEQ ID NO: 87331

SEQ ID NO: 87341 - DNA, 201 bp, Homo sapiens; identical to SEQ ID NO: 87332

SEQ ID NO: 87342 - DNA, 201 bp, Homo sapiens
cacaaagggaagatcatcatgcacgacccatttgccatgcggcccttttttggctacaacttcgggcactacctggaacactggctgagcatggaagggcrcaagggggcccagctgccccgtatcttccatgtcaactggttccggcgtgacgaggcagggcacttcctgtggccaggctttggggagaatgctcgggtg

SEQ ID NO: 87343 - DNA, 201 bp, Homo sapiens
actgctggctggcccgcacagaccccaaggatgtggcacgagtagagagcaagacggtgattgtaactccttctcagcgggacacggtaccactcccgccyggtggggcccgtgggcagctgggcaactggatgtccccagctgatttccagcgagctgtggatgagaggtttccaggctgcatgcagggccgcaccatgt

SEQ ID NO: 87344 - DNA, 201 bp, Homo sapiens
atgtggctgagaccagtgatggtggcgtgtactgggagggcattgaccagcctcttccacctggtgttactgtgacctcctggctgggcaaaccctggaarcctggtgacaaggagccctgtgcacatcccaactctcgattttgtgccccggctcgccagtgccccatcatggacccagcctgggaggccccagagggtg

SEQ ID NO: 87345 - DNA, 201 bp, Homo sapiens
tcgggtgctagactggatctgccggcggttagagggggaggacagtgcccgagagacacccattgggctggtgccaaaggaaggagccttggatctcagcrgcctcagagctatagacaccactcagctgttctccctccccaaggacttctgggaacaggaggttcgtgacattcggagctacctgacagagcaggtcaa

SEQ ID NO: 87346 - DNA, 201 bp, Homo sapiens
ttccaggctgcatgcagggccgcaccatgtatgtgcttccattcagcatgggtcctgtgggctccccgctgtcccgcatcggggtgcagctcactgactcrgcctatgtggtggcaagcatgcgtattatgacccgactggggacacctgtgcttcaggccctgggagatggtgactttgtcaagtgtctgcactccgtgg

SEQ ID NO: 87347 - DNA, 201 bp, Homo sapiens
gtgtccccattgacgccatcatctttggtggccgcagacccaaaggggtacccctggtatacgaggccttcaactggcgtcatggggtgtttgtgggcagmgccatgcgctctgagtccactgctgcagcagaacacaaagggaagatcatcatgcacgacccatttgccatgcggcccttttttggctacaacttcgggc

SEQ ID NO: 87348 - DNA, 201 bp, Homo sapiens
ggtgtccccattgacgccatcatctttggtggccgcagacccaaaggggtacccctggtatacgaggccttcaactggcgtcatggggtgtttgtgggcascgccatgcgctctgagtccactgctgcagcagaacacaaagggaagatcatcatgcacgacccatttgccatgcggcccttttttggctacaacttcggg

SEQ ID NO: 87349 - DNA, 201 bp, Homo sapiens
aagtacaataactgctggctggcccgcacagaccccaaggatgtggcacgagtagagagcaagacggtgattgtaactccttctcagcgggacacggtacmactcccgcctggtggggcccgtgggcagctgggcaactggatgtccccagctgatttccagcgagctgtggatgagaggtttccaggctgcatgcagggc

SEQ ID NO: 87350 - DNA, 201 bp, Homo sapiens
tgtccccattgacgccatcatctttggtggccgcagacccaaaggggtacccctggtatacgaggccttcaactggcgtcatggggtgtttgtgggcagcsccatgcgctctgagtccactgctgcagcagaacacaaagggaagatcatcatgcacgacccatttgccatgcggcccttttttggctacaacttcgggca

SEQ ID NO: 87351 - DNA, 201 bp, Homo sapiens
gagccggcaccatggtgagaaccctgagcccagcccttcacctccgcaggcccgcgccctcacccccagtggcagtgccatggttgccccgtatgaacctmgggctccacagtgtggggtttttgcaggtcagcttctgcaaggcaacctgcactcttccaacccgttcatccttgtagcacggacgcctgaaggtgaaga

SEQ ID NO: 87352 - DNA, 201 bp, Homo sapiens
ccagtggcagtgccatggttgccccgtatgaacctagggctccacagtgtggggtttttgcaggtcagcttctgcaaggcaacctgcactcttccaaccckttcatccttgtagcacggacgcctgaaggtgaagacgtcagaagagcaggcggaggccaaaaggctagagcgagagcagaagctgaagctataccagtca

SEQ ID NO: 87353 - DNA, 201 bp, Homo sapiens
tcaagggctaccactggacccttcccctgtcttgaaccctgagccggcaccatggtgagaaccctgagcccagcccttcacctccgcaggcccgcgccctyacccccagtggcagtgccatggttgccccgtatgaacctagggctccacagtgtggggtttttgcaggtcagcttctgcaaggcaacctgcactcttcca

SEQ ID NO: 87354 - DNA, 201 bp, Homo sapiens
ttgacttgtcacacaatcgcctccgaaccctgccacctgcactggctgccctgcgctgccttgaggtgctgcaggccagtgataatgccatagagtccctrgacggcgtcaccaacctaccccggctgcaggagctgctactgtgcaacaaccgcctccagcagcctgcagtgctccagcctcttgcctcctgccccaggc

SEQ ID NO: 87355 - DNA, 201 bp, Homo sapiens
agaagtccacagtgctgcagtctgagctggaatcctgtaaggagctgcaggagctggagcctgagaataaatggtgcctgcttaccatcatcctgctgatrcgggcactggaccccctgctgtatgagaaggagaccctgcagtacttccagaccctcaaggccgtggaccccatgcgggcaacgtatctggatgacctgc

SEQ ID NO: 87356 - DNA, 127 bp, Homo sapiens
gtttcgatgagccgggacgtggcgccrctctagccagcgcctgggctctgtggcgggcgccgcagctccgcgtcccccgcgcctcctcccagcgcaggtgggtccgcccgcggggggcgggggtgcc

SEQ ID NO: 87357 - DNA, 201 bp, Homo sapiens
ccgaggtgcgtgtgctgcacctggctcacaaggatctgacagtgctctgccatctggaacagctgctcttggtcacccatcttgacttgtcacacaatcgyctccgaaccctgccacctgcactggctgccctgcgctgccttgaggtgctgcaggccagtgataatgccatagagtccctggacggcgtcaccaacctac

SEQ ID NO: 87358 - DNA, 201 bp, Homo sapiens
cgtgccccctgcagaagagctagccttcactgacagcctcatcacccgaaacttctccaactactcttcctggcattaccgctcctgtctcttgccccagytgcacccccagccggattctggaccacaggggcgcctccctgaggatgtgctgctcaaagagctggagctggtgcagaatgccttcttcactgaccccaa

SEQ ID NO: 87359 - DNA, 201 bp, Homo sapiens
ccaactactcttcctggcattaccgctcctgtctcttgccccagctgcacccccagccggattctggaccacaggggcgcctccctgaggatgtgctgctyaaagagctggagctggtgcagaatgccttcttcactgaccccaatgaccagagtgcctggttttatcaccgttggctcctaggccgagctgacccccagg

SEQ ID NO: 87360 - DNA, 201 bp, Homo sapiens
taccatcatcctgctgatgcgggcactggaccccctgctgtatgagaaggagaccctgcagtacttccagaccctcaaggccgtggaccccatgcgggcarcgtatctggatgacctgcgcagcaagttcttgctggagaatagcgtgctcaagatggagtatgccgaggtgcgtgtgctgcacctggctcacaaggatct

SEQ ID NO: 87361 - DNA, 201 bp, Homo sapiens; identical to SEQ ID NO: 87354

SEQ ID NO: 87362 - DNA, 201 bp, Homo sapiens; identical to SEQ ID NO: 87355

SEQ ID NO: 87363 - DNA, 201 bp, Homo sapiens; identical to SEQ ID NO: 87357

SEQ ID NO: 87364 - DNA, 201 bp, Homo sapiens; identical to SEQ ID NO: 87358

SEQ ID NO: 87365 - DNA, 201 bp, Homo sapiens; identical to SEQ ID NO: 87359

SEQ ID NO: 87366 - DNA, 201 bp, Homo sapiens; identical to SEQ ID NO: 87360

SEQ ID NO: 87367 - DNA, 201 bp, Homo sapiens; identical to SEQ ID NO: 87354

SEQ ID NO: 87368 - DNA, 201 bp, Homo sapiens
cagggcaggaggctggggcctcaaggagctgtttcagtctagatactgggaatgttgaccagtgcttcagggctgtgggcctcaactcctccccaccctgyccaccctcaggtgtgagctgtcagtggagaagtccacagtgctgcagtctgagctggaatcctgtaaggagctgcaggagctggagcctgagaataaatg

SEQ ID NO: 87369 - DNA, 201 bp, Homo sapiens; identical to SEQ ID NO: 87355

SEQ ID NO: 87370 - DNA, 139 bp, Homo sapiens
agagtgcgctgcgtttcgatgagccgggacgtggcgccrctctagccagcgcctgggctctgtggcgggcgccgcagctccgcgtcccccgcgcctcctcccagcgcagacttcaagggctaccactggacccttcccc

SEQ ID NO: 87371 - DNA, 201 bp, Homo sapiens; identical to SEQ ID NO: 87357

SEQ ID NO: 87372 - DNA, 201 bp, Homo sapiens; identical to SEQ ID NO: 87359

SEQ ID NO: 87373 - DNA, 201 bp, Homo sapiens; identical to SEQ ID NO: 87358

SEQ ID NO: 87374 - DNA, 201 bp, Homo sapiens; identical to SEQ ID NO: 87360

SEQ ID NO: 87375 - DNA, 201 bp, Homo sapiens; identical to SEQ ID NO: 87354

SEQ ID NO: 87376 - DNA, 201 bp, Homo sapiens; identical to SEQ ID NO: 87355

SEQ ID NO: 87377 - DNA, 139 bp, Homo sapiens; identical to SEQ ID NO: 87370

SEQ ID NO: 87378 - DNA, 201 bp, Homo sapiens; identical to SEQ ID NO: 87357

SEQ ID NO: 87379 - DNA, 201 bp, Homo sapiens; identical to SEQ ID NO: 87358

SEQ ID NO: 87380 - DNA, 201 bp, Homo sapiens; identical to SEQ ID NO: 87359

SEQ ID NO: 87381 - DNA, 201 bp, Homo sapiens; identical to SEQ ID NO: 87360

SEQ ID NO: 87382 - DNA, 201 bp, Homo sapiens
aattgagtggcaaatgtgtggtggctttggcaacagatcccaatatcctgagcctgagtggtaaggtgctgccatcctgtgaccttgctcgacgctatggmcttcgggatgtggacggccgccccgtccaagactatttgtctttgagctctgttctctcacacgtgtccggcctgggctggctggcctcctacctgccct

SEQ ID NO: 87383 - DNA, 201 bp, Homo sapiens
tcaggaggcacaatccctcgggggccaatgtgtgcctgtggtgtgcgattcaagccaggagagtgaagtgcgaagcctgtttgagcaagtggatcgggaayagcaagggcgtctagatgtgctggtcaacaatgcttatgcaggggtccagacgatcctgaacaccaggaataaggcattctgggaaacccctgcctccat

SEQ ID NO: 87384 - DNA, 201 bp, Homo sapiens
tgttgctcaggaggcacaatccctcgggggccaatgtgtgcctgtggtgtgcgattcaagccaggagagtgaagtgcgaagcctgtttgagcaagtggatsgggaacagcaagggcgtctagatgtgctggtcaacaatgcttatgcaggggtccagacgatcctgaacaccaggaataaggcattctgggaaacccctgc

SEQ ID NO: 87385 - DNA, 201 bp, Homo sapiens
tggtcaacaatgcttatgcaggggtccagacgatcctgaacaccaggaataaggcattctgggaaacccctgcctccatgtgggatgatatcaacaacgtyggactcagaggccactacttttgctcagtgtatggggcacggctgatggtaccagctggccaggggctcatcgtggtcatctcctccccaggaagcctgc

SEQ ID NO: 87386 - DNA, 201 bp, Homo sapiens
gaggaggtcctgcaggatcctgtgttgaagcagttcaaatcagccttctcatctgcggaaaccacagaattgagtggcaaatgtgtggtggctttggcaayagatcccaatatcctgagcctgagtggtaaggtgctgccatcctgtgaccttgctcgacgctatggccttcgggatgtggacggccgccccgtccaagac

SEQ ID NO: 87387 - DNA, 201 bp, Homo sapiens
cggaaaccacagaattgagtggcaaatgtgtggtggctttggcaacagatcccaatatcctgagcctgagtggtaaggtgctgccatcctgtgaccttgckcgacgctatggccttcgggatgtggacggccgccccgtccaagactatttgtctttgagctctgttctctcacacgtgtccggcctgggctggctggcct

SEQ ID NO: 87388 - DNA, 201 bp, Homo sapiens
cggggattgtgcagacagaactgctgaaggagcatatggcaaaggaggaggtcctgcaggatcctgtgttgaagcagttcaaatcagccttctcatctgcrgaaaccacagaattgagtggcaaatgtgtggtggctttggcaacagatcccaatatcctgagcctgagtggtaaggtgctgccatcctgtgaccttgctc

SEQ ID NO: 87389 - DNA, 201 bp, Homo sapiens
ccaggggtattggccgtggcattgccttgcagctctgcaaagcaggcgccacagtttacatcactggccgccatctggacacccttcgcgttgttgctcargaggcacaatccctcgggggccaatgtgtgcctgtggtgtgcgattcaagccaggagagtgaagtgcgaagcctgtttgagcaagtggatcgggaacagc

SEQ ID NO: 87390 - DNA, 201 bp, Homo sapiens
cgtgtgcccaagtggattattgccctctacactagcaagttctaaccctcctggtctgacactacgtctctgcttgtcttctcatttggacttggtggttygtcctgtctcagtgaaacagcagcctttcttgtttacccatacccttgatatgaagagaagccctctgctgtgtgtccgtggtgagttctggggtgcgcc

SEQ ID NO: 87391 - DNA, 201 bp, Homo sapiens
gaggggctgccgcgccagattcccatatccaggcagccacactcagagggttgtagtagttgtccacctctggacagtcccactcagccccttcttcactmtctgggcctcccaaaagacagtcagccttgtcctcaggcccgcacccagttgtcagcctctgactcctctcccctcaaaggattcttaccttggctcctc

SEQ ID NO: 87392 - DNA, 201 bp, Homo sapiens; identical to SEQ ID NO: 87387

SEQ ID NO: 87393 - DNA, 201 bp, Homo sapiens; identical to SEQ ID NO: 87388

SEQ ID NO: 87394 - DNA, 201 bp, Homo sapiens; identical to SEQ ID NO: 87389

SEQ ID NO: 87395 - DNA, 201 bp, Homo sapiens; identical to SEQ ID NO: 87382

SEQ ID NO: 87396 - DNA, 201 bp, Homo sapiens; identical to SEQ ID NO: 87383

SEQ ID NO: 87397 - DNA, 201 bp, Homo sapiens; identical to SEQ ID NO: 87390

SEQ ID NO: 87398 - DNA, 201 bp, Homo sapiens; identical to SEQ ID NO: 87384

SEQ ID NO: 87399 - DNA, 201 bp, Homo sapiens; identical to SEQ ID NO: 87385

SEQ ID NO: 87400 - DNA, 201 bp, Homo sapiens; identical to SEQ ID NO: 87386

SEQ ID NO: 87401 - DNA, 201 bp, Homo sapiens
ttctcgccggcaactagaggaacctgttggcgtggcccagaaggcttagcgggattgcacgaggttagttgctaagcaaggtggtctttggtcaactgcckcctggaccaaggcaacaggaaccctcagattcatcgctaccccgaggctaagcgccatgcctcatattgacaacgatgtgaaactggacttcaaggatgt

SEQ ID NO: 87402 - DNA, 201 bp, Homo sapiens
cccactgggttccggaaaggctcagggttgctcccgcgtttcggttcagtgacgtcgtaaattggaatgaggcatccagtttagcaacagcagagatgacractctgcgattctgagagtccctggcgagcccgggctagcgaaaagtgggggcagaacgaactacatctcccatcgtgccaggaggcggtcccgcccgtt

SEQ ID NO: 87403 - DNA, 201 bp, Homo sapiens
gctcatggcctcaaaggccacatcatttcagatggaggttgcagctgtcctggggatgtggccaaggcttttggggcaggagctgacttcgtgatgctggrtggcatgctggctgggcacagtgagtcaggtggtgagctcatcgagagggatggcaagaagtacaagctcttctatggaatgagttctgaaatggccatg

SEQ ID NO: 87404 - DNA, 201 bp, Homo sapiens
cccccccccccactgggttccggaaaggctcagggttgctcccgcgtttcggttcagtgacgtcgtaaattggaatgaggcatccagtttagcaacagcasagatgacgactctgcgattctgagagtccctggcgagcccgggctagcgaaaagtgggggcagaacgaactacatctcccatcgtgccaggaggcggtcc

SEQ ID NO: 87405 - DNA, 201 bp, Homo sapiens
atctcacaagatccttttcatttcggaactcaaagcagacatactctggggttcccatcattgctgccaatatggatactgtgggcacctttgagatggcyaaggttctctgtaagttctctctcttcactgctgtccataagcactatagcctcgttcagtggcaagagtttgctggccagaatcctgactgtcttgagc

SEQ ID NO: 87406 - DNA, 201 bp, Homo sapiens; identical to SEQ ID NO: 87403

SEQ ID NO: 87407 - DNA, 201 bp, Homo sapiens; identical to SEQ ID NO: 87405

SEQ ID NO: 87408 - DNA, 201 bp, Homo sapiens; identical to SEQ ID NO: 87402

SEQ ID NO: 87409 - DNA, 201 bp, Homo sapiens; identical to SEQ ID NO: 87403

SEQ ID NO: 87410 - DNA, 201 bp, Homo sapiens; identical to SEQ ID NO: 87404

SEQ ID NO: 87411 - DNA, 201 bp, Homo sapiens; identical to SEQ ID NO: 87405

SEQ ID NO: 87412 - DNA, 201 bp, Homo sapiens; identical to SEQ ID NO: 87401

SEQ ID NO: 87413 - DNA, 201 bp, Homo sapiens; identical to SEQ ID NO: 87402

SEQ ID NO: 87414 - DNA, 201 bp, Homo sapiens; identical to SEQ ID NO: 87403

SEQ ID NO: 87415 - DNA, 201 bp, Homo sapiens; identical to SEQ ID NO: 87404

SEQ ID NO: 87416 - DNA, 201 bp, Homo sapiens; identical to SEQ ID NO: 87405

SEQ ID NO: 87417 - DNA, 201 bp, Homo sapiens; identical to SEQ ID NO: 87403

SEQ ID NO: 87418 - DNA, 201 bp, Homo sapiens; identical to SEQ ID NO: 87405

SEQ ID NO: 87419 - DNA, 201 bp, Homo sapiens
ggctcgctgctgtggctgctgttcatgccgaaatgcggcagatgacgactggggacctgaaccctctgactccaggggtcgagggtccagctctggcactygaagacctggctcccggggctcagactcccgccggcctgtatcccggggcagcggtgtcaatgcagctggagatggcaccatccgagagggcatgctagt

SEQ ID NO: 87420 - DNA, 201 bp, Homo sapiens
catgctagtagtgaacggtgtggacttgctgagctcgcgctcggaccagaaccgccgagagcaccacacagacgagtatgagtacgacgagctgatagtgygccgcgggcagcctttccatatgctcctcctcctgtcccggacctatgaatcctctgatcgcatcacccttgagttactcatcggaaacaaccccgaggt

SEQ ID NO: 87421 - DNA, 201 bp, Homo sapiens
caccaacccatcagcgtgggtgggcagcgtggagatcctgcttagctacctacgcacgggatattccgtcccctatggccagtgctgggtctttgctggcrtgaccaccacagtgctgcgctgcctgggtctggccacccgtactgtcaccaacttcaactccgcccacgacacagacacatcccttaccatggacatcta

SEQ ID NO: 87422 - DNA, 201 bp, Homo sapiens
gcaccaacccatcagcgtgggtgggcagcgtggagatcctgcttagctacctacgcacgggatattccgtcccctatggccagtgctgggtctttgctggmgtgaccaccacagtgctgcgctgcctgggtctggccacccgtactgtcaccaacttcaactccgcccacgacacagacacatcccttaccatggacatct

SEQ ID NO: 87423 - DNA, 201 bp, Homo sapiens
gggctcagcggaggatgtggccatgcaggtggaggcacaggacgcggtgatggggcaggatctgatggtctctgtgatgctgatcaatcacagcagcagcygccgcacagtgaaactgcacctctacctctcagtcactttctatactggtgtcagtggtaccatcttcaaggagaccaagaaggaagtggagctggcacc

SEQ ID NO: 87424 - DNA, 201 bp, Homo sapiens
agtggagctggcaccaggggcctcggaccgtgtgaccatgccagtggcctacaaggaataccggccccatcttgtggaccagggggccatgctgctcaatrtctcaggccacgtcaaggagagcgggcaggtgctggccaagcagcacaccttccgtctgcgcaccccagacctctccctcacgttactgggagcagcagt

SEQ ID NO: 87425 - DNA, 201 bp, Homo sapiens
agggggccatgctgctcaatgtctcaggccacgtcaaggagagcgggcaggtgctggccaagcagcacaccttccgtctgcgcaccccagacctctccctsacgttactgggagcagcagtggttggccaggagtgtgaagtacagattgtcttcaagaacccccttcccgtcaccctcaccaatgtcgtcttccggctcg

SEQ ID NO: 87426 - DNA, 201 bp, Homo sapiens
ttgggaactggtctggtgattactcccgaggcaccaacccatcagcgtgggtgggcagcgtggagatcctgcttagctacctacgcacgggatattccgtmccctatggccagtgctgggtctttgctggcgtgaccaccacagtgctgcgctgcctgggtctggccacccgtactgtcaccaacttcaactccgcccacg

SEQ ID NO: 87427 - DNA, 201 bp, Homo sapiens
cgacgagctgatagtgcgccgcgggcagcctttccatatgctcctcctcctgtcccggacctatgaatcctctgatcgcatcacccttgagttactcatcwgaaacaaccccgaggtgggcaagggcacgcacgtgatcatcccagtgggcaaggggggcagtggaggctggaaagcccaggtggtcaaggccagtgggca

SEQ ID NO: 87428 - DNA, 201 bp, Homo sapiens
ggctggaaagcccaggtggtcaaggccagtgggcagaatctgaacctgcgggtccacacttcccccaacgccatcatcggcaagtttcagttcacagtccrcacacaatcagacgctggggagttccagttgccctttgacccccgcaatgagatctacatcctcttcaacccctggtgcccagaggacattgtgtacgtg

SEQ ID NO: 87429 - DNA, 201 bp, Homo sapiens
ggcctgtatcccggggcagcggtgtcaatgcagctggagatggcaccatccgagagggcatgctagtagtgaacggtgtggacttgctgagctcgcgctcrgaccagaaccgccgagagcaccacacagacgagtatgagtacgacgagctgatagtgcgccgcgggcagcctttccatatgctcctcctcctgtcccgga

SEQ ID NO: 87430 - DNA, 201 bp, Homo sapiens
accaatgtcgtcttccggctcgaaggctctgggttacagaggcccaagatcctcaacgttggggacattggaggcaatgaaacagtgacactgcgccagtygtttgtgcctgtgcgaccaggcccccgccagctcattgccagcttggacagcccacagctctcccaggtgcacggtgtcatccaggtggatgtggcccca

SEQ ID NO: 87431 - DNA, 201 bp, Homo sapiens
aaccccgaggtgggcaagggcacgcacgtgatcatcccagtgggcaaggggggcagtggaggctggaaagcccaggtggtcaaggccagtgggcagaatcwgaacctgcgggtccacacttcccccaacgccatcatcggcaagtttcagttcacagtccgcacacaatcagacgctggggagttccagttgccctttgac

SEQ ID NO: 87432 - DNA, 201 bp, Homo sapiens
aggctcagacgcagagcggaaggcagtagagacagcagcagcccacggcagcaaacccaatgtgtatgccaaccggggctcagcggaggatgtggccatgyaggtggaggcacaggacgcggtgatggggcaggatctgatggtctctgtgatgctgatcaatcacagcagcagccgccgcacagtgaaactgcacctcta

SEQ ID NO: 87433 - DNA, 154 bp, Homo sapiens
gggtcctgtcccatccatcctgacctgttccatctcagccccaggactcagtaytgcggttgccaacactgctgccaggcatgatggatgggccacgttccgatgtgggccgttggggtggcaaccccttgcagccccctaccacgccatctcc

SEQ ID NO: 87434 - DNA, 201 bp, Homo sapiens
tggaggagaaggccatcggcacactcattgtcacaaaggccatcagctccaacatgcgggaggacatcacctacctctataagcacccagaaggctcagasgcagagcggaaggcagtagagacagcagcagcccacggcagcaaacccaatgtgtatgccaaccggggctcagcggaggatgtggccatgcaggtggagg

SEQ ID NO: 87435 - DNA, 201 bp, Homo sapiens
gctagtagtgaacggtgtggacttgctgagctcgcgctcggaccagaaccgccgagagcaccacacagacgagtatgagtacgacgagctgatagtgcgcygcgggcagcctttccatatgctcctcctcctgtcccggacctatgaatcctctgatcgcatcacccttgagttactcatcggaaacaaccccgaggtggg

SEQ ID NO: 87436 - DNA, 201 bp, Homo sapiens
aggggtcgagggtccagctctggcactcgaagacctggctcccggggctcagactcccgccggcctgtatcccggggcagcggtgtcaatgcagctggagwtggcaccatccgagagggcatgctagtagtgaacggtgtggacttgctgagctcgcgctcggaccagaaccgccgagagcaccacacagacgagtatgag

SEQ ID NO: 87437 - DNA, 201 bp, Homo sapiens
atcatcggcaagtttcagttcacagtccgcacacaatcagacgctggggagttccagttgccctttgacccccgcaatgagatctacatcctcttcaaccyctggtgcccagaggacattgtgtacgtggaccatgaggattggcggcaggagtatgttcttaatgagtctgggagaatttactacgggaccgaagcacag

SEQ ID NO: 87438 - DNA, 201 bp, Homo sapiens
cgggctttgatgggtggcaggtggtggatgccacaccccaagagactagcagtggcatcttctgctgcggcccctgctctgtggagtccatcaagaatggsctggtctacatgaagtacgacacgcctttcatttttgctgaggtgaatagtgacaaggtgtactggcagcggcaggatgatggcagcttcaagattgttt

SEQ ID NO: 87439 - DNA, 201 bp, Homo sapiens
ccctaccacgccatctccagagccagagccagagccagacggacgctctcgcagaggaggaggccgttccttctgggctcgctgctgtggctgctgttcawgccgaaatgcggcagatgacgactggggacctgaaccctctgactccaggggtcgagggtccagctctggcactcgaagacctggctcccggggctcaga

SEQ ID NO: 87440 - DNA, 201 bp, Homo sapiens
gaggacattgtgtacgtggaccatgaggattggcggcaggagtatgttcttaatgagtctgggagaatttactacgggaccgaagcacagattggtgagcrgacctggaactacggccagtttgaccacggggtgctggatgcctgcttatacatcctggaccggcgggggatgccatatggaggccgtggagacccagtc

SEQ ID NO: 87441 - DNA, 201 bp, Homo sapiens
gtgtacgtggaccatgaggattggcggcaggagtatgttcttaatgagtctgggagaatttactacgggaccgaagcacagattggtgagcggacctggamctacggccagtttgaccacggggtgctggatgcctgcttatacatcctggaccggcgggggatgccatatggaggccgtggagacccagtcaatgtctcc

SEQ ID NO: 87442 - DNA, 201 bp, Homo sapiens
tacggccagtttgaccacggggtgctggatgcctgcttatacatcctggaccggcgggggatgccatatggaggccgtggagacccagtcaatgtctcccrggtcatctctgccatggtgaactccctggatgacaatggagtcctgattgggaactggtctggtgattactcccgaggcaccaacccatcagcgtgggtg

SEQ ID NO: 87443 - DNA, 201 bp, Homo sapiens
aggcaccaacccatcagcgtgggtgggcagcgtggagatcctgcttagctacctacgcacgggatattccgtcccctatggccagtgctgggtctttgctrgcgtgaccaccacagtgctgcgctgcctgggtctggccacccgtactgtcaccaacttcaactccgcccacgacacagacacatcccttaccatggacat

SEQ ID NO: 87444 - DNA, 201 bp, Homo sapiens
gtgggccgttggggtggcaaccccttgcagccccctaccacgccatctccagagccagagccagagccagacggacgctctcgcagaggaggaggccgttmcttctgggctcgctgctgtggctgctgttcatgccgaaatgcggcagatgacgactggggacctgaaccctctgactccaggggtcgagggtccagctct

SEQ ID NO: 87445 - DNA, 201 bp, Homo sapiens
actgtcaccaacttcaactccgcccacgacacagacacatcccttaccatggacatctacttcgacgagaacatgaagcccctggagcacctgaaccatgwttctgtctggaacttccatgtgtggaacgactgctggatgaagaggccggatctgccctcgggctttgatgggtggcaggtggtggatgccacaccccaa

SEQ ID NO: 87446 - DNA, 201 bp, Homo sapiens
ggccccagcccctggggatgggggcttcttctcagacgctggaggtgacagtcacttaggagagaccatccctatggcatctcgaggtggagcttagcccygtgccaggagcaatgggactggagtcagatgagcaaggacattgccccaagataggggcacactacagagcagctccccaggagctcaggtggggagtcc

SEQ ID NO: 87447 - DNA, 201 bp, Homo sapiens
agtagtgaacggtgtggacttgctgagctcgcgctcggaccagaaccgccgagagcaccacacagacgagtatgagtacgacgagctgatagtgcgccgcrggcagcctttccatatgctcctcctcctgtcccggacctatgaatcctctgatcgcatcacccttgagttactcatcggaaacaaccccgaggtgggcaa

SEQ ID NO: 87448 - DNA, 201 bp, Homo sapiens
cagattggtgagcggacctggaactacggccagtttgaccacggggtgctggatgcctgcttatacatcctggaccggcgggggatgccatatggaggccktggagacccagtcaatgtctcccgggtcatctctgccatggtgaactccctggatgacaatggagtcctgattgggaactggtctggtgattactcccga

SEQ ID NO: 87449 - DNA, 201 bp, Homo sapiens
cttcaaggagaccaagaaggaagtggagctggcaccaggggcctcggaccgtgtgaccatgccagtggcctacaaggaataccggccccatcttgtggacyagggggccatgctgctcaatgtctcaggccacgtcaaggagagcgggcaggtgctggccaagcagcacaccttccgtctgcgcaccccagacctctccct

SEQ ID NO: 87450 - DNA, 201 bp, Homo sapiens
catcctcttcaacccctggtgcccagaggacattgtgtacgtggaccatgaggattggcggcaggagtatgttcttaatgagtctgggagaatttactacsggaccgaagcacagattggtgagcggacctggaactacggccagtttgaccacggggtgctggatgcctgcttatacatcctggaccggcgggggatgcc

SEQ ID NO: 87451 - DNA, 201 bp, Homo sapiens
tgattgggaactggtctggtgattactcccgaggcaccaacccatcagcgtgggtgggcagcgtggagatcctgcttagctacctacgcacgggatattcygtcccctatggccagtgctgggtctttgctggcgtgaccaccacagtgctgcgctgcctgggtctggccacccgtactgtcaccaacttcaactccgccc

SEQ ID NO: 87452 - DNA, 201 bp, Homo sapiens
cccccgcaatgagatctacatcctcttcaacccctggtgcccagaggacattgtgtacgtggaccatgaggattggcggcaggagtatgttcttaatgagyctgggagaatttactacgggaccgaagcacagattggtgagcggacctggaactacggccagtttgaccacggggtgctggatgcctgcttatacatcct

SEQ ID NO: 87453 - DNA, 201 bp, Homo sapiens
cacgggatattccgtcccctatggccagtgctgggtctttgctggcgtgaccaccacagtgctgcgctgcctgggtctggccacccgtactgtcaccaacktcaactccgcccacgacacagacacatcccttaccatggacatctacttcgacgagaacatgaagcccctggagcacctgaaccatgattctgtctggaa

SEQ ID NO: 87454 - DNA, 201 bp, Homo sapiens
ctagtagtgaacggtgtggacttgctgagctcgcgctcggaccagaaccgccgagagcaccacacagacgagtatgagtacgacgagctgatagtgcgccrcgggcagcctttccatatgctcctcctcctgtcccggacctatgaatcctctgatcgcatcacccttgagttactcatcggaaacaaccccgaggtgggc

SEQ ID NO: 87455 - DNA, 201 bp, Homo sapiens
gtagtgaacggtgtggacttgctgagctcgcgctcggaccagaaccgccgagagcaccacacagacgagtatgagtacgacgagctgatagtgcgccgcgrgcagcctttccatatgctcctcctcctgtcccggacctatgaatcctctgatcgcatcacccttgagttactcatcggaaacaaccccgaggtgggcaag

SEQ ID NO: 87456 - DNA, 201 bp, Homo sapiens
ccggctcgaaggctctgggttacagaggcccaagatcctcaacgttggggacattggaggcaatgaaacagtgacactgcgccagtcgtttgtgcctgtgygaccaggcccccgccagctcattgccagcttggacagcccacagctctcccaggtgcacggtgtcatccaggtggatgtggccccagcccctggggatgg

SEQ ID NO: 87457 - DNA, 201 bp, Homo sapiens
gggcagcggtgtcaatgcagctggagatggcaccatccgagagggcatgctagtagtgaacggtgtggacttgctgagctcgcgctcggaccagaaccgcygagagcaccacacagacgagtatgagtacgacgagctgatagtgcgccgcgggcagcctttccatatgctcctcctcctgtcccggacctatgaatcctc

SEQ ID NO: 87458 - DNA, 201 bp, Homo sapiens
atgctagtagtgaacggtgtggacttgctgagctcgcgctcggaccagaaccgccgagagcaccacacagacgagtatgagtacgacgagctgatagtgcvccgcgggcagcctttccatatgctcctcctcctgtcccggacctatgaatcctctgatcgcatcacccttgagttactcatcggaaacaaccccgaggtg

SEQ ID NO: 87459 - DNA, 201 bp, Homo sapiens
agtgggcaaggggggcagtggaggctggaaagcccaggtggtcaaggccagtgggcagaatctgaacctgcgggtccacacttcccccaacgccatcatcrgcaagtttcagttcacagtccgcacacaatcagacgctggggagttccagttgccctttgacccccgcaatgagatctacatcctcttcaacccctggtg

SEQ ID NO: 87460 - DNA, 201 bp, Homo sapiens
cctgctctgtggagtccatcaagaatggcctggtctacatgaagtacgacacgcctttcatttttgctgaggtgaatagtgacaaggtgtactggcagcgscaggatgatggcagcttcaagattgtttatgtggaggagaaggccatcggcacactcattgtcacaaaggccatcagctccaacatgcgggaggacatca

SEQ ID NO: 87461 - DNA, 201 bp, Homo sapiens
acagattggtgagcggacctggaactacggccagtttgaccacggggtgctggatgcctgcttatacatcctggaccggcgggggatgccatatggaggcygtggagacccagtcaatgtctcccgggtcatctctgccatggtgaactccctggatgacaatggagtcctgattgggaactggtctggtgattactcccg

SEQ ID NO: 87462 - DNA, 201 bp, Homo sapiens
gctttgatgggtggcaggtggtggatgccacaccccaagagactagcagtggcatcttctgctgcggcccctgctctgtggagtccatcaagaatggcctsgtctacatgaagtacgacacgcctttcatttttgctgaggtgaatagtgacaaggtgtactggcagcggcaggatgatggcagcttcaagattgtttatg

SEQ ID NO: 87463 - DNA, 201 bp, Homo sapiens
gagaatttactacgggaccgaagcacagattggtgagcggacctggaactacggccagtttgaccacggggtgctggatgcctgcttatacatcctggacyggcgggggatgccatatggaggccgtggagacccagtcaatgtctcccgggtcatctctgccatggtgaactccctggatgacaatggagtcctgattgg

SEQ ID NO: 87464 - DNA, 201 bp, Homo sapiens
tccacacttcccccaacgccatcatcggcaagtttcagttcacagtccgcacacaatcagacgctggggagttccagttgccctttgacccccgcaatgaratctacatcctcttcaacccctggtgcccagaggacattgtgtacgtggaccatgaggattggcggcaggagtatgttcttaatgagtctgggagaattt

SEQ ID NO: 87465 - DNA, 201 bp, Homo sapiens
agcttggacagcccacagctctcccaggtgcacggtgtcatccaggtggatgtggccccagcccctggggatgggggcttcttctcagacgctggaggtgwcagtcacttaggagagaccatccctatggcatctcgaggtggagcttagccccgtgccaggagcaatgggactggagtcagatgagcaaggacattgccc

SEQ ID NO: 87466 - DNA, 201 bp, Homo sapiens
ggtctacatgaagtacgacacgcctttcatttttgctgaggtgaatagtgacaaggtgtactggcagcggcaggatgatggcagcttcaagattgtttatrtggaggagaaggccatcggcacactcattgtcacaaaggccatcagctccaacatgcgggaggacatcacctacctctataagcacccagaaggctcaga

SEQ ID NO: 87467 - DNA, 201 bp, Homo sapiens
cgactgctggatgaagaggccggatctgccctcgggctttgatgggtggcaggtggtggatgccacaccccaagagactagcagtggcatcttctgctgcrgcccctgctctgtggagtccatcaagaatggcctggtctacatgaagtacgacacgcctttcatttttgctgaggtgaatagtgacaaggtgtactggca

SEQ ID NO: 87468 - DNA, 201 bp, Homo sapiens
atgaagtacgacacgcctttcatttttgctgaggtgaatagtgacaaggtgtactggcagcggcaggatgatggcagcttcaagattgtttatgtggaggrgaaggccatcggcacactcattgtcacaaaggccatcagctccaacatgcgggaggacatcacctacctctataagcacccagaaggctcagacgcagag

SEQ ID NO: 87469 - DNA, 201 bp, Homo sapiens
gctctgtggagtccatcaagaatggcctggtctacatgaagtacgacacgcctttcatttttgctgaggtgaatagtgacaaggtgtactggcagcggcasgatgatggcagcttcaagattgtttatgtggaggagaaggccatcggcacactcattgtcacaaaggccatcagctccaacatgcgggaggacatcacct

SEQ ID NO: 87470 - DNA, 201 bp, Homo sapiens
tctacttcgacgagaacatgaagcccctggagcacctgaaccatgattctgtctggaacttccatgtgtggaacgactgctggatgaagaggccggatctsccctcgggctttgatgggtggcaggtggtggatgccacaccccaagagactagcagtggcatcttctgctgcggcccctgctctgtggagtccatcaaga

SEQ ID NO: 87471 - DNA, 201 bp, Homo sapiens
ggtcccaggaggccctacccccaccctgtgagagtgagatttactgccacggggagctcctaaaccaagttcaaatggccaagctctaccaggatgacaarcagtttgtggacatgccactgtctatagctccagaacaagtcctgcagaccttcactgagctgtccagggaccacaatcacagcatccccagggagcagc

SEQ ID NO: 87472 - DNA, 135 bp, Homo sapiens
aagctggctttcctggagccccactgcctggcggccacccttctgcccagcctcctgctcagcctcctgccatggtgacagccctcctctcctcacctggmcccagctcctgccccattaaacctctgcaccagt

SEQ ID NO: 87473 - DNA, 201 bp, Homo sapiens
gggaggagaatatgaagttcaggagggatttggctggacgaatggcgtggtcctgatgctgctggaccgctatggtgaccggctgacctcaggggccaagytggctttcctggagccccactgcctggcggccacccttctgcccagcctcctgctcagcctcctgccatggtgacagccctcctctcctcacctggcccc

SEQ ID NO: 87474 - DNA, 201 bp, Homo sapiens
atccaacctcactccactctgggccgggtgtttctctgaccctggcgtggcggacaaggctctgaaatacctggaggacaaccggatcctgacttaccagyatgggatcccgacctctctccagaagacaggccagcagtgggatttccccaatgcctgggcccccctgcaggacctggtcatcagaggcctggccaaggc

SEQ ID NO: 87475 - DNA, 201 bp, Homo sapiens
gacctctctccagaagacaggccagcagtgggatttccccaatgcctgggcccccctgcaggacctggtcatcagaggcctggccaaggcacctttacgtygggcccaggaagtggctttccagctggctcagaattggatccgaaccaattttgatgtctactcgcagaagtcagccatgtatgagaagtatgacgtcag

SEQ ID NO: 87476 - DNA, 201 bp, Homo sapiens
gcagactggaaagacagcccccagttcctgcagaagatttcagatgccaaactgcgtgcctgggcagggcagctgcatcagctctggaagaagctggggargaagatgaagccagaggttctcagccaccctgagcggttctctctcatctactcagaacatcccttcattgtgcctggcggtcgctttgttgagttctac

SEQ ID NO: 87477 - DNA, 201 bp, Homo sapiens
agaagtcagccatgtatgagaagtatgacgtcagcaacggtggacagcccggtgggggaggagaatatgaagttcaggagggatttggctggacgaatggygtggtcctgatgctgctggaccgctatggtgaccggctgacctcaggggccaagctggctttcctggagccccactgcctggcggccacccttctgccca

SEQ ID NO: 87478 - DNA, 201 bp, Homo sapiens
agcagaggagctgatgagcaacttctattccaggctggggaacgactcccaggccacgaagtacagaatcctgcggtcgcagcgcttggccgccctgaacrcagtcctgtgggatgagcagaccggagcctggttcgattacgaccttgagaagaagaagaaaaaccgggagttttacccatccaacctcactccactctg

SEQ ID NO: 87479 - DNA, 201 bp, Homo sapiens
ccggtgggggaggagaatatgaagttcaggagggatttggctggacgaatggcgtggtcctgatgctgctggaccgctatggtgaccggctgacctcaggrgccaagctggctttcctggagccccactgcctggcggccacccttctgcccagcctcctgctcagcctcctgccatggtgacagccctcctctcctcacc

SEQ ID NO: 87480 - DNA, 201 bp, Homo sapiens
agtctgatcagttctgcaagatgcccatcaacaacaagatggcccagtggggcaacaagcctgtatgctgagcaggaggcagacttgcagagcttgttttktttcatcctgtccgtaaggggtcagcgctcttgctttgctcttttcaatgaatagcacttatgttactggtgtccagctgagtttctcttgggtataaag

SEQ ID NO: 87481 - DNA, 201 bp, Homo sapiens
catggtttgccggggaaaagctcacctttgtggattttctcacctatgatatcttggatcagaaccgtatatttgaccccaagtgcctggatgagttcccraacctgaaggctttcatgtgccgttttgaggctttggagaaaatcgctgcctacttacagtctgatcagttctgcaagatgcccatcaacaacaagatgg

SEQ ID NO: 87482 - DNA, 201 bp, Homo sapiens
aagacgtaaaaagaaaaaaccataggctgctctgcctgtggagtaaccattctttattcttttactttttaaaataataacaatcacaaaggaaagatttrccaattgaataggatcaaattctacaacttttcctaaggcacccacaaataaatgacaagtgagacaaaaagcactagtataaagattatataaagacct

SEQ ID NO: 87483 - DNA, 201 bp, Homo sapiens
agaagttacccttaagctaggatgttgctcagaagtgaccatcccaactttggtgcgggcacaataaatcagcctaaatgtccctaatttaacccagctcrttataatgtcattaaacatgacattagcattgtggttttagcacccccatgggttttgcttaggcactcatgggtaataaccaagatggagtccctttgg

SEQ ID NO: 87484 - DNA, 201 bp, Homo sapiens
gtcagggcgcccgcgcgtgggccccgcccccttatgtcgggtataaagcccctcccgctcacagtttccctagtcctcgaaggctcggaagcccgtcaccstgtcgtgcgagtcgtctatggttctcgggtactgggatattcgtgggctggcgcacgccatccgcctgctcctggagttcacggatacctcttatgagga

SEQ ID NO: 87485 - DNA, 201 bp, Homo sapiens
cgcgcctgcgcacggccctgtggagccgcggaggcaagggacggagaacggggcggaggcggagtcagggcgcccgcgcgtgggccccgcccccttatgtmgggtataaagcccctcccgctcacagtttccctagtcctcgaaggctcggaagcccgtcaccatgtcgtgcgagtcgtctatggttctcgggtactggga

SEQ ID NO: 87486 - DNA, 201 bp, Homo sapiens
tgtatgctgagcaggaggcagacttgcagagcttgttttgtttcatcctgtccgtaaggggtcagcgctcttgctttgctcttttcaatgaatagcacttmtgttactggtgtccagctgagtttctcttgggtataaaggctaaaagggaaaaaggatatgtggagaatcatcaagatatgaattgaatcgctgcgatac

SEQ ID NO: 87487 - DNA, 201 bp, Homo sapiens
gggccccgcccccttatgtcgggtataaagcccctcccgctcacagtttccctagtcctcgaaggctcggaagcccgtcaccatgtcgtgcgagtcgtctmtggttctcgggtactgggatattcgtgggctggcgcacgccatccgcctgctcctggagttcacggatacctcttatgaggagaaacggtacacgtgcgg

SEQ ID NO: 87488 - DNA, 201 bp, Homo sapiens
ccagattgccatcccctatggaccagaagccaaggatctctctagtgatggtcagagggcccaaatggcagggatacccagtgatgtcaggaggaatagtrcagacagaaggtgctaagcagacaattcaactgccatgttttgccaccccctgtgagcagggattaggtgttcaggccagtatcttgggcatgggggagc

SEQ ID NO: 87489 - DNA, 201 bp, Homo sapiens
tcacctttgtggattttctcacctatgatatcttggatcagaaccgtatatttgaccccaagtgcctggatgagttcccaaacctgaaggctttcatgtgycgttttgaggctttggagaaaatcgctgcctacttacagtctgatcagttctgcaagatgcccatcaacaacaagatggcccagtggggcaacaagcctg

SEQ ID NO: 87490 - DNA, 201 bp, Homo sapiens
atattgatgaaaatgtaagaatttttgtgaccacggggtaggagaagtttctttaaagacgtaaaaagaaaaaaccataggctgctctgcctgtggagtarccattctttattcttttactttttaaaataataacaatcacaaaggaaagatttaccaattgaataggatcaaattctacaacttttcctaaggcaccca

SEQ ID NO: 87491 - DNA, 201 bp, Homo sapiens
ccgttttgaggctttggagaaaatcgctgcctacttacagtctgatcagttctgcaagatgcccatcaacaacaagatggcccagtggggcaacaagcctrtatgctgagcaggaggcagacttgcagagcttgttttgtttcatcctgtccgtaaggggtcagcgctcttgctttgctcttttcaatgaatagcacttat

SEQ ID NO: 87492 - DNA, 201 bp, Homo sapiens; identical to SEQ ID NO: 87480

SEQ ID NO: 87493 - DNA, 201 bp, Homo sapiens; identical to SEQ ID NO: 87481

SEQ ID NO: 87494 - DNA, 201 bp, Homo sapiens; identical to SEQ ID NO: 87482

SEQ ID NO: 87495 - DNA, 201 bp, Homo sapiens; identical to SEQ ID NO: 87485

SEQ ID NO: 87496 - DNA, 201 bp, Homo sapiens; identical to SEQ ID NO: 87486

SEQ ID NO: 87497 - DNA, 201 bp, Homo sapiens; identical to SEQ ID NO: 87487

SEQ ID NO: 87498 - DNA, 201 bp, Homo sapiens; identical to SEQ ID NO: 87489

SEQ ID NO: 87499 - DNA, 201 bp, Homo sapiens; identical to SEQ ID NO: 87490

SEQ ID NO: 87500 - DNA, 201 bp, Homo sapiens; identical to SEQ ID NO: 87491

SEQ ID NO: 87501 - DNA, 201 bp, Homo sapiens; identical to SEQ ID NO: 87480

SEQ ID NO: 87502 - DNA, 201 bp, Homo sapiens; identical to SEQ ID NO: 87481

SEQ ID NO: 87503 - DNA, 201 bp, Homo sapiens; identical to SEQ ID NO: 87482

SEQ ID NO: 87504 - DNA, 201 bp, Homo sapiens; identical to SEQ ID NO: 87483

SEQ ID NO: 87505 - DNA, 201 bp, Homo sapiens; identical to SEQ ID NO: 87484

SEQ ID NO: 87506 - DNA, 201 bp, Homo sapiens; identical to SEQ ID NO: 87485

SEQ ID NO: 87507 - DNA, 201 bp, Homo sapiens; identical to SEQ ID NO: 87486

SEQ ID NO: 87508 - DNA, 201 bp, Homo sapiens; identical to SEQ ID NO: 87487

SEQ ID NO: 87509 - DNA, 201 bp, Homo sapiens; identical to SEQ ID NO: 87488

SEQ ID NO: 87510 - DNA, 201 bp, Homo sapiens; identical to SEQ ID NO: 87489

SEQ ID NO: 87511 - DNA, 201 bp, Homo sapiens; identical to SEQ ID NO: 87490

SEQ ID NO: 87512 - DNA, 201 bp, Homo sapiens; identical to SEQ ID NO: 87491

SEQ ID NO: 87513 - DNA, 201 bp, Homo sapiens; identical to SEQ ID NO: 87480

SEQ ID NO: 87514 - DNA, 201 bp, Homo sapiens; identical to SEQ ID NO: 87481

SEQ ID NO: 87515 - DNA, 201 bp, Homo sapiens; identical to SEQ ID NO: 87482

SEQ ID NO: 87516 - DNA, 201 bp, Homo sapiens; identical to SEQ ID NO: 87484

SEQ ID NO: 87517 - DNA, 201 bp, Homo sapiens; identical to SEQ ID NO: 87485

SEQ ID NO: 87518 - DNA, 201 bp, Homo sapiens; identical to SEQ ID NO: 87486

SEQ ID NO: 87519 - DNA, 201 bp, Homo sapiens; identical to SEQ ID NO: 87487

SEQ ID NO: 87520 - DNA, 201 bp, Homo sapiens; identical to SEQ ID NO: 87489

SEQ ID NO: 87521 - DNA, 201 bp, Homo sapiens; identical to SEQ ID NO: 87490

SEQ ID NO: 87522 - DNA, 201 bp, Homo sapiens; identical to SEQ ID NO: 87491

SEQ ID NO: 87523 - DNA, 201 bp, Homo sapiens
gtttgcaggagacaagatcacctttgtggatttccttgcctatgatgtccttgacatgaagcgtatatttgagcccaagtgcttggacgccttcctaaacytgaaggacttcatctcccgctttgagggtttgaagaagatctctgcctacatgaagtccagccaattcctccgaggtcttttgtttggaaagtcagctac

SEQ ID NO: 87524 - DNA, 201 bp, Homo sapiens
gctgggtccctaccccagctccgtgtgatgcccagtaaagcctgaaccatgcctgccatgtcttgtcttattccctgaggctcccttgactcaggactgtsctcgaattgtgggtggttttttgtcttctgttgtccacagccagagcttagtggatgggtgtgtgtgtgtgtgtgttgggggtggtgatcaggcaggttc

SEQ ID NO: 87525 - DNA, 201 bp, Homo sapiens
ccacatccctctgttcctcactgtggggattactacagaaaggtgctctgtgccaagttcctcactcattcgcgctcctgtaggccgtctagaactggcayggttcaaagaggggctaggctgatggggaagggggctgagcagctcccaggcagactgccttctttcaccctgtcctgatagacttccctgatctagata

SEQ ID NO: 87526 - DNA, 201 bp, Homo sapiens
cacgctgggggacgctcctgactatgacagaagccagtggctgaatgaaaaattcaagctgggcctggactttcccaatctgccctacttgattgatgggrctcacaagatcacccagagcaatgccatcctgcgctacattgcccgcaagcacaacctgtgtggggagacagaagaggagaagattcgtgtggacatttt

SEQ ID NO: 87527 - DNA, 201 bp, Homo sapiens
gattcgtgtggacattttggagaaccaggttatggataaccacatggagctggtcagactgtgctatgacccagattttgagaaactgaagccaaaatacytggaggaactccctgaaaagctaaagctctactcagagtttctggggaagcggccatggtttgcaggagacaagatcacctttgtggatttccttgccta

SEQ ID NO: 87528 - DNA, 201 bp, Homo sapiens
cctctcaaagtctgagccccgctccgctgatgcctgtctgcagaatccgcaccaaccagcaccatgcccatgactctggggtactgggacatccgtgggckggcccacgccatccgcttgctcctggaatacacagactcaagctatgtggaaaagaagtacacgctgggggacgctcctgactatgacagaagccagtgg

SEQ ID NO: 87529 - DNA, 201 bp, Homo sapiens
ggtttgcaggagacaagatcacctttgtggatttccttgcctatgatgtccttgacatgaagcgtatatttgagcccaagtgcttggacgccttcctaaayttgaaggacttcatctcccgctttgagggtttgaagaagatctctgcctacatgaagtccagccaattcctccgaggtcttttgtttggaaagtcagcta

SEQ ID NO: 87530 - DNA, 201 bp, Homo sapiens
ccatggtttgcaggagacaagatcacctttgtggatttccttgcctatgatgtccttgacatgaagcgtatatttgagcccaagtgcttggacgccttccyaaacttgaaggacttcatctcccgctttgagggtttgaagaagatctctgcctacatgaagtccagccaattcctccgaggtcttttgtttggaaagtca

SEQ ID NO: 87531 - DNA, 201 bp, Homo sapiens
atgtgctactcaatgagatgaaggagctggccgcccagaagaaagtgccacaccgagatttctacaacatccgcaaggtggacacccacatccatgcctcrtcctgcatgaaccagaagcatctgctgcgcttcatcaagcgggcaatgaagcggcacctggaggagatcgtgcacgtggagcagggccgtgaacagacgc

SEQ ID NO: 87532 - DNA, 201 bp, Homo sapiens
agtgggacaagctggcgcgctgggccgtcatgcaccgcgtgcactcccccaacgtgcgctggctggtgcaggtgccccgcctctttgatgtgtaccgtacmaagggccagctggccaacttccaggagatgctggagaacatcttcctgccactgttcgaggccactgtgcaccctgccagccacccggaactgcatctct

SEQ ID NO: 87533 - DNA, 201 bp, Homo sapiens
tcgtgcacgtggagcagggccgtgaacagacgctgcgggaggtctttgagagcatgaatctcacggcctacgacctgagtgtggacacgctggatgtgcaygcggacaggaacactttccatcgctttgacaagtttaatgccaaatacaaccctattggggagtccgtcctccgagagatcttcatcaagacggacaaca

SEQ ID NO: 87534 - DNA, 201 bp, Homo sapiens
gtgccaggagctggcgctcatcacgcaggcagtccagagtgagatgctggagaccattccagaggaggcgggtatcaccatgagcccagggcctcaatgakcctggtccatgaagtgcccaccacatcgcagcacttttaccacgttttgtcctcagaccccgcccatgctgtgtggtctctgcatgtctccattcttctc

SEQ ID NO: 87535 - DNA, 201 bp, Homo sapiens
cctctagcctttccggtccttcctgggcaaatctaagccttggccagggccgaagtttaggcccctgtcttgttcatgtagccgaggggcaggcgggggayctctacacctctgctgtgggcacggggctgctgagggtctgtggaactccagcagctctgcactgggtagagctgggcctagagctcagtcacaggcctg

SEQ ID NO: 87536 - DNA, 176 bp, Homo sapiens
ctggcgcggagccggcgagattttggtggggtctcacctgttgcgtgactcccccacagtccggccgcgggagtcygaccctgaatgcccagggagtgttgagagaaatctggacgagtttcgggtcccgctcccttgggagcacgtggcctaccagcctctcgattgcagggttg

SEQ ID NO: 87537 - DNA, 201 bp, Homo sapiens; identical to SEQ ID NO: 87531

SEQ ID NO: 87538 - DNA, 201 bp, Homo sapiens
ggaacctgcggggtcatattcaaggggtcagggcctgcctcctgccctcctaggatggctgagcctcccttgtccctgccaacccctctgagtgcaaggargggcttcctggtcccatccatggtctgtccagcctggcccacctgggtatccttgctttcccaatatggttcagatgcgcccctgcgctcttgggccaag

SEQ ID NO: 87539 - DNA, 201 bp, Homo sapiens
gcatcatggcctcagaggctcggggtggtctgggggcccctccgctgcagtctgcccgatccctgccgggccccgccccctgcctcaagcacttcccgctsgacctgcgcacgtctatggatggcaaatgcaaggagatcgccgaggagctgttcacccgctcactggctgagagcgagctccgtagtgccccgtatgagt

SEQ ID NO: 87540 - DNA, 201 bp, Homo sapiens; identical to SEQ ID NO: 87534

SEQ ID NO: 87541 - DNA, 201 bp, Homo sapiens
ttgctttcccaatatggttcagatgcgcccctgcgctcttgggccaagctctgacccttgctggaccgctgggtttcctcccactggccctgacttgcacmtacctgcatgttgtctcacctgcagtgatgtgtaccgtaccaagggccagctggccaacttccaggagatgctggagaacatcttcctgccactgttcga

SEQ ID NO: 87542 - DNA, 201 bp, Homo sapiens
tcttgtgagtgtccctggagtgggaggggaacctgcggggtcatattcaaggggtcagggcctgcctcctgccctcctaggatggctgagcctcccttgtscctgccaacccctctgagtgcaaggaagggcttcctggtcccatccatggtctgtccagcctggcccacctgggtatccttgctttcccaatatggttca

SEQ ID NO: 87543 - DNA, 201 bp, Homo sapiens
ggccaagctctgacccttgctggaccgctgggtttcctcccactggccctgacttgcacctacctgcatgttgtctcacctgcagtgatgtgtaccgtacmaagggccagctggccaacttccaggagatgctggagaacatcttcctgccactgttcgaggccactgtgcaccctgccagccacccggaactgcatctct

SEQ ID NO: 87544 - DNA, 201 bp, Homo sapiens
tcgtgcacgtggagcagggccgtgaacagacgctgcgggaggtctttgagagcatgaatctcacggcctacgacctgagtgtggacacgctggatgtgcaygcggtctgtgccagtggcgtgggctgtgggactgagtcagtcaggggaccaggagtcacgggtgacctgagccttcccatgtcccccaggacaggaacac

SEQ ID NO: 87545 - DNA, 201 bp, Homo sapiens; identical to SEQ ID NO: 87535

SEQ ID NO: 87546 - DNA, 201 bp, Homo sapiens; identical to SEQ ID NO: 87531

SEQ ID NO: 87547 - DNA, 201 bp, Homo sapiens; identical to SEQ ID NO: 87532

SEQ ID NO: 87548 - DNA, 201 bp, Homo sapiens; identical to SEQ ID NO: 87533

SEQ ID NO: 87549 - DNA, 201 bp, Homo sapiens
ccactgcagctccagaggctcggggtggtctgggggcccctccgctgcagtctgcccgatccctgccgggccccgccccctgcctcaagcacttcccgctsgacctgcgcacgtctatggatggcaaatgcaaggagatcgccgaggagctgttcacccgctcactggctgagagcgagctccgtagtgccccgtatgagt

SEQ ID NO: 87550 - DNA, 201 bp, Homo sapiens; identical to SEQ ID NO: 87534

SEQ ID NO: 87551 - DNA, 201 bp, Homo sapiens; identical to SEQ ID NO: 87535

SEQ ID NO: 87552 - DNA, 201 bp, Homo sapiens; identical to SEQ ID NO: 87531

SEQ ID NO: 87553 - DNA, 201 bp, Homo sapiens; identical to SEQ ID NO: 87532

SEQ ID NO: 87554 - DNA, 201 bp, Homo sapiens; identical to SEQ ID NO: 87533

SEQ ID NO: 87555 - DNA, 201 bp, Homo sapiens; identical to SEQ ID NO: 87534

SEQ ID NO: 87556 - DNA, 201 bp, Homo sapiens; identical to SEQ ID NO: 87535

SEQ ID NO: 87557 - DNA, 201 bp, Homo sapiens; identical to SEQ ID NO: 87531

SEQ ID NO: 87558 - DNA, 201 bp, Homo sapiens; identical to SEQ ID NO: 87532

SEQ ID NO: 87559 - DNA, 201 bp, Homo sapiens; identical to SEQ ID NO: 87533

SEQ ID NO: 87560 - DNA, 201 bp, Homo sapiens; identical to SEQ ID NO: 87549

SEQ ID NO: 87561 - DNA, 201 bp, Homo sapiens; identical to SEQ ID NO: 87534

SEQ ID NO: 87562 - DNA, 201 bp, Homo sapiens; identical to SEQ ID NO: 87535

SEQ ID NO: 87563 - DNA, 176 bp, Homo sapiens; identical to SEQ ID NO: 87536

SEQ ID NO: 87564 - DNA, 201 bp, Homo sapiens; identical to SEQ ID NO: 87531

SEQ ID NO: 87565 - DNA, 201 bp, Homo sapiens; identical to SEQ ID NO: 87532

SEQ ID NO: 87566 - DNA, 201 bp, Homo sapiens; identical to SEQ ID NO: 87533

SEQ ID NO: 87567 - DNA, 201 bp, Homo sapiens; identical to SEQ ID NO: 87539

SEQ ID NO: 87568 - DNA, 201 bp, Homo sapiens; identical to SEQ ID NO: 87534

SEQ ID NO: 87569 - DNA, 201 bp, Homo sapiens; identical to SEQ ID NO: 87535

SEQ ID NO: 87570 - DNA, 201 bp, Homo sapiens
atgcatttactattaaaactgttaaagaaaaccttgatcaactgaaaaaccaaatacaggagccatgcaagaagtttgccattgcagatgcaaccagagasgatccatttaaagagaaacttctagaaataatgacaaggattcaaacttattgtcaaatgagtccaatgtcagattttggaactcaaccctatgaacaat

SEQ ID NO: 87571 - DNA, 201 bp, Homo sapiens
gagaaatattgccaagcattacaagaataacccatcactaataactttcctttgcaaaaactgcagtgtgctagcctgttctggggaagatatccatgtarttgagaaaatgcatcacgtcaatatgaccccagaattcaaggaactttacattgtaagagaaaacaaaacactgcaaaagaagtgtgccgactatcaaat

SEQ ID NO: 87572 - DNA, 201 bp, Homo sapiens
ggagaataactcatcagaatcatcttttgcagattcttctgtagtttcagaatcagacacaagtttggcagaaggaagtgtcagctgcttagatgaaagtmttggacataacagcaacatgggcagtgattcaggcaccatgggaagtgattcagatgaagagaatgtggcagcaagagcatccccggagccagaactcca

SEQ ID NO: 87573 - DNA, 201 bp, Homo sapiens
agaagttgaaaaacaatagactcaagaaagaaaacaaaccagtgattccccttcctcagatactgggactaacagcttcacctggtgttggaggggccacsaagcaagccaaagctgaagaacacattttaaaactatgtgccaatcttgatgcatttactattaaaactgttaaagaaaaccttgatcaactgaaaaacc

SEQ ID NO: 87574 - DNA, 201 bp, Homo sapiens
gtcaccaatgaaatagccatggtccaggcccgtggtcgagccagagctgatgagagcacctacgtcctggttgctcacagtggttcaggagttatcgaacrtgagacagttaatgatttccgagagaagatgatgtataaagctatacattgtgttcaaaatatgaaaccagaggagtatgctcataagattttggaatta

SEQ ID NO: 87575 - DNA, 201 bp, Homo sapiens
aaatcgcaaagaacgtgtttgtgcagaacatttgaggaagtacaatgaggccctacaaattaatgacacaattcgaatgatagatgcgtatactcatcttkaaactttctataatgaagagaaagataagaagtttgcagtcatagaagatgatagtgatgagggtggtgatgatgagtattgtgatggtgatgaagatga

SEQ ID NO: 87576 - DNA, 201 bp, Homo sapiens
ggagaagatgctggtgttcaattgtcagacttttccctcattatcattgatgaatgtcatcacaccaacaaagaagcagtgtataataacatcatgaggcrttatttgatgcagaagttgaaaaacaatagactcaagaaagaaaacaaaccagtgattccccttcctcagatactgggactaacagcttcacctggtgtt

SEQ ID NO: 87577 - DNA, 201 bp, Homo sapiens
caacaaagaaacaatacaaaaagtgggtagaattacctatcacatttcccaatcttgactattcagaatgctgtttatttagtgatgaggattagcacttrattgaagattcttttaaaatactatcagttaaacatttaatatgattatgattaatgtattcattatgctacagaactgacataagaatcaataaaatga

SEQ ID NO: 87578 - DNA, 201 bp, Homo sapiens
gctagcctgttctggggaagatatccatgtaattgagaaaatgcatcacgtcaatatgaccccagaattcaaggaactttacattgtaagagaaaacaaarcactgcaaaagaagtgtgccgactatcaaataaatggtgaaatcatctgcaaatgtggccaggcttggggaacaatgatggtgcacaaaggcttagattt

SEQ ID NO: 87579 - DNA, 201 bp, Homo sapiens
cgtcaaagaattcaaatcccagctctttgtggagggcctggtacaagggaatgtcacaagcacagaatctatggatttcctgaaatatgttgttgacaaaytaaacttcaagcctctggagcaggagatgcctgtgcagttccaggtggtagagctgcccagtggccaccatctatgcaaagtgaaagctctgaacaaggg

SEQ ID NO: 87580 - DNA, 201 bp, Homo sapiens
cttatgaagcagatgtggcacagctggagtataaactggtagctggagaacatggtttaattattcgagtgaaaggatttaaccacaaactacctctactrtttcagctcattattgactacttagctgagttcaattccacaccagctgtctttacaatgataactgagcagttgaagaagacctactttaacatcctca

SEQ ID NO: 87581 - DNA, 201 bp, Homo sapiens
gatacatcaaattacagaatggcttgcaggcacttctgatttcagacctaagtaatatggaaggtaaaacaggaaatacaacagatgatgaagaagaagargaggtggaggaagaagaagaagatgatgatgaagattctggagctgaaatagaagatgacgatgaagagggttttgatgatgaagatgagtttgatgatg

SEQ ID NO: 87582 - DNA, 201 bp, Homo sapiens
aagaagacctactttaacatcctcatcaagcccgagactttggccaaagatgtacggcttttaatcttggaatatgcccgttggtctatgattgacaagtmccaggctttgatggacggcctttcccttgagtctctgctgagcttcgtcaaagaattcaaatcccagctctttgtggagggcctggtacaagggaatgtc

SEQ ID NO: 87583 - DNA, 201 bp, Homo sapiens
gcctggtacaagggaatgtcacaagcacagaatctatggatttcctgaaatatgttgttgacaaactaaacttcaagcctctggagcaggagatgcctgtkcagttccaggtggtagagctgcccagtggccaccatctatgcaaagtgaaagctctgaacaagggtgatgccaactctgaagtcactgtgtactaccagg

SEQ ID NO: 87584 - DNA, 201 bp, Homo sapiens
gctttcacaacaacactcaaccttctcccctaccataaaatagtcaaataaataaactgcagtcacgttggcctgaagcaatgtgtattttaaaatgtgtktgtttgtattttatggagttagttatactactgccttagggcttccattgaagttttgcactggcatcatagcatttgatttactttttatcctttgttg

SEQ ID NO: 87585 - DNA, 201 bp, Homo sapiens
tcattattgactacttagctgagttcaattccacaccagctgtctttacaatgataactgagcagttgaagaagacctactttaacatcctcatcaagccygagactttggccaaagatgtacggcttttaatcttggaatatgcccgttggtctatgattgacaagtaccaggctttgatggacggcctttcccttgagt

SEQ ID NO: 87586 - DNA, 131 bp, Homo sapiens
tgttcgctggctgttccgagaatcagtccgsgtcacgttggtgcctctcctttcctgttctgattggttgcttacgtgagcgtgactactttcttgcctcatgattggctgaaatcagtagcgtcatcggc

SEQ ID NO: 87587 - DNA, 201 bp, Homo sapiens
accagctgtctttacaatgataactgagcagttgaagaagacctactttaacatcctcatcaagcccgagactttggccaaagatgtacggcttttaatcytggaatatgcccgttggtctatgattgacaagtaccaggctttgatggacggcctttcccttgagtctctgctgagcttcgtcaaagaattcaaatccca

SEQ ID NO: 87588 - DNA, 201 bp, Homo sapiens
ttgaccgtgaagttgaagctgttgatagtgaatatcaacttgcaaggccttctgatgcaaacagaaaggaaatgttgtttggaagccttgctagacctggmcatcctatgggaaaatttttttggggaaatgctgagacgctcaagcatgagccaagaaagaataatattgatacacatgctagattgagagaattctgga

SEQ ID NO: 87589 - DNA, 201 bp, Homo sapiens
aaggtaaaacaggaaatacaacagatgatgaagaagaagaggaggtggaggaagaagaagaagatgatgatgaagattctggagctgaaatagaagatgaygatgaagagggttttgatgatgaagatgagtttgatgatgaacatgatgatgatcttgatactgaggataatgaattggaagaattagaagagagagcag

SEQ ID NO: 87590 - DNA, 201 bp, Homo sapiens
aaattacagaatggcttgcaggcacttctgatttcagacctaagtaatatggaaggtaaaacaggaaatacaacagatgatgaagaagaagaggaggtggwggaagaagaagaagatgatgatgaagattctggagctgaaatagaagatgacgatgaagagggttttgatgatgaagatgagtttgatgatgaacatgat

SEQ ID NO: 87591 - DNA, 201 bp, Homo sapiens
atcaaattacagaatggcttgcaggcacttctgatttcagacctaagtaatatggaaggtaaaacaggaaatacaacagatgatgaagaagaagaggaggwggaggaagaagaagaagatgatgatgaagattctggagctgaaatagaagatgacgatgaagagggttttgatgatgaagatgagtttgatgatgaacat

SEQ ID NO: 87592 - DNA, 201 bp, Homo sapiens
gcgtgactactttcttgcctcatgattggctgaaatcagtagcgtcatcggcggccgggagggcggagggacgagggaagtcggcgagagggagactgggktgggggaggggttcaggcctgttccccgcggctgcggcagcaccagggccggccgccaccgcctctagaacgcggaggaggtgggtcctgggaagcggga

SEQ ID NO: 87593 - DNA, 201 bp, Homo sapiens; identical to SEQ ID NO: 87579

SEQ ID NO: 87594 - DNA, 201 bp, Homo sapiens; identical to SEQ ID NO: 87580

SEQ ID NO: 87595 - DNA, 201 bp, Homo sapiens; identical to SEQ ID NO: 87581

SEQ ID NO: 87596 - DNA, 201 bp, Homo sapiens; identical to SEQ ID NO: 87582

SEQ ID NO: 87597 - DNA, 201 bp, Homo sapiens
gcctggtacaagggaatgtcacaagcacagaatctatggatttcctgaaatatgttgttgacaaactaaacttcaagcctctggagcaggagatgcctgtkcagttccaggtggtagagctgcccagtggccaccatctatgcaaagtgaaagctctgaacaagggtgatgccaactctgaagtcactgtgtactaccagt

SEQ ID NO: 87598 - DNA, 201 bp, Homo sapiens; identical to SEQ ID NO: 87584

SEQ ID NO: 87599 - DNA, 201 bp, Homo sapiens; identical to SEQ ID NO: 87585

SEQ ID NO: 87600 - DNA, 131 bp, Homo sapiens; identical to SEQ ID NO: 87586

SEQ ID NO: 87601 - DNA, 201 bp, Homo sapiens; identical to SEQ ID NO: 87587

SEQ ID NO: 87602 - DNA, 201 bp, Homo sapiens; identical to SEQ ID NO: 87588

SEQ ID NO: 87603 - DNA, 201 bp, Homo sapiens; identical to SEQ ID NO: 87589

SEQ ID NO: 87604 - DNA, 201 bp, Homo sapiens; identical to SEQ ID NO: 87590

SEQ ID NO: 87605 - DNA, 201 bp, Homo sapiens; identical to SEQ ID NO: 87591

SEQ ID NO: 87606 - DNA, 201 bp, Homo sapiens; identical to SEQ ID NO: 87592

SEQ ID NO: 87607 - DNA, 201 bp, Homo sapiens; identical to SEQ ID NO: 87579

SEQ ID NO: 87608 - DNA, 201 bp, Homo sapiens; identical to SEQ ID NO: 87580

SEQ ID NO: 87609 - DNA, 201 bp, Homo sapiens; identical to SEQ ID NO: 87581

SEQ ID NO: 87610 - DNA, 201 bp, Homo sapiens; identical to SEQ ID NO: 87582

SEQ ID NO: 87611 - DNA, 201 bp, Homo sapiens; identical to SEQ ID NO: 87583

SEQ ID NO: 87612 - DNA, 201 bp, Homo sapiens; identical to SEQ ID NO: 87584

SEQ ID NO: 87613 - DNA, 201 bp, Homo sapiens; identical to SEQ ID NO: 87585

SEQ ID NO: 87614 - DNA, 131 bp, Homo sapiens; identical to SEQ ID NO: 87586

SEQ ID NO: 87615 - DNA, 201 bp, Homo sapiens; identical to SEQ ID NO: 87587

SEQ ID NO: 87616 - DNA, 201 bp, Homo sapiens; identical to SEQ ID NO: 87588

SEQ ID NO: 87617 - DNA, 201 bp, Homo sapiens; identical to SEQ ID NO: 87589

SEQ ID NO: 87618 - DNA, 201 bp, Homo sapiens; identical to SEQ ID NO: 87590

SEQ ID NO: 87619 - DNA, 201 bp, Homo sapiens; identical to SEQ ID NO: 87591

SEQ ID NO: 87620 - DNA, 201 bp, Homo sapiens; identical to SEQ ID NO: 87592

SEQ ID NO: 87621 - DNA, 201 bp, Homo sapiens; identical to SEQ ID NO: 87579

SEQ ID NO: 87622 - DNA, 201 bp, Homo sapiens; identical to SEQ ID NO: 87580

SEQ ID NO: 87623 - DNA, 201 bp, Homo sapiens; identical to SEQ ID NO: 87581

SEQ ID NO: 87624 - DNA, 201 bp, Homo sapiens; identical to SEQ ID NO: 87582

SEQ ID NO: 87625 - DNA, 201 bp, Homo sapiens; identical to SEQ ID NO: 87597

SEQ ID NO: 87626 - DNA, 201 bp, Homo sapiens; identical to SEQ ID NO: 87584

SEQ ID NO: 87627 - DNA, 201 bp, Homo sapiens; identical to SEQ ID NO: 87585

SEQ ID NO: 87628 - DNA, 131 bp, Homo sapiens; identical to SEQ ID NO: 87586

SEQ ID NO: 87629 - DNA, 201 bp, Homo sapiens; identical to SEQ ID NO: 87587

SEQ ID NO: 87630 - DNA, 201 bp, Homo sapiens; identical to SEQ ID NO: 87588

SEQ ID NO: 87631 - DNA, 201 bp, Homo sapiens; identical to SEQ ID NO: 87589

SEQ ID NO: 87632 - DNA, 201 bp, Homo sapiens; identical to SEQ ID NO: 87590

SEQ ID NO: 87633 - DNA, 201 bp, Homo sapiens; identical to SEQ ID NO: 87591

SEQ ID NO: 87634 - DNA, 201 bp, Homo sapiens; identical to SEQ ID NO: 87592

SEQ ID NO: 87635 - DNA, 143 bp, Homo sapiens
cttctaggctcaagtgatcctcctgcctgtgccgcccaaagtgttggaattacaggcatgagccactgcttctagatggatgtcttttattggcgggggggaaagccctatatacgtatatatgtattttttactaattctaa

SEQ ID NO: 87636 - DNA, 201 bp, Homo sapiens; identical to SEQ ID NO: 87592

SEQ ID NO: 87637 - DNA, 131 bp, Homo sapiens; identical to SEQ ID NO: 87586

SEQ ID NO: 87638 - DNA, 201 bp, Homo sapiens
tgcattttatcccccgcctggggagcagagcagacttgatcaagcagtatggaagatgggccgttgtcagcggtgcaacagatgggattggaaaagcctaygctgaagagttagcaagccgaggtctcaatataatcctgattagtcggaacgaggagaagttgcaggttgttgctaaagacatagccgacacgtacaaag

SEQ ID NO: 87639 - DNA, 201 bp, Homo sapiens
gaatttatgtattgtagtgaatacctttactggtgtgaagataattatgcacaaaccctcacaatacgcgttaacattgaaacctgtgaaatgtccttagkttgggtcatataaagccaaccatttttgaggaccatgtacctagtgctttgaaaactctaagtcactatatgaatatgacaatatgtgcacatttaaaat

SEQ ID NO: 87640 - DNA, 201 bp, Homo sapiens
atgtaatattattccattccagtagcattattgatagaaatagtaagtatttatggaatagtaaaatatggacaaattacgtgtgtgacatatctgtcaawataagttagaagcttattcttggtttgtgtaatgaatttatgtattgtagtgaatacctttactggtgtgaagataattatgcacaaaccctcacaatac

SEQ ID NO: 87641 - DNA, 201 bp, Homo sapiens
acgtaaggaagccttatcctgcacagcctgagtctggatggccacttgagaagttttgccaactcctgggaacctcgatattctgacatttggaaaaacayatttaatttatctcctgtgtttcattgctgattattcagcatactgttgattcgtcatttgcaaaacacacataataccgtcagagtgctgtgaaaaacc

SEQ ID NO: 87642 - DNA, 201 bp, Homo sapiens
aactggtatttcattagagaaccgtgtgtgtgcgtgtgtgtggtgcctttgagcaactttatttatggttaccatatttttaaaaagattttttgtcaggrtgacttaacatggactcttatagggtattaaaacaatctagattattccttttcatcctaaataagcctaccaaatttcatgctgttggtttgccatgaa

SEQ ID NO: 87643 - DNA, 201 bp, Homo sapiens
tcccattctattcagtttctttttgcacagtatatgcctgaatggctctgggtgtggggagcaaatattctcaaccgttcactacgtaaggaagccttatsctgcacagcctgagtctggatggccacttgagaagttttgccaactcctgggaacctcgatattctgacatttggaaaaacacatttaatttatctcctg

SEQ ID NO: 87644 - DNA, 201 bp, Homo sapiens
gatgaagagcaagaccttctctaggttttctagctttcattaaatgtatttttttccccagagctaatttgaaagttgattggaccactgtggatggggtstcattaagaatgtgggaaataggggccgagtgcggtggctcacacctgtaatcccagcagtttggaaggccagggcaggtggatcgcttgatcccaggag

SEQ ID NO: 87645 - DNA, 201 bp, Homo sapiens
gcttagatcatgtcttcagaacttagatgtgaaaatctacacactgggagatgctgtgagccccaaggttttgatggagtttgcttggaatcctcttgacktcatgccacattgacgtgaactttgatgtataataagcagcagcaacttcatgtgaaaatatggtcaggtagttatatgtaaggttacgtggtccagtaa

SEQ ID NO: 87646 - DNA, 201 bp, Homo sapiens
acctaagcacagttttatgaacacaattttgcccatgacattgcctacaggatttccagatgtgacttgcactcagaagatcagtggtcaacttcagaagytcttccacgcttagatcatgtcttcagaacttagatgtgaaaatctacacactgggagatgctgtgagccccaaggttttgatggagtttgcttggaatc

SEQ ID NO: 87647 - DNA, 201 bp, Homo sapiens
tcacaatacgcgttaacattgaaacctgtgaaatgtccttagtttgggtcatataaagccaaccatttttgaggaccatgtacctagtgctttgaaaactstaagtcactatatgaatatgacaatatgtgcacatttaaaattcagagctcggcattgtgatactgatgcagaagctagtagattggttaaaagtctgga

SEQ ID NO: 87648 - DNA, 201 bp, Homo sapiens; identical to SEQ ID NO: 87638

SEQ ID NO: 87649 - DNA, 201 bp, Homo sapiens; identical to SEQ ID NO: 87639

SEQ ID NO: 87650 - DNA, 201 bp, Homo sapiens; identical to SEQ ID NO: 87640

SEQ ID NO: 87651 - DNA, 201 bp, Homo sapiens; identical to SEQ ID NO: 87641

SEQ ID NO: 87652 - DNA, 201 bp, Homo sapiens; identical to SEQ ID NO: 87642

SEQ ID NO: 87653 - DNA, 201 bp, Homo sapiens; identical to SEQ ID NO: 87643

SEQ ID NO: 87654 - DNA, 201 bp, Homo sapiens; identical to SEQ ID NO: 87644

SEQ ID NO: 87655 - DNA, 201 bp, Homo sapiens; identical to SEQ ID NO: 87645

SEQ ID NO: 87656 - DNA, 201 bp, Homo sapiens; identical to SEQ ID NO: 87646

SEQ ID NO: 87657 - DNA, 201 bp, Homo sapiens; identical to SEQ ID NO: 87647

SEQ ID NO: 87658 - DNA, 201 bp, Homo sapiens; identical to SEQ ID NO: 87638

SEQ ID NO: 87659 - DNA, 201 bp, Homo sapiens; identical to SEQ ID NO: 87639

SEQ ID NO: 87660 - DNA, 201 bp, Homo sapiens; identical to SEQ ID NO: 87640

SEQ ID NO: 87661 - DNA, 201 bp, Homo sapiens; identical to SEQ ID NO: 87641

SEQ ID NO: 87662 - DNA, 201 bp, Homo sapiens; identical to SEQ ID NO: 87642

SEQ ID NO: 87663 - DNA, 201 bp, Homo sapiens; identical to SEQ ID NO: 87643

SEQ ID NO: 87664 - DNA, 201 bp, Homo sapiens; identical to SEQ ID NO: 87644

SEQ ID NO: 87665 - DNA, 201 bp, Homo sapiens
gcttagatcatgtcttcagaacttagatgtgaaaatctacacactgggagatgctgtgagccccaaggttttgatggagtttgcttggaatcctcttgacktcatgccacattgacgtgaactttgatgtataataagcagcagcaacttcatgtgaaaatatggtcaggacatgggcaaacatgctgattggtgcaaatg

SEQ ID NO: 87666 - DNA, 201 bp, Homo sapiens; identical to SEQ ID NO: 87646

SEQ ID NO: 87667 - DNA, 201 bp, Homo sapiens; identical to SEQ ID NO: 87647

SEQ ID NO: 87668 - DNA, 201 bp, Homo sapiens
aagtctgtcacctatacctggtttcaccaaatggcttctggggcttctgaactcgcaaacgaaggagcatgggaggaatgaactctttacagattcggaakgtaaggaaatctcggagatcacaggtggccccattaacgagaccctcaagctcctcctcagcagcagcgagtgggtgcagtcggagaagctggtgcgggc

SEQ ID NO: 87669 - DNA, 201 bp, Homo sapiens
aaatcagtgaggctgaggctgtgcatcctgtaaaaaactggatggacatgaagcgccgcgttgggccctacagaaggtgttacttcttttctcactgttcracccctggggagcccctggtcgttttgcacgtggcactgactggtgacatctccagcaacatccaggcaatcgtgaaggaacatcctccatcagaaacag

SEQ ID NO: 87670 - DNA, 201 bp, Homo sapiens
ggtcgttttgcacgtggcactgactggtgacatctccagcaacatccaggcaatcgtgaaggaacatcctccatcagaaacagaagagaagaacaaaatcrctgctgcgatcttttattccatcagcttgacccagcagggactccaaggggtggagctgggaacattcctcataaagcgagtcgtcaaggagttgcagag

SEQ ID NO: 87671 - DNA, 201 bp, Homo sapiens
atcctcctaaggaccggggcgcgtggcccagataagaataggtgttcctttgtgctcataaaacagaatgcggcgatggttgctttagccgtttctcaccmtgcaatgcagagggacaaagggctgtgctacacttcccagttacattctgaagctcataaatgtatgagaaggtttgtgattttgcacaaggtgtgtgta

SEQ ID NO: 87672 - DNA, 201 bp, Homo sapiens
agcagcgggaggcggcggtgctgctgcaggccgaggaccggctgcgctacgcgctggtgccgcgctatcgcggcctcttccaccacatcagcaagctggayggcggcgtgcgcttcctggtgcagctgcgggccgacctgctggaggcgcaggccctcaagctggtggaggggccggacgtccgggaaatgaatggggtgc

SEQ ID NO: 87673 - DNA, 201 bp, Homo sapiens
tcaggaagctgtgcagcctctgccattgccatcccagggggatctggcatcctcctaaggaccggggcgcgtggcccagataagaataggtgttcctttgygctcataaaacagaatgcggcgatggttgctttagccgtttctcaccatgcaatgcagagggacaaagggctgtgctacacttcccagttacattctgaa

SEQ ID NO: 87674 - DNA, 201 bp, Homo sapiens
gctacttcctggaggagacgggccccaacagcacctcctacctcggctccaagatcatcaaagcctctgagcaggtcctcagcctagtggcccagtttcaraagaacagcaagctctgacagtaaacctctcctaaagcacagggccccggctaagaaaacgatcattttcaggaggggccgggagttatgtatctgaagc

SEQ ID NO: 87675 - DNA, 201 bp, Homo sapiens
gatgaggctgtgcgcctggtacctgtatggagagaagcaccgcggctacgcgctgaaccccgtggccaacttccacctgcagaacggggcggtgctgtggygcatcaactggatggcggatgtgagcctcagaggcatcaccggctcctgcggcctgatggccaactaccgctacttcctggaggagacgggccccaacag

SEQ ID NO: 87676 - DNA, 201 bp, Homo sapiens; identical to SEQ ID NO: 87668

SEQ ID NO: 87677 - DNA, 201 bp, Homo sapiens; identical to SEQ ID NO: 87669

SEQ ID NO: 87678 - DNA, 201 bp, Homo sapiens; identical to SEQ ID NO: 87670

SEQ ID NO: 87679 - DNA, 201 bp, Homo sapiens; identical to SEQ ID NO: 87671

SEQ ID NO: 87680 - DNA, 201 bp, Homo sapiens; identical to SEQ ID NO: 87672

SEQ ID NO: 87681 - DNA, 201 bp, Homo sapiens; identical to SEQ ID NO: 87673

SEQ ID NO: 87682 - DNA, 201 bp, Homo sapiens; identical to SEQ ID NO: 87674

SEQ ID NO: 87683 - DNA, 201 bp, Homo sapiens; identical to SEQ ID NO: 87675

SEQ ID NO: 87684 - DNA, 201 bp, Homo sapiens
acctgtccatctgccggaagcagagggccctgccgagcctggatatcgtagtgtggtcggagctgccccccggggcgggcttgggctccagcgccgcctastcggtgtgtctggcagcagccctcctgactgtgtgcgaggagatcccaaacccgctgaaggacggggattgcgtcaacaggtggaccaaggaggatttgg

SEQ ID NO: 87685 - DNA, 201 bp, Homo sapiens
cctcaagccagggctggagcagccagaagtggaggccacgaagcaggccctgaccagctgtggctttgactgcttggaaaccagcatcggtgcccccggcrtctccatccactcagccacctccctggacagccgagtccagcaagccctggatggcctctgagaggagcccacgacactgcagccccacccagatgcccc

SEQ ID NO: 87686 - DNA, 201 bp, Homo sapiens
gtccagtccgcggggtgactccacccacagctggccgcgccaccgctcaggattcccaggagccatgttgtcagaagtcctactggtgtctgctccggggwaagtcatccttcatggagaacatgccgtggtacatggcaaggtagcactggctgtatccttgaacttgagaacattcctccggcttcaaccccacagcaa

SEQ ID NO: 87687 - DNA, 201 bp, Homo sapiens
ctgtccatctgccggaagcagagggccctgccgagcctggatatcgtagtgtggtcggagctgccccccggggcgggcttgggctccagcgccgcctactyggtgtgtctggcagcagccctcctgactgtgtgcgaggagatcccaaacccgctgaaggacggggattgcgtcaacaggtggaccaaggaggatttggag

SEQ ID NO: 87688 - DNA, 201 bp, Homo sapiens
cttatacctgtccatctgccggaagcagagggccctgccgagcctggatatcgtagtgtggtcggagctgccccccggggcgggcttgggctccagcgccrcctactcggtgtgtctggcagcagccctcctgactgtgtgcgaggagatcccaaacccgctgaaggacggggattgcgtcaacaggtggaccaaggagga

SEQ ID NO: 87689 - DNA, 201 bp, Homo sapiens
cgtgctggaagagctcattgacatgaaccagcaccatctgaatgccctcggcgtgggccacgcctctctggaccagctctgccaggtgaccagggcccgcrgacttcacagcaagctgactggcgcaggcggtggtggctgtggcatcacactcctcaagccagggctggagcagccagaagtggaggccacgaagcaggc

SEQ ID NO: 87690 - DNA, 201 bp, Homo sapiens
caggccgcacacagccatgagccaggctgcttgacgggacctgaccccgccaggttcccgtccagtccgcggggtgactccacccacagctggccgcgccrccgctcaggattcccaggagccatgttgtcagaagtcctactggtgtctgctccggggaaagtcatccttcatggagaacatgccgtggtacatggcaag

SEQ ID NO: 87691 - DNA, 201 bp, Homo sapiens
gtccctcgcaataccagggcccttgtggctggcgtcagaaacaggctgctcaagttcccagagatcgtggcccccctcctgacctcaatagatgccatctycctggagtgtgagcgcgtgctgggagagatgggggaagccccagccccggagcagtacctcgtgctggaagagctcattgacatgaaccagcaccatctg

SEQ ID NO: 87692 - DNA, 201 bp, Homo sapiens
cagggcccttgtggctggcgtcagaaacaggctgctcaagttcccagagatcgtggcccccctcctgacctcaatagatgccatctccctggagtgtgagygcgtgctgggagagatgggggaagccccagccccggagcagtacctcgtgctggaagagctcattgacatgaaccagcaccatctgaatgccctcggcgt

SEQ ID NO: 87693 - DNA, 188 bp, Homo sapiens
agccactcacctgtccccgtcttccacgccctgagggccgcggctctggaaacggggatacaggagcctggcggcgccgaagcaccckcgcaggccaagacggctccccaggccaagacggctccccaggccgcacacagccatgagccaggctgcttgacgggacctgaccccgccaggttcccgtc

SEQ ID NO: 87694 - DNA, 201 bp, Homo sapiens
ctggctgtatccttgaacttgagaacattcctccggcttcaaccccacagcaatgggaaagtggacctcagcttacccaacattggtatcaagcgggcctrggatgtggccaggcttcagtcactggacacaagctttctggggtctcactctgttatgcagcctggagtacagtggtgcgaccacagctcactgtttctt

SEQ ID NO: 87695 - DNA, 189 bp, Homo sapiens
agccactcacctgtccccgtcttccacgccctgagggccgcggctctggaaacggggatacaggagcctggcggcgccgaagcacccgygcaggccaagacggctccccaggccaagacggctccccaggccgcacacagccatgagccaggctgcttgacgggacctgaccccgccaggttcccgtcc

SEQ ID NO: 87696 - DNA, 201 bp, Homo sapiens
ctgtcaccgagcgcctggctgtgctggcctttctttacttatacctgtccatctgccggaagcagagggccctgccgagcctggatatcgtagtgtggtcrgagctgccccccggggcgggcttgggctccagcgccgcctactcggtgtgtctggcagcagccctcctgactgtgtgcgaggagatcccaaacccgctga

SEQ ID NO: 87697 - DNA, 201 bp, Homo sapiens
gaacatgccgtggtacatggcaaggtagcactggctgtatccttgaacttgagaacattcctccggcttcaaccccacagcaatgggaaagtggacctcarcttacccaacattggtatcaagcgggcctgggatgtggccaggcttcagtcactggacacaagctttctggggtctcactctgttatgcagcctggagta

SEQ ID NO: 87698 - DNA, 201 bp, Homo sapiens
tgccccccggggcgggcttgggctccagcgccgcctactcggtgtgtctggcagcagccctcctgactgtgtgcgaggagatcccaaacccgctgaaggayggggattgcgtcaacaggtggaccaaggaggatttggagctaattaacaagtgggccttccaaggggagagaatgattcacgggaacccctccggagtgg

SEQ ID NO: 87699 - DNA, 201 bp, Homo sapiens
ggccacgaagcaggccctgaccagctgtggctttgactgcttggaaaccagcatcggtgcccccggcgtctccatccactcagccacctccctggacagcygagtccagcaagccctggatggcctctgagaggagcccacgacactgcagccccacccagatgcccctttctggattattctgggggctgcagttcgact

SEQ ID NO: 87700 - DNA, 201 bp, Homo sapiens
atagatgccatctccctggagtgtgagcgcgtgctgggagagatgggggaagccccagccccggagcagtacctcgtgctggaagagctcattgacatgamccagcaccatctgaatgccctcggcgtgggccacgcctctctggaccagctctgccaggtgaccagggcccgcggacttcacagcaagctgactggcgca

SEQ ID NO: 87701 - DNA, 201 bp, Homo sapiens
cgccagctctccagatcctgctgaccaacaccaaagtccctcgcaataccagggcccttgtggctggcgtcagaaacaggctgctcaagttcccagagatmgtggcccccctcctgacctcaatagatgccatctccctggagtgtgagcgcgtgctgggagagatgggggaagccccagccccggagcagtacctcgtgc

SEQ ID NO: 87702 - DNA, 201 bp, Homo sapiens
tggggaggagccctccgataccatcaagggaagatttcatccttaaagaggtcgccagctctccagatcctgctgaccaacaccaaagtccctcgcaataycagggcccttgtggctggcgtcagaaacaggctgctcaagttcccagagatcgtggcccccctcctgacctcaatagatgccatctccctggagtgtgag

SEQ ID NO: 87703 - DNA, 201 bp, Homo sapiens
cacccacagctggccgcgccaccgctcaggattcccaggagccatgttgtcagaagtcctactggtgtctgctccggggaaagtcatccttcatggagaamatgccgtggtacatggcaaggtagcactggctgtatccttgaacttgagaacattcctccggcttcaaccccacagcaatgggaaagtggacctcagctt

SEQ ID NO: 87704 - DNA, 201 bp, Homo sapiens
gcgcgtgctgggagagatgggggaagccccagccccggagcagtacctcgtgctggaagagctcattgacatgaaccagcaccatctgaatgccctcggcrtgggccacgcctctctggaccagctctgccaggtgaccagggcccgcggacttcacagcaagctgactggcgcaggcggtggtggctgtggcatcacact

SEQ ID NO: 87705 - DNA, 201 bp, Homo sapiens
acccacagctggccgcgccaccgctcaggattcccaggagccatgttgtcagaagtcctactggtgtctgctccggggaaagtcatccttcatggagaacmtgccgtggtacatggcaaggtagcactggctgtatccttgaacttgagaacattcctccggcttcaaccccacagcaatgggaaagtggacctcagctta

SEQ ID NO: 87706 - DNA, 201 bp, Homo sapiens
caggtggaccaaggaggatttggagctaattaacaagtgggccttccaaggggagagaatgattcacgggaacccctccggagtggacaatgctgtcagcrcctggggaggagccctccgataccatcaagggaagatttcatccttaaagaggtcgccagctctccagatcctgctgaccaacaccaaagtccctcgcaa

SEQ ID NO: 87707 - DNA, 201 bp, Homo sapiens; identical to SEQ ID NO: 87684

SEQ ID NO: 87708 - DNA, 201 bp, Homo sapiens; identical to SEQ ID NO: 87687

SEQ ID NO: 87709 - DNA, 201 bp, Homo sapiens; identical to SEQ ID NO: 87685

SEQ ID NO: 87710 - DNA, 201 bp, Homo sapiens; identical to SEQ ID NO: 87688

SEQ ID NO: 87711 - DNA, 201 bp, Homo sapiens
ccggcttcggcgcggaggggcggcggccggggaggcggcggcggcggcaggattcccaggagccatgttgtcagaagtcctactggtgtctgctccggggwaagtcatccttcatggagaacatgccgtggtacatggcaaggtagcactggctgtatccttgaacttgagaacattcctccggcttcaaccccacagcaa

SEQ ID NO: 87712 - DNA, 201 bp, Homo sapiens; identical to SEQ ID NO: 87689

SEQ ID NO: 87713 - DNA, 201 bp, Homo sapiens; identical to SEQ ID NO: 87691

SEQ ID NO: 87714 - DNA, 201 bp, Homo sapiens; identical to SEQ ID NO: 87692

SEQ ID NO: 87715 - DNA, 201 bp, Homo sapiens
ctggctgtatccttgaacttgagaacattcctccggcttcaaccccacagcaatgggaaagtggacctcagcttacccaacattggtatcaagcgggcctrggatgtggccaggcttcagtcactggacacaagctttctggagcaaggtgatgtcacaacacccacctcagagcaagtggagaagctaaaggaggttgca

SEQ ID NO: 87716 - DNA, 201 bp, Homo sapiens; identical to SEQ ID NO: 87696

SEQ ID NO: 87717 - DNA, 201 bp, Homo sapiens; identical to SEQ ID NO: 87699

SEQ ID NO: 87718 - DNA, 201 bp, Homo sapiens; identical to SEQ ID NO: 87698

SEQ ID NO: 87719 - DNA, 201 bp, Homo sapiens
gaacatgccgtggtacatggcaaggtagcactggctgtatccttgaacttgagaacattcctccggcttcaaccccacagcaatgggaaagtggacctcarcttacccaacattggtatcaagcgggcctgggatgtggccaggcttcagtcactggacacaagctttctggagcaaggtgatgtcacaacacccacctca

SEQ ID NO: 87720 - DNA, 201 bp, Homo sapiens; identical to SEQ ID NO: 87701

SEQ ID NO: 87721 - DNA, 201 bp, Homo sapiens; identical to SEQ ID NO: 87700

SEQ ID NO: 87722 - DNA, 201 bp, Homo sapiens; identical to SEQ ID NO: 87702

SEQ ID NO: 87723 - DNA, 201 bp, Homo sapiens
ggcggccggggaggcggcggcggcggcaggattcccaggagccatgttgtcagaagtcctactggtgtctgctccggggaaagtcatccttcatggagaamatgccgtggtacatggcaaggtagcactggctgtatccttgaacttgagaacattcctccggcttcaaccccacagcaatgggaaagtggacctcagctt

SEQ ID NO: 87724 - DNA, 201 bp, Homo sapiens
gcggccggggaggcggcggcggcggcaggattcccaggagccatgttgtcagaagtcctactggtgtctgctccggggaaagtcatccttcatggagaacmtgccgtggtacatggcaaggtagcactggctgtatccttgaacttgagaacattcctccggcttcaaccccacagcaatgggaaagtggacctcagctta

SEQ ID NO: 87725 - DNA, 201 bp, Homo sapiens; identical to SEQ ID NO: 87704

SEQ ID NO: 87726 - DNA, 201 bp, Homo sapiens; identical to SEQ ID NO: 87706

SEQ ID NO: 87727 - DNA, 201 bp, Homo sapiens
gtggcagcaaagcaggggccacccgtctccacagtccttcagagtttcagctgcatcctggtgtcccacccaggtcgagcccccaggcttctggaaaagartgtgtgctctactttgatggaaacatggcaaggaatttaaagacaggaatgtattaatattattgaaggtgtgttcgtaacctctgattctgtggacttg

SEQ ID NO: 87728 - DNA, 201 bp, Homo sapiens
cagtggcagcaaagcaggggccacccgtctccacagtccttcagagtttcagctgcatcctggtgtcccacccaggtcgagcccccaggcttctggaaaasagtgtgtgctctactttgatggaaacatggcaaggaatttaaagacaggaatgtattaatattattgaaggtgtgttcgtaacctctgattctgtggact

SEQ ID NO: 87729 - DNA, 201 bp, Homo sapiens
cctgccttgaagccacgcgctccacgccgcggccctcccattttctgcgtcctcagcgggctgagctgccagagagtcttcccggacctattcccgtcctrtgcattcacattggcatcctggtttgggggaagaaaaacaacggcccttagcagcagccccgtttccagaatgtgctgcctgttccccaaagcctgcttg

SEQ ID NO: 87730 - DNA, 201 bp, Homo sapiens
acaccgtgagtccaaggcgctgctcctgccttgaagccacgcgctccacgccgcggccctcccattttctgcgtcctcagcgggctgagctgccagagagycttcccggacctattcccgtcctatgcattcacattggcatcctggtttgggggaagaaaaacaacggcccttagcagcagccccgtttccagaatgtgc

SEQ ID NO: 87731 - DNA, 201 bp, Homo sapiens
ggggaccccagactgtcagcacagggaagatggatcccatcctaatttttatcacctgaaggttggaaccagtgagggactgggagagagtgatttataarcaccaatatcaacttcatgtggatttttgacaaggaggggtagtttgtaatttcatttaaattcttttcagcagctggaaatattgcactatctgaaaca

SEQ ID NO: 87732 - DNA, 201 bp, Homo sapiens
ccaaacgctcggttcctttgaagatttcttctgaacgtgtgtgcgcacgctgggcgggttcgtgcatacatgcggggaccccagactgtcagcacagggargatggatcccatcctaatttttatcacctgaaggttggaaccagtgagggactgggagagagtgatttataagcaccaatatcaacttcatgtggatttt

SEQ ID NO: 87733 - DNA, 201 bp, Homo sapiens
tgtgttcgtaacctctgattctgtggacttgccactttctccaaacgctcggttcctttgaagatttcttctgaacgtgtgtgcgcacgctgggcgggttygtgcatacatgcggggaccccagactgtcagcacagggaagatggatcccatcctaatttttatcacctgaaggttggaaccagtgagggactgggagag

SEQ ID NO: 87734 - DNA, 105 bp, Homo sapiens
ggctcttgatggctctaaaaagttgtaggattttttgtttttgtagctaacttatggattgagatgtgatcaaaggctttattaaatttgtacttcagcawatga

SEQ ID NO: 87735 - DNA, 201 bp, Homo sapiens
tgagattgatctggaagatttaaagaagcacacagtctactacggtggtttccatggaagtcacagagtcatcatctggctctgggatattctggcctccracttcacaccggatgagagagctatgtttctgaagttcgtgaccagctgctccagacccccgctcctgggattcgcctacctcaagcctccattctccat

SEQ ID NO: 87736 - DNA, 201 bp, Homo sapiens
agctgcatcctggtgtcccacccaggtcgagcccccaggcttctggaaaagagtgtgtgctctactttgatggaaacatggcaaggaatttaaagacaggratgtattaatattattgaaggtgtgttcgtaacctctgattctgtggacttgccactttctccaaacgctcggttcctttgaagatttcttctgaacgtg

SEQ ID NO: 87737 - DNA, 201 bp, Homo sapiens
tcaccatccgcaagcgggagccaggcggccgcctgcccacctcctccacctgcttcaacctgctcaagctgcccaactacagcaagaagagcgtcctccgygagaagctgcgctacgccatcagcatgaacacgggctttgaactctcctagctcctgtcccagccctgcctccagggctcctgggctgccagggaccttc

SEQ ID NO: 87738 - DNA, 201 bp, Homo sapiens
aaagaagcacacagtctactacggtggtttccatggaagtcacagagtcatcatctggctctgggatattctggcctccgacttcacaccggatgagagakctatgtttctgaagttcgtgaccagctgctccagacccccgctcctgggattcgcctacctcaagcctccattctccatccgctgcgtggaggtgtcgga

SEQ ID NO: 87739 - DNA, 201 bp, Homo sapiens
aacgctcggttcctttgaagatttcttctgaacgtgtgtgcgcacgctgggcgggttcgtgcatacatgcggggaccccagactgtcagcacagggaagawggatcccatcctaatttttatcacctgaaggttggaaccagtgagggactgggagagagtgatttataagcaccaatatcaacttcatgtggatttttga

SEQ ID NO: 87740 - DNA, 201 bp, Homo sapiens
cccatcctaatttttatcacctgaaggttggaaccagtgagggactgggagagagtgatttataagcaccaatatcaacttcatgtggatttttgacaagraggggtagtttgtaatttcatttaaattcttttcagcagctggaaatattgcactatctgaaacactgaatctccttttgtaactggtgttcactgacac

SEQ ID NO: 87741 - DNA, 201 bp, Homo sapiens
atgggcaacctcctacacttgggctccctcagccccagagtgttagaggaggagacagatgggttcgtgagtttgctcacccagacgctgtgctactgtcrgaagtatgtgtctcagaagaagtccaacctgacccactggcatcctgtccttggctggttctcccaatctgtggattatggccttaacgagtcaatgcac

SEQ ID NO: 87742 - DNA, 201 bp, Homo sapiens
aaaaccaaacagctgccctcattagcggattccgttccattatcaaacccgagtggatccgaatgttctcaactcctgaactgcagcgtctcatctctggygacaatgctgagattgatctggaagatttaaagaagcacacagtctactacggtggtttccatggaagtcacagagtcatcatctggctctgggatattc

SEQ ID NO: 87743 - DNA, 201 bp, Homo sapiens
tgggctgagacagtggcagctgcggccccgaccccaagtgcggggacctccggcgaataaagaaaaaataacaagcttttctgaagtgagaagctgttctyagccacgagtcctgtgcaagatcactaatgattacctggcatttctgcgacacaggcaggtcctcagggtttgtgcaagtttgcaaacatgttcaccctg

SEQ ID NO: 87744 - DNA, 201 bp, Homo sapiens
ctgagattgatctggaagatttaaagaagcacacagtctactacggtggtttccatggaagtcacagagtcatcatctggctctgggatattctggcctcygacttcacaccggatgagagagctatgtttctgaagttcgtgaccagctgctccagacccccgctcctgggattcgcctacctcaagcctccattctcca

SEQ ID NO: 87745 - DNA, 201 bp, Homo sapiens
cattttccggaactggatgcttgcttcctggcggggttctgaaagcgaacaccgcggggcaagatggcggtagtgcgtcggctgctgccccgggtctggcrgaactcgggtgttttgggctgagacagtggcagctgcggccccgaccccaagtgcggggacctccggcgaataaagaaaaaataacaagcttttctgaag

SEQ ID NO: 87746 - DNA, 201 bp, Homo sapiens
ggcttatggtgctgtacgagcgggactgccggcggcgcttcacccccgaggaccactggctgcgaaaggatctcaaacctagcgtgctcttccaagaactygacagggacagaaaacgggcacagttgatcctgcagtacatcccacatgtcatccctcacaaaaacagagttctactgtttcgaaccatggttaccaagg

SEQ ID NO: 87747 - DNA, 201 bp, Homo sapiens
tggttaccaaggagaaggagaaactggggctggtggaaaccagctctgcctccccgcatgtcactcacatcaccatccgccggtccaggatgctggaggayggctacgagcagcttaggcagctctcccagcacgccatgaagggggtcatccgtgtgaagtttgtcaatgacctcggggtggacgaagcagggattgatc

SEQ ID NO: 87748 - DNA, 201 bp, Homo sapiens
gatcccatcctaatttttatcacctgaaggttggaaccagtgagggactgggagagagtgatttataagcaccaatatcaacttcatgtggatttttgacraggaggggtagtttgtaatttcatttaaattcttttcagcagctggaaatattgcactatctgaaacactgaatctccttttgtaactggtgttcactga

SEQ ID NO: 87749 - DNA, 201 bp, Homo sapiens
gctgtgattttctcaagcagctcaagcctgaaatcctgcaggactcccgactcatcaccctgtacctcacgatgcttgtcaccttcacagacacttcaacrtggaaaattcttcggggaaaaggtgaaagtcttcgaccagcgatgaaccacatttgtgcaaatataatgggacatctcaaccagcatggattttattctg

SEQ ID NO: 87750 - DNA, 201 bp, Homo sapiens
tccttggctggttctcccaatctgtggattatggccttaacgagtcaatgcacttgatcaccaaacagctgcagttcttgtggggggtgcctctgatccgsatcttcttctgtgacatcctgagcaagaagctactggagagccaggagccagcccacgcacagccagcatcccctcagaatgtgctcccagtgaagagtc

SEQ ID NO: 87751 - DNA, 201 bp, Homo sapiens; identical to SEQ ID NO: 87727

SEQ ID NO: 87752 - DNA, 201 bp, Homo sapiens; identical to SEQ ID NO: 87728

SEQ ID NO: 87753 - DNA, 201 bp, Homo sapiens; identical to SEQ ID NO: 87729

SEQ ID NO: 87754 - DNA, 201 bp, Homo sapiens; identical to SEQ ID NO: 87730

SEQ ID NO: 87755 - DNA, 201 bp, Homo sapiens; identical to SEQ ID NO: 87731

SEQ ID NO: 87756 - DNA, 201 bp, Homo sapiens; identical to SEQ ID NO: 87732

SEQ ID NO: 87757 - DNA, 201 bp, Homo sapiens; identical to SEQ ID NO: 87733

SEQ ID NO: 87758 - DNA, 105 bp, Homo sapiens; identical to SEQ ID NO: 87734

SEQ ID NO: 87759 - DNA, 201 bp, Homo sapiens; identical to SEQ ID NO: 87735

SEQ ID NO: 87760 - DNA, 201 bp, Homo sapiens; identical to SEQ ID NO: 87736

SEQ ID NO: 87761 - DNA, 201 bp, Homo sapiens; identical to SEQ ID NO: 87737

SEQ ID NO: 87762 - DNA, 201 bp, Homo sapiens; identical to SEQ ID NO: 87738

SEQ ID NO: 87763 - DNA, 201 bp, Homo sapiens; identical to SEQ ID NO: 87739

SEQ ID NO: 87764 - DNA, 201 bp, Homo sapiens; identical to SEQ ID NO: 87740

SEQ ID NO: 87765 - DNA, 201 bp, Homo sapiens; identical to SEQ ID NO: 87741

SEQ ID NO: 87766 - DNA, 201 bp, Homo sapiens; identical to SEQ ID NO: 87742

SEQ ID NO: 87767 - DNA, 201 bp, Homo sapiens
tgggctgagacagtggcagctgcggccccgaccccaagtgcggggacctccggcgaataaagaaaaaataacaagcttttctgaagtgagaagctgttctyagccacgagtcctgtgcaagatcactaatgattacctggcatttctgcgacacaggcaggtcctcagcatggttcatcgatagagcccgtcaggcacgag

SEQ ID NO: 87768 - DNA, 201 bp, Homo sapiens; identical to SEQ ID NO: 87744

SEQ ID NO: 87769 - DNA, 201 bp, Homo sapiens; identical to SEQ ID NO: 87745

SEQ ID NO: 87770 - DNA, 201 bp, Homo sapiens; identical to SEQ ID NO: 87746

SEQ ID NO: 87771 - DNA, 201 bp, Homo sapiens; identical to SEQ ID NO: 87747

SEQ ID NO: 87772 - DNA, 201 bp, Homo sapiens; identical to SEQ ID NO: 87748

SEQ ID NO: 87773 - DNA, 201 bp, Homo sapiens; identical to SEQ ID NO: 87749

SEQ ID NO: 87774 - DNA, 201 bp, Homo sapiens; identical to SEQ ID NO: 87750

SEQ ID NO: 87775 - DNA, 201 bp, Homo sapiens; identical to SEQ ID NO: 87727

SEQ ID NO: 87776 - DNA, 201 bp, Homo sapiens; identical to SEQ ID NO: 87728

SEQ ID NO: 87777 - DNA, 201 bp, Homo sapiens
gtcagtcctccgagtggtggggctggggactttgagggagttggctctagggcacagtccctgcctggccaggtcggaggaacaagtgctgggatctggcktgtgtgctccaggggctctttccgcggccctttccacctcttttcactttggggacggtaggcctttataaacggactaatgctgggtgatttgttcctg

SEQ ID NO: 87778 - DNA, 201 bp, Homo sapiens; identical to SEQ ID NO: 87729

SEQ ID NO: 87779 - DNA, 201 bp, Homo sapiens; identical to SEQ ID NO: 87730

SEQ ID NO: 87780 - DNA, 201 bp, Homo sapiens; identical to SEQ ID NO: 87731

SEQ ID NO: 87781 - DNA, 201 bp, Homo sapiens; identical to SEQ ID NO: 87732

SEQ ID NO: 87782 - DNA, 201 bp, Homo sapiens; identical to SEQ ID NO: 87733

SEQ ID NO: 87783 - DNA, 105 bp, Homo sapiens; identical to SEQ ID NO: 87734

SEQ ID NO: 87784 - DNA, 201 bp, Homo sapiens; identical to SEQ ID NO: 87735

SEQ ID NO: 87785 - DNA, 201 bp, Homo sapiens; identical to SEQ ID NO: 87737

SEQ ID NO: 87786 - DNA, 201 bp, Homo sapiens; identical to SEQ ID NO: 87738

SEQ ID NO: 87787 - DNA, 201 bp, Homo sapiens; identical to SEQ ID NO: 87736

SEQ ID NO: 87788 - DNA, 201 bp, Homo sapiens; identical to SEQ ID NO: 87739

SEQ ID NO: 87789 - DNA, 201 bp, Homo sapiens; identical to SEQ ID NO: 87741

SEQ ID NO: 87790 - DNA, 201 bp, Homo sapiens; identical to SEQ ID NO: 87740

SEQ ID NO: 87791 - DNA, 201 bp, Homo sapiens; identical to SEQ ID NO: 87742

SEQ ID NO: 87792 - DNA, 201 bp, Homo sapiens
ctgggccccaggactcacctaaactggagttcgaatactgttcgctcgctgtgtgaccttggaaaaaataacaagcttttctgaagtgagaagctgttctyagccacgagtcctgtgcaagatcactaatgattacctggcatttctgcgacacaggcaggtcctcagggtttgtgcaagtttgcaaacatgttcaccctg

SEQ ID NO: 87793 - DNA, 201 bp, Homo sapiens; identical to SEQ ID NO: 87744

SEQ ID NO: 87794 - DNA, 201 bp, Homo sapiens; identical to SEQ ID NO: 87748

SEQ ID NO: 87795 - DNA, 201 bp, Homo sapiens
cattttccggaactggatgcttgcttcctggcggggttctgaaagcgaacaccgcggggcaagatggcggtagtgcgtcggctgctgccccgggtctggcrgaactcgggtgttttgggctgagacagtggcagctgcggccccgaccccaagtgcggggacctccggcgaataaaggtcggcctgcgggtaggccggtag

SEQ ID NO: 87796 - DNA, 201 bp, Homo sapiens; identical to SEQ ID NO: 87746

SEQ ID NO: 87797 - DNA, 201 bp, Homo sapiens; identical to SEQ ID NO: 87747

SEQ ID NO: 87798 - DNA, 201 bp, Homo sapiens; identical to SEQ ID NO: 87749

SEQ ID NO: 87799 - DNA, 201 bp, Homo sapiens; identical to SEQ ID NO: 87750

SEQ ID NO: 87800 - DNA, 201 bp, Homo sapiens
caaggctgacatccaccagactgatttctccgatgttgcacttggctggcttatgcctctgagatcggtgccacggctgtatttatttcagttgtcactgmtgctccctcctgctatgaaacgacactgccagtgccagcagtgtccttgggaaaggcaatatttatgaagggcagaagaggcagccccaagaacctaaag

SEQ ID NO: 87801 - DNA, 121 bp, Homo sapiens
ggtgctcagtgtttgcaaaacagagctgaaaacggactttgggaggccgaggcaggcagatcacctgaggtcaggagtttgagaccagcctggtcaacatrgtaaaaccccatttctgcta

SEQ ID NO: 87802 - DNA, 201 bp, Homo sapiens
ctcacccagagaggctcaaagcagccttttgtcccagctcagctttgatctacacctcttgccaccttcctcaagggactgtgaccctttggggattctgyccctgaccctgcttccccaagctctcctgggtcttggagggatgtgggaatgaattggcattgcaggaaagacaggtaaagtgattgctgcaatgagaag

SEQ ID NO: 87803 - DNA, 201 bp, Homo sapiens
tgcaatgagaaggagctgtgcggaaaaggaataaaagttggaaaggctggagccgtgtgtgtgtgtgtgtgtgtgtgtgtgtgtgtgtgtgtgtgtgtgagagagagccctcccactgccagctcaggttgttcacagatttggaatgggaccagaggcccttgaaaatgtaattgtgatttacctgtgccaaaggtgctt

SEQ ID NO: 87804 - DNA, 201 bp, Homo sapiens
ctgcaatgagaaggagctgtgcggaaaaggaataaaagttggaaaggctggagccgtgtgtgtgtgtgtgtgtgtgtgtgtgtgtgtgtgtgtgtgtgtgagagagagccctcccactgccagctcaggttgttcacagatttggaatgggaccagaggcccttgaaaatgtaattgtgatttacctgtgccaaaggtgct

SEQ ID NO: 87805 - DNA, 201 bp, Homo sapiens
gctgcaatgagaaggagctgtgcggaaaaggaataaaagttggaaaggctggagccgtgtgtgtgtgtgtgtgtgtgtgtgtgtgtgtgtgtgtgtgtgtgagagagagccctcccactgccagctcaggttgttcacagatttggaatgggaccagaggcccttgaaaatgtaattgtgatttacctgtgccaaaggtgc

SEQ ID NO: 87806 - DNA, 201 bp, Homo sapiens
tgctgcaatgagaaggagctgtgcggaaaaggaataaaagttggaaaggctggagccgtgtgtgtgtgtgtgtgtgtgtgtgtgtgtgtgtgtgtgtgtgwgagagagagccctcccactgccagctcaggttgttcacagatttggaatgggaccagaggcccttgaaaatgtaattgtgatttacctgtgccaaaggtg

SEQ ID NO: 87807 - DNA, 201 bp, Homo sapiens
attgctgcaatgagaaggagctgtgcggaaaaggaataaaagttggaaaggctggagccgtgtgtgtgtgtgtgtgtgtgtgtgtgtgtgtgtgtgtgtgwgtgagagagagccctcccactgccagctcaggttgttcacagatttggaatgggaccagaggcccttgaaaatgtaattgtgatttacctgtgccaaagg

SEQ ID NO: 87808 - DNA, 201 bp, Homo sapiens
gagaaggagctgtgcggaaaaggaataaaagttggaaaggctggagccgtgtgtgtgtgtgtgtgtgtgtgtgtgtgtgtgtgtgtgtgtgtgagagagarccctcccactgccagctcaggttgttcacagatttggaatgggaccagaggcccttgaaaatgtaattgtgatttacctgtgccaaaggtgctttaaatg

SEQ ID NO: 87809 - DNA, 201 bp, Homo sapiens
tgattgctgcaatgagaaggagctgtgcggaaaaggaataaaagttggaaaggctggagccgtgtgtgtgtgtgtgtgtgtgtgtgtgtgtgtgtgtgtgwgtgtgagagagagccctcccactgccagctcaggttgttcacagatttggaatgggaccagaggcccttgaaaatgtaattgtgatttacctgtgccaaa

SEQ ID NO: 87810 - DNA, 201 bp, Homo sapiens
gacgggaacctggcggggtcaggtcccgtcaagcagcctggctcatggctgtgtgcggcctggggagccgtcttggcctggggagccgtcttggcctgcgmgggtgcttcggcgccgccaggctcctgtatccccgtttccagagccgcggccctcagggcgtggaagacggggacaggccacagccttcctcgaagacac

SEQ ID NO: 87811 - DNA, 201 bp, Homo sapiens
ggacgggaacctggcggggtcaggtcccgtcaagcagcctggctcatggctgtgtgcggcctggggagccgtcttggcctggggagccgtcttggcctgcrcgggtgcttcggcgccgccaggctcctgtatccccgtttccagagccgcggccctcagggcgtggaagacggggacaggccacagccttcctcgaagaca

SEQ ID NO: 87812 - DNA, 201 bp, Homo sapiens
atgacccatcggccgagtctgagggactctgaaatcacagaaagtgggagcttggaggatccctccatggcgatggccgtggagagaggagcttgcccttytggggtcctggttcctgaagagctcacccagagaggctcaaagcagccttttgtcccagctcagctttgatctacacctcttgccaccttcctcaaggga

SEQ ID NO: 87813 - DNA, 201 bp, Homo sapiens
attagtcacagaaaagggccatacatttgccgaagagcttcagaaaatccagtgcacattgcaggacgtcggctcggccctggcgacaccatgctcctcgrcccgggaggctcacttaaagtataccacgttcaaggcggggcccatcctggagctggagcagtggatcgacaagtacaccagccagctcccaccactcac

SEQ ID NO: 87814 - DNA, 201 bp, Homo sapiens
gagacaaagggttttctagtaccttcacaggagaaaggagacccaaagatgaccaagtgtttgaagccgtgggaactacagatgaattaagttcagctatygggtttgctctggaattagtcacagaaaagggccatacatttgccgaagagcttcagaaaatccagtgcacattgcaggacgtcggctcggccctggcga

SEQ ID NO: 87815 - DNA, 201 bp, Homo sapiens
atggccgtggagagaggagcttgcccttctggggtcctggttcctgaagagctcacccagagaggctcaaagcagccttttgtcccagctcagctttgatytacacctcttgccaccttcctcaagggactgtgaccctttggggattctgtccctgaccctgcttccccaagctctcctgggtcttggagggatgtggga

SEQ ID NO: 87816 - DNA, 201 bp, Homo sapiens
tcgggaggcaagatcagctcggcgctgcatttctgccgggccgtgtgccgccgggccgagagacgtgtggtgcctcttgtccagatgggagagaccgatgygaacgtggccaagttcttaaacagactcagtgactatctcttcacgctagccagatatgcagccatgaaggaggggaatcaagagaaaatatacaagaaa

SEQ ID NO: 87817 - DNA, 201 bp, Homo sapiens
gatgcgaacgtggccaagttcttaaacagactcagtgactatctcttcacgctagccagatatgcagccatgaaggaggggaatcaagagaaaatatacawgaaaaatgacccatcggccgagtctgagggactctgaaatcacagaaagtgggagcttggaggatccctccatggcgatggccgtggagagaggagcttg

SEQ ID NO: 87818 - DNA, 201 bp, Homo sapiens
aagtgtgtgtgatgggggtgcagcttagaggaccccctctgaaagggatggagatgctgatgagaacaacactaccacttgaaggtgaacattccctgtckggttggactgagtcaagggtctgcggtgcagcatcttcagcttgagaaaatgaggttgtcagtttccagcaaggctgacatccaccagactgatttctcc

SEQ ID NO: 87819 - DNA, 201 bp, Homo sapiens
ttcagcttgagaaaatgaggttgtcagtttccagcaaggctgacatccaccagactgatttctccgatgttgcacttggctggcttatgcctctgagatcsgtgccacggctgtatttatttcagttgtcactgctgctccctcctgctatgaaacgacactgccagtgccagcagtgtccttgggaaaggcaatatttat

SEQ ID NO: 87820 - DNA, 189 bp, Homo sapiens
cttccaggaggtggctttgttccgtgcctccctgcccccatcgtcactaccaggtctggtacggagtcggtgctcagtgtttgcaaaacagagctgaaaayggactttgggaggccgaggcaggcagatcacctgaggtcaggagtttgagaccagcctggtcaacatggtaaaaccccatttctgcta

SEQ ID NO: 87821 - DNA, 201 bp, Homo sapiens
gttcccgtcgttttctgagcggcttcgtggctggggctgtagtgggcgctgcgggagctgggctcgcggccctgcagttcttccggagtcagggcgctgarggagcgttgacagggaagcagccggatggatctgcagaaaaggctgtcttggaacaatttggattccctttaactggaacagaggcaaggtgttacacta

SEQ ID NO: 87822 - DNA, 201 bp, Homo sapiens
tgaccttacctcagactagaggcgatggaaagaaaatagttagttaccaggtgattggcgaggacaacgtggcagtcccctcacacctttataaggaccaygctggctgctgtgttgagagcccgctggggacaaggaccagtgaggaggccactgcaagaatccaggagagagatgatggcggctcagaccagcgcagtg

SEQ ID NO: 87823 - DNA, 201 bp, Homo sapiens
acagtggaatcctaaatttatgactaaaaattcccccaaaagatgaaagatctacaatgtttttgtcagtattatatttgactcaggaactaattattaakggagctttgacacctgcagatggagggctgatcttgtgtcaagttaacaggaagactgcccacagatgacactgcatttgtatccctgtggatgtagagt

SEQ ID NO: 87824 - DNA, 201 bp, Homo sapiens; identical to SEQ ID NO: 87821

SEQ ID NO: 87825 - DNA, 201 bp, Homo sapiens
tgtctgtgatgtatctgcccagccttctcagaactcaatgttgtacatttttccctctaggacctgaattggtcttggaggcagcttttagaaatcctctrtgtagttcctgtccacatgcactatatatttgtttcttttttctcctctcatgaatctgctcgtttctctacttctgtctacgtagaagcactcagcaac

SEQ ID NO: 87826 - DNA, 201 bp, Homo sapiens
gtcatccaggctggagtgcagtggtggaatcatagctcactatagcctcaaacttctgggcttaagcaatcctcctgcctctgccccctgagcagctgggwctacaggcacacaccatcaccctcagctactagtggctttgctttaaagaaacagtggaatcctaaatttatgactaaaaattcccccaaaagatgaaag

SEQ ID NO: 87827 - DNA, 201 bp, Homo sapiens
ctggcgctaggggcctttgtggtacccaatgaagccatcggcttccagccccagttaactgaattccaagtgagcctccaggacctagagaagttgtcagkactggtgttttttcctcatttggatagaactagtgatatccggaatatctgctctgtggacacctgtaagctcctggatttccaggagttcaccttgtac

SEQ ID NO: 87828 - DNA, 201 bp, Homo sapiens
gttgtacatttttccctctaggacctgaattggtcttggaggcagcttttagaaatcctctgtgtagttcctgtccacatgcactatatatttgtttcttytttctcctctcatgaatctgctcgtttctctacttctgtctacgtagaagcactcagcaactagtttctgctcattaaatgtgttctatatactaggctc

SEQ ID NO: 87829 - DNA, 162 bp, Homo sapiens
cctctgtgtagttcctgtccacatgcactatatatttgtttcttttttctcctctcatgaatctgctcgtttctctacttctgtctacgtagaagcactcrgcaactagtttctgctcattaaatgtgttctatatactaggctcagtgctttacatgtgtt

SEQ ID NO: 87830 - DNA, 201 bp, Homo sapiens
ctgtaatgaagcaggcatgccctctttaggctaacatattttagtggctttgctttttgctttttaaaaagtttttctctttaagagatgtggtctcgccrtgtcatccaggctggagtgcagtggtggaatcatagctcactatagcctcaaacttctgggcttaagcaatcctcctgcctctgccccctgagcagctgg

SEQ ID NO: 87831 - DNA, 201 bp, Homo sapiens; identical to SEQ ID NO: 87822

SEQ ID NO: 87832 - DNA, 201 bp, Homo sapiens
tcactgctgaatgtgtgcttggtttctcccactaggaaaaacagtaccagttttactgtcatcttgcaacagcacacatatcagtgcttcagagatgattkggaaatttgatgtgaaagactaataagatcaagtctttattcaaaagttaatgcagtagctgcattttattcactgattataggcaaatcagtactttgc

SEQ ID NO: 87833 - DNA, 201 bp, Homo sapiens
aaaaaaaaaaaaattaacacgagctcatttcttgtactttgcggatgtgctaatttaacttgctcctttggatacttggcatctagcaagagaactacccycttggggggttgaggatttgagaaggcatcggggaggattatctcgaaactgactcactgctgaatgtgtgcttggtttctcccactaggaaaaacagta

SEQ ID NO: 87834 - DNA, 201 bp, Homo sapiens
aaaaaaaaaaaaaaattaacacgagctcatttcttgtactttgcggatgtgctaatttaacttgctcctttggatacttggcatctagcaagagaactacycccttggggggttgaggatttgagaaggcatcggggaggattatctcgaaactgactcactgctgaatgtgtgcttggtttctcccactaggaaaaacag

SEQ ID NO: 87835 - DNA, 201 bp, Homo sapiens
agtcctttgtaaatcacaccgctctccttttccttataatctttcattattaagagccactaattgtgtgtgtgtgttttttttgtctctgccccccctttttttttttttttcatttttaggatctgcagaaaaggctgtcttggaacaatttggattccctttaactggaacagaggcaagggactacatggaaggttg

SEQ ID NO: 87836 - DNA, 201 bp, Homo sapiens
agttaactgcccttctttcgtcattgttcagttgaagaatacctgctatccctccaaagtgtataaaaactcatgttgcaatgggtaccttatatttgacaaaaaaaaaaaaaaaattaacacgagctcatttcttgtactttgcggatgtgctaatttaacttgctcctttggatacttggcatctagcaagagaactac

SEQ ID NO: 87837 - DNA, 118 bp, Homo sapiens
gatggtaagtctgtgggyccgtcctcccttcgctggcccagatttcgggctccgactcctacctggagtgtgaatggcagtccttgacggacagccttcaccgtttgctgggccccta

SEQ ID NO: 87838 - DNA, 201 bp, Homo sapiens
ccagtcctttgtaaatcacaccgctctccttttccttataatctttcattattaagagccactaattgtgtgtgtgtgttttttttgtctctgccccccctttttttttttttttcatttttaggatctgcagaaaaggctgtcttggaacaatttggattccctttaactggaacagaggcaagggactacatggaaggt

SEQ ID NO: 87839 - DNA, 201 bp, Homo sapiens
cagtcctttgtaaatcacaccgctctccttttccttataatctttcattattaagagccactaattgtgtgtgtgtgttttttttgtctctgccccccctttttttttttttttcatttttaggatctgcagaaaaggctgtcttggaacaatttggattccctttaactggaacagaggcaagggactacatggaaggtt

SEQ ID NO: 87840 - DNA, 201 bp, Homo sapiens
tgttttggtctccatcatctaaccagcacagtacctggtacataattggcattcagtaagtatgaatgaaggaataaattaatacataattttagtagatkagttaactgcccttctttcgtcattgttcagttgaagaatacctgctatccctccaaagtgtataaaaactcatgttgcaatgggtaccttatatttgac

SEQ ID NO: 87841 - DNA, 201 bp, Homo sapiens
tctctacttctgtctacgtagaagcactcagcaactagtttctgctcattaaatgtgttctatatactaggctcagtgctttacatgtgtttgtcttaccygagtttcacttttccaaagtagtcatccacaaagtatgaggcagacagatctaagagaagaaagacagctgaggtagattcaaatcttttctgacatgga

SEQ ID NO: 87842 - DNA, 201 bp, Homo sapiens; identical to SEQ ID NO: 87823

SEQ ID NO: 87843 - DNA, 201 bp, Homo sapiens; identical to SEQ ID NO: 87821

SEQ ID NO: 87844 - DNA, 201 bp, Homo sapiens; identical to SEQ ID NO: 87825

SEQ ID NO: 87845 - DNA, 201 bp, Homo sapiens; identical to SEQ ID NO: 87826

SEQ ID NO: 87846 - DNA, 201 bp, Homo sapiens; identical to SEQ ID NO: 87827

SEQ ID NO: 87847 - DNA, 201 bp, Homo sapiens; identical to SEQ ID NO: 87828

SEQ ID NO: 87848 - DNA, 201 bp, Homo sapiens
cctctgtgtagttcctgtccacatgcactatatatttgtttcttttttctcctctcatgaatctgctcgtttctctacttctgtctacgtagaagcactcrgcaactagtttctgctcattaaatgtgttctatatactaggctcagtgctttacatgtgtttgtcttacccgagtttcacttttccaaagtagtcatcca

SEQ ID NO: 87849 - DNA, 201 bp, Homo sapiens; identical to SEQ ID NO: 87830

SEQ ID NO: 87850 - DNA, 201 bp, Homo sapiens
ggccctgcacttgcacccactgcatcaggcagcatgggctctcagcctggttcgatgagaggttcaaccagatagtgcagctgctgctgactgcccagaaygcgctcttggaggacaacacctaccaatggtggctgaggctccagcaggagaagaagcccaatatcatcaacaataccatcaaggaattcagagcagtac

SEQ ID NO: 87851 - DNA, 201 bp, Homo sapiens
agatagtgcagctgctgctgactgcccagaacgcgctcttggaggacaacacctaccaatggtggctgaggctccagcaggagaagaagcccaatatcatsaacaataccatcaaggaattcagagcagtacctgggaatgtggacccaatgctggagaagaggtcggtgggctgctggcactgtgctgtcgtgggcaact

SEQ ID NO: 87852 - DNA, 201 bp, Homo sapiens
gccctgcacttgcacccactgcatcaggcagcatgggctctcagcctggttcgatgagaggttcaaccagatagtgcagctgctgctgactgcccagaacrcgctcttggaggacaacacctaccaatggtggctgaggctccagcaggagaagaagcccaatatcatcaacaataccatcaaggaattcagagcagtacc

SEQ ID NO: 87853 - DNA, 201 bp, Homo sapiens
gatcagagtgaaacaggataagatcctgatctaccacccagccttcatcaagtatgtcttcgacaactggctgcagagccacaggcggtacccactcaccrgcatcctctcggtcatcttctcaatgcatgtctgcgattaggtagacttgtatagcttctgagcagatagcaaagggaactgacaccactactgggagaa

SEQ ID NO: 87854 - DNA, 199 bp, Homo sapiens
tcatcttctcaatgcatgtctgcgattaggtagacttgtatagcttctgagcagatagcaaagggaactgacaccactactgggagaacaacctgtctgcrgggtcttttcacaagacgggggtgcacgatgcaggctttgagtctaacgtgacggccaccttggcttcatgaataaaatccggatcttcaaggggaga

SEQ ID NO: 87855 - DNA, 201 bp, Homo sapiens
ctccttgagttttcctgctgcgatgcaatgcttttctaatctgcagtggctcttacaaaactctgttcccactccctctcttgccgacaagggcaactcaygggtgcatgaaaccactggaacatggccgtcgctgtgggggtttttttctctggggttcccctggaaaggctgcaggaactaggcacaagctctctgagc

SEQ ID NO: 87856 - DNA, 201 bp, Homo sapiens
ttggcctcggctcacgagcataccctcacttttgcgccttcggacacgctgtggacaccctcctggaagaactgggaggggagaggatcctgaagatgagrgaaggggatgagctctgtgggcaggaagaggctttcaggacctgggccaagaaggtcttcaaggcagcctgtgatgtcttctgtgtgggagatgatgtca

SEQ ID NO: 87857 - DNA, 201 bp, Homo sapiens
tgccggccaccctgctcctgacccagctgtccctgctgcagccccgctactattccatcagctcctccccagacatgtaccctgatgaagtgcacctcacygtggccatcgtttcctaccgcactcgagatggagaaggaccaattcaccacggcgtatgctcctcctggctcaaccggatacaggctgacgaactggtcc

SEQ ID NO: 87858 - DNA, 201 bp, Homo sapiens
gtctggctgcagcccgtgacagccagcacaggagctacaaggtccgattcaacagcgtctcctcctactctgactcccaaaaatcatcaggcgatgggccygacctcagagacaactttgagagtgctggacccctggccaatgtgaggttctcagtttttggcctcggctcacgagcataccctcacttttgcgccttcg

SEQ ID NO: 87859 - DNA, 201 bp, Homo sapiens
aggaatggaaatggggcaagaaccccaccatcgtggaggtgctggaggagttcccatctatccagatgccggccaccctgctcctgacccagctgtccctrctgcagccccgctactattccatcagctcctccccagacatgtaccctgatgaagtgcacctcactgtggccatcgtttcctaccgcactcgagatggag

SEQ ID NO: 87860 - DNA, 201 bp, Homo sapiens
tatccaatgtccacaaaaagcgagtctcagctgcccggctccttagccgtcaaaacctccagagccctaaatccagtcggtcaactatcttcgtgcgtctscacaccaacgggagccaggagctgcagtaccagcctggggaccacctgggtgtcttccctggcaaccacgaggacctcgtgaatgccctgatcgagcggc

SEQ ID NO: 87861 - DNA, 201 bp, Homo sapiens
agagtgctggacccctggccaatgtgaggttctcagtttttggcctcggctcacgagcataccctcacttttgcgccttcggacacgctgtggacaccctyctggaagaactgggaggggagaggatcctgaagatgagggaaggggatgagctctgtgggcaggaagaggctttcaggacctgggccaagaaggtcttca

SEQ ID NO: 87862 - DNA, 201 bp, Homo sapiens
gaaacgtgtccctggcccatattaatccctcgtgtgtccataattagggtccacgcccatgtacctgaaacatttggaagccccataattgttctagttaraaagggttcagggcatggggagaggagtgggaaattgattaaaggggctgtctcccaatgaaagaggcattcccagaatttgctgcatttagattttgat

SEQ ID NO: 87863 - DNA, 201 bp, Homo sapiens
agccagacaaaccaaagaagtacgtgcaggacatcctgcaggagcagctggcggagtctgtgtaccgagccctgaaggagcaagggggccacatatacgtmtgtggggacgtcaccatggctgctgatgtcctcaaagccatccagcgcatcatgacccagcaggggaagctctcggcagaggacgccggcgtattcatca

SEQ ID NO: 87864 - DNA, 201 bp, Homo sapiens
tcaactaccggctcaccccctccttcgaataccagcctgatccctggaacacgcatgtctggaaaggcaccaacgggacccccacaaagcggcgagccatyggcttcaagaagctagcagaagctgtcaagttctcggccaagctgatggggcaggctatggccaagagggtgaaagcgaccatcctctatgccacagaga

SEQ ID NO: 87865 - DNA, 201 bp, Homo sapiens
tcgagcggctggaggacgcgccgcctgtcaaccagatggtgaaagtggaactgctggaggagcggaacacggctttaggtgtcatcagtaactggacagaygagctccgcctcccgccctgcaccatcttccaggccttcaagtactacctggacatcaccacgccaccaacgcctctgcagctgcagcagtttgcctccc

SEQ ID NO: 87866 - DNA, 201 bp, Homo sapiens
tcagagacaactttgagagtgctggacccctggccaatgtgaggttctcagtttttggcctcggctcacgagcataccctcacttttgcgccttcggacaygctgtggacaccctcctggaagaactgggaggggagaggatcctgaagatgagggaaggggatgagctctgtgggcaggaagaggctttcaggacctggg

SEQ ID NO: 87867 - DNA, 201 bp, Homo sapiens
ccctgagaatggggagaaattcggctgtgctttgatggaaatgaggcaccccaactctgtgcaggaagaaaggaagtacccggaacccttgcgtttctttycccgtaaagggcctcccctccccaatggtgacacagaagtccacggtctggctgcagcccgtgacagccagcacaggagctacaaggtccgattcaacag

SEQ ID NO: 87868 - DNA, 101 bp, Homo sapiens
gtctggctgcagcccgtgacagccagcacaggagctacaaggtccgattcaacagcgtctcctcctactctgactcccaaaaatcatcaggcgatgggccy

SEQ ID NO: 87869 - DNA, 155 bp, Homo sapiens
caccccaactctgtgcaggaagaaaggaagtacccggaacccttgcgtttctttycccgtaaagggcctcccctccccaatggtgacacagaagtccacggtctggctgcagcccgtgacagccagcacaggagctacaaggtccgattcaacag

SEQ ID NO: 87870 - DNA, 201 bp, Homo sapiens; identical to SEQ ID NO: 87855

SEQ ID NO: 87871 - DNA, 201 bp, Homo sapiens; identical to SEQ ID NO: 87856

SEQ ID NO: 87872 - DNA, 201 bp, Homo sapiens; identical to SEQ ID NO: 87857

SEQ ID NO: 87873 - DNA, 201 bp, Homo sapiens
ggcaccccaactctgtgcaggaagaaaggaagagctacaaggtccgattcaacagcgtctcctcctactctgactcccaaaaatcatcaggcgatgggccygacctcagagacaactttgagagtgctggacccctggccaatgtgaggttctcagtttttggcctcggctcacgagcataccctcacttttgcgccttcg

SEQ ID NO: 87874 - DNA, 201 bp, Homo sapiens; identical to SEQ ID NO: 87859

SEQ ID NO: 87875 - DNA, 201 bp, Homo sapiens; identical to SEQ ID NO: 87860

SEQ ID NO: 87876 - DNA, 201 bp, Homo sapiens; identical to SEQ ID NO: 87861

SEQ ID NO: 87877 - DNA, 201 bp, Homo sapiens; identical to SEQ ID NO: 87862

SEQ ID NO: 87878 - DNA, 201 bp, Homo sapiens; identical to SEQ ID NO: 87863

SEQ ID NO: 87879 - DNA, 201 bp, Homo sapiens; identical to SEQ ID NO: 87864

SEQ ID NO: 87880 - DNA, 201 bp, Homo sapiens; identical to SEQ ID NO: 87865

SEQ ID NO: 87881 - DNA, 201 bp, Homo sapiens; identical to SEQ ID NO: 87866

SEQ ID NO: 87882 - DNA, 201 bp, Homo sapiens; identical to SEQ ID NO: 87855

SEQ ID NO: 87883 - DNA, 201 bp, Homo sapiens; identical to SEQ ID NO: 87856

SEQ ID NO: 87884 - DNA, 201 bp, Homo sapiens; identical to SEQ ID NO: 87857

SEQ ID NO: 87885 - DNA, 201 bp, Homo sapiens; identical to SEQ ID NO: 87873

SEQ ID NO: 87886 - DNA, 201 bp, Homo sapiens; identical to SEQ ID NO: 87859

SEQ ID NO: 87887 - DNA, 201 bp, Homo sapiens; identical to SEQ ID NO: 87860

SEQ ID NO: 87888 - DNA, 201 bp, Homo sapiens
ccccctcacgaccctcgctgagctcacggctcagtccctacatatttatgccgcgtttccagccgctgggtgaggagctacttagcgccgcggctcctccraggggcggccgggcagcgagcagcggccgagcggacgggctcatgatgcctcagatctgatccgcatctaacaggctggcaatgaagatacccagagaat

SEQ ID NO: 87889 - DNA, 201 bp, Homo sapiens; identical to SEQ ID NO: 87861

SEQ ID NO: 87890 - DNA, 201 bp, Homo sapiens
ctcactgacaccctccaccttaagagcacattggaaacgggatgcactgagtacatctgcatgggctccatcatgcatccttctcagcatgcaaggaggcytgaagacgtccgcacaaaaggacagctcttccctctcgccaaagagtttattgatcaatactattcatcaattaaaagatttggctccaaagcccacatg

SEQ ID NO: 87891 - DNA, 201 bp, Homo sapiens
ttgacgtctgcctggtcaaccatcacttccttagagaataaggagagaggcggatgcaggaaatcatgccaccgacgggccaccagccatgagtgggtgaygctgagctgacgtcaaagacagagagggctgaagccttgtcagcacctgtcaccccggctcctgctctccgtgtagcctgaagcctggatcctcctggtg

SEQ ID NO: 87892 - DNA, 201 bp, Homo sapiens; identical to SEQ ID NO: 87862

SEQ ID NO: 87893 - DNA, 201 bp, Homo sapiens; identical to SEQ ID NO: 87865

SEQ ID NO: 87894 - DNA, 201 bp, Homo sapiens; identical to SEQ ID NO: 87864

SEQ ID NO: 87895 - DNA, 201 bp, Homo sapiens; identical to SEQ ID NO: 87863

SEQ ID NO: 87896 - DNA, 201 bp, Homo sapiens; identical to SEQ ID NO: 87866

SEQ ID NO: 87897 - DNA, 201 bp, Homo sapiens
gtgctttctttcctaatgagcctctagatctattgtctcagaaagcatttaaagcaattccttccatcatcggagtcaataaccccgagtgtggcttccckctgcctatgaaggaggctcctgagattctcagtggctccaacaagtcccttgccctctgtctgacacaaaacatcctgcacatcctgcccaattatttgc

SEQ ID NO: 87898 - DNA, 201 bp, Homo sapiens
tatcctgggtccagaagaacatcgagttcttcggtggggaccccagctctgtgaccatctttggtgagtccgtgggagccataagtgtttccagccttatkctgtctcccatggccgaaggcttattccacaaagccgtcatggagagtggggtggccatcatcctttacctgaaggcccatgattatgagaagagtgagg

SEQ ID NO: 87899 - DNA, 201 bp, Homo sapiens
ttggcttcttcaccacatgggatcagcacgctcccgggaactgggccttcaaggaccaggtggctgctctatcctgggtccagaagaacatcgagttcttyggtggggaccccagctctgtgaccatctttggtgagtccgtgggagccataagtgtttccagccttatgctgtctcccatggccgaaggcttattccaca

SEQ ID NO: 87900 - DNA, 198 bp, Homo sapiens
gaatacttccatgacaagcactccctgactgaaatccgagacagtcttctggacttgcttggagatgtgttctttgtgatccctaagctgatcacagctcrgtatcatagaggccaaataccccagggccgatacctgcttcttcgaatccaggttccaacccatccctccatctcatttccattttacgtgcacaca

SEQ ID NO: 87901 - DNA, 200 bp, Homo sapiens
atggtgcctgctgcacagcaggccacaagagcagagcgacaggacacagtgaggggcggcggtgccttcgagactggctcagcctccatcttcgatgggwcctccctggctgcctatgaggacatgctggttgtgatcgtccagtaccggctgggaatatttggcttcttcaccacatgggatcagcacgctcccgggaa

SEQ ID NO: 87902 - DNA, 201 bp, Homo sapiens
ggaagctgccacctcagtatgccctggagctcctgacggtctatgcttgggagcgagggagcatgaaaacacatttcaacacagcccagggatttcggacrgtcttggaattagtcataaactaccagcaactctgcatctactggacaaagtattatgactttaaaaaccccattattgaaaagtacctgagaaggcagc

SEQ ID NO: 87903 - DNA, 201 bp, Homo sapiens
tgcctgcctttgatgccctgggtcagttgactggcggctataaacctaacccccaaatctatgtcaagctcatcgaggagtgcaccgacctgcagaaagasggcgagttctccacctgcttcacagaactacagagagacttcctgaagcagcgccccaccaagctcaagagcctcatccgcctagtcaagcactggtacc

SEQ ID NO: 87904 - DNA, 201 bp, Homo sapiens
ggagagttcatccaggaaattaggagacagctggaagcctgtcaaagagagagagcattttccgtgaagtttgaggtccaggctccacgctggggcaaccsccgtgcgctcagcttcgtactgagttcgctccagctcggggagggggtggagttcgatgtgctgcctgcctttgatgccctgggtcagttgactggcggc

SEQ ID NO: 87905 - DNA, 201 bp, Homo sapiens
ggagttcgatgtgctgcctgcctttgatgccctgggtcagttgactggcggctataaacctaacccccaaatctatgtcaagctcatcgaggagtgcacckacctgcagaaagagggcgagttctccacctgcttcacagaactacagagagacttcctgaagcagcgccccaccaagctcaagagcctcatccgcctagt

SEQ ID NO: 87906 - DNA, 201 bp, Homo sapiens
tctcctgtcaatgatggatctcagaaataccccagccaaatctctggacaagttcattgaagactatctcttgccagacacgtgtttccgcatgcaaatcraccatgccattgacatcatctgtgggttcctgaaggaaaggtgcttccgaggtagctcctaccctgtgtgtgtgtccaaggtggtaaagggtggctcctc

SEQ ID NO: 87907 - DNA, 201 bp, Homo sapiens
tgtgatcctggacccggcggaccctacaggaaacttgggtggtggagacccaaagggttggaggcagctggcacaagaggctgaggcctggctgaattacycatgctttaagaattgggatgggtccccagtgagctcctggattctgctgaaagcaacagtacagacgatgagaccgacgatcccaggacgtatcagaaa

SEQ ID NO: 87908 - DNA, 149 bp, Homo sapiens
gtacagacgatgagaccgacgatcccaggacgtatcagaaatatggttacattggaacacatgagtaccctcatttctctcatagacccagcacactccargcagcatccaccccacaggcagaagaggactggacctgcaccatcctc

SEQ ID NO: 87909 - DNA, 201 bp, Homo sapiens
cctcagtcctctcaccacttttcaggatcagttaaatcgccggggagagttcatccaggaaattaggagacagctggaagcctgtcaaagagagagagcaytttccgtgaagtttgaggtccaggctccacgctggggcaacccccgtgcgctcagcttcgtactgagttcgctccagctcggggagggggtggagttcga

SEQ ID NO: 87910 - DNA, 201 bp, Homo sapiens
gctgaattacccatgctttaagaattgggatgggtccccagtgagctcctggattctgctgaaagcaacagtacagacgatgagaccgacgatcccaggasgtatcagaaatatggttacattggaacacatgagtaccctcatttctctcatagacccagcacactccaggcagcatccaccccacaggcagaagaggac

SEQ ID NO: 87911 - DNA, 201 bp, Homo sapiens
acacatttcaacacagcccagggatttcggacggtcttggaattagtcataaactaccagcaactctgcatctactggacaaagtattatgactttaaaamccccattattgaaaagtacctgagaaggcagctcacgaaacccaggcctgtgatcctggacccggcggaccctacaggaaacttgggtggtggagaccca

SEQ ID NO: 87912 - DNA, 201 bp, Homo sapiens
  misc_feature (1)...(201): n = A,T,C or G
ggcagctggcacaagaggctgaggcctggctgaattacccatgctttaagaattgggatgggtccccagtgagctcctggattctgctgaaagcaacagtncagacgatgagaccgacgatcccaggacgtatcagaaatatggttacattggaacacatgagtaccctcatttctctcatagacccagcacactccaggc

SEQ ID NO: 87913 - DNA, 201 bp, Homo sapiens
cccaaagggttggaggcagctggcacaagaggctgaggcctggctgaattacccatgctttaagaattgggatgggtccccagtgagctcctggattctgrtgaaagcaacagtacagacgatgagaccgacgatcccaggacgtatcagaaatatggttacattggaacacatgagtaccctcatttctctcatagaccc

SEQ ID NO: 87914 - DNA, 201 bp, Homo sapiens
  misc_feature (1)...(201): n = A,T,C or G
cccccgtgcgctcagcttcgtactgagttcgctccagctcggggagggggtggagttcgatgtgctgcctgcctttgatgccctgggtcagttgactggcngctataaacctaacccccaaatctatgtcaagctcatcgaggagtgcaccgacctgcagaaagagggcgagttctccacctgcttcacagaactacagag

SEQ ID NO: 87915 - DNA, 201 bp, Homo sapiens
tcgccggggagagttcatccaggaaattaggagacagctggaagcctgtcaaagagagagagcattttccgtgaagtttgaggtccaggctccacgctggsgcaacccccgtgcgctcagcttcgtactgagttcgctccagctcggggagggggtggagttcgatgtgctgcctgcctttgatgccctgggtcagttgac

SEQ ID NO: 87916 - DNA, 201 bp, Homo sapiens
cagaggccgatctgacgctgacctggttgtcttcctcagtcctctcaccacttttcaggatcagttaaatcgccggggagagttcatccaggaaattaggrgacagctggaagcctgtcaaagagagagagcattttccgtgaagtttgaggtccaggctccacgctggggcaacccccgtgcgctcagcttcgtactgag

SEQ ID NO: 87917 - DNA, 201 bp, Homo sapiens; identical to SEQ ID NO: 87902

SEQ ID NO: 87918 - DNA, 201 bp, Homo sapiens; identical to SEQ ID NO: 87903

SEQ ID NO: 87919 - DNA, 201 bp, Homo sapiens; identical to SEQ ID NO: 87904

SEQ ID NO: 87920 - DNA, 201 bp, Homo sapiens; identical to SEQ ID NO: 87905

SEQ ID NO: 87921 - DNA, 201 bp, Homo sapiens; identical to SEQ ID NO: 87906

SEQ ID NO: 87922 - DNA, 201 bp, Homo sapiens
tgtgatcctggacccggcggaccctacaggaaacttgggtggtggagacccaaagggttggaggcagctggcacaagaggctgaggcctggctgaattacycatgctttaagaattgggatgggtccccagtgagctcctggattctgctgacccagcacactccaggcagcatccaccccacaggcagaagaggactgga

SEQ ID NO: 87923 - DNA, 201 bp, Homo sapiens
gctggcacaagaggctgaggcctggctgaattacccatgctttaagaattgggatgggtccccagtgagctcctggattctgctgacccagcacactccargcagcatccaccccacaggcagaagaggactggacctgcaccatcctctgaatgccagtgcatcttgggggaaagggctccagtgttatctggaccagtt

SEQ ID NO: 87924 - DNA, 201 bp, Homo sapiens; identical to SEQ ID NO: 87909

SEQ ID NO: 87925 - DNA, 201 bp, Homo sapiens; identical to SEQ ID NO: 87911

SEQ ID NO: 87926 - DNA, 201 bp, Homo sapiens; identical to SEQ ID NO: 87914
  misc_feature (1)...(201): n = A,T,C or G

SEQ ID NO: 87927 - DNA, 154 bp, Homo sapiens
cctgcaccatcctctgaatgccagtgcatcttgggggaaagggctccagtgttatctggaccagttccttcattttcaggtgggactcttgatccagagargacaaagctcctcagtgagctggtgtataatccaggacagaacccaggtctcc

SEQ ID NO: 87928 - DNA, 201 bp, Homo sapiens; identical to SEQ ID NO: 87915

SEQ ID NO: 87929 - DNA, 201 bp, Homo sapiens; identical to SEQ ID NO: 87916

SEQ ID NO: 87930 - DNA, 201 bp, Homo sapiens; identical to SEQ ID NO: 87902

SEQ ID NO: 87931 - DNA, 201 bp, Homo sapiens; identical to SEQ ID NO: 87903

SEQ ID NO: 87932 - DNA, 201 bp, Homo sapiens; identical to SEQ ID NO: 87904

SEQ ID NO: 87933 - DNA, 195 bp, Homo sapiens
tattttacagtcattttggtcacaatcgagggtttctggaattttcacatcccttgtccagaattcattcccctaagagtaataataaataatctctaacmccatttattgactgtctgcttcgggctcaggttctgtcctaagccctttaatatgcactctctcattaaatagtcacaacaatcccatgaggca

SEQ ID NO: 87934 - DNA, 201 bp, Homo sapiens; identical to SEQ ID NO: 87905

SEQ ID NO: 87935 - DNA, 201 bp, Homo sapiens; identical to SEQ ID NO: 87906

SEQ ID NO: 87936 - DNA, 201 bp, Homo sapiens
tgtgatcctggacccggcggaccctacaggaaacttgggtggtggagacccaaagggttggaggcagctggcacaagaggctgaggcctggctgaattacycatgctttaagaattgggatgggtccccagtgagctcctggattctgctggtgagacctcctgcttcctccctgccattcatccctgcccctctccatga

SEQ ID NO: 87937 - DNA, 201 bp, Homo sapiens; identical to SEQ ID NO: 87909

SEQ ID NO: 87938 - DNA, 201 bp, Homo sapiens; identical to SEQ ID NO: 87911

SEQ ID NO: 87939 - DNA, 201 bp, Homo sapiens; identical to SEQ ID NO: 87914
  misc_feature (1)...(201): n = A,T,C or G

SEQ ID NO: 87940 - DNA, 201 bp, Homo sapiens; identical to SEQ ID NO: 87915

SEQ ID NO: 87941 - DNA, 201 bp, Homo sapiens; identical to SEQ ID NO: 87916

SEQ ID NO: 87942 - DNA, 201 bp, Homo sapiens; identical to SEQ ID NO: 87902

SEQ ID NO: 87943 - DNA, 201 bp, Homo sapiens; identical to SEQ ID NO: 87903

SEQ ID NO: 87944 - DNA, 201 bp, Homo sapiens; identical to SEQ ID NO: 87904

SEQ ID NO: 87945 - DNA, 201 bp, Homo sapiens; identical to SEQ ID NO: 87905

SEQ ID NO: 87946 - DNA, 201 bp, Homo sapiens; identical to SEQ ID NO: 87906

SEQ ID NO: 87947 - DNA, 201 bp, Homo sapiens
tgtgatcctggacccggcggaccctacaggaaacttgggtggtggagacccaaagggttggaggcagctggcacaagaggctgaggcctggctgaattacycatgctttaagaattgggatgggtccccagtgagctcctggattctgctgctgaaagcaacagtacagacgatgagaccgacgatcccaggacgtatcag

SEQ ID NO: 87948 - DNA, 201 bp, Homo sapiens
gtacagacgatgagaccgacgatcccaggacgtatcagaaatatggttacattggaacacatgagtaccctcatttctctcatagacccagcacactccargcagcatccaccccacaggcagaagaggactggacctgcaccatcctctgaatgccagtgcatcttgggggaaagggctccagtgttatctggaccagtt

SEQ ID NO: 87949 - DNA, 201 bp, Homo sapiens; identical to SEQ ID NO: 87911

SEQ ID NO: 87950 - DNA, 201 bp, Homo sapiens; identical to SEQ ID NO: 87909

SEQ ID NO: 87951 - DNA, 201 bp, Homo sapiens
gaattacccatgctttaagaattgggatgggtccccagtgagctcctggattctgctgctgaaagcaacagtacagacgatgagaccgacgatcccaggasgtatcagaaatatggttacattggaacacatgagtaccctcatttctctcatagacccagcacactccaggcagcatccaccccacaggcagaagaggac

SEQ ID NO: 87952 - DNA, 201 bp, Homo sapiens
  misc_feature (1)...(201): n = A,T,C or G
agctggcacaagaggctgaggcctggctgaattacccatgctttaagaattgggatgggtccccagtgagctcctggattctgctgctgaaagcaacagtncagacgatgagaccgacgatcccaggacgtatcagaaatatggttacattggaacacatgagtaccctcatttctctcatagacccagcacactccaggc

SEQ ID NO: 87953 - DNA, 201 bp, Homo sapiens
aaagggttggaggcagctggcacaagaggctgaggcctggctgaattacccatgctttaagaattgggatgggtccccagtgagctcctggattctgctgrtgaaagcaacagtacagacgatgagaccgacgatcccaggacgtatcagaaatatggttacattggaacacatgagtaccctcatttctctcatagaccc

SEQ ID NO: 87954 - DNA, 201 bp, Homo sapiens; identical to SEQ ID NO: 87914
  misc_feature (1)...(201): n = A,T,C or G

SEQ ID NO: 87955 - DNA, 201 bp, Homo sapiens
cctgcaccatcctctgaatgccagtgcatcttgggggaaagggctccagtgttatctggaccagttccttcattttcaggtgggactcttgatccagagargacaaagctcctcagtgagctggtgtataatccaggacagaacccaggtctcctgactcctggccttctatgccctctatcctatcatagataacattct

SEQ ID NO: 87956 - DNA, 201 bp, Homo sapiens; identical to SEQ ID NO: 87915

SEQ ID NO: 87957 - DNA, 201 bp, Homo sapiens; identical to SEQ ID NO: 87916

SEQ ID NO: 87958 - DNA, 201 bp, Homo sapiens; identical to SEQ ID NO: 87902

SEQ ID NO: 87959 - DNA, 201 bp, Homo sapiens; identical to SEQ ID NO: 87903

SEQ ID NO: 87960 - DNA, 201 bp, Homo sapiens; identical to SEQ ID NO: 87904

SEQ ID NO: 87961 - DNA, 201 bp, Homo sapiens; identical to SEQ ID NO: 87905

SEQ ID NO: 87962 - DNA, 201 bp, Homo sapiens; identical to SEQ ID NO: 87947

SEQ ID NO: 87963 - DNA, 201 bp, Homo sapiens; identical to SEQ ID NO: 87948

SEQ ID NO: 87964 - DNA, 201 bp, Homo sapiens
tctcctgtcaatgatggatctcagaaataccccagccaaatctctggacaagttcattgaagactatctcttgccagacacgtgtttccgcatgcaaatcraccatgccattgacatcatctgtgggttcctgaaggaaaggtgcttccgaggtagctcctaccctgtgtgtgtgtccaaggtggtaaagtcctctcacca

SEQ ID NO: 87965 - DNA, 201 bp, Homo sapiens; identical to SEQ ID NO: 87911

SEQ ID NO: 87966 - DNA, 201 bp, Homo sapiens; identical to SEQ ID NO: 87951

SEQ ID NO: 87967 - DNA, 201 bp, Homo sapiens
gtaaagtcctctcaccacttttcaggatcagttaaatcgccggggagagttcatccaggaaattaggagacagctggaagcctgtcaaagagagagagcaytttccgtgaagtttgaggtccaggctccacgctggggcaacccccgtgcgctcagcttcgtactgagttcgctccagctcggggagggggtggagttcga

SEQ ID NO: 87968 - DNA, 201 bp, Homo sapiens; identical to SEQ ID NO: 87952
  misc_feature (1)...(201): n = A,T,C or G

SEQ ID NO: 87969 - DNA, 201 bp, Homo sapiens; identical to SEQ ID NO: 87953

SEQ ID NO: 87970 - DNA, 201 bp, Homo sapiens; identical to SEQ ID NO: 87914
  misc_feature (1)...(201): n = A,T,C or G

SEQ ID NO: 87971 - DNA, 201 bp, Homo sapiens; identical to SEQ ID NO: 87955

SEQ ID NO: 87972 - DNA, 201 bp, Homo sapiens; identical to SEQ ID NO: 87915

SEQ ID NO: 87973 - DNA, 201 bp, Homo sapiens
ggtagctcctaccctgtgtgtgtgtccaaggtggtaaagtcctctcaccacttttcaggatcagttaaatcgccggggagagttcatccaggaaattaggrgacagctggaagcctgtcaaagagagagagcattttccgtgaagtttgaggtccaggctccacgctggggcaacccccgtgcgctcagcttcgtactgag

SEQ ID NO: 87974 - DNA, 201 bp, Homo sapiens
ttgcccaagtgaggacggaccccttaccgatctgtgctctcctagcccaagagacccctggaggggctggagttttatccagcgcctcgtcgtatgtttgrctgagcacctgtggcctgggtgcaggttaacttcttgttatcaggagcccactatgcagaggccaaaggtcggcagccagcgaggctatgaattggacct

SEQ ID NO: 87975 - DNA, 201 bp, Homo sapiens
agacactgtgggaaaagccgggggccatcgcgctgtcagtgggcggcgggggcctgctgtgtggagtggtccaggggctgcaggaggtgggctggggggaygtgcctgtcatcgccatggagacttttggtgcccacagcttccacgctgccaccaccgcaggcaaacttgtctccctgcccaagatcaccagtgttgcca

SEQ ID NO: 87976 - DNA, 201 bp, Homo sapiens
cccagccctccggctccttcaagatccggggcattgggcacttctgcaagaggtgggccaagcaaggctgtgcacattttgtctgctcctcggcgggcaaygcaggcatggcggctgcatatgcggccaggcaactcggcgtccccgccaccatcgtggtgcccagcaccacacctgctctcaccattgagcgcctcaaga

SEQ ID NO: 87977 - DNA, 170 bp, Homo sapiens
ttgcccaagtgaggacggaccccttaccgatctgtgctctcctagcccaagagacccctggaggggctggagttttatccagcgcctcgtcgtatgtttgrctgagcacctgtggcctgggtgcaggttaacttcttgttatcaggagcccactatgcagaggccaaagg

SEQ ID NO: 87978 - DNA, 201 bp, Homo sapiens
cccagccctccggctccttcaagatccggggcattgggcacttctgcaagaggtgggccaagcaaggctgtgcacattttgtctgctcctcggcgggcaaygcaggcatggccgctgtctatagccacgtgatccagaagctccaactggaggggaatctccgaaccccgctgccatccctcgtggtcatcgtctgcgggg

SEQ ID NO: 87979 - DNA, 201 bp, Homo sapiens
caccatgttggctggtctcaaactcctgagctcaagtgatccgcccacctcggcctcccgaagtgctgggactacatccgtgagccaccgcgctcagcccwttgagaggtttgaagccgaggagctgtgtgtgaatggaccagtgggaatgatgtctggagaacccctgcacgtgaagacccccatccgtgacagcatggc

SEQ ID NO: 87980 - DNA, 201 bp, Homo sapiens; identical to SEQ ID NO: 87974

SEQ ID NO: 87981 - DNA, 201 bp, Homo sapiens; identical to SEQ ID NO: 87975

SEQ ID NO: 87982 - DNA, 201 bp, Homo sapiens
caggaagagagccaagaggaaaagttcctacagagaacagcagccaggaccacctcgagggagaaatgcactttggggtgccgcggatgcagacagaaggrgtttgcggcaggagagacggggtttcaccatgttggctggtctcaaactcctgagctcaagtgatccgcccacctcggcctcccgaagtgctgggactac

SEQ ID NO: 87983 - DNA, 201 bp, Homo sapiens; identical to SEQ ID NO: 87976

SEQ ID NO: 87984 - DNA, 201 bp, Homo sapiens
gagagccaagaggaaaagttcctacagagaacagcagccaggaccacctcgagggagaaatgcactttggggtgccgcggatgcagacagaaggagtttgsggcaggagagacggggtttcaccatgttggctggtctcaaactcctgagctcaagtgatccgcccacctcggcctcccgaagtgctgggactacatccgt

SEQ ID NO: 87985 - DNA, 201 bp, Homo sapiens
gcactttggggtgccgcggatgcagacagaaggagtttgcggcaggagagacggggtttcaccatgttggctggtctcaaactcctgagctcaagtgatcygcccacctcggcctcccgaagtgctgggactacatccgtgagccaccgcgctcagccctttgagaggtttgaagccgaggagctgtgtgtgaatggacca

SEQ ID NO: 87986 - DNA, 201 bp, Homo sapiens
ctcgccctaccaagctgaagagcctgatccggctggtgaagcactggtaccagcagtgtaccaagatctccaaggggagaggctccctacccccacagcaygggctggaactcctgactgtgtatgcctgggagcagggcgggaaggactcccagttcaacatggctgagggcttccgcacggtcctggagctggtcaccc

SEQ ID NO: 87987 - DNA, 201 bp, Homo sapiens
ctgtgtgaagttgagaaaatcagcggtcctactggatgaagagaagatggacaccagccctcagcatgaggaaattcagggtcccctaccagatgagagasattgtgtacatgtgtgtgtgagcacatgtgtgcatgtgtgtgcacacgtgtgcatgtgtgtgttttagtgaatctgctctcccagctcacacactcccct

SEQ ID NO: 87988 - DNA, 201 bp, Homo sapiens
ccttggacctgtctcagatccccaccaaggagctggaccgcttcatccaggaccacctgaagccgagcccccagttccaggagcaggtgaaaaaggccatygacatcatcttgcgctgcctccatgagaactgtgttcacaaggcctcaagagtcagtaaagggggctcatttggccggggcacagacctaagggatggct

SEQ ID NO: 87989 - DNA, 201 bp, Homo sapiens
gatgaagagaagatggacaccagccctcagcatgaggaaattcagggtcccctaccagatgagagagattgtgtacatgtgtgtgtgagcacatgtgtgcrtgtgtgtgcacacgtgtgcatgtgtgtgttttagtgaatctgctctcccagctcacacactcccctgcctcccatggcttacacactaggatccagactc

SEQ ID NO: 87990 - DNA, 201 bp, Homo sapiens
ctggatgctcaggtttgggccaccccatccagctagaccctaaccagaagacccctgaaaacagcaagagcctcaatgctgtgtacccaagagcagggagsaaacctccctcatgcccagctcctggccccactggggcagccagcatcgtcccctctgtgccgggaatggccttggacctgtctcagatccccaccaagg

SEQ ID NO: 87991 - DNA, 201 bp, Homo sapiens
gccatcactgccccacatggacaaaactggagtcgagacctaggttagattcctgcaaccacaaacatccatcagggatggccagctgccagagctgcggraagacggatcccacctccctttcttagcagaatctaaattacagccagacctctggctgcagaggagtctgagacatgtatgactgaatgggtgccaagt

SEQ ID NO: 87992 - DNA, 201 bp, Homo sapiens
ttcccggtctagccacaccctcggatggaaagacttgactgcataaagatgtcagttctccctgagttgattgataggcttaatggtcaccctaaaaacamccacatatgcttttcgacgcaatagctaggaaaacacagggaaagaagagttctgagcagggcctagtcttagccaatattaaaacatactatgaagcct

SEQ ID NO: 87993 - DNA, 201 bp, Homo sapiens
aaaacagaaagcactctaggaatcttaggcagaaagggattttatctaaatcactggaaaggctggaggagcagaaggcagaggccaccactggactattsgtttcaatattagaccactgtagccgaatcagaggccagagagcagccactgctactgctaatgccaccactacccctgccatcactgccccacatggac

SEQ ID NO: 87994 - DNA, 201 bp, Homo sapiens
cgctctgggcgccctggccgctgctctgagggagcgcgggggccgcctcggtgctgctgccccgcgggtgctgaaaactgtcaagggaggctcctcgggcyggggcacagctctcaagggtggctgtgattctgaacttgtcatcttcctcgactgcttcaagagctatgtggaccagagggcccgccgtgcagagatcct

SEQ ID NO: 87995 - DNA, 201 bp, Homo sapiens
caaacaaccgtgctcagcctgtttctctctgccctctagagcaaggcccaccaggtccatccaggaggctctcctgacctcaagtccaacaacagtgtccrcactagtcaaggttcagcccagaaaacagaaagcactctaggaatcttaggcagaaagggattttatctaaatcactggaaaggctggaggagcagaagg

SEQ ID NO: 87996 - DNA, 201 bp, Homo sapiens
ctccctgactcctctctgcccatgcaaattagctcacatctttcctcctgctgcaatccatcccttcctcccattggcctctccttgccaaatctaaatastttatatagggatggcagagagttcccatctcatctgtcagccacagtcatttggtactggctacctggagccttatcttctgaagggttttaaagaatg

SEQ ID NO: 87997 - DNA, 201 bp, Homo sapiens
  misc_feature (1)...(201): n = A,T,C or G
aaggccgcgccagagccctgcttccccttgcatctgcgccgggaggccatggacttgtacagcaccccggccgctgcgctggacaggttcgtggccagaangctgcagccgcggaaggagttcgtagagaaggcgcggcgcgctctgggcgccctggccgctgctctgagggagcgcgggggccgcctcggtgctgctgcc

SEQ ID NO: 87998 - DNA, 184 bp, Homo sapiens
  misc_feature (1)...(184): n = A,T,C or G
ggttcggagagccgggcgggaaaacgaaaccagaaatccgaaggccgcgccagagccctgcttccccttgcatctgcgccgggnggccatggacttgtacagcaccccggccgctgcgctggacaggttcgtggccagaaagctgcagccgcggaaggagttcgtagagaaggcgcggcgcgct

SEQ ID NO: 87999 - DNA, 184 bp, Homo sapiens
atcacagatgcattcatcataataattccagacattttcatcaccctaaaaggaaaccctgaaacccattagcagtcattccccattcctccaacccattmtctccctaatccctagaaaccaccaatctgctgtgtatttcatctattgccaacatttcatataaatggcatcatacaatatg

SEQ ID NO: 88000 - DNA, 201 bp, Homo sapiens
tgctgtggggcagctcagttctggcaccaaaccaaatccccaggtctactcgaggctcctcaccagtggctgccaggagggcgagcataaggcctgcttcrcagagctgcggaggaacttcatgaacattcgccctgtcaagctgaagaacctgattctgctggtgaagcactggtaccgccaggttgcggctcagaacaa

SEQ ID NO: 88001 - DNA, 173 bp, Homo sapiens
  misc_feature (1)...(173): n = A,T,C or G
ggttcggagagccgggcgggaaaacgaaaccagaaatccgaaggccgcgccagagccctgcttccccttgcanctgcgccgggaggccatggacttgtacagcaccccggccgctgcgctggacaggttcgtggccagaaagctgcagccgcggaaggagttcgtagagaagg

SEQ ID NO: 88002 - DNA, 201 bp, Homo sapiens
gccagcttcgaaaacccagacccctggtcctggaccccgctgatcccacctggaacgtgggccacggtagctgggagctgttggcccaggaagcagcagcrctggggatgcaggcctgctttctgagtagagacgggacatctgtgcagccctgggatgtgatgccagccctcctttaccaaaccccagctggggaccttg

SEQ ID NO: 88003 - DNA, 201 bp, Homo sapiens
ccacagccctgaagagctggacggatgttagcctgctgcctgccttcgatgctgtggggcagctcagttctggcaccaaaccaaatccccaggtctactcraggctcctcaccagtggctgccaggagggcgagcataaggcctgcttcgcagagctgcggaggaacttcatgaacattcgccctgtcaagctgaagaacc

SEQ ID NO: 88004 - DNA, 201 bp, Homo sapiens
gctgccagagctgcgggaagacggatcccacctccctttcttagcagaatctaaattacagccagacctctggctgcagaggagtctgagacatgtatgaytgaatgggtgccaagtgccagggggcggagtccccagcagatgcatcctggccatctgttgcgtggatgagggagtgggtctatctcagaggaaggaaca

SEQ ID NO: 88005 - DNA, 201 bp, Homo sapiens
gcacatgtgtgcatgtgtgtgcacacgtgtgcatgtgtgtgttttagtgaatctgctctcccagctcacacactcccctgcctcccatggcttacacactrggatccagactccatggtttgacaccagcctgcgtttgcagcttctctgtcacttccatgactctatcctcataccaccactgctgcttcccacccagct

SEQ ID NO: 88006 - DNA, 201 bp, Homo sapiens
catctgttgcgtggatgagggagtgggtctatctcagaggaaggaacaggaaacaaagaaaggaagccactgaacatcccttctctgctccacaggagtgycttagacagcctgactctccacaaaccactgttaaaacttacctgctaggaatgctagattgaatgggatgggaagagccttccctcattattgtcattc

SEQ ID NO: 88007 - DNA, 201 bp, Homo sapiens
ctggtctctggctccaggcccagctctcaagtctacgtcgacctcatccacagctacagcaatgcgggcgagtactccacctgcttcacagagctacaacrggacttcatcatctctcgccctaccaagctgaagagcctgatccggctggtgaagcactggtaccagcagtgtaccaagatctccaaggggagaggctcc

SEQ ID NO: 88008 - DNA, 201 bp, Homo sapiens
ccgctcagatgccgacctcgtggtgttcctcagctgcttcagccagttcactgagcagggcaacaagcgggccgagatcatctccgagatccgagcccagytggaggcatgtcaacaggagcggcagttcgaggtcaagtttgaagtctccaaatgggagaatccccgcgtgctgagcttctcactgacatcccagacgat

SEQ ID NO: 88009 - DNA, 201 bp, Homo sapiens
  misc_feature (1)...(201): n = A,T,C or G
ccccggccgctgcgctggacaggttcgtggccagaaagctgcagccgcggaaggagttcgtagagaaggcgcggcgcgctctgggcgccctggccgctgcnctgagggagcgcgggggccgcctcggtgctgctgccccgcgggtgctgaaaactgtcaagggaggctcctcgggctggggcacagctctcaagggtggct

SEQ ID NO: 88010 - DNA, 201 bp, Homo sapiens
aaactgagccagtggccaaacaaccgtgctcagcctgtttctctctgccctctagagcaaggcccaccaggtccatccaggaggctctcctgacctcaagkccaacaacagtgtccacactagtcaaggttcagcccagaaaacagaaagcactctaggaatcttaggcagaaagggattttatctaaatcactggaaagg

SEQ ID NO: 88011 - DNA, 201 bp, Homo sapiens
acccagacccctggtcctggaccccgctgatcccacctggaacgtgggccacggtagctgggagctgttggcccaggaagcagcagcgctggggatgcagkcctgctttctgagtagagacgggacatctgtgcagccctgggatgtgatgccagccctcctttaccaaaccccagctggggaccttgacaagttcatcag

SEQ ID NO: 88012 - DNA, 201 bp, Homo sapiens
ggccagaaagctgcagccgcggaaggagttcgtagagaaggcgcggcgcgctctgggcgccctggccgctgctctgagggagcgcgggggccgcctcggtrctgctgccccgcgggtgctgaaaactgtcaagggaggctcctcgggctggggcacagctctcaagggtggctgtgattctgaacttgtcatcttcctcga

SEQ ID NO: 88013 - DNA, 201 bp, Homo sapiens; identical to SEQ ID NO: 87986

SEQ ID NO: 88014 - DNA, 201 bp, Homo sapiens; identical to SEQ ID NO: 87987

SEQ ID NO: 88015 - DNA, 201 bp, Homo sapiens; identical to SEQ ID NO: 87988

SEQ ID NO: 88016 - DNA, 201 bp, Homo sapiens; identical to SEQ ID NO: 87989

SEQ ID NO: 88017 - DNA, 201 bp, Homo sapiens; identical to SEQ ID NO: 87990

SEQ ID NO: 88018 - DNA, 201 bp, Homo sapiens; identical to SEQ ID NO: 87991

SEQ ID NO: 88019 - DNA, 201 bp, Homo sapiens
ttcccggtctagccacaccctcggatggaaagacttgactgcataaagatgtcagttctccctgagttgattgataggcttaatggtcaccctaaaaacamccacatatgcttttcgatggaaccagataagttgacgctaaagttcttatggaaaaatacacacgcaatagctaggaaaacacagggaaagaagagttct

SEQ ID NO: 88020 - DNA, 201 bp, Homo sapiens; identical to SEQ ID NO: 87993

SEQ ID NO: 88021 - DNA, 201 bp, Homo sapiens; identical to SEQ ID NO: 87994

SEQ ID NO: 88022 - DNA, 201 bp, Homo sapiens; identical to SEQ ID NO: 87995

SEQ ID NO: 88023 - DNA, 201 bp, Homo sapiens; identical to SEQ ID NO: 87996

SEQ ID NO: 88024 - DNA, 201 bp, Homo sapiens; identical to SEQ ID NO: 87997
  misc_feature (1)...(201): n = A,T,C or G

SEQ ID NO: 88025 - DNA, 184 bp, Homo sapiens; identical to SEQ ID NO: 87998
  misc_feature (1)...(184): n = A,T,C or G

SEQ ID NO: 88026 - DNA, 184 bp, Homo sapiens; identical to SEQ ID NO: 87999

SEQ ID NO: 88027 - DNA, 201 bp, Homo sapiens; identical to SEQ ID NO: 88000

SEQ ID NO: 88028 - DNA, 173 bp, Homo sapiens; identical to SEQ ID NO: 88001
  misc_feature (1)...(173): n = A,T,C or G

SEQ ID NO: 88029 - DNA, 201 bp, Homo sapiens; identical to SEQ ID NO: 88002

SEQ ID NO: 88030 - DNA, 201 bp, Homo sapiens; identical to SEQ ID NO: 88003

SEQ ID NO: 88031 - DNA, 201 bp, Homo sapiens; identical to SEQ ID NO: 88004

SEQ ID NO: 88032 - DNA, 201 bp, Homo sapiens; identical to SEQ ID NO: 88005

SEQ ID NO: 88033 - DNA, 201 bp, Homo sapiens; identical to SEQ ID NO: 88006

SEQ ID NO: 88034 - DNA, 201 bp, Homo sapiens; identical to SEQ ID NO: 88007

SEQ ID NO: 88035 - DNA, 201 bp, Homo sapiens; identical to SEQ ID NO: 88008

SEQ ID NO: 88036 - DNA, 201 bp, Homo sapiens; identical to SEQ ID NO: 88009
  misc_feature (1)...(201): n = A,T,C or G

SEQ ID NO: 88037 - DNA, 201 bp, Homo sapiens; identical to SEQ ID NO: 88010

SEQ ID NO: 88038 - DNA, 201 bp, Homo sapiens; identical to SEQ ID NO: 88011

SEQ ID NO: 88039 - DNA, 201 bp, Homo sapiens; identical to SEQ ID NO: 88012

SEQ ID NO: 88040 - DNA, 201 bp, Homo sapiens
gcggctccttcaagattcggggcattgggcatttctgccaggagatggccaagaagggatgcagacacctggtgtgctcctcagggggtaatgcgggcatygctgctgcctatgctgctaggaagctgggcattcctgccaccatcgtgctccccgagagcacctccctgcaggtggtgcagaggctgcagggggaggggg

SEQ ID NO: 88041 - DNA, 201 bp, Homo sapiens
ctgcctgtggggcagccttagcagccatctactcaggcctcctgcggaggctccaggccgagggctgcctgcccccttccctgacttcagttgtggtaatygtgtgtggaggcaacaacatcaacagccgagagctgcaggctttgaaaacccacctgggccaggtctgaggggtcccatcctggccccaaagacccctga

SEQ ID NO: 88042 - DNA, 201 bp, Homo sapiens
tggccaagaagggatgcagacacctggtgtgctcctcagggggtaatgcgggcatcgctgctgcctatgctgctaggaagctgggcattcctgccaccatygtgctccccgagagcacctccctgcaggtggtgcagaggctgcagggggagggggccgaggttcagctgactggaaaggtctgggacgaggccaatctga

SEQ ID NO: 88043 - DNA, 201 bp, Homo sapiens; identical to SEQ ID NO: 88040

SEQ ID NO: 88044 - DNA, 201 bp, Homo sapiens; identical to SEQ ID NO: 88041

SEQ ID NO: 88045 - DNA, 201 bp, Homo sapiens; identical to SEQ ID NO: 88042

SEQ ID NO: 88046 - DNA, 201 bp, Homo sapiens
ttcacgtggtcacacctctgttggagagctgggcgctgtcccagatggccaagaagggatgcagacacctggtgtgctcctcagggggtaatgcgggcatygctgctgcctatgctgctaggaagctgggcattcctgccaccatcgtgctccccgagagcacctccctgcaggtggtgcagaggctgcagggggaggggg

SEQ ID NO: 88047 - DNA, 201 bp, Homo sapiens; identical to SEQ ID NO: 88041

SEQ ID NO: 88048 - DNA, 201 bp, Homo sapiens; identical to SEQ ID NO: 88042

SEQ ID NO: 88049 - DNA, 127 bp, Homo sapiens
gggctccaggatggaggccggcctgayttctccgcctcggtgggctgggtcggcggctggagcattacccctactgcgggtcccgctgctggcagcgctggaaactgggtggacggcatgggttggt

SEQ ID NO: 88050 - DNA, 201 bp, Homo sapiens
cgggtcccgctgctggcagcgctggaaactgggtggacggcatgggttggtctcaggatttgttccgcgccttgtggagatcgctgtcaagggaagtgaargagcacgtgggcacggaccaattcgggaacaaatactactacatcccgcagtacaagaactggagaggacaaactattcgagagaaaagaattgtagaag

SEQ ID NO: 88051 - DNA, 121 bp, Homo sapiens
gggctccaggatggaggccgrcctgacttctccgcctcggtgggctgggtcggcggctggagcattacccctactgcgggtcccgctgctggcagcgctggaaactgggtggacggcatgg

SEQ ID NO: 88052 - DNA, 103 bp, Homo sapiens
ggsctccaggatggaggccggcctgacttctccgcctcggtgggctgggtcggcggctggagcattacccctactgcgggtcccgctgctggcagcgctggaa

SEQ ID NO: 88053 - DNA, 201 bp, Homo sapiens
tgccacacccagcggccccccgcacagccacccgtggggtgctgcccttatgcccggcgccgggcaccaactccatgtttggtgtttgtctgtgtttgttyttcaagaaatgattcaaattgctgcttggattttgaaatttactgtaactgtcagtgtacacgtctggaccccgtttcatttttacaccaatttggtaaa

SEQ ID NO: 88054 - DNA, 201 bp, Homo sapiens
gcggcctcctggactccccggcactcaaggcctgcctggacactgccgtggagaacatgcccagcctgaagatgaaggtggtggaggtgctggctggccayggtcacctgtattcccgcatcccaggcctgctcagcccccatcccctgctgcagctgagctacacggccaccgaccgccacccccaggccctggaggctg

SEQ ID NO: 88055 - DNA, 201 bp, Homo sapiens
gccgcagtatggccagggcatcctgagccaggacgcgtgggagagcctcttctccagggtgtcgctgcgcctggtgggcctgaagaagtccttctacggckccacgctcttcctgtgccgccggcccaccccgcaggacagccccatcttcctgccggtggacgataccagcttccgctgggtggagtctctgaagggcat

SEQ ID NO: 88056 - DNA, 201 bp, Homo sapiens
caggcagaagctgtacacactgcaggacaaggcccaagtggctgacgtggtggtgagcaggtggctgagggtcacagtggcgggaggcgtccacatctccsggctccacactgagtcggccccgcggcggcagcaggagcagcaggtgcccatcctggagaagttttgcttcactccccacacggaggaggggtgcctgtc

SEQ ID NO: 88057 - DNA, 201 bp, Homo sapiens
acatcgaccctgccacccacaggcagaagctgtacacactgcaggacaaggcccaagtggctgacgtggtggtgagcaggtggctgagggtcacagtggcsggaggcgtccacatctccgggctccacactgagtcggccccgcggcggcagcaggagcagcaggtgcccatcctggagaagttttgcttcactccccaca

SEQ ID NO: 88058 - DNA, 201 bp, Homo sapiens
agctcaagaaggtgatccgggagccgaagccacgttcagcccgctggctcagcacctctatccccaaggcccagtggcacagcagcctggcacgcacgtcytccgccgagtacaatgtcaacaacctggtgagccctgtgctgttccaggaggccctgtggcacgtgcctgagcacgcggtggtgctggagatcgcgcccc

SEQ ID NO: 88059 - DNA, 201 bp, Homo sapiens
tgtgaagagccggtggtgcccgtgcccgcaggaactgggctgggcctcgtgcgcccgtggggtctgcgcttggtctttctgtgcttggatttgcatatttwttgcattgctggtagagacccccaggcctgtccaccctgccaagactcctcaggcagcgtgtgggtcccgcactctgcccccatttccccgatgccacac

SEQ ID NO: 88060 - DNA, 201 bp, Homo sapiens
tgctcagcggcctcctggactccccggcactcaaggcctgcctggacactgccgtggagaacatgcccagcctgaagatgaaggtggtggaggtgctggcyggccacggtcacctgtattcccgcatcccaggcctgctcagcccccatcccctgctgcagctgagctacacggccaccgaccgccacccccaggccctgg

SEQ ID NO: 88061 - DNA, 201 bp, Homo sapiens
ggtggaggccgtggcacacatcctgggcatccgcgacttggctgctgtcaacctggacagctcactggcggacctgggcctggactcgctcatgagcgtgsaggtgcgccagacgctggagcgtgagctcaacctggtgctgtccgtgcgcgaggtgcggcaactcacgctccggaaactgcaggagctgtcctcaaaggc

SEQ ID NO: 88062 - DNA, 201 bp, Homo sapiens
cacaggcagaagctgtacacactgcaggacaaggcccaagtggctgacgtggtggtgagcaggtggctgagggtcacagtggcgggaggcgtccacatctycgggctccacactgagtcggccccgcggcggcagcaggagcagcaggtgcccatcctggagaagttttgcttcactccccacacggaggaggggtgcctg

SEQ ID NO: 88063 - DNA, 201 bp, Homo sapiens
agccccacatggtcctgagcagctttgtgctggctgagaaggctgcggcctatagggacagggacagccagcgggacctggtggaggccgtggcacacatyctgggcatccgcgacttggctgctgtcaacctggacagctcactggcggacctgggcctggactcgctcatgagcgtggaggtgcgccagacgctggagc

SEQ ID NO: 88064 - DNA, 201 bp, Homo sapiens
tgtcagagaacggcaacctggtagtgagtgggaaggtgtaccagtgggatgaccctgaccccaggctcttcgaccacccggaaagccccacccccaacccyacggagcccctcttcctggcccaggctgaagtttacaaggagctgcgtctgcgtggctacgactacggccctcatttccagggcatcctggaggccagcc

SEQ ID NO: 88065 - DNA, 201 bp, Homo sapiens
tatccgtccacgtcatcgagggtgaccaccgcacgctgctggagggcagcggcctggagtccatcatcagcatcatccacagctccctggctgagccacgygtgagcgtgcgggagggctaggcccgtgcccccgcctgccaccggaggtcactccaccatccccaccccaccccaccccacccccgccatgcaacgggat

SEQ ID NO: 88066 - DNA, 201 bp, Homo sapiens
gcatccacagcctggctgcctactacatcgactgcatcaggcaggtgcagcccgagggcccctaccgcgtggccggctactcctacggggcctgcgtggcytttgaaatgtgctcccagctgcaggcccagcagagcccagcccccacccacaacagcctcttcctgttcgacggctcgcccacctacgtactggcctaca

SEQ ID NO: 88067 - DNA, 201 bp, Homo sapiens
ctggtggaggccgtggcacacatcctgggcatccgcgacttggctgctgtcaacctggacagctcactggcggacctgggcctggactcgctcatgagcgyggaggtgcgccagacgctggagcgtgagctcaacctggtgctgtccgtgcgcgaggtgcggcaactcacgctccggaaactgcaggagctgtcctcaaag

SEQ ID NO: 88068 - DNA, 201 bp, Homo sapiens
ccgtggacctgatcatcaagagccaccagggcctggaccgccaggagctgagctttgcggcccggtccttctactacaagctgcgtgccgctgagcagtayacacccaaggccaagtaccatggcaacgtgatgctactgcgcgccaagacgggtggcgcctacggcgaggacctgggcgcggactacaacctctcccagg

SEQ ID NO: 88069 - DNA, 201 bp, Homo sapiens
tgggcttgtcctgggaggagtgtaaacagcgctgccccccgggcgtggtgcccgcctgccacaactccaaggacacagtcaccatctcgggacctcaggcyccggtgtttgagttcgtggagcagctgaggaaggagggtgtgtttgccaaggaggtgcggaccggcggtatggccttccactcctacttcatggaggcca

SEQ ID NO: 88070 - DNA, 201 bp, Homo sapiens
cacctgcaaggccttcgacacagcggggaatgggtactgccgctcggagggtgtggtggccgtcctgctgaccaagaagtccctggcccggcgggtgtacrccaccatcctgaacgccggcaccaatacagatggcttcaaggagcaaggcgtgaccttcccctcaggggatatccaggagcagctcatccgctcgttgta

SEQ ID NO: 88071 - DNA, 201 bp, Homo sapiens
agggcacctgcaaggccttcgacacagcggggaatgggtactgccgctcggagggtgtggtggccgtcctgctgaccaagaagtccctggcccggcgggtstacgccaccatcctgaacgccggcaccaatacagatggcttcaaggagcaaggcgtgaccttcccctcaggggatatccaggagcagctcatccgctcgt

SEQ ID NO: 88072 - DNA, 201 bp, Homo sapiens
cccgggacacatccttcgagcagcatgtgctgtggcacacgggcgggaagggcgttgacctggtcttgaactccttggcggaagagaagctgcaggccagygtgaggtgcttggctacgcacggtcgcttcctggaaattggcaaattcgacctttctcagaaccacccgctcggcatggctatcttcctgaagaacgtga

SEQ ID NO: 88073 - DNA, 201 bp, Homo sapiens
ccccgagggcacctgcaaggccttcgacacagcggggaatgggtactgccgctcggagggtgtggtggccgtcctgctgaccaagaagtccctggcccggmgggtgtacgccaccatcctgaacgccggcaccaatacagatggcttcaaggagcaaggcgtgaccttcccctcaggggatatccaggagcagctcatccg

SEQ ID NO: 88074 - DNA, 201 bp, Homo sapiens
cgcttgtgcaggccggcatccgggatggggtggtacggcccctcaagtgcacggtgttccatggggcccaggtggaggacgccttccgctacatggcccargggaagcacattggcaaagtcgtcgtgcaggtgcttgcggaggagccggaggcagtgctgaagggggccaaacccaagctgatgtcggccatctccaaga

SEQ ID NO: 88075 - DNA, 201 bp, Homo sapiens
catgcccagcctgaagatgaaggtggtggaggtgctggctggccacggtcacctgtattcccgcatcccaggcctgctcagcccccatcccctgctgcagmtgagctacacggccaccgaccgccacccccaggccctggaggctgcccaggccgagctgcagcagcacgacgttgcccagggccagtgggatcccgcaga

SEQ ID NO: 88076 - DNA, 201 bp, Homo sapiens
cgacatcgcggctgtccccgccaccgccatgcccttccgtggctacgctgtgctgggtggtgagcgcggtggcccagaggtgcagcaggtgcccgctggcragcgcccgctctggttcatctgctctgggatgggcacacagtggcgcgggatggggctgagcctcatgcgcctggaccgcttccgagattccatcctacg

SEQ ID NO: 88077 - DNA, 201 bp, Homo sapiens
tgcaggacaaggcccaagtggctgacgtggtggtgagcaggtggctgagggtcacagtggcgggaggcgtccacatctccgggctccacactgagtcggcsccgcggcggcagcaggagcagcaggtgcccatcctggagaagttttgcttcactccccacacggaggaggggtgcctgtctgagcgcgctgccctgcagg

SEQ ID NO: 88078 - DNA, 201 bp, Homo sapiens
cttcatggaggccatcgcacccccactgctgcaggagctcaagaaggtgatccgggagccgaagccacgttcagcccgctggctcagcacctctatccccraggcccagtggcacagcagcctggcacgcacgtcctccgccgagtacaatgtcaacaacctggtgagccctgtgctgttccaggaggccctgtggcacgt

SEQ ID NO: 88079 - DNA, 201 bp, Homo sapiens
cactggacacagcctgctcctccagcctgatggccctgcagaacgcctaccaggccatccacagcgggcagtgccctgccgccatcgtggggggcatcaaygtcctgctgaagcccaacacctccgtgcagttcttgaggctggggatgctcagccccgagggcacctgcaaggccttcgacacagcggggaatgggtact

SEQ ID NO: 88080 - DNA, 201 bp, Homo sapiens
gcaggtgcttgcggaggagccggaggcagtgctgaagggggccaaacccaagctgatgtcggccatctccaagaccttctgcccggcccacaagagctacrtcatcgctggtggtctgggtggcttcggcctggagttggcgcagtggctgatacagcgtggggtgcagaagctcgtgttgacttctcgctccgggatccg

SEQ ID NO: 88081 - DNA, 201 bp, Homo sapiens
ccttggcggaagagaagctgcaggccagcgtgaggtgcttggctacgcacggtcgcttcctggaaattggcaaattcgacctttctcagaaccacccgctyggcatggctatcttcctgaagaacgtgacattccacggggtcctactggatgcgttcttcaacgagagcagtgctgactggcgggaggtgtgggcgcttg

SEQ ID NO: 88082 - DNA, 201 bp, Homo sapiens
ggccacacccagcggccccccgcacagccacccgtggggtgctgcccttatgcccggcgccgggcaccaactccatgtttggtgtttgtctgtgtttgttyttcaagaaatgattcaaattgctgcttggattttgaaatttactgtaactgtcagtgtacacgtctggaccccgtttcatttttacaccaatttggtaaa

SEQ ID NO: 88083 - DNA, 201 bp, Homo sapiens; identical to SEQ ID NO: 88054

SEQ ID NO: 88084 - DNA, 201 bp, Homo sapiens; identical to SEQ ID NO: 88055

SEQ ID NO: 88085 - DNA, 201 bp, Homo sapiens; identical to SEQ ID NO: 88056

SEQ ID NO: 88086 - DNA, 201 bp, Homo sapiens; identical to SEQ ID NO: 88057

SEQ ID NO: 88087 - DNA, 201 bp, Homo sapiens; identical to SEQ ID NO: 88058

SEQ ID NO: 88088 - DNA, 201 bp, Homo sapiens
tgtgaagagccggtggtgcccgtgcccgcaggaactgggctgggcctcgtgcgcccgtggggtctgcgcttggtctttctgtgcttggatttgcatatttwttgcattgctggtagagacccccaggcctgtccaccctgccaagactcctcaggcagcgtgtgggtcccgcactctgcccccatttccccgatgtcccct

SEQ ID NO: 88089 - DNA, 201 bp, Homo sapiens; identical to SEQ ID NO: 88060

SEQ ID NO: 88090 - DNA, 201 bp, Homo sapiens; identical to SEQ ID NO: 88061

SEQ ID NO: 88091 - DNA, 201 bp, Homo sapiens; identical to SEQ ID NO: 88062

SEQ ID NO: 88092 - DNA, 201 bp, Homo sapiens; identical to SEQ ID NO: 88063

SEQ ID NO: 88093 - DNA, 201 bp, Homo sapiens; identical to SEQ ID NO: 88064

SEQ ID NO: 88094 - DNA, 201 bp, Homo sapiens; identical to SEQ ID NO: 88065

SEQ ID NO: 88095 - DNA, 201 bp, Homo sapiens; identical to SEQ ID NO: 88066

SEQ ID NO: 88096 - DNA, 201 bp, Homo sapiens; identical to SEQ ID NO: 88067

SEQ ID NO: 88097 - DNA, 201 bp, Homo sapiens; identical to SEQ ID NO: 88068

SEQ ID NO: 88098 - DNA, 201 bp, Homo sapiens; identical to SEQ ID NO: 88069

SEQ ID NO: 88099 - DNA, 201 bp, Homo sapiens; identical to SEQ ID NO: 88070

SEQ ID NO: 88100 - DNA, 201 bp, Homo sapiens; identical to SEQ ID NO: 88071

SEQ ID NO: 88101 - DNA, 201 bp, Homo sapiens; identical to SEQ ID NO: 88072

SEQ ID NO: 88102 - DNA, 201 bp, Homo sapiens; identical to SEQ ID NO: 88073

SEQ ID NO: 88103 - DNA, 201 bp, Homo sapiens; identical to SEQ ID NO: 88074

SEQ ID NO: 88104 - DNA, 201 bp, Homo sapiens; identical to SEQ ID NO: 88075

SEQ ID NO: 88105 - DNA, 201 bp, Homo sapiens; identical to SEQ ID NO: 88076

SEQ ID NO: 88106 - DNA, 201 bp, Homo sapiens; identical to SEQ ID NO: 88077

SEQ ID NO: 88107 - DNA, 201 bp, Homo sapiens; identical to SEQ ID NO: 88078

SEQ ID NO: 88108 - DNA, 201 bp, Homo sapiens; identical to SEQ ID NO: 88079

SEQ ID NO: 88109 - DNA, 201 bp, Homo sapiens; identical to SEQ ID NO: 88080

SEQ ID NO: 88110 - DNA, 201 bp, Homo sapiens; identical to SEQ ID NO: 88081

SEQ ID NO: 88111 - DNA, 201 bp, Homo sapiens
ttcattttcctgggaagtcaaggttacatcttgcagaggttgttttgagaaaaaagggcccttctgagttaaggagccatagttctatcaatgatcaaaaraaaaaaaaaaaaaagagaaactgttacagtatgattcagatcatttaaaaaagcaaaatcaagtgcaattttgtttacaaatggtgtatattaaagattt

SEQ ID NO: 88112 - DNA, 201 bp, Homo sapiens
aaggaaacaggtcctgctggcttaatttaaacagttattgcatgaagtagcgtggaggccctggactgctgctcgttctttaggatggactgttctggtawctggtattggtttagagactgttaataagggacatcacaaggtgatgggattcatttgaagcactctatttctgttttaatggttttatccaattttgcc

SEQ ID NO: 88113 - DNA, 201 bp, Homo sapiens
aatctgtccagggtgctttgatccttgcagagctgctttcagcagtgaaacgctcactggctcgaaccctggtcatcatagtcagtctgggatatggcatygtcaagccacgccttggagtcactcttcataaggttgtagtagcaggagccctctatcttttgttctctggcatggaaggggtcctcagagttactgggg

SEQ ID NO: 88114 - DNA, 201 bp, Homo sapiens
ggataatcccgcccttagagcagagccggaagaaggcgggacgaaccggaagagggtgaaatgctttcggtaggcactccacggctgtgaagatggcggckgctgcgtggcttcaggtgttgcctgtcattcttctgcttctgggagctcacccgtcaccactgtcgtttttcagtgcgggaccggcaaccgtagctgctg

SEQ ID NO: 88115 - DNA, 182 bp, Homo sapiens
ctgttctggtatctggtattggtttagagactgttaataagggacatcacaaggtgatgggattcatttgaagcactctatttctgttttaatggttttayccaattttgccttcccaagatttttgttctacataaaaagttcatgccactttttaatataaaaaaatttaacaaaattaa

SEQ ID NO: 88116 - DNA, 201 bp, Homo sapiens; identical to SEQ ID NO: 88111

SEQ ID NO: 88117 - DNA, 201 bp, Homo sapiens; identical to SEQ ID NO: 88112

SEQ ID NO: 88118 - DNA, 201 bp, Homo sapiens; identical to SEQ ID NO: 88113

SEQ ID NO: 88119 - DNA, 201 bp, Homo sapiens; identical to SEQ ID NO: 88114

SEQ ID NO: 88120 - DNA, 182 bp, Homo sapiens; identical to SEQ ID NO: 88115

SEQ ID NO: 88121 - DNA, 201 bp, Homo sapiens; identical to SEQ ID NO: 88114

SEQ ID NO: 88122 - DNA, 201 bp, Homo sapiens
acatcaagcgcctccttaaagttgccatatagatgtgaactgctcaacacacagatctcctactccatccagtcctgaggagccttaggatgcagcatgcyttcaggagacactgctggacctcagcattcccttgatatcagtccccttcactgcagagccttgcctttcccctctgcctgtttccttttcctctcccaa

SEQ ID NO: 88123 - DNA, 201 bp, Homo sapiens; identical to SEQ ID NO: 88122

SEQ ID NO: 88124 - DNA, 201 bp, Homo sapiens
tcattgacctcaactacatggtctgtgtgttccagtatgattttgtctgtggcaaattccatggcactgccaaggctgagaatgggaagcttgtcatcaaygaaaatcctatcaccatcttccaggagcgagatccctccaaaatcagatggggcaatgctggtgctgagtatatcatggaatccaccggtgtcttcacca

SEQ ID NO: 88125 - DNA, 201 bp, Homo sapiens
gatccctccaaaatcagatggggcaatgctggtgctgagtatatcatggaatccaccggtgtcttcaccaccatggagaaggctgggactcacttgcagcrgggagccaaaagggtcatcatctctgccccttctgctgacacccccatgtctgtgatgggcatgaagcatgagaagtaatgacaacagcctcaagatcat

SEQ ID NO: 88126 - DNA, 201 bp, Homo sapiens
gcggtttttaactctggtaaagtggatattgttgccatcaatgaccccttcattgacctcaactacatggtctgtgtgttccagtatgattttgtctgtgrcaaattccatggcactgccaaggctgagaatgggaagcttgtcatcaacgaaaatcctatcaccatcttccaggagcgagatccctccaaaatcagatgg

SEQ ID NO: 88127 - DNA, 201 bp, Homo sapiens
acacaaaagcaacagggaaccccctctccgcgcgcgacaggtgggtgccaggcaactagctcagctgagctgagagtctcctggaacccagctgcgctcakggcgcgcgggcgtggccaaggtctctgtgcagctgcgggaagcaccgggccaaagcacttggctgagggcacgctggggagggggtgtaagaaaatgctg

SEQ ID NO: 88128 - DNA, 201 bp, Homo sapiens
tcgtggtcaagaccagttagagatagttcgtcatcagcagtggggctcctgtgcacccaaaacaagcgggggaaactaccctgcccacccctccccatccmcgacatcacttcccctaccagggacaggaaacagacacaaaagcaacagggaaccccctctccgcgcgcgacaggtgggtgccaggcaactagctcagct

SEQ ID NO: 88129 - DNA, 201 bp, Homo sapiens; identical to SEQ ID NO: 88127

SEQ ID NO: 88130 - DNA, 201 bp, Homo sapiens; identical to SEQ ID NO: 88128

SEQ ID NO: 88131 - DNA, 201 bp, Homo sapiens
ggagctggaactggtcaccaaggccggcttccgggcccttctctctgccccctggtacctgaaccgtatatcctatggccctgactggaaggatttctacrtagtggaacccctggcatttgaaggtacccctgagcagaaggctctggtgattggtggagaggcttgtatgtggggagaatatgtggacaacacaaacct

SEQ ID NO: 88132 - DNA, 201 bp, Homo sapiens
tcagagaataaattccttgactttctacgtaaggccctgcaggaccaggcccctgtcattatctctgagcactctccatcttgcacccaaagccccagcartatcttactgctttcagtaaatacacaccgggctatgtggggttttgtctggggaaaggggatgtgagttgtaactaagagatttatagtcaatcttgaa

SEQ ID NO: 88133 - DNA, 201 bp, Homo sapiens
cctggccacactttgtcctggggaccaggtatccctggattactgactccttgctactctgggtctgagccctctggcacctttggaccagtgaatcccaktctcaataatacctatgagttcatgagcacattcttcttagaagtcagctctgtcttcccagatttttatcttcatcttggaggagatgaggttgatttc

SEQ ID NO: 88134 - DNA, 201 bp, Homo sapiens
ccagagctcatgagaaaggggtcctacaaccctgtcacccacatctacacagcacaggatgtgaaggaggtcattgaatacgcacggctccggggtatccrtgtgcttgcagagtttgacactcctggccacactttgtcctggggaccaggtatccctggattactgactccttgctactctgggtctgagccctctggc

SEQ ID NO: 88135 - DNA, 201 bp, Homo sapiens
ttgactttctacgtaaggccctgcaggaccaggcccctgtcattatctctgagcactctccatcttgcacccaaagccccagcaatatcttactgctttcrgtaaatacacaccgggctatgtggggttttgtctggggaaaggggatgtgagttgtaactaagagatttatagtcaatcttgaagggaagagctcatatt

SEQ ID NO: 88136 - DNA, 201 bp, Homo sapiens
ctttcctcaccggggcttgctgttggatacatctcgccattacctgccactctctagcatcctggacactctggatgtcatggcgtacaataaattgaacrtgttccactggcatctggtagatgatccttccttcccatatgagagcttcacttttccagagctcatgagaaaggggtcctacaaccctgtcacccacat

SEQ ID NO: 88137 - DNA, 201 bp, Homo sapiens
gggcccttctctctgccccctggtacctgaaccgtatatcctatggccctgactggaaggatttctacgtagtggaacccctggcatttgaaggtaccccygagcagaaggctctggtgattggtggagaggcttgtatgtggggagaatatgtggacaacacaaacctggtccccaggctctggcccagagcaggggctg

SEQ ID NO: 88138 - DNA, 201 bp, Homo sapiens
ttcacttttccagagctcatgagaaaggggtcctacaaccctgtcacccacatctacacagcacaggatgtgaaggaggtcattgaatacgcacggctccrgggtatccgtgtgcttgcagagtttgacactcctggccacactttgtcctggggaccaggtatccctggattactgactccttgctactctgggtctgag

SEQ ID NO: 88139 - DNA, 201 bp, Homo sapiens
caatcatacaggtgtggcgagaggatattccagtgaactatatgaaggagctggaactggtcaccaaggccggcttccgggcccttctctctgccccctgstacctgaaccgtatatcctatggccctgactggaaggatttctacgtagtggaacccctggcatttgaaggtacccctgagcagaaggctctggtgattg

SEQ ID NO: 88140 - DNA, 201 bp, Homo sapiens
acttttccagagctcatgagaaaggggtcctacaaccctgtcacccacatctacacagcacaggatgtgaaggaggtcattgaatacgcacggctccgggdtatccgtgtgcttgcagagtttgacactcctggccacactttgtcctggggaccaggtatccctggattactgactccttgctactctgggtctgagccc

SEQ ID NO: 88141 - DNA, 201 bp, Homo sapiens
agcacaggatgtgaaggaggtcattgaatacgcacggctccggggtatccgtgtgcttgcagagtttgacactcctggccacactttgtcctggggaccargtatccctggattactgactccttgctactctgggtctgagccctctggcacctttggaccagtgaatcccagtctcaataatacctatgagttcatgag

SEQ ID NO: 88142 - DNA, 201 bp, Homo sapiens
aatacctatgagttcatgagcacattcttcttagaagtcagctctgtcttcccagatttttatcttcatcttggaggagatgaggttgatttcacctgctrgaagtccaacccagagatccaggactttatgaggaagaaaggcttcggtgaggacttcaagcagctggagtccttctacatccagacgctgctggacatc

SEQ ID NO: 88143 - DNA, 201 bp, Homo sapiens
atatcctatggccctgactggaaggatttctacgtagtggaacccctggcatttgaaggtacccctgagcagaaggctctggtgattggtggagaggcttrtatgtggggagaatatgtggacaacacaaacctggtccccaggctctggcccagagcaggggctgttgccgaaaggctgtggagcaacaagttgacatct

SEQ ID NO: 88144 - DNA, 201 bp, Homo sapiens
gagcacattcttcttagaagtcagctctgtcttcccagatttttatcttcatcttggaggagatgaggttgatttcacctgctggaagtccaacccagagwtccaggactttatgaggaagaaaggcttcggtgaggacttcaagcagctggagtccttctacatccagacgctgctggacatcgtctcttcttatggcaa

SEQ ID NO: 88145 - DNA, 201 bp, Homo sapiens
acatccagacgctgctggacatcgtctcttcttatggcaagggctatgtggtgtggcaggaggtgtttgataataaagtaaagattcagccagacacaatsatacaggtgtggcgagaggatattccagtgaactatatgaaggagctggaactggtcaccaaggccggcttccgggcccttctctctgccccctggtacc

SEQ ID NO: 88146 - DNA, 201 bp, Homo sapiens
tcacgtgattcgccgataagtcacgggggcgccgctcacctgaccagggtctcacgtggccagccccctccgagaggggagaccagcgggccatgacaagytccaggctttggttttcgctgctgctggcggcagcgttcgcaggacgggcgacggccctctggccctggcctcagaacttccaaacctccgaccagcgct

SEQ ID NO: 88147 - DNA, 201 bp, Homo sapiens
catttgaaggtacccctgagcagaaggctctggtgattggtggagaggcttgtatgtggggagaatatgtggacaacacaaacctggtccccaggctctgscccagagcaggggctgttgccgaaaggctgtggagcaacaagttgacatctgacctgacatttgcctatgaacgtttgtcacacttccgctgtgaattgc

SEQ ID NO: 88148 - DNA, 201 bp, Homo sapiens
tcgagtcgggtgagctgtctagttccatcacggccggcacggccgcaggggtggccggttatttactgctctactgggcccgtgaacagtctggcgagccragcagttgccgacgcccggcacaatccgctgcacgtagcaggagcctcaggtccaggccggaagtgaaagggcagggtgtgggtcctcctggggtcgcag

SEQ ID NO: 88149 - DNA, 201 bp, Homo sapiens
ccccaggctctggcccagagcaggggctgttgccgaaaggctgtggagcaacaagttgacatctgacctgacatttgcctatgaacgtttgtcacacttcygctgtgaattgctgaggcgaggtgtccaggcccaacccctcaatgtaggcttctgtgagcaggagtttgaacagacctgagccccaggcaccgaggaggg

SEQ ID NO: 88150 - DNA, 201 bp, Homo sapiens
cccaggctctggcccagagcaggggctgttgccgaaaggctgtggagcaacaagttgacatctgacctgacatttgcctatgaacgtttgtcacacttccrctgtgaattgctgaggcgaggtgtccaggcccaacccctcaatgtaggcttctgtgagcaggagtttgaacagacctgagccccaggcaccgaggagggt

SEQ ID NO: 88151 - DNA, 201 bp, Homo sapiens
ccaggtatccctggattactgactccttgctactctgggtctgagccctctggcacctttggaccagtgaatcccagtctcaataatacctatgagttcakgagcacattcttcttagaagtcagctctgtcttcccagatttttatcttcatcttggaggagatgaggttgatttcacctgctggaagtccaacccagag

SEQ ID NO: 88152 - DNA, 201 bp, Homo sapiens
ttatggcaagggctatgtggtgtggcaggaggtgtttgataataaagtaaagattcagccagacacaatcatacaggtgtggcgagaggatattccagtgractatatgaaggagctggaactggtcaccaaggccggcttccgggcccttctctctgccccctggtacctgaaccgtatatcctatggccctgactggaa

SEQ ID NO: 88153 - DNA, 201 bp, Homo sapiens
tctgagccctctggcacctttggaccagtgaatcccagtctcaataatacctatgagttcatgagcacattcttcttagaagtcagctctgtcttcccagwtttttatcttcatcttggaggagatgaggttgatttcacctgctggaagtccaacccagagatccaggactttatgaggaagaaaggcttcggtgaggac

SEQ ID NO: 88154 - DNA, 104 bp, Homo sapiens
tttygggatgattttcaattgctcagagaataaattccttgactttctacgtaaggccctgcaggaccaggcccctgtcattatctctgagcactctccatctt

SEQ ID NO: 88155 - DNA, 201 bp, Homo sapiens
cgaggtctggagacttttagccagcttgtttggaaatctgctgagggcacattctttatcaacaagactgagattgaggactttccccgctttcctcaccrgggcttgctgttggatacatctcgccattacctgccactctctagcatcctggacactctggatgtcatggcgtacaataaattgaacgtgttccactgg

SEQ ID NO: 88156 - DNA, 201 bp, Homo sapiens
ccgaggtctggagacttttagccagcttgtttggaaatctgctgagggcacattctttatcaacaagactgagattgaggactttccccgctttcctcacyggggcttgctgttggatacatctcgccattacctgccactctctagcatcctggacactctggatgtcatggcgtacaataaattgaacgtgttccactg

SEQ ID NO: 88157 - DNA, 201 bp, Homo sapiens
aagccccagcaatatcttactgctttcagtaaatacacaccgggctatgtggggttttgtctggggaaaggggatgtgagttgtaactaagagatttatastcaatcttgaagggaagagctcatattggaggcaatggaatgcctcaagctggctctgaaagtacacattttttccagtcataagtagatcacatttgtg

SEQ ID NO: 88158 - DNA, 201 bp, Homo sapiens
cctctggtcacgtgattcgccgataagtcacgggggcgccgctcacctgaccagggtctcacgtggccagccccctccgagaggggagaccagcgggccaygacaagctccaggctttggttttcgctgctgctggcggcagcgttcgcaggacgggcgacggccctctggccctggcctcagaacttccaaacctccgac

SEQ ID NO: 88159 - DNA, 201 bp, Homo sapiens
atgtaaccagcttcctactttggagtcagtggagaattataccctgaccataaatgatgaccagtgtttactcctctctgagactgtctggggagctctcygaggtctggagacttttagccagcttgtttggaaatctgctgagggcacattctttatcaacaagactgagattgaggactttccccgctttcctcaccg

SEQ ID NO: 88160 - DNA, 201 bp, Homo sapiens
ctttggttttcgctgctgctggcggcagcgttcgcaggacgggcgacggccctctggccctggcctcagaacttccaaacctccgaccagcgctacgtcckttacccgaacaactttcaattccagtacgatgtcagctcggccgcgcagcccggctgctcagtcctcgacgaggccttccagcgctatcgtgacctgctt

SEQ ID NO: 88161 - DNA, 201 bp, Homo sapiens
gactgagattgaggactttccccgctttcctcaccggggcttgctgttggatacatctcgccattacctgccactctctagcatcctggacactctggatstcatggcgtacaataaattgaacgtgttccactggcatctggtagatgatccttccttcccatatgagagcttcacttttccagagctcatgagaaaggg

SEQ ID NO: 88162 - DNA, 201 bp, Homo sapiens
gactttccccgctttcctcaccggggcttgctgttggatacatctcgccattacctgccactctctagcatcctggacactctggatgtcatggcgtacartaaattgaacgtgttccactggcatctggtagatgatccttccttcccatatgagagcttcacttttccagagctcatgagaaaggggtcctacaaccct

SEQ ID NO: 88163 - DNA, 201 bp, Homo sapiens
cacttttccagagctcatgagaaaggggtcctacaaccctgtcacccacatctacacagcacaggatgtgaaggaggtcattgaatacgcacggctccggrgtatccgtgtgcttgcagagtttgacactcctggccacactttgtcctggggaccaggtatccctggattactgactccttgctactctgggtctgagcc

SEQ ID NO: 88164 - DNA, 201 bp, Homo sapiens
cgccattacctgccactctctagcatcctggacactctggatgtcatggcgtacaataaattgaacgtgttccactggcatctggtagatgatccttcctycccatatgagagcttcacttttccagagctcatgagaaaggggtcctacaaccctgtcacccacatctacacagcacaggatgtgaaggaggtcattgaa

SEQ ID NO: 88165 - DNA, 201 bp, Homo sapiens
gggaccaggtatccctggattactgactccttgctactctgggtctgagccctctggcacctttggaccagtgaatcccagtctcaataatacctatgagytcatgagcacattcttcttagaagtcagctctgtcttcccagatttttatcttcatcttggaggagatgaggttgatttcacctgctggaagtccaaccc

SEQ ID NO: 88166 - DNA, 201 bp, Homo sapiens
ccgagaggggagaccagcgggccatgacaagctccaggctttggttttcgctgctgctggcggcagcgttcgcaggacgggcgacggccctctggccctgrcctcagaacttccaaacctccgaccagcgctacgtcctttacccgaacaactttcaattccagtacgatgtcagctcggccgcgcagcccggctgctcag

SEQ ID NO: 88167 - DNA, 201 bp, Homo sapiens
cccaccccgttcttctcgagtcgggtgagctgtctagttccatcacggccggcacggccgcaggggtggccggttatttactgctctactgggcccgtgarcagtctggcgagccgagcagttgccgacgcccggcacaatccgctgcacgtagcaggagcctcaggtccaggccggaagtgaaagggcagggtgtgggtc

SEQ ID NO: 88168 - DNA, 201 bp, Homo sapiens
tttccccgctttcctcaccggggcttgctgttggatacatctcgccattacctgccactctctagcatcctggacactctggatgtcatggcgtacaatamattgaacgtgttccactggcatctggtagatgatccttccttcccatatgagagcttcacttttccagagctcatgagaaaggggtcctacaaccctgtc

SEQ ID NO: 88169 - DNA, 201 bp, Homo sapiens
tctcgccattacctgccactctctagcatcctggacactctggatgtcatggcgtacaataaattgaacgtgttccactggcatctggtagatgatccttycttcccatatgagagcttcacttttccagagctcatgagaaaggggtcctacaaccctgtcacccacatctacacagcacaggatgtgaaggaggtcatt

SEQ ID NO: 88170 - DNA, 201 bp, Homo sapiens
cttcacttttccagagctcatgagaaaggggtcctacaaccctgtcacccacatctacacagcacaggatgtgaaggaggtcattgaatacgcacggctcyggggtatccgtgtgcttgcagagtttgacactcctggccacactttgtcctggggaccaggtatccctggattactgactccttgctactctgggtctga

SEQ ID NO: 88171 - DNA, 201 bp, Homo sapiens
atggcgtacaataaattgaacgtgttccactggcatctggtagatgatccttccttcccatatgagagcttcacttttccagagctcatgagaaaggggtyctacaaccctgtcacccacatctacacagcacaggatgtgaaggaggtcattgaatacgcacggctccggggtatccgtgtgcttgcagagtttgacact

SEQ ID NO: 88172 - DNA, 201 bp, Homo sapiens
ttctgcattatatctccaaggcgttggtatatggaaaaagatgtaggggcttggaggtgttctggacagtggggagggctccagacccaacctggtcacaraagagcctctcccccatgcatactcatccacctccctcccctagagctattctcctttgggtttcttgctgcttcaattttatacaaccattatttaaat

SEQ ID NO: 88173 - DNA, 201 bp, Homo sapiens
gcacaggatgtgaaggaggtcattgaatacgcacggctccggggtatccgtgtgcttgcagagtttgacactcctggccacactttgtcctggggaccagrtatccctggattactgactccttgctactctgggtctgagccctctggcacctttggaccagtgaatcccagtctcaataatacctatgagttcatgagc

SEQ ID NO: 88174 - DNA, 201 bp, Homo sapiens
tgagagcttcacttttccagagctcatgagaaaggggtcctacaaccctgtcacccacatctacacagcacaggatgtgaaggaggtcattgaatacgcayggctccggggtatccgtgtgcttgcagagtttgacactcctggccacactttgtcctggggaccaggtatccctggattactgactccttgctactctgg

SEQ ID NO: 88175 - DNA, 156 bp, Homo sapiens
agggctccagacccaacctggtcacagaagagcctctcccccatgcatactcatccacctccctcccctagagctattctcctttgggtttcttgctgctkcaattttatacaaccattatttaaatattattaaacacatattgttctctaggca

SEQ ID NO: 88176 - DNA, 115 bp, Homo sapiens
catgcatactcatccacctccctcccctagagctattctcctttgggtttcttgctgcttcaattttatacaaccattatttaaatattattaaacacatrttgttctctaggca

SEQ ID NO: 88177 - DNA, 201 bp, Homo sapiens
cccctccgagaggggagaccagcgggccatgacaagctccaggctttggttttcgctgctgctggcggcagcgttcgcaggacgggcgacggccctctggycctggcctcagaacttccaaacctccgaccagcgctacgtcctttacccgaacaactttcaattccagtacgatgtcagctcggccgcgcagcccggctg

SEQ ID NO: 88178 - DNA, 201 bp, Homo sapiens
tccaggccggaagtgaaagggcagggtgtgggtcctcctggggtcgcaggcgcagagccgcctctggtcacgtgattcgccgataagtcacgggggcgccrctcacctgaccagggtctcacgtggccagccccctccgagaggggagaccagcgggccatgacaagctccaggctttggttttcgctgctgctggcggca

SEQ ID NO: 88179 - DNA, 201 bp, Homo sapiens
gcaggggtggccggttatttactgctctactgggcccgtgaacagtctggcgagccgagcagttgccgacgcccggcacaatccgctgcacgtagcaggarcctcaggtccaggccggaagtgaaagggcagggtgtgggtcctcctggggtcgcaggcgcagagccgcctctggtcacgtgattcgccgataagtcacgg

SEQ ID NO: 88180 - DNA, 201 bp, Homo sapiens
ggcttgctgttggatacatctcgccattacctgccactctctagcatcctggacactctggatgtcatggcgtacaataaattgaacgtgttccactggcrtctggtagatgatccttccttcccatatgagagcttcacttttccagagctcatgagaaaggggtcctacaaccctgtcacccacatctacacagcacag

SEQ ID NO: 88181 - DNA, 201 bp, Homo sapiens
gcaacagaggaagggcccctggagccggctgtcgtggatgcctttaatcaagcctggcatttggttgctcacgaatgtcccaactacttccgctaggcccrtcatggctcaggctgcccaaggcttttctgtcacctcttttgttctctcacactgaccagtcttggccttaagctgacttagaagggtttttctgaattg

SEQ ID NO: 88182 - DNA, 201 bp, Homo sapiens
tccccaagtggacctcttctacctacacgcacctgaccacggcaccccggtggaagagacgctgcatgcctgccagcggctgcaccaggagggcaagttcrtggagcttggcctctccaactatgctagctgggaagtggccgagatctgtaccctctgcaagagcaatggctggatcctgcccactgtgtaccagggcat

SEQ ID NO: 88183 - DNA, 201 bp, Homo sapiens
ttctatgcctacaaccctctggctgggggcctgctgactggcaagtacaagtatgaggacaaggacgggaaacagcctgtgggccgcttctttgggaatarctgggctgagacctacaggaatcgcttctggaaggagcaccacttcgaggccattgcgttggtggagaaggccctgcaggccgcatatggcgccagcgcc

SEQ ID NO: 88184 - DNA, 201 bp, Homo sapiens
ttggactgaggttctatgcctacaaccctctggctgggggcctgctgactggcaagtacaagtatgaggacaaggacgggaaacagcctgtgggccgcttytttgggaatagctgggctgagacctacaggaatcgcttctggaaggagcaccacttcgaggccattgcgttggtggagaaggccctgcaggccgcatatg

SEQ ID NO: 88185 - DNA, 201 bp, Homo sapiens
gttcgtggagcttggcctctccaactatgctagctgggaagtggccgagatctgtaccctctgcaagagcaatggctggatcctgcccactgtgtaccagrgcatgtacaacgccaccacccggcaggtggaaacggagctcttcccctgcctcaggcactttggactgaggttctatgcctacaaccctctggctggggg

SEQ ID NO: 88186 - DNA, 201 bp, Homo sapiens
caccccggtggaagagacgctgcatgcctgccagcggctgcaccaggagggcaagttcgtggagcttggcctctccaactatgctagctgggaagtggccragatctgtaccctctgcaagagcaatggctggatcctgcccactgtgtaccagggcatgtacaacgccaccacccggcaggtggaaacggagctcttccc

SEQ ID NO: 88187 - DNA, 201 bp, Homo sapiens
agacgtcattgaagaggctgcagtgtccccaagtggacctcttctacctacacgcacctgaccacggcaccccggtggaagagacgctgcatgcctgccascggctgcaccaggagggcaagttcgtggagcttggcctctccaactatgctagctgggaagtggccgagatctgtaccctctgcaagagcaatggctgga

SEQ ID NO: 88188 - DNA, 201 bp, Homo sapiens
ttgggatggaaaatcactaaagcctgacagtgtccggtcccagctggagacgtcattgaagaggctgcagtgtccccaagtggacctcttctacctacacrcacctgaccacggcaccccggtggaagagacgctgcatgcctgccagcggctgcaccaggagggcaagttcgtggagcttggcctctccaactatgctag

SEQ ID NO: 88189 - DNA, 201 bp, Homo sapiens
attctatttctcatgtataaaactaggaatcctccaaccaggctcctgtgatagagttcttttaagcccaagattttttatttgagggttttttgtttttwaaaaaaaaattgaacaaagactactaatgactttgtttgaattatccacatgaaaataaagagccatagtttcagccttgctgtcttcgtgtcttacccc

SEQ ID NO: 88190 - DNA, 183 bp, Homo sapiens
cagacagaccaatcacgcgcattcttcggccacgacaagcgcgcctctgatcacgtgaccaggtccgctacccacgtgggggmtcagcgtgcacccttctttgtgctcgggttaggaggagctaggctgccatcgggccggtgcagatacggggttgctcttttgctcataagaggggcttcg

SEQ ID NO: 88191 - DNA, 201 bp, Homo sapiens
ggggttgctcttttgctcataagaggggcttcgctggcagtctgaacggcaagcttgagtcaggacccttaattaagatcctcaattggctggagggcagrtctcgcgagtagggcaacgcggtaaaaatattgcttcggtgggtgacgcggtacagctgcccaagggcgttcgtaacgggaatgccgaagcgtgggaaaa

SEQ ID NO: 88192 - DNA, 201 bp, Homo sapiens
atctgcattctatttctcatgtataaaactaggaatcctccaaccaggctcctgtgatagagttcttttaagcccaagattttttatttgagggttttttkttttttaaaaaaaaattgaacaaagactactaatgactttgtttgaattatccacatgaaaataaagagccatagtttcagccttgctgtcttcgtgtct

SEQ ID NO: 88193 - DNA, 201 bp, Homo sapiens
aaaaagggagcggtggcggaagacggggatgagctcaggacagagccagaggccaagaagagtaagacggccgcaaagaaaaatgacaaagaggcagcagragagggcccagccctgtatgaggaccccccagatcagaaaacctcacccagtggcaaacctgccacactcaagatctgctcttggaatgtggatgggctt

SEQ ID NO: 88194 - DNA, 201 bp, Homo sapiens
aagaaaaatgacaaagaggcagcaggagagggcccagccctgtatgaggaccccccagatcagaaaacctcacccagtggcaaacctgccacactcaagayctgctcttggaatgtggatgggcttcgagcctggattaagaagaaaggattagattgggtaaaggaagaagccccagatatactgtgccttcaagagacc

SEQ ID NO: 88195 - DNA, 201 bp, Homo sapiens
aaagaaaaatgacaaagaggcagcaggagagggcccagccctgtatgaggaccccccagatcagaaaacctcacccagtggcaaacctgccacactcaagrtctgctcttggaatgtggatgggcttcgagcctggattaagaagaaaggattagattgggtaaaggaagaagccccagatatactgtgccttcaagagac

SEQ ID NO: 88196 - DNA, 201 bp, Homo sapiens
ctttaggcacctctaccccaacacaccctatgcctacaccttttggacttatatgatgaatgctcgatccaagaatgttggttggcgccttgattactttytgttgtcccactctctgttacctgcattgtgtgacagcaagatccgttccaaggccctcggcagtgatcactgtcctatcaccctatacctagcactgtg

SEQ ID NO: 88197 - DNA, 201 bp, Homo sapiens
ggacagagccagaggccaagaagagtaagacggccgcaaagaaaaatgacaaagaggcagcaggagagggcccagccctgtatgaggaccccccagatcasaaaacctcacccagtggcaaacctgccacactcaagatctgctcttggaatgtggatgggcttcgagcctggattaagaagaaaggattagattgggtaa

SEQ ID NO: 88198 - DNA, 201 bp, Homo sapiens
ctcatcaatactggtcagctccttcggacaaggaagggtacagtggcgtgggcctgctttcccgccagtgcccactcaaagtttcttacggcataggcgakgaggagcatgatcaggaaggccgggtgattgtggctgaatttgactcgtttgtgctggtaacagcatatgtacctaatgcaggccgaggtctggtacgac

SEQ ID NO: 88199 - DNA, 201 bp, Homo sapiens
agcgccaaggcttcggggaattactgcaggctgtgccactggctgacagctttaggcacctctaccccaacacaccctatgcctacaccttttggacttayatgatgaatgctcgatccaagaatgttggttggcgccttgattactttttgttgtcccactctctgttacctgcattgtgtgacagcaagatccgttcca

SEQ ID NO: 88200 - DNA, 201 bp, Homo sapiens
cggccacgacaagcgcgcctctgatcacgtgaccaggtccgctacccacgtgggggctcagcgtgcacccttctttgtgctcgggttaggaggagctaggytgccatcgggccggtgcagatacggggttgctcttttgctcataagaggggcttcgctggcagtctgaacggcaagcttgagtcaggacccttaattaag

SEQ ID NO: 88201 - DNA, 201 bp, Homo sapiens
tgttggttggcgccttgattactttttgttgtcccactctctgttacctgcattgtgtgacagcaagatccgttccaaggccctcggcagtgatcactgtyctatcaccctatacctagcactgtgacaccacccctaaatcactttgagcctgggaaataagccccctcaactaccattccttctttaaacactcttcag

SEQ ID NO: 88202 - DNA, 201 bp, Homo sapiens
gtgtggagacctcaatgtggcacatgaagaaattgaccttcgcaaccccaaggggaacaaaaagaatgctggcttcacgccacaagagcgccaaggcttcrgggaattactgcaggctgtgccactggctgacagctttaggcacctctaccccaacacaccctatgcctacaccttttggacttatatgatgaatgctcg

SEQ ID NO: 88203 - DNA, 201 bp, Homo sapiens
tactttttgttgtcccactctctgttacctgcattgtgtgacagcaagatccgttccaaggccctcggcagtgatcactgtcctatcaccctatacctagyactgtgacaccacccctaaatcactttgagcctgggaaataagccccctcaactaccattccttctttaaacactcttcagagaaatctgcattctattt

SEQ ID NO: 88204 - DNA, 201 bp, Homo sapiens; identical to SEQ ID NO: 88189

SEQ ID NO: 88205 - DNA, 183 bp, Homo sapiens; identical to SEQ ID NO: 88190

SEQ ID NO: 88206 - DNA, 201 bp, Homo sapiens; identical to SEQ ID NO: 88192

SEQ ID NO: 88207 - DNA, 201 bp, Homo sapiens; identical to SEQ ID NO: 88193

SEQ ID NO: 88208 - DNA, 201 bp, Homo sapiens; identical to SEQ ID NO: 88194

SEQ ID NO: 88209 - DNA, 201 bp, Homo sapiens; identical to SEQ ID NO: 88195

SEQ ID NO: 88210 - DNA, 201 bp, Homo sapiens; identical to SEQ ID NO: 88196

SEQ ID NO: 88211 - DNA, 201 bp, Homo sapiens; identical to SEQ ID NO: 88197

SEQ ID NO: 88212 - DNA, 201 bp, Homo sapiens; identical to SEQ ID NO: 88198

SEQ ID NO: 88213 - DNA, 201 bp, Homo sapiens; identical to SEQ ID NO: 88199

SEQ ID NO: 88214 - DNA, 201 bp, Homo sapiens
cggccacgacaagcgcgcctctgatcacgtgaccaggtccgctacccacgtgggggctcagcgtgcacccttctttgtgctcgggttaggaggagctaggytgccatcgggccggtgcagatacggggttgctcttttgctcataagaggggcttcgctggcagtctgaacggcaacgcggtaaaaatattgcttcggtgg

SEQ ID NO: 88215 - DNA, 201 bp, Homo sapiens; identical to SEQ ID NO: 88201

SEQ ID NO: 88216 - DNA, 201 bp, Homo sapiens; identical to SEQ ID NO: 88202

SEQ ID NO: 88217 - DNA, 201 bp, Homo sapiens; identical to SEQ ID NO: 88203

SEQ ID NO: 88218 - DNA, 201 bp, Homo sapiens; identical to SEQ ID NO: 88189

SEQ ID NO: 88219 - DNA, 201 bp, Homo sapiens
ggggttgctcttttgctcataagaggggcttcgctggcagtctgaacggcaagcttgagtcaggacccttaattaagatcctcaattggctggagggcagrtctcgcgagcaacgcggtaaaaatattgcttcggtgggtgacgcggtacagctgcccaagggcgttcgtaacgggaatgccgaagcgtgggaaaaaggga

SEQ ID NO: 88220 - DNA, 201 bp, Homo sapiens; identical to SEQ ID NO: 88192

SEQ ID NO: 88221 - DNA, 201 bp, Homo sapiens; identical to SEQ ID NO: 88193

SEQ ID NO: 88222 - DNA, 201 bp, Homo sapiens; identical to SEQ ID NO: 88194

SEQ ID NO: 88223 - DNA, 201 bp, Homo sapiens; identical to SEQ ID NO: 88195

SEQ ID NO: 88224 - DNA, 201 bp, Homo sapiens; identical to SEQ ID NO: 88196

SEQ ID NO: 88225 - DNA, 201 bp, Homo sapiens; identical to SEQ ID NO: 88197

SEQ ID NO: 88226 - DNA, 201 bp, Homo sapiens; identical to SEQ ID NO: 88198

SEQ ID NO: 88227 - DNA, 201 bp, Homo sapiens; identical to SEQ ID NO: 88199

SEQ ID NO: 88228 - DNA, 201 bp, Homo sapiens; identical to SEQ ID NO: 88201

SEQ ID NO: 88229 - DNA, 201 bp, Homo sapiens; identical to SEQ ID NO: 88202

SEQ ID NO: 88230 - DNA, 201 bp, Homo sapiens; identical to SEQ ID NO: 88203

SEQ ID NO: 88231 - DNA, 201 bp, Homo sapiens; identical to SEQ ID NO: 88189

SEQ ID NO: 88232 - DNA, 113 bp, Homo sapiens
cccacgtgggggmtcagcgtgcacccttctttgtgctcgggcaacgcggtaaaaatattgcttcggtgggtgacgcggtacagctgcccaagggcgttcgtaacgggaatgcc

SEQ ID NO: 88233 - DNA, 201 bp, Homo sapiens; identical to SEQ ID NO: 88192

SEQ ID NO: 88234 - DNA, 201 bp, Homo sapiens; identical to SEQ ID NO: 88193

SEQ ID NO: 88235 - DNA, 201 bp, Homo sapiens; identical to SEQ ID NO: 88194

SEQ ID NO: 88236 - DNA, 201 bp, Homo sapiens; identical to SEQ ID NO: 88195

SEQ ID NO: 88237 - DNA, 201 bp, Homo sapiens; identical to SEQ ID NO: 88196

SEQ ID NO: 88238 - DNA, 201 bp, Homo sapiens; identical to SEQ ID NO: 88197

SEQ ID NO: 88239 - DNA, 201 bp, Homo sapiens; identical to SEQ ID NO: 88198

SEQ ID NO: 88240 - DNA, 201 bp, Homo sapiens; identical to SEQ ID NO: 88199

SEQ ID NO: 88241 - DNA, 201 bp, Homo sapiens; identical to SEQ ID NO: 88201

SEQ ID NO: 88242 - DNA, 201 bp, Homo sapiens; identical to SEQ ID NO: 88202

SEQ ID NO: 88243 - DNA, 201 bp, Homo sapiens; identical to SEQ ID NO: 88203

SEQ ID NO: 88244 - DNA, 201 bp, Homo sapiens; identical to SEQ ID NO: 88189

SEQ ID NO: 88245 - DNA, 201 bp, Homo sapiens
ggggttgctcttttgctcataagaggggcttcgctggcagtctgaacggcaagcttgagtcaggacccttaattaagatcctcaattggctggagggcagrtctcgcgagtagggtacaaggcactatgaaatgatctagtttcgtgggtgaggggctgaagggcctatgatgcacggaggcggggaaaggatttagagat

SEQ ID NO: 88246 - DNA, 201 bp, Homo sapiens; identical to SEQ ID NO: 88192

SEQ ID NO: 88247 - DNA, 201 bp, Homo sapiens; identical to SEQ ID NO: 88193

SEQ ID NO: 88248 - DNA, 201 bp, Homo sapiens; identical to SEQ ID NO: 88194

SEQ ID NO: 88249 - DNA, 201 bp, Homo sapiens
atttagagataacgtggtttgaaaggcgggacctggtgcggggacgctcttgggaggagtcttctccccagccttagctggtttcatgatttctttgcgtytgtaggcaacgcggtaaaaatattgcttcggtgggtgacgcggtacagctgcccaagggcgttcgtaacgggaatgccgaagcgtgggaaaaagggagcg

SEQ ID NO: 88250 - DNA, 201 bp, Homo sapiens; identical to SEQ ID NO: 88195

SEQ ID NO: 88251 - DNA, 201 bp, Homo sapiens; identical to SEQ ID NO: 88196

SEQ ID NO: 88252 - DNA, 201 bp, Homo sapiens; identical to SEQ ID NO: 88197

SEQ ID NO: 88253 - DNA, 201 bp, Homo sapiens; identical to SEQ ID NO: 88198

SEQ ID NO: 88254 - DNA, 201 bp, Homo sapiens; identical to SEQ ID NO: 88199

SEQ ID NO: 88255 - DNA, 111 bp, Homo sapiens
aggagctaggytgccatcgggccggtgcagatacggggttgctcttttgctcataagaggggcttcgctggcagtctgaacggcaagcttgagtcaggacccttaattaag

SEQ ID NO: 88256 - DNA, 201 bp, Homo sapiens; identical to SEQ ID NO: 88201

SEQ ID NO: 88257 - DNA, 201 bp, Homo sapiens; identical to SEQ ID NO: 88202

SEQ ID NO: 88258 - DNA, 201 bp, Homo sapiens; identical to SEQ ID NO: 88203

SEQ ID NO: 88259 - DNA, 201 bp, Homo sapiens; identical to SEQ ID NO: 88189

SEQ ID NO: 88260 - DNA, 183 bp, Homo sapiens; identical to SEQ ID NO: 88190

SEQ ID NO: 88261 - DNA, 201 bp, Homo sapiens; identical to SEQ ID NO: 88192

SEQ ID NO: 88262 - DNA, 201 bp, Homo sapiens; identical to SEQ ID NO: 88193

SEQ ID NO: 88263 - DNA, 201 bp, Homo sapiens; identical to SEQ ID NO: 88194

SEQ ID NO: 88264 - DNA, 201 bp, Homo sapiens; identical to SEQ ID NO: 88195

SEQ ID NO: 88265 - DNA, 201 bp, Homo sapiens; identical to SEQ ID NO: 88196

SEQ ID NO: 88266 - DNA, 201 bp, Homo sapiens; identical to SEQ ID NO: 88197

SEQ ID NO: 88267 - DNA, 201 bp, Homo sapiens; identical to SEQ ID NO: 88198

SEQ ID NO: 88268 - DNA, 201 bp, Homo sapiens; identical to SEQ ID NO: 88199

SEQ ID NO: 88269 - DNA, 201 bp, Homo sapiens
cggccacgacaagcgcgcctctgatcacgtgaccaggtccgctacccacgtgggggctcagcgtgcacccttctttgtgctcgggttaggaggagctaggytgccatcgggccggtgcagatacggggttgctcttttgctcataagaggggcttcgctggcagtctgaacggcaagcttgagcaacgcggtaaaaatatt

SEQ ID NO: 88270 - DNA, 201 bp, Homo sapiens; identical to SEQ ID NO: 88201

SEQ ID NO: 88271 - DNA, 201 bp, Homo sapiens; identical to SEQ ID NO: 88202

SEQ ID NO: 88272 - DNA, 201 bp, Homo sapiens; identical to SEQ ID NO: 88203

SEQ ID NO: 88273 - DNA, 201 bp, Homo sapiens
ccttctggtgccagatcctcttctcaaagctgggattacaggtgtgagcatagtgagaccttggcgctacaaaataaagctgttctcattcctgttctttyttacacaagagctggagcccgtgccctaccacacatctgtggagatgcccaggatttgactcgggccttagaactttgcatagcagctgctactagctct

SEQ ID NO: 88274 - DNA, 201 bp, Homo sapiens
gcaggctcatcgagaaggcgtctgcgagaccatggagaacggatacacctatgaagattataagaacactgcagaatggcttctgtctcacactaagcacygacctcaagttgcaataatctgtggttctggattaggaggtctgactgataaattaactcaggcccagatctttgactacggtgaaatccccaactttcc

SEQ ID NO: 88275 - DNA, 134 bp, Homo sapiens
ccagtgagccaactgtgcgaaccagacccggcarccttgctcagttcagcatagcggagcggatccgatcggatcggagcggatcggagcacaccggagcaggctcatcgagaaggcgtctgcgagaccatgga

SEQ ID NO: 88276 - DNA, 201 bp, Homo sapiens
gcacaccggagcaggctcatcgagaaggcgtctgcgagaccatggagaacggatacacctatgaagattataagaacactgcagaatggcttctgtctcayactaagcaccgacctcaagttgcaataatctgtggttctggattaggaggtctgactgataaattaactcaggcccagatctttgactacggtgaaatcc

SEQ ID NO: 88277 - DNA, 201 bp, Homo sapiens
gagactgtggcagaatgtcgtgtgctgcagaagctgggagcagacgctgttggcatgagtacagtaccagaagttatcgttgcacggcactgtggacttcsagtctttggcttctcactcatcactaacaaggtcatcatggattatgaaagcctggagaaggccaaccatgaagaagtcttagcagctggcaaacaagct

SEQ ID NO: 88278 - DNA, 201 bp, Homo sapiens
tttcagtggtcagaaccctctcagagggcccaatgatgaaaggtttggagatcgtttccctgccatgtctgatgcctacgaccggactatgaggcagaggsctctcagtacctggaaacaaatgggggagcaacgtgagctacaggaaggcacctatgtgatggtggcaggccccagctttgagactgtggcagaatgtcg

SEQ ID NO: 88279 - DNA, 201 bp, Homo sapiens
ctttccccgaagtacagtgccaggtcatgctggccgactggtgtttgggttcctgaatggcagggcctgtgtgatgatgcagggcaggttccacatgtatraagggtacccactctggaaggtgacattcccagtgagggttttccaccttctgggtgtggacaccctggtagtcaccaatgcagcaggagggctgaaccc

SEQ ID NO: 88280 - DNA, 201 bp, Homo sapiens
aaggtgacattcccagtgagggttttccaccttctgggtgtggacaccctggtagtcaccaatgcagcaggagggctgaaccccaagtttgaggttggagrtatcatgctgatccgtgaccatatcaacctacctggtttcagtggtcagaaccctctcagagggcccaatgatgaaaggtttggagatcgtttccctgcc

SEQ ID NO: 88281 - DNA, 201 bp, Homo sapiens
gatcgtttccctgccatgtctgatgcctacgaccggactatgaggcagagggctctcagtacctggaaacaaatgggggagcaacgtgagctacaggaagkcacctatgtgatggtggcaggccccagctttgagactgtggcagaatgtcgtgtgctgcagaagctgggagcagacgctgttggcatgagtacagtacca

SEQ ID NO: 88282 - DNA, 201 bp, Homo sapiens
tctgtctcacactaagcaccgacctcaagttgcaataatctgtggttctggattaggaggtctgactgataaattaactcaggcccagatctttgactacrgtgaaatccccaactttccccgaagtacagtgccaggtcatgctggccgactggtgtttgggttcctgaatggcagggcctgtgtgatgatgcagggcag

SEQ ID NO: 88283 - DNA, 201 bp, Homo sapiens
ttccctgccatgtctgatgcctacgaccggactatgaggcagagggctctcagtacctggaaacaaatgggggagcaacgtgagctacaggaaggcacctrtgtgatggtggcaggccccagctttgagactgtggcagaatgtcgtgtgctgcagaagctgggagcagacgctgttggcatgagtacagtaccagaagtt

SEQ ID NO: 88284 - DNA, 201 bp, Homo sapiens
gacctcaagttgcaataatctgtggttctggattaggaggtctgactgataaattaactcaggcccagatctttgactacggtgaaatccccaactttccycgaagtacagtgccaggtcatgctggccgactggtgtttgggttcctgaatggcagggcctgtgtgatgatgcagggcaggttccacatgtatgaagggt

SEQ ID NO: 88285 - DNA, 200 bp, Homo sapiens
tggagatgcccaggatttgactcgggccttagaactttgcatagcagctgctactagctctttgagataatacattccgaggggctcagttctgccttatytaaatcaccagagaccaaacaaggactaatccaatacctcttggattttatttaatgtcataatgttgtcagaataaagagaaagatgaaataatttca

SEQ ID NO: 88286 - DNA, 201 bp, Homo sapiens
ccttctggtgccagatcctcttctcaaagctgggattacaggtgtgagcatagtgagaccttggcgctacaaaataaagctgttctcattcctgttctttyttacacaagagctggagcccgtgccctaccacacattcgggccttagaactttgcatagcagctgctactagctctttgagataatacattccgaggggc

SEQ ID NO: 88287 - DNA, 201 bp, Homo sapiens; identical to SEQ ID NO: 88274

SEQ ID NO: 88288 - DNA, 134 bp, Homo sapiens; identical to SEQ ID NO: 88275

SEQ ID NO: 88289 - DNA, 201 bp, Homo sapiens; identical to SEQ ID NO: 88276

SEQ ID NO: 88290 - DNA, 201 bp, Homo sapiens; identical to SEQ ID NO: 88277

SEQ ID NO: 88291 - DNA, 201 bp, Homo sapiens; identical to SEQ ID NO: 88278

SEQ ID NO: 88292 - DNA, 201 bp, Homo sapiens; identical to SEQ ID NO: 88279

SEQ ID NO: 88293 - DNA, 201 bp, Homo sapiens; identical to SEQ ID NO: 88280

SEQ ID NO: 88294 - DNA, 201 bp, Homo sapiens; identical to SEQ ID NO: 88281

SEQ ID NO: 88295 - DNA, 201 bp, Homo sapiens; identical to SEQ ID NO: 88282

SEQ ID NO: 88296 - DNA, 201 bp, Homo sapiens; identical to SEQ ID NO: 88283

SEQ ID NO: 88297 - DNA, 201 bp, Homo sapiens; identical to SEQ ID NO: 88284

SEQ ID NO: 88298 - DNA, 197 bp, Homo sapiens
agcccgtgccctaccacacattcgggccttagaactttgcatagcagctgctactagctctttgagataatacattccgaggggctcagttctgccttatytaaatcaccagagaccaaacaaggactaatccaatacctcttggattttatttaatgtcataatgttgtcagaataaagagaaagatgaaataatt

SEQ ID NO: 88299 - DNA, 201 bp, Homo sapiens
tgaaagcatcatgaggagacggggcctgacctcaccctgcaaagacatcaacacatttattcatggcaacaagcgcagcatcaaggccatctgtgaaaacragaatggaaaccctcacagagaaaacctaagaataagcaagtcttctttccaggtcaccacttgcaagctacatggaggttccccctggcctccatgcca

SEQ ID NO: 88300 - DNA, 201 bp, Homo sapiens
ctcacagagaaaacctaagaataagcaagtcttctttccaggtcaccacttgcaagctacatggaggttccccctggcctccatgccagtaccgagccacwgcggggttcagaaacgttgttgttgcttgtgaaaatggcttacctgtccacttggatcagtcaattttccgtcgtccgtaaccagcgggcccctggtcaa

SEQ ID NO: 88301 - DNA, 201 bp, Homo sapiens
tcaaggccatctgtgaaaacaagaatggaaaccctcacagagaaaacctaagaataagcaagtcttctttccaggtcaccacttgcaagctacatggaggktccccctggcctccatgccagtaccgagccacagcggggttcagaaacgttgttgttgcttgtgaaaatggcttacctgtccacttggatcagtcaattt

SEQ ID NO: 88302 - DNA, 201 bp, Homo sapiens; identical to SEQ ID NO: 88299

SEQ ID NO: 88303 - DNA, 201 bp, Homo sapiens; identical to SEQ ID NO: 88300

SEQ ID NO: 88304 - DNA, 201 bp, Homo sapiens; identical to SEQ ID NO: 88301

SEQ ID NO: 88305 - DNA, 201 bp, Homo sapiens; identical to SEQ ID NO: 88299

SEQ ID NO: 88306 - DNA, 201 bp, Homo sapiens; identical to SEQ ID NO: 88300

SEQ ID NO: 88307 - DNA, 201 bp, Homo sapiens; identical to SEQ ID NO: 88301

SEQ ID NO: 88308 - DNA, 201 bp, Homo sapiens
cataacagaactctcaacaattgtcatcggagtagattccgggtgcctttactccactgtgacctcataaatccaggtgcacagaatatttcaaactgcasgtatgcagacagaccaggaaggaggttctatgtagttgcatgtgacaacagagatccacgggattctccacggtatcctgtggttccagttcacctggat

SEQ ID NO: 88309 - DNA, 201 bp, Homo sapiens
ctatgtagttgcatgtgacaacagagatccacgggattctccacggtatcctgtggttccagttcacctggataccaccatctaagctcctgtatcagcastcctcatcatcactcatctgccaagctcctcaatcatagccaagatcccatccctccatgtactctgggtatcagcaactgtcctcatcagtctccatac

SEQ ID NO: 88310 - DNA, 201 bp, Homo sapiens
ttaagctggtgaaaacagagctacaaagcccagaacacccattggaccaacactatagaaacctacattgtgccttgcgcccccttgaccatgaaagttaygagttcaaagtgatttcccagtacctacaatctacccatgctcccacacacagcgactataccatgaccttgctggatttgtttgaagtggagaaggatg

SEQ ID NO: 88311 - DNA, 201 bp, Homo sapiens
tcaactacaatgaatatattgtatataaccccaaccaggtccgtatgcggtaccttttaaaggttcagtttaatttccttcagctgtggtgaatgttgatmttaaataaaccagagatctgatcttcaagcaagaaaataagcagtgttgtacttgtgaattttgtgatattttatgtaataaaaactgtacaggtctacc

SEQ ID NO: 88312 - DNA, 201 bp, Homo sapiens
caggttaccagtctcttaagaagattgaggattgtattcgggctggccagcatggacgagctctcatggaagcatgcaatgaattctacaccaggattccrcatgactttggactccgtactcctccactaatccggacacagaaggaactgtcagaaaaaatacaattactagaggctttgggagacattgaaattgcta

SEQ ID NO: 88313 - DNA, 201 bp, Homo sapiens
ctcatggaagcatgcaatgaattctacaccaggattccgcatgactttggactccgtactcctccactaatccggacacagaaggaactgtcagaaaaaayacaattactagaggctttgggagacattgaaattgctattaagctggtgaaaacagagctacaaagcccagaacacccattggaccaacactatagaaac

SEQ ID NO: 88314 - DNA, 201 bp, Homo sapiens
aagaaagccccacttgggaagctgacagtggcacaaatcaaggcaggttaccagtctcttaagaagattgaggattgtattcgggctggccagcatggacragctctcatggaagcatgcaatgaattctacaccaggattccgcatgactttggactccgtactcctccactaatccggacacagaaggaactgtcagaa

SEQ ID NO: 88315 - DNA, 201 bp, Homo sapiens; identical to SEQ ID NO: 88310

SEQ ID NO: 88316 - DNA, 201 bp, Homo sapiens; identical to SEQ ID NO: 88311

SEQ ID NO: 88317 - DNA, 201 bp, Homo sapiens; identical to SEQ ID NO: 88312

SEQ ID NO: 88318 - DNA, 201 bp, Homo sapiens; identical to SEQ ID NO: 88313

SEQ ID NO: 88319 - DNA, 201 bp, Homo sapiens; identical to SEQ ID NO: 88314

SEQ ID NO: 88320 - DNA, 201 bp, Homo sapiens
ctcttctggataactttgagtggaaccagggatacagcagccggtttggtctcttccacgttgattttgaagacccagctagaccccgagtcccttacacrtcggccaaggaatatgccaagatcatccgaaacaatggccttgaagcacatctgtaggcaagatggctgagaaatacaggagaggcgtctgcttttggaa

SEQ ID NO: 88321 - DNA, 201 bp, Homo sapiens
ttgagtggaaccagggatacagcagccggtttggtctcttccacgttgattttgaagacccagctagaccccgagtcccttacacatcggccaaggaatawgccaagatcatccgaaacaatggccttgaagcacatctgtaggcaagatggctgagaaatacaggagaggcgtctgcttttggaaaggaaatctgctttg

SEQ ID NO: 88322 - DNA, 201 bp, Homo sapiens
taactttgagtggaaccagggatacagcagccggtttggtctcttccacgttgattttgaagacccagctagaccccgagtcccttacacatcggccaagkaatatgccaagatcatccgaaacaatggccttgaagcacatctgtaggcaagatggctgagaaatacaggagaggcgtctgcttttggaaaggaaatctg

SEQ ID NO: 88323 - DNA, 201 bp, Homo sapiens
gaaaggagaactaggtattctccaggatgcggaaattgaattttttccagatccatcttggaaaaatgtggattggatctacgtggtaccatggggagtaygtaaactactgaaatatattaaggatacatataataaccctgtaatttacatcactgagaatgggtttccccagagtgacccagcgcctcttgatgacac

SEQ ID NO: 88324 - DNA, 201 bp, Homo sapiens
ggcgtctgcttttggaaaggaaatctgctttggtgatgatctttcaggcaatctcaacttacttctttaatcaacatttaatatcaatggatctgtgattaaaaggtctgaatatgtaatgcctcgtgaagtatttaataatggcctttatttgtatttggatcaatgaggtttttaaaaaaaatggaagagaaaaccact

SEQ ID NO: 88325 - DNA, 201 bp, Homo sapiens
aagagaagaaaatgatcaaaggcactgctgatttttttgctgtgcaatattatacaactcgcttaatcaagtaccaggagaacaagaaaggagaactaggkattctccaggatgcggaaattgaattttttccagatccatcttggaaaaatgtggattggatctacgtggtaccatggggagtatgtaaactactgaaat

SEQ ID NO: 88326 - DNA, 201 bp, Homo sapiens
tctgcttttggaaaggaaatctgctttggtgatgatctttcaggcaatctcaacttacttctttaatcaacatttaatatcaatggatctgtgattaaaakgtctgaatatgtaatgcctcgtgaagtatttaataatggcctttatttgtatttggatcaatgaggtttttaaaaaaaatggaagagaaaaccactaacc

SEQ ID NO: 88327 - DNA, 201 bp, Homo sapiens
ttgaatcctttgacaaatatgctcagttttgcttcagtacctttggggatcgtgtcaagcagtggatcaccataaatgaagctaatgttctttctgtgatrtcatatgacttaggtatgtttcctccgggtatccctcactttgggactggaggttatcaggcagctcataatttgattaaggctcatgccagatcctggc

SEQ ID NO: 88328 - DNA, 201 bp, Homo sapiens
ttctggataactttgagtggaaccagggatacagcagccggtttggtctcttccacgttgattttgaagacccagctagaccccgagtcccttacacatcrgccaaggaatatgccaagatcatccgaaacaatggccttgaagcacatctgtaggcaagatggctgagaaatacaggagaggcgtctgcttttggaaagg

SEQ ID NO: 88329 - DNA, 201 bp, Homo sapiens
cctccgggtatccctcactttgggactggaggttatcaggcagctcataatttgattaaggctcatgccagatcctggcacagctatgattccttatttcsaaaaaagcagaaaggtatggtgtctctatcactttttgcggtctggttggaaccagcagatcccaactcagtgtctgaccaggaagctgctaaaagagcc

SEQ ID NO: 88330 - DNA, 201 bp, Homo sapiens; identical to SEQ ID NO: 88320

SEQ ID NO: 88331 - DNA, 201 bp, Homo sapiens; identical to SEQ ID NO: 88321

SEQ ID NO: 88332 - DNA, 201 bp, Homo sapiens; identical to SEQ ID NO: 88322

SEQ ID NO: 88333 - DNA, 201 bp, Homo sapiens; identical to SEQ ID NO: 88323

SEQ ID NO: 88334 - DNA, 201 bp, Homo sapiens; identical to SEQ ID NO: 88324

SEQ ID NO: 88335 - DNA, 201 bp, Homo sapiens; identical to SEQ ID NO: 88325

SEQ ID NO: 88336 - DNA, 201 bp, Homo sapiens; identical to SEQ ID NO: 88326

SEQ ID NO: 88337 - DNA, 201 bp, Homo sapiens; identical to SEQ ID NO: 88327

SEQ ID NO: 88338 - DNA, 201 bp, Homo sapiens; identical to SEQ ID NO: 88328

SEQ ID NO: 88339 - DNA, 201 bp, Homo sapiens; identical to SEQ ID NO: 88329

SEQ ID NO: 88340 - DNA, 201 bp, Homo sapiens
ccaatgggaattacattgatctggtgtctggccttggttcttatcaagtggatcacctctaagaggcgtggagctatttcctatgacagttctgatcagastgcattatacattcgtatgctaggagatgtacgtgtaaggagccgagcaggatttgaatcagaaagaagaggttctcacccatatattgattttcgtatt

SEQ ID NO: 88341 - DNA, 201 bp, Homo sapiens
agactcctaagaagttttccttgctccctagtagaagagagagattatgcagcgggcttttgattgatccaatgggaattacattgatctggtgtctggcyttggttcttatcaagtggatcacctctaagaggcgtggagctatttcctatgacagttctgatcagactgcattatacattcgtatgctaggagatgtac

SEQ ID NO: 88342 - DNA, 201 bp, Homo sapiens
atcacctctaagaggcgtggagctatttcctatgacagttctgatcagactgcattatacattcgtatgctaggagatgtacgtgtaaggagccgagcagratttgaatcagaaagaagaggttctcacccatatattgattttcgtattttccactctcaatctgaaattgaagtgtctgtctctgcaaggaatatcaga

SEQ ID NO: 88343 - DNA, 201 bp, Homo sapiens
tgacttacctagtggagcctttatttacagaatgggccaggttttccaatacaaggctatcccagacaatgcttggacacgtggggctgaataaagccagytggaagggactgcagagagaacagtcgagcagtgaggacactgatgctgcatttgagttgaactcacagttattacctcaggaaaatcggttatcataac

SEQ ID NO: 88344 - DNA, 201 bp, Homo sapiens; identical to SEQ ID NO: 88340

SEQ ID NO: 88345 - DNA, 201 bp, Homo sapiens; identical to SEQ ID NO: 88341

SEQ ID NO: 88346 - DNA, 201 bp, Homo sapiens; identical to SEQ ID NO: 88342

SEQ ID NO: 88347 - DNA, 201 bp, Homo sapiens; identical to SEQ ID NO: 88343

SEQ ID NO: 88348 - DNA, 201 bp, Homo sapiens
gccatcagcttcagctccagctccgctctcttcggctgccccaatccccggcagctctctcagaggcgtggagctatttcctatgacagttctgatcagastgcattatacattcgtatgctaggagatgtacgtgtaaggagccgagcaggatttgaatcagaaagaagaggttctcacccatatattgattttcgtatt

SEQ ID NO: 88349 - DNA, 201 bp, Homo sapiens
cagctctctcagaggcgtggagctatttcctatgacagttctgatcagactgcattatacattcgtatgctaggagatgtacgtgtaaggagccgagcagratttgaatcagaaagaagaggttctcacccatatattgattttcgtattttccactctcaatctgaaattgaagtgtctgtctctgcaaggaatatcaga

SEQ ID NO: 88350 - DNA, 201 bp, Homo sapiens; identical to SEQ ID NO: 88348

SEQ ID NO: 88351 - DNA, 201 bp, Homo sapiens; identical to SEQ ID NO: 88349

SEQ ID NO: 88352 - DNA, 201 bp, Homo sapiens; identical to SEQ ID NO: 88343

SEQ ID NO: 88353 - DNA, 201 bp, Homo sapiens
tggatatttataaggtggaaacaataggtgatgcctactgtgttgcagcagggctccacagaaaaagcctctgccatgctaaacccattgctctgatggcyttgaagatgatggaactttcagaagaggtgctgacacctgatggaagaccgattcagatgaggataggaattcactcaggctccgtgctggctggagttg

SEQ ID NO: 88354 - DNA, 201 bp, Homo sapiens
ggacactgcagtattatgaacatcaagttattggttacagggatgcagaaaagaatttccacaatatctctaacagatgctcctatgcagaccactccaayaaagaagaaattgaagatgtctcaggaattcttcagtgtactgctaatatactcggtttgaagtttgaggaaattcaaaaaagatttggtgaagagttct

SEQ ID NO: 88355 - DNA, 201 bp, Homo sapiens
aggagggggagtgccccctgtctaggctctgctggaatggcagccggagcccgcccgggccgctggagcccagcccggccgcagctgccgctgccgccgcyccggccccgaccccggctgcttctgccgccgccgccgctgccactgccggggccaggagggtgcagcgccggaggcgggtcaacctggactcgctgggcg

SEQ ID NO: 88356 - DNA, 201 bp, Homo sapiens
accactccaacaaagaagaaattgaagatgtctcaggaattcttcagtgtactgctaatatactcggtttgaagtttgaggaaattcaaaaaagatttggkgaagagttctttaatatatgctttcatgagaatgagagagtccttcgagctgtaggtggcactttgcaggacttttttaacggctttgatgctttgttgg

SEQ ID NO: 88357 - DNA, 201 bp, Homo sapiens
cactgcagtattatgaacatcaagttattggttacagggatgcagaaaagaatttccacaatatctctaacagatgctcctatgcagaccactccaacaargaagaaattgaagatgtctcaggaattcttcagtgtactgctaatatactcggtttgaagtttgaggaaattcaaaaaagatttggtgaagagttcttta

SEQ ID NO: 88358 - DNA, 201 bp, Homo sapiens
tggaagtggaacaggttgcaaatgagaagctatgctctgatgtttcaaacccaggcaattgtagctgtcttactttccttatcaaagaatgtgaaaatackaatatcatgaagaaccttccacagggaacctcccaagttcctgcggacctcagaattagcatcaacaccttctgtagagccttccctttccacttgatgt

SEQ ID NO: 88359 - DNA, 201 bp, Homo sapiens
ggaacaggttgcaaatgagaagctatgctctgatgtttcaaacccaggcaattgtagctgtcttactttccttatcaaagaatgtgaaaatactaatatcrtgaagaaccttccacagggaacctcccaagttcctgcggacctcagaattagcatcaacaccttctgtagagccttccctttccacttgatgtttgatcc

SEQ ID NO: 88360 - DNA, 201 bp, Homo sapiens
agctgaagctgagccaggcgcacagcgtccagcctctcagcctcactgttctgttgctgctatcactcctgtcccctcagctgtgccctgctgcctgagcrtccccctacccccccagggcctgctgccttttgggacttaaaccccagcctcccccgtccatccagccctggggctggggggcttcaactatagttgccc

SEQ ID NO: 88361 - DNA, 201 bp, Homo sapiens
gggtgggggcatggggcccaggaggttgctagagataggaaatggggcaaatcgcaggtgacctcagcagtacctggatgattcccaccaaggaggaatgrccaaaccagatgggtgagaacaagcccaatgtgatgcacacctacccttgctaaataaacgctgctggtcagcctctagcccacaagcccctcttggtcc

SEQ ID NO: 88362 - DNA, 201 bp, Homo sapiens
aaagctgtgtgaacccaggtgtcccggaaaggggctgcaggacacagcaaaatgccagcagcatgccggacccctcccttccatcctcctctccaaagaasagaggtcaggaaaaacactggctgggacgctagaagggtcatgtgttaactataatcacatttatggtttggaaccatcaccccaaggtaaaaaaaaaat

SEQ ID NO: 88363 - DNA, 201 bp, Homo sapiens
gggtatcgcgatccacttaaggatgaggcagacttggtgacaagctggtctgagcagcgcctccagagccagaactgagcccagtgagagcgcaccctggrgcagcctggattcctggggtgtccccggcagccacacacagccatgcactacccaactgcactcctcttcctcatcctggccaatggggcccaggccttt

SEQ ID NO: 88364 - DNA, 201 bp, Homo sapiens
tctccacacagaaaatctgcaccagttatgtaagctaaaaagctgtgtgaacccaggtgtcccggaaaggggctgcaggacacagcaaaatgccagcagcrtgccggacccctcccttccatcctcctctccaaagaagagaggtcaggaaaaacactggctgggacgctagaagggtcatgtgttaactataatcacatt

SEQ ID NO: 88365 - DNA, 201 bp, Homo sapiens
tgggccatgtttattgtggattggtaagaatcaccaggaaaccattaagccccaatagctacaaggagggtggttaatctgctatatcaaactccttcccygaaaccagcaaacaccgggaaacattttggctcattataatccggtgaacaatgcagtcaggcctgttataaccgctgagcagccacactcgcacctcct

SEQ ID NO: 88366 - DNA, 201 bp, Homo sapiens
tggccagggagcaggtgatggacaccttagttcggatactggctcgctgtgacatcatggtgctgcaggaggtggtggactcttccggcagcgccatcccsctcctgcttcgagaactcaatcgatttgatggctctgggccctacagcaccctgagcagcccccagctggggcgcagcacctacatggagacgtatgtgt

SEQ ID NO: 88367 - DNA, 201 bp, Homo sapiens
cccagcggctgacactggccaaggtggccagggagcaggtgatggacaccttagttcggatactggctcgctgtgacatcatggtgctgcaggaggtggtrgactcttccggcagcgccatcccgctcctgcttcgagaactcaatcgatttgatggctctgggccctacagcaccctgagcagcccccagctggggcgca

SEQ ID NO: 88368 - DNA, 201 bp, Homo sapiens
atcgcgatccacttaaggatgaggcagacttggtgacaagctggtctgagcagcgcctccagagccagaactgagcccagtgagagcgcaccctggggcarcctggattcctggggtgtccccggcagccacacacagccatgcactacccaactgcactcctcttcctcatcctggccaatggggcccaggcctttcgca

SEQ ID NO: 88369 - DNA, 201 bp, Homo sapiens
ccagctggggcgcagcacctacatggagacgtatgtgtacttctatcggtcacacaaaacacaggtcctgagttcctacgtgtacaacgatgaggatgacrtctttgcccgggagccatttgtggcccagttctctttgcccagcaatgtccttcccagcctggtgttggtcccgctgcacaccactcctaaggccgtaga

SEQ ID NO: 88370 - DNA, 201 bp, Homo sapiens
ctgcctttgacttccccacgagcttccagctcaccgaggaggaggccctcaacatcagtgaccactaccccgtggaggtggagctgaagctgagccaggcrcacagcgtccagcctctcagcctcactgttctgttgctgctatcactcctgtcccctcagctgtgccctgctgcctgagcgtccccctacccccccaggg

SEQ ID NO: 88371 - DNA, 201 bp, Homo sapiens; identical to SEQ ID NO: 88360

SEQ ID NO: 88372 - DNA, 201 bp, Homo sapiens; identical to SEQ ID NO: 88361

SEQ ID NO: 88373 - DNA, 201 bp, Homo sapiens; identical to SEQ ID NO: 88362

SEQ ID NO: 88374 - DNA, 201 bp, Homo sapiens
cagaagcagctgtaggtgcccaccaagcccatgacgacgctgctggccagggtccagcgcctccagagccagaactgagcccagtgagagcgcaccctggrgcagcctggattcctggggtgtccccggcagccacacacagccatgcactacccaactgcactcctcttcctcatcctggccaatggggcccaggccttt

SEQ ID NO: 88375 - DNA, 201 bp, Homo sapiens; identical to SEQ ID NO: 88364

SEQ ID NO: 88376 - DNA, 201 bp, Homo sapiens; identical to SEQ ID NO: 88365

SEQ ID NO: 88377 - DNA, 201 bp, Homo sapiens; identical to SEQ ID NO: 88366

SEQ ID NO: 88378 - DNA, 201 bp, Homo sapiens; identical to SEQ ID NO: 88367

SEQ ID NO: 88379 - DNA, 201 bp, Homo sapiens
agcagctgtaggtgcccaccaagcccatgacgacgctgctggccagggtccagcgcctccagagccagaactgagcccagtgagagcgcaccctggggcarcctggattcctggggtgtccccggcagccacacacagccatgcactacccaactgcactcctcttcctcatcctggccaatggggcccaggcctttcgca

SEQ ID NO: 88380 - DNA, 201 bp, Homo sapiens; identical to SEQ ID NO: 88369

SEQ ID NO: 88381 - DNA, 201 bp, Homo sapiens; identical to SEQ ID NO: 88370

SEQ ID NO: 88382 - DNA, 201 bp, Homo sapiens; identical to SEQ ID NO: 88360

SEQ ID NO: 88383 - DNA, 201 bp, Homo sapiens; identical to SEQ ID NO: 88361

SEQ ID NO: 88384 - DNA, 201 bp, Homo sapiens; identical to SEQ ID NO: 88362

SEQ ID NO: 88385 - DNA, 201 bp, Homo sapiens; identical to SEQ ID NO: 88363

SEQ ID NO: 88386 - DNA, 201 bp, Homo sapiens; identical to SEQ ID NO: 88364

SEQ ID NO: 88387 - DNA, 201 bp, Homo sapiens; identical to SEQ ID NO: 88365

SEQ ID NO: 88388 - DNA, 201 bp, Homo sapiens; identical to SEQ ID NO: 88366

SEQ ID NO: 88389 - DNA, 201 bp, Homo sapiens; identical to SEQ ID NO: 88367

SEQ ID NO: 88390 - DNA, 201 bp, Homo sapiens; identical to SEQ ID NO: 88368

SEQ ID NO: 88391 - DNA, 201 bp, Homo sapiens; identical to SEQ ID NO: 88369

SEQ ID NO: 88392 - DNA, 201 bp, Homo sapiens; identical to SEQ ID NO: 88370

SEQ ID NO: 88393 - DNA, 201 bp, Homo sapiens; identical to SEQ ID NO: 88360

SEQ ID NO: 88394 - DNA, 201 bp, Homo sapiens; identical to SEQ ID NO: 88361

SEQ ID NO: 88395 - DNA, 201 bp, Homo sapiens; identical to SEQ ID NO: 88362

SEQ ID NO: 88396 - DNA, 201 bp, Homo sapiens; identical to SEQ ID NO: 88363

SEQ ID NO: 88397 - DNA, 201 bp, Homo sapiens; identical to SEQ ID NO: 88364

SEQ ID NO: 88398 - DNA, 201 bp, Homo sapiens; identical to SEQ ID NO: 88365

SEQ ID NO: 88399 - DNA, 201 bp, Homo sapiens; identical to SEQ ID NO: 88366

SEQ ID NO: 88400 - DNA, 201 bp, Homo sapiens; identical to SEQ ID NO: 88367

SEQ ID NO: 88401 - DNA, 201 bp, Homo sapiens; identical to SEQ ID NO: 88368

SEQ ID NO: 88402 - DNA, 201 bp, Homo sapiens; identical to SEQ ID NO: 88369

SEQ ID NO: 88403 - DNA, 201 bp, Homo sapiens; identical to SEQ ID NO: 88370

SEQ ID NO: 88404 - DNA, 201 bp, Homo sapiens; identical to SEQ ID NO: 88360

SEQ ID NO: 88405 - DNA, 201 bp, Homo sapiens; identical to SEQ ID NO: 88361

SEQ ID NO: 88406 - DNA, 201 bp, Homo sapiens; identical to SEQ ID NO: 88362

SEQ ID NO: 88407 - DNA, 201 bp, Homo sapiens; identical to SEQ ID NO: 88363

SEQ ID NO: 88408 - DNA, 201 bp, Homo sapiens; identical to SEQ ID NO: 88364

SEQ ID NO: 88409 - DNA, 201 bp, Homo sapiens; identical to SEQ ID NO: 88365

SEQ ID NO: 88410 - DNA, 201 bp, Homo sapiens; identical to SEQ ID NO: 88366

SEQ ID NO: 88411 - DNA, 201 bp, Homo sapiens; identical to SEQ ID NO: 88367

SEQ ID NO: 88412 - DNA, 201 bp, Homo sapiens; identical to SEQ ID NO: 88368

SEQ ID NO: 88413 - DNA, 201 bp, Homo sapiens; identical to SEQ ID NO: 88369

SEQ ID NO: 88414 - DNA, 201 bp, Homo sapiens; identical to SEQ ID NO: 88370

SEQ ID NO: 88415 - DNA, 201 bp, Homo sapiens
acaacgccgctgtcgccctgctgcagcccttcctggaggtcaccaaggaggcctttgacagatcctttgaggtgaacctgcgtgcggtcatccaggtgtcrcagattgtggccaggggcttaatagcccggggagtcccaggggccatcgtgaatgtctccagccagtgctcccagcgggcagtaactaaccatagcgtct

SEQ ID NO: 88416 - DNA, 172 bp, Homo sapiens
agcttcaagttccgcagccccagtgcggagggcggagactgcgccgacatggagctgttcctcgcgggccgycgggtgctggtcaccggggcaggcaaaggtatagggcgcggcacggtccaggcgctgcacgcgacgggcgcgcgggtggtggctgtgagccggactcagg

SEQ ID NO: 88417 - DNA, 159 bp, Homo sapiens
gccaagactatgctgaaccgaatcccacttggcaagtttgctggtcccacagatgtacataaccgaggggcagagaaaacagtcgtgtatgcagaaataastaggaagtgacgtttgccgattttgcttttaataacacaaattgtaagcttctataat

SEQ ID NO: 88418 - DNA, 201 bp, Homo sapiens; identical to SEQ ID NO: 88415

SEQ ID NO: 88419 - DNA, 172 bp, Homo sapiens; identical to SEQ ID NO: 88416

SEQ ID NO: 88420 - DNA, 195 bp, Homo sapiens
agtttgctgaggtagagcacgtggtgaacgccatcctctttctgctgagtgaccgaagtggcatgaccacgggttccactttgccggtggaagggggcttytgggcctgctgagctccctccacacacctcaagccccatgccgtgctcatcctacccccaatccctccaataaacctgattctgctgcccagac

SEQ ID NO: 88421 - DNA, 201 bp, Homo sapiens
gtccatgggccaggccacctggagtgacccccacaaggccaagactatgctgaaccgaatcccacttggcaagtttgctgaggtagagcacgtggtgaacrccatcctctttctgctgagtgaccgaagtggcatgaccacgggttccactttgccggtggaagggggcttctgggcctgctgagctccctccacacacct

SEQ ID NO: 88422 - DNA, 201 bp, Homo sapiens
tgcagaggcagagcactggggagagggacggtcggcccctctggcagaaggtaccactcacagctcgtagagcagggtttgcacttgggaagaagtgatgrcctgttttggcttttgtaggaaaactgaaataatgtgtttctgaactattgttcctgcaccttttctaggttgatgaccgatttttttggaataaataca

SEQ ID NO: 88423 - DNA, 201 bp, Homo sapiens
atgacctgaccaattccgtgcagaggcagagcactggggagagggacggtcggcccctctggcagaaggtaccactcacagctcgtagagcagggtttgcmcttgggaagaagtgatggcctgttttggcttttgtaggaaaactgaaataatgtgtttctgaactattgttcctgcaccttttctaggttgatgaccgat

SEQ ID NO: 88424 - DNA, 201 bp, Homo sapiens
tgagcaaattttcatctctaaatcaaaaagtgaagcagaccaaatccaatgtaaatattggcaacctccgaaagctaggaaactttaccaaacctgaaatraaagttaactttctaaaaccaaacttaaaagtaaatctttggaaatcagatagtagtcttgaaactatggaaaacacaggagtgatggataaggttcagg

SEQ ID NO: 88425 - DNA, 201 bp, Homo sapiens
aggagttgagggttattgacactagagaaatgaattctcatttgatcctaattttccccgtattctacttgaacacattaaaaatactctgctgcctatayaatgtaaacctaggagcattaagacttgtcacacagtaaacctgatacatcagaggtgaataccagcacctattaggtttcattttgctgttttcaggaa

SEQ ID NO: 88426 - DNA, 201 bp, Homo sapiens
tgctgcctatacaatgtaaacctaggagcattaagacttgtcacacagtaaacctgatacatcagaggtgaataccagcacctattaggtttcattttgcygttttcaggaatgtaagaacacccatattggctactggaaattctagaagtcagtcaggttttaatttattccaggaggggcatcctcgacatcttatgt

SEQ ID NO: 88427 - DNA, 201 bp, Homo sapiens
caacttcaaaatttagtctgggcctagtgcagtggctcacacctataatcccaacactttgggaggccaggagttttgagaccagcctgggaaacatctgyctctacaaaaaaatacaaaaattagctgggcatagtggtgcatgcctgtgtttctagctacgcaggaggattgcttgagcccatgagattgaggctgcag

SEQ ID NO: 88428 - DNA, 201 bp, Homo sapiens
taaacctgatacatcagaggtgaataccagcacctattaggtttcattttgctgttttcaggaatgtaagaacacccatattggctactggaaattctagmagtcagtcaggttttaatttattccaggaggggcatcctcgacatcttatgtagatgatccacaacttcaaaatttagtctgggcctagtgcagtggctc

SEQ ID NO: 88429 - DNA, 201 bp, Homo sapiens
ggaggccaggagttttgagaccagcctgggaaacatctgtctctacaaaaaaatacaaaaattagctgggcatagtggtgcatgcctgtgtttctagctaygcaggaggattgcttgagcccatgagattgaggctgcagtgagctgtgatcgtgccactgacctccagcctgggggacagagcaagaccgtgtctcaaaa

SEQ ID NO: 88430 - DNA, 201 bp, Homo sapiens
agaaagttgtatggcatattccaacaagtattggttcgtctggtgtctttagagctttactctgttgaagtgactgattctcaactgaacattatgtcgtwactttgataagcattccacttttgttatttattagtgctatcttttttttttacgtgttaaatcttgtgattattaaaataaagtaccattgtaatttaa

SEQ ID NO: 88431 - DNA, 201 bp, Homo sapiens
ctgtaatccccacagtaagaaagttgtatggcatattccaacaagtattggttcgtctggtgtctttagagctttactctgttgaagtgactgattctcarctgaacattatgtcgttactttgataagcattccacttttgttatttattagtgctatcttttttttttacgtgttaaatcttgtgattattaaaataaa

SEQ ID NO: 88432 - DNA, 201 bp, Homo sapiens
cagaaccagggctgcccctgtaatccccacagtaagaaagttgtatggcatattccaacaagtattggttcgtctggtgtctttagagctttactctgttraagtgactgattctcaactgaacattatgtcgttactttgataagcattccacttttgttatttattagtgctatcttttttttttacgtgttaaatctt

SEQ ID NO: 88433 - DNA, 201 bp, Homo sapiens
agcacctattaggtttcattttgctgttttcaggaatgtaagaacacccatattggctactggaaattctagaagtcagtcaggttttaatttattccagraggggcatcctcgacatcttatgtagatgatccacaacttcaaaatttagtctgggcctagtgcagtggctcacacctataatcccaacactttgggagg

SEQ ID NO: 88434 - DNA, 201 bp, Homo sapiens
tgagaatgttcagacactaacagatgccatttatgacattattcttgatatgaagtggtgttgggttgatgaagctggggtaatatgtaagcaggaagggrtttttcgtgttaattgtatggactgcctggatcgcaccaacgtggtccaagctgccatcgcgagagtggtcatggaacagcagctgaaaaaattaggtgt

SEQ ID NO: 88435 - DNA, 201 bp, Homo sapiens
tagagagtgtagggccaatagattacgttcttcctagttgtggtattattgcctcagcgcctcgattgggcagtcggtcccagtctcttagcagcacagayagtagcgttcatgctccttcagagattactgttgctcatgggagtgggcttggaaaaggccaggagtctcctttgaagaaaagtccttctgctggcgacg

SEQ ID NO: 88436 - DNA, 201 bp, Homo sapiens
agacgtggatgtgctgttactgctttctaactctgcctactacgtggcctattatgatgatgaagttgataaagtaaaccagtatcaacgactaagtctasaaaacctggaaaaaattgaaataggccctgaacccactctttttggtaagccaaagttctcctgcatgcgactgcactacagatacaaagaagcgagtgg

SEQ ID NO: 88437 - DNA, 201 bp, Homo sapiens
gattgggcagtcggtcccagtctcttagcagcacagatagtagcgttcatgctccttcagagattactgttgctcatgggagtgggcttggaaaaggccasgagtctcctttgaagaaaagtccttctgctggcgacgtacacatattgactggctttgccaagcctatggatatttactgccacagatttgtgcaagatg

SEQ ID NO: 88438 - DNA, 201 bp, Homo sapiens
tgtgcaagatgcacagaacaaagtgacccacctatcagagaccagatctgtgtctcagcaggctagtcaggaaagaaatcaaatgaccaatcaagtttcaratgaaacccaatcagaatcaacagaacagacaccttctcggccatcgcaattagatgtctctctttctgcaacaggcccacagtttttgtcagttgagcc

SEQ ID NO: 88439 - DNA, 201 bp, Homo sapiens
tctggcagaaggttgatgaccgatttttttggaataaatacatgatacaagatcttactgagattggtactccagatgtggacttttggattatccccatratccaaggttttgtgcagattgaagaacttgtggttaattataccgaatcatctgatgatgagaaaagcagcccagagaccccccctcaggagtccacct

SEQ ID NO: 88440 - DNA, 201 bp, Homo sapiens
tcagagaccagatctgtgtctcagcaggctagtcaggaaagaaatcaaatgaccaatcaagtttcaaatgaaacccaatcagaatcaacagaacagacacyttctcggccatcgcaattagatgtctctctttctgcaacaggcccacagtttttgtcagttgagccagcgcattcagttgcatctcaaaaaacccccacc

SEQ ID NO: 88441 - DNA, 201 bp, Homo sapiens
acgtacacatattgactggctttgccaagcctatggatatttactgccacagatttgtgcaagatgcacagaacaaagtgacccacctatcagagaccagrtctgtgtctcagcaggctagtcaggaaagaaatcaaatgaccaatcaagtttcaaatgaaacccaatcagaatcaacagaacagacaccttctcggccat

SEQ ID NO: 88442 - DNA, 201 bp, Homo sapiens
taaaagtaaatctttggaaatcagatagtagtcttgaaactatggaaaacacaggagtgatggataaggttcaggcagagtctgatggggacatgtcttcrgataatgactcataccactctgatgaattccttacaaattctaagtctgatgaagacaggcagctagctaactcattagagagtgtagggccaatagatt

SEQ ID NO: 88443 - DNA, 201 bp, Homo sapiens; identical to SEQ ID NO: 88424

SEQ ID NO: 88444 - DNA, 201 bp, Homo sapiens; identical to SEQ ID NO: 88425

SEQ ID NO: 88445 - DNA, 201 bp, Homo sapiens; identical to SEQ ID NO: 88426

SEQ ID NO: 88446 - DNA, 201 bp, Homo sapiens; identical to SEQ ID NO: 88427

SEQ ID NO: 88447 - DNA, 201 bp, Homo sapiens; identical to SEQ ID NO: 88428

SEQ ID NO: 88448 - DNA, 201 bp, Homo sapiens
ggaggccaggagttttgagaccagcctgggaaacatctgtctctacaaaaaaatacaaaaattagctgggcatagtggtgcatgcctgtgtttctagctaygcaggaggattgcttgagcccatgagattgaggctgcagtgagctgtgatcgtgccactgacctccagcctgggggacagagcaagaccaacaatttagt

SEQ ID NO: 88449 - DNA, 201 bp, Homo sapiens; identical to SEQ ID NO: 88433

SEQ ID NO: 88450 - DNA, 201 bp, Homo sapiens; identical to SEQ ID NO: 88434

SEQ ID NO: 88451 - DNA, 201 bp, Homo sapiens; identical to SEQ ID NO: 88435

SEQ ID NO: 88452 - DNA, 201 bp, Homo sapiens; identical to SEQ ID NO: 88436

SEQ ID NO: 88453 - DNA, 201 bp, Homo sapiens; identical to SEQ ID NO: 88439

SEQ ID NO: 88454 - DNA, 201 bp, Homo sapiens; identical to SEQ ID NO: 88438

SEQ ID NO: 88455 - DNA, 201 bp, Homo sapiens; identical to SEQ ID NO: 88437

SEQ ID NO: 88456 - DNA, 201 bp, Homo sapiens; identical to SEQ ID NO: 88440

SEQ ID NO: 88457 - DNA, 201 bp, Homo sapiens; identical to SEQ ID NO: 88441

SEQ ID NO: 88458 - DNA, 201 bp, Homo sapiens; identical to SEQ ID NO: 88442

SEQ ID NO: 88459 - DNA, 201 bp, Homo sapiens
tggacctgaaaatgccatacccatacctgatttatctgaaggcaattcctcagatatcaactatcaaactaggaaaactgtgagtttaacaccaagtcctrcaacacaagttgaaacacctgatcttgtggatcatgataacacttcaccactcttcagaacacccctcagttttactaatccacttcactctgatgactc

SEQ ID NO: 88460 - DNA, 201 bp, Homo sapiens
agctattgcccaactgtttgaaaaacagctacaactatatgaaattcatggagctcagaaaattgctgatggagtgaatgaaattaacactgaaaacatgrtcagctccatagagcctgaaaaacaagattctcctcctccaaaaccaccaaggacccgcagttgccttgttgaaggggatgctaaagaagaaatactgca

SEQ ID NO: 88461 - DNA, 201 bp, Homo sapiens
gattaagaaggtccctctccaagagggaccaaaaagttttgatgggaacacacttttgaataggggacatgcaattaaaattaaatctgcttcaccttgtrtagctgataaaatctctaagccacaggaattaagttcagatctaaatgtcggtgatacttcccagaattcttgtgtggactgcagtgtaacacaatcaaa

SEQ ID NO: 88462 - DNA, 201 bp, Homo sapiens
tctgtgccgggcgggcgggcggcgggggggccagcgaccgcagccggggggacgcgggaggatggagcaagtggagatcctgaggaaattcatccagaggrtccaggccatgaagagtcctgaccacaatggggaggacaacttcgcccgggacttcatgcggttaagaagattgtctaccaaatatagaacagaaaagat

SEQ ID NO: 88463 - DNA, 201 bp, Homo sapiens
taatttgataaagttgcaattgaaatattattaacagaagatgtaagaaatttctgcatggtctaaatctttgtgtactttatttgtaaattatttgcccyggagttttagaaaatagtttctgaattttaaacttgctggattcatgcagccagctttgcaggttatcagagatcaaagattgtaataataattttgtaa

SEQ ID NO: 88464 - DNA, 201 bp, Homo sapiens
ggaaaacccaaaggaccaagagatccaccttcagaatggacatgattcagggagctagaagacactttaagttatactggaaaattcaggtgccactgaamgccagatttatagtattccatctttaatatgtgggactaacagcagtgtagattgttaccttaatattttttgctgggaccatctacctgccttatacta

SEQ ID NO: 88465 - DNA, 201 bp, Homo sapiens; identical to SEQ ID NO: 88459

SEQ ID NO: 88466 - DNA, 201 bp, Homo sapiens; identical to SEQ ID NO: 88460

SEQ ID NO: 88467 - DNA, 201 bp, Homo sapiens; identical to SEQ ID NO: 88461

SEQ ID NO: 88468 - DNA, 201 bp, Homo sapiens; identical to SEQ ID NO: 88462

SEQ ID NO: 88469 - DNA, 201 bp, Homo sapiens; identical to SEQ ID NO: 88463

SEQ ID NO: 88470 - DNA, 201 bp, Homo sapiens; identical to SEQ ID NO: 88464

SEQ ID NO: 88471 - DNA, 201 bp, Homo sapiens; identical to SEQ ID NO: 88459

SEQ ID NO: 88472 - DNA, 201 bp, Homo sapiens; identical to SEQ ID NO: 88460

SEQ ID NO: 88473 - DNA, 201 bp, Homo sapiens; identical to SEQ ID NO: 88461

SEQ ID NO: 88474 - DNA, 201 bp, Homo sapiens; identical to SEQ ID NO: 88462

SEQ ID NO: 88475 - DNA, 201 bp, Homo sapiens
acatttctttgttttcaacattagaagtggtgtaacatgtaagctgagcacggtggcatgcctatagtcccagctacttgagaggctgaggcaggaggatygttgagcccaggagtttgagtgcaatctgggtaacattttttagaggtgccagttcccacctctaaaaaaaacaccaacaacaaaagaaatgatgcaaca

SEQ ID NO: 88476 - DNA, 201 bp, Homo sapiens
tttccctgtaaggggccaagtcctccaagttcaggctccctgggtggagcattttatccgagatggcagtgggctgacatatatttatcctggtacatccyatgtaaccctaggtggaactaggcaaaaaggggactggaatctgtccccggatgcagaaaatagcagagagattctttcccgatgctgtgctctggagcc

SEQ ID NO: 88477 - DNA, 201 bp, Homo sapiens
agcacagaacaggttcaaataacttttccactgcatgaaagtttaattagacatttctttgttttcaacattagaagtggtgtaacatgtaagctgagcayggtggcatgcctatagtcccagctacttgagaggctgaggcaggaggatcgttgagcccaggagtttgagtgcaatctgggtaacattttttagaggtgc

SEQ ID NO: 88478 - DNA, 201 bp, Homo sapiens
gggaagtggaggctggacactcactcggcgaatagaagacctgtgggaacttcatccgtcctttgacatcgtggtcaactgttcaggccttggaagcagasagcttgcaggagactcaaagattttccctgtaaggggccaagtcctccaagttcaggctccctgggtggagcattttatccgagatggcagtgggctgac

SEQ ID NO: 88479 - DNA, 201 bp, Homo sapiens
acatatatttatcctggtacatcccatgtaaccctaggtggaactaggcaaaaaggggactggaatctgtccccggatgcagaaaatagcagagagattckttcccgatgctgtgctctggagccctccctccacggagcctgcaacatcagggagaaggtgggcttgaggccctacaggccaggcgtgcgactgcagaca

SEQ ID NO: 88480 - DNA, 201 bp, Homo sapiens
caggcactgggaaacaaggtttggtgccagagattttggtggcttccaagactgctttttcagagacaggctcatggacacagcacggattgcagttgtcrgggcaggtgtggtggggctctccacggctgtgtgcatctccaaactggtgccccgatgctccgttaccatcatttcagacaagtttactccagataccac

SEQ ID NO: 88481 - DNA, 201 bp, Homo sapiens
gctctggagccctccctccacggagcctgcaacatcagggagaaggtgggcttgaggccctacaggccaggcgtgcgactgcagacagagctccttgcgcragatggacagaggctgcctgtagtccaccactatggccatgggagtgggggcatctcagtgcactggggcactgctctggaggccgccaggctggtgagc

SEQ ID NO: 88482 - DNA, 201 bp, Homo sapiens
aggtggaactaggcaaaaaggggactggaatctgtccccggatgcagaaaatagcagagagattctttcccgatgctgtgctctggagccctccctccacrgagcctgcaacatcagggagaaggtgggcttgaggccctacaggccaggcgtgcgactgcagacagagctccttgcgcgagatggacagaggctgcctgt

SEQ ID NO: 88483 - DNA, 201 bp, Homo sapiens
caggttggcagatatttcagagcactccgactgaagaagtgccattctgggctgacgtggttctgggatttcgaaagatgactgaggctgagctgaagaarttcccccagtatgtgtttggtcaggcttttacaaccctgaaatgtgaatgccctgcctacctcccgtggttggagaaaaggataaagggaagtggaggct

SEQ ID NO: 88484 - DNA, 201 bp, Homo sapiens; identical to SEQ ID NO: 88477

SEQ ID NO: 88485 - DNA, 201 bp, Homo sapiens
tgccaattctgcagaagctggagatgctggtgttcatttggtatcaggttggcagatatttcagagcactccgactgaagaagtgccattctgggctgacrtggttctgggatttcgaaagatgactgaggctgagctgaagaaattcccccagtatgtgtttggtcaggcttttacaaccctgaaatgtgaatgccctgc

SEQ ID NO: 88486 - DNA, 201 bp, Homo sapiens; identical to SEQ ID NO: 88482

SEQ ID NO: 88487 - DNA, 201 bp, Homo sapiens; identical to SEQ ID NO: 88475

SEQ ID NO: 88488 - DNA, 201 bp, Homo sapiens; identical to SEQ ID NO: 88476

SEQ ID NO: 88489 - DNA, 201 bp, Homo sapiens; identical to SEQ ID NO: 88478

SEQ ID NO: 88490 - DNA, 201 bp, Homo sapiens; identical to SEQ ID NO: 88479

SEQ ID NO: 88491 - DNA, 201 bp, Homo sapiens; identical to SEQ ID NO: 88480

SEQ ID NO: 88492 - DNA, 201 bp, Homo sapiens; identical to SEQ ID NO: 88481

SEQ ID NO: 88493 - DNA, 201 bp, Homo sapiens
caggttggcagatatttcagagcactccgactgaagaagtgccattctgggctgacgtggttctgggatttcgaaagatgactgaggctgagctgaagaarttcccccagtatgtgtttggtcaggcttttacaaccctgaaatgtgaatgccctgcctacctcccgtggttggagaaaagattagctccctgcagcccgg

SEQ ID NO: 88494 - DNA, 201 bp, Homo sapiens; identical to SEQ ID NO: 88477

SEQ ID NO: 88495 - DNA, 201 bp, Homo sapiens; identical to SEQ ID NO: 88485

SEQ ID NO: 88496 - DNA, 201 bp, Homo sapiens; identical to SEQ ID NO: 88482

SEQ ID NO: 88497 - DNA, 201 bp, Homo sapiens; identical to SEQ ID NO: 88475

SEQ ID NO: 88498 - DNA, 201 bp, Homo sapiens; identical to SEQ ID NO: 88476

SEQ ID NO: 88499 - DNA, 201 bp, Homo sapiens; identical to SEQ ID NO: 88478

SEQ ID NO: 88500 - DNA, 201 bp, Homo sapiens; identical to SEQ ID NO: 88479

SEQ ID NO: 88501 - DNA, 201 bp, Homo sapiens; identical to SEQ ID NO: 88480

SEQ ID NO: 88502 - DNA, 201 bp, Homo sapiens; identical to SEQ ID NO: 88481

SEQ ID NO: 88503 - DNA, 201 bp, Homo sapiens; identical to SEQ ID NO: 88483

SEQ ID NO: 88504 - DNA, 201 bp, Homo sapiens; identical to SEQ ID NO: 88477

SEQ ID NO: 88505 - DNA, 201 bp, Homo sapiens; identical to SEQ ID NO: 88485

SEQ ID NO: 88506 - DNA, 201 bp, Homo sapiens; identical to SEQ ID NO: 88482

SEQ ID NO: 88507 - DNA, 201 bp, Homo sapiens; identical to SEQ ID NO: 88475

SEQ ID NO: 88508 - DNA, 201 bp, Homo sapiens; identical to SEQ ID NO: 88476

SEQ ID NO: 88509 - DNA, 201 bp, Homo sapiens; identical to SEQ ID NO: 88478

SEQ ID NO: 88510 - DNA, 201 bp, Homo sapiens; identical to SEQ ID NO: 88479

SEQ ID NO: 88511 - DNA, 132 bp, Homo sapiens
gctcatggacacagcacggattgcagttgtcrgggcaggtgtggtggggctctccacggctgtgtgcatctccaaactggtgccccgatgctccgttaccatcatttcagacaagtttactccagataccac

SEQ ID NO: 88512 - DNA, 201 bp, Homo sapiens; identical to SEQ ID NO: 88481

SEQ ID NO: 88513 - DNA, 201 bp, Homo sapiens; identical to SEQ ID NO: 88475

SEQ ID NO: 88514 - DNA, 201 bp, Homo sapiens; identical to SEQ ID NO: 88476

SEQ ID NO: 88515 - DNA, 201 bp, Homo sapiens; identical to SEQ ID NO: 88477

SEQ ID NO: 88516 - DNA, 201 bp, Homo sapiens; identical to SEQ ID NO: 88478

SEQ ID NO: 88517 - DNA, 201 bp, Homo sapiens; identical to SEQ ID NO: 88479

SEQ ID NO: 88518 - DNA, 132 bp, Homo sapiens; identical to SEQ ID NO: 88511

SEQ ID NO: 88519 - DNA, 201 bp, Homo sapiens; identical to SEQ ID NO: 88481

SEQ ID NO: 88520 - DNA, 201 bp, Homo sapiens; identical to SEQ ID NO: 88482

SEQ ID NO: 88521 - DNA, 201 bp, Homo sapiens
gcccaatattttcgtgaataaagtgcatgtaggtggatgtgaccaaactttccaggcatatcagagtggtttgttacagaagctccttcaggaagatttgscatatgattatgatctcatcatcatcggtggtggttctggaggcctttcatgtgcgaaggaagctgccattttgggaaagaaagttatggtgctagactt

SEQ ID NO: 88522 - DNA, 201 bp, Homo sapiens
attgatgcatcaggctgcccttttggggcaggcattatgtgactcaaggaaatttggctgggaatataatcaacaagtgaggcacaactgggagacaatgrcaaaagcgattcagaaccacatcagctctctaaactggggctacaggttgtctctgagggaaaaggctgtggcctatgtcaattcctatggagaatttgt

SEQ ID NO: 88523 - DNA, 201 bp, Homo sapiens
gttacagaagctccttcaggaagatttggcatatgattatgatctcatcatcatcggtggtggttctggaggcctttcatgtgcgaaggaagctgccattytgggaaagaaagttatggtgctagactttgttgtcccgtcacctcagggcacatcctggggtcttggtggcacttgtgtaaatgtaggttgtattcctaa

SEQ ID NO: 88524 - DNA, 201 bp, Homo sapiens
ctctgttactcagggaccagtgcagggctgtcttacgacacttagatgagaaagtagacaaggaaagaggacagcagtgggcatctgccttgtggtcttgmtgacagcgagaagcagtgggactgcttccttgacgccttagcttggagccccgttatgaggtgagccaaggctgactctcgcaagccaggactgagcttc

SEQ ID NO: 88525 - DNA, 201 bp, Homo sapiens
gtagacaaggaaagaggacagcagtgggcatctgccttgtggtcttgctgacagcgagaagcagtgggactgcttccttgacgccttagcttggagccccrttatgaggtgagccaaggctgactctcgcaagccaggactgagcttccctcggaaagacctttgagtggcaccattcacctaagttagcttttctggtcg

SEQ ID NO: 88526 - DNA, 201 bp, Homo sapiens
attatgatctcatcatcatcggtggtggttctggaggcctttcatgtgcgaaggaagctgccattttgggaaagaaagttatggtgctagactttgttgtyccgtcacctcagggcacatcctggggtcttggtggcacttgtgtaaatgtaggttgtattcctaagaaattgatgcatcaggctgcccttttggggcagg

SEQ ID NO: 88527 - DNA, 201 bp, Homo sapiens
aagctattgaagtatataaaaaagagaatctagaaatatatcatactttgttctggcctcttgaatggacagtagctggcagagagaacaacacttgttaygcaaagataatctgcaataaattcgaccatgatcgggtgataggatttcatattcttggaccaaacgccggtgaggttacccaaggatttgcagctgcaa

SEQ ID NO: 88528 - DNA, 201 bp, Homo sapiens; identical to SEQ ID NO: 88521

SEQ ID NO: 88529 - DNA, 201 bp, Homo sapiens; identical to SEQ ID NO: 88522

SEQ ID NO: 88530 - DNA, 201 bp, Homo sapiens; identical to SEQ ID NO: 88523

SEQ ID NO: 88531 - DNA, 201 bp, Homo sapiens; identical to SEQ ID NO: 88526

SEQ ID NO: 88532 - DNA, 201 bp, Homo sapiens
cctcgtgcgggctccagccgcagccttagcttcggctcccggcttgggtggcgcggccgtgccctcgttttggcctccgaacgcggctcgaatggcaagcyaaaattccttccggatagaatatgatacctttggtgaactaaaggtgccaaatgataagtattatggcgcccagaccgtgagatctacgatgaactttaa

SEQ ID NO: 88533 - DNA, 201 bp, Homo sapiens
attgctgctgcaatagaagttcatgaagtactgttaccaggactacagaagttacatgatgctcttgatgcaaaatccaaagagtttgcacagatcatcargattggacgtactcatactcaggatgctgttccacttactcttgggcaggaatttagtggttatgttcaacaagtaaaatatgcaatgacaagaataaaa

SEQ ID NO: 88534 - DNA, 201 bp, Homo sapiens
actcagacaaatatgaatgtaaatgaagtcattagcaatagagcaattgaaatgttaggaggtgaacttggcagcaagatacctgtgcatcccaacgatcrtgttaataaaagccagagctcaaatgatacttttcccacagcaatgcacattgctgctgcaatagaagttcatgaagtactgttaccaggactacagaag

SEQ ID NO: 88535 - DNA, 201 bp, Homo sapiens
aatgtaaatgaagtcattagcaatagagcaattgaaatgttaggaggtgaacttggcagcaagatacctgtgcatcccaacgatcatgttaataaaagccrgagctcaaatgatacttttcccacagcaatgcacattgctgctgcaatagaagttcatgaagtactgttaccaggactacagaagttacatgatgctctt

SEQ ID NO: 88536 - DNA, 201 bp, Homo sapiens
gaataaatttgaagctctggctgctcatgacgctctggttgagctcagtggagccatgaacactactgcctgcagtctgatgaagatagcaaatgatattygatttttgggttctggtcctcggtcaggtctgggagaattgatcttgcctgaaaatgaaccaggaagcagtatcatgccaggcaaggtgaaccctactca

SEQ ID NO: 88537 - DNA, 201 bp, Homo sapiens
aagtggctgcacttacaggcttgccttttgtcactgctccgaataaatttgaagctctggctgctcatgacgctctggttgagctcagtggagccatgaayactactgcctgcagtctgatgaagatagcaaatgatattcgatttttgggttctggtcctcggtcaggtctgggagaattgatcttgcctgaaaatgaac

SEQ ID NO: 88538 - DNA, 201 bp, Homo sapiens
gacattttgagttgaatgttttcaagccaatgatgattaaaaatgtgttacactcagccaggctgctgggggatgcttcagtttcctttacagaaaactgygtggtgggaatccaggccaatacagaaaggatcaacaagctgatgaatgagtctctaatgttggtgacagctctcaatcctcatatagggtatgacaagg

SEQ ID NO: 88539 - DNA, 201 bp, Homo sapiens
agatctacgatgaactttaagattggaggtgtgacagaacgcatgccaaccccagttattaaagcttttggcatcttgaagcgagcggccgctgaagtaamccaggattatggtcttgatccaaagattgctaatgcaataatgaaggcagcagatgaggtagctgaaggtaaattaaatgatcattttcctctcgtggta

SEQ ID NO: 88540 - DNA, 201 bp, Homo sapiens
agtggttatgttcaacaagtaaaatatgcaatgacaagaataaaagctgccatgccaagaatctatgagctcgcagctggaggcactgctgttggtacagktttaaatactagaattggctttgcagaaaaggttgctgcaaaagtggctgcacttacaggcttgccttttgtcactgctccgaataaatttgaagctctg

SEQ ID NO: 88541 - DNA, 201 bp, Homo sapiens
gcactgctgttggtacaggtttaaatactagaattggctttgcagaaaaggttgctgcaaaagtggctgcacttacaggcttgccttttgtcactgctccraataaatttgaagctctggctgctcatgacgctctggttgagctcagtggagccatgaacactactgcctgcagtctgatgaagatagcaaatgatattc

SEQ ID NO: 88542 - DNA, 201 bp, Homo sapiens
gcaatagaagttcatgaagtactgttaccaggactacagaagttacatgatgctcttgatgcaaaatccaaagagtttgcacagatcatcaagattggacrtactcatactcaggatgctgttccacttactcttgggcaggaatttagtggttatgttcaacaagtaaaatatgcaatgacaagaataaaagctgccatg

SEQ ID NO: 88543 - DNA, 192 bp, Homo sapiens
acagccgcccagaaattctacccaagctccctcagcaccatgtaccgagcacttcggctcctcgcgcgctcgcgtcccctcgtgcgggctcyagccgcagccttagcttcggctcccggcttgggtggcgcggccgtgccctcgttttggcctccgaacgcggctcgaatggcaagccaaaattccttccgg

SEQ ID NO: 88544 - DNA, 201 bp, Homo sapiens
cccagaccgtgagatctacgatgaactttaagattggaggtgtgacagaacgcatgccaaccccagttattaaagcttttggcatcttgaagcgagcggcygctgaagtaaaccaggattatggtcttgatccaaagattgctaatgcaataatgaaggcagcagatgaggtagctgaaggtaaattaaatgatcattttc

SEQ ID NO: 88545 - DNA, 201 bp, Homo sapiens
aagtgatttacataaatttataatgaaaataaacatgtataaaatttaaaaaaacagactcccatttcttaaaaacggataagtttgaaaggaaactgctrttgaacttaagcatctctagcagagcaatttgatcagtatataaaaccctaggatgtgctaggtctaagatggattaaacaagtataaaataaaatacat

SEQ ID NO: 88546 - DNA, 201 bp, Homo sapiens
atcatcaagattggacgtactcatactcaggatgctgttccacttactcttgggcaggaatttagtggttatgttcaacaagtaaaatatgcaatgacaakaataaaagctgccatgccaagaatctatgagctcgcagctggaggcactgctgttggtacaggtttaaatactagaattggctttgcagaaaaggttgct

SEQ ID NO: 88547 - DNA, 201 bp, Homo sapiens
aaggcagcaaagattgctaagacagcacacaaaaatggatcaaccttaaaggaaactgctatcgaacttggctatctcacagcagagcagtttgacgaatrggtaaaacctaaggacatgctgggtccaaagtgatttacataaatttataatgaaaataaacatgtataaaatttaaaaaaacagactcccatttcttaa

SEQ ID NO: 88548 - DNA, 201 bp, Homo sapiens; identical to SEQ ID NO: 88532

SEQ ID NO: 88549 - DNA, 201 bp, Homo sapiens; identical to SEQ ID NO: 88533

SEQ ID NO: 88550 - DNA, 201 bp, Homo sapiens; identical to SEQ ID NO: 88534

SEQ ID NO: 88551 - DNA, 201 bp, Homo sapiens; identical to SEQ ID NO: 88535

SEQ ID NO: 88552 - DNA, 201 bp, Homo sapiens; identical to SEQ ID NO: 88536

SEQ ID NO: 88553 - DNA, 201 bp, Homo sapiens; identical to SEQ ID NO: 88537

SEQ ID NO: 88554 - DNA, 201 bp, Homo sapiens; identical to SEQ ID NO: 88538

SEQ ID NO: 88555 - DNA, 201 bp, Homo sapiens
agatctacgatgaactttaagattggaggtgtgacagaacgcatgccaaccccagttattaaagcttttggcatcttgaagcgagcggccgctgaagtaamccaggattatggtcttgatccaaagattgctaatgcaataatgaaggcagcagatgaggtaggagctgaaggtaaattaaatgatcattttcctctcgtg

SEQ ID NO: 88556 - DNA, 201 bp, Homo sapiens; identical to SEQ ID NO: 88540

SEQ ID NO: 88557 - DNA, 201 bp, Homo sapiens; identical to SEQ ID NO: 88541

SEQ ID NO: 88558 - DNA, 201 bp, Homo sapiens; identical to SEQ ID NO: 88542

SEQ ID NO: 88559 - DNA, 192 bp, Homo sapiens; identical to SEQ ID NO: 88543

SEQ ID NO: 88560 - DNA, 201 bp, Homo sapiens
cccagaccgtgagatctacgatgaactttaagattggaggtgtgacagaacgcatgccaaccccagttattaaagcttttggcatcttgaagcgagcggcygctgaagtaaaccaggattatggtcttgatccaaagattgctaatgcaataatgaaggcagcagatgaggtaggagctgaaggtaaattaaatgatcatt

SEQ ID NO: 88561 - DNA, 201 bp, Homo sapiens; identical to SEQ ID NO: 88545

SEQ ID NO: 88562 - DNA, 201 bp, Homo sapiens; identical to SEQ ID NO: 88546

SEQ ID NO: 88563 - DNA, 201 bp, Homo sapiens; identical to SEQ ID NO: 88547

SEQ ID NO: 88564 - DNA, 201 bp, Homo sapiens; identical to SEQ ID NO: 88538

SEQ ID NO: 88565 - DNA, 201 bp, Homo sapiens; identical to SEQ ID NO: 88533

SEQ ID NO: 88566 - DNA, 201 bp, Homo sapiens; identical to SEQ ID NO: 88534

SEQ ID NO: 88567 - DNA, 201 bp, Homo sapiens; identical to SEQ ID NO: 88539

SEQ ID NO: 88568 - DNA, 201 bp, Homo sapiens; identical to SEQ ID NO: 88535

SEQ ID NO: 88569 - DNA, 201 bp, Homo sapiens; identical to SEQ ID NO: 88540

SEQ ID NO: 88570 - DNA, 201 bp, Homo sapiens; identical to SEQ ID NO: 88536

SEQ ID NO: 88571 - DNA, 201 bp, Homo sapiens; identical to SEQ ID NO: 88542

SEQ ID NO: 88572 - DNA, 201 bp, Homo sapiens; identical to SEQ ID NO: 88541

SEQ ID NO: 88573 - DNA, 201 bp, Homo sapiens; identical to SEQ ID NO: 88544

SEQ ID NO: 88574 - DNA, 169 bp, Homo sapiens
aagctccctcagcaccatgtaccgagcacttcggctcctcgcgcgctcgcgtcccctcgtgcgggctcyagccgcagccttagcttcggctcccggcttgggtggcgcggccgtgccctcgttttggcctccgaacgcggctcgaatggtgccaaatgataagtattat

SEQ ID NO: 88575 - DNA, 201 bp, Homo sapiens; identical to SEQ ID NO: 88537

SEQ ID NO: 88576 - DNA, 201 bp, Homo sapiens; identical to SEQ ID NO: 88545

SEQ ID NO: 88577 - DNA, 201 bp, Homo sapiens; identical to SEQ ID NO: 88546

SEQ ID NO: 88578 - DNA, 201 bp, Homo sapiens; identical to SEQ ID NO: 88547

SEQ ID NO: 88579 - DNA, 201 bp, Homo sapiens; identical to SEQ ID NO: 88538

SEQ ID NO: 88580 - DNA, 201 bp, Homo sapiens
ttgctggccggacactggccgcctgtgcatctagtggtttctgaactgtggtttgtttcgccaaggggcactgcactgctttcaggccctccaggcaagcyaaaattccttccggatagaatatgatacctttggtgaactaaaggtgccaaatgataagtattatggcgcccagaccgtgagatctacgatgaactttaa

SEQ ID NO: 88581 - DNA, 201 bp, Homo sapiens; identical to SEQ ID NO: 88533

SEQ ID NO: 88582 - DNA, 201 bp, Homo sapiens; identical to SEQ ID NO: 88534

SEQ ID NO: 88583 - DNA, 201 bp, Homo sapiens; identical to SEQ ID NO: 88539

SEQ ID NO: 88584 - DNA, 201 bp, Homo sapiens; identical to SEQ ID NO: 88535

SEQ ID NO: 88585 - DNA, 201 bp, Homo sapiens; identical to SEQ ID NO: 88540

SEQ ID NO: 88586 - DNA, 201 bp, Homo sapiens; identical to SEQ ID NO: 88536

SEQ ID NO: 88587 - DNA, 201 bp, Homo sapiens; identical to SEQ ID NO: 88542

SEQ ID NO: 88588 - DNA, 201 bp, Homo sapiens; identical to SEQ ID NO: 88541

SEQ ID NO: 88589 - DNA, 201 bp, Homo sapiens; identical to SEQ ID NO: 88544

SEQ ID NO: 88590 - DNA, 201 bp, Homo sapiens; identical to SEQ ID NO: 88537

SEQ ID NO: 88591 - DNA, 201 bp, Homo sapiens; identical to SEQ ID NO: 88545

SEQ ID NO: 88592 - DNA, 201 bp, Homo sapiens; identical to SEQ ID NO: 88546

SEQ ID NO: 88593 - DNA, 201 bp, Homo sapiens; identical to SEQ ID NO: 88547

SEQ ID NO: 88594 - DNA, 201 bp, Homo sapiens
atctttcgttgccattcttcattcctacaaaggacgaacttggattacatcaactttggacccattggttttgtcgctgtcgtcaactgacagtgattcaycactggtgatgataaaaatgatggaagaagagttgaaagtcacttttttctttggcctgtccccatctttctgtgacatcacaatgggtctgatctgcat

SEQ ID NO: 88595 - DNA, 201 bp, Homo sapiens
gttgttttttgtttgttagcaggtgtggatgtggggttatgtggtcatgctcagatctacctaaatcaccccagagctttatgtcttttattcattctaawtcttattaaccggaatatgtaggaccatttcaataccttgtaatcctccaagcttcaatctgcacacactttctatgagggcaggtacaactattaagag

SEQ ID NO: 88596 - DNA, 201 bp, Homo sapiens
ttagagctgagctgattgtactttggccaactaatgggttaatactgtcaagggaaattagccctgactaaacattgccgctggctcatgaatgcactagscttggggcagtataaaaactcagagaaatcagtgtgtaggagacacagaaatcagtgtcactcagtgacagaagcaacaataattgtgaaaaatacttca

SEQ ID NO: 88597 - DNA, 201 bp, Homo sapiens
ctatcgaaattactaatcagttggggaaaaaaatactatagcagacagcactaatgtcatcaacaaacattgttcttctccgtgtcctgggtacaacatcsaataatatttcttggcctcctttccgcttctcctctctgctgttcctctctacaagaacctgggaggccaacgcctaaagatcataatatcacacaatgg

SEQ ID NO: 88598 - DNA, 201 bp, Homo sapiens
tgtggtagcaaatgcatgatttctctgtgaccaaaattaagcatgaaaaaaatgtttccattgccatatttgattcactagtggaagatagtgttctgctyataattaaactgaatgtagagtatctctgtatgttaattgcaattactggttggggggtgcattttaaaagatgaaacatgcagcttccctacattacac

SEQ ID NO: 88599 - DNA, 201 bp, Homo sapiens
agtgtcactcagtgacagaagcaacaataattgtgaaaaatacttcagcagttatggactcatctgtcattcaaaggaaaaaagtagctgtcattggtggyggcttggttggctcattacaagcatgctttcttgcaaagaggaatttccagattgatgtatatgaagctagggaagatactcgagtggctaccttcacac

SEQ ID NO: 88600 - DNA, 201 bp, Homo sapiens
tacaaaatgaactcattttattttcccaccttcaaatataagtattatcatctatctgtttatcctatctatctatctatcatctatctatctatctatctatctatctatctatctatctatctatatctatctatctatctctatttatttatgtatttagagatcaggtctcactctgttgaccaggctggagtgcag

SEQ ID NO: 88601 - DNA, 201 bp, Homo sapiens
caccttcaaatataagtattatcatctatctgtttatcctatctatctatctatcatctatctatctatctatctatctatctatctatctatctatctayatctatctatctatctctatttatttatgtatttagagatcaggtctcactctgttgaccaggctggagtgcagtggtgagatctgggttcactgcaacc

SEQ ID NO: 88602 - DNA, 201 bp, Homo sapiens
agtctgtaggggcagcaatttgggggaagcaaatatatgggagtttgccttgtagattcctctggtgctggtctccaggctgacaaggattcaaagttgtytctgaaactcctctttgtcatactgcacatataaaacgtcttttgtttccaacaagaggattttctttttcattctagaattatctccttgataacttga

SEQ ID NO: 88603 - DNA, 201 bp, Homo sapiens
gagaagaccatggaactggatagctcacttccggaatacaacatgtttccccgcaaaggccgtggactccctagaacaaatttccaatctcattagcaggygatagaaaggttttgtggtagcaaatgcatgatttctctgtgaccaaaattaagcatgaaaaaaatgtttccattgccatatttgattcactagtggaag

SEQ ID NO: 88604 - DNA, 150 bp, Homo sapiens
tgcttgttatagtagtcggtccatcatgaccagtaaaacataaatcaaaagttaatgtaattgttatcccattatttagagcgaaataaatgttgaatatrtggactttctcagattaggaaataccaattaaaaatataataaatagct

SEQ ID NO: 88605 - DNA, 201 bp, Homo sapiens
actaaaaatcacaacttaactagcatgttaactgcacttttcattacgtgaatggaacttacctaaccacagggctcagacttactagataaaaccagaartggaaataaggaattcaggggagttccagagacttacaaaatgaactcattttattttcccaccttcaaatataagtattatcatctatctgtttatcct

SEQ ID NO: 88606 - DNA, 201 bp, Homo sapiens
atgtaggaccatttcaataccttgtaatcctccaagcttcaatctgcacacactttctatgagggcaggtacaactattaagagattttgaacattaagtyagtccacaaatattcagtgggcatctactaggtgacagccactgtgctataattagagactttttactataagcatcaaaaacagataaggctcttcctg

SEQ ID NO: 88607 - DNA, 201 bp, Homo sapiens
aaaaaaggtgataaacaaaggactctttttcttgggatcactgatagccatcagcagtacctacctacttatacactacatgtcaccacgatctttcctcygcttgagaagaccatggaactggatagctcacttccggaatacaacatgtttccccgcaaaggccgtggactccctagaacaaatttccaatctcattag

SEQ ID NO: 88608 - DNA, 201 bp, Homo sapiens
gattggtcttaaccacaaaaatgatccacagatgaattatgaaaccatgtcatcttactctctaagggaggtataagatgtttttggacttcagatgagamgggctccattcatggttaatcatgaatgaaaacgaaactaagaatatatgctgtagaaaaagaagaagaaaagccacaagactgcttaaaaatttctgtg

SEQ ID NO: 88609 - DNA, 201 bp, Homo sapiens
gaaatgaaaatctccaacacattagaagatgatgatgttagatgcccatcgtgtgccacaagtggttttttcattatgtaaagcacccgttgaattaaaakaatttgtttttgttcaacctcttcctgaggcccaagagcatatgggcaattcggatttcctgctggaccacaaggttctgttgatattacatagaacggg

SEQ ID NO: 88610 - DNA, 201 bp, Homo sapiens
tgacagaagcaacaataattgtgaaaaatacttcagcagttatggactcatctgtcattcaaaggaaaaaagtagctgtcattggtggtggcttggttggrtcattacaagcatgctttcttgcaaagaggaatttccagattgatgtatatgaagctagggaagatactcgagtggctaccttcacacgtggaagaagca

SEQ ID NO: 88611 - DNA, 201 bp, Homo sapiens
aacattgttcttctccgtgtcctgggtacaacatcgaataatatttcttggcctcctttccgcttctcctctctgctgttcctctctacaagaacctgggrggccaacgcctaaagatcataatatcacacaatggaaggaacctagattcctaaatgactgcataggacagatcccatctcctccacccaatacattatt

SEQ ID NO: 88612 - DNA, 201 bp, Homo sapiens; identical to SEQ ID NO: 88594

SEQ ID NO: 88613 - DNA, 201 bp, Homo sapiens; identical to SEQ ID NO: 88595

SEQ ID NO: 88614 - DNA, 201 bp, Homo sapiens; identical to SEQ ID NO: 88596

SEQ ID NO: 88615 - DNA, 201 bp, Homo sapiens; identical to SEQ ID NO: 88597

SEQ ID NO: 88616 - DNA, 201 bp, Homo sapiens; identical to SEQ ID NO: 88598

SEQ ID NO: 88617 - DNA, 201 bp, Homo sapiens; identical to SEQ ID NO: 88599

SEQ ID NO: 88618 - DNA, 201 bp, Homo sapiens; identical to SEQ ID NO: 88600

SEQ ID NO: 88619 - DNA, 201 bp, Homo sapiens; identical to SEQ ID NO: 88601

SEQ ID NO: 88620 - DNA, 201 bp, Homo sapiens; identical to SEQ ID NO: 88602

SEQ ID NO: 88621 - DNA, 201 bp, Homo sapiens; identical to SEQ ID NO: 88603

SEQ ID NO: 88622 - DNA, 150 bp, Homo sapiens; identical to SEQ ID NO: 88604

SEQ ID NO: 88623 - DNA, 201 bp, Homo sapiens; identical to SEQ ID NO: 88605

SEQ ID NO: 88624 - DNA, 201 bp, Homo sapiens; identical to SEQ ID NO: 88606

SEQ ID NO: 88625 - DNA, 201 bp, Homo sapiens; identical to SEQ ID NO: 88607

SEQ ID NO: 88626 - DNA, 201 bp, Homo sapiens; identical to SEQ ID NO: 88608

SEQ ID NO: 88627 - DNA, 201 bp, Homo sapiens; identical to SEQ ID NO: 88609

SEQ ID NO: 88628 - DNA, 201 bp, Homo sapiens; identical to SEQ ID NO: 88610

SEQ ID NO: 88629 - DNA, 201 bp, Homo sapiens; identical to SEQ ID NO: 88611

SEQ ID NO: 88630 - DNA, 201 bp, Homo sapiens; identical to SEQ ID NO: 88594

SEQ ID NO: 88631 - DNA, 201 bp, Homo sapiens; identical to SEQ ID NO: 88595

SEQ ID NO: 88632 - DNA, 201 bp, Homo sapiens; identical to SEQ ID NO: 88596

SEQ ID NO: 88633 - DNA, 201 bp, Homo sapiens; identical to SEQ ID NO: 88597

SEQ ID NO: 88634 - DNA, 201 bp, Homo sapiens; identical to SEQ ID NO: 88598

SEQ ID NO: 88635 - DNA, 201 bp, Homo sapiens; identical to SEQ ID NO: 88599

SEQ ID NO: 88636 - DNA, 201 bp, Homo sapiens
ttattttcccaccttcaaatataagtattatcatctatctgtttatcgtctatctatctatcatctatctatctatctatcatctatctatctatctatctatctatctatctatctatctatctatatctatctatctatctctatttatttatgtatttagagatcaggtctcactctgttgaccaggctggagtgcag

SEQ ID NO: 88637 - DNA, 201 bp, Homo sapiens
attatcatctatctgtttatcgtctatctatctatcatctatctatctatctatcatctatctatctatctatctatctatctatctatctatctatctayatctatctatctatctctatttatttatgtatttagagatcaggtctcactctgttgaccaggctggagtgcagtggtgagatctgggttcactgcaacc

SEQ ID NO: 88638 - DNA, 201 bp, Homo sapiens; identical to SEQ ID NO: 88602

SEQ ID NO: 88639 - DNA, 201 bp, Homo sapiens; identical to SEQ ID NO: 88603

SEQ ID NO: 88640 - DNA, 150 bp, Homo sapiens; identical to SEQ ID NO: 88604

SEQ ID NO: 88641 - DNA, 201 bp, Homo sapiens
actaaaaatcacaacttaactagcatgttaactgcacttttcattacgtgaatggaacttacctaaccacagggctcagacttactagataaaaccagaartggaaataaggaattcaggggagttccagagacttacaaaatgaactcattttattttcccaccttcaaatataagtattatcatctatctgtttatcgt

SEQ ID NO: 88642 - DNA, 201 bp, Homo sapiens; identical to SEQ ID NO: 88606

SEQ ID NO: 88643 - DNA, 201 bp, Homo sapiens; identical to SEQ ID NO: 88607

SEQ ID NO: 88644 - DNA, 201 bp, Homo sapiens; identical to SEQ ID NO: 88608

SEQ ID NO: 88645 - DNA, 201 bp, Homo sapiens; identical to SEQ ID NO: 88609

SEQ ID NO: 88646 - DNA, 201 bp, Homo sapiens; identical to SEQ ID NO: 88610

SEQ ID NO: 88647 - DNA, 201 bp, Homo sapiens; identical to SEQ ID NO: 88611

SEQ ID NO: 88648 - DNA, 167 bp, Homo sapiens
atgcgcaaacagcacatccggtgtggtcgacgggtcctccaagagtttggggcgcggactggagtaycttgcgtgcagttatgtcggcgtcggtagtgtctgtcatttcgcggttcttagaagagtacttgagctccactccgcagcgtctgaagttgctggacgcg

SEQ ID NO: 88649 - DNA, 201 bp, Homo sapiens
aacaaagcggatttccaaggcatctccccagagcgagcctttgctgattttctctttgccagcaccatcctgcaccttgttgtcatgaactttgttggctraatcattctcatttacttaattgaggagtaggagactaaaagaatatgattagaacaaactgattaaatggcactgtcttctgcccaggtgaaatagact

SEQ ID NO: 88650 - DNA, 201 bp, Homo sapiens
gactaaaagaatatgattagaacaaactgattaaatggcactgtcttctgcccaggtgaaatagactgaagtcacgctaacttttctcagttcactctttsaatttcctggataagagttctggagatggcagcttattggacacatggattttcttcagatttgcacttactgctagctctgctttttatgcaggagaaa

SEQ ID NO: 88651 - DNA, 201 bp, Homo sapiens
gagtttggggcgcggactggagtaccttgcgtgcagttatgtcggcgtcggtagtgtctgtcatttcgcggttcttagaagagtacttgagctccactcckcagcgtctgaagttgctggacgcgtacctgctgtatatactgctgaccggggcgctgcagttcggttactgtctcctcgtggggaccttccccttcaact

SEQ ID NO: 88652 - DNA, 201 bp, Homo sapiens
cagcgtctgaagttgctggacgcgtacctgctgtatatactgctgaccggggcgctgcagttcggttactgtctcctcgtggggaccttccccttcaactyttttctctcgggcttcatctcttgtgtggggagtttcatcctagcggtttgcctgagaatacagatcaacccacagaacaaagcggatttccaaggcatc

SEQ ID NO: 88653 - DNA, 141 bp, Homo sapiens
tatgcaggagaaaagcccagagttcactgtgtgtcagaacaactttctaacaaacatttattaatccagcctctgcctttcattaaatgtaaccttttgcyttccaaattaaagaactccatgccactcctccatatgcct

SEQ ID NO: 88654 - DNA, 160 bp, Homo sapiens
atgcgcaaacagcacatccggtgtggtcgacgggtcctccaagagtttggggcgcggacyggagtaccttgcgtgcagttatgtcggcgtcggtagtgtctgtcatttcgcggttcttagaagagtacttgagctccactccgcagcgtctgaagttgct

SEQ ID NO: 88655 - DNA, 201 bp, Homo sapiens
caaagcggatttccaaggcatctccccagagcgagcctttgctgattttctctttgccagcaccatcctgcaccttgttgtcatgaactttgttggctgamtcattctcatttacttaattgaggagtaggagactaaaagaatatgattagaacaaactgattaaatggcactgtcttctgcccaggtgaaatagactga

SEQ ID NO: 88656 - DNA, 201 bp, Homo sapiens
ggcactgtcttctgcccaggtgaaatagactgaagtcacgctaacttttctcagttcactctttgaatttcctggataagagttctggagatggcagcttrttggacacatggattttcttcagatttgcacttactgctagctctgctttttatgcaggagaaaagcccagagttcactgtgtgtcagaacaactttcta

SEQ ID NO: 88657 - DNA, 167 bp, Homo sapiens; identical to SEQ ID NO: 88648

SEQ ID NO: 88658 - DNA, 201 bp, Homo sapiens
aacaaagcggatttccaaggcatctccccagagcgagcctttgctgattttctctttgccagcaccatcctgcaccttgttgtcatgaactttgttggctraatcattctcatttacttaattgaggagtaggagactaaaagaatgttcactctttgaatttcctggataagagttctggagatggcagcttattggaca

SEQ ID NO: 88659 - DNA, 201 bp, Homo sapiens
gccagcaccatcctgcaccttgttgtcatgaactttgttggctgaatcattctcatttacttaattgaggagtaggagactaaaagaatgttcactctttsaatttcctggataagagttctggagatggcagcttattggacacatggattttcttcagatttgcacttactgctagctctgctttttatgcaggagaaa

SEQ ID NO: 88660 - DNA, 201 bp, Homo sapiens; identical to SEQ ID NO: 88651

SEQ ID NO: 88661 - DNA, 201 bp, Homo sapiens; identical to SEQ ID NO: 88652

SEQ ID NO: 88662 - DNA, 146 bp, Homo sapiens
tatgcaggagaaaagcccagagttcactgtgtgtcagaacaactttctaacaaacatttattaatccagcctctgcctttcattaaatgtaaccttttgcyttccaaattaaagaactccatgccactcctccatatgcctctggc

SEQ ID NO: 88663 - DNA, 160 bp, Homo sapiens; identical to SEQ ID NO: 88654

SEQ ID NO: 88664 - DNA, 201 bp, Homo sapiens
caaagcggatttccaaggcatctccccagagcgagcctttgctgattttctctttgccagcaccatcctgcaccttgttgtcatgaactttgttggctgamtcattctcatttacttaattgaggagtaggagactaaaagaatgttcactctttgaatttcctggataagagttctggagatggcagcttattggacaca

SEQ ID NO: 88665 - DNA, 201 bp, Homo sapiens
gttggctgaatcattctcatttacttaattgaggagtaggagactaaaagaatgttcactctttgaatttcctggataagagttctggagatggcagcttrttggacacatggattttcttcagatttgcacttactgctagctctgctttttatgcaggagaaaagcccagagttcactgtgtgtcagaacaactttcta

SEQ ID NO: 88666 - DNA, 201 bp, Homo sapiens
cggctggaacacactaagctgagctatcggcctcgggacagcaatgagctggtgcccctttcagaagacagcatgaaggatgcctggggccaggtgaaaawctactgcctgactctgtggtgtgagaacacagtgggtgaccaaggctttccagatgaacccaaggaaagtgaaaaagctgatgctaataaccagacaaca

SEQ ID NO: 88667 - DNA, 201 bp, Homo sapiens
aaagaagccttgattcagcttcgagggaaccagctgatagactataagatcctggggctccagttcaagctgtttgcctgtgaggtgttatataacattgytttcatgtatgccaagaaggaggaatggaaaaaagctgaagaacagttagcattggccacgagcatgaagtctgagcccagacattccaaaatcgacaag

SEQ ID NO: 88668 - DNA, 201 bp, Homo sapiens
ggtagtcatgaagactcagcccgggctcccctacagccaggtccgggacatggtgtctaagaaactggagctccggctggaacacactaagctgagctatyggcctcgggacagcaatgagctggtgcccctttcagaagacagcatgaaggatgcctggggccaggtgaaaaactactgcctgactctgtggtgtgagaa

SEQ ID NO: 88669 - DNA, 201 bp, Homo sapiens
gcacttggcagtggcttacttccaacgagggatgctctactaccagacagagaaatatgatttggctatcaaagaccttaaagaagccttgattcagcttygagggaaccagctgatagactataagatcctggggctccagttcaagctgtttgcctgtgaggtgttatataacattgctttcatgtatgccaagaagga

SEQ ID NO: 88670 - DNA, 201 bp, Homo sapiens
agacaagcacttggcagtggcttacttccaacgagggatgctctactaccagacagagaaatatgatttggctatcaaagaccttaaagaagccttgattyagcttcgagggaaccagctgatagactataagatcctggggctccagttcaagctgtttgcctgtgaggtgttatataacattgctttcatgtatgccaa

SEQ ID NO: 88671 - DNA, 201 bp, Homo sapiens
tctgagtgctagctagccagctgtgttcacactgtaaacattcatcaagctgtacatttggtgcacttttctgtgtcataccacaataaaaaaaaacctakcatcttacaaaaacaagacacccaagtccaggcccaaggagtaagtacaaatattcctgtttctgaaccattactgtaattggctcttaaggcttgaagt

SEQ ID NO: 88672 - DNA, 201 bp, Homo sapiens
acgagcatgaagtctgagcccagacattccaaaatcgacaaggcgatggagtgtgtctggaagcagaagctatatgagccagtggtgatccctgtgggcargctgtttcgaccaaatgagagacaagtggctcagctggccaagaaggattacctaggcaaggcgacggtcgtggcatctgtggtggatcaagacagtttc

SEQ ID NO: 88673 - DNA, 201 bp, Homo sapiens
ccaggacccccactcccggatttgcttcaacattggctgcatgtacactatcctgaagaacatgactgaagcagagaaggcctttaccagaagcattaacygagacaagcacttggcagtggcttacttccaacgagggatgctctactaccagacagagaaatatgatttggctatcaaagaccttaaagaagccttgat

SEQ ID NO: 88674 - DNA, 201 bp, Homo sapiens; identical to SEQ ID NO: 88667

SEQ ID NO: 88675 - DNA, 201 bp, Homo sapiens; identical to SEQ ID NO: 88670

SEQ ID NO: 88676 - DNA, 201 bp, Homo sapiens; identical to SEQ ID NO: 88669

SEQ ID NO: 88677 - DNA, 181 bp, Homo sapiens
acgagcatgaagtctgagcccagacattccaaaatcgacaaggcgatggagtgtgtctggaagcagaagctatatgagccagtggtgatccctgtgggcargctgtttcgaccaaatgagagacaagtggctcagctggccaagaaggattacctaggcaaggcgacggtaggtgggattg

SEQ ID NO: 88678 - DNA, 201 bp, Homo sapiens; identical to SEQ ID NO: 88673

SEQ ID NO: 88679 - DNA, 201 bp, Homo sapiens
gttggatgtcaatgatgatttttctgaggaagtaaccaaacaagaagacctcatgagagaggtaaacacctttgtaaagaatctgtaaccaataccatgawgttcaggctgtgatctgggctccctgactttctgaagctagaaaaatgttgtgtctcccaaccacctttccatccccagcccctctcatccctggagcac

SEQ ID NO: 88680 - DNA, 201 bp, Homo sapiens
acacattccagacattttcctttttgagccgcctgaaagtacagctggagcccttccctgagaaactcttacaggccaggaagccagtacagatctttgaraggtctgtgtacagtgacaggtatatctttgcaaagaatctttttgaaaatggttccctcagtgacatcgagtggcatatctatcaggactggcattctt

SEQ ID NO: 88681 - DNA, 138 bp, Homo sapiens
aacggtgcgctggagcgagtgagcagcgatacctaggrcggaagtgctctcggcggaagtgatcgctgtgtgaatcgtgggtgggatggccgcgggccgcctctttctaagtcggcttcgagcacccttcagttccat

SEQ ID NO: 88682 - DNA, 201 bp, Homo sapiens
cgcggggcgcgggccccgaaggctctccatcgaaggcaacattgctgtgggaaagtccacgtttgtgaagttactcacgaaaacttacccagaatggcacrtagctacagaacctgtagcaacatggcagaatatccaggctgctggcacccaaaaagcctgcactgcccaaagtcttggaaacttgctggatatgatgta

SEQ ID NO: 88683 - DNA, 201 bp, Homo sapiens
agagcccactcgagggcgtttcctcctccagaggcctgcacgcggggcgcgggccccgaaggctctccatcgaaggcaacattgctgtgggaaagtccacrtttgtgaagttactcacgaaaacttacccagaatggcacgtagctacagaacctgtagcaacatggcagaatatccaggctgctggcacccaaaaagcct

SEQ ID NO: 88684 - DNA, 201 bp, Homo sapiens; identical to SEQ ID NO: 88679

SEQ ID NO: 88685 - DNA, 201 bp, Homo sapiens
acacattccagacattttcctttttgagccgcctgaaagtacagctggagcccttccctgagaaactcttacaggccaggaagccagtacagatctttgaraggtctgtgtacagtgacaggtatatctttgcaaagaatctttttgaaaatgtctcctgtgggagtttgccagccggatcacattacatggcttcatcta

SEQ ID NO: 88686 - DNA, 138 bp, Homo sapiens; identical to SEQ ID NO: 88681

SEQ ID NO: 88687 - DNA, 201 bp, Homo sapiens; identical to SEQ ID NO: 88679

SEQ ID NO: 88688 - DNA, 201 bp, Homo sapiens; identical to SEQ ID NO: 88680

SEQ ID NO: 88689 - DNA, 138 bp, Homo sapiens; identical to SEQ ID NO: 88681

SEQ ID NO: 88690 - DNA, 201 bp, Homo sapiens; identical to SEQ ID NO: 88679

SEQ ID NO: 88691 - DNA, 201 bp, Homo sapiens; identical to SEQ ID NO: 88680

SEQ ID NO: 88692 - DNA, 138 bp, Homo sapiens; identical to SEQ ID NO: 88681

SEQ ID NO: 88693 - DNA, 201 bp, Homo sapiens; identical to SEQ ID NO: 88679

SEQ ID NO: 88694 - DNA, 201 bp, Homo sapiens; identical to SEQ ID NO: 88680

SEQ ID NO: 88695 - DNA, 138 bp, Homo sapiens; identical to SEQ ID NO: 88681

SEQ ID NO: 88696 - DNA, 201 bp, Homo sapiens; identical to SEQ ID NO: 88682

SEQ ID NO: 88697 - DNA, 201 bp, Homo sapiens; identical to SEQ ID NO: 88683

SEQ ID NO: 88698 - DNA, 201 bp, Homo sapiens; identical to SEQ ID NO: 88679

SEQ ID NO: 88699 - DNA, 138 bp, Homo sapiens; identical to SEQ ID NO: 88681

SEQ ID NO: 88700 - DNA, 201 bp, Homo sapiens; identical to SEQ ID NO: 88679

SEQ ID NO: 88701 - DNA, 201 bp, Homo sapiens
acacattccagacattttcctttttgagccgcctgaaagtacagctggagcccttccctgagaaactcttacaggccaggaagccagtacagatctttgaraggtctgtgtacagtgacaggctccactttgaggctctgatgaacattccagtgctggtgttggatgtcaatgatgatttttctgaggaagtaaccaaac

SEQ ID NO: 88702 - DNA, 138 bp, Homo sapiens; identical to SEQ ID NO: 88681

SEQ ID NO: 88703 - DNA, 201 bp, Homo sapiens; identical to SEQ ID NO: 88682

SEQ ID NO: 88704 - DNA, 201 bp, Homo sapiens; identical to SEQ ID NO: 88683

SEQ ID NO: 88705 - DNA, 121 bp, Homo sapiens
acacattccagacattttcctttttgagccgcctgaaagtacagctggagcccttccctgagaaactcttacaggccaggaagccagtacagatctttgaraggtctgtgtacagtgacag

SEQ ID NO: 88706 - DNA, 138 bp, Homo sapiens; identical to SEQ ID NO: 88681

SEQ ID NO: 88707 - DNA, 201 bp, Homo sapiens; identical to SEQ ID NO: 88679

SEQ ID NO: 88708 - DNA, 201 bp, Homo sapiens; identical to SEQ ID NO: 88701

SEQ ID NO: 88709 - DNA, 138 bp, Homo sapiens; identical to SEQ ID NO: 88681

SEQ ID NO: 88710 - DNA, 201 bp, Homo sapiens
tttccagaaattttttaagagtttgagttactattgaatttaatcagactttctgattaaagggttttctttcttttttaataaaacacatctgtctggtrtggtatgaatttctgaaattctgtcttcctatgactcctagttgtgacctaaccagtttttttctcatttaatcaatgtagctattcctatattcagtaa

SEQ ID NO: 88711 - DNA, 201 bp, Homo sapiens
gagttactattgaatttaatcagactttctgattaaagggttttctttcttttttaataaaacacatctgtctggtatggtatgaatttctgaaattctgkcttcctatgactcctagttgtgacctaaccagtttttttctcatttaatcaatgtagctattcctatattcagtaacacttacttctatagccttaaata

SEQ ID NO: 88712 - DNA, 201 bp, Homo sapiens
aagaactgtcagcagctgcctgcttttctgtgatgtatgtatcctgttgacttttccagaaattttttaagagtttgagttactattgaatttaatcagaytttctgattaaagggttttctttcttttttaataaaacacatctgtctggtatggtatgaatttctgaaattctgtcttcctatgactcctagttgtgac

SEQ ID NO: 88713 - DNA, 115 bp, Homo sapiens
agtataaccgcgtgscccgcgcgcgcgcttccctcccggcgcagtcaccggcgcggtctatggctgcgacttctctaatgtctgctttggctgcccggctgctgcagcccgcgca

SEQ ID NO: 88714 - DNA, 201 bp, Homo sapiens
tcccaagtgctattgcaataacagttgatactcattttaggtaccaaaccttttgagttcaactgatcaaaccaaaggaaaagtgttgctagagaaaattrgggaaaaggtgaaaaagaaaaaatggtagtaattgagcagaaaaaaattaatttatatatgtattgattggcaaccagatttatctaagtagaactgaat

SEQ ID NO: 88715 - DNA, 115 bp, Homo sapiens; identical to SEQ ID NO: 88713

SEQ ID NO: 88716 - DNA, 201 bp, Homo sapiens; identical to SEQ ID NO: 88710

SEQ ID NO: 88717 - DNA, 201 bp, Homo sapiens; identical to SEQ ID NO: 88711

SEQ ID NO: 88718 - DNA, 201 bp, Homo sapiens
acctcaaggttcaagtgatttactcaaggtttaaatcatagttgttttggagaaagtaagtgtcagatgcactgtggctgtcagggtcatagtaggcattwaatcaacatggttggtgttcattaaatgtggattgaagataaaatgactgatcttaagtttcatgaggaataggtttgcttcattgaaactggtttttat

SEQ ID NO: 88719 - DNA, 201 bp, Homo sapiens; identical to SEQ ID NO: 88712

SEQ ID NO: 88720 - DNA, 201 bp, Homo sapiens
taaagtactaggttgattaatattgcaaagttgtaatgtaaaatgtgaccttacctctgtctaacctgtattgttcacatgaatgggagtttgactttggkaataaacattgaaaatttgcagggaggacccacccaaatgtatcatgaaatgtgattccaggtatgaaaaaccagtgatactaatttaaaggatcatttt

SEQ ID NO: 88721 - DNA, 201 bp, Homo sapiens; identical to SEQ ID NO: 88714

SEQ ID NO: 88722 - DNA, 201 bp, Homo sapiens; identical to SEQ ID NO: 88710

SEQ ID NO: 88723 - DNA, 201 bp, Homo sapiens; identical to SEQ ID NO: 88711

SEQ ID NO: 88724 - DNA, 201 bp, Homo sapiens; identical to SEQ ID NO: 88712

SEQ ID NO: 88725 - DNA, 115 bp, Homo sapiens; identical to SEQ ID NO: 88713

SEQ ID NO: 88726 - DNA, 201 bp, Homo sapiens; identical to SEQ ID NO: 88714

SEQ ID NO: 88727 - DNA, 201 bp, Homo sapiens; identical to SEQ ID NO: 88710

SEQ ID NO: 88728 - DNA, 201 bp, Homo sapiens; identical to SEQ ID NO: 88711

SEQ ID NO: 88729 - DNA, 201 bp, Homo sapiens; identical to SEQ ID NO: 88718

SEQ ID NO: 88730 - DNA, 201 bp, Homo sapiens; identical to SEQ ID NO: 88712

SEQ ID NO: 88731 - DNA, 201 bp, Homo sapiens; identical to SEQ ID NO: 88720

SEQ ID NO: 88732 - DNA, 115 bp, Homo sapiens; identical to SEQ ID NO: 88713

SEQ ID NO: 88733 - DNA, 201 bp, Homo sapiens; identical to SEQ ID NO: 88714

SEQ ID NO: 88734 - DNA, 201 bp, Homo sapiens
ggctttcaccagctggtggttcagcggtgggatccctccctcacccgggaagcccttggccactggctggggctgctaaatgctgatggctggattgggasggagcagatactgggggatgaggcccgagcccgggtgcctccagaattcctagtacaacgagcagtccacgccaaccccccaaccctacttttgcctgta

SEQ ID NO: 88735 - DNA, 201 bp, Homo sapiens
gggtgaggctgaggtagctgctgagctgggcccactggctgcctcactggaggcagcagagagcctggatgagctgcactgggccccagagctaggagtcyttgcagactttgggaaccacacaaaagcagtacagctgaagcccaggccccctcaggggctcgttcgggtggtgggtcggccccaacctcaactgcagta

SEQ ID NO: 88736 - DNA, 201 bp, Homo sapiens
gttcttctatgtggtgacagatggcaaggaagtcctactaccagaggttggggccaaggggcagttgaagtttatcagtgggcacaccagtgaacttggtracttccgctttacacttttgccaccaaccagtccaggggatacagcccccaagtatggcagctacaatgtcttctggacctccaacccaggactgcccct

SEQ ID NO: 88737 - DNA, 109 bp, Homo sapiens
cggaggcgsaggcgcaggcgctggctggcaggtgtcgctaaccggacggtggtcgccagggcgagaggcgggagccggagaggtgaggcaggacccgggctccactgcc

SEQ ID NO: 88738 - DNA, 175 bp, Homo sapiens
gggtgctgtgtggctcaatgtcaactacctggctttgggagcactccaccactatgggcatctggagggtcctcaccaggctcgggctgccaaactccacrgtgtctccttgctgtcatcccacatagccctggggtgaatgtgaatccagagtctatttttctaaataaattgg

SEQ ID NO: 88739 - DNA, 201 bp, Homo sapiens
tgggatccctccctcacccgggaagcccttggccactggctggggctgctaaatgctgatggctggattgggagggagcagatactgggggatgaggcccsagcccgggtgcctccagaattcctagtacaacgagcagtccacgccaaccccccaaccctacttttgcctgtagcccatatgctagaggttggtgaccct

SEQ ID NO: 88740 - DNA, 201 bp, Homo sapiens
gcctgagctctggcgagcaggttttgggtcaggctgccctcagcggcctccttggtggaattggctacttctacggacaagggctggtattgccagacatsggggtggaagggtctgagcagaaggtggacccagccctctttccacccgtacctctttttacagcagtgccctcccggtcattcttcccacgaggcttcc

SEQ ID NO: 88741 - DNA, 201 bp, Homo sapiens
ctacaatgtcttctggacctccaacccaggactgcccctgctgacagagatggtaaagagtcgcctaaatagctggtttcagcatcggcccccaggggccycccctgaacgctacctcggcttgccaggatccctgaagtgggaggacagaggtccaagtgggcaagggcaggggcagttcttgatacagcaggtgaccct

SEQ ID NO: 88742 - DNA, 201 bp, Homo sapiens
ggtctccctgttcttctatgtggtgacagatggcaaggaagtcctactaccagaggttggggccaaggggcagttgaagtttatcagtgggcacaccagtsaacttggtgacttccgctttacacttttgccaccaaccagtccaggggatacagcccccaagtatggcagctacaatgtcttctggacctccaacccagg

SEQ ID NO: 88743 - DNA, 201 bp, Homo sapiens
ctactgacccaggccctggagagccatgctgaaggctttagagagcgctttgagaagaccttccagctgaaggagaagggcctgagctctggcgagcaggytttgggtcaggctgccctcagcggcctccttggtggaattggctacttctacggacaagggctggtattgccagacatcggggtggaagggtctgagcag

SEQ ID NO: 88744 - DNA, 201 bp, Homo sapiens
gactgtagagcctcaggactcaggtacttctgccctccctttggtctccctgttcttctatgtggtgacagatggcaaggaagtcctactaccagaggttrgggccaaggggcagttgaagtttatcagtgggcacaccagtgaacttggtgacttccgctttacacttttgccaccaaccagtccaggggatacagcccc

SEQ ID NO: 88745 - DNA, 201 bp, Homo sapiens; identical to SEQ ID NO: 88734

SEQ ID NO: 88746 - DNA, 201 bp, Homo sapiens; identical to SEQ ID NO: 88735

SEQ ID NO: 88747 - DNA, 201 bp, Homo sapiens; identical to SEQ ID NO: 88736

SEQ ID NO: 88748 - DNA, 118 bp, Homo sapiens
ggcgggaggcggaggcgsaggcgcaggcgctggctggcaggtgtcgctaaccggacggtggtcgccagggcgagaggcgggagccggagaggtgaggcaggacccgggctccactgcc

SEQ ID NO: 88749 - DNA, 201 bp, Homo sapiens
gggtgctgtgtggctcaatgtcaactacctggctttgggagcactccaccactatgggcatctggagggtcctcaccaggctcgggctgccaaactccacrgtgagctccgtgccaacgtggtaggcaatgtatggcgccagtaccaggctacaggctttctttgggagcagtacagtgaccgcgatgggcgaggcatggg

SEQ ID NO: 88750 - DNA, 201 bp, Homo sapiens; identical to SEQ ID NO: 88739

SEQ ID NO: 88751 - DNA, 201 bp, Homo sapiens; identical to SEQ ID NO: 88740

SEQ ID NO: 88752 - DNA, 201 bp, Homo sapiens; identical to SEQ ID NO: 88741

SEQ ID NO: 88753 - DNA, 201 bp, Homo sapiens
ctttctttgggagcagtacagtgaccgcgatgggcgaggcatgggctgccgccctttccacggctggaccagccttgtcttactggccatggctgaagackactgaagggagggagaggaggggagccaagacactcatgccactctggctctgaagggacaaaggcttctggcttttgcccccagccccttggataccag

SEQ ID NO: 88754 - DNA, 201 bp, Homo sapiens; identical to SEQ ID NO: 88742

SEQ ID NO: 88755 - DNA, 201 bp, Homo sapiens
tctttgggagcagtacagtgaccgcgatgggcgaggcatgggctgccgccctttccacggctggaccagccttgtcttactggccatggctgaagactacwgaagggagggagaggaggggagccaagacactcatgccactctggctctgaagggacaaaggcttctggcttttgcccccagccccttggataccagtaa

SEQ ID NO: 88756 - DNA, 201 bp, Homo sapiens; identical to SEQ ID NO: 88743

SEQ ID NO: 88757 - DNA, 201 bp, Homo sapiens; identical to SEQ ID NO: 88744

SEQ ID NO: 88758 - DNA, 201 bp, Homo sapiens
ctgaagggagggagaggaggggagccaagacactcatgccactctggctctgaagggacaaaggcttctggcttttgcccccagccccttggataccagtrattcaaaccttcctcatttcatctcaggtgtctccttgctgtcatcccacatagccctggggtgaatgtgaatccagagtctatttttctaaataaattg

SEQ ID NO: 88759 - DNA, 201 bp, Homo sapiens
gctgaagactactgaagggagggagaggaggggagccaagacactcatgccactctggctctgaagggacaaaggcttctggcttttgcccccagcccctwggataccagtaattcaaaccttcctcatttcatctcaggtgtctccttgctgtcatcccacatagccctggggtgaatgtgaatccagagtctatttttc

SEQ ID NO: 88760 - DNA, 201 bp, Homo sapiens
agggtctggagctggcagacagggagggccaggatcctggcagatggcctcgaaccacacccccggtccttgaagccacttcccaggtgatgtggaagccsgtgttgctgccagaagccctgaagctggcccctggtgtgagcatgtggaaccggagcacccaggtgttgctcagctctggtgtgcctgaacaagaggaca

SEQ ID NO: 88761 - DNA, 201 bp, Homo sapiens
gccctctggctgaggtcctggtcccagactctcaaacacgccccttggaagcctaccgcggacgccagcggggcgagaagaccaaggcccgggccgaaccycaagccctcggccccggcacccgtgtctccccggcagcgttcttccctctccggccaggcattcctttccgtgacttggactcgggccccgcactcctgt

SEQ ID NO: 88762 - DNA, 201 bp, Homo sapiens
acttttcccctggcctcttcccatccctaccccctcctccccccgtccacccactcatacacatgtgccctcctggacaaggctaatgtcctgcttagccrcaccctgcacctgctgcgtccctgatcccttggtggtgacattgctctctgggcttttggtttgggagccacttctctgctcctccactgttgcctctgg

SEQ ID NO: 88763 - DNA, 201 bp, Homo sapiens
ctggcccgggacgagggagaatctgcagtagctgaggaccccacatggggtgaggacgaggagccttcggcatgcacgacggactcctgggctcagggttsagtgcccgtgctgcacgcgtccacctcggagggcctggagaacttccaaggcgaagaccctgggggcgtggaccggatccctttaggaaggtcgtggatg

SEQ ID NO: 88764 - DNA, 201 bp, Homo sapiens
agcccccattctggcacaccccactccactgtcctggcagcagcaggtgtggccaatggaggggggtgctggcccccaggattcccccagccaaactgtckttgtcaccacgtgaggctcacacctttcatccttccccaccttccctagtccctgcactaggttggacagcccccattggctacaggaaagcgggagggg

SEQ ID NO: 88765 - DNA, 201 bp, Homo sapiens
agtgcggccgcccactgtgccagtgccgcaggtggatattgtgcctgggcggctcagtgaggccgagtggatggcgcttacagccctcgaggagggcgagracgtcgtaggggacatcttggccgacttgctggctcgagtcatggactctgctttcaaagtctacctgactcagcagtgcattccattcaccatcagcca

SEQ ID NO: 88766 - DNA, 201 bp, Homo sapiens
tgcattccattcaccatcagccaggcccgggaggccatgctgcagatcaccgagtggcgcttcctggcccgggacgagggagaatctgcagtagctgaggmccccacatggggtgaggacgaggagccttcggcatgcacgacggactcctgggctcagggttcagtgcccgtgctgcacgcgtccacctcggagggcctg

SEQ ID NO: 88767 - DNA, 201 bp, Homo sapiens
gccgagctgctgggcgagctgtgggctggccggacccgcgtgcctccacagggtctggagctggcagacagggagggccaggatcctggcagatggcctckaaccacacccccggtccttgaagccacttcccaggtgatgtggaagcccgtgttgctgccagaagccctgaagctggcccctggtgtgagcatgtggaac

SEQ ID NO: 88768 - DNA, 201 bp, Homo sapiens; identical to SEQ ID NO: 88760

SEQ ID NO: 88769 - DNA, 201 bp, Homo sapiens; identical to SEQ ID NO: 88761

SEQ ID NO: 88770 - DNA, 201 bp, Homo sapiens; identical to SEQ ID NO: 88762

SEQ ID NO: 88771 - DNA, 201 bp, Homo sapiens
ctggcccgggacgagggagaatctgcagtagctgaggaccccacatggggtgaggacgaggagccttcggcatgcacgacggactcctgggctcagggttsagtgcccgtgctgcacgcgtccacctcggagggcctggagaacttccaaggcgaagtacactcctcaggagcctctccggactcctctgccattgctcct

SEQ ID NO: 88772 - DNA, 201 bp, Homo sapiens; identical to SEQ ID NO: 88764

SEQ ID NO: 88773 - DNA, 201 bp, Homo sapiens; identical to SEQ ID NO: 88765

SEQ ID NO: 88774 - DNA, 201 bp, Homo sapiens; identical to SEQ ID NO: 88766

SEQ ID NO: 88775 - DNA, 201 bp, Homo sapiens; identical to SEQ ID NO: 88767

SEQ ID NO: 88776 - DNA, 201 bp, Homo sapiens
agttcttcagttctgaaaatgttaaagtgtttgagtcaattaatatggacacaaatgacatgtggttaatgatgagaaaagcttacaaatacgcctttgawaagtatagagaccaatacaactggttcttccttgcacgccccactacgtttgctatcattgaaaacctaaagtattttttgttaaaaaaggatccatcac

SEQ ID NO: 88777 - DNA, 201 bp, Homo sapiens
taccgccttagggcatttgggcatattttcaatgatgcattggttttcttacctccaaatggttctgacaatgactgagaagtggtagaaaagcgtgaatrtgatctttgtataggacgtgtgttgtcattatttgtagtagtaactacatatccaatacagctgtatgtttctttttcttttctaatttggtggcactgg

SEQ ID NO: 88778 - DNA, 201 bp, Homo sapiens
ggcatttgggcatattttcaatgatgcattggttttcttacctccaaatggttctgacaatgactgagaagtggtagaaaagcgtgaatatgatctttgtrtaggacgtgtgttgtcattatttgtagtagtaactacatatccaatacagctgtatgtttctttttcttttctaatttggtggcactggtataaccacac

SEQ ID NO: 88779 - DNA, 201 bp, Homo sapiens
acctccagattctggtaattgcaagaagacgtcccgtcaccccctgcaccaggacctgcactatttccccttcaggcccagcgatctcatcgtttgcgccyggacggcgatggagcacatcagccggaacaacggctgtctggttgtgctcccaggcacacacaagggctccctgaagccccacgattaccccaagtggga

SEQ ID NO: 88780 - DNA, 201 bp, Homo sapiens
gaaaaaatctgcagaaaggaggtgaaaccattaggattaacagtaatgagagatgtgaccatttcgaaatccgaatatgctccaagtgagaagatgatcaygaaggtccaggatttccaggaagataaggagctcttcagatactgcactctccccgagattctgaaatatgtggagtgcttcactggacctaatattatg

SEQ ID NO: 88781 - DNA, 201 bp, Homo sapiens
acacacaagggctccctgaagccccacgattaccccaagtgggaggggggagttaacaaaatgttccacgggatccaggactacgaggaaaacaaggcccrggtgcacctggtgatggagaagggcgacactgttttcttccatcctttgctcatccacggatctggtcagaataaaacccagggattccggaaggcaatt

SEQ ID NO: 88782 - DNA, 201 bp, Homo sapiens
tggtaattgcaagaagacgtcccgtcaccccctgcaccaggacctgcactatttccccttcaggcccagcgatctcatcgtttgcgcctggacggcgatgsagcacatcagccggaacaacggctgtctggttgtgctcccaggcacacacaagggctccctgaagccccacgattaccccaagtgggaggggggagttaa

SEQ ID NO: 88783 - DNA, 201 bp, Homo sapiens
gctccaagtgagaagatgatcacgaaggtccaggatttccaggaagataaggagctcttcagatactgcactctccccgagattctgaaatatgtggagtkcttcactggacctaatattatggccatgcacacaatgttgataaacaaacctccagattctggtaattgcaagaagacgtcccgtcaccccctgcaccag

SEQ ID NO: 88784 - DNA, 201 bp, Homo sapiens
tgatgtaaccttttctatcacttgttaaaagcagaaaacatgtatcaggtacttaattgcatagagttagttttgcagcacaatggtgttgctttaatggaaaaaaaaacagtaaaagtgaaatattactgttttaaggaaaactaatttagggtggcagccaataaaggtggttggtgtctaatttaagtgttaaatcaa

SEQ ID NO: 88785 - DNA, 201 bp, Homo sapiens
gccgcccctcggccggggctgtcgtagctcatcccacttcagggactatttcctctgccagtttccatcctcaacaattccagtatactctggataataaygttctaaccctggaacagagaaaattttatgaagaaaatgggtttctagtaatcaaaaatcttgtacctgatgccgatattcaacgctttcggaatgagt

SEQ ID NO: 88786 - DNA, 201 bp, Homo sapiens
ccgtcaccccctgcaccaggacctgcactatttccccttcaggcccagcgatctcatcgtttgcgcctggacggcgatggagcacatcagccggaacaacrgctgtctggttgtgctcccaggcacacacaagggctccctgaagccccacgattaccccaagtgggaggggggagttaacaaaatgttccacgggatcca

SEQ ID NO: 88787 - DNA, 201 bp, Homo sapiens
actatttccccttcaggcccagcgatctcatcgtttgcgcctggacggcgatggagcacatcagccggaacaacggctgtctggttgtgctcccaggcacrcacaagggctccctgaagccccacgattaccccaagtgggaggggggagttaacaaaatgttccacgggatccaggactacgaggaaaacaaggcccggg

SEQ ID NO: 88788 - DNA, 201 bp, Homo sapiens
tccccgcgccgcagccatggagcagcttcgcgccgccgcccgtctgcagattgttctgggccacctcggccgcccctcggccggggctgtcgtagctcatyccacttcagggactatttcctctgccagtttccatcctcaacaattccagtatactctggataataatgttctaaccctggaacagagaaaattttatga

SEQ ID NO: 88789 - DNA, 201 bp, Homo sapiens
atatgtggagtgcttcactggacctaatattatggccatgcacacaatgttgataaacaaacctccagattctggtaattgcaagaagacgtcccgtcacyccctgcaccaggacctgcactatttccccttcaggcccagcgatctcatcgtttgcgcctggacggcgatggagcacatcagccggaacaacggctgtct

SEQ ID NO: 88790 - DNA, 201 bp, Homo sapiens
cgatctcatcgtttgcgcctggacggcgatggagcacatcagccggaacaacggctgtctggttgtgctcccaggcacacacaagggctccctgaagcccyacgattaccccaagtgggaggggggagttaacaaaatgttccacgggatccaggactacgaggaaaacaaggcccgggtgcacctggtgatggagaaggg

SEQ ID NO: 88791 - DNA, 201 bp, Homo sapiens
aacaaggcccgggtgcacctggtgatggagaagggcgacactgttttcttccatcctttgctcatccacggatctggtcagaataaaacccagggattccrgaaggcaatttcctgccatttcgccagtgccgattgccactacattgacgtgaagggcaccagtcaagaaaacatcgagaaggaagttgtaggaatagca

SEQ ID NO: 88792 - DNA, 201 bp, Homo sapiens
ttgcaagaagacgtcccgtcaccccctgcaccaggacctgcactatttccccttcaggcccagcgatctcatcgtttgcgcctggacggcgatggagcacwtcagccggaacaacggctgtctggttgtgctcccaggcacacacaagggctccctgaagccccacgattaccccaagtgggaggggggagttaacaaaat

SEQ ID NO: 88793 - DNA, 201 bp, Homo sapiens
gctcgacttgtgaaaggagaaagaaccaatctttgaaatagccatctgctataactctttcaacagaaaaccaaaaccaaacgaaatgtctaaggaaaatrttttcttaatgagatgatgtaaccttttctatcacttgttaaaagcagaaaacatgtatcaggtacttaattgcatagagttagttttgcagcacaatgg

SEQ ID NO: 88794 - DNA, 201 bp, Homo sapiens
aaacaaggcccgggtgcacctggtgatggagaagggcgacactgttttcttccatcctttgctcatccacggatctggtcagaataaaacccagggattcyggaaggcaatttcctgccatttcgccagtgccgattgccactacattgacgtgaagggcaccagtcaagaaaacatcgagaaggaagttgtaggaatagc

SEQ ID NO: 88795 - DNA, 201 bp, Homo sapiens
aagtgggaggggggagttaacaaaatgttccacgggatccaggactacgaggaaaacaaggcccgggtgcacctggtgatggagaagggcgacactgtttycttccatcctttgctcatccacggatctggtcagaataaaacccagggattccggaaggcaatttcctgccatttcgccagtgccgattgccactacatt

SEQ ID NO: 88796 - DNA, 201 bp, Homo sapiens
aaacaaacctccagattctggcaagaagacgtcccgtcaccccctgcaccaggacctgcactatttccccttcaggcccagcgatctcatcgtttgcgccyggacggcgatggagcacatcagccggaacaacggctgtctggttgtgctcccaggcacacacaagggctccctgaagccccacgattaccccaagtggga

SEQ ID NO: 88797 - DNA, 201 bp, Homo sapiens; identical to SEQ ID NO: 88780

SEQ ID NO: 88798 - DNA, 201 bp, Homo sapiens; identical to SEQ ID NO: 88781

SEQ ID NO: 88799 - DNA, 201 bp, Homo sapiens
agattctggcaagaagacgtcccgtcaccccctgcaccaggacctgcactatttccccttcaggcccagcgatctcatcgtttgcgcctggacggcgatgsagcacatcagccggaacaacggctgtctggttgtgctcccaggcacacacaagggctccctgaagccccacgattaccccaagtgggaggggggagttaa

SEQ ID NO: 88800 - DNA, 201 bp, Homo sapiens
gctccaagtgagaagatgatcacgaaggtccaggatttccaggaagataaggagctcttcagatactgcactctccccgagattctgaaatatgtggagtkcttcactggacctaatattatggccatgcacacaatgttgataaacaaacctccagattctggcaagaagacgtcccgtcaccccctgcaccaggacctg

SEQ ID NO: 88801 - DNA, 201 bp, Homo sapiens; identical to SEQ ID NO: 88784

SEQ ID NO: 88802 - DNA, 201 bp, Homo sapiens; identical to SEQ ID NO: 88785

SEQ ID NO: 88803 - DNA, 201 bp, Homo sapiens; identical to SEQ ID NO: 88786

SEQ ID NO: 88804 - DNA, 201 bp, Homo sapiens; identical to SEQ ID NO: 88787

SEQ ID NO: 88805 - DNA, 201 bp, Homo sapiens; identical to SEQ ID NO: 88788

SEQ ID NO: 88806 - DNA, 201 bp, Homo sapiens
tctgaaatatgtggagtgcttcactggacctaatattatggccatgcacacaatgttgataaacaaacctccagattctggcaagaagacgtcccgtcacyccctgcaccaggacctgcactatttccccttcaggcccagcgatctcatcgtttgcgcctggacggcgatggagcacatcagccggaacaacggctgtct

SEQ ID NO: 88807 - DNA, 201 bp, Homo sapiens; identical to SEQ ID NO: 88790

SEQ ID NO: 88808 - DNA, 201 bp, Homo sapiens; identical to SEQ ID NO: 88791

SEQ ID NO: 88809 - DNA, 201 bp, Homo sapiens
tggcaagaagacgtcccgtcaccccctgcaccaggacctgcactatttccccttcaggcccagcgatctcatcgtttgcgcctggacggcgatggagcacwtcagccggaacaacggctgtctggttgtgctcccaggcacacacaagggctccctgaagccccacgattaccccaagtgggaggggggagttaacaaaat

SEQ ID NO: 88810 - DNA, 201 bp, Homo sapiens; identical to SEQ ID NO: 88793

SEQ ID NO: 88811 - DNA, 201 bp, Homo sapiens; identical to SEQ ID NO: 88794

SEQ ID NO: 88812 - DNA, 201 bp, Homo sapiens; identical to SEQ ID NO: 88795

SEQ ID NO: 88813 - DNA, 201 bp, Homo sapiens
tatctttggcatgggcaagcggaagtgtatcggtgagaccattgcccgctgggaggtctttctcttcctggctatcctgctgcaacgggtggaattcagcrtgccactgggcgtgaaggtggacatgacccccatctatgggctaaccatgaagcatgcctgctgtgagcacttccaaatgcagctgcgctcttaggtgct

SEQ ID NO: 88814 - DNA, 201 bp, Homo sapiens
acctgaacggtttctcacccctgatggtgctatcgacaaggtgttaagtgagaaggtgattatctttggcatgggcaagcggaagtgtatcggtgagaccrttgcccgctgggaggtctttctcttcctggctatcctgctgcaacgggtggaattcagcgtgccactgggcgtgaaggtggacatgacccccatctatgg

SEQ ID NO: 88815 - DNA, 201 bp, Homo sapiens
ccggcgctatgaccacaaccaccaagaactgcttagcctagtcaacctgaataataatttcggggaggtggttggctctggaaacccagctgacttcatcyctattcttcgctacctacccaacccttccctgaatgccttcaaggacctgaatgagaagttctacagcttcatgcagaagatggtcaaggagcactacaa

SEQ ID NO: 88816 - DNA, 201 bp, Homo sapiens
gcagctgcgctcttaggtgcttgagagccctgaggcctagactctgtctacctggtctggttgggcagccagaccagcaggctggcctatgtggtctaagrttcagcctgaaactcatagacactgatctggctgcagttttgctatctgggctgtgggcaagcctaagggatcctgcctgcccctaccctggacttgcct

SEQ ID NO: 88817 - DNA, 201 bp, Homo sapiens
ctacctgaacggtttctcacccctgatggtgctatcgacaaggtgttaagtgagaaggtgattatctttggcatgggcaagcggaagtgtatcggtgagamcattgcccgctgggaggtctttctcttcctggctatcctgctgcaacgggtggaattcagcgtgccactgggcgtgaaggtggacatgacccccatctat

SEQ ID NO: 88818 - DNA, 201 bp, Homo sapiens
cacctggcactgtcaaggatgagccagcagtatggggacgtgctgcagatccgaattggctccacacccgtggtggtgctgagcggcctggacaccatccrgcaggccctggtgcggcagggcgatgatttcaagggccggcccgacctctacaccttcaccctcatcagtaatggtcagagcatgtccttcagcccagac

SEQ ID NO: 88819 - DNA, 201 bp, Homo sapiens
ctaggctgagcaatctgaccctatgggtctaggacacagttcctgggaacatcacattcctctgcccttcctgcaggcaggaacaaacagggctgccttcyggccttgtaagacccttattgctgtcctggaggggctggggacttgtgtctgcggggatcagagcgcacagggagtgcacatatccaggcaccaggacta

SEQ ID NO: 88820 - DNA, 201 bp, Homo sapiens
ttcccaagttgtgcttgagccaggaggcctgctagggttaggaggtccttaggcctctgagaagctctgaagaactctctggaagcccctgggcccagtayctagctggctctgtgagggtgctgactggcttcagcaagttagaactagccaaaccaggaccctgtccaatctttgacaattgggagctgccaagagtga

SEQ ID NO: 88821 - DNA, 201 bp, Homo sapiens
acacagtgattggcaggtcacggcggccccggctctctgacagatcccatctgccctatatggaggccttcatcctggagaccttccgacactcttccttmgtccccttcaccatcccccacagcacaacaagagacacaagtttgaaaggcttttacatccccaaggggcgttgtgtctttgtaaaccagtggcagatca

SEQ ID NO: 88822 - DNA, 201 bp, Homo sapiens
ttcagcctgaaactcatagacactgatctggctgcagttttgctatctgggctgtgggcaagcctaagggatcctgcctgcccctaccctggacttgcctytgcacaccctccagagacaacaggtaaaacagggccacatagatgctgatggagccttcccaagttgtgcttgagccaggaggcctgctagggttaggag

SEQ ID NO: 88823 - DNA, 201 bp, Homo sapiens
ggctggcctctgattgggcacatgctgaccctgggaaagaacccgcacctggcactgtcaaggatgagccagcagtatggggacgtgctgcagatccgaaytggctccacacccgtggtggtgctgagcggcctggacaccatccggcaggccctggtgcggcagggcgatgatttcaagggccggcccgacctctacacc

SEQ ID NO: 88824 - DNA, 201 bp, Homo sapiens
gagccaggaggcctgctagggttaggaggtccttaggcctctgagaagctctgaagaactctctggaagcccctgggcccagtacctagctggctctgtgrgggtgctgactggcttcagcaagttagaactagccaaaccaggaccctgtccaatctttgacaattgggagctgccaagagtgaagggaagagacagccc

SEQ ID NO: 88825 - DNA, 201 bp, Homo sapiens
gaacggtttctcacccctgatggtgctatcgacaaggtgttaagtgagaaggtgattatctttggcatgggcaagcggaagtgtatcggtgagaccattgsccgctgggaggtctttctcttcctggctatcctgctgcaacgggtggaattcagcgtgccactgggcgtgaaggtggacatgacccccatctatgggcta

SEQ ID NO: 88826 - DNA, 201 bp, Homo sapiens
gcacctggcactgtcaaggatgagccagcagtatggggacgtgctgcagatccgaattggctccacacccgtggtggtgctgagcggcctggacaccatcyggcaggccctggtgcggcagggcgatgatttcaagggccggcccgacctctacaccttcaccctcatcagtaatggtcagagcatgtccttcagcccaga

SEQ ID NO: 88827 - DNA, 201 bp, Homo sapiens; identical to SEQ ID NO: 88813

SEQ ID NO: 88828 - DNA, 201 bp, Homo sapiens; identical to SEQ ID NO: 88814

SEQ ID NO: 88829 - DNA, 201 bp, Homo sapiens; identical to SEQ ID NO: 88815

SEQ ID NO: 88830 - DNA, 201 bp, Homo sapiens; identical to SEQ ID NO: 88816

SEQ ID NO: 88831 - DNA, 201 bp, Homo sapiens; identical to SEQ ID NO: 88817

SEQ ID NO: 88832 - DNA, 201 bp, Homo sapiens; identical to SEQ ID NO: 88818

SEQ ID NO: 88833 - DNA, 201 bp, Homo sapiens; identical to SEQ ID NO: 88819

SEQ ID NO: 88834 - DNA, 201 bp, Homo sapiens; identical to SEQ ID NO: 88820

SEQ ID NO: 88835 - DNA, 201 bp, Homo sapiens; identical to SEQ ID NO: 88821

SEQ ID NO: 88836 - DNA, 201 bp, Homo sapiens; identical to SEQ ID NO: 88822

SEQ ID NO: 88837 - DNA, 201 bp, Homo sapiens; identical to SEQ ID NO: 88823

SEQ ID NO: 88838 - DNA, 201 bp, Homo sapiens; identical to SEQ ID NO: 88824

SEQ ID NO: 88839 - DNA, 201 bp, Homo sapiens; identical to SEQ ID NO: 88825

SEQ ID NO: 88840 - DNA, 201 bp, Homo sapiens; identical to SEQ ID NO: 88826

SEQ ID NO: 88841 - DNA, 201 bp, Homo sapiens
agcctggaagaaagaccgggtggccctgaaccaggaggtgatggctccagaggccaccaagaactttttgcccctgttggatgcagtgtctcgggacttcrtcagtgtcctgcacaggcgcatcaagaaggcgggctccggaaattactcgggggacatcagtgatgacctgttccgctttgcctttgagtccatcactaa

SEQ ID NO: 88842 - DNA, 201 bp, Homo sapiens
acacccagaacttctactgggaattgagacagaaaggaagtgttcaccacgattaccgtggcatcctctacagactcctgggagacagcaagatgtccttygaggacatcaaggccaacgtcacagagatgctggcaggaggggtggacacgacgtccatgaccctgcagtggcacttgtatgagatggcacgcaacctga

SEQ ID NO: 88843 - DNA, 201 bp, Homo sapiens
cacccagaacttctactgggaattgagacagaaaggaagtgttcaccacgattaccgtggcatcctctacagactcctgggagacagcaagatgtccttcraggacatcaaggccaacgtcacagagatgctggcaggaggggtggacacgacgtccatgaccctgcagtggcacttgtatgagatggcacgcaacctgaa

SEQ ID NO: 88844 - DNA, 201 bp, Homo sapiens
ctgcatgggacgtgattttcagtaaagctgacatatacacccagaacttctactgggaattgagacagaaaggaagtgttcaccacgattaccgtggcatsctctacagactcctgggagacagcaagatgtccttcgaggacatcaaggccaacgtcacagagatgctggcaggaggggtggacacgacgtccatgaccc

SEQ ID NO: 88845 - DNA, 201 bp, Homo sapiens
acgtccatgaccctgcagtggcacttgtatgagatggcacgcaacctgaaggtgcaggatatgctgcgggcagaggtcttggctgcgcggcaccaggcccrgggagacatggccacgatgctacagctggtccccctcctcaaagccagcatcaaggagacactaaggcaacttcaccccatctccgtgaccctgcagaga

SEQ ID NO: 88846 - DNA, 201 bp, Homo sapiens
cgtcacagagatgctggcaggaggggtggacacgacgtccatgaccctgcagtggcacttgtatgagatggcacgcaacctgaaggtgcaggatatgctgygggcagaggtcttggctgcgcggcaccaggcccagggagacatggccacgatgctacagctggtccccctcctcaaagccagcatcaaggagacactaag

SEQ ID NO: 88847 - DNA, 201 bp, Homo sapiens
tcagtgtcctgcacaggcgcatcaagaaggcgggctccggaaattactcgggggacatcagtgatgacctgttccgctttgcctttgagtccatcactaaygtcatttttggggagcgccaggggatgctggaggaagtagtgaaccccgaggcccagcgattcattgatgccatctaccagatgttccacaccagcgtcc

SEQ ID NO: 88848 - DNA, 201 bp, Homo sapiens
tcctagcagtccccgctgaagtggagcaggtacagtcacagctgtggggacagcatgctggccaagggtcttcccccacgctcagtcctggtcaaaggctrccagacctttctgagtgcccccagggaggggctggggcgtctcagggtgcccactggcgagggagctggcatctccacccgcagtcctcgccccttcaat

SEQ ID NO: 88849 - DNA, 201 bp, Homo sapiens; identical to SEQ ID NO: 88841

SEQ ID NO: 88850 - DNA, 201 bp, Homo sapiens; identical to SEQ ID NO: 88842

SEQ ID NO: 88851 - DNA, 201 bp, Homo sapiens; identical to SEQ ID NO: 88843

SEQ ID NO: 88852 - DNA, 201 bp, Homo sapiens; identical to SEQ ID NO: 88844

SEQ ID NO: 88853 - DNA, 201 bp, Homo sapiens
acgtccatgaccctgcagtggcacttgtatgagatggcacgcaacctgaaggtgcaggatatgctgcgggcagaggtcttggctgcgcggcaccaggcccrgggagacatggccacgatgctacagctggtccccctcctcaaagccagcatcaaggagacactaagacttcaccccatctccgtgaccctgcagagatat

SEQ ID NO: 88854 - DNA, 201 bp, Homo sapiens; identical to SEQ ID NO: 88846

SEQ ID NO: 88855 - DNA, 201 bp, Homo sapiens; identical to SEQ ID NO: 88847

SEQ ID NO: 88856 - DNA, 201 bp, Homo sapiens; identical to SEQ ID NO: 88848

SEQ ID NO: 88857 - DNA, 201 bp, Homo sapiens
tgccgccgggcgtgaaagtcgacctgacccccatctacgggctgaccatgaagcacgcccgctgtgaacatgtccaggcgcggctgcgcttctccatcaaytgaagaagacaccaccattctgaggccagggagcgagtgggggccagccacggggactcagcccttgtttctcttcctttctttttttaaaaaatagcag

SEQ ID NO: 88858 - DNA, 201 bp, Homo sapiens
acctccacctcgcaggttcaagcaatcctcccacttcagcctcccaagcacctgggattacaagcatgagtcactacgcctggctgatttttgtagttttrgtggagatggggtttcaccatgttggccaggcttgtctcgaactcctgaccccaagttatccacctgccttggcttcccaaagtcctgggattacaggtg

SEQ ID NO: 88859 - DNA, 201 bp, Homo sapiens
ggccacagagcttctcctggcctctgccatcttctgcctggtattctgggtgctcaagggtttgaggcctcgggtccccaaaggcctgaaaagtccaccaragccatggggctggcccttgctcgggcatgtgctgaccctggggaagaacccgcacctggcactgtcaaggatgagccagcgctacggggacgtcctgca

SEQ ID NO: 88860 - DNA, 201 bp, Homo sapiens
ttcctttctttttttaaaaaatagcagctttagccaagtgcagggcctgtaatcccagcattttaggaggccaaggttggaggatcatttgagcccaggarttggaaagcagcctggccaacatagtgggaccctgtctctacaaaaaaaaaatttgccaagagcctgagtgacagagcaagaccccatctcaaaaaaaaa

SEQ ID NO: 88861 - DNA, 201 bp, Homo sapiens
ccttcatcctggagaccttccgacactcctccttcttgcccttcaccatcccccacagcacaacaagggacacaacgctgaatggcttctacatccccaaraaatgctgtgtcttcgtaaaccagtggcaggtcaaccatgacccagagctgtgggaggacccctctgagttccggcctgagcggttcctcaccgccgatg

SEQ ID NO: 88862 - DNA, 201 bp, Homo sapiens
agaaaacagtccaggagcactatcaggactttgacaagaacagtgtccgggacatcacgggtgccctgttcaagcacagcaagaaggggcctagagccagmggcaacctcatcccacaggagaagattgtcaaccttgtcaatgacatctttggagcaggatttgacacagtcaccacagccatctcctggagcctcatgt

SEQ ID NO: 88863 - DNA, 201 bp, Homo sapiens
ttcaagggccggcctgacctctacacctccaccctcatcactgatggccagagcttgaccttcagcacagactctggaccggtgtgggctgcccgccggcrcctggcccagaatgccctcaacaccttctccatcgcctctgacccagcttcctcatcctcctgctacctggaggagcatgtgagcaaggaggctaaggcc

SEQ ID NO: 88864 - DNA, 201 bp, Homo sapiens
tggaaagcagcctggccaacatagtgggaccctgtctctacaaaaaaaaaatttgccaagagcctgagtgacagagcaagaccccatctcaaaaaaaaaaacaaacaaacaaaaaaaaaaccatatatatacatatatatatagcagctttatggagatataattcttatgccatataattcaccttcttttttttttttt

SEQ ID NO: 88865 - DNA, 201 bp, Homo sapiens
ggctttggccaggtgcccgacaactggcgcgaggtggccgtcggggacagcacgggcatggcccgggcccgcacctccgtctcccagcaacggcacggggrctccgcctcctcggtcgcggcttcggccttcgccagcacctaccgccagcagccctcctacccgcagcagttcccctacccgcaggcgcccttcgtcagc

SEQ ID NO: 88866 - DNA, 201 bp, Homo sapiens
atctccgggagggacagatggccaatctctccccttccaaagcaggccctgctccccgggcagcctcccgccgaggggcccagcccccaacccacaggcasggaggggcatccctccctgccggcctcagggagcgaacgtggatgaaaaccacagggattccggacgccagaccccattttatacttcacttttctctac

SEQ ID NO: 88867 - DNA, 201 bp, Homo sapiens
tcggacaccgtgcgcggccaggcgcggcacccattcggctttggccaggtgcccgacaactggcgcgaggtggccgtcggggacagcacgggcatggccckggcccgcacctccgtctcccagcaacggcacgggggctccgcctcctcggtcgcggcttcggccttcgccagcacctaccgccagcagccctcctacccg

SEQ ID NO: 88868 - DNA, 201 bp, Homo sapiens
cccgccgaggggcccagcccccaacccacaggcagggaggggcatccctccctgccggcctcagggagcgaacgtggatgaaaaccacagggattccggaygccagaccccattttatacttcacttttctctacagtgttgttttgttgttgttggtttttattttttatactttggccataccacagagctagattgcc

SEQ ID NO: 88869 - DNA, 201 bp, Homo sapiens
atcctcaaggtgcacgtgaacccaaagtatattgttttggagtctgacttcaccaacaacgtggtgagatgcaacattcactacacaggtcgctacgtttmtgcaacaaactgcaaaattgtccaatcctgatctccgggagggacagatggccaatctctccccttccaaagcaggccctgctccccgggcagcctcccg

SEQ ID NO: 88870 - DNA, 201 bp, Homo sapiens
agatgccctgggctcagatctgtaattctcccaggagctgtgatagagcaggccacacaaagtccctacgcctccctgctgcctcccccagatgcatgtgrtggcatcaccattccccaaattgaatatcagcatgcggcctgaccagggactctttagatgcatgaatttatttatatgaaggctctcacagagacacac

SEQ ID NO: 88871 - DNA, 201 bp, Homo sapiens
cccaaaccaacttgtccccatcaactccatctttctagtccccaccttccccggtgcagacacccggcgaagcccacccggttttcccagcggcatttcckatgacagcttcggggctacgtgtcctgtgctgtcggagacgcacaggaagcaaagtttgtgagaagccttgggggcgactttgccttgggcacccgcatt

SEQ ID NO: 88872 - DNA, 201 bp, Homo sapiens
actgcgtccccaccctgaatgcattggccggtgcccggctcatggtctgggggatgcaggcaggggaagggcagagatggcttctcagatatggcttgcaaaaaaaaaaaaaaaaaaaaaaatcagaaattggagaaatccttaacacaattttctaaaaaataacagacatttttgttatacattagactatcagacact

SEQ ID NO: 88873 - DNA, 201 bp, Homo sapiens
gtctgggggatgcaggcaggggaagggcagagatggcttctcagatatggcttgcaaaaaaaaaaaaaaaaaaaaaaatcagaaattggagaaatccttarcacaattttctaaaaaataacagacatttttgttatacattagactatcagacactggacctaccttaatggttagacactttatgcaaaaaaagagaaa

SEQ ID NO: 88874 - DNA, 201 bp, Homo sapiens
tcctatgggcaaggcccagtgctcttcctgcccaccagggaccatggagcagtggcaccctatggggctatgatccctaggcctgggcctgggcctgcctrtggcccagagctaccctgggagtgtcagtgctagcagcacagctacctctggtggcaggagaagagaggcccagcacagcagcaggccaggccttcctgt

SEQ ID NO: 88875 - DNA, 201 bp, Homo sapiens
tgaaaagctttttacagaaagatgccgcctgtagccagtgacagccgcaaccctacaggcctcagttccttgcagaggtgaggggtagagagtcagcctcyctcccttccagcagcgacccagcttccctccacttccaggtggtgctgggctcaccaagggagcactggtgggtgctctgaaaacccacaggatcccacc

SEQ ID NO: 88876 - DNA, 201 bp, Homo sapiens
ggcctcagttccttgcagaggtgaggggtagagagtcagcctctctcccttccagcagcgacccagcttccctccacttccaggtggtgctgggctcaccragggagcactggtgggtgctctgaaaacccacaggatcccacctccaggcccacctgggtcccatctcactctcttcttctttcaccaattgctaacata

SEQ ID NO: 88877 - DNA, 201 bp, Homo sapiens
aactgcgtccccaccctgaatgcattggccggtgcccggctcatggtctgggggatgcaggcaggggaagggcagagatggcttctcagatatggcttgcmaaaaaaaaaaaaaaaaaaaaaatcagaaattggagaaatccttaacacaattttctaaaaaataacagacatttttgttatacattagactatcagacac

SEQ ID NO: 88878 - DNA, 201 bp, Homo sapiens
aatgcccagcccttcctcaaaatgagcagccacccatgactttgtgggctccttgttagcctgagaccaggctttgcagaggggcggggggtgaggcttakcccagaaggagaactgagcaggaaaccaaggctcttctctgtcccctgcccttcccctcctgccagggggaggctcaggttggtccccgagtgccgcctg

SEQ ID NO: 88879 - DNA, 201 bp, Homo sapiens
cttgtgctgccaaacttgtccctcgggcccatcgactccagcgtgctctctcggaataagacagaggtcgacatttataactcagaccccctgatctgccrggcagggctgaaggtgtgcttcggcatccaactgctgaatgccgtctcacgggtggagcgcgccctccccaagctgactgtgcccttcctgctgctccag

SEQ ID NO: 88880 - DNA, 201 bp, Homo sapiens
gcttcggcatccaactgctgaatgccgtctcacgggtggagcgcgccctccccaagctgactgtgcccttcctgctgctccagggctctgccgatcgcctrtgtgacagcaaaggggcctacctgctcatggagttagccaagagccaggacaagactctcaagatttatgaaggtgcctaccatgttctccacaaggagc

SEQ ID NO: 88881 - DNA, 201 bp, Homo sapiens; identical to SEQ ID NO: 88870

SEQ ID NO: 88882 - DNA, 201 bp, Homo sapiens; identical to SEQ ID NO: 88871

SEQ ID NO: 88883 - DNA, 201 bp, Homo sapiens; identical to SEQ ID NO: 88872

SEQ ID NO: 88884 - DNA, 201 bp, Homo sapiens; identical to SEQ ID NO: 88873

SEQ ID NO: 88885 - DNA, 201 bp, Homo sapiens; identical to SEQ ID NO: 88874

SEQ ID NO: 88886 - DNA, 201 bp, Homo sapiens; identical to SEQ ID NO: 88875

SEQ ID NO: 88887 - DNA, 201 bp, Homo sapiens; identical to SEQ ID NO: 88876

SEQ ID NO: 88888 - DNA, 201 bp, Homo sapiens; identical to SEQ ID NO: 88877

SEQ ID NO: 88889 - DNA, 201 bp, Homo sapiens; identical to SEQ ID NO: 88878

SEQ ID NO: 88890 - DNA, 201 bp, Homo sapiens; identical to SEQ ID NO: 88879

SEQ ID NO: 88891 - DNA, 201 bp, Homo sapiens; identical to SEQ ID NO: 88880

SEQ ID NO: 88892 - DNA, 201 bp, Homo sapiens; identical to SEQ ID NO: 88877

SEQ ID NO: 88893 - DNA, 201 bp, Homo sapiens; identical to SEQ ID NO: 88870

SEQ ID NO: 88894 - DNA, 201 bp, Homo sapiens; identical to SEQ ID NO: 88878

SEQ ID NO: 88895 - DNA, 201 bp, Homo sapiens; identical to SEQ ID NO: 88879

SEQ ID NO: 88896 - DNA, 201 bp, Homo sapiens; identical to SEQ ID NO: 88872

SEQ ID NO: 88897 - DNA, 201 bp, Homo sapiens; identical to SEQ ID NO: 88873

SEQ ID NO: 88898 - DNA, 201 bp, Homo sapiens; identical to SEQ ID NO: 88880

SEQ ID NO: 88899 - DNA, 201 bp, Homo sapiens; identical to SEQ ID NO: 88874

SEQ ID NO: 88900 - DNA, 201 bp, Homo sapiens; identical to SEQ ID NO: 88875

SEQ ID NO: 88901 - DNA, 201 bp, Homo sapiens; identical to SEQ ID NO: 88876

SEQ ID NO: 88902 - DNA, 201 bp, Homo sapiens
ttccccattatacctccttcaccccagaatatttgccgtcttgtacccttaagagctacagctagagaaaccttcacggggtggagagaggattctaaggyttttctagcgtgacccttttcagtagtgctagtcccttttttacttgatcttaatggcaagaaggccacagaggtacttttccttttttagctcaggaaa

SEQ ID NO: 88903 - DNA, 201 bp, Homo sapiens
gcagaggccagctgtgctgccctggtgaaggctggcaaagtctatgctgcggctaccgaggacatggactgcctcaccttcggcagccctgtgctaatgcracacctgactgccagtgaagccaaaaagctgccaatccaggaattccacctgagccggattctgcaggagctgggcctgaaccaggaacagtttgtggat

SEQ ID NO: 88904 - DNA, 201 bp, Homo sapiens
ttcggcagccctgtgctaatgcgacacctgactgccagtgaagccaaaaagctgccaatccaggaattccacctgagccggattctgcaggagctgggccwgaaccaggaacagtttgtggatctgtgcatcctgctaggcagtgactactgtgagagtatccggggtattgggcccaagcgggctgtggacctcatccag

SEQ ID NO: 88905 - DNA, 201 bp, Homo sapiens
gggtcaagaggctgagtaagagccgccaaggcagcacccagggccgcctggatgatttcttcaaggtgaccggctcactctcttcagctaagcgcaaggakccagaacccaagggatccactaagaagaaggcaaagactggggcagcagggaagtttaaaaggggaaaataaatgtgtttccccattatacctccttcac

SEQ ID NO: 88906 - DNA, 201 bp, Homo sapiens
accacttctcaggcagtttaatggacactaagtccattgttacatgaaagtgatagatagcaacaagttttggagaagagagagggagataaaagggggakacaaaagatgtacagaaatgatttcctggctggccaactggtggccagtgggaggtgatggtggacctagactgtgcttttctgtcttgttcagccttga

SEQ ID NO: 88907 - DNA, 201 bp, Homo sapiens
tttaaaaggggaaaataaatgtgtttccccattatacctccttcaccccagaatatttgccgtcttgtacccttaagagctacagctagagaaaccttcabggggtggagagaggattctaaggcttttctagcgtgacccttttcagtagtgctagtcccttttttacttgatcttaatggcaagaaggccacagaggta

SEQ ID NO: 88908 - DNA, 201 bp, Homo sapiens
cagaacccaagggatccactaagaagaaggcaaagactggggcagcagggaagtttaaaaggggaaaataaatgtgtttccccattatacctccttcaccscagaatatttgccgtcttgtacccttaagagctacagctagagaaaccttcacggggtggagagaggattctaaggcttttctagcgtgacccttttcag

SEQ ID NO: 88909 - DNA, 201 bp, Homo sapiens
cgaggacatggactgcctcaccttcggcagccctgtgctaatgcgacacctgactgccagtgaagccaaaaagctgccaatccaggaattccacctgagcyggattctgcaggagctgggcctgaaccaggaacagtttgtggatctgtgcatcctgctaggcagtgactactgtgagagtatccggggtattgggcccaa

SEQ ID NO: 88910 - DNA, 201 bp, Homo sapiens
ttcgggtgtagagggagcaggggcctgcggggacctggtgtgggtggagtggggacaagcggtggagaagggtacgccagggtcgctgagagactctgttytccctggagggactggttgccatgagagcagccgtctgaggggacgcagcctgcactacgcgccccaagaggctgtgcgtggcgagcaggtcacgtgacg

SEQ ID NO: 88911 - DNA, 147 bp, Homo sapiens
gtctagttattcagaggagtaagatggtgatgttcacctggcaatcagctgagttgagactttggaataagacactggttttcatgcgctgtttttgtttyaaagttatgaagaaaaaagtcaataaaattctaaaagtaaccaaaa

SEQ ID NO: 88912 - DNA, 201 bp, Homo sapiens
gggaggtccaggcaggaggatcacttgggcccaggaggtcaagcctgcagcgagctgagatcacaccactgcactccagcctggggtgatagaacaagacyctgtctcaaaaaaaaaaaaaacaacaaaaacttagaattgaggagttgtacctccattggcttcctcactccaaaataggtgctgatccttcctattcct

SEQ ID NO: 88913 - DNA, 201 bp, Homo sapiens
cacttttgggaggtccaggcaggaggatcacttgggcccaggaggtcaagcctgcagcgagctgagatcacaccactgcactccagcctggggtgatagarcaagaccctgtctcaaaaaaaaaaaaaacaacaaaaacttagaattgaggagttgtacctccattggcttcctcactccaaaataggtgctgatccttcc

SEQ ID NO: 88914 - DNA, 201 bp, Homo sapiens
caaagacatggaaggttagaggtttgtcaacaaaaagacatggaaggttaggtttgtcaacacaaagacatggaagattagaggtttgtcaacacaaagayacaggaagaatgggctgcagaagatttagatgttttccatttgggcacattttacttagctggagaactaggtttaaaacagcctgggtaggaaaattag

SEQ ID NO: 88915 - DNA, 201 bp, Homo sapiens
caacacttttgggaggtccaggcaggaggatcacttgggcccaggaggtcaagcctgcagcgagctgagatcacaccactgcactccagcctggggtgatrgaacaagaccctgtctcaaaaaaaaaaaaaacaacaaaaacttagaattgaggagttgtacctccattggcttcctcactccaaaataggtgctgatcct

SEQ ID NO: 88916 - DNA, 201 bp, Homo sapiens
gatgcagtggctcatgcctgtaatcccaacacttttgggaggtccaggcaggaggatcacttgggcccaggaggtcaagcctgcagcgagctgagatcacrccactgcactccagcctggggtgatagaacaagaccctgtctcaaaaaaaaaaaaaacaacaaaaacttagaattgaggagttgtacctccattggcttc

SEQ ID NO: 88917 - DNA, 201 bp, Homo sapiens
gcttgaaccggggaggtggaggttgcagtgagctgagatcacgccattgtactccagcctgggcgacagagcaagactccatttcaaaaaaaaaaaaaaaatccactcatataaaaggtgagctcagctcactggtccatttctcagtggcttctccatcctcatttgcaaacctcagagggataaggcagttgaacctga

SEQ ID NO: 88918 - DNA, 201 bp, Homo sapiens
agctactgcactgaggcaataactcctaagaaatcttaacatttcgccaggcaaggtggctcatcctgtaatcccagcactgggagagaatggcacacgtratcctagcctttaggaggccaaggcgggaggattgcttgagcccaggagtttaagaccagcctgggcaacagtgagatcccatctttacaaaaaattgaa

SEQ ID NO: 88919 - DNA, 201 bp, Homo sapiens
tactccagcctgggcgacagagcaagactccatttcaaaaaaaaaaaaaaaatccactcatataaaaggtgagctcagctcactggtccatttctcagtgscttctccatcctcatttgcaaacctcagagggataaggcagttgaacctgatgagcaagaattataacagcaaggaaacattaatgcttagaattctgag

SEQ ID NO: 88920 - DNA, 176 bp, Homo sapiens
agagcaagagactctgtctcaaaaaaaaaaaaaatgggatagaactttttgtcaacaccagttttcaaaaagtaccctagttatgaggccgttgctgggtraactttatcccattccagcttcaaccagaggaacctgtacatcctaaagtttcacataagattacacttgaagaa

SEQ ID NO: 88921 - DNA, 201 bp, Homo sapiens
cttgagcccaggaggctgaggctgcagtgagccaagatcgcactactgaactccagcctgggtgacagagcaagagactctgtctcaaaaaaaaaaaaaakgggatagaactttttgtcaacaccagttttcaaaaagtaccctagttatgaggccgttgctgggtaaactttatcccattccagcttcaaccagaggaac

SEQ ID NO: 88922 - DNA, 201 bp, Homo sapiens
gggcgacagagcaagactccatttcaaaaaaaaaaaaaaaatccactcatataaaaggtgagctcagctcactggtccatttctcagtggcttctccatcmtcatttgcaaacctcagagggataaggcagttgaacctgatgagcaagaattataacagcaaggaaacattaatgcttagaattctgagatccagcacaa

SEQ ID NO: 88923 - DNA, 201 bp, Homo sapiens
ctgggtaggaaaattagaagcaagctggatgcagtggctcatgcctgtaatcccaacacttttgggaggtccaggcaggaggatcacttgggcccaggagktcaagcctgcagcgagctgagatcacaccactgcactccagcctggggtgatagaacaagaccctgtctcaaaaaaaaaaaaaacaacaaaaacttagaa

SEQ ID NO: 88924 - DNA, 201 bp, Homo sapiens
caggcaggaggatcacttgggcccaggaggtcaagcctgcagcgagctgagatcacaccactgcactccagcctggggtgatagaacaagaccctgtctcmaaaaaaaaaaaaacaacaaaaacttagaattgaggagttgtacctccattggcttcctcactccaaaataggtgctgatccttcctattcctattctttg

SEQ ID NO: 88925 - DNA, 201 bp, Homo sapiens
ctaaaggagtcagggcagctctggctagatgcctatcttcaccaataacaacagccaccctgcccagtctggaagaagaggaggaagactctggagccaargcagaggggagcttgagggacaatgccactatagtttaatactcagagggggttgggtttggggacataaagcctctgactcaaactcctcccttttatc

SEQ ID NO: 88926 - DNA, 201 bp, Homo sapiens
tggtagagagagttgctggctatttaaaaagctctttcatcttttaattcacctcttcttttcacctctttaaccactcctcaggaacagaacacttctargactgggggtcttttagctccataagcaagtgagcagatgggacaagttagtcttttctccctagaaacaaaggggatgcccagtggtttccctttgctt

SEQ ID NO: 88927 - DNA, 201 bp, Homo sapiens
gactgggggtcttttagctccataagcaagtgagcagatgggacaagttagtcttttctccctagaaacaaaggggatgcccagtggtttccctttgcttyccaacctaaaatttcaagtttaataaaatagcaattagcagaagtgaccaaattgggagataattatcagtcatgaggaaagacacagatttcggtcata

SEQ ID NO: 88928 - DNA, 201 bp, Homo sapiens
ttgttactttcacttttttacaacctggccagaggcattttttaaatcaggcccaatatcagtattctttttgtgtgtgccaattttgttatcacatcccyatgaagttgaaaaataaagttaattttgaccaaaagacttcatttgtaacccatgatgttcatctgtgtgtgcacaggattcctgagtgcctctgctacg

SEQ ID NO: 88929 - DNA, 201 bp, Homo sapiens; identical to SEQ ID NO: 88924

SEQ ID NO: 88930 - DNA, 201 bp, Homo sapiens; identical to SEQ ID NO: 88912

SEQ ID NO: 88931 - DNA, 201 bp, Homo sapiens; identical to SEQ ID NO: 88913

SEQ ID NO: 88932 - DNA, 201 bp, Homo sapiens; identical to SEQ ID NO: 88914

SEQ ID NO: 88933 - DNA, 201 bp, Homo sapiens; identical to SEQ ID NO: 88915

SEQ ID NO: 88934 - DNA, 201 bp, Homo sapiens; identical to SEQ ID NO: 88925

SEQ ID NO: 88935 - DNA, 201 bp, Homo sapiens; identical to SEQ ID NO: 88916

SEQ ID NO: 88936 - DNA, 201 bp, Homo sapiens; identical to SEQ ID NO: 88926

SEQ ID NO: 88937 - DNA, 201 bp, Homo sapiens; identical to SEQ ID NO: 88917

SEQ ID NO: 88938 - DNA, 201 bp, Homo sapiens; identical to SEQ ID NO: 88927

SEQ ID NO: 88939 - DNA, 201 bp, Homo sapiens; identical to SEQ ID NO: 88928

SEQ ID NO: 88940 - DNA, 201 bp, Homo sapiens; identical to SEQ ID NO: 88919

SEQ ID NO: 88941 - DNA, 201 bp, Homo sapiens; identical to SEQ ID NO: 88922

SEQ ID NO: 88942 - DNA, 201 bp, Homo sapiens; identical to SEQ ID NO: 88923

SEQ ID NO: 88943 - DNA, 201 bp, Homo sapiens
gctgggtgcccagtgccctggccgccttcatcctggccatctctcaggctcagtcctggtgtctgcagcatgacctgggccatgcctccatcttcaagaaktcctggtggaaccacgtggcccagaagttcgtgatggggcagctaaagggcttctccgcccactggtggaacttccgccacttccagcaccacgccaagc

SEQ ID NO: 88944 - DNA, 201 bp, Homo sapiens
acctgggccatgcctccatcttcaagaagtcctggtggaaccacgtggcccagaagttcgtgatggggcagctaaagggcttctccgcccactggtggaasttccgccacttccagcaccacgccaagcccaacatcttccacaaagacccagacgtgacggtggcgcccgtcttcctcctgggggagtcatccgtcgagt

SEQ ID NO: 88945 - DNA, 201 bp, Homo sapiens
gagcgccgcgtctacgacatcagccgctgggcacagcggcacccagggggcagccgcctcatcggccaccacggcgctgaggacgccacggatgccttccrtgccttccatcaagatctcaattttgtgcgcaagttcctacagcccctgttgattggagagctggctccggaagaacccagccaggatggacccctgaat

SEQ ID NO: 88946 - DNA, 201 bp, Homo sapiens
gcagcatgggcggcgtcggggagccgggaccgcgggagggacccgcgcagccgggggcaccgctgcccaccttctgctgggagcagatccgcgcgcacgamcagcccggcgacaagtggctggtcatcgagcgccgcgtctacgacatcagccgctgggcacagcggcacccagggggcagccgcctcatcggccaccacg

SEQ ID NO: 88947 - DNA, 201 bp, Homo sapiens
tcggacctcggccaccgcctgggatccccaggactcgtgcgtgcagcatgggcggcgtcggggagccgggaccgcgggagggacccgcgcagccgggggcrccgctgcccaccttctgctgggagcagatccgcgcgcacgaccagcccggcgacaagtggctggtcatcgagcgccgcgtctacgacatcagccgctggg

SEQ ID NO: 88948 - DNA, 201 bp, Homo sapiens; identical to SEQ ID NO: 88943

SEQ ID NO: 88949 - DNA, 201 bp, Homo sapiens; identical to SEQ ID NO: 88944

SEQ ID NO: 88950 - DNA, 201 bp, Homo sapiens
ctggaagccccccaggccccgctgctcacagaccgggactccgcctccggttcccgagggcgtggcgaggcgctgcgggacgcccaacaggatgccttccrtgccttccatcaagatctcaattttgtgcgcaagttcctacagcccctgttgattggagagctggctccggaagaacccagccaggatggacccctgaat

SEQ ID NO: 88951 - DNA, 201 bp, Homo sapiens; identical to SEQ ID NO: 88943

SEQ ID NO: 88952 - DNA, 201 bp, Homo sapiens; identical to SEQ ID NO: 88944

SEQ ID NO: 88953 - DNA, 201 bp, Homo sapiens; identical to SEQ ID NO: 88945

SEQ ID NO: 88954 - DNA, 201 bp, Homo sapiens; identical to SEQ ID NO: 88946

SEQ ID NO: 88955 - DNA, 201 bp, Homo sapiens; identical to SEQ ID NO: 88947

SEQ ID NO: 88956 - DNA, 201 bp, Homo sapiens
aggcccgggctgaaggcatcccggtggagatggtggtgattggggacgacagcgccttcactgtcctgaagaaggcaggccggcgggggctgtgcggcacsgtgcttatacacaaggtggcaggtgctctggctgaggctggtgtggggctggaggagatcgcaaagcaggtgaacgtggtcaccaaggccatgggtaccc

SEQ ID NO: 88957 - DNA, 201 bp, Homo sapiens
gtggatgagcctctcctgaaactgatagatgctgaaaccactgcagcagcctggcctaacgtggctgcagtctccattactgggcggaagcggagccgggkagcccctgccgagccccaggaggcccctgattccactgctgcaggaggctcagcctcgaagcggatggcgctggtgctggaacgggtgtgcagcactctc

SEQ ID NO: 88958 - DNA, 168 bp, Homo sapiens
cagtgtctcctcagctgggctgcttccactgagacccccgacccatcccctttccagtacacacacctgatgcatgtaagaatggtagaggggcttttctyagcattgaattaataattcagtggctcctcgggagtcgaatgggcatttgggacaccagaaggaaaa

SEQ ID NO: 88959 - DNA, 201 bp, Homo sapiens
ggcaccttcatgtcagcactggagatgcctggcatttctctcaccctcctgctggtggatgagcctctcctgaaactgatagatgctgaaaccactgcagsagcctggcctaacgtggctgcagtctccattactgggcggaagcggagccgggtagcccctgccgagccccaggaggcccctgattccactgctgcagga

SEQ ID NO: 88960 - DNA, 201 bp, Homo sapiens
tcaacaacctgggtggcctgtcattcctggaactgggcatcatagccgacgctaccgtccgctccctggagggccgcggggtgaagattgcccgtgccctsgtgggcaccttcatgtcagcactggagatgcctggcatttctctcaccctcctgctggtggatgagcctctcctgaaactgatagatgctgaaaccactg

SEQ ID NO: 88961 - DNA, 201 bp, Homo sapiens
gtggcaccacccacagccgtgcggccagagcaatccaggagtggctgaaggagggcccaccccctgccagccctgcccagctgctctccaagttgtctgtyctgctcctggagaagatgggaggctcatctggggcgctctatggcctgttcctgactgcggctgcacagcccctgaaggccaagaccagcctcccagcct

SEQ ID NO: 88962 - DNA, 201 bp, Homo sapiens
ggccaagaccagcctcccagcctggtctgctgccatggatgccggcctggaagccatgcagaagtatggcaaggctgctccaggggacaggactatgctgrattctctgtgggcagcggggcaggagctccaagcctggaagagcccaggagctgatctgttacaagtcctgaccaaagcagtcaagagtgccgaagctgc

SEQ ID NO: 88963 - DNA, 201 bp, Homo sapiens
gagcagccagaccccggggcggtggcagctgctgccatcctccgggccatcttggaggtcttgcagagctagggtgtgtgactgcctcccttggcctcagytcctctcactgctgtgctgaggtggcctttgtcacttccttctgccttccaaccctcaccttcccccggcctggccccattggcccaccctctaagttga

SEQ ID NO: 88964 - DNA, 201 bp, Homo sapiens
gagaagatgggaggctcatctggggcgctctatggcctgttcctgactgcggctgcacagcccctgaaggccaagaccagcctcccagcctggtctgctgycatggatgccggcctggaagccatgcagaagtatggcaaggctgctccaggggacaggactatgctggattctctgtgggcagcggggcaggagctccaa

SEQ ID NO: 88965 - DNA, 201 bp, Homo sapiens
gcgggggctgtgcggcaccgtgcttatacacaaggtggcaggtgctctggctgaggctggtgtggggctggaggagatcgcaaagcaggtgaacgtggtcrccaaggccatgggtaccctgggggtgagcttatcctcctgcagcgtccctggttccaaacccaccttcgagctctcagccgacgaggtggagctgggcct

SEQ ID NO: 88966 - DNA, 201 bp, Homo sapiens
gggcgctctatggcctgttcctgactgcggctgcacagcccctgaaggccaagaccagcctcccagcctggtctgctgccatggatgccggcctggaagcsatgcagaagtatggcaaggctgctccaggggacaggactatgctggattctctgtgggcagcggggcaggagctccaagcctggaagagcccaggagctg

SEQ ID NO: 88967 - DNA, 201 bp, Homo sapiens; identical to SEQ ID NO: 88956

SEQ ID NO: 88968 - DNA, 201 bp, Homo sapiens; identical to SEQ ID NO: 88957

SEQ ID NO: 88969 - DNA, 168 bp, Homo sapiens; identical to SEQ ID NO: 88958

SEQ ID NO: 88970 - DNA, 201 bp, Homo sapiens; identical to SEQ ID NO: 88959

SEQ ID NO: 88971 - DNA, 201 bp, Homo sapiens; identical to SEQ ID NO: 88960

SEQ ID NO: 88972 - DNA, 201 bp, Homo sapiens; identical to SEQ ID NO: 88961

SEQ ID NO: 88973 - DNA, 159 bp, Homo sapiens
accgcctcgcctctttccgccagcgcccgcaggacccggatgagagcgcacgcttcggrgtctccgggaagtcgcggcgccttcggatgtggcggatgcggccgtgagccggcgggggaggtgctgctgctgcctccactgtactcagacccaggtagc

SEQ ID NO: 88974 - DNA, 201 bp, Homo sapiens; identical to SEQ ID NO: 88962

SEQ ID NO: 88975 - DNA, 201 bp, Homo sapiens; identical to SEQ ID NO: 88963

SEQ ID NO: 88976 - DNA, 201 bp, Homo sapiens; identical to SEQ ID NO: 88964

SEQ ID NO: 88977 - DNA, 201 bp, Homo sapiens; identical to SEQ ID NO: 88965

SEQ ID NO: 88978 - DNA, 201 bp, Homo sapiens; identical to SEQ ID NO: 88966

SEQ ID NO: 88979 - DNA, 201 bp, Homo sapiens; identical to SEQ ID NO: 88957

SEQ ID NO: 88980 - DNA, 168 bp, Homo sapiens; identical to SEQ ID NO: 88958

SEQ ID NO: 88981 - DNA, 201 bp, Homo sapiens; identical to SEQ ID NO: 88959

SEQ ID NO: 88982 - DNA, 201 bp, Homo sapiens; identical to SEQ ID NO: 88964

SEQ ID NO: 88983 - DNA, 201 bp, Homo sapiens; identical to SEQ ID NO: 88966

SEQ ID NO: 88984 - DNA, 201 bp, Homo sapiens; identical to SEQ ID NO: 88961

SEQ ID NO: 88985 - DNA, 201 bp, Homo sapiens
gcttttctgttgttttctttccctgatgcccatttttcccttttggactgccacactctggtattgcagagggccgcggggtgaagattgcccgtgccctsgtgggcaccttcatgtcagcactggagatgcctggcatttctctcaccctcctgctggtggatgagcctctcctgaaactgatagatgctgaaaccactg

SEQ ID NO: 88986 - DNA, 201 bp, Homo sapiens; identical to SEQ ID NO: 88962

SEQ ID NO: 88987 - DNA, 201 bp, Homo sapiens; identical to SEQ ID NO: 88963

SEQ ID NO: 88988 - DNA, 201 bp, Homo sapiens
ctgcggcgggcgggagaggacagtcctgagcatggccccggcagctgtgaagtcctgcaggagtggcccaagcaggaggaagcactttgcttgggcagcaracgtgcctcattgccagggaaagacccaggaaactgccttatctgtgaggacctctttgctgctgaggaaggagtccagggagatgccgtggaggggatt

SEQ ID NO: 88989 - DNA, 201 bp, Homo sapiens
aattcgccgagttcatcgacagcctcttcaacctggacagcaagagcagctccttccaagacctctactgcatggtggtgcccgagagccccaccagtgastacgctgagggccccaagtcccccagccagcaagagatcctgctccgtgcccagttcgagcccaacctggtgcccaagcccccacggctctttgccggct

SEQ ID NO: 88990 - DNA, 201 bp, Homo sapiens
atgagctggtcatctcagcacgctagcaccccagttgcgtggccagccgggcccaggcaggagcaggtggccctgtgggcacctggtgcctgccccctgcygggcagctttaaggacagacccccaggggcagtttagcctcaggcacaggcatcgctgctgagctgggggtccgcatccctacctcagcttaggaccccc

SEQ ID NO: 88991 - DNA, 201 bp, Homo sapiens
cgggcactgctgccatcctctccttccttctgcgcccacagtatccgaccctcaagtgctttgcctactccccgccagggggcctgctgagtgaggatgcratggagtattccaaggagttcgtgactgctgtggttctgggcaaagacctcgtccccaggattggcctctctcagctggaaggcttccgcagacagctcc

SEQ ID NO: 88992 - DNA, 201 bp, Homo sapiens
ctggaggcggccctgggcagtggcggcgtcactcctgagcggccccccagtgctgcggccaatgacgaggaggaagaggttggcggtgggggtggcgggcyggcctcccgcggggagctggcgctgcacaatgggcgcctgggggactcgcccagtcctcaggtgctggaattcgccgagttcatcgacagcctcttcaac

SEQ ID NO: 88993 - DNA, 201 bp, Homo sapiens
gtggcctgcagtgctgtacatgtttacagaagctgctgggcttggctcaggatgtgttctgggcttgcaagccccccgcccaatcatgtgttcagtagccrtcctctgagcagggcccaaggcagccaggggcctggaggggccagaggagggtggggtcagggccgccccttctctgccttgtgcctctcatgctgcctc

SEQ ID NO: 88994 - DNA, 201 bp, Homo sapiens
agggcttctcggaggggcggctgctgtcgccagtggttgcggcggcggcccgccaggacccggtggagctgctgctgctgtctacccaggagcggctggcrgcggagctgcaggcccggcgggcaccactggccaccatggagagcctctcggacactgagtccctgtacagcttcgactcgcgccgctcctcaggcttcc

SEQ ID NO: 88995 - DNA, 201 bp, Homo sapiens
gggccgcccatgcccactggccttgccctggagctgccgactgcagaccaccgcaacagcagcgtcaggagcaagtcccagtctgagatgagcctggaggkcttctcggaggggcggctgctgtcgccagtggttgcggcggcggcccgccaggacccggtggagctgctgctgctgtctacccaggagcggctggcggcg

SEQ ID NO: 88996 - DNA, 201 bp, Homo sapiens
tggagagcctctcggacactgagtccctgtacagcttcgactcgcgccgctcctcaggcttccgcagcatccggggctcccccagcctccacgctgtgctrgagcgtgatgaaggccacctcttctacattgaccctgccatccccgaggaaaacccatccctgagctcgcgcactgagctgctggcggccgacagcctgt

SEQ ID NO: 88997 - DNA, 201 bp, Homo sapiens
tgggactggcctggatggctgtcctgggagcccctgcccaccctgacagagggagctgggcctcccctcatcctctgtaactcccgccttcaccagactcraggacaccctggccctgctgaggcatacagagcttgaaagatctgacaagcaccgtggccagtcacagggagagacttgatgtctggccttttaattcct

SEQ ID NO: 88998 - DNA, 201 bp, Homo sapiens
agcaccaggcccactgagcctctgcagagccaccagccatgcccgggatcgtggtgttccggcggcgctggtctgtgggcagtgatgacctcgtcctaccrgccatcttcctctttctcctgcataccacctggtttgtgatcctgtccgtggtgctcttcggcctggtctataacccgcacgaggcctgctccctgaacc

SEQ ID NO: 88999 - DNA, 201 bp, Homo sapiens; identical to SEQ ID NO: 88989

SEQ ID NO: 89000 - DNA, 201 bp, Homo sapiens; identical to SEQ ID NO: 88990

SEQ ID NO: 89001 - DNA, 201 bp, Homo sapiens; identical to SEQ ID NO: 88991

SEQ ID NO: 89002 - DNA, 201 bp, Homo sapiens; identical to SEQ ID NO: 88992

SEQ ID NO: 89003 - DNA, 201 bp, Homo sapiens; identical to SEQ ID NO: 88993

SEQ ID NO: 89004 - DNA, 201 bp, Homo sapiens; identical to SEQ ID NO: 88994

SEQ ID NO: 89005 - DNA, 201 bp, Homo sapiens
gccagtcacagggagagacttgatgtctggccttttaattcctcctctgccagggtgggtcctgggacctctaatgtgggcatgtcgtccaccccaggacragccatcagggacagaccccccacccccaaggctgcagccacaccatgtttcaggcttggggctggggcaggcttgggctcaatcctgggcacccagggg

SEQ ID NO: 89006 - DNA, 201 bp, Homo sapiens; identical to SEQ ID NO: 88995

SEQ ID NO: 89007 - DNA, 201 bp, Homo sapiens
ctgcagccacaccatgtttcaggcttggggctggggcaggcttgggctcaatcctgggcacccaggggcagcccacccctaacctggctcctacccacctygcccttgaaggatgggcctgctgcacgtctccctcctccaccccataccacactggggggtctgagccacccccctcagccccgttcggctcagaccgac

SEQ ID NO: 89008 - DNA, 201 bp, Homo sapiens; identical to SEQ ID NO: 88996

SEQ ID NO: 89009 - DNA, 201 bp, Homo sapiens
tgggactggcctggatggctgtcctgggagcccctgcccaccctgacagagggagctgggcctcccctcatcctctgtaactcccgccttcaccagactcraggacaccctggccctgctgaggcatacagagcttcagcccagcacagaagcaagacaaaatcagtggctcttagagtttagaaaacaagacagactctc

SEQ ID NO: 89010 - DNA, 201 bp, Homo sapiens; identical to SEQ ID NO: 88998

SEQ ID NO: 89011 - DNA, 201 bp, Homo sapiens
aatcctgggcacccaggggcagcccacccctaacctggctcctacccaccttgcccttgaaggatgggcctgctgcacgtctccctcctccaccccatacmacactggggggtctgagccacccccctcagccccgttcggctcagaccgacccccactccatccccagacctgcagcacaagtgcgcgggcctgtcctcc

SEQ ID NO: 89012 - DNA, 201 bp, Homo sapiens
ctctgtgagctacttggagacagggagggggcggcaataccagctgttggcagctctgttctgccccagcccaactgccacccacggtgccccagcccccsctcctgtcctatcgtgtccaaccctaatctgaagctggaggtgagcaccaggcccactgagcctctgcagagccaccagccatgcccgggatcgtggtgt

SEQ ID NO: 89013 - DNA, 201 bp, Homo sapiens
agcaccaggcccactgagcctctgcagagccaccagccatgcccgggatcgtggtgttccggcggcgctggtctgtgggcagtgatgacctcgtcctaccrgccatcttcctctttctcctgcataccacctggcattcgatgccaggtggacaatggtcttatggaggaggtgcctgctgccagccctccttccactgaa

SEQ ID NO: 89014 - DNA, 138 bp, Homo sapiens
cctagccctgccctggatgagccccagggccctcccatccggggtgctggccctgctcccctgactggtcctcctggcccacacatcactgactcagaggyagccctgtcaccggagaagcgaggagccactcgttat

SEQ ID NO: 89015 - DNA, 201 bp, Homo sapiens
tcctggagaaccctaagaaccaagcacctccagaccaggacccggccaaagcccccaacacccctgacattctcgagatcgagttcaaaaaaggagtcccygtgaaggtgaccaacgtcaaggatggcaccacccaccagacctcattggagctcttcatgtacctgaacgaagtcgtgggcaagcagggtgtgggctgta

SEQ ID NO: 89016 - DNA, 201 bp, Homo sapiens
tatgtcccacagcaccacgggaaatgggaacaatcagccccccagataaaggtcattgctccctggaggatgcccaaattctacaaccagctcaagggccdcaatgacctgatggaatatgcaaagcaacacaggattcccatcccggtcacacccaagaactcgtggagcatggacgagaacctcatgcatatcagctac

SEQ ID NO: 89017 - DNA, 201 bp, Homo sapiens
atatcagctacgagtctggaatcctggagaaccctaagaaccaagcacctccagaccaggacccggccaaagcccccaacacccctgacattctcgagatygagttcaaaaaaggagtccctgtgaaggtgaccaacgtcaaggatggcaccacccaccagacctcattggagctcttcatgtacctgaacgaagtcgtgg

SEQ ID NO: 89018 - DNA, 201 bp, Homo sapiens
gtccgtcctcgagggccaggtgtacatccttggccaggagtccccactgtctctctacaaggaggagccggtgagcatgaacgtgcagggtgattatcagycaattgatgccaccgggttcatcaacatcaattccctcaggctgaaggaatatcatcgtctccagagcaaggtcactgccaaatagccccctgtacaatg

SEQ ID NO: 89019 - DNA, 201 bp, Homo sapiens
aagaaccaagcacctccaggtctctacacgaagaccaggacccggccaaagcccccaacacccctgacattctcgagatcgagttcaaaaaaggagtcccygtgaaggtgaccaacgtcaaggatggcaccacccaccagacctcattggagctcttcatgtacctgaacgaagtcgtgggcaagcagggtgtgggctgta

SEQ ID NO: 89020 - DNA, 201 bp, Homo sapiens
cacccagtggaagggggccaagtatatgtcccacagcaccacgggaaatgggtcattgctccctggaggatgcccaaattctacaaccagctcaagggccdcaatgacctgatggaatatgcaaagcaacacaggattcccatcccggtcacacccaagaactcgtggagcatggacgagaacctcatgcatatcagctac

SEQ ID NO: 89021 - DNA, 201 bp, Homo sapiens
tctggaatcctggagaaccctaagaaccaagcacctccaggtctctacacgaagaccaggacccggccaaagcccccaacacccctgacattctcgagatygagttcaaaaaaggagtccctgtgaaggtgaccaacgtcaaggatggcaccacccaccagacctcattggagctcttcatgtacctgaacgaagtcgtgg

SEQ ID NO: 89022 - DNA, 201 bp, Homo sapiens; identical to SEQ ID NO: 89018

SEQ ID NO: 89023 - DNA, 201 bp, Homo sapiens; identical to SEQ ID NO: 89019

SEQ ID NO: 89024 - DNA, 201 bp, Homo sapiens
aatcaggtccggtttgagctcatttgctactcactagccccccagataaaggtcattgctccctggaggatgcccaaattctacaaccagctcaagggccdcaatgacctgatggaatatgcaaagcaacacaggattcccatcccggtcacacccaagaactcgtggagcatggacgagaacctcatgcatatcagctac

SEQ ID NO: 89025 - DNA, 201 bp, Homo sapiens; identical to SEQ ID NO: 89021

SEQ ID NO: 89026 - DNA, 201 bp, Homo sapiens; identical to SEQ ID NO: 89018

SEQ ID NO: 89027 - DNA, 116 bp, Homo sapiens
atgacaagggacatcrcccccaggatcggatatcctaaacccgtcctgctgcattcttccttcttctctgacctgcagggcatccagaacaaaatgagtgccagtgaccccagctc

SEQ ID NO: 89028 - DNA, 170 bp, Homo sapiens
tcaaggatgaagacaagctcgagcagatgaggaaggatgacaccagcagagacatgctcactggtgacctcaagaagatgctcatagaggttctccagccygtgattacagagcaccaagcccagtgcaaggaggtcatggacgagttagtgaaagagttcactaacgaa

SEQ ID NO: 89029 - DNA, 201 bp, Homo sapiens
gcttatcaacctggcaatcagttataaaattaaatgatttttttgttgaaataagaggaactttaaaaatgatgtgtgagagctttatctacaatcagacrcttatgaagaagctacaggaaaccaactacgatgtaatgcttatagaccctgtgattccctgtggagacctgatggctgagttgcttgcagtcccttttg

SEQ ID NO: 89030 - DNA, 201 bp, Homo sapiens
ccttgctattttcatattatctattctgttattttatcttagctatatagcctagaattccacgatcatgaggttgtgagtatatctcattctttcgttgyattttcctaggtgtctttactctcttctctcactttgtgacacaaggacatgaatacatctaaattttcctatttctgatatgactgttttgatgatgtc

SEQ ID NO: 89031 - DNA, 201 bp, Homo sapiens
tattcttgttcacaaaatgttttttattttcctgtcaaaaatttaataaaactagaaagatagaaaagagggaatagatctttccaaattcaagaaagacstgatggggtaatcctgttaattccagccacatagaatttggtgaaaaccttgctattttcatattatctattctgttattttatcttagctatatagcct

SEQ ID NO: 89032 - DNA, 201 bp, Homo sapiens
tgtttacactaataagcaaatatgttaatcttctcatttttttactgtcatataatcttagtgatatgcctattaatagttttaaataaataaattggctyatctggctttttgaaaattttgaaattcttacagatgttgattaggtatatctacaaattaatttcaattttaaaatgatgatataaaaataaatataag

SEQ ID NO: 89033 - DNA, 201 bp, Homo sapiens
ggattacgactatcatttttgggaagagttttatagtaaggcattaggaaggcccactacattatgtgagactgtgggaaaagctgagatatggctaataygaacatattgggattttgaatttcctcaaccataccaacctaactttgagtttgttggaggattgcactgtaaacctgccaaagctttgcctaaggaaat

SEQ ID NO: 89034 - DNA, 201 bp, Homo sapiens
ggtattagaaaacctgcataacaaatagtattatatattaaatattttgatatgtaaagctctacacaaagctaaatatagtgtaataatgtttacactartaagcaaatatgttaatcttctcatttttttactgtcatataatcttagtgatatgcctattaatagttttaaataaataaattggctcatctggctttt

SEQ ID NO: 89035 - DNA, 201 bp, Homo sapiens
ctatcatttttgggaagagttttatagtaaggcattaggaaggcccactacattatgtgagactgtgggaaaagctgagatatggctaatacgaacatatkgggattttgaatttcctcaaccataccaacctaactttgagtttgttggaggattgcactgtaaacctgccaaagctttgcctaaggaaatggaaaattt

SEQ ID NO: 89036 - DNA, 201 bp, Homo sapiens
gataaaaagacctttctcatgattgccatcaaataacaaaagaaactattttttttctcacatagagaacatgtcagtaagatattcaaggtgaacagattatttttgggattagtaactatttgaaatatgtggtgataattactgagtttataaaatttatttgatagtacacttaaagaagatttatatgtttattct

SEQ ID NO: 89037 - DNA, 201 bp, Homo sapiens
ttcacaaaattcagtaaaccacacaaatcaggtaagtgttctatgagattagctggctatgagaaacataatgatgtttctttttcaatttaaataagccyttctacatagccagcatcagtgatctcagaaaataaattgctaataatgatgacatggcattatgcttagaaaagtttgctgtatttccatagacctcat

SEQ ID NO: 89038 - DNA, 201 bp, Homo sapiens
gtttgtcatgcgccacaaaggagccaagcacctgcgatcagctgcccatgacctcacctggttccagcactactctatagatgtgattgggttcctgctgrcctgtgtggcaactgctatattcttgttcacaaaatgttttttattttcctgtcaaaaatttaataaaactagaaagatagaaaagagggaatagatctt

SEQ ID NO: 89039 - DNA, 201 bp, Homo sapiens
ggaaatggaaaattttgtccagagttcaggggaagatggtattgtggtgttttctctggggtcactgtttcaaaatgttacagaagaaaaggctaatatcrttgcttcagcccttgcccagatcccacagaaggtgttatggaggtacaaaggaaaaaaaccatccacattaggagccaatactcggctgtatgattggat

SEQ ID NO: 89040 - DNA, 201 bp, Homo sapiens
ctggatcgagtttgtcatgcgccacaaaggagccaagcacctgcgatcagctgcccatgacctcacctggttccagcactactctatagatgtgattgggktcctgctggcctgtgtggcaactgctatattcttgttcacaaaatgttttttattttcctgtcaaaaatttaataaaactagaaagatagaaaagaggga

SEQ ID NO: 89041 - DNA, 201 bp, Homo sapiens
aatcctgttaattccagccacatagaatttggtgaaaaccttgctattttcatattatctattctgttattttatcttagctatatagcctagaattccaygatcatgaggttgtgagtatatctcattctttcgttgtattttcctaggtgtctttactctcttctctcactttgtgacacaaggacatgaatacatcta

SEQ ID NO: 89042 - DNA, 201 bp, Homo sapiens; identical to SEQ ID NO: 89029

SEQ ID NO: 89043 - DNA, 201 bp, Homo sapiens; identical to SEQ ID NO: 89030

SEQ ID NO: 89044 - DNA, 201 bp, Homo sapiens; identical to SEQ ID NO: 89031

SEQ ID NO: 89045 - DNA, 201 bp, Homo sapiens; identical to SEQ ID NO: 89032

SEQ ID NO: 89046 - DNA, 201 bp, Homo sapiens
ggattacgactatcatttttgggaagagttttatagtaaggcattaggaaggcccactacattatgtgagactgtgggaaaagctgagatatggctaataygaacatattgggattttgaatttcctcaaccataccaacctaactttgagtttgttggaggattgcactgtaaacctgccaaagctttgcctaaggaaag

SEQ ID NO: 89047 - DNA, 201 bp, Homo sapiens; identical to SEQ ID NO: 89034

SEQ ID NO: 89048 - DNA, 201 bp, Homo sapiens
ctatcatttttgggaagagttttatagtaaggcattaggaaggcccactacattatgtgagactgtgggaaaagctgagatatggctaatacgaacatatkgggattttgaatttcctcaaccataccaacctaactttgagtttgttggaggattgcactgtaaacctgccaaagctttgcctaaggaaagttataccag

SEQ ID NO: 89049 - DNA, 201 bp, Homo sapiens; identical to SEQ ID NO: 89036

SEQ ID NO: 89050 - DNA, 201 bp, Homo sapiens; identical to SEQ ID NO: 89037

SEQ ID NO: 89051 - DNA, 201 bp, Homo sapiens; identical to SEQ ID NO: 89038

SEQ ID NO: 89052 - DNA, 201 bp, Homo sapiens; identical to SEQ ID NO: 89039

SEQ ID NO: 89053 - DNA, 201 bp, Homo sapiens; identical to SEQ ID NO: 89041

SEQ ID NO: 89054 - DNA, 201 bp, Homo sapiens; identical to SEQ ID NO: 89040

SEQ ID NO: 89055 - DNA, 201 bp, Homo sapiens
tgtctctgacacatttacaaaataccagttttttaaaattttggtcaaattatgagtggttgatttaaaaacttttccaagaagaagaaaagcatggagtmgtaatttaaagaactcaataaaaacttctattttttattttaaaataatatacacagtgttattttcttcaagaccgtcctgtggatgtgaaatccgtct

SEQ ID NO: 89056 - DNA, 135 bp, Homo sapiens
tctcacacatttgctgttccttattcattgttgacacaggggataggtgatccactacttgctgtagaatgtccttactttcactaggaggcagattactraaatagtattgtggtaccagctgcataaatctgt

SEQ ID NO: 89057 - DNA, 201 bp, Homo sapiens
cgtcctgtggatgtgaaatccgtcttcgcgtcatgtatctcccatatccagcagttcagccatccagctacctttgggaccctgctgcaccttgtgtttgytggggagtcactggagagtgcatctctgttcagtttcagggcacgtctcacacatttgctgttccttattcattgttgacacaggggataggtgatccac

SEQ ID NO: 89058 - DNA, 201 bp, Homo sapiens
cagaaagaactggcgggggcacacagaaccaataagccatgtgggaagtgctacttttaccttctgattagtaagacatttgtggaagcaggaaaaaacawttccaaaaagaaacctagcaacaaaaagaaagctgcgttaatgtttgcaaatgcagaggaagaatttttctatgagaaggcaattctcaagttcaactac

SEQ ID NO: 89059 - DNA, 201 bp, Homo sapiens
aatccagcaggggcattggggttgacgtgcactcagcgccgagcttcttcgtagttcctcacccccttggctactatgggctggtccggaaggtcaggcawggggaagctgcgcaggcgcagtgtgagcggcaacatggcgtccaggtctaagcggcgtgccgtggaaagtggggttccgcagccgccggatcccccagtc

SEQ ID NO: 89060 - DNA, 201 bp, Homo sapiens
ttgacgtgcactcagcgccgagcttcttcgtagttcctcacccccttggctactatgggctggtccggaaggtcaggcaaggggaagctgcgcaggcgcastgtgagcggcaacatggcgtccaggtctaagcggcgtgccgtggaaagtggggttccgcagccgccggatcccccagtccagcgcgacgaggaagaggaa

SEQ ID NO: 89061 - DNA, 201 bp, Homo sapiens
ttcgcgtcatgtatctcccatatccagcagttcagccatccagctacctttgggaccctgctgcaccttgtgtttgctggggagtcactggagagtgcatmtctgttcagtttcagggcacgtctcacacatttgctgttccttattcattgttgacacaggggataggtgatccactacttgctgtagaatgtccttact

SEQ ID NO: 89062 - DNA, 201 bp, Homo sapiens
cagaaagaactggcgggggcacacagaaccaataagccatgtgggaagtgctacttttaccttctgattagtaagacatttgtggaagcaggaaaaaacawttccaaaaagaaacctagcaacaaaaagaaagctgcgttaatgtttgcaaatgcagaggaagaatttttctatgaggagcagggaaaacctgaggtgctt

SEQ ID NO: 89063 - DNA, 201 bp, Homo sapiens; identical to SEQ ID NO: 89059

SEQ ID NO: 89064 - DNA, 201 bp, Homo sapiens
tcaaaatataatttcaaatggatccgatctaaatctatacctagtgcagatttgcaaaaaaagaaaaggaatagtcattaaggatacctgttaccatggcygcgattgttagcacttcatctacacagtcaaattcacaggacgctaagatagacttcgagagttgtggatcaagaggaaactctgacatgatgattccaa

SEQ ID NO: 89065 - DNA, 201 bp, Homo sapiens; identical to SEQ ID NO: 89060

SEQ ID NO: 89066 - DNA, 201 bp, Homo sapiens
tcctcttccataaattcagcatttctgagaacaactacatcaggattacctcagaaatctctcctgaactatttatgcagctggtaccacaatactatttyagtaatctgcctcctagtgaaagtaaggacattctacagcaagtagtggatcacctatcccctgtgtcaacaatgaataaggaacagcaaatgtgtgaga

SEQ ID NO: 89067 - DNA, 201 bp, Homo sapiens
agacggatttcacatccacaggacggtcttgaagaaaataacactgtgtatattattttaaaataaaaaatagaagtttttattgagttctttaaattackactccatgcttttcttcttcttggaaaagtttttaaatcaaccactcataatttgaccaaaattttaaaaaactggtattttgtaaatgtgtcagagaca

SEQ ID NO: 89068 - DNA, 201 bp, Homo sapiens
gtggatcacctatcccctgtgtcaacaatgaataaggaacagcaaatgtgtgagacgtgccctgaaactgaacagagatgcactctccagtgactccccarcaaacacaaggtgcagcagggtcccaaaggtagctggatggctgaactgctggatatgggagatacatgacgcgaagacggatttcacatccacaggacg

SEQ ID NO: 89069 - DNA, 201 bp, Homo sapiens
ttggaatcatcatgtcagagtttcctcttgatccacaactctcgaagtctatcttagcgtcctgtgaatttgactgtgtagatgaagtgctaacaatcgcrgccatggtaacagctccaaattgcttttcacatgtgccacatggagctgaagaggctgccttgacttgttggaagacatttttacatcccgaaggagatc

SEQ ID NO: 89070 - DNA, 201 bp, Homo sapiens
agtaaggacattctacagcaagtagtggatcacctatcccctgtgtcaacaatgaataaggaacagcaaatgtgtgagacgtgccctgaaactgaacagakatgcactctccagtgactccccagcaaacacaaggtgcagcagggtcccaaaggtagctggatggctgaactgctggatatgggagatacatgacgcgaa

SEQ ID NO: 89071 - DNA, 201 bp, Homo sapiens
cactcgggtgagaaaggtgacattgtagtctttctggcctgtgaacaagatattgagaaagtctgtgaaactgtctatcaaggatctaacctaaacccagmtcttggagaactggtggttgttcctttgtatccaaaagagaaatgttcattgttcaagccactcgatgaaacagaaaaaagatgccaagtttatcaaaga

SEQ ID NO: 89072 - DNA, 201 bp, Homo sapiens
gagtctattttacgccttatctttgaaattcaccactcgggtgagaaaggtgacattgtagtctttctggcctgtgaacaagatattgagaaagtctgtgmaactgtctatcaaggatctaacctaaacccagatcttggagaactggtggttgttcctttgtatccaaaagagaaatgttcattgttcaagccactcgat

SEQ ID NO: 89073 - DNA, 159 bp, Homo sapiens
acactgctcctgaagcccggtcaggcggtcgcgccctccctggcggcccccgcggcccsgcaggacctgtgccccgacgtcgccgacccgcggtccccgctgtcgccgacccgcggcgtccgtcgggcgagtgggcctgcccgcgggtaaggcgccggc

SEQ ID NO: 89074 - DNA, 201 bp, Homo sapiens
atggagctgaagaggctgccttgacttgttggaagacatttttacatcccgaaggagatcactttaccctcatcagcatttacaaggcttaccaagacacmactctgaattctagcagtgagtactgtgtggaaaagtggtgtcgtgattacttcctcaactgttcagcactcagaatggcagatgttattcgagctgaac

SEQ ID NO: 89075 - DNA, 120 bp, Homo sapiens
caggcagagagcacgaggcycagtgcagaatcattttctgaaccagccaggaaataccggaacccaccaaactttaaacaccagcctaaattattcctgttcttttaagcaggcagcaga

SEQ ID NO: 89076 - DNA, 201 bp, Homo sapiens; identical to SEQ ID NO: 89066

SEQ ID NO: 89077 - DNA, 201 bp, Homo sapiens; identical to SEQ ID NO: 89067

SEQ ID NO: 89078 - DNA, 201 bp, Homo sapiens; identical to SEQ ID NO: 89068

SEQ ID NO: 89079 - DNA, 201 bp, Homo sapiens; identical to SEQ ID NO: 89069

SEQ ID NO: 89080 - DNA, 201 bp, Homo sapiens; identical to SEQ ID NO: 89070

SEQ ID NO: 89081 - DNA, 201 bp, Homo sapiens; identical to SEQ ID NO: 89072

SEQ ID NO: 89082 - DNA, 201 bp, Homo sapiens; identical to SEQ ID NO: 89071

SEQ ID NO: 89083 - DNA, 201 bp, Homo sapiens
ccagccaggaaataccggaacccaccaaactttaaacaccagcctaaattattcctgttcttttaagcaggcagcagaaatgacagaaacccgttaacagaaaaaaaaaaaataatgcttttcatttgaactcctgtgcattttctttttaacttatatgtgttcctaattttccttactctttttgtttgtttgtttctt

SEQ ID NO: 89084 - DNA, 201 bp, Homo sapiens; identical to SEQ ID NO: 89074

SEQ ID NO: 89085 - DNA, 201 bp, Homo sapiens
ggcgttgggtacaacaaaaccagccatcggagttacaccccaaagcaccatttgctgtccagctgcctgtcgtttggcccagaccaccctcagaaaaaaamcagctgcctctcccattctcccctcccgttctgccacagcggcctgggctggtccagtgctatgcctggaggctcaacacaaaacttcccatccaaacat

SEQ ID NO: 89086 - DNA, 201 bp, Homo sapiens
ccccttagaccaaccccaggtgtccactgcaggggttctgcctgttcccaaactttttccattccaggaacaaaggagaagccactttccccaggacgcargactctcccctccactgtccgggacagcgttcgccctttagcggggaggtcattacagcctcatggcctctaccaaggccccagatcacaggatctcctg

SEQ ID NO: 89087 - DNA, 201 bp, Homo sapiens
gattagaagacgaccattctgatctgtgtgtgatctggtcactatgtgactgcctttacggtttctctccatgtgctatatgaatgaagaatgcataccartgttttaaaaggtatttttatgtgtttttaaacacttttttaaatgagcctgacacctgtgtttcagcatttggagacatccccatgttattcttttaag

SEQ ID NO: 89088 - DNA, 201 bp, Homo sapiens
acacctgtgtttcagcatttggagacatccccatgttattcttttaagtgtataattactgatacttttttgtttgtttgtttaactaagttgtgtttaayttatgtgcagtctttataatgtatgtatgttattacagtttcaactatcatattttctttgattacatttataatttgatcttgctctgattataatgcc

SEQ ID NO: 89089 - DNA, 201 bp, Homo sapiens
ggctttggttcatgtctaggagccctctgtcagaatccttgaagccctttaatggtctaactggcatctcttgtatcaagaagtacctttaaggtagaccytttcagggtgccctcaggaaagggccctgctcatgtttttttcctgtccccttagaccaaccccaggtgtccactgcaggggttctgcctgttcccaaac

SEQ ID NO: 89090 - DNA, 201 bp, Homo sapiens
ctggtccagtgctatgcctggaggctcaacacaaaacttcccatccaaacattcagatgaactgagcgtcttacacacgcagtacagaggagcacacattrggatagaaacagtagaataaccacgggcaattaaactttaaattttctgagcagcattttggtatttaaacatttcttgtaaaaagctgagacagtttgt

SEQ ID NO: 89091 - DNA, 201 bp, Homo sapiens
atggccattaggtacctagcagatgtgcacaatataaacaaaaagatatctggcctaccttactactaaaagcatttaacacatgcatttttggtactttyttttgttttctaaaagctacataaaggccttatttgacattttcactgataactgatcgcaccctcgtgttgcagtgttcgtcccctattcattaacagt

SEQ ID NO: 89092 - DNA, 201 bp, Homo sapiens
gttctgccacagcggcctgggctggtccagtgctatgcctggaggctcaacacaaaacttcccatccaaacattcagatgaactgagcgtcttacacacgsagtacagaggagcacacattgggatagaaacagtagaataaccacgggcaattaaactttaaattttctgagcagcattttggtatttaaacatttcttg

SEQ ID NO: 89093 - DNA, 201 bp, Homo sapiens
ggaagtaagcttctgttcagcacctgaaccctagaaaaagagccagtttgctacgatgaaggtgacatttctctggtcatttgagagttcgaagtcaaagycgaggggcacaggctttggttcatgtctaggagccctctgtcagaatccttgaagccctttaatggtctaactggcatctcttgtatcaagaagtacctt

SEQ ID NO: 89094 - DNA, 201 bp, Homo sapiens
aattatttttgaatggaaatactactgagaccattgacactggataacagtaatgatcccattaccagataagattgactgacggggaaaaaaaaaaaaaagaatggggtgtgaatgtaccaacactgaatcttacagcagttatctttctatggccattaggtacctagcagatgtgcacaatataaacaaaaagatatc

SEQ ID NO: 89095 - DNA, 201 bp, Homo sapiens
cagccatcggagttacaccccaaagcaccatttgctgtccagctgcctgtcgtttggcccagaccaccctcagaaaaaaaccagctgcctctcccattctsccctcccgttctgccacagcggcctgggctggtccagtgctatgcctggaggctcaacacaaaacttcccatccaaacattcagatgaactgagcgtctt

SEQ ID NO: 89096 - DNA, 201 bp, Homo sapiens
tctgttcagcacctgaaccctagaaaaagagccagtttgctacgatgaaggtgacatttctctggtcatttgagagttcgaagtcaaagccgaggggcacmggctttggttcatgtctaggagccctctgtcagaatccttgaagccctttaatggtctaactggcatctcttgtatcaagaagtacctttaaggtagacc

SEQ ID NO: 89097 - DNA, 201 bp, Homo sapiens
ggccttatttgacattttcactgataactgatcgcaccctcgtgttgcagtgttcgtcccctattcattaacagtgtgtgcaaatgcaaccccaggacacrttattgttctgatagatgctcacagggaatcaagcttctcgcccactccacggctctgagccccatccaagggcaagacttggtgcccagctggaaggac

SEQ ID NO: 89098 - DNA, 201 bp, Homo sapiens
tccttaatctaaaagctaaattatttttgaatggaaatactactgagaccattgacactggataacagtaatgatcccattaccagataagattgactgayggggaaaaaaaaaaaaaagaatggggtgtgaatgtaccaacactgaatcttacagcagttatctttctatggccattaggtacctagcagatgtgcacaa

SEQ ID NO: 89099 - DNA, 201 bp, Homo sapiens
cttgtatcaagaagtacctttaaggtagaccttttcagggtgccctcaggaaagggccctgctcatgtttttttcctgtccccttagaccaaccccaggtktccactgcaggggttctgcctgttcccaaactttttccattccaggaacaaaggagaagccactttccccaggacgcaagactctcccctccactgtccg

SEQ ID NO: 89100 - DNA, 201 bp, Homo sapiens
aaaagcatttaacacatgcatttttggtacttttttttgttttctaaaagctacataaaggccttatttgacattttcactgataactgatcgcaccctcrtgttgcagtgttcgtcccctattcattaacagtgtgtgcaaatgcaaccccaggacacgttattgttctgatagatgctcacagggaatcaagcttctcg

SEQ ID NO: 89101 - DNA, 201 bp, Homo sapiens
gtaaaaagctgagacagtttgtaagaaaagaatccttaaaatctagatttataccattttttaaagtcccacctttcaatgtttaataaaacaaaaagagaaatccttaatctaaaagctaaattatttttgaatggaaatactactgagaccattgacactggataacagtaatgatcccattaccagataagattgact

SEQ ID NO: 89102 - DNA, 201 bp, Homo sapiens
catgtggtttatctttacattttgaagatcaaagaagtctttacaacctgaatccaggtctaaaacacactagagtagctggtgactataaataatatttwaaaatgctgtgtctacaccatcaagactgtgtctacactatcttggctgaacgagaagagatgtaaatgctgggtggtcccgttgacccacggcgttggg

SEQ ID NO: 89103 - DNA, 201 bp, Homo sapiens
tgtaaaaagctgagacagtttgtaagaaaagaatccttaaaatctagatttataccattttttaaagtcccacctttcaatgtttaataaaacaaaaagagaaatccttaatctaaaagctaaattatttttgaatggaaatactactgagaccattgacactggataacagtaatgatcccattaccagataagattgac

SEQ ID NO: 89104 - DNA, 201 bp, Homo sapiens
tacagcagttatctttctatggccattaggtacctagcagatgtgcacaatataaacaaaaagatatctggcctaccttactactaaaagcatttaacacrtgcatttttggtacttttttttgttttctaaaagctacataaaggccttatttgacattttcactgataactgatcgcaccctcgtgttgcagtgttcgt

SEQ ID NO: 89105 - DNA, 201 bp, Homo sapiens
tgactgaaggagaagagagggaagtaagcttctgttcagcacctgaaccctagaaaaagagccagtttgctacgatgaaggtgacatttctctggtcattwgagagttcgaagtcaaagccgaggggcacaggctttggttcatgtctaggagccctctgtcagaatccttgaagccctttaatggtctaactggcatctc

SEQ ID NO: 89106 - DNA, 201 bp, Homo sapiens
ccattaggtacctagcagatgtgcacaatataaacaaaaagatatctggcctaccttactactaaaagcatttaacacatgcatttttggtacttttttttgttttctaaaagctacataaaggccttatttgacattttcactgataactgatcgcaccctcgtgttgcagtgttcgtcccctattcattaacagtgtgt

SEQ ID NO: 89107 - DNA, 201 bp, Homo sapiens
ccttcatagacggctaccgacagaaggactatttcatcgccacccaggggccactggcacacacggttgaggacttctggaggatgatctgggaatggaartcccacactatcgtgatgctgacggaggtgcaggagagagagcaggataaatgctaccagtattggccaaccgagggctcagttactcatggagaaataa

SEQ ID NO: 89108 - DNA, 201 bp, Homo sapiens
tcgccctttagcggggaggtcattacagcctcatggcctctaccaaggccccagatcacaggatctcctgggccttggagcacctcacgctgggggaatcmatccctgagggactcagaatcttctccgtgcaacctggaaagttcatctcttgtttccttcagtcaaagaaagtccattgtacataacaaaacagccccc

SEQ ID NO: 89109 - DNA, 201 bp, Homo sapiens
ctttcctttgttgcatgcagttgggttcaaatgccaaatagtgattagaagacgaccattctgatctgtgtgtgatctggtcactatgtgactgcctttayggtttctctccatgtgctatatgaatgaagaatgcataccagtgttttaaaaggtatttttatgtgtttttaaacacttttttaaatgagcctgacacct

SEQ ID NO: 89110 - DNA, 201 bp, Homo sapiens
gcaagagcagcaaagggtgatgctgctcagcaggtcaccctcagggcccaagaagtattttcccatccccgtggagcacctggaggaggagatccgtatcwgatccgccgacgactgcaagcagtttcgggaggagttcaactcattgccatctggacacatacaaggaacttttgaactggcaaataaagaagaaaacag

SEQ ID NO: 89111 - DNA, 201 bp, Homo sapiens; identical to SEQ ID NO: 89085

SEQ ID NO: 89112 - DNA, 201 bp, Homo sapiens; identical to SEQ ID NO: 89086

SEQ ID NO: 89113 - DNA, 201 bp, Homo sapiens; identical to SEQ ID NO: 89087

SEQ ID NO: 89114 - DNA, 201 bp, Homo sapiens; identical to SEQ ID NO: 89088

SEQ ID NO: 89115 - DNA, 201 bp, Homo sapiens; identical to SEQ ID NO: 89089

SEQ ID NO: 89116 - DNA, 201 bp, Homo sapiens; identical to SEQ ID NO: 89090

SEQ ID NO: 89117 - DNA, 201 bp, Homo sapiens; identical to SEQ ID NO: 89091

SEQ ID NO: 89118 - DNA, 201 bp, Homo sapiens; identical to SEQ ID NO: 89092

SEQ ID NO: 89119 - DNA, 201 bp, Homo sapiens; identical to SEQ ID NO: 89093

SEQ ID NO: 89120 - DNA, 201 bp, Homo sapiens; identical to SEQ ID NO: 89094

SEQ ID NO: 89121 - DNA, 201 bp, Homo sapiens; identical to SEQ ID NO: 89095

SEQ ID NO: 89122 - DNA, 201 bp, Homo sapiens; identical to SEQ ID NO: 89096

SEQ ID NO: 89123 - DNA, 201 bp, Homo sapiens; identical to SEQ ID NO: 89097

SEQ ID NO: 89124 - DNA, 201 bp, Homo sapiens; identical to SEQ ID NO: 89098

SEQ ID NO: 89125 - DNA, 201 bp, Homo sapiens; identical to SEQ ID NO: 89099

SEQ ID NO: 89126 - DNA, 201 bp, Homo sapiens; identical to SEQ ID NO: 89100

SEQ ID NO: 89127 - DNA, 201 bp, Homo sapiens; identical to SEQ ID NO: 89101

SEQ ID NO: 89128 - DNA, 201 bp, Homo sapiens; identical to SEQ ID NO: 89102

SEQ ID NO: 89129 - DNA, 201 bp, Homo sapiens; identical to SEQ ID NO: 89103

SEQ ID NO: 89130 - DNA, 201 bp, Homo sapiens; identical to SEQ ID NO: 89104

SEQ ID NO: 89131 - DNA, 201 bp, Homo sapiens; identical to SEQ ID NO: 89105

SEQ ID NO: 89132 - DNA, 201 bp, Homo sapiens; identical to SEQ ID NO: 89106

SEQ ID NO: 89133 - DNA, 201 bp, Homo sapiens; identical to SEQ ID NO: 89107

SEQ ID NO: 89134 - DNA, 201 bp, Homo sapiens; identical to SEQ ID NO: 89108

SEQ ID NO: 89135 - DNA, 201 bp, Homo sapiens; identical to SEQ ID NO: 89109

SEQ ID NO: 89136 - DNA, 201 bp, Homo sapiens; identical to SEQ ID NO: 89110

SEQ ID NO: 89137 - DNA, 201 bp, Homo sapiens
taagggctcctgtgtgctgtaccaaatgtcaggtagaaaagacacctgtgaagcaccagctgacccagacagtcctgcatgggtctcaggcaagctgcttsggatatgagcttgcagatgcgggagggcagccgaggctgatttcaggggagggcttcacagaagctggagatttgcggcaggcacgacttgggattcctt

SEQ ID NO: 89138 - DNA, 167 bp, Homo sapiens
cagcagagggcagctgagaggctgggtggctgggcctgggagacacacagaggccaggccttagcgyggctcagccatgagcaacaggagtagcttttcccggctcacctggttcaggaagcagaggaaagctgtggtcagcaccagcgacaagaagatgcccaacg

SEQ ID NO: 89139 - DNA, 201 bp, Homo sapiens; identical to SEQ ID NO: 89110

SEQ ID NO: 89140 - DNA, 201 bp, Homo sapiens; identical to SEQ ID NO: 89085

SEQ ID NO: 89141 - DNA, 201 bp, Homo sapiens; identical to SEQ ID NO: 89086

SEQ ID NO: 89142 - DNA, 201 bp, Homo sapiens; identical to SEQ ID NO: 89087

SEQ ID NO: 89143 - DNA, 201 bp, Homo sapiens; identical to SEQ ID NO: 89088

SEQ ID NO: 89144 - DNA, 201 bp, Homo sapiens; identical to SEQ ID NO: 89089

SEQ ID NO: 89145 - DNA, 201 bp, Homo sapiens; identical to SEQ ID NO: 89090

SEQ ID NO: 89146 - DNA, 201 bp, Homo sapiens; identical to SEQ ID NO: 89091

SEQ ID NO: 89147 - DNA, 201 bp, Homo sapiens; identical to SEQ ID NO: 89092

SEQ ID NO: 89148 - DNA, 201 bp, Homo sapiens; identical to SEQ ID NO: 89093

SEQ ID NO: 89149 - DNA, 201 bp, Homo sapiens; identical to SEQ ID NO: 89094

SEQ ID NO: 89150 - DNA, 201 bp, Homo sapiens; identical to SEQ ID NO: 89095

SEQ ID NO: 89151 - DNA, 201 bp, Homo sapiens; identical to SEQ ID NO: 89096

SEQ ID NO: 89152 - DNA, 201 bp, Homo sapiens; identical to SEQ ID NO: 89097

SEQ ID NO: 89153 - DNA, 201 bp, Homo sapiens; identical to SEQ ID NO: 89098

SEQ ID NO: 89154 - DNA, 201 bp, Homo sapiens; identical to SEQ ID NO: 89099

SEQ ID NO: 89155 - DNA, 201 bp, Homo sapiens; identical to SEQ ID NO: 89100

SEQ ID NO: 89156 - DNA, 201 bp, Homo sapiens; identical to SEQ ID NO: 89101

SEQ ID NO: 89157 - DNA, 201 bp, Homo sapiens; identical to SEQ ID NO: 89102

SEQ ID NO: 89158 - DNA, 201 bp, Homo sapiens; identical to SEQ ID NO: 89103

SEQ ID NO: 89159 - DNA, 201 bp, Homo sapiens; identical to SEQ ID NO: 89104

SEQ ID NO: 89160 - DNA, 201 bp, Homo sapiens; identical to SEQ ID NO: 89105

SEQ ID NO: 89161 - DNA, 201 bp, Homo sapiens; identical to SEQ ID NO: 89106

SEQ ID NO: 89162 - DNA, 201 bp, Homo sapiens; identical to SEQ ID NO: 89107

SEQ ID NO: 89163 - DNA, 201 bp, Homo sapiens; identical to SEQ ID NO: 89108

SEQ ID NO: 89164 - DNA, 201 bp, Homo sapiens; identical to SEQ ID NO: 89109

SEQ ID NO: 89165 - DNA, 201 bp, Homo sapiens; identical to SEQ ID NO: 89110

SEQ ID NO: 89166 - DNA, 201 bp, Homo sapiens; identical to SEQ ID NO: 89085

SEQ ID NO: 89167 - DNA, 201 bp, Homo sapiens; identical to SEQ ID NO: 89086

SEQ ID NO: 89168 - DNA, 201 bp, Homo sapiens; identical to SEQ ID NO: 89087

SEQ ID NO: 89169 - DNA, 201 bp, Homo sapiens; identical to SEQ ID NO: 89088

SEQ ID NO: 89170 - DNA, 201 bp, Homo sapiens; identical to SEQ ID NO: 89089

SEQ ID NO: 89171 - DNA, 201 bp, Homo sapiens; identical to SEQ ID NO: 89090

SEQ ID NO: 89172 - DNA, 201 bp, Homo sapiens; identical to SEQ ID NO: 89091

SEQ ID NO: 89173 - DNA, 201 bp, Homo sapiens; identical to SEQ ID NO: 89092

SEQ ID NO: 89174 - DNA, 201 bp, Homo sapiens; identical to SEQ ID NO: 89093

SEQ ID NO: 89175 - DNA, 201 bp, Homo sapiens; identical to SEQ ID NO: 89094

SEQ ID NO: 89176 - DNA, 201 bp, Homo sapiens; identical to SEQ ID NO: 89095

SEQ ID NO: 89177 - DNA, 201 bp, Homo sapiens; identical to SEQ ID NO: 89096

SEQ ID NO: 89178 - DNA, 201 bp, Homo sapiens; identical to SEQ ID NO: 89097

SEQ ID NO: 89179 - DNA, 201 bp, Homo sapiens; identical to SEQ ID NO: 89098

SEQ ID NO: 89180 - DNA, 201 bp, Homo sapiens; identical to SEQ ID NO: 89099

SEQ ID NO: 89181 - DNA, 201 bp, Homo sapiens; identical to SEQ ID NO: 89100

SEQ ID NO: 89182 - DNA, 201 bp, Homo sapiens; identical to SEQ ID NO: 89101

SEQ ID NO: 89183 - DNA, 201 bp, Homo sapiens; identical to SEQ ID NO: 89102

SEQ ID NO: 89184 - DNA, 201 bp, Homo sapiens; identical to SEQ ID NO: 89103

SEQ ID NO: 89185 - DNA, 201 bp, Homo sapiens; identical to SEQ ID NO: 89104

SEQ ID NO: 89186 - DNA, 201 bp, Homo sapiens; identical to SEQ ID NO: 89105

SEQ ID NO: 89187 - DNA, 201 bp, Homo sapiens; identical to SEQ ID NO: 89106

SEQ ID NO: 89188 - DNA, 201 bp, Homo sapiens; identical to SEQ ID NO: 89107

SEQ ID NO: 89189 - DNA, 201 bp, Homo sapiens; identical to SEQ ID NO: 89108

SEQ ID NO: 89190 - DNA, 201 bp, Homo sapiens; identical to SEQ ID NO: 89109

SEQ ID NO: 89191 - DNA, 167 bp, Homo sapiens; identical to SEQ ID NO: 89138

SEQ ID NO: 89192 - DNA, 184 bp, Homo sapiens
caacaaaaatttaccatccaaacataaacagtaatggaagtatttgtctcgatattctgaggtcacaatggtcaccagctctgactgtatcaaaaggctgwagtggaggattgcttgagcccgagttcgagaccggcctgggcaacataggagaccccatctctgcaaaagaagagagagaata

SEQ ID NO: 89193 - DNA, 201 bp, Homo sapiens
catcaaattttcaaatggacagaaagacccggttcatcatccatggcttcatagacaaaggagatgagagctgggtgacagacatgtgcaagaaactgttsgaggtggaggaggtgaactgcatctgcgtggactggaagaagggctcccaagccacctacacacaggctgccaacaacgtgcgagtggtgggcgcccagg

SEQ ID NO: 89194 - DNA, 201 bp, Homo sapiens
agagctgggtgacagacatgtgcaagaaactgttcgaggtggaggaggtgaactgcatctgcgtggactggaagaagggctcccaagccacctacacacargctgccaacaacgtgcgagtggtgggcgcccaggtggcccagatgctcgacatcctcttgacagagtatagctaccccccttccaaagttcacctcattg

SEQ ID NO: 89195 - DNA, 201 bp, Homo sapiens
atccctgcacttcctacaagtcctttgagtctgacaagtgcttcccgtgtccagatcaaggatgcccacagatgggtcactatgctgataaatttgctggyaggacaagtgaagagcagcagaaattcttcttgaacacaggagaggctagcaatttcgctcgctggagatatggggtttccatcacactgtctggaagaa

SEQ ID NO: 89196 - DNA, 201 bp, Homo sapiens
actccaggcctgagcaggattacagggttggatcctgtagaagcaagtttcgagagtactcctgaagaggtgcgacttgatccctctgatgctgactttgytgatgtgattcacacggatgcagctcccctgatcccattcttgggttttggaacgaaccaacagatgggtcatcttgacttcttccccaatggaggagag

SEQ ID NO: 89197 - DNA, 201 bp, Homo sapiens
cgggacagcaatcaggcccctgaaaattctcccctggagccctgagaagatcggcacccgcttcctgctgtacaccaatgaaaacccaaacaactttcaarttctcctcctctctgatccatcaacaattgaggcatcaaattttcaaatggacagaaagacccggttcatcatccatggcttcatagacaaaggagatga

SEQ ID NO: 89198 - DNA, 201 bp, Homo sapiens
cccaagccacctacacacaggctgccaacaacgtgcgagtggtgggcgcccaggtggcccagatgctcgacatcctcttgacagagtatagctaccccccytccaaagttcacctcattggccacagcctgggagcccacgtggctggagaggcaggaagcaagactccaggcctgagcaggattacagggttggatcctg

SEQ ID NO: 89199 - DNA, 201 bp, Homo sapiens
cacaggctgccaacaacgtgcgagtggtgggcgcccaggtggcccagatgctcgacatcctcttgacagagtatagctaccccccttccaaagttcacctsattggccacagcctgggagcccacgtggctggagaggcaggaagcaagactccaggcctgagcaggattacagggttggatcctgtagaagcaagtttcg

SEQ ID NO: 89200 - DNA, 186 bp, Homo sapiens
atgctgatcttctggacaatcacacttttcctgctgggagcagccaaaggaaaagaagtttgctatgaggacctcgggtgcttttytgacactgagccctggggcgggacagcaatcaggcccctgaaaattctcccctggagccctgagaagatcggcacccgcttcctgctgtacaccaatgaa

SEQ ID NO: 89201 - DNA, 201 bp, Homo sapiens
cagagtatagctaccccccttccaaagttcacctcattggccacagcctgggagcccacgtggctggagaggcaggaagcaagactccaggcctgagcagrattacagggttggatcctgtagaagcaagtttcgagagtactcctgaagaggtgcgacttgatccctctgatgctgactttgttgatgtgattcacacgg

SEQ ID NO: 89202 - DNA, 201 bp, Homo sapiens
gctggagatatggggtttccatcacactgtctggaagaacagccactggtcagatcaaagttgctttgtttggaaataagggaaacactcaccagtacagyatcttcagggggattctcaaaccaggctcaacccattcctatgagtttgatgcaaagctggatgttggaacaattgagaaagtcaagtttctttggaata

SEQ ID NO: 89203 - DNA, 201 bp, Homo sapiens
cagatgggtcatcttgacttcttccccaatggaggagagagcatgccgggatgcaagaagaatgccctgtctcagatcgtggatctagatggcatctgggygggaacccgggactttgtggcttgcaatcacctaagaagctacaagtattacttggaaagcatcctcaatcccgatgggtttgctgcatatccctgcact

SEQ ID NO: 89204 - DNA, 201 bp, Homo sapiens
ccggttcatcatccatggcttcatagacaaaggagatgagagctgggtgacagacatgtgcaagaaactgttcgaggtggaggaggtgaactgcatctgcrtggactggaagaagggctcccaagccacctacacacaggctgccaacaacgtgcgagtggtgggcgcccaggtggcccagatgctcgacatcctcttgac

SEQ ID NO: 89205 - DNA, 201 bp, Homo sapiens
agactccaggcctgagcaggattacagggttggatcctgtagaagcaagtttcgagagtactcctgaagaggtgcgacttgatccctctgatgctgacttygttgatgtgattcacacggatgcagctcccctgatcccattcttgggttttggaacgaaccaacagatgggtcatcttgacttcttccccaatggaggag

SEQ ID NO: 89206 - DNA, 201 bp, Homo sapiens
agggaaacactcaccagtacagtatcttcagggggattctcaaaccaggctcaacccattcctatgagtttgatgcaaagctggatgttggaacaattgasaaagtcaagtttctttggaataacaatgtgataaatccaaccctccccaaagtgggtgccaccaagatcactgtgcaaaagggagaagagaagacagtgt

SEQ ID NO: 89207 - DNA, 182 bp, Homo sapiens
  misc_feature (1)...(182): n = A,T,C or G
accctccccaaagtgggtgccaccaagatcactgtgcaaaagggagaagagaagacagtgtacaacttctgtagcgaagacacagtgcgggaagacacgcngctcaccctcacgccctgctaagctcccggggcgacgaggctgctgcgttcacactaataaaatccactggtgcatctgta

SEQ ID NO: 89208 - DNA, 201 bp, Homo sapiens
tttgtggtgctgtaggtaacgtgtggcactgctggcaaatgaaggtcatgagatgagttccttgtaggtaccagcttctggctcaagagttgaaggtgccrtcgcagggtcaggcctgccctgtcccgaagtgatctcctggaagacaagtgccttctccctccatggatctgtgatcttcccagctctgcatcaacacag

SEQ ID NO: 89209 - DNA, 201 bp, Homo sapiens
ggaatctcctatgatcgcattatcgaaggtcactacaatggtgaacaactgggcaaacctaagaagaatgagagcctgtggagtgtagcaagaggtgttaytagaatgttacgaaaaaactatggttgtgtccgagtggattttgcacagccattttccttaaaggaatatttagaaagccaaagtcagaaaccggtgtct

SEQ ID NO: 89210 - DNA, 201 bp, Homo sapiens
gtgattttgacctggggttctcaggaaattcagaagatgtagtaatgcatgccatacagctgctgggaaattgtgtcacaatcacccacactagcaggaaygatgagttttttatcacccccagcacaactgtcccatcagtcttcgaactcaacttctacagcaatggggtacttcatgtctttatcatggaggccatca

SEQ ID NO: 89211 - DNA, 201 bp, Homo sapiens
tgactgaaaatgtgctgaacagcagtagagtacaagaggcaattgcagaagtggctgctgaattaaaccctgatggttctgcccagcagcaatcaaaagcmgttaacaaagtgaaaaagaaagctaaaaggattcttcaagaaatggttgccactgtctcaccggcaatgatcagactgactgggtgggtgctgctaaaac

SEQ ID NO: 89212 - DNA, 201 bp, Homo sapiens
gtgaacaactgggcaaacctaagaagaatgagagcctgtggagtgtagcaagaggtgttattagaatgttacgaaaaaactatggttgtgtccgagtggaytttgcacagccattttccttaaaggaatatttagaaagccaaagtcagaaaccggtgtctgctctactttccctggagcaagcgttgttaccagctatac

SEQ ID NO: 89213 - DNA, 201 bp, Homo sapiens
cacacaagacaccgcggatggcttgcaagacgcctttcttacgttctttttattcaagagcgagatgtgcataagggcatgtttgccaccaatgtgactgraaatgtgctgaacagcagtagagtacaagaggcaattgcagaagtggctgctgaattaaaccctgatggttctgcccagcagcaatcaaaagccgttaac

SEQ ID NO: 89214 - DNA, 201 bp, Homo sapiens
gaaagtttatccagtatggcattcttacagtggcagagcacgatgaccaggaagatatcagtcctagtcttgctgagcagcagtgggacaagaagcttccwgaacctttgtcttggagaagtgatgaagaagatgaagacagtgactttggggaggaacagcgagattgctacctgaaggtgagccaatccaaggagcacc

SEQ ID NO: 89215 - DNA, 201 bp, Homo sapiens
cagtatcccgtctttgggtttgcggaatgttatttatatcaatgaaactcacacaagacaccgcggatggcttgcaagacgcctttcttacgttctttttrttcaagagcgagatgtgcataagggcatgtttgccaccaatgtgactgaaaatgtgctgaacagcagtagagtacaagaggcaattgcagaagtggctgc

SEQ ID NO: 89216 - DNA, 201 bp, Homo sapiens
tacaatagatgtttcttatctgccacattcatcagaatacagtgttggtcgatgtaagcacacaagtgaggaatggggtgagtgtggctttagacccaccrtcttcagatctgcaactttaaaatggaaagaaagcctaatgagtcggaaaaggccatttgttggaagatgttgttactcctgcactccccagagctggga

SEQ ID NO: 89217 - DNA, 201 bp, Homo sapiens
taaatgaagaagtaataacaggctctggaaagaattcttggaagtcagaagcagaaggaggagaaagtagtgatactcaaggaccaaaagtgacctacatmccccctcctccacctgaggatgaggactccatctttgcacattatcagacaggcataaacttcgacaaatacgacactattcttgtggaagtgtctggac

SEQ ID NO: 89218 - DNA, 201 bp, Homo sapiens
ccccctcctccacctgaggatgaggactccatctttgcacattatcagacaggcataaacttcgacaaatacgacactattcttgtggaagtgtctggacrtgatgcaccaccagcaattctgacttttgaagaagctaatctctgtcagacactgaataacaacattgctaaagctggttatactaagcttactcctgtg

SEQ ID NO: 89219 - DNA, 201 bp, Homo sapiens
aatgactgcgaagataatccaacacggaacagagggttttccaagagaggcggctatcgagatggaaataattcagaagcttcagggccatacagaagagrtggaagaggtagtttccgaggttgccgtggaggatttggtctaggaagtccaaataatgacttagacccagacgaatgtatgcagcgcactggtggcctt

SEQ ID NO: 89220 - DNA, 201 bp, Homo sapiens
gatacttctcaaagcagaagtggcagtggaagtgaacgaggtggttacaaaggtttaaatgaagaagtaataacaggctctggaaagaattcttggaagtyagaagcagaaggaggagaaagtagtgatactcaaggaccaaaagtgacctacataccccctcctccacctgaggatgaggactccatctttgcacattat

SEQ ID NO: 89221 - DNA, 201 bp, Homo sapiens
cactgaataacaacattgctaaagctggttatactaagcttactcctgtgcaaaaatacagtattcctatcatacttgcaggacgagatttgatggcttgygctcaaacagggtctgggaagactgcggcttttctcctaccaattttggctcatatgatgcatgatggaataactgccagtcgttttaaagagttgcagg

SEQ ID NO: 89222 - DNA, 201 bp, Homo sapiens
ggatgaggactccatctttgcacattatcagacaggcataaacttcgacaaatacgacactattcttgtggaagtgtctggacatgatgcaccaccagcarttctgacttttgaagaagctaatctctgtcagacactgaataacaacattgctaaagctggttatactaagcttactcctgtgcaaaaatacagtattcc

SEQ ID NO: 89223 - DNA, 201 bp, Homo sapiens; identical to SEQ ID NO: 89217

SEQ ID NO: 89224 - DNA, 201 bp, Homo sapiens; identical to SEQ ID NO: 89218

SEQ ID NO: 89225 - DNA, 201 bp, Homo sapiens; identical to SEQ ID NO: 89219

SEQ ID NO: 89226 - DNA, 201 bp, Homo sapiens; identical to SEQ ID NO: 89220

SEQ ID NO: 89227 - DNA, 201 bp, Homo sapiens; identical to SEQ ID NO: 89221

SEQ ID NO: 89228 - DNA, 201 bp, Homo sapiens; identical to SEQ ID NO: 89222

SEQ ID NO: 89229 - DNA, 201 bp, Homo sapiens; identical to SEQ ID NO: 89217

SEQ ID NO: 89230 - DNA, 201 bp, Homo sapiens; identical to SEQ ID NO: 89218

SEQ ID NO: 89231 - DNA, 201 bp, Homo sapiens; identical to SEQ ID NO: 89219

SEQ ID NO: 89232 - DNA, 201 bp, Homo sapiens; identical to SEQ ID NO: 89220

SEQ ID NO: 89233 - DNA, 201 bp, Homo sapiens; identical to SEQ ID NO: 89221

SEQ ID NO: 89234 - DNA, 201 bp, Homo sapiens; identical to SEQ ID NO: 89222

SEQ ID NO: 89235 - DNA, 201 bp, Homo sapiens; identical to SEQ ID NO: 89217

SEQ ID NO: 89236 - DNA, 201 bp, Homo sapiens; identical to SEQ ID NO: 89218

SEQ ID NO: 89237 - DNA, 201 bp, Homo sapiens; identical to SEQ ID NO: 89219

SEQ ID NO: 89238 - DNA, 201 bp, Homo sapiens; identical to SEQ ID NO: 89220

SEQ ID NO: 89239 - DNA, 201 bp, Homo sapiens; identical to SEQ ID NO: 89221

SEQ ID NO: 89240 - DNA, 201 bp, Homo sapiens; identical to SEQ ID NO: 89222

SEQ ID NO: 89241 - DNA, 201 bp, Homo sapiens
gaaatttccaacctgtgattattttcagttttagtaagaaagattgtgaagcctatgcacttcaaatgaccaaattagatttcaacacagatgaagaaaaraagatggttgaagaagtattcagtaatgcaattgattgcttatccgatgaagataaaaaactccctcaggtagaacatgtacttcctcttttgaagaggg

SEQ ID NO: 89242 - DNA, 201 bp, Homo sapiens
ggcttggagtttttttaatgagtttagagctattagataaccactgagttaaaggtaactatgtacacacaaagtgtgcatccaagaggcatagcagcagyagaagtctttaaaggcttgtacaccaggaagaaagatgcatcctcttgccttgtggcaatcattttcctttagaaaacaggccagcttcacctgggcacc

SEQ ID NO: 89243 - DNA, 201 bp, Homo sapiens
tttatacataagcattacatttttttaataaaaatgtatacaggtggggcactgttttggtggaaggcttggagtttttttaatgagtttagagctattarataaccactgagttaaaggtaactatgtacacacaaagtgtgcatccaagaggcatagcagcagcagaagtctttaaaggcttgtacaccaggaagaaag

SEQ ID NO: 89244 - DNA, 127 bp, Homo sapiens
ctgctcccaaaaatggcggacgcattyggagatgagctgttcagcgtgttcgagggcgactcgaccactgcggcgggaaccaaaaaagacaaggaaaaggacaaggggaaatggaaggggcctccag

SEQ ID NO: 89245 - DNA, 201 bp, Homo sapiens
gtgtggttatctattataagattagacagcagcttgccaaattgggtaaagaaattgaagaatatattcacaaaccaaaatactgcttaccttttctacarccaggtcgtttggtaaaggtaaagaatgaaggagatgactttggctggggagtagtggtgaatttctcaaaaaagtcaaatgttaagcctaactctggtg

SEQ ID NO: 89246 - DNA, 169 bp, Homo sapiens
ctgctcccaaaaatggcggacgcattcggagatgagctgttcagcgtgttcgagggcgactcgaccackgcggcgggaaccaaaaaagacaaggaaaaggacaaggggaaatggaaggggcctccagggtctgcagacaaggcagggaaacgttttgatggtaaattac

SEQ ID NO: 89247 - DNA, 201 bp, Homo sapiens
aaatcaaacatcattcatagaaagcatattacatacatgtttatacataagcattacatttttttaataaaaatgtatacaggtggggcactgttttggtrgaaggcttggagtttttttaatgagtttagagctattagataaccactgagttaaaggtaactatgtacacacaaagtgtgcatccaagaggcatagcag

SEQ ID NO: 89248 - DNA, 201 bp, Homo sapiens
gcccactccattgcaacactacatttttccagcagggggagatggcctgcatcttgtggttgatgaaaatggtgacttcagagaagataattttaatactscaatgcaagtgcttcgagatgcaggtgatttggccaaaggagaccagaaagggcggaaaggaggaacaaaaggaccatcaaatgttttcaaaattgtgaa

SEQ ID NO: 89249 - DNA, 201 bp, Homo sapiens; identical to SEQ ID NO: 89241

SEQ ID NO: 89250 - DNA, 201 bp, Homo sapiens; identical to SEQ ID NO: 89242

SEQ ID NO: 89251 - DNA, 201 bp, Homo sapiens; identical to SEQ ID NO: 89243

SEQ ID NO: 89252 - DNA, 126 bp, Homo sapiens
tgctcccaaaaatggcggacgcattyggagatgagctgttcagcgtgttcgagggcgactcgaccactgcggcgggaaccaaaaaagacaaggaaaaggacaaggggaaatggaaggggcctccag

SEQ ID NO: 89253 - DNA, 201 bp, Homo sapiens; identical to SEQ ID NO: 89245

SEQ ID NO: 89254 - DNA, 168 bp, Homo sapiens
tgctcccaaaaatggcggacgcattcggagatgagctgttcagcgtgttcgagggcgactcgaccackgcggcgggaaccaaaaaagacaaggaaaaggacaaggggaaatggaaggggcctccagggtctgcagacaaggcagggaaacgttttgatggtaaattac

SEQ ID NO: 89255 - DNA, 201 bp, Homo sapiens; identical to SEQ ID NO: 89247

SEQ ID NO: 89256 - DNA, 201 bp, Homo sapiens; identical to SEQ ID NO: 89248

SEQ ID NO: 89257 - DNA, 101 bp, Homo sapiens
rgctctctccagctccagctggacctgaagtctcagagctgccaccagcagcaggctcagacactgggctcccagctggggactgctccatggccatggag

SEQ ID NO: 89258 - DNA, 191 bp, Homo sapiens
agctctctccagctccagctggacctgaagtctcagagctgccaccagcagcaggctcagacactgggctcccagctggggactgctccayggccatggagatagacagcaggcctggggggctccccggcagtagctgcaacctaggtgcagcccgagaacacatgcaggcggtcacccgaaactacatc

SEQ ID NO: 89259 - DNA, 201 bp, Homo sapiens
ctgtgtgcagcgtgaacgggcccctggtggtgctggaccgggtcaagtttgcccagtatgcggagatcgtccacttcaccctcccagatgggactcagagkagcgggcaggtgcttgaggtggctggcaccaaggcgattgttcaggtgtttgaagggacatcagggatcgatgccaggaagaccacttgcgaatttacag

SEQ ID NO: 89260 - DNA, 201 bp, Homo sapiens
tgcgggaggtctctgctgctagagaggaggtgcctgggcgccgagggtttcctggatatatgtacacagacctggccaccatctacgagcgggcgggccgygtggagggtcggggaggatccatcacacagatccccatcctcaccatgcccaacgacgatatcacccaccctatcccagacttgacgggcttcatcacag

SEQ ID NO: 89261 - DNA, 201 bp, Homo sapiens
ccggcagtagctgcaacctaggtgcagcccgagaacacatgcaggcggtcacccgaaactacatcacccacccccgtgtcacctacaggactgtgtgcagygtgaacgggcccctggtggtgctggaccgggtcaagtttgcccagtatgcggagatcgtccacttcaccctcccagatgggactcagaggagcgggcagg

SEQ ID NO: 89262 - DNA, 201 bp, Homo sapiens
gcggaggactttctggatatcaatggccagcccatcaacccgcactcccgcatctaccccgaggagatgattcagacgggcatttctcctattgacgtcakgaacagcattgcccgcggccagaagatccccatcttctcagcagccgggctcccccacaatgagattgccgctcagatctgccgccaggcggggctggtg

SEQ ID NO: 89263 - DNA, 201 bp, Homo sapiens
actgcgctctagccccgcgcgccgtggcaccccaacaccggcagggaacctaccctcggctcccgggtctcccctccctcgccaccccaaccagcggcttytgcgccgccctccgccctccgctggctccgaggtggtgggggcgccgcacgctccatccctttccctcgctcgattccttttcccgcgctccatgcctcc

SEQ ID NO: 89264 - DNA, 201 bp, Homo sapiens
gcagcagcatggccgcgatctatgggggtgtagaggggggaggcacacgatccgaggtccttttagtctcagaggatgggaagatcctggcagaagcagayggactgagcacaaaccactggctgatcgggacagacaagtgtgtggagaggatcaatgagatggtgaacagggccaaacggaaagcaggggtggatcctc

SEQ ID NO: 89265 - DNA, 201 bp, Homo sapiens
cgagattgacccggtcttgttccagggcaagattggactccccatcctgtgcgtgggctctgtgtggaagagctgggagctgctgaaggaaggttttcttytggcgctgacccagggcagagagatccaggctcagaacttcttctccagcttcaccctgatgaagctgaggcactcctccgctctgggtggggccagcct

SEQ ID NO: 89266 - DNA, 201 bp, Homo sapiens
ggctctgtgtggaagagctgggagctgctgaaggaaggttttcttttggcgctgacccagggcagagagatccaggctcagaacttcttctccagcttcaycctgatgaagctgaggcactcctccgctctgggtggggccagcctaggggccaggcacatcgggcacctcctccccatggactatagcgccaatgccatt

SEQ ID NO: 89267 - DNA, 201 bp, Homo sapiens
gcggtgcccagacagctggagggaaggaggtgtcaggcggggagagacgcaaacggcgggaccagcagcgacggtagcagcagcatggccgcgatctatgrgggtgtagaggggggaggcacacgatccgaggtccttttagtctcagaggatgggaagatcctggcagaagcagatggactgagcacaaaccactggctg

SEQ ID NO: 89268 - DNA, 201 bp, Homo sapiens
ctggaagcaggatccaggaggacgggaggggccgctgcggaccgcagtcgctccacctggaggagacaccagaaggaagacagcctgagggacgcagccayccccggctcctaccggcgccccgccccgcgcatgcgcacgcgcacagggagtcagctggctgcgcgggaggtcacgggaagtggggcggtgcccagacag

SEQ ID NO: 89269 - DNA, 201 bp, Homo sapiens
gggagatgctgggcagacacatcgtagcagtgttgcccgagattgacccggtcttgttccagggcaagattggactccccatcctgtgcgtgggctctgtrtggaagagctgggagctgctgaaggaaggttttcttttggcgctgacccagggcagagagatccaggctcagaacttcttctccagcttcaccctgatga

SEQ ID NO: 89270 - DNA, 201 bp, Homo sapiens
ccggctccatcgccacagctacaccggatggtggagttgtgctcatatctggaacaggctccaactgcaggctcatcaaccctgatggctccgagagtggstgcggcggctggggccatatgatgggtgatgagggttcagcctactggatcgcacaccaagcagtgaaaatagtgtttgactccattgacaacctagagg

SEQ ID NO: 89271 - DNA, 201 bp, Homo sapiens
gactgagcacaaaccactggctgatcgggacagacaagtgtgtggagaggatcaatgagatggtgaacagggccaaacggaaagcaggggtggatcctctrgtaccgctgcgaagcttgggcctatctctgagcggtggggaccaggaggacgcggggaggatcctgatcgaggagctgagggaccgatttccctacctga

SEQ ID NO: 89272 - DNA, 201 bp, Homo sapiens
atggactgagcacaaaccactggctgatcgggacagacaagtgtgtggagaggatcaatgagatggtgaacagggccaaacggaaagcaggggtggatccwctggtaccgctgcgaagcttgggcctatctctgagcggtggggaccaggaggacgcggggaggatcctgatcgaggagctgagggaccgatttccctacc

SEQ ID NO: 89273 - DNA, 201 bp, Homo sapiens
cggctccatcgccacagctacaccggatggtggagttgtgctcatatctggaacaggctccaactgcaggctcatcaaccctgatggctccgagagtggcwgcggcggctggggccatatgatgggtgatgagggttcagcctactggatcgcacaccaagcagtgaaaatagtgtttgactccattgacaacctagaggc

SEQ ID NO: 89274 - DNA, 201 bp, Homo sapiens; identical to SEQ ID NO: 89264

SEQ ID NO: 89275 - DNA, 201 bp, Homo sapiens; identical to SEQ ID NO: 89265

SEQ ID NO: 89276 - DNA, 201 bp, Homo sapiens; identical to SEQ ID NO: 89266

SEQ ID NO: 89277 - DNA, 201 bp, Homo sapiens; identical to SEQ ID NO: 89267

SEQ ID NO: 89278 - DNA, 201 bp, Homo sapiens; identical to SEQ ID NO: 89268

SEQ ID NO: 89279 - DNA, 201 bp, Homo sapiens; identical to SEQ ID NO: 89269

SEQ ID NO: 89280 - DNA, 201 bp, Homo sapiens; identical to SEQ ID NO: 89270

SEQ ID NO: 89281 - DNA, 201 bp, Homo sapiens; identical to SEQ ID NO: 89271

SEQ ID NO: 89282 - DNA, 201 bp, Homo sapiens; identical to SEQ ID NO: 89272

SEQ ID NO: 89283 - DNA, 201 bp, Homo sapiens; identical to SEQ ID NO: 89273

SEQ ID NO: 89284 - DNA, 201 bp, Homo sapiens
agcaggtgcagagcactgcgctgtcagcgatagcccagtggatggccattccagaccatgctcgacagctgaccaaggccatgatgcgaaaggccacggcyagccgcctggtcacgcagcgcgatgcggacgtgcagaacttcgtcagcttcatctccaaagactccatccagaagtccctgcagatgtacttagagaggc

SEQ ID NO: 89285 - DNA, 194 bp, Homo sapiens
ccgcgcgttgcggtcaagatggcgctggtggcttctgtgcgagtcccggcgcgcgttctgctccgcgcgggggcccggctcccgggcgcggccytcgggcggacggagcgggcggccggcggcggagacggcgcgcggcgcttcgggagccagcgggtgctggtggagccggacgcgggcgcaggggtcgctgt

SEQ ID NO: 89286 - DNA, 201 bp, Homo sapiens
agaacttcgtcagcttcatctccaaagactccatccagaagtccctgcagatgtacttagagaggctcaaagaagaaaaaggctaacgattgggctgccasaggcttacggccacacgtgcccctgtgggtcccagggaggtcttaaacaaggtatttttcaacttaaaagtactgccagcgtttcattttgctgatgtta

SEQ ID NO: 89287 - DNA, 201 bp, Homo sapiens; identical to SEQ ID NO: 89284

SEQ ID NO: 89288 - DNA, 194 bp, Homo sapiens; identical to SEQ ID NO: 89285

SEQ ID NO: 89289 - DNA, 201 bp, Homo sapiens; identical to SEQ ID NO: 89286

SEQ ID NO: 89290 - DNA, 201 bp, Homo sapiens
aagcaaaggcattcattgttaaccttgtaagtacacgtttgggggacgattttgtttacagatgcttgtaatcgaagatgcacttttaggcttggaaggcrttgtgggctgggttctgggccttgggtggggttggcaggggcaggctctgcacctgtccgggattcaggtaaccagggcctgccgatgggactgaggcgg

SEQ ID NO: 89291 - DNA, 201 bp, Homo sapiens
attggagttaagcaaaggcattcattgttaaccttgtaagtacacgtttgggggacgattttgtttacagatgcttgtaatcgaagatgcacttttaggcytggaaggcattgtgggctgggttctgggccttgggtggggttggcaggggcaggctctgcacctgtccgggattcaggtaaccagggcctgccgatggga

SEQ ID NO: 89292 - DNA, 201 bp, Homo sapiens
tgggctgtgctctgcaatttggtgccaatcctcttgagttcctcagagcaaatcaaaggaaacatggtcatgtttttacctgcaaactaatgggaaaataygtccatttcatcacaaatcccttgtcataccataaggtgttgtgccacggaaaatattttgattggaaaaaatttcactttgctacttctgcgaaggcat

SEQ ID NO: 89293 - DNA, 201 bp, Homo sapiens
tcttgagttcctcagagcaaatcaaaggaaacatggtcatgtttttacctgcaaactaatgggaaaatatgtccatttcatcacaaatcccttgtcatacmataaggtgttgtgccacggaaaatattttgattggaaaaaatttcactttgctacttctgcgaaggcatttgggcacagaagcattgacccgatggatgg

SEQ ID NO: 89294 - DNA, 201 bp, Homo sapiens; identical to SEQ ID NO: 89292

SEQ ID NO: 89295 - DNA, 201 bp, Homo sapiens; identical to SEQ ID NO: 89293

SEQ ID NO: 89296 - DNA, 201 bp, Homo sapiens; identical to SEQ ID NO: 89292

SEQ ID NO: 89297 - DNA, 201 bp, Homo sapiens; identical to SEQ ID NO: 89293

SEQ ID NO: 89298 - DNA, 201 bp, Homo sapiens; identical to SEQ ID NO: 89292

SEQ ID NO: 89299 - DNA, 201 bp, Homo sapiens; identical to SEQ ID NO: 89293

SEQ ID NO: 89300 - DNA, 201 bp, Homo sapiens; identical to SEQ ID NO: 89292

SEQ ID NO: 89301 - DNA, 201 bp, Homo sapiens; identical to SEQ ID NO: 89293

SEQ ID NO: 89302 - DNA, 201 bp, Homo sapiens; identical to SEQ ID NO: 89292

SEQ ID NO: 89303 - DNA, 201 bp, Homo sapiens; identical to SEQ ID NO: 89293

SEQ ID NO: 89304 - DNA, 201 bp, Homo sapiens; identical to SEQ ID NO: 89292

SEQ ID NO: 89305 - DNA, 201 bp, Homo sapiens; identical to SEQ ID NO: 89293

SEQ ID NO: 89306 - DNA, 201 bp, Homo sapiens; identical to SEQ ID NO: 89292

SEQ ID NO: 89307 - DNA, 201 bp, Homo sapiens; identical to SEQ ID NO: 89293

SEQ ID NO: 89308 - DNA, 201 bp, Homo sapiens; identical to SEQ ID NO: 89292

SEQ ID NO: 89309 - DNA, 201 bp, Homo sapiens; identical to SEQ ID NO: 89293

SEQ ID NO: 89310 - DNA, 201 bp, Homo sapiens
gtacttttattggaggtgcaactgacactcataggcttcacaaagaaggaaaattgctcccactagttcatcagtgttatttaaaaaaaagtaagaggaargaatttcagtgatgtttatactaataagtttgctagtacagtgtcagttatttaaagtggtaatgcccgataatgtcttttaaatgtttgaggatgtttt

SEQ ID NO: 89311 - DNA, 201 bp, Homo sapiens
aagtgcctgggagcctttatgagcgtccctaaacctaaaagaatccagaggcggggctcggatgaaccctcgagataagcaagtgagccgcttctcccctstaaaggatgtttacacgtgggtggcactcgctggaatccagcgctcgggcagccctgggaggacgcgctcagctgcgtggaggatggagagcaatacatc

SEQ ID NO: 89312 - DNA, 201 bp, Homo sapiens
aaagaatccagaggcggggctcggatgaaccctcgagataagcaagtgagccgcttctcccctctaaaggatgtttacacgtgggtggcactcgctggaakccagcgctcgggcagccctgggaggacgcgctcagctgcgtggaggatggagagcaatacatcatcatctttggagaatttagcgacggcgcctgtgaac

SEQ ID NO: 89313 - DNA, 201 bp, Homo sapiens
ctgtcaacagcaatcgcccatttccaaagccatggtgaaacatctctgtgctaatttcttttgttttgtttcctaattttttttttttttggcaggtggtrggaaataatctttgtcttctttggagtaaaccttcaacaccggattttttcttttaattatggatgtaaaccccaatatccccataatttacattgggtc

SEQ ID NO: 89314 - DNA, 201 bp, Homo sapiens; identical to SEQ ID NO: 89310

SEQ ID NO: 89315 - DNA, 201 bp, Homo sapiens
gtctagcacctggtattcaaatcacaagaatatttttgttgggcttaagtattaagctaaatggctaccttcaacgtgcaatactggaagaaagcagacartatcatgatataattcaacaggaatacttagatacgtactataatttgaccattaaaacactaatgggcatgaactgggttgcaacatactgtccacata

SEQ ID NO: 89316 - DNA, 201 bp, Homo sapiens
tgaagaagttaattcttaaaactataacattatataacaaaaaaggtttcccaaaacaatctatttaaaaaactgtataaggagattctgtgtattaacaygcaataacaagcatgcataaatcaatggttcaagtcttctgttaggggccaataaaatgtatctgcatatgttttccacataaattttaattcaagaaat

SEQ ID NO: 89317 - DNA, 201 bp, Homo sapiens
aaaaaggtactggacatccaaattcttaccatttcaaatatattattaatgagcctgaaaaatgccaagagaaaagtccttttttaatactactaatagcygcagagcctggacaaatagaagctagaagagctattcggcaaacttggggcaatgaaagtctagcacctggtattcaaatcacaagaatatttttgttgg

SEQ ID NO: 89318 - DNA, 201 bp, Homo sapiens
aaagaagagaggtaaatcctattcttttccaatacaactgaagcactacattttagctctggctgctttacattgcagctcagtgttattagtagaaatayggatactgagacgagaacacagcactgcattgtccagccaggaaaatagcagatgtaaaaagcttcaatgcatcaactgtcgggaagagtcaacagtgct

SEQ ID NO: 89319 - DNA, 201 bp, Homo sapiens
caacacatttttaagatgcatgtctgccaaaatgcaacatacgggaagtttatttcctgacagcaggtgtacacatgccaacacttaatcattttatggcmcctatttctttcttggagtgccaagtttgcaaacctgcagtttttaatttggtagatgacaaatattctgaatcaccaattaaaaacctttttgggaggg

SEQ ID NO: 89320 - DNA, 201 bp, Homo sapiens
cctttggctctgagcagaatcgcagagaccttcagaaagcactggtgtcaggatactttctcaaggtggccagagacacagacgggactggaaattacctwctcctaacccataagcatgtggcccagctctcctcatactgctgctaccgaagccgcagagctcctgccagacccccaccatgggtgctctaccacaatt

SEQ ID NO: 89321 - DNA, 201 bp, Homo sapiens
tggagcctggggcgtgctggtactagatgaggctcaggagcggtcggtggcatcagattcactccaggggctactgcaagatgccaggctggaaaaacttycgggggacctcagagtggttgtggttactgacccagcccttgaacctaagctccgagctttctggggcaatcctcctattgtgcatatacccagagagcc

SEQ ID NO: 89322 - DNA, 201 bp, Homo sapiens
atgaggttggatacagcatcccccaggaggactgcacggggcccaacaccctgctcaggttctgctgggacaggctgcttctgcaggaggtggcctcgacscgaggcactggagcctggggcgtgctggtactagatgaggctcaggagcggtcggtggcatcagattcactccaggggctactgcaagatgccaggctgg

SEQ ID NO: 89323 - DNA, 201 bp, Homo sapiens; identical to SEQ ID NO: 89320

SEQ ID NO: 89324 - DNA, 201 bp, Homo sapiens; identical to SEQ ID NO: 89321

SEQ ID NO: 89325 - DNA, 201 bp, Homo sapiens; identical to SEQ ID NO: 89322

SEQ ID NO: 89326 - DNA, 135 bp, Homo sapiens
acatagggaaggactctttccttagccttctcttattgattggagagggactgacatgctcctcattctcttaactttgccaaacccattcttgtactccsttgtgatctataaaagatttttctatgatgccaa

SEQ ID NO: 89327 - DNA, 201 bp, Homo sapiens
atgctgcccacctacgtgtgtgctaccccggacggcacagagaaaggggacttcttggccttggaccttggaggaacaaatttccgggtcctgctggtccrtgttcggaatgggaagtggggtggagtggagatgcacaacaagatctacgccatcccgcaggaggtcatgcacggcaccggggacgagctctttgaccac

SEQ ID NO: 89328 - DNA, 201 bp, Homo sapiens
ccgagtggagccgggctgagattcttctcaagttgagcctcagtgatcctgtggccgaagttagcgccttgacgtgggacaaccggacacgtcgccaggasagaactgaggcgccttctagcagttgtgacgccaaaatcacgtctccggagacccgcgccctccgccagccgggcgcaccctcgccggtagccttctttg

SEQ ID NO: 89329 - DNA, 201 bp, Homo sapiens
gtggattccagcatttgccattcctggaatcaaggaatcctgagtctgggcaatgaaaccaaagccaggagttgacgcatcctgcagttgggccagctgtygcatctcagcggggcgcacatgttatccacaagcaatggacctttggggaagggggagtttttagtttgttttacaaatttttcctgcaaaagtggaatc

SEQ ID NO: 89330 - DNA, 201 bp, Homo sapiens
tcggaactatgatgacctgtggctttgaagaccctcactgtgaagttggcctcattgttggcacgggcagcaatgcctgctacatggaggagatgcgcaaygtggaactggtggaaggagaagaggggcggatgtgtgtgaacatggaatggggggccttcggggacaatggatgcctagatgacttccgcacagaatttg

SEQ ID NO: 89331 - DNA, 201 bp, Homo sapiens
cactcaaccccggcaagcagaggttcgagaaaatgatcagtggaatgtacctgggtgagattgtccgtaacattctcatcgatttcaccaagcgtggactrctcttccgaggccgcatctcagagcggctcaagacaaggggcatctttgaaaccaagttcttgtctcagattgagaggtgagagcttaggccatcctgca

SEQ ID NO: 89332 - DNA, 201 bp, Homo sapiens
gtgagcctgattatcctataggcagacgtggggagggtggaggggtgacagtggaggaaaatccatggatatccacgcagcagcccctctttaacctcatmtacaagcatttgccctgtggattccagcatttgccattcctggaatcaaggaatcctgagtctgggcaatgaaaccaaagccaggagttgacgcatcctg

SEQ ID NO: 89333 - DNA, 201 bp, Homo sapiens
cgcgcccgcgagccgtgagcgatgattggctgcgccacggcggcgggcggtccgtgggcgcacacaccctccccgcgcagccaatgggcgtgcgcacgtcwctgatccggaggcccgcgggccggcagcccctcaataagccacattgttgcatgaaactccggcgcaggagtcccgggctgccgctggcaacatcgtgtc

SEQ ID NO: 89334 - DNA, 201 bp, Homo sapiens
tctaatcctcaacaacaaaccaaaacagaacaattaaacagccaaataaaacctcagggacaacatttttggtgtatttgagccctcccagcaagtttcaycttgggtttgtattttaaatgttttacaagaattgtccatgtgcttccctaggctgagctggcattggtctgctgacctgtttttgtgtttttctttttt

SEQ ID NO: 89335 - DNA, 201 bp, Homo sapiens
atcagatctatgccatccctgaggacatcatgcgaggcagtggcacccagctgtttgaccacattgccgaatgcctggctaacttcatggataagctacawatcaaagacaagaagctcccactgggttttaccttctcgttcccctgccaccagactaaactagacgagagtttcctggtctcatggaccaagggattca

SEQ ID NO: 89336 - DNA, 201 bp, Homo sapiens
cctgaggacatcatgcgaggcagtggcacccagctgtttgaccacattgccgaatgcctggctaacttcatggataagctacaaatcaaagacaagaagcycccactgggttttaccttctcgttcccctgccaccagactaaactagacgagagtttcctggtctcatggaccaagggattcaagtccagtggagtggaa

SEQ ID NO: 89337 - DNA, 201 bp, Homo sapiens
agcacctgtgacgacagcatcattgttaaggaggtgtgcactgtggtggcccggcgggcagcccagctctgtggcgcaggcatggccgctgtggtggacargatacgagaaaaccgtgggctggacgctctcaaagtgacagtgggtgtggatgggaccctctacaagctacatcctcactttgccaaagtcatgcatgag

SEQ ID NO: 89338 - DNA, 201 bp, Homo sapiens
gagaaaatgatcagtggaatgtacctgggtgagattgtccgtaacattctcatcgatttcaccaagcgtggactgctcttccgaggccgcatctcagagcrgctcaagacaaggggcatctttgaaaccaagttcttgtctcagattgagaggtgagagcttaggccatcctgcaacacttagggcttgagagcacctgtg

SEQ ID NO: 89339 - DNA, 201 bp, Homo sapiens
ccgggaaagcaactgtttgagaagatgatcagtgggatgtacatgggggagctggtgaggcttatcctggtgaagatggccaaggaggagctgctctttgrggggaagctcagcccagagcttctcaacaccggtcgctttgagaccaaagacatctcagacattgaaggggagaaggatggcatccggaaggcccgtgag

SEQ ID NO: 89340 - DNA, 201 bp, Homo sapiens
tgggatgtacatgggggagctggtgaggcttatcctggtgaagatggccaaggaggagctgctctttggggggaagctcagcccagagcttctcaacaccrgtcgctttgagaccaaagacatctcagacattgaaggggagaaggatggcatccggaaggcccgtgaggtcctgatgcggttgggcctggacccgactca

SEQ ID NO: 89341 - DNA, 201 bp, Homo sapiens
agagcttggtggctgagcttggccctattaagataaatagagttccaaataaggatttgttcacatgcatcataaccattcccattggttctcctaaaacrtgaaaattatctcccttagtaatcccccttgccaaattccatgtccctgtataattctacaggatggggacactaatgaagatacggttgcttcaccttg

SEQ ID NO: 89342 - DNA, 201 bp, Homo sapiens
ggtactatctgtgaagttacacttttttttttttttttaaaggtagagatgtgtgtgtgtgtaggtattaaagatgtgttgttggtttccaaaaaggaacmctggaaaataaattttgaatgtttatgttctcagaatcaggttgacagtcccttgctgacatggctttgctttgtgtaaatacagtggatctcaatcttc

SEQ ID NO: 89343 - DNA, 201 bp, Homo sapiens
gtggctgagcttggccctattaagataaatagagttccaaataaggatttgttcacatgcatcataaccattcccattggttctcctaaaacatgaaaatkatctcccttagtaatcccccttgccaaattccatgtccctgtataattctacaggatggggacactaatgaagatacggttgcttcaccttggagcctga

SEQ ID NO: 89344 - DNA, 201 bp, Homo sapiens
tgtgtgtgaacatggaatggggggccttcggggacaatggatgcctagatgacttccgcacagaatttgatgtggctgtggatgagctttcactcaacccsggcaagcagaggttcgagaaaatgatcagtggaatgtacctgggtgagattgtccgtaacattctcatcgatttcaccaagcgtggactgctcttccgag

SEQ ID NO: 89345 - DNA, 201 bp, Homo sapiens
gttatgatgaccacaactgtgagattggtctcattgtgggcacgggcagcaacgcctgctacatggaagagatgcgccacatcgacatggtggaaggcgaygaggggcggatgtgtatcaatatggagtggggggccttcggggacgatggctcgctcaacgacattcgcactgagtttgaccaggagattgacatgggct

SEQ ID NO: 89346 - DNA, 201 bp, Homo sapiens
attgacatgggctcactgaacccgggaaagcaactgtttgagaagatgatcagtgggatgtacatgggggagctggtgaggcttatcctggtgaagatggycaaggaggagctgctctttggggggaagctcagcccagagcttctcaacaccggtcgctttgagaccaaagacatctcagacattgaaggggagaaggat

SEQ ID NO: 89347 - DNA, 201 bp, Homo sapiens
tgaggtcctgatgcggttgggcctggacccgactcaggaggactgcgtggccactcaccggatctgccagatcgtgtccacacgctccgccagcctgtgckcagccaccctggccgccgtgctgcagcgcatcaaggagaacaaaggcgaggagcggctgcgctctactattggggtcgacggttccgtctacaagaaaca

SEQ ID NO: 89348 - DNA, 201 bp, Homo sapiens
gccgatcaacaccgtgcccgccagaagacattagagcatctgcagctgagccatgaccagctgctggaggtcaagaggaggatgaaggtagaaatggagcraggtctgagcaaggagactcatgccagtgcccccgtcaagatgctgcccacctacgtgtgtgctaccccggacggcacagagaaaggggacttcttggcc

SEQ ID NO: 89349 - DNA, 201 bp, Homo sapiens; identical to SEQ ID NO: 89327

SEQ ID NO: 89350 - DNA, 201 bp, Homo sapiens; identical to SEQ ID NO: 89328

SEQ ID NO: 89351 - DNA, 201 bp, Homo sapiens; identical to SEQ ID NO: 89329

SEQ ID NO: 89352 - DNA, 201 bp, Homo sapiens; identical to SEQ ID NO: 89330

SEQ ID NO: 89353 - DNA, 201 bp, Homo sapiens
cactcaaccccggcaagcagaggttcgagaaaatgatcagtggaatgtacctgggtgagattgtccgtaacattctcatcgatttcaccaagcgtggactrctcttccgaggccgcatctcagagcggctcaagacaaggggcatctttgaaaccaagttcttgtctcagattgagagtgactgcctggccctgctgcaag

SEQ ID NO: 89354 - DNA, 201 bp, Homo sapiens; identical to SEQ ID NO: 89332

SEQ ID NO: 89355 - DNA, 201 bp, Homo sapiens; identical to SEQ ID NO: 89334

SEQ ID NO: 89356 - DNA, 201 bp, Homo sapiens; identical to SEQ ID NO: 89335

SEQ ID NO: 89357 - DNA, 201 bp, Homo sapiens; identical to SEQ ID NO: 89336

SEQ ID NO: 89358 - DNA, 201 bp, Homo sapiens; identical to SEQ ID NO: 89337

SEQ ID NO: 89359 - DNA, 201 bp, Homo sapiens
gagaaaatgatcagtggaatgtacctgggtgagattgtccgtaacattctcatcgatttcaccaagcgtggactgctcttccgaggccgcatctcagagcrgctcaagacaaggggcatctttgaaaccaagttcttgtctcagattgagagtgactgcctggccctgctgcaagtccgagccatcctgcaacacttaggg

SEQ ID NO: 89360 - DNA, 201 bp, Homo sapiens; identical to SEQ ID NO: 89339

SEQ ID NO: 89361 - DNA, 201 bp, Homo sapiens; identical to SEQ ID NO: 89340

SEQ ID NO: 89362 - DNA, 201 bp, Homo sapiens; identical to SEQ ID NO: 89341

SEQ ID NO: 89363 - DNA, 201 bp, Homo sapiens; identical to SEQ ID NO: 89343

SEQ ID NO: 89364 - DNA, 201 bp, Homo sapiens; identical to SEQ ID NO: 89342

SEQ ID NO: 89365 - DNA, 201 bp, Homo sapiens; identical to SEQ ID NO: 89344

SEQ ID NO: 89366 - DNA, 201 bp, Homo sapiens; identical to SEQ ID NO: 89345

SEQ ID NO: 89367 - DNA, 201 bp, Homo sapiens; identical to SEQ ID NO: 89346

SEQ ID NO: 89368 - DNA, 201 bp, Homo sapiens; identical to SEQ ID NO: 89347

SEQ ID NO: 89369 - DNA, 201 bp, Homo sapiens; identical to SEQ ID NO: 89348

SEQ ID NO: 89370 - DNA, 201 bp, Homo sapiens; identical to SEQ ID NO: 89327

SEQ ID NO: 89371 - DNA, 201 bp, Homo sapiens; identical to SEQ ID NO: 89328

SEQ ID NO: 89372 - DNA, 201 bp, Homo sapiens; identical to SEQ ID NO: 89329

SEQ ID NO: 89373 - DNA, 201 bp, Homo sapiens; identical to SEQ ID NO: 89330

SEQ ID NO: 89374 - DNA, 201 bp, Homo sapiens; identical to SEQ ID NO: 89353

SEQ ID NO: 89375 - DNA, 201 bp, Homo sapiens; identical to SEQ ID NO: 89332

SEQ ID NO: 89376 - DNA, 201 bp, Homo sapiens; identical to SEQ ID NO: 89333

SEQ ID NO: 89377 - DNA, 201 bp, Homo sapiens; identical to SEQ ID NO: 89334

SEQ ID NO: 89378 - DNA, 201 bp, Homo sapiens; identical to SEQ ID NO: 89335

SEQ ID NO: 89379 - DNA, 201 bp, Homo sapiens; identical to SEQ ID NO: 89336

SEQ ID NO: 89380 - DNA, 201 bp, Homo sapiens; identical to SEQ ID NO: 89337

SEQ ID NO: 89381 - DNA, 201 bp, Homo sapiens; identical to SEQ ID NO: 89359

SEQ ID NO: 89382 - DNA, 201 bp, Homo sapiens; identical to SEQ ID NO: 89339

SEQ ID NO: 89383 - DNA, 201 bp, Homo sapiens; identical to SEQ ID NO: 89340

SEQ ID NO: 89384 - DNA, 201 bp, Homo sapiens; identical to SEQ ID NO: 89341

SEQ ID NO: 89385 - DNA, 201 bp, Homo sapiens; identical to SEQ ID NO: 89342

SEQ ID NO: 89386 - DNA, 201 bp, Homo sapiens; identical to SEQ ID NO: 89343

SEQ ID NO: 89387 - DNA, 201 bp, Homo sapiens; identical to SEQ ID NO: 89344

SEQ ID NO: 89388 - DNA, 201 bp, Homo sapiens; identical to SEQ ID NO: 89345

SEQ ID NO: 89389 - DNA, 201 bp, Homo sapiens; identical to SEQ ID NO: 89346

SEQ ID NO: 89390 - DNA, 201 bp, Homo sapiens; identical to SEQ ID NO: 89347

SEQ ID NO: 89391 - DNA, 201 bp, Homo sapiens; identical to SEQ ID NO: 89348

SEQ ID NO: 89392 - DNA, 201 bp, Homo sapiens
cctgacagtctccggttccagctggagacgtcactgaagcggctgcagtgtccccgagtggacctcttctacctgcatatgccagaccacagcaccccggkggaagagacactgcgtgcctgccaccagctgcaccaggagggcaagttcgtggagcttggcctctccaactatgcagcctgggaagtggccgagatctgt

SEQ ID NO: 89393 - DNA, 201 bp, Homo sapiens
aggaagggcccctggagccggctgtcgtggacgcctttaatcaagcctggcatttggttgctcacgaatgtcccaactacttccgctaggcccatcgtttytcaggctgcccaaggctcttctgtaacatcttttgttactcacattttctttaatttagaactgcctcagtaaattcttagggatggaagtatttggaca

SEQ ID NO: 89394 - DNA, 201 bp, Homo sapiens
ccagcctggagcagctggagcagaacttggcagcggcagaggaagggcccctggagccggctgtcgtggacgcctttaatcaagcctggcatttggttgcycacgaatgtcccaactacttccgctaggcccatcgtttctcaggctgcccaaggctcttctgtaacatcttttgttactcacattttctttaatttagaa

SEQ ID NO: 89395 - DNA, 201 bp, Homo sapiens
agggatgtggcagcttctggggcactctaggccccggggctgattgctgctttccctcagggggcctgctgaccggcaagtacaagtatgaggacaaggaygggaaacagcccgtgggccgcttctttgggaatacctgggcagagatgtacaggaatcgctactggaaggagcaccactttgagggcattgccctggtgg

SEQ ID NO: 89396 - DNA, 201 bp, Homo sapiens
tggagaaggccctgcaggccgcgtatggcgccagcgcccccagcatgacctcggccaccctccggtggatgtaccaccactcacagctgcagggtgcccayggggacgcggtcatcctgggcatgtccagcctggagcagctggagcagaacttggcagcggcagaggaagggcccctggagccggctgtcgtggacgcct

SEQ ID NO: 89397 - DNA, 201 bp, Homo sapiens
gtccagcctggagcagctggagcagaacttggcagcggcagaggaagggcccctggagccggctgtcgtggacgcctttaatcaagcctggcatttggttrctcacgaatgtcccaactacttccgctaggcccatcgtttctcaggctgcccaaggctcttctgtaacatcttttgttactcacattttctttaatttag

SEQ ID NO: 89398 - DNA, 153 bp, Homo sapiens
gtgagagagggagcaagagacagacaggggaggaaattccaggctcttttaaacaaccagatcctgtgtgaactcatagagctggaactcactcattactrtacagatggcaccaagccattcatgtgggatttgcccccataccctaacccc

SEQ ID NO: 89399 - DNA, 201 bp, Homo sapiens
tgaagcctgacagtctccggttccagctggagacgtcactgaagcggctgcagtgtccccgagtggacctcttctacctgcatatgccagaccacagcacyccggtggaagagacactgcgtgcctgccaccagctgcaccaggagggcaagttcgtggagcttggcctctccaactatgcagcctgggaagtggccgaga

SEQ ID NO: 89400 - DNA, 201 bp, Homo sapiens
ccctggagccggctgtcgtggacgcctttaatcaagcctggcatttggttgctcacgaatgtcccaactacttccgctaggcccatcgtttctcaggctgyccaaggctcttctgtaacatcttttgttactcacattttctttaatttagaactgcctcagtaaattcttagggatggaagtatttggacaaaaacctaa

SEQ ID NO: 89401 - DNA, 201 bp, Homo sapiens
gcttctggggcactctaggccccggggctgattgctgctttccctcagggggcctgctgaccggcaagtacaagtatgaggacaaggatgggaaacagccygtgggccgcttctttgggaatacctgggcagagatgtacaggaatcgctactggaaggagcaccactttgagggcattgccctggtggagaaggccctgc

SEQ ID NO: 89402 - DNA, 201 bp, Homo sapiens
cccacggggacgcggtcatcctgggcatgtccagcctggagcagctggagcagaacttggcagcggcagaggaagggcccctggagccggctgtcgtggaygcctttaatcaagcctggcatttggttgctcacgaatgtcccaactacttccgctaggcccatcgtttctcaggctgcccaaggctcttctgtaacatct

SEQ ID NO: 89403 - DNA, 201 bp, Homo sapiens
tgagggatgtggcagcttctggggcactctaggccccggggctgattgctgctttccctcagggggcctgctgaccggcaagtacaagtatgaggacaagratgggaaacagcccgtgggccgcttctttgggaatacctgggcagagatgtacaggaatcgctactggaaggagcaccactttgagggcattgccctggt

SEQ ID NO: 89404 - DNA, 201 bp, Homo sapiens
tacttccgctaggcccatcgtttctcaggctgcccaaggctcttctgtaacatcttttgttactcacattttctttaatttagaactgcctcagtaaattyttagggatggaagtatttggacaaaaacctaatagaagagtcaccaccaaatgaagaataaaactcccagggtgctgtgtgttagtctgtttgcgttgct

SEQ ID NO: 89405 - DNA, 201 bp, Homo sapiens
ctgtcgtggacgcctttaatcaagcctggcatttggttgctcacgaatgtcccaactacttccgctaggcccatcgtttctcaggctgcccaaggctcttytgtaacatcttttgttactcacattttctttaatttagaactgcctcagtaaattcttagggatggaagtatttggacaaaaacctaatagaagagtcac

SEQ ID NO: 89406 - DNA, 201 bp, Homo sapiens
cggctgtcgtggacgcctttaatcaagcctggcatttggttgctcacgaatgtcccaactacttccgctaggcccatcgtttctcaggctgcccaaggctyttctgtaacatcttttgttactcacattttctttaatttagaactgcctcagtaaattcttagggatggaagtatttggacaaaaacctaatagaagagt

SEQ ID NO: 89407 - DNA, 201 bp, Homo sapiens; identical to SEQ ID NO: 89392

SEQ ID NO: 89408 - DNA, 201 bp, Homo sapiens; identical to SEQ ID NO: 89393

SEQ ID NO: 89409 - DNA, 201 bp, Homo sapiens; identical to SEQ ID NO: 89394

SEQ ID NO: 89410 - DNA, 201 bp, Homo sapiens
agctcttcccctgcctcaggcactttggactgaggttctatgccttcaaccctctggctgggggcctgctgaccggcaagtacaagtatgaggacaaggaygggaaacagcccgtgggccgcttctttgggaatacctgggcagagatgtacaggaatcgctactggaaggagcaccactttgagggcattgccctggtgg

SEQ ID NO: 89411 - DNA, 201 bp, Homo sapiens; identical to SEQ ID NO: 89396

SEQ ID NO: 89412 - DNA, 201 bp, Homo sapiens; identical to SEQ ID NO: 89397

SEQ ID NO: 89413 - DNA, 153 bp, Homo sapiens; identical to SEQ ID NO: 89398

SEQ ID NO: 89414 - DNA, 201 bp, Homo sapiens; identical to SEQ ID NO: 89399

SEQ ID NO: 89415 - DNA, 201 bp, Homo sapiens; identical to SEQ ID NO: 89400

SEQ ID NO: 89416 - DNA, 201 bp, Homo sapiens
gcctcaggcactttggactgaggttctatgccttcaaccctctggctgggggcctgctgaccggcaagtacaagtatgaggacaaggatgggaaacagccygtgggccgcttctttgggaatacctgggcagagatgtacaggaatcgctactggaaggagcaccactttgagggcattgccctggtggagaaggccctgc

SEQ ID NO: 89417 - DNA, 201 bp, Homo sapiens; identical to SEQ ID NO: 89402

SEQ ID NO: 89418 - DNA, 201 bp, Homo sapiens
ggagctcttcccctgcctcaggcactttggactgaggttctatgccttcaaccctctggctgggggcctgctgaccggcaagtacaagtatgaggacaagratgggaaacagcccgtgggccgcttctttgggaatacctgggcagagatgtacaggaatcgctactggaaggagcaccactttgagggcattgccctggt

SEQ ID NO: 89419 - DNA, 201 bp, Homo sapiens; identical to SEQ ID NO: 89404

SEQ ID NO: 89420 - DNA, 201 bp, Homo sapiens; identical to SEQ ID NO: 89405

SEQ ID NO: 89421 - DNA, 201 bp, Homo sapiens; identical to SEQ ID NO: 89406

SEQ ID NO: 89422 - DNA, 201 bp, Homo sapiens
ccgcttctttgggactcagtgggcagagatctacaggaatcacttctggaaggagcaccacttcgagggcattgccctggtggagaaggccctgcaggccrcgtatggcgccagcgctcccagcatgacctcggccgccctccggtggatgtaccaccactcacagctgcagggtgcccacggggacgcggtcatcctggg

SEQ ID NO: 89423 - DNA, 201 bp, Homo sapiens
ctgctcttggtgagggcctcaggaagcttagaatcatggcagaaggggaaacggagccagcgtgtcacatggtgagagagggagcaagagacagacaggggaggaaattcacacactgatggtggggatgtaaaatggtacaaccagtttggaaaacagtttggcagtttctcaaaggattaaacataaaattaccatagg

SEQ ID NO: 89424 - DNA, 201 bp, Homo sapiens
gcatctgctcttggtgagggcctcaggaagcttagaatcatggcagaaggggaaacggagccagcgtgtcacatggtgagagagggagcaagagacagacaggggaggaaattcacacactgatggtggggatgtaaaatggtacaaccagtttggaaaacagtttggcagtttctcaaaggattaaacataaaattacca

SEQ ID NO: 89425 - DNA, 201 bp, Homo sapiens
atctgtaccctctgcaagagcaacggctggatcctgcccactgtgtaccagggcatgtacagcgccaccacccggcaggtggaaacggagctcttcccctrcctcaggcactttggactgaggttctatgcctacaaccctctggctgggggcctgctgaccggcaagtacaagtatgaggacaaggacgggaaacagccc

SEQ ID NO: 89426 - DNA, 201 bp, Homo sapiens
catgtccagcctggagcagctggagcagaacttggcagcggcagaggaagggcccctggagccggctgtcgtggacgcctttaatcaagcctggcatttgkttgcccacgaatgtcccaactacttcatctaagctcattgtggctcaggctgcccaaggcttttctgtcaactcttttgctctctcccgctttgtctaat

SEQ ID NO: 89427 - DNA, 201 bp, Homo sapiens
tggagaaggccctgcaggccacgtatggcgccagcgctcccagcatgacctcggccgccctccggtggatgtaccaccactcacagctgcagggtgcccayggggacgcggtcatcctgggcatgtccagcctggagcagctggagcagaacttggcagcggcagaggaagggcccctggagccggctgtcgtggacgcct

SEQ ID NO: 89428 - DNA, 102 bp, Homo sapiens
agttccacttgtgggtatgtagccaagagaaatgaaaacatatctccccacaaaaaaacttgggtatgagatttcacattatcattgctcataatagccart

SEQ ID NO: 89429 - DNA, 201 bp, Homo sapiens
tccattcatctgcccacccatccgtccctccgtctgcccaccagccgcccctctcctcctgggctgcagagccatggcccggggctacggggccacggtcrgcctagtcctgctgggtctggggctggcgctggctgtcattgtgctggctgtggtcctctctcgacaccaggccccatgtggcccccaggcctttgccca

SEQ ID NO: 89430 - DNA, 201 bp, Homo sapiens
tggaggttccagggagccctgcccctacctggcaaccgcagtgcagcaggcaccaagttctcctgcacattgcgacagtgtgaccctgggctctggcgggyggtaggtggggcctttggacctactagcagtgagggagttaacacagcagctgactcctctaggcaaggaaaactcccctcagacgctttgctgcctggc

SEQ ID NO: 89431 - DNA, 201 bp, Homo sapiens
tgggcggaggggtcatcttcaccatctacaatgtgacaacaggggcccagtggatcggggtgcccggggagctccgtggctatgccgaggcccaccgccgycatggccgcctgccctgggcgcagctgttccagcccaccatcgcgctgctccgaggggggcatgtggtggcccctgtcctcagccgtttcctgcacaaca

SEQ ID NO: 89432 - DNA, 201 bp, Homo sapiens
gaggggggcatgtggtggcccctgtcctcagccgtttcctgcacaacagcatcctgcggccttccttgcaggcgtcaaccctgcgccagctcttcttcaaygggacagaacccctgaggcctcaggacccactcccatggcctgcactggccaccaccctggagaccgtggccacagagggcgtggaggtcttctacacgg

SEQ ID NO: 89433 - DNA, 201 bp, Homo sapiens
cagccgcccctctcctcctgggctgcagagccatggcccggggctacggggccacggtcagcctagtcctgctgggtctggggctggcgctggctgtcatygtgctggctgtggtcctctctcgacaccaggccccatgtggcccccaggcctttgcccacgctgctgttgccgccgactccaaggtctgctcggatattg

SEQ ID NO: 89434 - DNA, 104 bp, Homo sapiens
gcaccaccccctcacctgtggagacagggtgggtggagctcccggaaggtgctggcccccagttccaggcgagcgttccccatcctccatggtgccctccrtct

SEQ ID NO: 89435 - DNA, 201 bp, Homo sapiens
ctgttgccgccgactccaaggtctgctcggatattggacgagccatcctccagcagcagggctcacccgtggatgccaccatcgcggctctggtctgcacyagcgtcgtcaaccctcagagcatgggcctgggcggaggggtcatcttcaccatctacaatgtgacaacaggggcccagtggatcggggtgcccggggagc

SEQ ID NO: 89436 - DNA, 201 bp, Homo sapiens
gacaggcacgtcccatgtgtctgtgctgggggaggatggcagcgccgtggctgccaccagcaccatcaacacaccctttggagcgatggtgtattcaccayggacaggcatcatcctcaacaacgagctcctggacttatgcgagcgatgcccccggggttccggcaccaccccctcacctgtggagacagggtgggtgga

SEQ ID NO: 89437 - DNA, 201 bp, Homo sapiens
gggagctccgtggctatgccgaggcccaccgccgccatggccgcctgccctgggcgcagctgttccagcccaccatcgcgctgctccgaggggggcatgtkgtggcccctgtcctcagccgtttcctgcacaacagcatcctgcggccttccttgcaggcgtcaaccctgcgccagctcttcttcaacgggacagaacccc

SEQ ID NO: 89438 - DNA, 201 bp, Homo sapiens
accatctacaatgtgacaacaggggcccagtggatcggggtgcccggggagctccgtggctatgccgaggcccaccgccgccatggccgcctgccctgggygcagctgttccagcccaccatcgcgctgctccgaggggggcatgtggtggcccctgtcctcagccgtttcctgcacaacagcatcctgcggccttccttg

SEQ ID NO: 89439 - DNA, 201 bp, Homo sapiens
aacgtgctaagagggttcaacttctcaacagagtctatggccaggcctgaagggagggtgaacgtgtaccaccaccttgtagagacgctcaagtttgccarggggcagaggtggaggctgggggaccctcgaagccacccgaagctccagaatgcctcccgggacctgctgggggagaccctggcccagctcatccgccaa

SEQ ID NO: 89440 - DNA, 201 bp, Homo sapiens
ttatcctcaacgtgctaagagggttcaacttctcaacagagtctatggccaggcctgaagggagggtgaacgtgtaccaccaccttgtagagacgctcaartttgccaaggggcagaggtggaggctgggggaccctcgaagccacccgaagctccagaatgcctcccgggacctgctgggggagaccctggcccagctca

SEQ ID NO: 89441 - DNA, 201 bp, Homo sapiens
cagcaacaagcaggagctgaaaaccagaagttgaggcgtgagtttggccactccgtagtgtgcacttggtgagggcagcagctcgccacagctgccagccrtctgtccattcacccatctgtccatctggcagcccgctgttcagacctgtctgtctgtccgcccatctgtaagcccatctctgtcccattgtctatctga

SEQ ID NO: 89442 - DNA, 201 bp, Homo sapiens; identical to SEQ ID NO: 89429

SEQ ID NO: 89443 - DNA, 201 bp, Homo sapiens; identical to SEQ ID NO: 89430

SEQ ID NO: 89444 - DNA, 201 bp, Homo sapiens
gcctgctggaccagtgtgcacaggctctgccactgggcacaggggcccagtggatcggggtgcccggggagctccgtggctatgccgaggcccaccgccgycatggccgcctgccctgggcgcagctgttccagcccaccatcgcgctgctccgaggggggcatgtggtggcccctgtcctcagccgtttcctgcacaaca

SEQ ID NO: 89445 - DNA, 201 bp, Homo sapiens; identical to SEQ ID NO: 89432

SEQ ID NO: 89446 - DNA, 201 bp, Homo sapiens; identical to SEQ ID NO: 89433

SEQ ID NO: 89447 - DNA, 201 bp, Homo sapiens
caccccctcacctgtgagtggagacagggtgggtggagctcccggaaggtgctggcccccagttccaggcgagcgttccccatcctccatggtgccctccrtcttgatcaacaaagcccaggggtcgaagctagtgattggcggggctggcggggagctcatcatctctgctgtggcccaggccatcatgagcaagctgtg

SEQ ID NO: 89448 - DNA, 184 bp, Homo sapiens
ggtggcggggaccagctgggcagatgagaggctgagcctcatccctaaccccctttcccagagcccctggtggtcctgaaccggcccctctatccctccgyaggcctcttgcctggggccactctcccaccctctcgatctgtatatcctccagtccaagattaaagaggcggactgtggcctg

SEQ ID NO: 89449 - DNA, 201 bp, Homo sapiens
ctgttgccgccgactccaaggtctgctcggatattggacgagccatcctccagcagcagggctcacccgtggatgccaccatcgcggctctggtctgcacyagcgtcgtcaaccctcagagcatgggcctgggcggaggggtcatcttcaccatctacaatgtgacaacagggaaggtggaggtcatcaatgcccgggaga

SEQ ID NO: 89450 - DNA, 201 bp, Homo sapiens
gacaggcacgtcccatgtgtctgtgctgggggaggatggcagcgccgtggctgccaccagcaccatcaacacaccctttggagcgatggtgtattcaccayggacaggcatcatcctcaacaacgagctcctggacttatgcgagcgatgcccccggggttccggcaccaccccctcacctgtgagtggagacagggtggg

SEQ ID NO: 89451 - DNA, 201 bp, Homo sapiens; identical to SEQ ID NO: 89437

SEQ ID NO: 89452 - DNA, 201 bp, Homo sapiens
caggctctgccactgggcacaggggcccagtggatcggggtgcccggggagctccgtggctatgccgaggcccaccgccgccatggccgcctgccctgggygcagctgttccagcccaccatcgcgctgctccgaggggggcatgtggtggcccctgtcctcagccgtttcctgcacaacagcatcctgcggccttccttg

SEQ ID NO: 89453 - DNA, 201 bp, Homo sapiens; identical to SEQ ID NO: 89439

SEQ ID NO: 89454 - DNA, 201 bp, Homo sapiens; identical to SEQ ID NO: 89440

SEQ ID NO: 89455 - DNA, 201 bp, Homo sapiens; identical to SEQ ID NO: 89441

SEQ ID NO: 89456 - DNA, 117 bp, Homo sapiens
tggtggtcctgaaccggcccctctatccctccgcaggcctcttgcctggggccactctcccaccctctcgatctgtatatcctccagtccaagattaaagrggcggactgtggcctg

SEQ ID NO: 89457 - DNA, 201 bp, Homo sapiens
ccgtggatttggtcaaagggcagcacaagagcaaggagttcttgcagatcaacagcctggggaaactgccgacgctcaaggatggtgatttcatcttgacygaaagctcggccatcctgatttacctgagctgtaagtaccagacgccggaccactggtatccatctgacctgcaggctcgtgcccgtgttcatgagtacc

SEQ ID NO: 89458 - DNA, 201 bp, Homo sapiens
gtatccatctgacctgcaggctcgtgcccgtgttcatgagtacctgggctggcatgccgactgcatccgtggcacctttggtatacccctgtgggtccagrtgttggggccactcattggggtccaggtgcccgaggagaaggtggaacgcaacaggactgccatggaccaggccctgcaatggctggaggacaagttcct

SEQ ID NO: 89459 - DNA, 201 bp, Homo sapiens
ttggtcaaagggcagcacaagagcaaggagttcttgcagatcaacagcctggggaaactgccgacgctcaaggatggtgatttcatcttgaccgaaagctyggccatcctgatttacctgagctgtaagtaccagacgccggaccactggtatccatctgacctgcaggctcgtgcccgtgttcatgagtacctgggctgg

SEQ ID NO: 89460 - DNA, 201 bp, Homo sapiens
acctgcaggctcgtgcccgtgttcatgagtacctgggctggcatgccgactgcatccgtggcacctttggtatacccctgtgggtccaggtgttggggccmctcattggggtccaggtgcccgaggagaaggtggaacgcaacaggactgccatggaccaggccctgcaatggctggaggacaagttcctgggggacaggc

SEQ ID NO: 89461 - DNA, 201 bp, Homo sapiens
tccgtggcacctttggtatacccctgtgggtccaggtgttggggccactcattggggtccaggtgcccgaggagaaggtggaacgcaacaggactgccatrgaccaggccctgcaatggctggaggacaagttcctgggggacaggcccttcctcgctggccagcaggtgacactggctgatctcatggccctggaggagc

SEQ ID NO: 89462 - DNA, 201 bp, Homo sapiens
gacactggctgatctcatggccctggaggagctgatgcagccggtggctctcggctatgaactgtttgagggacggccacgactggcagcatggcgtggaygagtggaggctttcctgggtgctgagctatgccaggaggcccacagcatcatcttgagcatcctggaacaggcggccaagaaaaccctcccaacaccctc

SEQ ID NO: 89463 - DNA, 201 bp, Homo sapiens
tcatgagtacctgggctggcatgccgactgcatccgtggcacctttggtatacccctgtgggtccaggtgttggggccactcattggggtccaggtgcccraggagaaggtggaacgcaacaggactgccatggaccaggccctgcaatggctggaggacaagttcctgggggacaggcccttcctcgctggccagcaggt

SEQ ID NO: 89464 - DNA, 201 bp, Homo sapiens
tacttgcccctttttatctttccctcttgccccagtcccttctctccagcttcatgtgaagctctgcacagacaagacactcagtgtccttggcagtgctkctactcctcaggtgcagcatacataaccagtaagagactaaatctgcaatatataaagagctcctacaaatcagtaacatgaagaacactcaaaaattgg

SEQ ID NO: 89465 - DNA, 201 bp, Homo sapiens
ggaggcccacagcatcatcttgagcatcctggaacaggcggccaagaaaaccctcccaacaccctcaccagaggcctatcaggctatgctgcttcgaatcrccaggatcccctgaagggtctgggatgggggccaggagattagcaacaaggattcattctgttacttacttgcccctttttatctttccctcttgcccca

SEQ ID NO: 89466 - DNA, 201 bp, Homo sapiens
tcccaaagataacaggggaggaagtttcagctgagaagatggagcatgcagtggaagaggtgaagaacagcctgcagctctttgaggagtattttctgcasgataagatgttcatcaccgggaaccaaatctcactggctgacctggtggccgtggtggagatgatgcagcccatggcagccaactataatgtcttcctca

SEQ ID NO: 89467 - DNA, 201 bp, Homo sapiens
ccagctgcctgccaccaatgtctacctgtgcaagcctgcagatgctgcacagctggagcggctgttggggaggctgatgccagccctgcagcacctggatkggggggtgctggtggccaggcccttcctggcaatggagcagatctccctggaagacttggtgctgacggaggtgatgcaggcccgtgtggcggctgccct

SEQ ID NO: 89468 - DNA, 201 bp, Homo sapiens
tctggctcaagttgctgatcccaaagataacaggggaggaagtttcagctgagaagatggagcatgcagtggaagaggtgaagaacagcctgcagctcttygaggagtattttctgcaggataagatgttcatcaccgggaaccaaatctcactggctgacctggtggccgtggtggagatgatgcagcccatggcagcca

SEQ ID NO: 89469 - DNA, 201 bp, Homo sapiens
aggtgaagaacagcctgcagctctttgaggagtattttctgcaggataagatgttcatcaccgggaaccaaatctcactggctgacctggtggccgtggtrgagatgatgcagcccatggcagccaactataatgtcttcctcaacagctccaagctagctgagtggcgtatgcgggtggagctgaatattggctgtggcc

SEQ ID NO: 89470 - DNA, 201 bp, Homo sapiens
agacagacagctctggtgaaggtctttctcggggccgtttgggctcctctttgctctggaagccccagcagttgggcccaggccacaccggggtggttgaygtagtggcactcaggaaggcaagggcagtgcccctgaccggccccttctgcagcgcggccatcctttactacctgtgccgcaagtacagcgcaccatcgc

SEQ ID NO: 89471 - DNA, 201 bp, Homo sapiens
tgcccgtgtggatgagttcgtggcttggcaacacacggcctttcagctgcccatgaagaagatagtctggctcaagttgctgatcccaaagataacagggraggaagtttcagctgagaagatggagcatgcagtggaagaggtgaagaacagcctgcagctctttgaggagtattttctgcaggataagatgttcatcac

SEQ ID NO: 89472 - DNA, 201 bp, Homo sapiens
caagttgctgatcccaaagataacaggggaggaagtttcagctgagaagatggagcatgcagtggaagaggtgaagaacagcctgcagctctttgaggagwattttctgcaggataagatgttcatcaccgggaaccaaatctcactggctgacctggtggccgtggtggagatgatgcagcccatggcagccaactataa

SEQ ID NO: 89473 - DNA, 201 bp, Homo sapiens
agctgagtggcgtatgcgggtggagctgaatattggctgtggcctctttagggaggcccatgatcgactaatgcagttggccgactgggacttttcaacaytggatccaatggtcacgaggaaaatctgtgagtttcgggagaagtacttgtgaccctaatcgcagcccatcctgcagggcctggctggctcaatgatctg

SEQ ID NO: 89474 - DNA, 201 bp, Homo sapiens
gtggtggagatgatgcagcccatggcagccaactataatgtcttcctcaacagctccaagctagctgagtggcgtatgcgggtggagctgaatattggctstggcctctttagggaggcccatgatcgactaatgcagttggccgactgggacttttcaacattggatccaatggtcacgaggaaaatctgtgagtttcgg

SEQ ID NO: 89475 - DNA, 201 bp, Homo sapiens
gcatgcagtggaagaggtgaagaacagcctgcagctctttgaggagtattttctgcaggataagatgttcatcaccgggaaccaaatctcactggctgacytggtggccgtggtggagatgatgcagcccatggcagccaactataatgtcttcctcaacagctccaagctagctgagtggcgtatgcgggtggagctgaa

SEQ ID NO: 89476 - DNA, 201 bp, Homo sapiens; identical to SEQ ID NO: 89466

SEQ ID NO: 89477 - DNA, 201 bp, Homo sapiens; identical to SEQ ID NO: 89467

SEQ ID NO: 89478 - DNA, 201 bp, Homo sapiens
ttaagtgaaagttgctgatcccaaagataacaggggaggaagtttcagctgagaagatggagcatgcagtggaagaggtgaagaacagcctgcagctcttygaggagtattttctgcaggataagatgttcatcaccgggaaccaaatctcactggctgacctggtggccgtggtggagatgatgcagcccatggcagcca

SEQ ID NO: 89479 - DNA, 201 bp, Homo sapiens; identical to SEQ ID NO: 89469

SEQ ID NO: 89480 - DNA, 201 bp, Homo sapiens
gcaaaggatacattgacatcaaccccctcaggaagctgcccagcctcaaagatgggaaatttatcttaagtgaaagttgctgatcccaaagataacagggraggaagtttcagctgagaagatggagcatgcagtggaagaggtgaagaacagcctgcagctctttgaggagtattttctgcaggataagatgttcatcac

SEQ ID NO: 89481 - DNA, 201 bp, Homo sapiens
aaagttgctgatcccaaagataacaggggaggaagtttcagctgagaagatggagcatgcagtggaagaggtgaagaacagcctgcagctctttgaggagwattttctgcaggataagatgttcatcaccgggaaccaaatctcactggctgacctggtggccgtggtggagatgatgcagcccatggcagccaactataa

SEQ ID NO: 89482 - DNA, 201 bp, Homo sapiens; identical to SEQ ID NO: 89473

SEQ ID NO: 89483 - DNA, 201 bp, Homo sapiens; identical to SEQ ID NO: 89474

SEQ ID NO: 89484 - DNA, 201 bp, Homo sapiens; identical to SEQ ID NO: 89475

SEQ ID NO: 89485 - DNA, 144 bp, Homo sapiens
gatcccggtgccagggaccctgcccagttccaggcgtcgccctracccagaaacgactgggcgccgccgtcctggaaaggccccagcgcacggacatctgaggagctgtttccgttcctctgcccgccatgccgttcctggagc

SEQ ID NO: 89486 - DNA, 144 bp, Homo sapiens; identical to SEQ ID NO: 89485

SEQ ID NO: 89487 - DNA, 201 bp, Homo sapiens
ctgcttcttccagagagatctcttggcagagtgagggcctggagataaccagctttggattatcccgcatgcaacattcctgtgatcacataatcctcttyttcatcctcatatgaaataaatgaagagagcttcctcattcaaacatgacttcttaccttctattatctctcctgggcatctggggccaccatgggcagc

SEQ ID NO: 89488 - DNA, 201 bp, Homo sapiens
ttttaggaatccctgattactttgatattgtgaagagccccatggatctttctaccattaagaggaagttagacactggacagtatcaggagccctggcartatgtcgatgatatttggcttatgttcaataatgcctggttatataaccggaaaacatcacgggtatacaaatactgctccaagctctctgaggtctttg

SEQ ID NO: 89489 - DNA, 201 bp, Homo sapiens
accagccaagtacttcagctacccagtcatctccggctccaggacagtcaaagaaaaagattttcaaaccagaagaactacgacaggcactgatgccaacwttggaggcactttaccgtcaggatccagaatcccttccctttcgtcaacctgtggaccctcagcttttaggaatccctgattactttgatattgtgaaga

SEQ ID NO: 89490 - DNA, 201 bp, Homo sapiens
ttctcaggccattgctgagaagcagccttcccaggaagtgaagatggaggccaaaatggaagtggatcaaccagaaccagcagatactcagccggaggatrtttcagagtctaaagtggaagactgtaaaatggaatctaccgaaacagaagagagaagcactgagttaaaaactgaaataaaagaggaggaagaccagcc

SEQ ID NO: 89491 - DNA, 201 bp, Homo sapiens
caacagcagcagcaacagggagcagggccaggaataggccctggaatggccaaccataaccagttccagcaaccccaaggagttggctacccaccacagcmgcagcagcggatgcagcatcacatgcaacagatgcaacaaggaaatatgggacagataggccagcttccccaggccttgggagcagaggcaggtgccagt

SEQ ID NO: 89492 - DNA, 201 bp, Homo sapiens
ttgtgtgtgtggttcaagtgtgcactgggaggaggctgaggcctgtgaagccaaacaatatgctcctgccttgcacctccaataggttttattattttttwtaaattaatgaacatatgtaatattaatagttattatttactggtgcagatggttgacatttttccctattttcctcactttatggaagagttaaaacat

SEQ ID NO: 89493 - DNA, 201 bp, Homo sapiens
tatataaatatatattaaaataccagttttttttctctgggtgcaaagatgttcattcttttaaaaaatgtttaaaaaaaaaaaaaaactgcctttcttcycctcaagtcaacttttgtgctccagaaaattttctattctgtaagtctgagcgtaaaacttcaagtattaaaataatttgtacatgtagagagaaaaatg

SEQ ID NO: 89494 - DNA, 201 bp, Homo sapiens
cctgcccggtgaactctcctataatgcctccagggtctcaggggagccacattcactgtccccagcttcctcaaccagctcttcatcagaattcaccctcrcctgtacctagtcgtacccccacccctcaccatactcccccaagcataggggctcagcagccaccagcaacaacaattccagcccctgttcctacacctc

SEQ ID NO: 89495 - DNA, 201 bp, Homo sapiens
agtatgccaactctaatccacaacccatccctgggcagcctggcatgccccaggggcagccagggctacagccacctaccatgccaggtcagcagggggtycactccaatccagccatgcagaacatgaatccaatgcaggcgggcgttcagagggctggcctgccccagcagcaaccacagcagcaactccagccaccca

SEQ ID NO: 89496 - DNA, 143 bp, Homo sapiens
accccccactcacacacacacacacacacacacacacacactttctataaaacttgaaaatagcaaaaaccctcaactgttgtaaatcatgcaattaaagktgattacttataaatatgaactttggatcactgtatagactg

SEQ ID NO: 89497 - DNA, 201 bp, Homo sapiens
gaatccctgattactttgatattgtgaagagccccatggatctttctaccattaagaggaagttagacactggacagtatcaggagccctggcagtatgtygatgatatttggcttatgttcaataatgcctggttatataaccggaaaacatcacgggtatacaaatactgctccaagctctctgaggtctttgaacaag

SEQ ID NO: 89498 - DNA, 201 bp, Homo sapiens
caaataacttatctccatttgctatggacaaaaaggcagttcctggtggaggaatgcccaacatgggtcaacagccagccccgcaggtccagcagccaggyctggtgactccagttgcccaagggatgggttctggagcacatacagctgatccagagaagcgcaagctcatccagcagcagcttgttctccttttgcatg

SEQ ID NO: 89499 - DNA, 201 bp, Homo sapiens
ccatggtgcaagcgccacggacctgggactcagcaccgataactcagacttgaattcaaacctctcacagagtacactagacatacactagagacaccttdtattttgggagcaaaaaaattattttctcttaacaagactttttgtactgaaaacaatttttttgaatctttcgtagcctaaaagacaattttccttgga

SEQ ID NO: 89500 - DNA, 201 bp, Homo sapiens
gtatcagcccactcaaaccaggcactgtgtctcaacaagccttacaaaaccttttgcggactctcaggtctcccagctctcccctgcagcagcaacaggtrcttagtatccttcacgccaacccccagctgttggctgcattcatcaagcagcgggctgccaagtatgccaactctaatccacaacccatccctgggcagc

SEQ ID NO: 89501 - DNA, 201 bp, Homo sapiens
gtgatggatgtgaaccacgagaagtatgacaacagcctcaagatcgtcagcaatgcctcctgcatcaccaactgcttagcgcccctggccaacgtcatccrcaactttgggcatcctgggctacacgagcaccaggtggtctcctctgacttcaacagcgacacccacacctactcttccaccttcaatgctggggctggc

SEQ ID NO: 89502 - DNA, 201 bp, Homo sapiens
gaaggctggagtcaatggatttggtcgtattgaacacctggtaaccaagcctgcttttaactctggtaaagtggatattgtcaccatcaatgaccccttcrttgacctcaacaacatggtctacatgttccagtatgattccacccatggcaaattctgtggcaccgtcaaggctgagaacaggaagcttgtcgccagtgg

SEQ ID NO: 89503 - DNA, 201 bp, Homo sapiens
tgaaggctggagtcaatggatttggtcgtattgaacacctggtaaccaagcctgcttttaactctggtaaagtggatattgtcaccatcaatgaccccttygttgacctcaacaacatggtctacatgttccagtatgattccacccatggcaaattctgtggcaccgtcaaggctgagaacaggaagcttgtcgccagtg

SEQ ID NO: 89504 - DNA, 109 bp, Homo sapiens
gacaccacrgtgaaggtgaaggctggagtcaatggatttggtcgtattgaacacctggtaaccaagcctgcttttaactctggtaaagtggatattgtcaccatcaatg

SEQ ID NO: 89505 - DNA, 201 bp, Homo sapiens
attctgtggcaccgtcaaggctgagaacaggaagcttgtcgccagtggaaatcccatcaccgtcttccagggcgagatccctccaaaatcaaatggggtgrtgctggtgctcagtacattgcggagtccacttgtatcttcaccaccatggagaaggctggggctgacttgcagggaggagccaaaagggtcatcatctct

SEQ ID NO: 89506 - DNA, 186 bp, Homo sapiens
tggccactttgtcaagctcgtttcctggtatgacaatgcatttggctacagcaacagggtggtgaacctcagggcccacatggccgccaaggagtaagacmccctgaccaccagccccagcgagagcaccagaggaagagagagaccctcactgctggggagtccctgccacactcagtcccccac

SEQ ID NO: 89507 - DNA, 201 bp, Homo sapiens
ttcaacagcgacacccacacctactcttccaccttcaatgctggggctggcactgccctcgatggccactttgtcaagctcgtttcctggtatgacaatgmatttggctacagcaacagggtggtgaacctcagggcccacatggccgccaaggagtaagaccccctgaccaccagccccagcgagagcaccagaggaaga

SEQ ID NO: 89508 - DNA, 201 bp, Homo sapiens
gggctttgacctcagcagctaccgtgactgcctcaccaagtggaacaaggccatcgaggtgatgtacgcccagtgcatggaggtaggcaaggagaagtgcytgcctgtgtactacgagcagctggtgctgcaccccaggcgctcactcaagctcatcctcgacttcctcggcatcgcctggagcgacgctgtcctccacca

SEQ ID NO: 89509 - DNA, 201 bp, Homo sapiens
ccaaccacgtggaataccgctatggcaaggccatgccgctcatcttcgtgggtggcgtgcctcgcagtggcaccacgttgatgcgcgccatgctggacgcbcaccccgaggtgcgctgcggcgaggagacccgcatcatcccgcgcgtgctggccatgcgccaggcctggtccaagtctggccgtgagaagctgcggctgg

SEQ ID NO: 89510 - DNA, 201 bp, Homo sapiens
agtgtgcacctgtacttgtggaagtgtactcttggggatatggggcttctgcagatgtggaaactccagccacctgaggaaatgttcagtctctcaattcytggtcatctgatttgttcctgtctgatggacacagtgaactacatgattgcttgtatttccattttgcttgggctgcagggaagctcaaagccaactggt

SEQ ID NO: 89511 - DNA, 201 bp, Homo sapiens
gctatggcaaggccatgccgctcatcttcgtgggtggcgtgcctcgcagtggcaccacgttgatgcgcgccatgctggacgcccaccccgaggtgcgctgyggcgaggagacccgcatcatcccgcgcgtgctggccatgcgccaggcctggtccaagtctggccgtgagaagctgcggctggatgaggcgggggtgacgg

SEQ ID NO: 89512 - DNA, 201 bp, Homo sapiens
accccaggcgctcactcaagctcatcctcgacttcctcggcatcgcctggagcgacgctgtcctccaccatgaagacctcattggcaagcccggtggtgtytccctgtccaagatcgagcggtccacggaccaggtcatcaagcctgttaacctggaagcgctctccaagtggactggccacatccctggggatgtggtgc

SEQ ID NO: 89513 - DNA, 201 bp, Homo sapiens
acgtggaataccgctatggcaaggccatgccgctcatcttcgtgggtggcgtgcctcgcagtggcaccacgttgatgcgcgccatgctggacgcccacccygaggtgcgctgcggcgaggagacccgcatcatcccgcgcgtgctggccatgcgccaggcctggtccaagtctggccgtgagaagctgcggctggatgagg

SEQ ID NO: 89514 - DNA, 201 bp, Homo sapiens
cagctcggctatgacccttatgcaaacccccccaactatggcaaccctgaccccttcgtcatcaacaacacacagcgggtgagtgtgcacctgtacttgtrgaagtgtactcttggggatatggggcttctgcagatgtggaaactccagccacctgaggaaatgttcagtctctcaattcctggtcatctgatttgttcc

SEQ ID NO: 89515 - DNA, 201 bp, Homo sapiens; identical to SEQ ID NO: 89508

SEQ ID NO: 89516 - DNA, 201 bp, Homo sapiens; identical to SEQ ID NO: 89509

SEQ ID NO: 89517 - DNA, 201 bp, Homo sapiens
atatgaggctttctttgattcctcctcagttctacctagtttcacagaggaaaaaaatactctttgaataaagtgaacagaggctcatttgtttgtgcctyactttactgaatgaatagggttttttttttctttccatactggattttgtcaggtagatttgtgatgagcaaaaagctggagaatataggtgcatgtaag

SEQ ID NO: 89518 - DNA, 201 bp, Homo sapiens
aaaggggactataaaacaccagccaatctgaaaggatattttcaggtgaaccagaacagcacctcctcccacttaggaagctcgtgatttccagatctccrcaaatgacttcattgccaagaagagaagaaaatgcatttaagtggaaatcggacctctaatccaagcatattgcttgctattaatcgccaaaacaggact

SEQ ID NO: 89519 - DNA, 201 bp, Homo sapiens; identical to SEQ ID NO: 89511

SEQ ID NO: 89520 - DNA, 201 bp, Homo sapiens; identical to SEQ ID NO: 89512

SEQ ID NO: 89521 - DNA, 201 bp, Homo sapiens; identical to SEQ ID NO: 89513

SEQ ID NO: 89522 - DNA, 201 bp, Homo sapiens; identical to SEQ ID NO: 89508

SEQ ID NO: 89523 - DNA, 201 bp, Homo sapiens; identical to SEQ ID NO: 89509

SEQ ID NO: 89524 - DNA, 201 bp, Homo sapiens
gcttttttgaaggtgtgaccctttttgttcatttcttcagcagttactttttattttttaaatgtttgacacacagtctctgataaatgatcattcaccartcaccgattactctccttgctctgttaagtgtgacactgtccctttgagaatctggcgacagctatgtatcccatcaccacacaccccaaaaaaaaaatt

SEQ ID NO: 89525 - DNA, 201 bp, Homo sapiens; identical to SEQ ID NO: 89511

SEQ ID NO: 89526 - DNA, 201 bp, Homo sapiens
ctgggcgtcgtggcgcatgcctgtagttgcagctacttgggaggctgaggcaggagaattgcttgaacccaggaggcagaggttgcagtgaaccaagatcrtgctagtacactccagcctgggcaacagagtgagactccatctcaaaaataaaataaataaaacaaaataaaataaatacaatttctgtttctagcccct

SEQ ID NO: 89527 - DNA, 201 bp, Homo sapiens; identical to SEQ ID NO: 89512

SEQ ID NO: 89528 - DNA, 201 bp, Homo sapiens; identical to SEQ ID NO: 89517

SEQ ID NO: 89529 - DNA, 201 bp, Homo sapiens; identical to SEQ ID NO: 89518

SEQ ID NO: 89530 - DNA, 201 bp, Homo sapiens
ctcctgagtagctgggcatgtgccaccacacctggctactttttaaatttttttttttctgtagagacgaggtctttctatgctgttcaggctgaacttcrtgggtttattggggatggctaatggatgacattggcggtggtccttgataccagataagccctcagtgtgaagcagctcttatttttccttgtcttgaga

SEQ ID NO: 89531 - DNA, 201 bp, Homo sapiens; identical to SEQ ID NO: 89513

SEQ ID NO: 89532 - DNA, 201 bp, Homo sapiens
ctaactcctgggctcaagcagtcctttcacctcagcctcctgagtagctggaccatgacacctacctaactttttattttttgtaaagaggggaatcactrtgttgcccaggctggtctcaaactcctgggctcaagcaatccttcctcagcctctcaaagagttgggtttacaggcgtgagccaccgcacctggctcctg

SEQ ID NO: 89533 - DNA, 201 bp, Homo sapiens
cccccaaggtgactcatgcagctgtgggtgcccggcatacagcatggtgactggaatggatgagcacccaataaacatttgttgcaggaatgcaggaggaygggcaggccagcaagcaggctgcctggtttttcccacatgggcttttctgggaaagaagagcttctatttttggaaagggctgctatgattgagaaaagt

SEQ ID NO: 89534 - DNA, 201 bp, Homo sapiens
gagtgcaaggccgcctgagcgcggcccccacccggcggcggccagggacccccgaggcccccctctgcctttgagcttctcctctgctccaacagacaccytccactctgaggtctcaccttcgcctttgctgaagtctccccgcagccctctccacccagaggtctccctataccgagacccaccatccttccatcctga

SEQ ID NO: 89535 - DNA, 201 bp, Homo sapiens
taccgaaacaccccgctcacgctgacagcctcctaggctccctgaggtacctttccacccagaccctccttccccaccccataagccctgagactcccgcmtttgacctgacgatcttcccccttcccgccttcaggttcctcctaggcgctcagaggccgctctggggggttgcctcgagtccccccacccctccccacc

SEQ ID NO: 89536 - DNA, 201 bp, Homo sapiens
cacattttttaaaaagactccttcatctctttaataataacggtaacgacaatgacaatgatgattacttatgagtgcggctagtgccagccactgtgttktcactgggcgagtaatgatctcattggatcttcacggtgggcgtgcggggctccagggacagcctgcgttcctgggctggctgggtgcagctctcttttc

SEQ ID NO: 89537 - DNA, 201 bp, Homo sapiens
cccccttcccgccttcaggttcctcctaggcgctcagaggccgctctggggggttgcctcgagtccccccacccctccccacccaccaccgctcccgcggsaagccagcccgtgcaacggaagccaggccaactgccccgcgtcttcagctgtttcgcatccaccgccaccccactgagagctgctcctttgggggaatgt

SEQ ID NO: 89538 - DNA, 201 bp, Homo sapiens
catgtacgccaaggtcacggagatctggcaggaggtcatgcagcggcgggacgacgacggcgcgctccacgccgcctgccaggtgcagccgtcggccacgytggacgccgcgcagccccgggtgaccggcgtcgtcctcttccggcagcttgcgccccgcgccaagctcgacgccttcttcgccctggagggcttcccgac

SEQ ID NO: 89539 - DNA, 201 bp, Homo sapiens
ccacccggcggcggccagggacccccgaggcccccctctgcctttgagcttctcctctgctccaacagacaccctccactctgaggtctcaccttcgcctytgctgaagtctccccgcagccctctccacccagaggtctccctataccgagacccaccatccttccatcctgaggaccgccccaaccctcggagcccccc

SEQ ID NO: 89540 - DNA, 201 bp, Homo sapiens
gaacgggaacgcgggccggcggctggcctgctgcgtggtgggcgtgtgcgggcccgggctctgggagcgccaggcgcgggagcactcagagcgcaagaagsggcggcgcgagagcgagtgcaaggccgcctgagcgcggcccccacccggcggcggccagggacccccgaggcccccctctgcctttgagcttctcctctg

SEQ ID NO: 89541 - DNA, 201 bp, Homo sapiens
ggcggagcccaactctgactcggcggagtggatccgagacatgtacgccaaggtcacggagatctggcaggaggtcatgcagcggcgggacgacgacggcrcgctccacgccgcctgccaggtgcagccgtcggccacgctggacgccgcgcagccccgggtgaccggcgtcgtcctcttccggcagcttgcgccccgcgc

SEQ ID NO: 89542 - DNA, 201 bp, Homo sapiens
tgtctgagcagtggaatgtgccaggaaagaaggagcaaccactgactgatgaacctttgccagtctcccttccaagagggatgccagagccttctagcatyctggccagaacaagccaaggagccaagacgagagggacacacggacaaacaacagacagaagacgtactggccgctggactccgctgcctcccccatctc

SEQ ID NO: 89543 - DNA, 103 bp, Homo sapiens
agtctttatttattttaactatttcttcaacattccacatttgatgatgatacctctttcttccctgagtgtatatgttctaatacaaatctttttgtttwtt

SEQ ID NO: 89544 - DNA, 201 bp, Homo sapiens
ccccattttttcccctggtcctttcccctgtggccacagggaagtgtggcctgaataccccaccccggctcctctgcacccagagctgggggccacctcakaagtgtcatctctctctgagcacgcattcccctgcagcagtcgaggactgagcagattgagtgatgctggggcagagaggcctgggaggaaaggtgttca

SEQ ID NO: 89545 - DNA, 201 bp, Homo sapiens
gcatgaaatgtcaccagcaacagttacagagaatgaaggagaatgcaaagcatcggaaccagtacaaatttatcttactggaaaacctgacttcccgctaygaggtgccttgtgtccttgacctcaagatgggcacacgacaacatggtgatgatgcttcagaggagaaggcagccaaccagatccgaaaatgtcagcaga

SEQ ID NO: 89546 - DNA, 201 bp, Homo sapiens
gaggacaccgtggtgcatgagggccaggatgctggctatatcttcgggctccagagcctgatagacattgtcacagagataagtgaggagagtggggagtragcttgctagctgctccagtacttgagagcgactctgtgtcccaggcacagctgtgctgcgtcagggaggaagccagtatggccaggtggtggctcctgc

SEQ ID NO: 89547 - DNA, 201 bp, Homo sapiens
gcctgaataccccaccccggctcctctgcacccagagctgggggccacctcagaagtgtcatctctctctgagcacgcattcccctgcagcagtcgaggamtgagcagattgagtgatgctggggcagagaggcctgggaggaaaggtgttcagccagtcgtttgtaaggcgctcgtcggcacctgctgaaacgcccccac

SEQ ID NO: 89548 - DNA, 176 bp, Homo sapiens
tggccgcagccattttggtgcgagagaaacaataggacggaaacgccgaggaacccggctgaggcggcagagcatyctggccagaacaagccaaggagccaagacgagagggacacacggacaaacaacagacagaagacgtactggccgctggactccgctgcctcccccatctc

SEQ ID NO: 89549 - DNA, 201 bp, Homo sapiens; identical to SEQ ID NO: 89544

SEQ ID NO: 89550 - DNA, 201 bp, Homo sapiens; identical to SEQ ID NO: 89547

SEQ ID NO: 89551 - DNA, 201 bp, Homo sapiens
agagggatgccagagccttctgtaagctcctgagatgtcactggtatctaggcaacagggatgagcctgaacctccctgaggccagcttactgagagcatyctggccagaacaagccaaggagccaagacgagagggacacacggacaaacaacagacagaagacgtactggccgctggactccgctgcctcccccatctc

SEQ ID NO: 89552 - DNA, 103 bp, Homo sapiens; identical to SEQ ID NO: 89543

SEQ ID NO: 89553 - DNA, 201 bp, Homo sapiens; identical to SEQ ID NO: 89545

SEQ ID NO: 89554 - DNA, 201 bp, Homo sapiens; identical to SEQ ID NO: 89546

SEQ ID NO: 89555 - DNA, 201 bp, Homo sapiens
gggatgccagagccttctgtaagctcctgagatgtcactggtatctaggcaacagggatgagcctgaacctccctgaggccagcttactgagcagagcatyctggccagaacaagccaaggagccaagacgagagggacacacggacaaacaacagacagaagacgtactggccgctggactccgctgcctcccccatctc

SEQ ID NO: 89556 - DNA, 103 bp, Homo sapiens; identical to SEQ ID NO: 89543

SEQ ID NO: 89557 - DNA, 201 bp, Homo sapiens; identical to SEQ ID NO: 89545

SEQ ID NO: 89558 - DNA, 201 bp, Homo sapiens; identical to SEQ ID NO: 89546

SEQ ID NO: 89559 - DNA, 109 bp, Homo sapiens
cagagcatyctggccagaacaagccaaggagccaagacgagagggacacacggacaaacaacagacagaagacgtactggccgctggactccgctgcctcccccatctc

SEQ ID NO: 89560 - DNA, 103 bp, Homo sapiens; identical to SEQ ID NO: 89543

SEQ ID NO: 89561 - DNA, 201 bp, Homo sapiens; identical to SEQ ID NO: 89545

SEQ ID NO: 89562 - DNA, 201 bp, Homo sapiens; identical to SEQ ID NO: 89546

SEQ ID NO: 89563 - DNA, 168 bp, Homo sapiens
attttggtgcgagagaaacaataggacggaaacgccgaggaacccggctgaggcggcagcagagcatyctggccagaacaagccaaggagccaagacgagagggacacacggacaaacaacagacagaagacgtactggccgctggactccgctgcctcccccatctc

SEQ ID NO: 89564 - DNA, 103 bp, Homo sapiens; identical to SEQ ID NO: 89543

SEQ ID NO: 89565 - DNA, 201 bp, Homo sapiens; identical to SEQ ID NO: 89545

SEQ ID NO: 89566 - DNA, 201 bp, Homo sapiens; identical to SEQ ID NO: 89546

SEQ ID NO: 89567 - DNA, 201 bp, Homo sapiens
ggagtggagcaccagcaactgttagacctcgcccagaagcacctcggtggcatcccatggacatatgcagaggacgctgtgcccactcttactccatgccrcttcactggcagtgagatccgccaccgtgatgatgctctaccttttgcccacgtggccattgcagtagagggtcctggctgggccagcccggacaatgtg

SEQ ID NO: 89568 - DNA, 201 bp, Homo sapiens
agtacatctatgaccagtgcccagcagtggctggatatggccccattgagcagctcccagactacaaccggatccgtagcggcatgttctggctgcgcttytaggcgggaagcctatgtaagcaagagggcagggccggggtttgtggtcccccccccaccacaaacacagcacttcggctcctctaacctgtgccacagg

SEQ ID NO: 89569 - DNA, 176 bp, Homo sapiens
cccagactacaaccggatccgtagcggcatgttctggctgcgcttctaggcgggaagcctatgtaagcaagagggcagggccggggtttgtggtccccccyccaccacaaacacagcacttcggctcctctaacctgtgccacaggtgaccaccaataaaatcctctgctgagaag

SEQ ID NO: 89570 - DNA, 174 bp, Homo sapiens
cagactacaaccggatccgtagcggcatgttctggctgcgcttctaggcgggaagcctatgtaagcaagagggcagggccggggtttgtggtccccccccmaccacaaacacagcacttcggctcctctaacctgtgccacaggtgaccaccaataaaatcctctgctgagaag

SEQ ID NO: 89571 - DNA, 201 bp, Homo sapiens
accagtgcccagcagtggctggatatggccccattgagcagctcccagactacaaccggatccgtagcggcatgttctggctgcgcttctaggcgggaagyctatgtaagcaagagggcagggccggggtttgtggtcccccccccaccacaaacacagcacttcggctcctctaacctgtgccacaggtgaccaccaata

SEQ ID NO: 89572 - DNA, 201 bp, Homo sapiens
tgtcatctgaggtgagaccaccgaggccttttctctctgtgtacagaggggagttaggagttgctggactggatgcattacgaggactggggacagggtaragggacatccagggatcagggcatgagtgggggcaaccccccggcctctgccctggcatggtctccgcatgggctgaggtgtagctgattggctgccaca

SEQ ID NO: 89573 - DNA, 201 bp, Homo sapiens
cagatgccacctgtccctgagagaagttagcgtccctggccctggccggtggtctctcatccttgtgtgctgctctgctaagagatgtccaaggcggagcyggggcaagatccttccagactcatctgtcagagccccaagccctttagacccagagcccaaggaccatgcctttgggacattaggactgcagcctttgct

SEQ ID NO: 89574 - DNA, 201 bp, Homo sapiens
tgaacacgcaccgggacaggcctcagaacgtggacatctcaagacctccagaggaagcccttgtcacggtgcctgctcaccagtgaccatgttcatccacygtgaccactaggcaggcactgctctctgcagagggggtcattccaggccctccagtgtgtgtgatagtcaccatgccatgcagggatattcttgaagcca

SEQ ID NO: 89575 - DNA, 201 bp, Homo sapiens
gagctggtggccaggggtgccccttcaggcctgctctcacagtgaaaccacttcaagacagggcaggaagttaccttcctggtgcacacaccgaagtgctygagggagaggctgccgccccctctccccttccctggctgtggacactggcagccaatggggaggcggcctctcccctgttgctgcccgtgtccacacagg

SEQ ID NO: 89576 - DNA, 201 bp, Homo sapiens
agatgccacctgtccctgagagaagttagcgtccctggccctggccggtggtctctcatccttgtgtgctgctctgctaagagatgtccaaggcggagccrgggcaagatccttccagactcatctgtcagagccccaagccctttagacccagagcccaaggaccatgcctttgggacattaggactgcagcctttgctt

SEQ ID NO: 89577 - DNA, 201 bp, Homo sapiens
ttgcaatcccatgacaactggatttaaaagtacagtacagatagtcgtactgatcatgagagactggctgatactcaaagttgcagttacttagctgcatkagaataatactattataagttaggttgacaaatgatgttgattatgtaaggatatacttagctacattttcagtcagtatgaacttcctgatacaaatgt

SEQ ID NO: 89578 - DNA, 201 bp, Homo sapiens
catttaacctgccgtatcccttgatactgagacctcagagaggggttgatctcataatctcctttgacttttctgcaaggccaagtgactctagtcctccrttcaaggaacttctacttgcagaaaagtgggctaaaatgaacaagctcccctttccaaagattgatccttatgtgtttgatcgggaagggctgaaggagt

SEQ ID NO: 89579 - DNA, 201 bp, Homo sapiens
aaggagtgctatgtctttaaacccaagaatcctgatatggagaaagattgcccaaccatcatccactttgttctggccaacatcaacttcagaaagtacarggctccaggtgttccaagggaaactgaggaagagaaagaaatcgctgactttgatatttttgatgacccagaatcaccattttcaaccttcaattttcaa

SEQ ID NO: 89580 - DNA, 201 bp, Homo sapiens
tcccatgtaacgtggggccctacacgcaaggagccggcgccgggtccacggtggcgcagctggcttcttggaggcattgtggctgctggcttcttcaaccrgcccacctttctggcctttgctgtggtccccctctacctctggggcactcgtggagccacaaaccctggtttgaagtctctgacccgggaggccctggtg

SEQ ID NO: 89581 - DNA, 201 bp, Homo sapiens
cgcgcggccctgggagttttaccccagcagctcctgccgctcggtgctcttccccctgctgatctctggttccaccttctggctgctcaggctctgggagragctggggccgtggcctggcctggtgagcggctatgcgctgctggtggggcctcgactcctcctcactgccctttcctttgctctggacggggccgtgta

SEQ ID NO: 89582 - DNA, 201 bp, Homo sapiens
gcgttgcccggcccgagggacggcggcgcccccaggaccctccccagcgcggccccagctcgctccgggaccgcggggccaggccgggcgggagcgcgggsacgtacacggcggccccgcccgcgcgctcctcctccctcccggcccgccctgcgccggcggcggcggccccagtctccgcgctgctgaggcgcgcccggc

SEQ ID NO: 89583 - DNA, 201 bp, Homo sapiens
gcggccccgcccgcgcgctcctcctccctcccggcccgccctgcgccggcggcggcggccccagtctccgcgctgctgaggcgcgcccggccgctcccacrgcctcccctccgccctgcggtcccgccgcctccggggcctcctgggaccctggccctcgccgggcaggacgccgccagcgctgaaggcgcagcccggagg

SEQ ID NO: 89584 - DNA, 201 bp, Homo sapiens
tagcatctgtagcagctgggacatcattccaggttttgggcccggtgtgttggcaacaactggatctgaagatggcagtcagggtgctttggggtggtctyagcctgctccgagtgctgtggtgtctccttccgcagacgggctatgtgcacccagatgagttcttccagtcccctgaggtgatggcagaggacatcctgg

SEQ ID NO: 89585 - DNA, 201 bp, Homo sapiens
ctgagtcccctgtcatgagtgactccattgcgaggcgtttcgggccacgaagcaggaccgggggccgcactccgggtccccgccctgccctcgccgacctyccgcgcgtggaagggggacggcggcggcggagctccccgccacggagaaccccgaaatggtcatttcgaacgagaggagtgtggcctggggtgtctggtt

SEQ ID NO: 89586 - DNA, 201 bp, Homo sapiens
gcccccaggaccctccccagcgcggccccagctcgctccgggaccgcggggccaggccgggcgggagcgcggggacgtacacggcggccccgcccgcgcgytcctcctccctcccggcccgccctgcgccggcggcggcggccccagtctccgcgctgctgaggcgcgcccggccgctcccacggcctcccctccgccctg

SEQ ID NO: 89587 - DNA, 201 bp, Homo sapiens
tgaggactgggccctgtgccaaaccctgaaaagcttcaccagacaaccagcctgccaagtggctggtgggccatggctctgccgcctctttgtggtaaccrctggcaccaccaggcgtgccgtggagaagtgcagcttccccttcaagaatgaaacacttttatttccccatctgaccctggaggatccaccagccctgtc

SEQ ID NO: 89588 - DNA, 201 bp, Homo sapiens
cggatcgctggaacgccctggccctgctgtctggttcctacgtcaccctggtcttctacacaaggaccttctccaacaccattgagggactcctcttcacrtggctgctggtgctggtatcctcccatgtaacgtggggccctacacgcaaggagccggcgccgggtccacggtggcgcagctggcttcttggaggcattg

SEQ ID NO: 89589 - DNA, 201 bp, Homo sapiens
tcatgcctctggccctgctatctgcctttagccaccaggaggctcggttcctgattcccctcctggtccccctggtcctgctttgtagtccacagacgcarcctgtgccttggaagggcactgtggtcctcttcaacgccctcggtgccctcctcttcggctgcctgcatcaggggggcctggtgcctggcctggagtacc

SEQ ID NO: 89590 - DNA, 201 bp, Homo sapiens
tggtatcctcccatgtaacgtggggccctacacgcaaggagccggcgccgggtccacggtggcgcagctggcttcttggaggcattgtggctgctggcttsttcaaccggcccacctttctggcctttgctgtggtccccctctacctctggggcactcgtggagccacaaaccctggtttgaagtctctgacccgggagg

SEQ ID NO: 89591 - DNA, 201 bp, Homo sapiens
ctcttccccctgctgatctctggttccaccttctggctgctcaggctctgggaggagctggggccgtggcctggcctggtgagcggctatgcgctgctggyggggcctcgactcctcctcactgccctttcctttgctctggacggggccgtgtaccacctggccccgccgatgggggcggatcgctggaacgccctggcc

SEQ ID NO: 89592 - DNA, 201 bp, Homo sapiens
acacaaggaccttctccaacaccattgagggactcctcttcacgtggctgctggtgctggtatcctcccatgtaacgtggggccctacacgcaaggagcckgcgccgggtccacggtggcgcagctggcttcttggaggcattgtggctgctggcttcttcaaccggcccacctttctggcctttgctgtggtccccctct

SEQ ID NO: 89593 - DNA, 201 bp, Homo sapiens
ctacacgcaaggagccggcgccgggtccacggtggcgcagctggcttcttggaggcattgtggctgctggcttcttcaaccggcccacctttctggccttygctgtggtccccctctacctctggggcactcgtggagccacaaaccctggtttgaagtctctgacccgggaggccctggtgctgctccctggggcgaccc

SEQ ID NO: 89594 - DNA, 201 bp, Homo sapiens; identical to SEQ ID NO: 89587

SEQ ID NO: 89595 - DNA, 201 bp, Homo sapiens; identical to SEQ ID NO: 89588

SEQ ID NO: 89596 - DNA, 201 bp, Homo sapiens; identical to SEQ ID NO: 89589

SEQ ID NO: 89597 - DNA, 201 bp, Homo sapiens; identical to SEQ ID NO: 89590

SEQ ID NO: 89598 - DNA, 201 bp, Homo sapiens; identical to SEQ ID NO: 89591

SEQ ID NO: 89599 - DNA, 201 bp, Homo sapiens; identical to SEQ ID NO: 89592

SEQ ID NO: 89600 - DNA, 201 bp, Homo sapiens; identical to SEQ ID NO: 89593

SEQ ID NO: 89601 - DNA, 201 bp, Homo sapiens
ggctgtcccgtagccgggatggactgctagttgctaagctcgacctaaacctctgccagcaggtgaatgatgtctggaacttcaagatgacgggcaggtaygagatgtacgcacgggagctcgccgaagctgtcaagtccaactacagccccaccatcgtgaaagagtagccggcttcagtgcctgccttgggctgtttct

SEQ ID NO: 89602 - DNA, 201 bp, Homo sapiens
agctcgacctaaacctctgccagcaggtgaatgatgtctggaacttcaagatgacgggcaggtatgagatgtacgcacgggagctcgccgaagctgtcaartccaactacagccccaccatcgtgaaagagtagccggcttcagtgcctgccttgggctgtttctgagggtgaacagccacagcagccctgtggacaccat

SEQ ID NO: 89603 - DNA, 201 bp, Homo sapiens
tttgaactgcagggatatgcctttgaagcagcggaggagcagctgagacgaccccgcattgtgcacgtggggctggttcagaacagaatccccctccccgmaaatgcccctgtggcagaacaggtctctgcccttcatagacgcataaaggctatcgtagaggtggctgcaatgtgtggagtcaacatcatctgtttccag

SEQ ID NO: 89604 - DNA, 201 bp, Homo sapiens
caccaggactttggctacttttatggctcgagctatgtggcagcccctgacagcagccggactcctgggctgtcccgtagccgggatggactgctagttgmtaagctcgacctaaacctctgccagcaggtgaatgatgtctggaacttcaagatgacgggcaggtatgagatgtacgcacgggagctcgccgaagctgtc

SEQ ID NO: 89605 - DNA, 201 bp, Homo sapiens
tcttcaacccctcggccacgataggagcactcaggtcactcagttgcgagtccctgtggcccatcgaggccagaaacgcagccattgccaatcactgcttyacctgcgccatcaatcgagtgggcaccgagcacttcccgaacgagtttacctcgggagatggaaagaaagctcaccaggactttggctacttttatggct

SEQ ID NO: 89606 - DNA, 144 bp, Homo sapiens
ccactgcgggcaaagggcaggcagttcgtgcgcggacacaagcwctggcggaccgtggccatggcgggcgctgagtggaagtcgctggaggaatgcttggagaagcacctgccgctccccgacttgcaggaagtgaagcgcgtt

SEQ ID NO: 89607 - DNA, 201 bp, Homo sapiens
ggctgtcccgtagccgggatggactgctagttgctaagctcgacctaaacctctgccagcaggtgaatgatgtctggaacttcaagatgacgggcaggtaygagatgtacgcacgggagctcgccgaagctgtcaagtccaactacagccccaccatcgtgaaagagtagccggcttcagtgcctgccttggggtgaggaa

SEQ ID NO: 89608 - DNA, 201 bp, Homo sapiens
agctcgacctaaacctctgccagcaggtgaatgatgtctggaacttcaagatgacgggcaggtatgagatgtacgcacgggagctcgccgaagctgtcaartccaactacagccccaccatcgtgaaagagtagccggcttcagtgcctgccttggggtgaggaagacacctctgccccagtggattagcaagtgtggcag

SEQ ID NO: 89609 - DNA, 201 bp, Homo sapiens
tgattagtcagaaggcctaaagaacagagctaagggtttccctgaggaagaaattctgcctgaggacagcagcccagtgcttggcgagagttcctgacagkctgcccttctgatagcctgcctcacagagtttagacatgactagccagctcctacaatcactgaagtcaattccttgcaataaatctcaatatatcccct

SEQ ID NO: 89610 - DNA, 201 bp, Homo sapiens; identical to SEQ ID NO: 89603

SEQ ID NO: 89611 - DNA, 201 bp, Homo sapiens; identical to SEQ ID NO: 89604

SEQ ID NO: 89612 - DNA, 201 bp, Homo sapiens
gggtattggaaatgtttggggactaggtagaggtgaatgtactaaatgccactgaatttgtatacttcagaatgtttgttatgtaaattttacctcaactaaaaaaaaaaatgcccaggtactgcttgtgcaggtggatttgaggttaggcagatgatgctgtccatcccgtacaccagtgggaagagggtgagggctgat

SEQ ID NO: 89613 - DNA, 201 bp, Homo sapiens
gggctgagatcatcttcaacccctcggccacgataggagcactcagcgagtccctgtggcccatcgaggccagaaacgcagccattgccaatcactgcttyacctgcgccatcaatcgagtgggcaccgagcacttcccgaacgagtttacctcgggagatggaaagaaagctcaccaggactttggctacttttatggct

SEQ ID NO: 89614 - DNA, 144 bp, Homo sapiens; identical to SEQ ID NO: 89606

SEQ ID NO: 89615 - DNA, 201 bp, Homo sapiens
tatggcgagaagtttgttgcagactataagaaatcagctgaacaaatggagcagaagtgcacacaggatctgtcgttggtgaccaactgcatggagcatgygctgattgcctgccacccccgtactcgctactcagctggctgggatgccaagcttctctacctccccatgagctacatgcccaccttcctggtggatgcc

SEQ ID NO: 89616 - DNA, 201 bp, Homo sapiens
acatgcccaccttcctggtggatgccattatgtactgggtctctccaagcccggccaaggctctatgaagctaaggttggatgcatggttgcatggatttrgggtgtgctatgaggggtggtgtatccttgggagagatataaagtggagggagggagccgtccggtcagtagggcaccaatcccacctccttcattacct

SEQ ID NO: 89617 - DNA, 201 bp, Homo sapiens
ttcagaggagtgattgattctggggtgcggagcaggatgaggaaactcaggctcagagagggatttccacctaatgtgcctggaaaccatgggtagctacycaataaggcctttctatgttcagaaggtcatggaccaggagtgttggtatcggagctttgtagagacagttttgacccctgtacttagagcagaggggtg

SEQ ID NO: 89618 - DNA, 201 bp, Homo sapiens
tacgcagctgagaaacagggaccaaatagtgctcctgggtgcattgtcaccgtgggtggccactcaagggtccaagcctctagggccatccttgggctaamaactggggtgggtgtgagcaggtggaaggagcctcagcccatgccattacctcctgcttccttatcaggctgtgtgttaattctgggccagtctacaccc

SEQ ID NO: 89619 - DNA, 201 bp, Homo sapiens
ggcttcgggaaactgctggccagacagctggatgcacgaggcttgcgggtgctggctgcatgtctgacggagaaaggagccgagcagctgaggggccagasttcagacaggctggagacggtgaccctggatgttaccaagacagagagcgttgctgcagccgcccagtgggtgaaggagtgcgtgagagacaaaggactc

SEQ ID NO: 89620 - DNA, 201 bp, Homo sapiens
ttagaggtgaagagcaagatctagccaagctccaggatttcaaatccttcctgcttaaggactcagaaacaagtcagcgtctggccaacctcaggcaacgkgtggagcagtttgccagggccttccccatgcctggttttgatgagcattgaaggcacctgggaaatgaggcccacagactcaaagttactctccttcccc

SEQ ID NO: 89621 - DNA, 201 bp, Homo sapiens
cttcgaggggccaggtcagggctcatcttctaccggaaaggggtgaaggctgtggaccccaagactggccgggagatccctttgccgtgttcccatccctkcaggggggcccccacaatcatgccattgctgcagtagctgtggccctaaagcaggcctgcacccccatgttccgggagtactccctgcaggttctgaaga

SEQ ID NO: 89622 - DNA, 201 bp, Homo sapiens
gcttagaggtgaagagcaagactgccaagctccaggatttcaaatccttcctgcttaaggactcagaaacaagtcagcgtctggccaacctcaggcaacgkgtggagcagtttgccagggccttccccatgcctggttttgatgagcattgaaggcacctgggaaatgaggcccacagactcaaagttactctccttcccc

SEQ ID NO: 89623 - DNA, 201 bp, Homo sapiens
tcttctaccggaaaggggtgaaggctgtggaccccaagactggccgggagatcccttacacatttgaggaccgaatcaactttgccgtgttcccatccctkcaggggggcccccacaatcatgccattgctgcagtagctgtggccctaaagcaggcctgcacccccatgttccgggagtactccctgcaggttctgaaga

SEQ ID NO: 89624 - DNA, 201 bp, Homo sapiens; identical to SEQ ID NO: 89622

SEQ ID NO: 89625 - DNA, 201 bp, Homo sapiens; identical to SEQ ID NO: 89623

SEQ ID NO: 89626 - DNA, 201 bp, Homo sapiens; identical to SEQ ID NO: 89622

SEQ ID NO: 89627 - DNA, 201 bp, Homo sapiens; identical to SEQ ID NO: 89623

SEQ ID NO: 89628 - DNA, 201 bp, Homo sapiens
aacctgctggccaaacagctggttgatcggggcatgcaggtgctggctgcttgcttcactgaggagggatcccagaaacttcagcgggatacctcctatcrgctgcagaccaccctactggatgtcaccaagagcgaaagcatcaaggcggcggcccagtgggtgagggacaaagtgggcgaacaaggcctctgggccctg

SEQ ID NO: 89629 - DNA, 201 bp, Homo sapiens
ctgccctcctacccgggcctcgaagggtgtggcacaggctacgtgttgagcgtggcctacgtgagccaacaagaagcaggggcctctgagtgccaagcgaygtggcgggctccacgttagcccaggctctgagagccagcccaggggcggcgctgctcagcttgggctggtccagggcctgcccaggctggggcacctttg

SEQ ID NO: 89630 - DNA, 201 bp, Homo sapiens
cgtggcctacgtgagccaacaagaagcaggggcctctgagtgccaagcgacgtggcgggctccacgttagcccaggctctgagagccagcccaggggcggygctgctcagcttgggctggtccagggcctgcccaggctggggcacctttgcctcctgaggcgcagcgcactcctcccctgcccaagcctactgcctcccg

SEQ ID NO: 89631 - DNA, 201 bp, Homo sapiens; identical to SEQ ID NO: 89629

SEQ ID NO: 89632 - DNA, 201 bp, Homo sapiens; identical to SEQ ID NO: 89630

SEQ ID NO: 89633 - DNA, 201 bp, Homo sapiens
ccctgacagcgcggaatctgggtgcagttcctgcagtaccccactctacgatcagggtggcccggtggaaatcctgccctttctgtacctgggcagtgcgyatcacgcttcccgcaaggacatgctggatgccttgggcataactgccttgatcaacgtctcagccaattgtcccaaccattttgagggtcactaccagta

SEQ ID NO: 89634 - DNA, 201 bp, Homo sapiens
ctgaaataatatatttcttcttctaagaagacattttgttacataaggatgacttttttatacaatggaataaattatggcatttctattgaaatttcaaygcttttatttctttggcaaccacacccaatccctctcccactagtgaactagggaagaatttcgacaagggcctgcagaatgtgttgagatctgatccca

SEQ ID NO: 89635 - DNA, 201 bp, Homo sapiens
tggtcccatgaaatggctgggttgcaagggaggaagacaagtgagtatcatgaaacaccggacgctacagctgaactcttagtattggatcagtgtgtctrcccatgcccattttagcggctctgtaacctaccatgtcacccaggatgccaaggtgtccccagagccaaagctaggaggaaatagccacttgtctggatt

SEQ ID NO: 89636 - DNA, 201 bp, Homo sapiens
cactctacgatcagggtggcccggtggaaatcctgccctttctgtacctgggcagtgcgtatcacgcttcccgcaaggacatgctggatgccttgggcatmactgccttgatcaacgtctcagccaattgtcccaaccattttgagggtcactaccagtacaagagcatccctgtggaggacaaccacaaggcagacatca

SEQ ID NO: 89637 - DNA, 201 bp, Homo sapiens
acatatacatatgagaatataccttatttatttttgtgtaggtgtctgccttcacaaatgtcattgtctactcctagaagaaccaaatacctcaatttttktttttgagtactgtactatcctgtaaatatatcttaagcaggtttgttttcagcactgatggaaaataccagtgttgggtttttttttagttgccaacag

SEQ ID NO: 89638 - DNA, 201 bp, Homo sapiens
aaatgtcattgtctactcctagaagaaccaaatacctcaatttttgtttttgagtactgtactatcctgtaaatatatcttaagcaggtttgttttcagcmctgatggaaaataccagtgttgggtttttttttagttgccaacagttgtatgtttgctgattatttatgacctgaaataatatatttcttcttctaagaa

SEQ ID NO: 89639 - DNA, 201 bp, Homo sapiens; identical to SEQ ID NO: 89633

SEQ ID NO: 89640 - DNA, 201 bp, Homo sapiens; identical to SEQ ID NO: 89634

SEQ ID NO: 89641 - DNA, 201 bp, Homo sapiens; identical to SEQ ID NO: 89635

SEQ ID NO: 89642 - DNA, 201 bp, Homo sapiens; identical to SEQ ID NO: 89636

SEQ ID NO: 89643 - DNA, 201 bp, Homo sapiens; identical to SEQ ID NO: 89637

SEQ ID NO: 89644 - DNA, 201 bp, Homo sapiens; identical to SEQ ID NO: 89638

SEQ ID NO: 89645 - DNA, 167 bp, Homo sapiens
cacacgctggtcacgcggtcagctattgacacttcctggtgggatccgagtgaggcgacggggtagrggttggcgctcaggcggcgaccatggcgtatcacggcctcactgtgcctctcattgtgatgagcgtgttctggggcttcgtcggcttcttggtgccttgg

SEQ ID NO: 89646 - DNA, 117 bp, Homo sapiens
cacacgctggtcacgckgtcagctattgacacttcctggtgggatccgagtgaggcgacggggtaggggttggcgctcaggcggcgaccatggcgtatcacggcctcactgtgcctc

SEQ ID NO: 89647 - DNA, 114 bp, Homo sapiens
cacacgctggtcasgcggtcagctattgacacttcctggtgggatccgagtgaggcgacggggtaggggttggcgctcaggcggcgaccatggcgtatcacggcctcactgtgc

SEQ ID NO: 89648 - DNA, 201 bp, Homo sapiens
acgcggtcagctattgacacttcctggtgggatccgagtgaggcgacggggtaggggttggcgctcaggcggcgaccatggcgtatcacggcctcactgtrcctctcattgtgatgagcgtgttctggggcttcgtcggcttcttggtgccttggttcatccctaagggtcctaaccggggagttatcattaccatgttgg

SEQ ID NO: 89649 - DNA, 201 bp, Homo sapiens
gccttattctacaatgcagcgtgttttcctttgccttttttgcactttggtgaattacgtgcctccataacctgaactgtgccgactccacaaaacgattrtgtactcttctgagatagaagatgctgttcttctgagagatacgttactctctccttggaatctgtggatttgaagatggctcctgccttctcacgtggg

SEQ ID NO: 89650 - DNA, 201 bp, Homo sapiens
gaatgccttattctacaatgcagcgtgttttcctttgccttttttgcactttggtgaattacgtgcctccataacctgaactgtgccgactccacaaaackattatgtactcttctgagatagaagatgctgttcttctgagagatacgttactctctccttggaatctgtggatttgaagatggctcctgccttctcacg

SEQ ID NO: 89651 - DNA, 167 bp, Homo sapiens; identical to SEQ ID NO: 89645

SEQ ID NO: 89652 - DNA, 117 bp, Homo sapiens; identical to SEQ ID NO: 89646

SEQ ID NO: 89653 - DNA, 192 bp, Homo sapiens
acgttcagagggaagagccatctcaacagaatcgcaccaaactatactttcaggatgaatttcttctttctgccatcttttggaataaatattttcctcchttctatggaaatctgggctcggtgtttgtaaagttcatttttataagcttttctatcgctacataatgcctttttaaaaaatgattttgta

SEQ ID NO: 89654 - DNA, 185 bp, Homo sapiens
gagggaagagccatctcaacagaatcgcaccaaactatactttcaggatgaatttcttctttctgccatcttttggaataaatattttcctcctttctatsgaaatctgggctcggtgtttgtaaagttcatttttataagcttttctatcgctacataatgcctttttaaaaaatgattttgta

SEQ ID NO: 89655 - DNA, 201 bp, Homo sapiens
cgttactctctccttggaatctgtggatttgaagatggctcctgccttctcacgtgggaatcagtgaagtgtttagaaactgctgcaagacaaacaagackccagtggggtggtcagtaggagagcacgttcagagggaagagccatctcaacagaatcgcaccaaactatactttcaggatgaatttcttctttctgcca

SEQ ID NO: 89656 - DNA, 184 bp, Homo sapiens
agggaagagccatctcaacagaatcgcaccaaactatactttcaggatgaatttcttctttctgccatcttttggaataaatattttcctcctttctatgbaaatctgggctcggtgtttgtaaagttcatttttataagcttttctatcgctacataatgcctttttaaaaaatgattttgta

SEQ ID NO: 89657 - DNA, 201 bp, Homo sapiens
ctctctccttggaatctgtggatttgaagatggctcctgccttctcacgtgggaatcagtgaagtgtttagaaactgctgcaagacaaacaagactccagwggggtggtcagtaggagagcacgttcagagggaagagccatctcaacagaatcgcaccaaactatactttcaggatgaatttcttctttctgccatcttt

SEQ ID NO: 89658 - DNA, 201 bp, Homo sapiens
atcagtgaagtgtttagaaactgctgcaagacaaacaagactccagtggggtggtcagtaggagagcacgttcagagggaagagccatctcaacagaatcrcaccaaactatactttcaggatgaatttcttctttctgccatcttttggaataaatattttcctcctttctatggaaatctgggctcggtgtttgtaaag

SEQ ID NO: 89659 - DNA, 114 bp, Homo sapiens; identical to SEQ ID NO: 89647

SEQ ID NO: 89660 - DNA, 201 bp, Homo sapiens
aactgctgcaagacaaacaagactccagtggggtggtcagtaggagagcacgttcagagggaagagccatctcaacagaatcgcaccaaactatactttcrggatgaatttcttctttctgccatcttttggaataaatattttcctcctttctatggaaatctgggctcggtgtttgtaaagttcatttttataagcttt

SEQ ID NO: 89661 - DNA, 201 bp, Homo sapiens; identical to SEQ ID NO: 89648

SEQ ID NO: 89662 - DNA, 201 bp, Homo sapiens
gacaaacaagactccagtggggtggtcagtaggagagcacgttcagagggaagagccatctcaacagaatcgcaccaaactatactttcaggatgaatttyttctttctgccatcttttggaataaatattttcctcctttctatggaaatctgggctcggtgtttgtaaagttcatttttataagcttttctatcgctac

SEQ ID NO: 89663 - DNA, 201 bp, Homo sapiens
caagactccagtggggtggtcagtaggagagcacgttcagagggaagagccatctcaacagaatcgcaccaaactatactttcaggatgaatttcttcttyctgccatcttttggaataaatattttcctcctttctatggaaatctgggctcggtgtttgtaaagttcatttttataagcttttctatcgctacataatg

SEQ ID NO: 89664 - DNA, 201 bp, Homo sapiens; identical to SEQ ID NO: 89649

SEQ ID NO: 89665 - DNA, 201 bp, Homo sapiens; identical to SEQ ID NO: 89650

SEQ ID NO: 89666 - DNA, 201 bp, Homo sapiens
gagtccagcaggggccaggaagaagcgagcagcagggcagagtggagtccctggtggagggcaccagcgagagaagagaggatggaccatgcctggcacastgtggtgtggagttggagattctgctgggaactcctcggagctgggggtcttccagggacctgatctctgttgccgggaacatgaccgctgcccacagaa

SEQ ID NO: 89667 - DNA, 201 bp, Homo sapiens
cagaatcagcacgactccatctcggacatcgtgggcgtggccttcttcaacgtgctggagatcccctgctttgtgctggaggagcaggaggcgtgtgtggygtggtactggtggggcgggtgtaggatgtacggcacagtgcccctcgctcgcctgcagcccaggaccttctacaatgcctcctggagctcccgggccacc

SEQ ID NO: 89668 - DNA, 201 bp, Homo sapiens
cctcagtttcagctttcctgggcaccagcctggaccttgcccatggctatgccaagccttgggaatctcagcctcccctccgtaggttagactgaagcatrgcagaggctgttgtggacaatcaagaggatgaatggggggatctcaaggcccaaatgctggaccacatctcctgctgttctgggtaaccttgagctatgt

SEQ ID NO: 89669 - DNA, 201 bp, Homo sapiens
ctacggtgctctctgtgctcatgagactgcctggggctccttcatccacacccccggacccgagctgcagagagcactggccactcttcagagtcagtggsaggcatgccgagcgcttgaggagagtccagcaggggccaggaagaagcgagcagcagggcagagtggagtccctggtggagggcaccagcgagagaagag

SEQ ID NO: 89670 - DNA, 201 bp, Homo sapiens
gcagcccaggaccttctacaatgcctcctggagctcccgggccacctccccaactcccagctcccggagcccagcccctcccaagcctcgacagaagcagyaccttcggaaggggccaccacatcagaaagggtccaagcgccccagcaaagccaacaccacagccctccaggaccctatggtctctcccaggcttgatgt

SEQ ID NO: 89671 - DNA, 201 bp, Homo sapiens
  misc_feature (1)...(201): n = A,T,C or G
cgtccctggcaacccactggggtacctgagcttcctggccaaggatgctcagggactggccctgatccatgcccgctgggatgcgcataggaggctgcagncatgtagctgggaggatgagccggagctcaccgcagcctacggtgctctctgtgctcatgagactgcctggggctccttcatccacacccccggacccga

SEQ ID NO: 89672 - DNA, 166 bp, Homo sapiens
atgggggcgtgggccctggcaagtgcactcctcagccaatcagcgtcctgcccggctggtggattyggttacaagcccaagatcaccccatactccagcctctttcctcctcctcccgcagctccattcattggtcccgccgcaccgggcctgctgggctccgctt

SEQ ID NO: 89673 - DNA, 201 bp, Homo sapiens
tgggcgtggccttcttcaacgtgctggagatcccctgctttgtgctggaggagcaggaggcgtgtgtggcgtggtactggtggggcgggtgtaggatgtayggcacagtgcccctcgctcgcctgcagcccaggaccttctacaatgcctcctggagctcccgggccacctccccaactcccagctcccggagcccagccc

SEQ ID NO: 89674 - DNA, 201 bp, Homo sapiens
ctccagggcccacagggtggcctaaaacctcagggtgcccgctgggtctgccgcagcttccgccgccacctggaccagtgtgagcaccagattgggccccrggaaatcgagttccagctgctcaacagcgcccaagagcccctcttccactgcaactgcacgcgccgtctggcacgcttcctgaggctccacagcccaccc

SEQ ID NO: 89675 - DNA, 201 bp, Homo sapiens
ttcaggcagggctgtttgggatgctgggcttcctgggggtggccctggggggctcccctgccctccgctggtacaggacctcctgccacttgaccaaggcsgtccctggcaacccactggggtacctgagcttcctggccaaggatgctcagggactggccctgatccatgcccgctgggatgcgcataggaggctgcagg

SEQ ID NO: 89676 - DNA, 201 bp, Homo sapiens
ccccaactcccagctcccggagcccagcccctcccaagcctcgacagaagcagcaccttcggaaggggccaccacatcagaaagggtccaagcgccccagsaaagccaacaccacagccctccaggaccctatggtctctcccaggcttgatgtggcccccacaggcctccagggcccacagggtggcctaaaacctcagg

SEQ ID NO: 89677 - DNA, 201 bp, Homo sapiens
aggagacccgacaggcagcagaagtcctggagccagtgacctcagtttcagctttcctgggcaccagcctggaccttgcccatggctatgccaagccttgrgaatctcagcctcccctccgtaggttagactgaagcatggcagaggctgttgtggacaatcaagaggatgaatggggggatctcaaggcccaaatgctgg

SEQ ID NO: 89678 - DNA, 201 bp, Homo sapiens
tcacagaaatgtctgtgtctgaatccaggattggggtgggtgttggagagggctttcagctcccctcctcccaggggggcctctttttttaacggctgccrtgcccttcctggcccagccctaaacctaaattcaaatctcctccatgcctttgcgcaaaggacctccctcttgcactctaagccttagtttcctcctcta

SEQ ID NO: 89679 - DNA, 201 bp, Homo sapiens
ctcctctaaaaaaagggggtctctaaacaggagctacctcatagggttgttgaggattaagtgaaccaatacatatacagtgcttagcacttaataagtaytcccccctgcgacacctagctgaactatggtttggtgtctgatcttgagaggttgatgtaaccttttaaaggcctcagttcgctcacctgtgaaatgggt

SEQ ID NO: 89680 - DNA, 201 bp, Homo sapiens
tctgaatccaggattggggtgggtgttggagagggctttcagctcccctcctcccaggggggcctctttttttaacggctgccgtgcccttcctggcccakccctaaacctaaattcaaatctcctccatgcctttgcgcaaaggacctccctcttgcactctaagccttagtttcctcctctaaaaaaagggggtctcta

SEQ ID NO: 89681 - DNA, 201 bp, Homo sapiens
catgatcgccatagggttgcaggaagtgaactccatgctcaacaagcgactcaaggacgccctcttcacggaccagtggagtgagctgttcatggatgcgmtagggcccttcaacttcgtgctggtgagttcggtgaggatgcagggtgtcatcctgctgctgttcgccaagtactaccacctgcccttcctgcgagacgt

SEQ ID NO: 89682 - DNA, 201 bp, Homo sapiens
atgggaatacctaccaggtaacattcagtgaggaatcactgcccaagggccatggagacttcatcctgggctactatagtcacaaccacagcatcctcatyggcatcactgaacccttccagatctcgctgccttcctcggagttggccagcagcagcacagacagctcaggcaccagctcagagggagaggatgacagca

SEQ ID NO: 89683 - DNA, 201 bp, Homo sapiens
gtcagcgaccacaagcctgtggctgcccagttcctcctgcagtttgccttcagggacgacatgccactggtgcggctggaggtggcagatgagtgggtgcrgcccgagcaggcggtggtgaggtaccgcatggaaacagtgttcgcccgcagctcctgggactggatcggcttataccgggtgggtttccgccattgcaag

SEQ ID NO: 89684 - DNA, 201 bp, Homo sapiens
gctcctgggactggatcggcttataccgggtgggtttccgccattgcaaggactatgtggcttatgtctgggccaaacatgaagatgtggatgggaatacmtaccaggtaacattcagtgaggaatcactgcccaagggccatggagacttcatcctgggctactatagtcacaaccacagcatcctcatcggcatcactg

SEQ ID NO: 89685 - DNA, 201 bp, Homo sapiens
agtggagtgagctgttcatggatgcgctagggcccttcaacttcgtgctggtaacgcacccctcaccccctggacagccagagaccctgctgaattcctgkctccagctgtaccctggctcactgtggggcccgctgggcctctgtggctgggtgagttcggtgaggatgcagggtgtcatcctgctgctgttcgccaagt

SEQ ID NO: 89686 - DNA, 201 bp, Homo sapiens
gtggagtgagctgttcatggatgcgctagggcccttcaacttcgtgctggtaacgcacccctcaccccctggacagccagagaccctgctgaattcctggytccagctgtaccctggctcactgtggggcccgctgggcctctgtggctgggtgagttcggtgaggatgcagggtgtcatcctgctgctgttcgccaagta

SEQ ID NO: 89687 - DNA, 201 bp, Homo sapiens
catgatcgccatagggttgcaggaagtgaactccatgctcaacaagcgactcaaggacgccctcttcacggaccagtggagtgagctgttcatggatgcgmtagggcccttcaacttcgtgctggtaacgcacccctcaccccctggacagccagagaccctgctgaattcctggctccagctgtaccctggctcactgtg

SEQ ID NO: 89688 - DNA, 201 bp, Homo sapiens; identical to SEQ ID NO: 89682

SEQ ID NO: 89689 - DNA, 201 bp, Homo sapiens; identical to SEQ ID NO: 89683

SEQ ID NO: 89690 - DNA, 201 bp, Homo sapiens
gcagcccccagaactcccctccaccccttccccggtgcccagtccagttctgtctccaactcaggaacaggccctggctccagcatccacggcatcaggcrcagcctctgtgggacagacatcagctagaaagagggatgccccagcccctagacctctccctgcttctgaggggcatctccagcctccagctcagacatc

SEQ ID NO: 89691 - DNA, 201 bp, Homo sapiens; identical to SEQ ID NO: 89684

SEQ ID NO: 89692 - DNA, 201 bp, Homo sapiens
ccaagccaccccgatcacccagccgttccccaagccactccccgaatcgctctccctgtgttcccccagcccctgacatggccctcccaaggcttggcacmcagagtacagggcctggcaggtgcctgagccccaaccttcaggcccaagaagccccagccccagtcaccacctcctcttctacatccaccctgtcatcct

SEQ ID NO: 89693 - DNA, 201 bp, Homo sapiens
ccttttgaaccaccccaaagaactcaacatggcaaagcaaatggtaaaagcttcccgactgttctactttgggtccgcgcgaagcccactcacgtgtgatytgtgttgcccctctcggtggtcccaggcgatccagccatgccccctgcccctctgcccagatgcttcaggggcccggcttttcaggcttgccctcaccag

SEQ ID NO: 89694 - DNA, 201 bp, Homo sapiens
aagtccaggccaaatggtgggcttagcctctttgaaaagttctgccttgcccccacaggtgggcacatcctgtgtctcattcaccatgatgcttcctgagrgtgttctagaagcccgttccccagtggctgtatccagcctttccttgcatcatcttcctcttgaaggtgaggaagtgaaaactacagacctcccccggac

SEQ ID NO: 89695 - DNA, 201 bp, Homo sapiens
ttgtgactgggtccacgcgagtcccgctccaaggcttcaaggctttgcaaggttctacaggcgcggcagggccccggctgttcaccatccacctgatagaygcgaacacagacaaccttccgaaggcccatacctgctttaaccggatcgacattccaccatatgagtcctatgagaagctctacgagaagctgctgacag

SEQ ID NO: 89696 - DNA, 201 bp, Homo sapiens
cctgtgtctcattcaccatgatgcttcctgagggtgttctagaagcccgttccccagtggctgtatccagcctttccttgcatcatcttcctcttgaaggkgaggaagtgaaaactacagacctcccccggacagcccactctctatcacgagcctaacccgcgggaggcggaagagacatccattcgagaactgaagcgg

SEQ ID NO: 89697 - DNA, 201 bp, Homo sapiens
ggcccaggatatttcttttctgggtatcttggctgaaaattttgttttacatagagaaaaacgatcttttaagggtcccttttgctgcattatctgtccartttgacttttttttcagtgaaaacaccatgtcatggagtgtaggaaagagcagaccaaaatcagccctagagccaaccagtcagtcccaaagctgtgacc

SEQ ID NO: 89698 - DNA, 201 bp, Homo sapiens
aaatctttgaggagtcttaccgccagataatgaagatgcgaccgaaagacttgaaaaaacggctgatggtgaaattccgtggggaagaaggtttggattayggtggtgtggccagggagtggctttacttgctgtgccatgaaatgctgaatccttattacgggctcttccagtattctacggacaatatttacatgttgc

SEQ ID NO: 89699 - DNA, 201 bp, Homo sapiens
gtcctccacaggtgaccccggtggacacacgcgttcccatcctggcctccgtctctgcttttccacttctacctgcgtgtgggtttgccgccttgtcatcrgttgtgtgagtgtcgcagacctttccagagctccggttcactctttccaaacaggcctccctgtcggtggcactgcactcctagaaccttcagtttctac

SEQ ID NO: 89700 - DNA, 201 bp, Homo sapiens
atttttgtttctcaaccactttataacgtattttttaatttattttgtaatgtcttgttttgaagtattgctgctatccttgttatccttcccactgtttktatcactgatttattttgtgaaagttgtacactaatgttctatgtcaaaatcaaaagtatttaatgaaatactagttctatttaatgtggttatggaacc

SEQ ID NO: 89701 - DNA, 201 bp, Homo sapiens
tagtggtcagtttacagacacgagacagaataggaaccggcggctcggtggtggactgcagaggactgttagaaaatgaaggaacggtgtatgaagactcsgggcctgggaggccgctcagctgcttcatggaggaaccagccccttacacagatagcaccggtgctgctgctggaggagggaattgcaggttcgtggagt

SEQ ID NO: 89702 - DNA, 201 bp, Homo sapiens; identical to SEQ ID NO: 89693

SEQ ID NO: 89703 - DNA, 201 bp, Homo sapiens; identical to SEQ ID NO: 89694

SEQ ID NO: 89704 - DNA, 201 bp, Homo sapiens; identical to SEQ ID NO: 89695

SEQ ID NO: 89705 - DNA, 201 bp, Homo sapiens; identical to SEQ ID NO: 89696

SEQ ID NO: 89706 - DNA, 201 bp, Homo sapiens; identical to SEQ ID NO: 89697

SEQ ID NO: 89707 - DNA, 201 bp, Homo sapiens; identical to SEQ ID NO: 89698

SEQ ID NO: 89708 - DNA, 201 bp, Homo sapiens; identical to SEQ ID NO: 89699

SEQ ID NO: 89709 - DNA, 201 bp, Homo sapiens; identical to SEQ ID NO: 89700

SEQ ID NO: 89710 - DNA, 201 bp, Homo sapiens; identical to SEQ ID NO: 89701

SEQ ID NO: 89711 - DNA, 201 bp, Homo sapiens; identical to SEQ ID NO: 89693

SEQ ID NO: 89712 - DNA, 201 bp, Homo sapiens; identical to SEQ ID NO: 89694

SEQ ID NO: 89713 - DNA, 201 bp, Homo sapiens; identical to SEQ ID NO: 89695

SEQ ID NO: 89714 - DNA, 201 bp, Homo sapiens; identical to SEQ ID NO: 89696

SEQ ID NO: 89715 - DNA, 201 bp, Homo sapiens; identical to SEQ ID NO: 89697

SEQ ID NO: 89716 - DNA, 201 bp, Homo sapiens; identical to SEQ ID NO: 89698

SEQ ID NO: 89717 - DNA, 201 bp, Homo sapiens; identical to SEQ ID NO: 89699

SEQ ID NO: 89718 - DNA, 201 bp, Homo sapiens; identical to SEQ ID NO: 89700

SEQ ID NO: 89719 - DNA, 201 bp, Homo sapiens; identical to SEQ ID NO: 89701

SEQ ID NO: 89720 - DNA, 201 bp, Homo sapiens; identical to SEQ ID NO: 89693

SEQ ID NO: 89721 - DNA, 201 bp, Homo sapiens; identical to SEQ ID NO: 89694

SEQ ID NO: 89722 - DNA, 201 bp, Homo sapiens; identical to SEQ ID NO: 89695

SEQ ID NO: 89723 - DNA, 201 bp, Homo sapiens; identical to SEQ ID NO: 89696

SEQ ID NO: 89724 - DNA, 201 bp, Homo sapiens; identical to SEQ ID NO: 89697

SEQ ID NO: 89725 - DNA, 201 bp, Homo sapiens; identical to SEQ ID NO: 89699

SEQ ID NO: 89726 - DNA, 201 bp, Homo sapiens; identical to SEQ ID NO: 89700

SEQ ID NO: 89727 - DNA, 201 bp, Homo sapiens; identical to SEQ ID NO: 89701

SEQ ID NO: 89728 - DNA, 201 bp, Homo sapiens; identical to SEQ ID NO: 89693

SEQ ID NO: 89729 - DNA, 201 bp, Homo sapiens; identical to SEQ ID NO: 89694

SEQ ID NO: 89730 - DNA, 201 bp, Homo sapiens; identical to SEQ ID NO: 89695

SEQ ID NO: 89731 - DNA, 201 bp, Homo sapiens; identical to SEQ ID NO: 89696

SEQ ID NO: 89732 - DNA, 201 bp, Homo sapiens; identical to SEQ ID NO: 89697

SEQ ID NO: 89733 - DNA, 201 bp, Homo sapiens; identical to SEQ ID NO: 89698

SEQ ID NO: 89734 - DNA, 201 bp, Homo sapiens; identical to SEQ ID NO: 89699

SEQ ID NO: 89735 - DNA, 201 bp, Homo sapiens; identical to SEQ ID NO: 89700

SEQ ID NO: 89736 - DNA, 201 bp, Homo sapiens; identical to SEQ ID NO: 89701

SEQ ID NO: 89737 - DNA, 201 bp, Homo sapiens
aaccgcatcatcgtggagaagcccttcgggagggacctgcagagctctgaccggctgtccaaccacatctcctccctgttccgtgaggaccagatctaccscatcgaccactacctgggcaaggagatggtgcagaacctcatggtgctgagatttgccaacaggatcttcggccccatctggaaccgggacaacatcgcc

SEQ ID NO: 89738 - DNA, 201 bp, Homo sapiens
atacaagaacgtgaagctccctgacgcctacgagcgcctcatcctggacgtcttctgcgggagccagatgcacttcgtgcgcagcgacgagctccgtgagrcctggcgtattttcaccccactgctgcaccagattgagctggagaagcccaagcccatcccctatatttatggcagccgaggccccacggaggcagacga

SEQ ID NO: 89739 - DNA, 201 bp, Homo sapiens
gcgcaaggccgaggtgaggctgcagttccatgatgtggccggcgacatcttccaccagcagtgcaagcgcaacgagctggtgatccgcgtgcagcccaacraggccgtgtacaccaagatgatgaccaagaagccgggcatgttcttcaaccccgaggagtcggagctggacctgacctacggcaacagatacaagaacgt

SEQ ID NO: 89740 - DNA, 201 bp, Homo sapiens
tgatgaccaagaagccgggcatgttcttcaaccccgaggagtcggagctggacctgacctacggcaacagatacaagaacgtgaagctccctgacgcctaygagcgcctcatcctggacgtcttctgcgggagccagatgcacttcgtgcgcagcgacgagctccgtgaggcctggcgtattttcaccccactgctgcacc

SEQ ID NO: 89741 - DNA, 201 bp, Homo sapiens
agttccatgatgtggccggcgacatcttccaccagcagtgcaagcgcaacgagctggtgatccgcgtgcagcccaacgaggccgtgtacaccaagatgatraccaagaagccgggcatgttcttcaaccccgaggagtcggagctggacctgacctacggcaacagatacaagaacgtgaagctccctgacgcctacgagc

SEQ ID NO: 89742 - DNA, 201 bp, Homo sapiens
cccccgaccgtctacgaggccgtcaccaagaacattcacgagtcctgcatgagccagataggctggaaccgcatcatcgtggagaagcccttcgggagggrcctgcagagctctgaccggctgtccaaccacatctcctccctgttccgtgaggaccagatctaccgcatcgaccactacctgggcaaggagatggtgcag

SEQ ID NO: 89743 - DNA, 201 bp, Homo sapiens
ccagcagtgcaagcgcaacgagctggtgatccgcgtgcagcccaacgaggccgtgtacaccaagatgatgaccaagaagccgggcatgttcttcaaccccraggagtcggagctggacctgacctacggcaacagatacaagaacgtgaagctccctgacgcctacgagcgcctcatcctggacgtcttctgcgggagcca

SEQ ID NO: 89744 - DNA, 201 bp, Homo sapiens
tgaatttgggatcatccgggacgtgatgcagaaccacctactgcagatgctgtgtctggtggccatggagaagcccgcctccaccaactcagatgacgtcygtgatgagaaggtcaaggtgttgaaatgcatctcagaggtgcaggccaacaatgtggtcctgggccagtacgtggggaaccccgatggagagggcgaggc

SEQ ID NO: 89745 - DNA, 201 bp, Homo sapiens
gaatttgggatcatccgggacgtgatgcagaaccacctactgcagatgctgtgtctggtggccatggagaagcccgcctccaccaactcagatgacgtccrtgatgagaaggtcaaggtgttgaaatgcatctcagaggtgcaggccaacaatgtggtcctgggccagtacgtggggaaccccgatggagagggcgaggcc

SEQ ID NO: 89746 - DNA, 201 bp, Homo sapiens
catggagaagcccgcctccaccaactcagatgacgtccgtgatgagaaggtcaaggtgttgaaatgcatctcagaggtgcaggccaacaatgtggtcctgrgccagtacgtggggaaccccgatggagagggcgaggccaccaaagggtacctggacgaccccacggtgccccgcgggtccaccaccgccacttttgcagc

SEQ ID NO: 89747 - DNA, 201 bp, Homo sapiens
ggacgtgatgcagaaccacctactgcagatgctgtgtctggtggccatggagaagcccgcctccaccaactcagatgacgtccgtgatgagaaggtcaagrtgttgaaatgcatctcagaggtgcaggccaacaatgtggtcctgggccagtacgtggggaaccccgatggagagggcgaggccaccaaagggtacctgga

SEQ ID NO: 89748 - DNA, 201 bp, Homo sapiens
ggccaccaaagggtacctggacgaccccacggtgccccgcgggtccaccaccgccacttttgcagccgtcgtcctctatgtggagaatgagaggtgggatkgggtgcccttcatcctgcgctgcggcaaggccctgaacgagcgcaaggccgaggtgaggctgcagttccatgatgtggccggcgacatcttccaccagca

SEQ ID NO: 89749 - DNA, 201 bp, Homo sapiens
aacgagcgcaaggccgaggtgaggctgcagttccatgatgtggccggcgacatcttccaccagcagtgcaagcgcaacgagctggtgatccgcgtgcagcycaacgaggccgtgtacaccaagatgatgaccaagaagccgggcatgttcttcaaccccgaggagtcggagctggacctgacctacggcaacagatacaag

SEQ ID NO: 89750 - DNA, 201 bp, Homo sapiens
gccaccaaagggtacctggacgaccccacggtgccccgcgggtccaccaccgccacttttgcagccgtcgtcctctatgtggagaatgagaggtgggatgkggtgcccttcatcctgcgctgcggcaaggccctgaacgagcgcaaggccgaggtgaggctgcagttccatgatgtggccggcgacatcttccaccagcag

SEQ ID NO: 89751 - DNA, 201 bp, Homo sapiens
catcatcatgggtgcatcgggtgacctggccaagaagaagatctaccccaccatctggtggctgttccgggatggccttctgcccgaaaacaccttcatcrtgggctatgcccgttcccgcctcacagtggctgacatccgcaaacagagtgagcccttcttcaaggccaccccagaggagaagctcaagctggaggactt

SEQ ID NO: 89752 - DNA, 201 bp, Homo sapiens
catgggtgcatcgggtgacctggccaagaagaagatctaccccaccatctggtggctgttccgggatggccttctgcccgaaaacaccttcatcgtgggcyatgcccgttcccgcctcacagtggctgacatccgcaaacagagtgagcccttcttcaaggccaccccagaggagaagctcaagctggaggacttctttgc

SEQ ID NO: 89753 - DNA, 201 bp, Homo sapiens
caaagggtacctggacgaccccacggtgccccgcgggtccaccaccgccacttttgcagccgtcgtcctctatgtggagaatgagaggtgggatggggtgyccttcatcctgcgctgcggcaaggccctgaacgagcgcaaggccgaggtgaggctgcagttccatgatgtggccggcgacatcttccaccagcagtgcaa

SEQ ID NO: 89754 - DNA, 201 bp, Homo sapiens
gacctggccaagaagaagatctaccccaccatctggtggctgttccgggatggccttctgcccgaaaacaccttcatcgtgggctatgcccgttcccgccycacagtggctgacatccgcaaacagagtgagcccttcttcaaggccaccccagaggagaagctcaagctggaggacttctttgcccgcaactcctatgtg

SEQ ID NO: 89755 - DNA, 201 bp, Homo sapiens
atgggtgcatcgggtgacctggccaagaagaagatctaccccaccatctggtggctgttccgggatggccttctgcccgaaaacaccttcatcgtgggctrtgcccgttcccgcctcacagtggctgacatccgcaaacagagtgagcccttcttcaaggccaccccagaggagaagctcaagctggaggacttctttgcc

SEQ ID NO: 89756 - DNA, 201 bp, Homo sapiens
agcccaacgaggccgtgtacaccaagatgatgaccaagaagccgggcatgttcttcaaccccgaggagtcggagctggacctgacctacggcaacagatamaagaacgtgaagctccctgacgcctacgagcgcctcatcctggacgtcttctgcgggagccagatgcacttcgtgcgcagcgacgagctccgtgaggcct

SEQ ID NO: 89757 - DNA, 201 bp, Homo sapiens
gaggccgtgtacaccaagatgatgaccaagaagccgggcatgttcttcaaccccgaggagtcggagctggacctgacctacggcaacagatacaagaacgkgaagctccctgacgcctacgagcgcctcatcctggacgtcttctgcgggagccagatgcacttcgtgcgcagcgacgagctccgtgaggcctggcgtatt

SEQ ID NO: 89758 - DNA, 201 bp, Homo sapiens
cgaggccgtgtacaccaagatgatgaccaagaagccgggcatgttcttcaaccccgaggagtcggagctggacctgacctacggcaacagatacaagaacrtgaagctccctgacgcctacgagcgcctcatcctggacgtcttctgcgggagccagatgcacttcgtgcgcagcgacgagctccgtgaggcctggcgtat

SEQ ID NO: 89759 - DNA, 201 bp, Homo sapiens
ccccgaggagtcggagctggacctgacctacggcaacagatacaagaacgtgaagctccctgacgcctacgagcgcctcatcctggacgtcttctgcgggrgccagatgcacttcgtgcgcagcgacgagctccgtgaggcctggcgtattttcaccccactgctgcaccagattgagctggagaagcccaagcccatccc

SEQ ID NO: 89760 - DNA, 201 bp, Homo sapiens
ctcacagtggctgacatccgcaaacagagtgagcccttcttcaaggccaccccagaggagaagctcaagctggaggacttctttgcccgcaactcctatgwggctggccagtacgatgatgcagcctcctaccagcgcctcaacagccacatgaatgccctccacctggggtcacaggccaaccgcctcttctacctggcc

SEQ ID NO: 89761 - DNA, 201 bp, Homo sapiens
tctggtggccatggagaagcccgcctccaccaactcagatgacgtccgtgatgagaaggtcaaggtgttgaaatgcatctcagaggtgcaggccaacaatktggtcctgggccagtacgtggggaaccccgatggagagggcgaggccaccaaagggtacctggacgaccccacggtgccccgcgggtccaccaccgccac

SEQ ID NO: 89762 - DNA, 201 bp, Homo sapiens
ggtggccatggagaagcccgcctccaccaactcagatgacgtccgtgatgagaaggtcaaggtgttgaaatgcatctcagaggtgcaggccaacaatgtgktcctgggccagtacgtggggaaccccgatggagagggcgaggccaccaaagggtacctggacgaccccacggtgccccgcgggtccaccaccgccacttt

SEQ ID NO: 89763 - DNA, 201 bp, Homo sapiens
cgtccgtgatgagaaggtcaaggtgttgaaatgcatctcagaggtgcaggccaacaatgtggtcctgggccagtacgtggggaaccccgatggagagggcraggccaccaaagggtacctggacgaccccacggtgccccgcgggtccaccaccgccacttttgcagccgtcgtcctctatgtggagaatgagaggtggga

SEQ ID NO: 89764 - DNA, 201 bp, Homo sapiens
ccgtcgtcctctatgtggagaatgagaggtgggatggggtgcccttcatcctgcgctgcggcaaggccctgaacgagcgcaaggccgaggtgaggctgcarttccatgatgtggccggcgacatcttccaccagcagtgcaagcgcaacgagctggtgatccgcgtgcagcccaacgaggccgtgtacaccaagatgatga

SEQ ID NO: 89765 - DNA, 201 bp, Homo sapiens
aaggtgttgaaatgcatctcagaggtgcaggccaacaatgtggtcctgggccagtacgtggggaaccccgatggagagggcgaggccaccaaagggtaccyggacgaccccacggtgccccgcgggtccaccaccgccacttttgcagccgtcgtcctctatgtggagaatgagaggtgggatggggtgcccttcatcctg

SEQ ID NO: 89766 - DNA, 201 bp, Homo sapiens
aaatgcatctcagaggtgcaggccaacaatgtggtcctgggccagtacgtggggaaccccgatggagagggcgaggccaccaaagggtacctggacgaccmcacggtgccccgcgggtccaccaccgccacttttgcagccgtcgtcctctatgtggagaatgagaggtgggatggggtgcccttcatcctgcgctgcggc

SEQ ID NO: 89767 - DNA, 201 bp, Homo sapiens
acattccttgtcaccagcaacatctcgagccccctggatgtcccctgtcccaccaactctgcactccatggccaccccgtgccacccgtaggcagcctctytgctataagaaaagcagacgcagcagctgggacccctcccaacctcaatgccctgccattaaatccgcaaacagcccctcctgtccccttgtcatttgct

SEQ ID NO: 89768 - DNA, 201 bp, Homo sapiens
aggagtcggagctggacctgacctacggcaacagatacaagaacgtgaagctccctgacgcctacgagcgcctcatcctggacgtcttctgcgggagccasatgcacttcgtgcgcagcgacgagctccgtgaggcctggcgtattttcaccccactgctgcaccagattgagctggagaagcccaagcccatcccctata

SEQ ID NO: 89769 - DNA, 201 bp, Homo sapiens
tcccgcctcacagtggctgacatccgcaaacagagtgagcccttcttcaaggccaccccagaggagaagctcaagctggaggacttctttgcccgcaactsctatgtggctggccagtacgatgatgcagcctcctaccagcgcctcaacagccacatgaatgccctccacctggggtcacaggccaaccgcctcttctac

SEQ ID NO: 89770 - DNA, 201 bp, Homo sapiens
ctggacctgacctacggcaacagatacaagaacgtgaagctccctgacgcctacgagcgcctcatcctggacgtcttctgcgggagccagatgcacttcgwgcgcagcgacgagctccgtgaggcctggcgtattttcaccccactgctgcaccagattgagctggagaagcccaagcccatcccctatatttatggcagc

SEQ ID NO: 89771 - DNA, 201 bp, Homo sapiens
catccgcaaacagagtgagcccttcttcaaggccaccccagaggagaagctcaagctggaggacttctttgcccgcaactcctatgtggctggccagtacratgatgcagcctcctaccagcgcctcaacagccacatgaatgccctccacctggggtcacaggccaaccgcctcttctacctggccttgcccccgaccgt

SEQ ID NO: 89772 - DNA, 201 bp, Homo sapiens
ggacctgacctacggcaacagatacaagaacgtgaagctccctgacgcctacgagcgcctcatcctggacgtcttctgcgggagccagatgcacttcgtgygcagcgacgagctccgtgaggcctggcgtattttcaccccactgctgcaccagattgagctggagaagcccaagcccatcccctatatttatggcagccg

SEQ ID NO: 89773 - DNA, 201 bp, Homo sapiens
agaggagaagctcaagctggaggacttctttgcccgcaactcctatgtggctggccagtacgatgatgcagcctcctaccagcgcctcaacagccacatgratgccctccacctggggtcacaggccaaccgcctcttctacctggccttgcccccgaccgtctacgaggccgtcaccaagaacattcacgagtcctgcat

SEQ ID NO: 89774 - DNA, 201 bp, Homo sapiens
gacctgacctacggcaacagatacaagaacgtgaagctccctgacgcctacgagcgcctcatcctggacgtcttctgcgggagccagatgcacttcgtgcrcagcgacgagctccgtgaggcctggcgtattttcaccccactgctgcaccagattgagctggagaagcccaagcccatcccctatatttatggcagccga

SEQ ID NO: 89775 - DNA, 201 bp, Homo sapiens
tttgcccgcaactcctatgtggctggccagtacgatgatgcagcctcctaccagcgcctcaacagccacatgaatgccctccacctggggtcacaggccamccgcctcttctacctggccttgcccccgaccgtctacgaggccgtcaccaagaacattcacgagtcctgcatgagccagataggctggaaccgcatcatc

SEQ ID NO: 89776 - DNA, 201 bp, Homo sapiens
aagctcaagctggaggacttctttgcccgcaactcctatgtggctggccagtacgatgatgcagcctcctaccagcgcctcaacagccacatgaatgcccbccacctggggtcacaggccaaccgcctcttctacctggccttgcccccgaccgtctacgaggccgtcaccaagaacattcacgagtcctgcatgagccag

SEQ ID NO: 89777 - DNA, 201 bp, Homo sapiens
aacagatacaagaacgtgaagctccctgacgcctacgagcgcctcatcctggacgtcttctgcgggagccagatgcacttcgtgcgcagcgacgagctccbtgaggcctggcgtattttcaccccactgctgcaccagattgagctggagaagcccaagcccatcccctatatttatggcagccgaggccccacggaggca

SEQ ID NO: 89778 - DNA, 201 bp, Homo sapiens
ctggaggacttctttgcccgcaactcctatgtggctggccagtacgatgatgcagcctcctaccagcgcctcaacagccacatgaatgccctccacctggkgtcacaggccaaccgcctcttctacctggccttgcccccgaccgtctacgaggccgtcaccaagaacattcacgagtcctgcatgagccagataggctgg

SEQ ID NO: 89779 - DNA, 201 bp, Homo sapiens
aaggagatggtgcagaacctcatggtgctgagatttgccaacaggatcttcggccccatctggaaccgggacaacatcgcctgcgttatcctcaccttcarggagccctttggcactgagggtcgcgggggctatttcgatgaatttgggatcatccgggacgtgatgcagaaccacctactgcagatgctgtgtctggtg

SEQ ID NO: 89780 - DNA, 201 bp, Homo sapiens
cagcgacgagctccgtgaggcctggcgtattttcaccccactgctgcaccagattgagctggagaagcccaagcccatcccctatatttatggcagccgargccccacggaggcagacgagctgatgaagagagtgggtttccagtatgagggcacctacaagtgggtgaacccccacaagctctgagccctgggcaccca

SEQ ID NO: 89781 - DNA, 201 bp, Homo sapiens
tgcccgcaactcctatgtggctggccagtacgatgatgcagcctcctaccagcgcctcaacagccacatgaatgccctccacctggggtcacaggccaacygcctcttctacctggccttgcccccgaccgtctacgaggccgtcaccaagaacattcacgagtcctgcatgagccagataggctggaaccgcatcatcgt

SEQ ID NO: 89782 - DNA, 201 bp, Homo sapiens
agaagcccgcctccaccaactcagatgacgtccgtgatgagaaggtcaaggtgttgaaatgcatctcagaggtgcaggccaacaatgtggtcctgggccastacgtggggaaccccgatggagagggcgaggccaccaaagggtacctggacgaccccacggtgccccgcgggtccaccaccgccacttttgcagccgtcg

SEQ ID NO: 89783 - DNA, 201 bp, Homo sapiens
agcgacgagctccgtgaggcctggcgtattttcaccccactgctgcaccagattgagctggagaagcccaagcccatcccctatatttatggcagccgagkccccacggaggcagacgagctgatgaagagagtgggtttccagtatgagggcacctacaagtgggtgaacccccacaagctctgagccctgggcacccac

SEQ ID NO: 89784 - DNA, 201 bp, Homo sapiens
gcctccaccaactcagatgacgtccgtgatgagaaggtcaaggtgttgaaatgcatctcagaggtgcaggccaacaatgtggtcctgggccagtacgtggrgaaccccgatggagagggcgaggccaccaaagggtacctggacgaccccacggtgccccgcgggtccaccaccgccacttttgcagccgtcgtcctctat

SEQ ID NO: 89785 - DNA, 201 bp, Homo sapiens
gacgagctccgtgaggcctggcgtattttcaccccactgctgcaccagattgagctggagaagcccaagcccatcccctatatttatggcagccgaggccycacggaggcagacgagctgatgaagagagtgggtttccagtatgagggcacctacaagtgggtgaacccccacaagctctgagccctgggcacccacctc

SEQ ID NO: 89786 - DNA, 201 bp, Homo sapiens
aaggtcaaggtgttgaaatgcatctcagaggtgcaggccaacaatgtggtcctgggccagtacgtggggaaccccgatggagagggcgaggccaccaaagrgtacctggacgaccccacggtgccccgcgggtccaccaccgccacttttgcagccgtcgtcctctatgtggagaatgagaggtgggatggggtgcccttc

SEQ ID NO: 89787 - DNA, 201 bp, Homo sapiens
gtgcccttcatcctgcgctgcggcaaggccctgaacgagcgcaaggccgaggtgaggctgcagttccatgatgtggccggcgacatcttccaccagcagtkcaagcgcaacgagctggtgatccgcgtgcagcccaacgaggccgtgtacaccaagatgatgaccaagaagccgggcatgttcttcaaccccgaggagtcg

SEQ ID NO: 89788 - DNA, 201 bp, Homo sapiens
catcctgcgctgcggcaaggccctgaacgagcgcaaggccgaggtgaggctgcagttccatgatgtggccggcgacatcttccaccagcagtgcaagcgcracgagctggtgatccgcgtgcagcccaacgaggccgtgtacaccaagatgatgaccaagaagccgggcatgttcttcaaccccgaggagtcggagctgga

SEQ ID NO: 89789 - DNA, 201 bp, Homo sapiens
cgcaaggccgaggtgaggctgcagttccatgatgtggccggcgacatcttccaccagcagtgcaagcgcaacgagctggtgatccgcgtgcagcccaacgrggccgtgtacaccaagatgatgaccaagaagccgggcatgttcttcaaccccgaggagtcggagctggacctgacctacggcaacagatacaagaacgtg

SEQ ID NO: 89790 - DNA, 201 bp, Homo sapiens
catgatgtggccggcgacatcttccaccagcagtgcaagcgcaacgagctggtgatccgcgtgcagcccaacgaggccgtgtacaccaagatgatgaccamgaagccgggcatgttcttcaaccccgaggagtcggagctggacctgacctacggcaacagatacaagaacgtgaagctccctgacgcctacgagcgcctc

SEQ ID NO: 89791 - DNA, 201 bp, Homo sapiens
ctgctgcaccagattgagctggagaagcccaagcccatcccctatatttatggcagccgaggccccacggaggcagacgagctgatgaagagagtgggttkccagtatgagggcacctacaagtgggtgaacccccacaagctctgagccctgggcacccacctccacccccgccacggccaccctccttcccgccgcccg

SEQ ID NO: 89792 - DNA, 201 bp, Homo sapiens
caatgtggtcctgggccagtacgtggggaaccccgatggagagggcgaggccaccaaagggtacctggacgaccccacggtgccccgcgggtccaccaccrccacttttgcagccgtcgtcctctatgtggagaatgagaggtgggatggggtgcccttcatcctgcgctgcggcaaggccctgaacgagcgcaaggccga

SEQ ID NO: 89793 - DNA, 201 bp, Homo sapiens
aatgtggtcctgggccagtacgtggggaaccccgatggagagggcgaggccaccaaagggtacctggacgaccccacggtgccccgcgggtccaccaccgmcacttttgcagccgtcgtcctctatgtggagaatgagaggtgggatggggtgcccttcatcctgcgctgcggcaaggccctgaacgagcgcaaggccgag

SEQ ID NO: 89794 - DNA, 201 bp, Homo sapiens
cgtctacgaggccgtcaccaagaacattcacgagtcctgcatgagccagataggctggaaccgcatcatcgtggagaagcccttcgggagggacctgcagwgctctgaccggctgtccaaccacatctcctccctgttccgtgaggaccagatctaccgcatcgaccactacctgggcaaggagatggtgcagaacctcat

SEQ ID NO: 89795 - DNA, 201 bp, Homo sapiens
tgagaggtgggatggggtgcccttcatcctgcgctgcggcaaggccctgaacgagcgcaaggccgaggtgaggctgcagttccatgatgtggccggcgacrtcttccaccagcagtgcaagcgcaacgagctggtgatccgcgtgcagcccaacgaggccgtgtacaccaagatgatgaccaagaagccgggcatgttctt

SEQ ID NO: 89796 - DNA, 201 bp, Homo sapiens
gagaggtgggatggggtgcccttcatcctgcgctgcggcaaggccctgaacgagcgcaaggccgaggtgaggctgcagttccatgatgtggccggcgacaycttccaccagcagtgcaagcgcaacgagctggtgatccgcgtgcagcccaacgaggccgtgtacaccaagatgatgaccaagaagccgggcatgttcttc

SEQ ID NO: 89797 - DNA, 201 bp, Homo sapiens
gaggtgggatggggtgcccttcatcctgcgctgcggcaaggccctgaacgagcgcaaggccgaggtgaggctgcagttccatgatgtggccggcgacatcytccaccagcagtgcaagcgcaacgagctggtgatccgcgtgcagcccaacgaggccgtgtacaccaagatgatgaccaagaagccgggcatgttcttcaa

SEQ ID NO: 89798 - DNA, 201 bp, Homo sapiens
ggtcaaggtgttgaaatgcatctcagaggtgcaggccaacaatgtggtcctgggccagtacgtggggaaccccgatggagagggcgaggccaccaaagggyacctggacgaccccacggtgccccgcgggtccaccaccgccacttttgcagccgtcgtcctctatgtggagaatgagaggtgggatggggtgcccttcat

SEQ ID NO: 89799 - DNA, 201 bp, Homo sapiens
tgacattccttgtcaccagcaacatctcgagccccctggatgtcccctgtcccaccaactctgcactccatggccaccccgtgccacccgtaggcagcctytctgctataagaaaagcagacgcagcagctgggacccctcccaacctcaatgccctgccattaaatccgcaaacagcccctcctgtccccttgtcatttg

SEQ ID NO: 89800 - DNA, 201 bp, Homo sapiens
aaggggcgagcacccacgtgagagaatctgcctgtggccttgcccgccagcctcagtgccacttgacattccttgtcaccagcaacatctcgagccccctrgatgtcccctgtcccaccaactctgcactccatggccaccccgtgccacccgtaggcagcctctctgctataagaaaagcagacgcagcagctgggaccc

SEQ ID NO: 89801 - DNA, 201 bp, Homo sapiens
aaggaggagggcgcccattcgtctgtcccagagcttattggccactgggtctcactcctgagtggggccagggtgggagggagggacaagggggaggaaargggcgagcacccacgtgagagaatctgcctgtggccttgcccgccagcctcagtgccacttgacattccttgtcaccagcaacatctcgagccccctgga

SEQ ID NO: 89802 - DNA, 201 bp, Homo sapiens
cgatgccttccatcagtcggatacacacatattcatcatcatgggtgcatcgggtgacctggccaagaagaagatctaccccaccatctggtggctgttcygggatggccttctgcccgaaaacaccttcatcgtgggctatgcccgttcccgcctcacagtggctgacatccgcaaacagagtgagcccttcttcaaggc

SEQ ID NO: 89803 - DNA, 201 bp, Homo sapiens
tgccttccatcagtcggatacacacatattcatcatcatgggtgcatcgggtgacctggccaagaagaagatctaccccaccatctggtggctgttccggratggccttctgcccgaaaacaccttcatcgtgggctatgcccgttcccgcctcacagtggctgacatccgcaaacagagtgagcccttcttcaaggccac

SEQ ID NO: 89804 - DNA, 201 bp, Homo sapiens
cagccacatgaatgccctccacctggggtcacaggccaaccgcctcttctacctggccttgcccccgaccgtctacgaggccgtcaccaagaacattcacragtcctgcatgagccagataggctggaaccgcatcatcgtggagaagcccttcgggagggacctgcagagctctgaccggctgtccaaccacatctcctc

SEQ ID NO: 89805 - DNA, 201 bp, Homo sapiens
gcccaacagaaggaaggaggagggcgcccattcgtctgtcccagagcttattggccactgggtctcactcctgagtggggccagggtgggagggagggacragggggaggaaaggggcgagcacccacgtgagagaatctgcctgtggccttgcccgccagcctcagtgccacttgacattccttgtcaccagcaacatct

SEQ ID NO: 89806 - DNA, 201 bp, Homo sapiens
gccggcgacatcttccaccagcagtgcaagcgcaacgagctggtgatccgcgtgcagcccaacgaggccgtgtacaccaagatgatgaccaagaagccggvcatgttcttcaaccccgaggagtcggagctggacctgacctacggcaacagatacaagaacgtgaagctccctgacgcctacgagcgcctcatcctggac

SEQ ID NO: 89807 - DNA, 201 bp, Homo sapiens
tgtggtcctgggccagtacgtggggaaccccgatggagagggcgaggccaccaaagggtacctggacgaccccacggtgccccgcgggtccaccaccgccrcttttgcagccgtcgtcctctatgtggagaatgagaggtgggatggggtgcccttcatcctgcgctgcggcaaggccctgaacgagcgcaaggccgaggt

SEQ ID NO: 89808 - DNA, 201 bp, Homo sapiens
ctttggcactgagggtcgcgggggctatttcgatgaatttgggatcatccgggacgtgatgcagaaccacctactgcagatgctgtgtctggtggccatgragaagcccgcctccaccaactcagatgacgtccgtgatgagaaggtcaaggtgttgaaatgcatctcagaggtgcaggccaacaatgtggtcctgggcca

SEQ ID NO: 89809 - DNA, 201 bp, Homo sapiens
cgaggccaccaaagggtacctggacgaccccacggtgccccgcgggtccaccaccgccacttttgcagccgtcgtcctctatgtggagaatgagaggtggsatggggtgcccttcatcctgcgctgcggcaaggccctgaacgagcgcaaggccgaggtgaggctgcagttccatgatgtggccggcgacatcttccacca

SEQ ID NO: 89810 - DNA, 201 bp, Homo sapiens
atcgaccactacctgggcaaggagatggtgcagaacctcatggtgctgagatttgccaacaggatcttcggccccatctggaaccgggacaacatcgcctrcgttatcctcaccttcaaggagccctttggcactgagggtcgcgggggctatttcgatgaatttgggatcatccgggacgtgatgcagaaccacctactg

SEQ ID NO: 89811 - DNA, 201 bp, Homo sapiens
gaggccgtcaccaagaacattcacgagtcctgcatgagccagataggctggaaccgcatcatcgtggagaagcccttcgggagggacctgcagagctctgwccggctgtccaaccacatctcctccctgttccgtgaggaccagatctaccgcatcgaccactacctgggcaaggagatggtgcagaacctcatggtgctg

SEQ ID NO: 89812 - DNA, 201 bp, Homo sapiens
ggccgtcaccaagaacattcacgagtcctgcatgagccagataggctggaaccgcatcatcgtggagaagcccttcgggagggacctgcagagctctgacyggctgtccaaccacatctcctccctgttccgtgaggaccagatctaccgcatcgaccactacctgggcaaggagatggtgcagaacctcatggtgctgag

SEQ ID NO: 89813 - DNA, 201 bp, Homo sapiens
ggtgcccttcatcctgcgctgcggcaaggccctgaacgagcgcaaggccgaggtgaggctgcagttccatgatgtggccggcgacatcttccaccagcagygcaagcgcaacgagctggtgatccgcgtgcagcccaacgaggccgtgtacaccaagatgatgaccaagaagccgggcatgttcttcaaccccgaggagtc

SEQ ID NO: 89814 - DNA, 201 bp, Homo sapiens
cacgagtcctgcatgagccagataggctggaaccgcatcatcgtggagaagcccttcgggagggacctgcagagctctgaccggctgtccaaccacatctyctccctgttccgtgaggaccagatctaccgcatcgaccactacctgggcaaggagatggtgcagaacctcatggtgctgagatttgccaacaggatcttc

SEQ ID NO: 89815 - DNA, 201 bp, Homo sapiens
tgcccttcatcctgcgctgcggcaaggccctgaacgagcgcaaggccgaggtgaggctgcagttccatgatgtggccggcgacatcttccaccagcagtgsaagcgcaacgagctggtgatccgcgtgcagcccaacgaggccgtgtacaccaagatgatgaccaagaagccgggcatgttcttcaaccccgaggagtcgg

SEQ ID NO: 89816 - DNA, 201 bp, Homo sapiens
gaaccgcatcatcgtggagaagcccttcgggagggacctgcagagctctgaccggctgtccaaccacatctcctccctgttccgtgaggaccagatctacygcatcgaccactacctgggcaaggagatggtgcagaacctcatggtgctgagatttgccaacaggatcttcggccccatctggaaccgggacaacatcgc

SEQ ID NO: 89817 - DNA, 201 bp, Homo sapiens
gcccttcatcctgcgctgcggcaaggccctgaacgagcgcaaggccgaggtgaggctgcagttccatgatgtggccggcgacatcttccaccagcagtgcragcgcaacgagctggtgatccgcgtgcagcccaacgaggccgtgtacaccaagatgatgaccaagaagccgggcatgttcttcaaccccgaggagtcgga

SEQ ID NO: 89818 - DNA, 201 bp, Homo sapiens
cttcatcctgcgctgcggcaaggccctgaacgagcgcaaggccgaggtgaggctgcagttccatgatgtggccggcgacatcttccaccagcagtgcaagygcaacgagctggtgatccgcgtgcagcccaacgaggccgtgtacaccaagatgatgaccaagaagccgggcatgttcttcaaccccgaggagtcggagct

SEQ ID NO: 89819 - DNA, 201 bp, Homo sapiens
ttcatcctgcgctgcggcaaggccctgaacgagcgcaaggccgaggtgaggctgcagttccatgatgtggccggcgacatcttccaccagcagtgcaagcrcaacgagctggtgatccgcgtgcagcccaacgaggccgtgtacaccaagatgatgaccaagaagccgggcatgttcttcaaccccgaggagtcggagctg

SEQ ID NO: 89820 - DNA, 201 bp, Homo sapiens
ctggggtcacaggccaaccgcctcttctacctggccttgcccccgaccgtctacgaggccgtcaccaagaacattcacgagtcctgcatgagccagatagrctggaaccgcatcatcgtggagaagcccttcgggagggacctgcagagctctgaccggctgtccaaccacatctcctccctgttccgtgaggaccagatc

SEQ ID NO: 89821 - DNA, 201 bp, Homo sapiens
ctgcgctgcggcaaggccctgaacgagcgcaaggccgaggtgaggctgcagttccatgatgtggccggcgacatcttccaccagcagtgcaagcgcaacgrgctggtgatccgcgtgcagcccaacgaggccgtgtacaccaagatgatgaccaagaagccgggcatgttcttcaaccccgaggagtcggagctggacctg

SEQ ID NO: 89822 - DNA, 201 bp, Homo sapiens
caaggccctgaacgagcgcaaggccgaggtgaggctgcagttccatgatgtggccggcgacatcttccaccagcagtgcaagcgcaacgagctggtgatcsgcgtgcagcccaacgaggccgtgtacaccaagatgatgaccaagaagccgggcatgttcttcaaccccgaggagtcggagctggacctgacctacggcaa

SEQ ID NO: 89823 - DNA, 201 bp, Homo sapiens
cctggggtcacaggccaaccgcctcttctacctggccttgcccccgaccgtctacgaggccgtcaccaagaacattcacgagtcctgcatgagccagatargctggaaccgcatcatcgtggagaagcccttcgggagggacctgcagagctctgaccggctgtccaaccacatctcctccctgttccgtgaggaccagat

SEQ ID NO: 89824 - DNA, 201 bp, Homo sapiens
aaggccctgaacgagcgcaaggccgaggtgaggctgcagttccatgatgtggccggcgacatcttccaccagcagtgcaagcgcaacgagctggtgatccrcgtgcagcccaacgaggccgtgtacaccaagatgatgaccaagaagccgggcatgttcttcaaccccgaggagtcggagctggacctgacctacggcaac

SEQ ID NO: 89825 - DNA, 201 bp, Homo sapiens
gtcacaggccaaccgcctcttctacctggccttgcccccgaccgtctacgaggccgtcaccaagaacattcacgagtcctgcatgagccagataggctggraccgcatcatcgtggagaagcccttcgggagggacctgcagagctctgaccggctgtccaaccacatctcctccctgttccgtgaggaccagatctaccg

SEQ ID NO: 89826 - DNA, 201 bp, Homo sapiens
ggccctgaacgagcgcaaggccgaggtgaggctgcagttccatgatgtggccggcgacatcttccaccagcagtgcaagcgcaacgagctggtgatccgcstgcagcccaacgaggccgtgtacaccaagatgatgaccaagaagccgggcatgttcttcaaccccgaggagtcggagctggacctgacctacggcaacag

SEQ ID NO: 89827 - DNA, 201 bp, Homo sapiens
caggccaaccgcctcttctacctggccttgcccccgaccgtctacgaggccgtcaccaagaacattcacgagtcctgcatgagccagataggctggaaccrcatcatcgtggagaagcccttcgggagggacctgcagagctctgaccggctgtccaaccacatctcctccctgttccgtgaggaccagatctaccgcatc

SEQ ID NO: 89828 - DNA, 201 bp, Homo sapiens
gagctctgaccggctgtccaaccacatctcctccctgttccgtgaggaccagatctaccgcatcgaccactacctgggcaaggagatggtgcagaacctcrtggtgctgagatttgccaacaggatcttcggccccatctggaaccgggacaacatcgcctgcgttatcctcaccttcaaggagccctttggcactgaggg

SEQ ID NO: 89829 - DNA, 201 bp, Homo sapiens
ctctgaccggctgtccaaccacatctcctccctgttccgtgaggaccagatctaccgcatcgaccactacctgggcaaggagatggtgcagaacctcatgstgctgagatttgccaacaggatcttcggccccatctggaaccgggacaacatcgcctgcgttatcctcaccttcaaggagccctttggcactgagggtcg

SEQ ID NO: 89830 - DNA, 201 bp, Homo sapiens
tgtccaaccacatctcctccctgttccgtgaggaccagatctaccgcatcgaccactacctgggcaaggagatggtgcagaacctcatggtgctgagattkgccaacaggatcttcggccccatctggaaccgggacaacatcgcctgcgttatcctcaccttcaaggagccctttggcactgagggtcgcgggggctatt

SEQ ID NO: 89831 - DNA, 201 bp, Homo sapiens
atcccgctccggagagaagtctgagtccgccaggctctgcaggcccgcggaagctcgcgtcatggcagagcaggtggccctgagccggacccaggtgtgcrggatcctgcgggaagagcttttccagggcgatgccttccatcagtcggatacacacatattcatcatcatgggtgcatcgggtgacctggccaagaagaa

SEQ ID NO: 89832 - DNA, 201 bp, Homo sapiens
catctggaaccgggacaacatcgcctgcgttatcctcaccttcaaggagccctttggcactgagggtcgcgggggctatttcgatgaatttgggatcatcsgggacgtgatgcagaaccacctactgcagatgctgtgtctggtggccatggagaagcccgcctccaccaactcagatgacgtccgtgatgagaaggtcaa

SEQ ID NO: 89833 - DNA, 201 bp, Homo sapiens
ctatttcgatgaatttgggatcatccgggacgtgatgcagaaccacctactgcagatgctgtgtctggtggccatggagaagcccgcctccaccaactcasatgacgtccgtgatgagaaggtcaaggtgttgaaatgcatctcagaggtgcaggccaacaatgtggtcctgggccagtacgtggggaaccccgatggaga

SEQ ID NO: 89834 - DNA, 201 bp, Homo sapiens
ggccggcgacatcttccaccagcagtgcaagcgcaacgagctggtgatccgcgtgcagcccaacgaggccgtgtacaccaagatgatgaccaagaagccgkgcatgttcttcaaccccgaggagtcggagctggacctgacctacggcaacagatacaagaacgtgaagctccctgacgcctacgagcgcctcatcctgga

SEQ ID NO: 89835 - DNA, 201 bp, Homo sapiens
tcgatgaatttgggatcatccgggacgtgatgcagaaccacctactgcagatgctgtgtctggtggccatggagaagcccgcctccaccaactcagatgamgtccgtgatgagaaggtcaaggtgttgaaatgcatctcagaggtgcaggccaacaatgtggtcctgggccagtacgtggggaaccccgatggagagggcg

SEQ ID NO: 89836 - DNA, 201 bp, Homo sapiens
gggccgcatcccgctccggagagaagtctgagtccgccaggctctgcaggcccgcggaagctcgcgtcatggcagagcaggtggccctgagccggacccasgtgtgcgggatcctgcgggaagagcttttccagggcgatgccttccatcagtcggatacacacatattcatcatcatgggtgcatcgggtgacctggcca

SEQ ID NO: 89837 - DNA, 201 bp, Homo sapiens
ggccgcatcccgctccggagagaagtctgagtccgccaggctctgcaggcccgcggaagctcgcgtcatggcagagcaggtggccctgagccggacccagktgtgcgggatcctgcgggaagagcttttccagggcgatgccttccatcagtcggatacacacatattcatcatcatgggtgcatcgggtgacctggccaa

SEQ ID NO: 89838 - DNA, 201 bp, Homo sapiens; identical to SEQ ID NO: 89737

SEQ ID NO: 89839 - DNA, 201 bp, Homo sapiens; identical to SEQ ID NO: 89738

SEQ ID NO: 89840 - DNA, 201 bp, Homo sapiens; identical to SEQ ID NO: 89739

SEQ ID NO: 89841 - DNA, 201 bp, Homo sapiens; identical to SEQ ID NO: 89740

SEQ ID NO: 89842 - DNA, 201 bp, Homo sapiens; identical to SEQ ID NO: 89741

SEQ ID NO: 89843 - DNA, 201 bp, Homo sapiens
gatgatgcagcctcctaccagcgcctcaacagccacatgaatgccctccacctggggtcaggctggaaccgcatcatcgtggagaagcccttcgggagggrcctgcagagctctgaccggctgtccaaccacatctcctccctgttccgtgaggaccagatctaccgcatcgaccactacctgggcaaggagatggtgcag

SEQ ID NO: 89844 - DNA, 201 bp, Homo sapiens; identical to SEQ ID NO: 89743

SEQ ID NO: 89845 - DNA, 201 bp, Homo sapiens; identical to SEQ ID NO: 89744

SEQ ID NO: 89846 - DNA, 201 bp, Homo sapiens; identical to SEQ ID NO: 89745

SEQ ID NO: 89847 - DNA, 201 bp, Homo sapiens; identical to SEQ ID NO: 89746

SEQ ID NO: 89848 - DNA, 201 bp, Homo sapiens; identical to SEQ ID NO: 89747

SEQ ID NO: 89849 - DNA, 201 bp, Homo sapiens; identical to SEQ ID NO: 89748

SEQ ID NO: 89850 - DNA, 201 bp, Homo sapiens; identical to SEQ ID NO: 89749

SEQ ID NO: 89851 - DNA, 201 bp, Homo sapiens; identical to SEQ ID NO: 89750

SEQ ID NO: 89852 - DNA, 201 bp, Homo sapiens; identical to SEQ ID NO: 89751

SEQ ID NO: 89853 - DNA, 201 bp, Homo sapiens; identical to SEQ ID NO: 89752

SEQ ID NO: 89854 - DNA, 201 bp, Homo sapiens; identical to SEQ ID NO: 89753

SEQ ID NO: 89855 - DNA, 201 bp, Homo sapiens; identical to SEQ ID NO: 89754

SEQ ID NO: 89856 - DNA, 201 bp, Homo sapiens; identical to SEQ ID NO: 89755

SEQ ID NO: 89857 - DNA, 201 bp, Homo sapiens; identical to SEQ ID NO: 89756

SEQ ID NO: 89858 - DNA, 201 bp, Homo sapiens; identical to SEQ ID NO: 89757

SEQ ID NO: 89859 - DNA, 201 bp, Homo sapiens; identical to SEQ ID NO: 89758

SEQ ID NO: 89860 - DNA, 201 bp, Homo sapiens; identical to SEQ ID NO: 89759

SEQ ID NO: 89861 - DNA, 201 bp, Homo sapiens
ctcacagtggctgacatccgcaaacagagtgagcccttcttcaaggccaccccagaggagaagctcaagctggaggacttctttgcccgcaactcctatgwggctggccagtacgatgatgcagcctcctaccagcgcctcaacagccacatgaatgccctccacctggggtcaggctggaaccgcatcatcgtggagaag

SEQ ID NO: 89862 - DNA, 201 bp, Homo sapiens
acgctgccggcggaagtggagccctccgcgagcgcgcgaggccgccggggcaggcggggaaaccggacagtaggggcggggccgggccggcgatggggatkcgggagcactacgcggagctgcacccgtgcccgccggaattggggatgcagagcagcggcagcgggtatggcaggcagccggcgggccggcctccagcgc

SEQ ID NO: 89863 - DNA, 201 bp, Homo sapiens; identical to SEQ ID NO: 89761

SEQ ID NO: 89864 - DNA, 201 bp, Homo sapiens; identical to SEQ ID NO: 89762

SEQ ID NO: 89865 - DNA, 201 bp, Homo sapiens; identical to SEQ ID NO: 89763

SEQ ID NO: 89866 - DNA, 201 bp, Homo sapiens; identical to SEQ ID NO: 89764

SEQ ID NO: 89867 - DNA, 201 bp, Homo sapiens; identical to SEQ ID NO: 89765

SEQ ID NO: 89868 - DNA, 201 bp, Homo sapiens; identical to SEQ ID NO: 89766

SEQ ID NO: 89869 - DNA, 201 bp, Homo sapiens; identical to SEQ ID NO: 89767

SEQ ID NO: 89870 - DNA, 201 bp, Homo sapiens; identical to SEQ ID NO: 89768

SEQ ID NO: 89871 - DNA, 201 bp, Homo sapiens
tcccgcctcacagtggctgacatccgcaaacagagtgagcccttcttcaaggccaccccagaggagaagctcaagctggaggacttctttgcccgcaactsctatgtggctggccagtacgatgatgcagcctcctaccagcgcctcaacagccacatgaatgccctccacctggggtcaggctggaaccgcatcatcgtg

SEQ ID NO: 89872 - DNA, 201 bp, Homo sapiens; identical to SEQ ID NO: 89770

SEQ ID NO: 89873 - DNA, 201 bp, Homo sapiens
catccgcaaacagagtgagcccttcttcaaggccaccccagaggagaagctcaagctggaggacttctttgcccgcaactcctatgtggctggccagtacratgatgcagcctcctaccagcgcctcaacagccacatgaatgccctccacctggggtcaggctggaaccgcatcatcgtggagaagcccttcgggaggga

SEQ ID NO: 89874 - DNA, 201 bp, Homo sapiens; identical to SEQ ID NO: 89772

SEQ ID NO: 89875 - DNA, 201 bp, Homo sapiens
agaggagaagctcaagctggaggacttctttgcccgcaactcctatgtggctggccagtacgatgatgcagcctcctaccagcgcctcaacagccacatgratgccctccacctggggtcaggctggaaccgcatcatcgtggagaagcccttcgggagggacctgcagagctctgaccggctgtccaaccacatctcctc

SEQ ID NO: 89876 - DNA, 201 bp, Homo sapiens; identical to SEQ ID NO: 89774

SEQ ID NO: 89877 - DNA, 201 bp, Homo sapiens
aagctcaagctggaggacttctttgcccgcaactcctatgtggctggccagtacgatgatgcagcctcctaccagcgcctcaacagccacatgaatgcccbccacctggggtcaggctggaaccgcatcatcgtggagaagcccttcgggagggacctgcagagctctgaccggctgtccaaccacatctcctccctgttc

SEQ ID NO: 89878 - DNA, 201 bp, Homo sapiens; identical to SEQ ID NO: 89777

SEQ ID NO: 89879 - DNA, 201 bp, Homo sapiens
ctggaggacttctttgcccgcaactcctatgtggctggccagtacgatgatgcagcctcctaccagcgcctcaacagccacatgaatgccctccacctggkgtcaggctggaaccgcatcatcgtggagaagcccttcgggagggacctgcagagctctgaccggctgtccaaccacatctcctccctgttccgtgaggac

SEQ ID NO: 89880 - DNA, 201 bp, Homo sapiens; identical to SEQ ID NO: 89779

SEQ ID NO: 89881 - DNA, 201 bp, Homo sapiens; identical to SEQ ID NO: 89780

SEQ ID NO: 89882 - DNA, 201 bp, Homo sapiens; identical to SEQ ID NO: 89782

SEQ ID NO: 89883 - DNA, 201 bp, Homo sapiens; identical to SEQ ID NO: 89783

SEQ ID NO: 89884 - DNA, 201 bp, Homo sapiens; identical to SEQ ID NO: 89784

SEQ ID NO: 89885 - DNA, 201 bp, Homo sapiens; identical to SEQ ID NO: 89785

SEQ ID NO: 89886 - DNA, 201 bp, Homo sapiens; identical to SEQ ID NO: 89786

SEQ ID NO: 89887 - DNA, 201 bp, Homo sapiens; identical to SEQ ID NO: 89787

SEQ ID NO: 89888 - DNA, 201 bp, Homo sapiens; identical to SEQ ID NO: 89788

SEQ ID NO: 89889 - DNA, 201 bp, Homo sapiens; identical to SEQ ID NO: 89789

SEQ ID NO: 89890 - DNA, 201 bp, Homo sapiens; identical to SEQ ID NO: 89790

SEQ ID NO: 89891 - DNA, 201 bp, Homo sapiens; identical to SEQ ID NO: 89791

SEQ ID NO: 89892 - DNA, 201 bp, Homo sapiens; identical to SEQ ID NO: 89792

SEQ ID NO: 89893 - DNA, 201 bp, Homo sapiens; identical to SEQ ID NO: 89793

SEQ ID NO: 89894 - DNA, 201 bp, Homo sapiens
gtggccacgctgccggcggaagtggagccctccgcgagcgcgcgaggccgccggggcaggcggggaaaccggacagtaggggcggggccgggccggcgatkgggatgcgggagcactacgcggagctgcacccgtgcccgccggaattggggatgcagagcagcggcagcgggtatggcaggcagccggcgggccggcctc

SEQ ID NO: 89895 - DNA, 201 bp, Homo sapiens
agcctcctaccagcgcctcaacagccacatgaatgccctccacctggggtcaggctggaaccgcatcatcgtggagaagcccttcgggagggacctgcagwgctctgaccggctgtccaaccacatctcctccctgttccgtgaggaccagatctaccgcatcgaccactacctgggcaaggagatggtgcagaacctcat

SEQ ID NO: 89896 - DNA, 201 bp, Homo sapiens; identical to SEQ ID NO: 89795

SEQ ID NO: 89897 - DNA, 201 bp, Homo sapiens; identical to SEQ ID NO: 89796

SEQ ID NO: 89898 - DNA, 201 bp, Homo sapiens; identical to SEQ ID NO: 89797

SEQ ID NO: 89899 - DNA, 201 bp, Homo sapiens; identical to SEQ ID NO: 89798

SEQ ID NO: 89900 - DNA, 201 bp, Homo sapiens; identical to SEQ ID NO: 89799

SEQ ID NO: 89901 - DNA, 201 bp, Homo sapiens; identical to SEQ ID NO: 89800

SEQ ID NO: 89902 - DNA, 201 bp, Homo sapiens; identical to SEQ ID NO: 89801

SEQ ID NO: 89903 - DNA, 201 bp, Homo sapiens; identical to SEQ ID NO: 89802

SEQ ID NO: 89904 - DNA, 201 bp, Homo sapiens; identical to SEQ ID NO: 89803

SEQ ID NO: 89905 - DNA, 201 bp, Homo sapiens; identical to SEQ ID NO: 89805

SEQ ID NO: 89906 - DNA, 201 bp, Homo sapiens; identical to SEQ ID NO: 89806

SEQ ID NO: 89907 - DNA, 201 bp, Homo sapiens; identical to SEQ ID NO: 89807

SEQ ID NO: 89908 - DNA, 201 bp, Homo sapiens; identical to SEQ ID NO: 89808

SEQ ID NO: 89909 - DNA, 201 bp, Homo sapiens; identical to SEQ ID NO: 89809

SEQ ID NO: 89910 - DNA, 201 bp, Homo sapiens; identical to SEQ ID NO: 89810

SEQ ID NO: 89911 - DNA, 201 bp, Homo sapiens
taccagcgcctcaacagccacatgaatgccctccacctggggtcaggctggaaccgcatcatcgtggagaagcccttcgggagggacctgcagagctctgwccggctgtccaaccacatctcctccctgttccgtgaggaccagatctaccgcatcgaccactacctgggcaaggagatggtgcagaacctcatggtgctg

SEQ ID NO: 89912 - DNA, 201 bp, Homo sapiens
ccagcgcctcaacagccacatgaatgccctccacctggggtcaggctggaaccgcatcatcgtggagaagcccttcgggagggacctgcagagctctgacyggctgtccaaccacatctcctccctgttccgtgaggaccagatctaccgcatcgaccactacctgggcaaggagatggtgcagaacctcatggtgctgag

SEQ ID NO: 89913 - DNA, 201 bp, Homo sapiens; identical to SEQ ID NO: 89813

SEQ ID NO: 89914 - DNA, 201 bp, Homo sapiens
atgaatgccctccacctggggtcaggctggaaccgcatcatcgtggagaagcccttcgggagggacctgcagagctctgaccggctgtccaaccacatctyctccctgttccgtgaggaccagatctaccgcatcgaccactacctgggcaaggagatggtgcagaacctcatggtgctgagatttgccaacaggatcttc

SEQ ID NO: 89915 - DNA, 201 bp, Homo sapiens; identical to SEQ ID NO: 89815

SEQ ID NO: 89916 - DNA, 201 bp, Homo sapiens; identical to SEQ ID NO: 89816

SEQ ID NO: 89917 - DNA, 201 bp, Homo sapiens; identical to SEQ ID NO: 89817

SEQ ID NO: 89918 - DNA, 201 bp, Homo sapiens; identical to SEQ ID NO: 89818

SEQ ID NO: 89919 - DNA, 201 bp, Homo sapiens
gacttctttgcccgcaactcctatgtggctggccagtacgatgatgcagcctcctaccagcgcctcaacagccacatgaatgccctccacctggggtcagrctggaaccgcatcatcgtggagaagcccttcgggagggacctgcagagctctgaccggctgtccaaccacatctcctccctgttccgtgaggaccagatc

SEQ ID NO: 89920 - DNA, 201 bp, Homo sapiens; identical to SEQ ID NO: 89819

SEQ ID NO: 89921 - DNA, 201 bp, Homo sapiens; identical to SEQ ID NO: 89821

SEQ ID NO: 89922 - DNA, 201 bp, Homo sapiens
ggacttctttgcccgcaactcctatgtggctggccagtacgatgatgcagcctcctaccagcgcctcaacagccacatgaatgccctccacctggggtcargctggaaccgcatcatcgtggagaagcccttcgggagggacctgcagagctctgaccggctgtccaaccacatctcctccctgttccgtgaggaccagat

SEQ ID NO: 89923 - DNA, 201 bp, Homo sapiens; identical to SEQ ID NO: 89822

SEQ ID NO: 89924 - DNA, 201 bp, Homo sapiens
ccagaggaggcgtggccacgctgccggcggaagtggagccctccgcgagcgcgcgaggccgccggggcaggcggggaaaccggacagtaggggcggggcckggccggcgatggggatgcgggagcactacgcggagctgcacccgtgcccgccggaattggggatgcagagcagcggcagcgggtatggcaggcagccggc

SEQ ID NO: 89925 - DNA, 201 bp, Homo sapiens
ctttgcccgcaactcctatgtggctggccagtacgatgatgcagcctcctaccagcgcctcaacagccacatgaatgccctccacctggggtcaggctggraccgcatcatcgtggagaagcccttcgggagggacctgcagagctctgaccggctgtccaaccacatctcctccctgttccgtgaggaccagatctaccg

SEQ ID NO: 89926 - DNA, 201 bp, Homo sapiens; identical to SEQ ID NO: 89824

SEQ ID NO: 89927 - DNA, 201 bp, Homo sapiens
gcccgcaactcctatgtggctggccagtacgatgatgcagcctcctaccagcgcctcaacagccacatgaatgccctccacctggggtcaggctggaaccrcatcatcgtggagaagcccttcgggagggacctgcagagctctgaccggctgtccaaccacatctcctccctgttccgtgaggaccagatctaccgcatc

SEQ ID NO: 89928 - DNA, 201 bp, Homo sapiens; identical to SEQ ID NO: 89826

SEQ ID NO: 89929 - DNA, 201 bp, Homo sapiens; identical to SEQ ID NO: 89828

SEQ ID NO: 89930 - DNA, 201 bp, Homo sapiens; identical to SEQ ID NO: 89829

SEQ ID NO: 89931 - DNA, 201 bp, Homo sapiens; identical to SEQ ID NO: 89830

SEQ ID NO: 89932 - DNA, 201 bp, Homo sapiens; identical to SEQ ID NO: 89832

SEQ ID NO: 89933 - DNA, 201 bp, Homo sapiens
cggtcgtacacttcggggctgcgagcgcggagggcgacgacgacgaagcgcagacagcgtcatggcagagcaggtggccctgagccggacccaggtgtgcrggatcctgcgggaagagcttttccagggcgatgccttccatcagtcggatacacacatattcatcatcatgggtgcatcgggtgacctggccaagaagaa

SEQ ID NO: 89934 - DNA, 201 bp, Homo sapiens; identical to SEQ ID NO: 89833

SEQ ID NO: 89935 - DNA, 201 bp, Homo sapiens; identical to SEQ ID NO: 89835

SEQ ID NO: 89936 - DNA, 201 bp, Homo sapiens; identical to SEQ ID NO: 89834

SEQ ID NO: 89937 - DNA, 201 bp, Homo sapiens
ccggaaacggtcgtacacttcggggctgcgagcgcggagggcgacgacgacgaagcgcagacagcgtcatggcagagcaggtggccctgagccggacccasgtgtgcgggatcctgcgggaagagcttttccagggcgatgccttccatcagtcggatacacacatattcatcatcatgggtgcatcgggtgacctggcca

SEQ ID NO: 89938 - DNA, 201 bp, Homo sapiens
cggaaacggtcgtacacttcggggctgcgagcgcggagggcgacgacgacgaagcgcagacagcgtcatggcagagcaggtggccctgagccggacccagktgtgcgggatcctgcgggaagagcttttccagggcgatgccttccatcagtcggatacacacatattcatcatcatgggtgcatcgggtgacctggccaa

SEQ ID NO: 89939 - DNA, 201 bp, Homo sapiens
aaccgcatcatcgtggagaagcccttcgggagggacctgcagagctctgaccggctgtccaaccacatctcctccctgttccgtgaggaccagatctaccscatcgaccactacctgggcaaggagatggtgcagaacctcatggtgctgaggtggggccaagcctgggccgggggaccagggtgggggtggtactcagga

SEQ ID NO: 89940 - DNA, 201 bp, Homo sapiens
atacaagaacgtgaagctccctgacgcctacgagcgcctcatcctggacgtcttctgcgggagccagatgcacttcgtgcgcagcgacgagctccgtgagrcctggcgtattttcaccccactgctgcaccagattgagctggagaagcccaagcccatcccctatatttatggcaggtgaggaaagggtgggggctgggg

SEQ ID NO: 89941 - DNA, 201 bp, Homo sapiens; identical to SEQ ID NO: 89740

SEQ ID NO: 89942 - DNA, 201 bp, Homo sapiens; identical to SEQ ID NO: 89739

SEQ ID NO: 89943 - DNA, 201 bp, Homo sapiens; identical to SEQ ID NO: 89741

SEQ ID NO: 89944 - DNA, 201 bp, Homo sapiens
gaacattcacgagtcctgcatgagccagatggggtaacgcagctccgggctcccagcagaggctggaaccgcatcatcgtggagaagcccttcgggagggrcctgcagagctctgaccggctgtccaaccacatctcctccctgttccgtgaggaccagatctaccgcatcgaccactacctgggcaaggagatggtgcag

SEQ ID NO: 89945 - DNA, 201 bp, Homo sapiens; identical to SEQ ID NO: 89743

SEQ ID NO: 89946 - DNA, 201 bp, Homo sapiens
tgaatttgggatcatccgggacgtgatgcagaaccacctactgcagatgctgtgtctggtggccatggagaagcccgcctccaccaactcagatgacgtcygtgatgagaaggggtgcccttcatcctgcgctgcggcaaggccctgaacgagcgcaaggccgaggtgaggctgcagttccatgatgtggccggcgacatc

SEQ ID NO: 89947 - DNA, 201 bp, Homo sapiens
gaatttgggatcatccgggacgtgatgcagaaccacctactgcagatgctgtgtctggtggccatggagaagcccgcctccaccaactcagatgacgtccrtgatgagaaggggtgcccttcatcctgcgctgcggcaaggccctgaacgagcgcaaggccgaggtgaggctgcagttccatgatgtggccggcgacatct

SEQ ID NO: 89948 - DNA, 201 bp, Homo sapiens; identical to SEQ ID NO: 89749

SEQ ID NO: 89949 - DNA, 201 bp, Homo sapiens
catccgggacgtgatgcagaaccacctactgcagatgctgtgtctggtggccatggagaagcccgcctccaccaactcagatgacgtccgtgatgagaagkggtgcccttcatcctgcgctgcggcaaggccctgaacgagcgcaaggccgaggtgaggctgcagttccatgatgtggccggcgacatcttccaccagcag

SEQ ID NO: 89950 - DNA, 201 bp, Homo sapiens; identical to SEQ ID NO: 89751

SEQ ID NO: 89951 - DNA, 201 bp, Homo sapiens
gggacgtgatgcagaaccacctactgcagatgctgtgtctggtggccatggagaagcccgcctccaccaactcagatgacgtccgtgatgagaaggggtgyccttcatcctgcgctgcggcaaggccctgaacgagcgcaaggccgaggtgaggctgcagttccatgatgtggccggcgacatcttccaccagcagtgcaa

SEQ ID NO: 89952 - DNA, 201 bp, Homo sapiens; identical to SEQ ID NO: 89752

SEQ ID NO: 89953 - DNA, 201 bp, Homo sapiens; identical to SEQ ID NO: 89756

SEQ ID NO: 89954 - DNA, 201 bp, Homo sapiens; identical to SEQ ID NO: 89754

SEQ ID NO: 89955 - DNA, 201 bp, Homo sapiens; identical to SEQ ID NO: 89755

SEQ ID NO: 89956 - DNA, 201 bp, Homo sapiens; identical to SEQ ID NO: 89757

SEQ ID NO: 89957 - DNA, 201 bp, Homo sapiens; identical to SEQ ID NO: 89758

SEQ ID NO: 89958 - DNA, 201 bp, Homo sapiens; identical to SEQ ID NO: 89759

SEQ ID NO: 89959 - DNA, 201 bp, Homo sapiens; identical to SEQ ID NO: 89760

SEQ ID NO: 89960 - DNA, 201 bp, Homo sapiens; identical to SEQ ID NO: 89862

SEQ ID NO: 89961 - DNA, 201 bp, Homo sapiens
gcctccaccaactcagatgacgtccgtgatgagaaggggtgcccttcatcctgcgctgcggcaaggccctgaacgagcgcaaggccgaggtgaggctgcarttccatgatgtggccggcgacatcttccaccagcagtgcaagcgcaacgagctggtgatccgcgtgcagcccaacgaggccgtgtacaccaagatgatga

SEQ ID NO: 89962 - DNA, 201 bp, Homo sapiens; identical to SEQ ID NO: 89767

SEQ ID NO: 89963 - DNA, 201 bp, Homo sapiens; identical to SEQ ID NO: 89768

SEQ ID NO: 89964 - DNA, 201 bp, Homo sapiens; identical to SEQ ID NO: 89769

SEQ ID NO: 89965 - DNA, 201 bp, Homo sapiens
ctggacctgacctacggcaacagatacaagaacgtgaagctccctgacgcctacgagcgcctcatcctggacgtcttctgcgggagccagatgcacttcgwgcgcagcgacgagctccgtgaggcctggcgtattttcaccccactgctgcaccagattgagctggagaagcccaagcccatcccctatatttatggcagg

SEQ ID NO: 89966 - DNA, 201 bp, Homo sapiens; identical to SEQ ID NO: 89771

SEQ ID NO: 89967 - DNA, 201 bp, Homo sapiens
ggacctgacctacggcaacagatacaagaacgtgaagctccctgacgcctacgagcgcctcatcctggacgtcttctgcgggagccagatgcacttcgtgygcagcgacgagctccgtgaggcctggcgtattttcaccccactgctgcaccagattgagctggagaagcccaagcccatcccctatatttatggcaggtg

SEQ ID NO: 89968 - DNA, 201 bp, Homo sapiens; identical to SEQ ID NO: 89773

SEQ ID NO: 89969 - DNA, 201 bp, Homo sapiens
gacctgacctacggcaacagatacaagaacgtgaagctccctgacgcctacgagcgcctcatcctggacgtcttctgcgggagccagatgcacttcgtgcrcagcgacgagctccgtgaggcctggcgtattttcaccccactgctgcaccagattgagctggagaagcccaagcccatcccctatatttatggcaggtga

SEQ ID NO: 89970 - DNA, 201 bp, Homo sapiens
tttgcccgcaactcctatgtggctggccagtacgatgatgcagcctcctaccagcgcctcaacagccacatgaatgccctccacctggggtcacaggccamccgcctcttctacctggccttgcccccgaccgtctacgaggccgtcaccaagaacattcacgagtcctgcatgagccagatggggtaacgcagctccggg

SEQ ID NO: 89971 - DNA, 201 bp, Homo sapiens; identical to SEQ ID NO: 89776

SEQ ID NO: 89972 - DNA, 201 bp, Homo sapiens
aacagatacaagaacgtgaagctccctgacgcctacgagcgcctcatcctggacgtcttctgcgggagccagatgcacttcgtgcgcagcgacgagctccbtgaggcctggcgtattttcaccccactgctgcaccagattgagctggagaagcccaagcccatcccctatatttatggcaggtgaggaaagggtgggggc

SEQ ID NO: 89973 - DNA, 201 bp, Homo sapiens
ctggaggacttctttgcccgcaactcctatgtggctggccagtacgatgatgcagcctcctaccagcgcctcaacagccacatgaatgccctccacctggkgtcacaggccaaccgcctcttctacctggccttgcccccgaccgtctacgaggccgtcaccaagaacattcacgagtcctgcatgagccagatggggtaa

SEQ ID NO: 89974 - DNA, 201 bp, Homo sapiens
ggtcagttcctccaccttgcccctccctgcagatttgccaacaggatcttcggccccatctggaaccgggacaacatcgcctgcgttatcctcaccttcarggagccctttggcactgagggtcgcgggggctatttcgatgaatttgggatcatccgggacgtgatgcagaaccacctactgcagatgctgtgtctggtg

SEQ ID NO: 89975 - DNA, 201 bp, Homo sapiens
tgaggaaagggtgggggctggggacagagcccagcgggcaggggcggggtgagggtggagctacctcatgcctctcctccacccgtcactctccagccgargccccacggaggcagacgagctgatgaagagagtgggtttccagtatgagggcacctacaagtgggtgaacccccacaagctctgagccctgggcaccca

SEQ ID NO: 89976 - DNA, 201 bp, Homo sapiens
tgcccgcaactcctatgtggctggccagtacgatgatgcagcctcctaccagcgcctcaacagccacatgaatgccctccacctggggtcacaggccaacygcctcttctacctggccttgcccccgaccgtctacgaggccgtcaccaagaacattcacgagtcctgcatgagccagatggggtaacgcagctccgggct

SEQ ID NO: 89977 - DNA, 201 bp, Homo sapiens
gaggaaagggtgggggctggggacagagcccagcgggcaggggcggggtgagggtggagctacctcatgcctctcctccacccgtcactctccagccgagkccccacggaggcagacgagctgatgaagagagtgggtttccagtatgagggcacctacaagtgggtgaacccccacaagctctgagccctgggcacccac

SEQ ID NO: 89978 - DNA, 201 bp, Homo sapiens
gaaagggtgggggctggggacagagcccagcgggcaggggcggggtgagggtggagctacctcatgcctctcctccacccgtcactctccagccgaggccycacggaggcagacgagctgatgaagagagtgggtttccagtatgagggcacctacaagtgggtgaacccccacaagctctgagccctgggcacccacctc

SEQ ID NO: 89979 - DNA, 201 bp, Homo sapiens; identical to SEQ ID NO: 89787

SEQ ID NO: 89980 - DNA, 201 bp, Homo sapiens; identical to SEQ ID NO: 89788

SEQ ID NO: 89981 - DNA, 201 bp, Homo sapiens; identical to SEQ ID NO: 89789

SEQ ID NO: 89982 - DNA, 201 bp, Homo sapiens; identical to SEQ ID NO: 89790

SEQ ID NO: 89983 - DNA, 201 bp, Homo sapiens
ggggcggggtgagggtggagctacctcatgcctctcctccacccgtcactctccagccgaggccccacggaggcagacgagctgatgaagagagtgggttkccagtatgagggcacctacaagtgggtgaacccccacaagctctgagccctgggcacccacctccacccccgccacggccaccctccttcccgccgcccg

SEQ ID NO: 89984 - DNA, 201 bp, Homo sapiens
cccactgcctccccgaggacgaattcctccagaactcagacaagggtgacccctcacatgtggcccctgcaccacagaggcccaaggtcagttcctccacyttgcccctccctgcagatttgccaacaggatcttcggccccatctggaaccgggacaacatcgcctgcgttatcctcaccttcaaggagccctttggcac

SEQ ID NO: 89985 - DNA, 201 bp, Homo sapiens; identical to SEQ ID NO: 89894

SEQ ID NO: 89986 - DNA, 201 bp, Homo sapiens
acgagtcctgcatgagccagatggggtaacgcagctccgggctcccagcagaggctggaaccgcatcatcgtggagaagcccttcgggagggacctgcagwgctctgaccggctgtccaaccacatctcctccctgttccgtgaggaccagatctaccgcatcgaccactacctgggcaaggagatggtgcagaacctcat

SEQ ID NO: 89987 - DNA, 201 bp, Homo sapiens
tccgtgatgagaaggggtgcccttcatcctgcgctgcggcaaggccctgaacgagcgcaaggccgaggtgaggctgcagttccatgatgtggccggcgacrtcttccaccagcagtgcaagcgcaacgagctggtgatccgcgtgcagcccaacgaggccgtgtacaccaagatgatgaccaagaagccgggcatgttctt

SEQ ID NO: 89988 - DNA, 201 bp, Homo sapiens
ccgtgatgagaaggggtgcccttcatcctgcgctgcggcaaggccctgaacgagcgcaaggccgaggtgaggctgcagttccatgatgtggccggcgacaycttccaccagcagtgcaagcgcaacgagctggtgatccgcgtgcagcccaacgaggccgtgtacaccaagatgatgaccaagaagccgggcatgttcttc

SEQ ID NO: 89989 - DNA, 201 bp, Homo sapiens
gtgatgagaaggggtgcccttcatcctgcgctgcggcaaggccctgaacgagcgcaaggccgaggtgaggctgcagttccatgatgtggccggcgacatcytccaccagcagtgcaagcgcaacgagctggtgatccgcgtgcagcccaacgaggccgtgtacaccaagatgatgaccaagaagccgggcatgttcttcaa

SEQ ID NO: 89990 - DNA, 201 bp, Homo sapiens; identical to SEQ ID NO: 89799

SEQ ID NO: 89991 - DNA, 201 bp, Homo sapiens; identical to SEQ ID NO: 89800

SEQ ID NO: 89992 - DNA, 201 bp, Homo sapiens; identical to SEQ ID NO: 89802

SEQ ID NO: 89993 - DNA, 201 bp, Homo sapiens; identical to SEQ ID NO: 89801

SEQ ID NO: 89994 - DNA, 201 bp, Homo sapiens; identical to SEQ ID NO: 89803

SEQ ID NO: 89995 - DNA, 201 bp, Homo sapiens
cagccacatgaatgccctccacctggggtcacaggccaaccgcctcttctacctggccttgcccccgaccgtctacgaggccgtcaccaagaacattcacragtcctgcatgagccagatggggtaacgcagctccgggctcccagcagaggctggaaccgcatcatcgtggagaagcccttcgggagggacctgcagagc

SEQ ID NO: 89996 - DNA, 201 bp, Homo sapiens; identical to SEQ ID NO: 89805

SEQ ID NO: 89997 - DNA, 201 bp, Homo sapiens; identical to SEQ ID NO: 89806

SEQ ID NO: 89998 - DNA, 201 bp, Homo sapiens
ctttggcactgagggtcgcgggggctatttcgatgaatttgggatcatccgggacgtgatgcagaaccacctactgcagatgctgtgtctggtggccatgragaagcccgcctccaccaactcagatgacgtccgtgatgagaaggggtgcccttcatcctgcgctgcggcaaggccctgaacgagcgcaaggccgaggtg

SEQ ID NO: 89999 - DNA, 201 bp, Homo sapiens
tgcaccacagaggcccaaggtcagttcctccaccttgcccctccctgcagatttgccaacaggatcttcggccccatctggaaccgggacaacatcgcctrcgttatcctcaccttcaaggagccctttggcactgagggtcgcgggggctatttcgatgaatttgggatcatccgggacgtgatgcagaaccacctactg

SEQ ID NO: 90000 - DNA, 201 bp, Homo sapiens
ctgcatgagccagatggggtaacgcagctccgggctcccagcagaggctggaaccgcatcatcgtggagaagcccttcgggagggacctgcagagctctgwccggctgtccaaccacatctcctccctgttccgtgaggaccagatctaccgcatcgaccactacctgggcaaggagatggtgcagaacctcatggtgctg

SEQ ID NO: 90001 - DNA, 201 bp, Homo sapiens
gcatgagccagatggggtaacgcagctccgggctcccagcagaggctggaaccgcatcatcgtggagaagcccttcgggagggacctgcagagctctgacyggctgtccaaccacatctcctccctgttccgtgaggaccagatctaccgcatcgaccactacctgggcaaggagatggtgcagaacctcatggtgctgag

SEQ ID NO: 90002 - DNA, 201 bp, Homo sapiens; identical to SEQ ID NO: 89813

SEQ ID NO: 90003 - DNA, 201 bp, Homo sapiens
acgcagctccgggctcccagcagaggctggaaccgcatcatcgtggagaagcccttcgggagggacctgcagagctctgaccggctgtccaaccacatctyctccctgttccgtgaggaccagatctaccgcatcgaccactacctgggcaaggagatggtgcagaacctcatggtgctgaggtggggccaagcctgggcc

SEQ ID NO: 90004 - DNA, 201 bp, Homo sapiens; identical to SEQ ID NO: 89815

SEQ ID NO: 90005 - DNA, 201 bp, Homo sapiens
gaaccgcatcatcgtggagaagcccttcgggagggacctgcagagctctgaccggctgtccaaccacatctcctccctgttccgtgaggaccagatctacygcatcgaccactacctgggcaaggagatggtgcagaacctcatggtgctgaggtggggccaagcctgggccgggggaccagggtgggggtggtactcagg

SEQ ID NO: 90006 - DNA, 201 bp, Homo sapiens; identical to SEQ ID NO: 89817

SEQ ID NO: 90007 - DNA, 201 bp, Homo sapiens; identical to SEQ ID NO: 89818

SEQ ID NO: 90008 - DNA, 201 bp, Homo sapiens
cctggccttgcccccgaccgtctacgaggccgtcaccaagaacattcacgagtcctgcatgagccagatggggtaacgcagctccgggctcccagcagagrctggaaccgcatcatcgtggagaagcccttcgggagggacctgcagagctctgaccggctgtccaaccacatctcctccctgttccgtgaggaccagatc

SEQ ID NO: 90009 - DNA, 201 bp, Homo sapiens; identical to SEQ ID NO: 89819

SEQ ID NO: 90010 - DNA, 201 bp, Homo sapiens; identical to SEQ ID NO: 89821

SEQ ID NO: 90011 - DNA, 201 bp, Homo sapiens
acctggccttgcccccgaccgtctacgaggccgtcaccaagaacattcacgagtcctgcatgagccagatggggtaacgcagctccgggctcccagcagargctggaaccgcatcatcgtggagaagcccttcgggagggacctgcagagctctgaccggctgtccaaccacatctcctccctgttccgtgaggaccagat

SEQ ID NO: 90012 - DNA, 201 bp, Homo sapiens; identical to SEQ ID NO: 89822

SEQ ID NO: 90013 - DNA, 201 bp, Homo sapiens; identical to SEQ ID NO: 89924

SEQ ID NO: 90014 - DNA, 201 bp, Homo sapiens
ccttgcccccgaccgtctacgaggccgtcaccaagaacattcacgagtcctgcatgagccagatggggtaacgcagctccgggctcccagcagaggctggraccgcatcatcgtggagaagcccttcgggagggacctgcagagctctgaccggctgtccaaccacatctcctccctgttccgtgaggaccagatctaccg

SEQ ID NO: 90015 - DNA, 201 bp, Homo sapiens; identical to SEQ ID NO: 89824

SEQ ID NO: 90016 - DNA, 201 bp, Homo sapiens
gcccccgaccgtctacgaggccgtcaccaagaacattcacgagtcctgcatgagccagatggggtaacgcagctccgggctcccagcagaggctggaaccrcatcatcgtggagaagcccttcgggagggacctgcagagctctgaccggctgtccaaccacatctcctccctgttccgtgaggaccagatctaccgcatc

SEQ ID NO: 90017 - DNA, 201 bp, Homo sapiens; identical to SEQ ID NO: 89826

SEQ ID NO: 90018 - DNA, 201 bp, Homo sapiens
gagctctgaccggctgtccaaccacatctcctccctgttccgtgaggaccagatctaccgcatcgaccactacctgggcaaggagatggtgcagaacctcrtggtgctgaggtggggccaagcctgggccgggggaccagggtgggggtggtactcaggagcctcacctggcccactgcctccccgaggacgaattcctcc

SEQ ID NO: 90019 - DNA, 201 bp, Homo sapiens
ctctgaccggctgtccaaccacatctcctccctgttccgtgaggaccagatctaccgcatcgaccactacctgggcaaggagatggtgcagaacctcatgstgctgaggtggggccaagcctgggccgggggaccagggtgggggtggtactcaggagcctcacctggcccactgcctccccgaggacgaattcctccaga

SEQ ID NO: 90020 - DNA, 201 bp, Homo sapiens
gaattcctccagaactcagacaagggtgacccctcacatgtggcccctgcaccacagaggcccaaggtcagttcctccaccttgcccctccctgcagattkgccaacaggatcttcggccccatctggaaccgggacaacatcgcctgcgttatcctcaccttcaaggagccctttggcactgagggtcgcgggggctatt

SEQ ID NO: 90021 - DNA, 201 bp, Homo sapiens
catctggaaccgggacaacatcgcctgcgttatcctcaccttcaaggagccctttggcactgagggtcgcgggggctatttcgatgaatttgggatcatcsgggacgtgatgcagaaccacctactgcagatgctgtgtctggtggccatggagaagcccgcctccaccaactcagatgacgtccgtgatgagaaggggtg

SEQ ID NO: 90022 - DNA, 201 bp, Homo sapiens; identical to SEQ ID NO: 89933

SEQ ID NO: 90023 - DNA, 201 bp, Homo sapiens
ctatttcgatgaatttgggatcatccgggacgtgatgcagaaccacctactgcagatgctgtgtctggtggccatggagaagcccgcctccaccaactcasatgacgtccgtgatgagaaggggtgcccttcatcctgcgctgcggcaaggccctgaacgagcgcaaggccgaggtgaggctgcagttccatgatgtggcc

SEQ ID NO: 90024 - DNA, 201 bp, Homo sapiens
tcgatgaatttgggatcatccgggacgtgatgcagaaccacctactgcagatgctgtgtctggtggccatggagaagcccgcctccaccaactcagatgamgtccgtgatgagaaggggtgcccttcatcctgcgctgcggcaaggccctgaacgagcgcaaggccgaggtgaggctgcagttccatgatgtggccggcga

SEQ ID NO: 90025 - DNA, 201 bp, Homo sapiens; identical to SEQ ID NO: 89834

SEQ ID NO: 90026 - DNA, 201 bp, Homo sapiens; identical to SEQ ID NO: 89937

SEQ ID NO: 90027 - DNA, 201 bp, Homo sapiens; identical to SEQ ID NO: 89938

SEQ ID NO: 90028 - DNA, 201 bp, Homo sapiens; identical to SEQ ID NO: 89737

SEQ ID NO: 90029 - DNA, 201 bp, Homo sapiens; identical to SEQ ID NO: 89738

SEQ ID NO: 90030 - DNA, 201 bp, Homo sapiens; identical to SEQ ID NO: 89739

SEQ ID NO: 90031 - DNA, 201 bp, Homo sapiens; identical to SEQ ID NO: 89740

SEQ ID NO: 90032 - DNA, 201 bp, Homo sapiens; identical to SEQ ID NO: 89741

SEQ ID NO: 90033 - DNA, 201 bp, Homo sapiens; identical to SEQ ID NO: 89742

SEQ ID NO: 90034 - DNA, 201 bp, Homo sapiens; identical to SEQ ID NO: 89743

SEQ ID NO: 90035 - DNA, 201 bp, Homo sapiens; identical to SEQ ID NO: 89744

SEQ ID NO: 90036 - DNA, 201 bp, Homo sapiens; identical to SEQ ID NO: 89745

SEQ ID NO: 90037 - DNA, 201 bp, Homo sapiens; identical to SEQ ID NO: 89746

SEQ ID NO: 90038 - DNA, 201 bp, Homo sapiens; identical to SEQ ID NO: 89747

SEQ ID NO: 90039 - DNA, 201 bp, Homo sapiens; identical to SEQ ID NO: 89748

SEQ ID NO: 90040 - DNA, 201 bp, Homo sapiens; identical to SEQ ID NO: 89749

SEQ ID NO: 90041 - DNA, 201 bp, Homo sapiens; identical to SEQ ID NO: 89750

SEQ ID NO: 90042 - DNA, 201 bp, Homo sapiens; identical to SEQ ID NO: 89751

SEQ ID NO: 90043 - DNA, 201 bp, Homo sapiens; identical to SEQ ID NO: 89752

SEQ ID NO: 90044 - DNA, 201 bp, Homo sapiens; identical to SEQ ID NO: 89753

SEQ ID NO: 90045 - DNA, 201 bp, Homo sapiens; identical to SEQ ID NO: 89754

SEQ ID NO: 90046 - DNA, 201 bp, Homo sapiens; identical to SEQ ID NO: 89755

SEQ ID NO: 90047 - DNA, 201 bp, Homo sapiens; identical to SEQ ID NO: 89756

SEQ ID NO: 90048 - DNA, 201 bp, Homo sapiens; identical to SEQ ID NO: 89757

SEQ ID NO: 90049 - DNA, 201 bp, Homo sapiens; identical to SEQ ID NO: 89758

SEQ ID NO: 90050 - DNA, 201 bp, Homo sapiens; identical to SEQ ID NO: 89759

SEQ ID NO: 90051 - DNA, 201 bp, Homo sapiens; identical to SEQ ID NO: 89760

SEQ ID NO: 90052 - DNA, 107 bp, Homo sapiens
cccccgrgaactcgggaagccggcgagaagtgtgaggccgcggtagggccgcatcccgctccggagagaagtctgagtccgccaggctctgcaggcccgcggaagct

SEQ ID NO: 90053 - DNA, 201 bp, Homo sapiens; identical to SEQ ID NO: 89761

SEQ ID NO: 90054 - DNA, 201 bp, Homo sapiens; identical to SEQ ID NO: 89762

SEQ ID NO: 90055 - DNA, 201 bp, Homo sapiens; identical to SEQ ID NO: 89763

SEQ ID NO: 90056 - DNA, 201 bp, Homo sapiens; identical to SEQ ID NO: 89764

SEQ ID NO: 90057 - DNA, 201 bp, Homo sapiens; identical to SEQ ID NO: 89765

SEQ ID NO: 90058 - DNA, 201 bp, Homo sapiens; identical to SEQ ID NO: 89766

SEQ ID NO: 90059 - DNA, 201 bp, Homo sapiens; identical to SEQ ID NO: 89767

SEQ ID NO: 90060 - DNA, 201 bp, Homo sapiens; identical to SEQ ID NO: 89768

SEQ ID NO: 90061 - DNA, 201 bp, Homo sapiens; identical to SEQ ID NO: 89769

SEQ ID NO: 90062 - DNA, 201 bp, Homo sapiens; identical to SEQ ID NO: 89770

SEQ ID NO: 90063 - DNA, 201 bp, Homo sapiens; identical to SEQ ID NO: 89771

SEQ ID NO: 90064 - DNA, 201 bp, Homo sapiens; identical to SEQ ID NO: 89772

SEQ ID NO: 90065 - DNA, 201 bp, Homo sapiens; identical to SEQ ID NO: 89773

SEQ ID NO: 90066 - DNA, 201 bp, Homo sapiens; identical to SEQ ID NO: 89774

SEQ ID NO: 90067 - DNA, 201 bp, Homo sapiens; identical to SEQ ID NO: 89775

SEQ ID NO: 90068 - DNA, 201 bp, Homo sapiens; identical to SEQ ID NO: 89776

SEQ ID NO: 90069 - DNA, 201 bp, Homo sapiens; identical to SEQ ID NO: 89777

SEQ ID NO: 90070 - DNA, 201 bp, Homo sapiens; identical to SEQ ID NO: 89778

SEQ ID NO: 90071 - DNA, 201 bp, Homo sapiens; identical to SEQ ID NO: 89779

SEQ ID NO: 90072 - DNA, 201 bp, Homo sapiens; identical to SEQ ID NO: 89780

SEQ ID NO: 90073 - DNA, 201 bp, Homo sapiens; identical to SEQ ID NO: 89781

SEQ ID NO: 90074 - DNA, 201 bp, Homo sapiens; identical to SEQ ID NO: 89782

SEQ ID NO: 90075 - DNA, 201 bp, Homo sapiens; identical to SEQ ID NO: 89783

SEQ ID NO: 90076 - DNA, 201 bp, Homo sapiens; identical to SEQ ID NO: 89784

SEQ ID NO: 90077 - DNA, 201 bp, Homo sapiens; identical to SEQ ID NO: 89785

SEQ ID NO: 90078 - DNA, 201 bp, Homo sapiens; identical to SEQ ID NO: 89786

SEQ ID NO: 90079 - DNA, 201 bp, Homo sapiens; identical to SEQ ID NO: 89787

SEQ ID NO: 90080 - DNA, 201 bp, Homo sapiens; identical to SEQ ID NO: 89788

SEQ ID NO: 90081 - DNA, 201 bp, Homo sapiens; identical to SEQ ID NO: 89789

SEQ ID NO: 90082 - DNA, 201 bp, Homo sapiens; identical to SEQ ID NO: 89790

SEQ ID NO: 90083 - DNA, 201 bp, Homo sapiens; identical to SEQ ID NO: 89791

SEQ ID NO: 90084 - DNA, 201 bp, Homo sapiens; identical to SEQ ID NO: 89792

SEQ ID NO: 90085 - DNA, 201 bp, Homo sapiens; identical to SEQ ID NO: 89793

SEQ ID NO: 90086 - DNA, 201 bp, Homo sapiens; identical to SEQ ID NO: 89794

SEQ ID NO: 90087 - DNA, 201 bp, Homo sapiens; identical to SEQ ID NO: 89795

SEQ ID NO: 90088 - DNA, 201 bp, Homo sapiens; identical to SEQ ID NO: 89796

SEQ ID NO: 90089 - DNA, 201 bp, Homo sapiens; identical to SEQ ID NO: 89797

SEQ ID NO: 90090 - DNA, 201 bp, Homo sapiens; identical to SEQ ID NO: 89798

SEQ ID NO: 90091 - DNA, 201 bp, Homo sapiens; identical to SEQ ID NO: 89799

SEQ ID NO: 90092 - DNA, 201 bp, Homo sapiens; identical to SEQ ID NO: 89800

SEQ ID NO: 90093 - DNA, 201 bp, Homo sapiens; identical to SEQ ID NO: 89801

SEQ ID NO: 90094 - DNA, 201 bp, Homo sapiens; identical to SEQ ID NO: 89802

SEQ ID NO: 90095 - DNA, 201 bp, Homo sapiens; identical to SEQ ID NO: 89803

SEQ ID NO: 90096 - DNA, 201 bp, Homo sapiens; identical to SEQ ID NO: 89804

SEQ ID NO: 90097 - DNA, 201 bp, Homo sapiens; identical to SEQ ID NO: 89805

SEQ ID NO: 90098 - DNA, 201 bp, Homo sapiens; identical to SEQ ID NO: 89806

SEQ ID NO: 90099 - DNA, 201 bp, Homo sapiens; identical to SEQ ID NO: 89807

SEQ ID NO: 90100 - DNA, 201 bp, Homo sapiens; identical to SEQ ID NO: 89808

SEQ ID NO: 90101 - DNA, 201 bp, Homo sapiens; identical to SEQ ID NO: 89809

SEQ ID NO: 90102 - DNA, 201 bp, Homo sapiens; identical to SEQ ID NO: 89810

SEQ ID NO: 90103 - DNA, 201 bp, Homo sapiens; identical to SEQ ID NO: 89811

SEQ ID NO: 90104 - DNA, 201 bp, Homo sapiens; identical to SEQ ID NO: 89812

SEQ ID NO: 90105 - DNA, 201 bp, Homo sapiens; identical to SEQ ID NO: 89813

SEQ ID NO: 90106 - DNA, 201 bp, Homo sapiens; identical to SEQ ID NO: 89814

SEQ ID NO: 90107 - DNA, 201 bp, Homo sapiens; identical to SEQ ID NO: 89815

SEQ ID NO: 90108 - DNA, 201 bp, Homo sapiens; identical to SEQ ID NO: 89816

SEQ ID NO: 90109 - DNA, 201 bp, Homo sapiens; identical to SEQ ID NO: 89817

SEQ ID NO: 90110 - DNA, 201 bp, Homo sapiens; identical to SEQ ID NO: 89818

SEQ ID NO: 90111 - DNA, 201 bp, Homo sapiens; identical to SEQ ID NO: 89819

SEQ ID NO: 90112 - DNA, 201 bp, Homo sapiens; identical to SEQ ID NO: 89820

SEQ ID NO: 90113 - DNA, 201 bp, Homo sapiens; identical to SEQ ID NO: 89821

SEQ ID NO: 90114 - DNA, 201 bp, Homo sapiens; identical to SEQ ID NO: 89822

SEQ ID NO: 90115 - DNA, 201 bp, Homo sapiens; identical to SEQ ID NO: 89823

SEQ ID NO: 90116 - DNA, 201 bp, Homo sapiens; identical to SEQ ID NO: 89824

SEQ ID NO: 90117 - DNA, 201 bp, Homo sapiens; identical to SEQ ID NO: 89825

SEQ ID NO: 90118 - DNA, 201 bp, Homo sapiens; identical to SEQ ID NO: 89826

SEQ ID NO: 90119 - DNA, 201 bp, Homo sapiens; identical to SEQ ID NO: 89827

SEQ ID NO: 90120 - DNA, 201 bp, Homo sapiens; identical to SEQ ID NO: 89828

SEQ ID NO: 90121 - DNA, 201 bp, Homo sapiens; identical to SEQ ID NO: 89829

SEQ ID NO: 90122 - DNA, 201 bp, Homo sapiens; identical to SEQ ID NO: 89830

SEQ ID NO: 90123 - DNA, 201 bp, Homo sapiens
cgctccggagagaagtctgagtccgccaggctctgcaggcccgcggaagctcgacagcgtcatggcagagcaggtggccctgagccggacccaggtgtgcrggatcctgcgggaagagcttttccagggcgatgccttccatcagtcggatacacacatattcatcatcatgggtgcatcgggtgacctggccaagaagaa

SEQ ID NO: 90124 - DNA, 201 bp, Homo sapiens; identical to SEQ ID NO: 89832

SEQ ID NO: 90125 - DNA, 201 bp, Homo sapiens; identical to SEQ ID NO: 89833

SEQ ID NO: 90126 - DNA, 201 bp, Homo sapiens; identical to SEQ ID NO: 89834

SEQ ID NO: 90127 - DNA, 201 bp, Homo sapiens; identical to SEQ ID NO: 89835

SEQ ID NO: 90128 - DNA, 201 bp, Homo sapiens
cgcatcccgctccggagagaagtctgagtccgccaggctctgcaggcccgcggaagctcgacagcgtcatggcagagcaggtggccctgagccggacccasgtgtgcgggatcctgcgggaagagcttttccagggcgatgccttccatcagtcggatacacacatattcatcatcatgggtgcatcgggtgacctggcca

SEQ ID NO: 90129 - DNA, 201 bp, Homo sapiens
gcatcccgctccggagagaagtctgagtccgccaggctctgcaggcccgcggaagctcgacagcgtcatggcagagcaggtggccctgagccggacccagktgtgcgggatcctgcgggaagagcttttccagggcgatgccttccatcagtcggatacacacatattcatcatcatgggtgcatcgggtgacctggccaa

SEQ ID NO: 90130 - DNA, 201 bp, Homo sapiens; identical to SEQ ID NO: 89737

SEQ ID NO: 90131 - DNA, 201 bp, Homo sapiens; identical to SEQ ID NO: 89738

SEQ ID NO: 90132 - DNA, 201 bp, Homo sapiens; identical to SEQ ID NO: 89739

SEQ ID NO: 90133 - DNA, 201 bp, Homo sapiens; identical to SEQ ID NO: 89740

SEQ ID NO: 90134 - DNA, 201 bp, Homo sapiens; identical to SEQ ID NO: 89741

SEQ ID NO: 90135 - DNA, 201 bp, Homo sapiens; identical to SEQ ID NO: 89742

SEQ ID NO: 90136 - DNA, 201 bp, Homo sapiens; identical to SEQ ID NO: 89743

SEQ ID NO: 90137 - DNA, 201 bp, Homo sapiens; identical to SEQ ID NO: 89744

SEQ ID NO: 90138 - DNA, 201 bp, Homo sapiens; identical to SEQ ID NO: 89745

SEQ ID NO: 90139 - DNA, 201 bp, Homo sapiens; identical to SEQ ID NO: 89746

SEQ ID NO: 90140 - DNA, 201 bp, Homo sapiens; identical to SEQ ID NO: 89747

SEQ ID NO: 90141 - DNA, 201 bp, Homo sapiens; identical to SEQ ID NO: 89748

SEQ ID NO: 90142 - DNA, 201 bp, Homo sapiens; identical to SEQ ID NO: 89749

SEQ ID NO: 90143 - DNA, 201 bp, Homo sapiens; identical to SEQ ID NO: 89750

SEQ ID NO: 90144 - DNA, 201 bp, Homo sapiens; identical to SEQ ID NO: 89751

SEQ ID NO: 90145 - DNA, 201 bp, Homo sapiens; identical to SEQ ID NO: 89752

SEQ ID NO: 90146 - DNA, 201 bp, Homo sapiens; identical to SEQ ID NO: 89753

SEQ ID NO: 90147 - DNA, 201 bp, Homo sapiens; identical to SEQ ID NO: 89754

SEQ ID NO: 90148 - DNA, 201 bp, Homo sapiens; identical to SEQ ID NO: 89755

SEQ ID NO: 90149 - DNA, 201 bp, Homo sapiens; identical to SEQ ID NO: 89756

SEQ ID NO: 90150 - DNA, 201 bp, Homo sapiens; identical to SEQ ID NO: 89757

SEQ ID NO: 90151 - DNA, 201 bp, Homo sapiens; identical to SEQ ID NO: 89758

SEQ ID NO: 90152 - DNA, 201 bp, Homo sapiens; identical to SEQ ID NO: 89759

SEQ ID NO: 90153 - DNA, 201 bp, Homo sapiens; identical to SEQ ID NO: 89760

SEQ ID NO: 90154 - DNA, 201 bp, Homo sapiens; identical to SEQ ID NO: 89862

SEQ ID NO: 90155 - DNA, 201 bp, Homo sapiens; identical to SEQ ID NO: 89761

SEQ ID NO: 90156 - DNA, 201 bp, Homo sapiens; identical to SEQ ID NO: 89762

SEQ ID NO: 90157 - DNA, 201 bp, Homo sapiens; identical to SEQ ID NO: 89763

SEQ ID NO: 90158 - DNA, 201 bp, Homo sapiens; identical to SEQ ID NO: 89764

SEQ ID NO: 90159 - DNA, 201 bp, Homo sapiens; identical to SEQ ID NO: 89765

SEQ ID NO: 90160 - DNA, 201 bp, Homo sapiens; identical to SEQ ID NO: 89766

SEQ ID NO: 90161 - DNA, 201 bp, Homo sapiens; identical to SEQ ID NO: 89767

SEQ ID NO: 90162 - DNA, 201 bp, Homo sapiens; identical to SEQ ID NO: 89768

SEQ ID NO: 90163 - DNA, 201 bp, Homo sapiens; identical to SEQ ID NO: 89769

SEQ ID NO: 90164 - DNA, 201 bp, Homo sapiens; identical to SEQ ID NO: 89770

SEQ ID NO: 90165 - DNA, 201 bp, Homo sapiens; identical to SEQ ID NO: 89771

SEQ ID NO: 90166 - DNA, 201 bp, Homo sapiens; identical to SEQ ID NO: 89772

SEQ ID NO: 90167 - DNA, 201 bp, Homo sapiens; identical to SEQ ID NO: 89773

SEQ ID NO: 90168 - DNA, 201 bp, Homo sapiens; identical to SEQ ID NO: 89774

SEQ ID NO: 90169 - DNA, 201 bp, Homo sapiens; identical to SEQ ID NO: 89775

SEQ ID NO: 90170 - DNA, 201 bp, Homo sapiens; identical to SEQ ID NO: 89776

SEQ ID NO: 90171 - DNA, 201 bp, Homo sapiens; identical to SEQ ID NO: 89777

SEQ ID NO: 90172 - DNA, 201 bp, Homo sapiens; identical to SEQ ID NO: 89778

SEQ ID NO: 90173 - DNA, 201 bp, Homo sapiens; identical to SEQ ID NO: 89779

SEQ ID NO: 90174 - DNA, 201 bp, Homo sapiens; identical to SEQ ID NO: 89780

SEQ ID NO: 90175 - DNA, 201 bp, Homo sapiens; identical to SEQ ID NO: 89781

SEQ ID NO: 90176 - DNA, 201 bp, Homo sapiens; identical to SEQ ID NO: 89782

SEQ ID NO: 90177 - DNA, 201 bp, Homo sapiens; identical to SEQ ID NO: 89783

SEQ ID NO: 90178 - DNA, 201 bp, Homo sapiens; identical to SEQ ID NO: 89784

SEQ ID NO: 90179 - DNA, 201 bp, Homo sapiens; identical to SEQ ID NO: 89785

SEQ ID NO: 90180 - DNA, 201 bp, Homo sapiens; identical to SEQ ID NO: 89786

SEQ ID NO: 90181 - DNA, 201 bp, Homo sapiens; identical to SEQ ID NO: 89787

SEQ ID NO: 90182 - DNA, 201 bp, Homo sapiens; identical to SEQ ID NO: 89788

SEQ ID NO: 90183 - DNA, 201 bp, Homo sapiens; identical to SEQ ID NO: 89789

SEQ ID NO: 90184 - DNA, 201 bp, Homo sapiens; identical to SEQ ID NO: 89790

SEQ ID NO: 90185 - DNA, 201 bp, Homo sapiens; identical to SEQ ID NO: 89791

SEQ ID NO: 90186 - DNA, 201 bp, Homo sapiens; identical to SEQ ID NO: 89792

SEQ ID NO: 90187 - DNA, 201 bp, Homo sapiens; identical to SEQ ID NO: 89793

SEQ ID NO: 90188 - DNA, 201 bp, Homo sapiens; identical to SEQ ID NO: 89894

SEQ ID NO: 90189 - DNA, 201 bp, Homo sapiens; identical to SEQ ID NO: 89794

SEQ ID NO: 90190 - DNA, 201 bp, Homo sapiens; identical to SEQ ID NO: 89795

SEQ ID NO: 90191 - DNA, 201 bp, Homo sapiens; identical to SEQ ID NO: 89796

SEQ ID NO: 90192 - DNA, 201 bp, Homo sapiens; identical to SEQ ID NO: 89797

SEQ ID NO: 90193 - DNA, 201 bp, Homo sapiens; identical to SEQ ID NO: 89798

SEQ ID NO: 90194 - DNA, 201 bp, Homo sapiens; identical to SEQ ID NO: 89799

SEQ ID NO: 90195 - DNA, 201 bp, Homo sapiens; identical to SEQ ID NO: 89800

SEQ ID NO: 90196 - DNA, 201 bp, Homo sapiens; identical to SEQ ID NO: 89801

SEQ ID NO: 90197 - DNA, 201 bp, Homo sapiens; identical to SEQ ID NO: 89802

SEQ ID NO: 90198 - DNA, 201 bp, Homo sapiens; identical to SEQ ID NO: 89803

SEQ ID NO: 90199 - DNA, 201 bp, Homo sapiens; identical to SEQ ID NO: 89804

SEQ ID NO: 90200 - DNA, 201 bp, Homo sapiens; identical to SEQ ID NO: 89805

SEQ ID NO: 90201 - DNA, 201 bp, Homo sapiens; identical to SEQ ID NO: 89806

SEQ ID NO: 90202 - DNA, 201 bp, Homo sapiens; identical to SEQ ID NO: 89807

SEQ ID NO: 90203 - DNA, 201 bp, Homo sapiens; identical to SEQ ID NO: 89808

SEQ ID NO: 90204 - DNA, 201 bp, Homo sapiens; identical to SEQ ID NO: 89809

SEQ ID NO: 90205 - DNA, 201 bp, Homo sapiens; identical to SEQ ID NO: 89810

SEQ ID NO: 90206 - DNA, 201 bp, Homo sapiens; identical to SEQ ID NO: 89811

SEQ ID NO: 90207 - DNA, 201 bp, Homo sapiens; identical to SEQ ID NO: 89812

SEQ ID NO: 90208 - DNA, 201 bp, Homo sapiens; identical to SEQ ID NO: 89813

SEQ ID NO: 90209 - DNA, 201 bp, Homo sapiens; identical to SEQ ID NO: 89814

SEQ ID NO: 90210 - DNA, 201 bp, Homo sapiens; identical to SEQ ID NO: 89815

SEQ ID NO: 90211 - DNA, 201 bp, Homo sapiens; identical to SEQ ID NO: 89816

SEQ ID NO: 90212 - DNA, 201 bp, Homo sapiens; identical to SEQ ID NO: 89817

SEQ ID NO: 90213 - DNA, 201 bp, Homo sapiens; identical to SEQ ID NO: 89818

SEQ ID NO: 90214 - DNA, 201 bp, Homo sapiens; identical to SEQ ID NO: 89819

SEQ ID NO: 90215 - DNA, 201 bp, Homo sapiens; identical to SEQ ID NO: 89820

SEQ ID NO: 90216 - DNA, 201 bp, Homo sapiens; identical to SEQ ID NO: 89821

SEQ ID NO: 90217 - DNA, 201 bp, Homo sapiens; identical to SEQ ID NO: 89822

SEQ ID NO: 90218 - DNA, 201 bp, Homo sapiens; identical to SEQ ID NO: 89823

SEQ ID NO: 90219 - DNA, 201 bp, Homo sapiens; identical to SEQ ID NO: 89924

SEQ ID NO: 90220 - DNA, 201 bp, Homo sapiens; identical to SEQ ID NO: 89824

SEQ ID NO: 90221 - DNA, 201 bp, Homo sapiens; identical to SEQ ID NO: 89825

SEQ ID NO: 90222 - DNA, 201 bp, Homo sapiens; identical to SEQ ID NO: 89826

SEQ ID NO: 90223 - DNA, 201 bp, Homo sapiens; identical to SEQ ID NO: 89827

SEQ ID NO: 90224 - DNA, 201 bp, Homo sapiens; identical to SEQ ID NO: 89828

SEQ ID NO: 90225 - DNA, 201 bp, Homo sapiens; identical to SEQ ID NO: 89829

SEQ ID NO: 90226 - DNA, 201 bp, Homo sapiens; identical to SEQ ID NO: 89830

SEQ ID NO: 90227 - DNA, 201 bp, Homo sapiens; identical to SEQ ID NO: 89933

SEQ ID NO: 90228 - DNA, 201 bp, Homo sapiens; identical to SEQ ID NO: 89832

SEQ ID NO: 90229 - DNA, 201 bp, Homo sapiens; identical to SEQ ID NO: 89833

SEQ ID NO: 90230 - DNA, 201 bp, Homo sapiens; identical to SEQ ID NO: 89834

SEQ ID NO: 90231 - DNA, 201 bp, Homo sapiens; identical to SEQ ID NO: 89835

SEQ ID NO: 90232 - DNA, 201 bp, Homo sapiens; identical to SEQ ID NO: 89937

SEQ ID NO: 90233 - DNA, 201 bp, Homo sapiens; identical to SEQ ID NO: 89938

SEQ ID NO: 90234 - DNA, 201 bp, Homo sapiens; identical to SEQ ID NO: 89737

SEQ ID NO: 90235 - DNA, 201 bp, Homo sapiens; identical to SEQ ID NO: 89940

SEQ ID NO: 90236 - DNA, 201 bp, Homo sapiens; identical to SEQ ID NO: 89740

SEQ ID NO: 90237 - DNA, 201 bp, Homo sapiens; identical to SEQ ID NO: 89739

SEQ ID NO: 90238 - DNA, 201 bp, Homo sapiens; identical to SEQ ID NO: 89741

SEQ ID NO: 90239 - DNA, 201 bp, Homo sapiens; identical to SEQ ID NO: 89742

SEQ ID NO: 90240 - DNA, 201 bp, Homo sapiens; identical to SEQ ID NO: 89743

SEQ ID NO: 90241 - DNA, 201 bp, Homo sapiens; identical to SEQ ID NO: 89946

SEQ ID NO: 90242 - DNA, 201 bp, Homo sapiens; identical to SEQ ID NO: 89947

SEQ ID NO: 90243 - DNA, 201 bp, Homo sapiens; identical to SEQ ID NO: 89749

SEQ ID NO: 90244 - DNA, 201 bp, Homo sapiens; identical to SEQ ID NO: 89949

SEQ ID NO: 90245 - DNA, 201 bp, Homo sapiens; identical to SEQ ID NO: 89751

SEQ ID NO: 90246 - DNA, 201 bp, Homo sapiens; identical to SEQ ID NO: 89752

SEQ ID NO: 90247 - DNA, 201 bp, Homo sapiens; identical to SEQ ID NO: 89951

SEQ ID NO: 90248 - DNA, 201 bp, Homo sapiens; identical to SEQ ID NO: 89756

SEQ ID NO: 90249 - DNA, 201 bp, Homo sapiens; identical to SEQ ID NO: 89754

SEQ ID NO: 90250 - DNA, 201 bp, Homo sapiens; identical to SEQ ID NO: 89755

SEQ ID NO: 90251 - DNA, 201 bp, Homo sapiens; identical to SEQ ID NO: 89757

SEQ ID NO: 90252 - DNA, 201 bp, Homo sapiens; identical to SEQ ID NO: 89758

SEQ ID NO: 90253 - DNA, 201 bp, Homo sapiens; identical to SEQ ID NO: 89759

SEQ ID NO: 90254 - DNA, 201 bp, Homo sapiens; identical to SEQ ID NO: 89760

SEQ ID NO: 90255 - DNA, 201 bp, Homo sapiens; identical to SEQ ID NO: 89862

SEQ ID NO: 90256 - DNA, 201 bp, Homo sapiens; identical to SEQ ID NO: 89961

SEQ ID NO: 90257 - DNA, 201 bp, Homo sapiens; identical to SEQ ID NO: 89767

SEQ ID NO: 90258 - DNA, 201 bp, Homo sapiens; identical to SEQ ID NO: 89768

SEQ ID NO: 90259 - DNA, 201 bp, Homo sapiens; identical to SEQ ID NO: 89769

SEQ ID NO: 90260 - DNA, 201 bp, Homo sapiens; identical to SEQ ID NO: 89965

SEQ ID NO: 90261 - DNA, 201 bp, Homo sapiens; identical to SEQ ID NO: 89771

SEQ ID NO: 90262 - DNA, 201 bp, Homo sapiens; identical to SEQ ID NO: 89967

SEQ ID NO: 90263 - DNA, 201 bp, Homo sapiens; identical to SEQ ID NO: 89773

SEQ ID NO: 90264 - DNA, 201 bp, Homo sapiens; identical to SEQ ID NO: 89969

SEQ ID NO: 90265 - DNA, 201 bp, Homo sapiens; identical to SEQ ID NO: 89775

SEQ ID NO: 90266 - DNA, 201 bp, Homo sapiens; identical to SEQ ID NO: 89776

SEQ ID NO: 90267 - DNA, 201 bp, Homo sapiens; identical to SEQ ID NO: 89972

SEQ ID NO: 90268 - DNA, 201 bp, Homo sapiens; identical to SEQ ID NO: 89778

SEQ ID NO: 90269 - DNA, 201 bp, Homo sapiens; identical to SEQ ID NO: 89779

SEQ ID NO: 90270 - DNA, 201 bp, Homo sapiens; identical to SEQ ID NO: 89975

SEQ ID NO: 90271 - DNA, 201 bp, Homo sapiens; identical to SEQ ID NO: 89781

SEQ ID NO: 90272 - DNA, 201 bp, Homo sapiens; identical to SEQ ID NO: 89977

SEQ ID NO: 90273 - DNA, 201 bp, Homo sapiens; identical to SEQ ID NO: 89978

SEQ ID NO: 90274 - DNA, 201 bp, Homo sapiens; identical to SEQ ID NO: 89787

SEQ ID NO: 90275 - DNA, 201 bp, Homo sapiens; identical to SEQ ID NO: 89788

SEQ ID NO: 90276 - DNA, 201 bp, Homo sapiens; identical to SEQ ID NO: 89789

SEQ ID NO: 90277 - DNA, 201 bp, Homo sapiens; identical to SEQ ID NO: 89790

SEQ ID NO: 90278 - DNA, 201 bp, Homo sapiens; identical to SEQ ID NO: 89983

SEQ ID NO: 90279 - DNA, 201 bp, Homo sapiens; identical to SEQ ID NO: 89794

SEQ ID NO: 90280 - DNA, 201 bp, Homo sapiens; identical to SEQ ID NO: 89894

SEQ ID NO: 90281 - DNA, 201 bp, Homo sapiens; identical to SEQ ID NO: 89987

SEQ ID NO: 90282 - DNA, 201 bp, Homo sapiens; identical to SEQ ID NO: 89988

SEQ ID NO: 90283 - DNA, 201 bp, Homo sapiens; identical to SEQ ID NO: 89989

SEQ ID NO: 90284 - DNA, 201 bp, Homo sapiens; identical to SEQ ID NO: 89799

SEQ ID NO: 90285 - DNA, 201 bp, Homo sapiens; identical to SEQ ID NO: 89800

SEQ ID NO: 90286 - DNA, 201 bp, Homo sapiens; identical to SEQ ID NO: 89801

SEQ ID NO: 90287 - DNA, 201 bp, Homo sapiens; identical to SEQ ID NO: 89802

SEQ ID NO: 90288 - DNA, 201 bp, Homo sapiens; identical to SEQ ID NO: 89803

SEQ ID NO: 90289 - DNA, 201 bp, Homo sapiens; identical to SEQ ID NO: 89804

SEQ ID NO: 90290 - DNA, 201 bp, Homo sapiens; identical to SEQ ID NO: 89805

SEQ ID NO: 90291 - DNA, 201 bp, Homo sapiens; identical to SEQ ID NO: 89806

SEQ ID NO: 90292 - DNA, 201 bp, Homo sapiens; identical to SEQ ID NO: 89998

SEQ ID NO: 90293 - DNA, 201 bp, Homo sapiens; identical to SEQ ID NO: 89810

SEQ ID NO: 90294 - DNA, 201 bp, Homo sapiens; identical to SEQ ID NO: 89811

SEQ ID NO: 90295 - DNA, 201 bp, Homo sapiens; identical to SEQ ID NO: 89812

SEQ ID NO: 90296 - DNA, 201 bp, Homo sapiens; identical to SEQ ID NO: 89814

SEQ ID NO: 90297 - DNA, 201 bp, Homo sapiens; identical to SEQ ID NO: 89813

SEQ ID NO: 90298 - DNA, 201 bp, Homo sapiens; identical to SEQ ID NO: 89815

SEQ ID NO: 90299 - DNA, 201 bp, Homo sapiens; identical to SEQ ID NO: 89816

SEQ ID NO: 90300 - DNA, 201 bp, Homo sapiens; identical to SEQ ID NO: 89817

SEQ ID NO: 90301 - DNA, 201 bp, Homo sapiens; identical to SEQ ID NO: 89818

SEQ ID NO: 90302 - DNA, 201 bp, Homo sapiens; identical to SEQ ID NO: 89819

SEQ ID NO: 90303 - DNA, 201 bp, Homo sapiens; identical to SEQ ID NO: 89820

SEQ ID NO: 90304 - DNA, 201 bp, Homo sapiens; identical to SEQ ID NO: 89821

SEQ ID NO: 90305 - DNA, 201 bp, Homo sapiens; identical to SEQ ID NO: 89822

SEQ ID NO: 90306 - DNA, 201 bp, Homo sapiens; identical to SEQ ID NO: 89924

SEQ ID NO: 90307 - DNA, 201 bp, Homo sapiens; identical to SEQ ID NO: 89823

SEQ ID NO: 90308 - DNA, 201 bp, Homo sapiens; identical to SEQ ID NO: 89824

SEQ ID NO: 90309 - DNA, 201 bp, Homo sapiens; identical to SEQ ID NO: 89825

SEQ ID NO: 90310 - DNA, 201 bp, Homo sapiens; identical to SEQ ID NO: 89826

SEQ ID NO: 90311 - DNA, 201 bp, Homo sapiens; identical to SEQ ID NO: 89827

SEQ ID NO: 90312 - DNA, 201 bp, Homo sapiens; identical to SEQ ID NO: 89828

SEQ ID NO: 90313 - DNA, 201 bp, Homo sapiens; identical to SEQ ID NO: 89829

SEQ ID NO: 90314 - DNA, 201 bp, Homo sapiens; identical to SEQ ID NO: 89830

SEQ ID NO: 90315 - DNA, 201 bp, Homo sapiens; identical to SEQ ID NO: 90021

SEQ ID NO: 90316 - DNA, 201 bp, Homo sapiens; identical to SEQ ID NO: 89933

SEQ ID NO: 90317 - DNA, 201 bp, Homo sapiens; identical to SEQ ID NO: 90023

SEQ ID NO: 90318 - DNA, 201 bp, Homo sapiens; identical to SEQ ID NO: 89834

SEQ ID NO: 90319 - DNA, 201 bp, Homo sapiens; identical to SEQ ID NO: 90024

SEQ ID NO: 90320 - DNA, 201 bp, Homo sapiens; identical to SEQ ID NO: 89937

SEQ ID NO: 90321 - DNA, 201 bp, Homo sapiens; identical to SEQ ID NO: 89938

SEQ ID NO: 90322 - DNA, 120 bp, Homo sapiens
ccgggctgggagaaatgacsgcttctatgaggagaccatgtgccgaggtcgtgtgctaggaagccagttgctgtgagaaatgaccagtgtcatgtctgtctttcagccaccctacatcat

SEQ ID NO: 90323 - DNA, 201 bp, Homo sapiens
tttggcctctttaccctgtgtttatgtttgttccaaaaccatcatttaaatctctactgtcacattttgtttcttaaaagcaaagccagctaacaccttcmttcatccctagttcggaaattcaagctaactacttaccctttaaactgtcactgcatatgcaagtaccgctctaatttttggatcattaaagggagttac

SEQ ID NO: 90324 - DNA, 150 bp, Homo sapiens
ccgggctgggagaaatgaccgcttctatgaggagaccatgtgccgaggtygtgtgctaggaagccagttgctgtgagaaatgaccagtgtcatgtctgtctttcagccaccctacatcatgtagcagttcttctgagatcatgtctgtgc

SEQ ID NO: 90325 - DNA, 201 bp, Homo sapiens
acacaacttttaagtgaaaaaaataggtaacaaaacaaccacctgatagtaagttttctgataagactatagataagtggtagaggtaatcaattcttccraagtgtttccttcgtgaataactggtagaggtaatagttttttcaatgtatttccttcatgagtaaagaaaatgtggattgaagtatagattccagtagc

SEQ ID NO: 90326 - DNA, 201 bp, Homo sapiens
gataagactatagataagtggtagaggtaatcaattcttccgaagtgtttccttcgtgaataactggtagaggtaatagttttttcaatgtatttccttcrtgagtaaagaaaatgtggattgaagtatagattccagtagcctagtttccacagcacgataacaccatgacgcctactgctgttcccaccttgggattct

SEQ ID NO: 90327 - DNA, 201 bp, Homo sapiens
gcggagggagcggccggcggagggagcggcaggtggagggagtggcacgaggcatgcggagggagctgcaccgacatcacataaacgcactgggcagctcrcaggcgccattcgctcttcagacgccggagacgtaggagtgggtcttcagactccaaaggggttggactaatggcggatgctgaggcgagggctgagttc

SEQ ID NO: 90328 - DNA, 133 bp, Homo sapiens
agatcccttgacttgcttgcggagggagcggcyggcggagggagcggcaggtggagggagtggcacgaggcatgcggagggagctgcaccgacatcacataaacgcactgggcagctcgcaggcgccattcgc

SEQ ID NO: 90329 - DNA, 201 bp, Homo sapiens
gcggccggcggagggagcggcaggtggagggagtggcacgaggcatgcggagggagctgcaccgacatcacataaacgcactgggcagctcgcaggcgccrttcgctcttcagacgccggagacgtaggagtgggtcttcagactccaaaggggttggactaatggcggatgctgaggcgagggctgagttcccggaggag

SEQ ID NO: 90330 - DNA, 201 bp, Homo sapiens
gcagctcgcaggcgccattcgctcttcagacgccggagacgtaggagtgggtcttcagactccaaaggggttggactaatggcggatgctgaggcgagggytgagttcccggaggaggccagacctgacaggggcaccttgcaggtgttgcaagatatggccagccgcttgcgaatccattccatcagggccacatgctcc

SEQ ID NO: 90331 - DNA, 201 bp, Homo sapiens
cccttgacttgcttgcggagggagcggccggcggagggagcggcaggtggagggagtggcacgaggcatgcggagggagctgcaccgacatcacataaackcactgggcagctcgcaggcgccattcgctcttcagacgccggagacgtaggagtgggtcttcagactccaaaggggttggactaatggcggatgctgagg

SEQ ID NO: 90332 - DNA, 201 bp, Homo sapiens; identical to SEQ ID NO: 90323

SEQ ID NO: 90333 - DNA, 201 bp, Homo sapiens; identical to SEQ ID NO: 90325

SEQ ID NO: 90334 - DNA, 201 bp, Homo sapiens; identical to SEQ ID NO: 90326

SEQ ID NO: 90335 - DNA, 142 bp, Homo sapiens
attcagaaagggcctcagttactctaccatgacaaatttctyagtctgtcaccgttcacttcctaaaagaaattcattgtagaaggtagaatgggatcttcatggcatttctgattcacaatgctcctgaaagttcctcggc

SEQ ID NO: 90336 - DNA, 201 bp, Homo sapiens; identical to SEQ ID NO: 90323

SEQ ID NO: 90337 - DNA, 182 bp, Homo sapiens
attcagaaagggcctcagttactctaccatgacaaatttctcagtctgtcaccgttcacttcctaaaagaaattcattgtasaaggtagaatgggatcttcatggcatttctgattcacaatgctcctgaaagttcctcggcatgtggaaaggccacagatgaatttaagcatgtgaaagaa

SEQ ID NO: 90338 - DNA, 201 bp, Homo sapiens; identical to SEQ ID NO: 90325

SEQ ID NO: 90339 - DNA, 201 bp, Homo sapiens; identical to SEQ ID NO: 90326

SEQ ID NO: 90340 - DNA, 201 bp, Homo sapiens; identical to SEQ ID NO: 90327

SEQ ID NO: 90341 - DNA, 133 bp, Homo sapiens; identical to SEQ ID NO: 90328

SEQ ID NO: 90342 - DNA, 201 bp, Homo sapiens; identical to SEQ ID NO: 90329

SEQ ID NO: 90343 - DNA, 201 bp, Homo sapiens; identical to SEQ ID NO: 90330

SEQ ID NO: 90344 - DNA, 201 bp, Homo sapiens; identical to SEQ ID NO: 90331

SEQ ID NO: 90345 - DNA, 201 bp, Homo sapiens; identical to SEQ ID NO: 90323

SEQ ID NO: 90346 - DNA, 201 bp, Homo sapiens; identical to SEQ ID NO: 90325

SEQ ID NO: 90347 - DNA, 201 bp, Homo sapiens; identical to SEQ ID NO: 90326

SEQ ID NO: 90348 - DNA, 201 bp, Homo sapiens; identical to SEQ ID NO: 90327

SEQ ID NO: 90349 - DNA, 133 bp, Homo sapiens; identical to SEQ ID NO: 90328

SEQ ID NO: 90350 - DNA, 201 bp, Homo sapiens; identical to SEQ ID NO: 90329

SEQ ID NO: 90351 - DNA, 201 bp, Homo sapiens; identical to SEQ ID NO: 90330

SEQ ID NO: 90352 - DNA, 201 bp, Homo sapiens; identical to SEQ ID NO: 90331

SEQ ID NO: 90353 - DNA, 201 bp, Homo sapiens; identical to SEQ ID NO: 90323

SEQ ID NO: 90354 - DNA, 201 bp, Homo sapiens; identical to SEQ ID NO: 90325

SEQ ID NO: 90355 - DNA, 201 bp, Homo sapiens; identical to SEQ ID NO: 90326

SEQ ID NO: 90356 - DNA, 201 bp, Homo sapiens
aacatgtgtccaaatcggggattggtgagccagctgctggaatgggagaagactatccttggagattccatcacaaacatcatggatccgctctactgatyttctccgaggcccaccgaagggtactgaagagcctcacctgggggcattttgtgggtggagggccagagtgtgtatacccaggcttgtctggaaggagaa

SEQ ID NO: 90357 - DNA, 201 bp, Homo sapiens
gtatgacgaaagccatgtgatcactgcccttcgagtgaagaagaaaaataatgaatatcttctcccggagtctgtggacctggagtgtgtgaagtactgcrtggtgtatgataacaacagcagcaccctggagatactcttaaaagatgatgatgatgattcagactctgatggtgatggcaaagatcttgtgcctcaagc

SEQ ID NO: 90358 - DNA, 113 bp, Homo sapiens
ctcaggcaggacraggagctgcctaacaagaggtggaaggggttacgtacgttgcgaaagactccaaccctcctggatgcctggtttgcttttatgtgaaccgacagagcttt

SEQ ID NO: 90359 - DNA, 201 bp, Homo sapiens
caggcaggacaaggagctgcctaacaagaggtggaaggggttacgtacgttgcgaaagactccaaccctcctggatgcctggtttgcttttatgtgaaccracagagctttacaacatcctgaatcaggccacaaaactctccagattaacagaccccaactatctctgtttattggatgtccgttccaaatgggagtatg

SEQ ID NO: 90360 - DNA, 201 bp, Homo sapiens
gctatgagcgcttctcaggcacgtaccactttctccggacccagaagatcatctggatgcctcaggaactggatgcatttcagccataccccattgaaatygtgccagggaaggtcttcgttggcaatttcagtcaagcctgtgaccccaagattcagaaggacttgaaaatcaaagcccatgtcaatgtctccatggata

SEQ ID NO: 90361 - DNA, 201 bp, Homo sapiens
caatttcagtcaagcctgtgaccccaagattcagaaggacttgaaaatcaaagcccatgtcaatgtctccatggatacagggcccttttttgcaggcgatrctgacaagcttctgcacatccggatagaagattccccggaagcccagattcttcccttcttacgccacatgtgtcacttcattgaggtcctgggcctatg

SEQ ID NO: 90362 - DNA, 201 bp, Homo sapiens; identical to SEQ ID NO: 90356

SEQ ID NO: 90363 - DNA, 201 bp, Homo sapiens
attccccggaagcccagattcttcccttcttacgccacatgtgtcacttcattgaaattcaccatcaccttggctctgtcattctgatcttttccacccarggtatcagccgcagttgtgccgccatcatagcctacctcatgcatagtaacgagcagaccttgcagaggtcctgggcctatgtcaagaagtgcaaaaaca

SEQ ID NO: 90364 - DNA, 201 bp, Homo sapiens; identical to SEQ ID NO: 90357

SEQ ID NO: 90365 - DNA, 113 bp, Homo sapiens; identical to SEQ ID NO: 90358

SEQ ID NO: 90366 - DNA, 201 bp, Homo sapiens; identical to SEQ ID NO: 90359

SEQ ID NO: 90367 - DNA, 201 bp, Homo sapiens; identical to SEQ ID NO: 90360

SEQ ID NO: 90368 - DNA, 201 bp, Homo sapiens
caatttcagtcaagcctgtgaccccaagattcagaaggacttgaaaatcaaagcccatgtcaatgtctccatggatacagggcccttttttgcaggcgatrctgacaagcttctgcacatccggatagaagattccccggaagcccagattcttcccttcttacgccacatgtgtcacttcattgaaattcaccatcacct

SEQ ID NO: 90369 - DNA, 201 bp, Homo sapiens; identical to SEQ ID NO: 90356

SEQ ID NO: 90370 - DNA, 201 bp, Homo sapiens; identical to SEQ ID NO: 90363

SEQ ID NO: 90371 - DNA, 201 bp, Homo sapiens; identical to SEQ ID NO: 90357

SEQ ID NO: 90372 - DNA, 201 bp, Homo sapiens
ttccgggagtcggaaaggaaagctgtgggaccatcctggcaaccccggtgtttggctgggttctagcgtagccgtctgtgtggccggtgggggacctgcgrtcggagtgggagggccagtctgcacccaagaggtggaagaggacgggctttaggctggaagcgccttagaggagccatttttccaggatgcctggtttgc

SEQ ID NO: 90373 - DNA, 201 bp, Homo sapiens; identical to SEQ ID NO: 90368

SEQ ID NO: 90374 - DNA, 201 bp, Homo sapiens
gccagtctgcacccaagaggtggaagaggacgggctttaggctggaagcgccttagaggagccatttttccaggatgcctggtttgcttttatgtgaaccracagagctttacaacatcctgaatcaggccacaaaactctccagattaacagaccccaactatctctgtttattggatgtccgttccaaatgggagtatg

SEQ ID NO: 90375 - DNA, 201 bp, Homo sapiens; identical to SEQ ID NO: 90360

SEQ ID NO: 90376 - DNA, 175 bp, Homo sapiens
cggccacttccgggagtcggaaaggaaagctgtgggaccatcctggcaaccccggtgtttggctgggttctagcstagccgtctgtgtggccggtgggggacctgcggtcggagtgggagggccagtctgcacccaagaggtggaagaggacgggctttaggctggaagcgcctt

SEQ ID NO: 90377 - DNA, 201 bp, Homo sapiens; identical to SEQ ID NO: 90356

SEQ ID NO: 90378 - DNA, 201 bp, Homo sapiens; identical to SEQ ID NO: 90363

SEQ ID NO: 90379 - DNA, 201 bp, Homo sapiens; identical to SEQ ID NO: 90357

SEQ ID NO: 90380 - DNA, 201 bp, Homo sapiens
ccgagcccccgacctcagccaaacccattccttctgtccttggaggccagaggggactctgagcatcggaaaggatgcctggtttgcttttatgtgaaccracagagctttacaacatcctgaatcaggccacaaaactctccagattaacagaccccaactatctctgtttattggatgtccgttccaaatgggagtatg

SEQ ID NO: 90381 - DNA, 201 bp, Homo sapiens; identical to SEQ ID NO: 90360

SEQ ID NO: 90382 - DNA, 201 bp, Homo sapiens
taggctggaagcgccttagaggagccatttttccaggtggggccccaggcagaggctccgacagggagcctggccatagtcgcgcagccggggaggtggakcgcgtcccagacccgagcccccgacctcagccaaacccattccttctgtccttggaggccagaggggactctgagcatcggaaaggatgcctggtttgct

SEQ ID NO: 90383 - DNA, 201 bp, Homo sapiens
cagaggctccgacagggagcctggccatagtcgcgcagccggggaggtggagcgcgtcccagacccgagcccccgacctcagccaaacccattccttctgyccttggaggccagaggggactctgagcatcggaaaggatgcctggtttgcttttatgtgaaccgacagagctttacaacatcctgaatcaggccacaaaa

SEQ ID NO: 90384 - DNA, 173 bp, Homo sapiens
gccacttccgggagtcggaaaggaaagctgtgggaccatcctggcaaccccggtgtttggctgggttctagcstagccgtctgtgtggccggtgggggacctgcggtcggagtgggagggccagtctgcacccaagaggtggaagaggacgggctttaggctggaagcgcctt

SEQ ID NO: 90385 - DNA, 201 bp, Homo sapiens
agtcgcgcagccggggaggtggagcgcgtcccagacccgagcccccgacctcagccaaacccattccttctgtccttggaggccagaggggactctgagcwtcggaaaggatgcctggtttgcttttatgtgaaccgacagagctttacaacatcctgaatcaggccacaaaactctccagattaacagaccccaactatc

SEQ ID NO: 90386 - DNA, 201 bp, Homo sapiens
gagccatttttccaggtggggccccaggcagaggctccgacagggagcctggccatagtcgcgcagccggggaggtggagcgcgtcccagacccgagcccycgacctcagccaaacccattccttctgtccttggaggccagaggggactctgagcatcggaaaggatgcctggtttgcttttatgtgaaccgacagagct

SEQ ID NO: 90387 - DNA, 201 bp, Homo sapiens
ttagaggagccatttttccaggtggggccccaggcagaggctccgacagggagcctggccatagtcgcgcagccggggaggtggagcgcgtcccagacccragcccccgacctcagccaaacccattccttctgtccttggaggccagaggggactctgagcatcggaaaggatgcctggtttgcttttatgtgaaccgac

SEQ ID NO: 90388 - DNA, 201 bp, Homo sapiens
gtcgcgcagccggggaggtggagcgcgtcccagacccgagcccccgacctcagccaaacccattccttctgtccttggaggccagaggggactctgagcaycggaaaggatgcctggtttgcttttatgtgaaccgacagagctttacaacatcctgaatcaggccacaaaactctccagattaacagaccccaactatct

SEQ ID NO: 90389 - DNA, 201 bp, Homo sapiens; identical to SEQ ID NO: 90368

SEQ ID NO: 90390 - DNA, 201 bp, Homo sapiens
ttccgggagtcggaaaggaaagctgtgggaccatcctggcaaccccggtgtttggctgggttctagcgtagccgtctgtgtggccggtgggggacctgcgrtcggagtgggagggccagtctgcacccaagaggtggaagaggacgggctttaggctggaagcgccttagaggagccatttttccaggtggggccccaggc

SEQ ID NO: 90391 - DNA, 201 bp, Homo sapiens; identical to SEQ ID NO: 90356

SEQ ID NO: 90392 - DNA, 113 bp, Homo sapiens; identical to SEQ ID NO: 90358

SEQ ID NO: 90393 - DNA, 201 bp, Homo sapiens
ttttttgcaggcgatgctgacaagcttctgcacatccggatagaagattccccggaagcccagattcttcccttcttacgccacatgtgtcacttcattgrgtatcagccgcagttgtgccgccatcatagcctacctcatgcatagtaacgagcagaccttgcagaggtcctgggcctatgtcaagaagtgcaaaaacaa

SEQ ID NO: 90394 - DNA, 201 bp, Homo sapiens; identical to SEQ ID NO: 90359

SEQ ID NO: 90395 - DNA, 201 bp, Homo sapiens; identical to SEQ ID NO: 90360

SEQ ID NO: 90396 - DNA, 201 bp, Homo sapiens
caatttcagtcaagcctgtgaccccaagattcagaaggacttgaaaatcaaagcccatgtcaatgtctccatggatacagggcccttttttgcaggcgatrctgacaagcttctgcacatccggatagaagattccccggaagcccagattcttcccttcttacgccacatgtgtcacttcattgggtatcagccgcagtt

SEQ ID NO: 90397 - DNA, 201 bp, Homo sapiens
agtttgccaaccgcctgtccaaggacgcccaccgctacgggatgcgaggcatgtcagcggaccctgaggagtatgacctggccgacctgagcagcctgccrgagatcgacaacgccctggtggttttctgcatggccacctacggtgagggagaccccaccgacaatgcccaggacttctacgactggctgcaggagacag

SEQ ID NO: 90398 - DNA, 165 bp, Homo sapiens
atggccacgcccccacccccgcggccggcgaaggcggtggtagcgcctcagtggtgtgggcctgmgccctgcccaggtgcccgcagagagcagccgggctgccagcgtttcatgatcaacatgggagactcccacgtggacaccagctccaccgtgtccgaggcg

SEQ ID NO: 90399 - DNA, 103 bp, Homo sapiens
tttctctctgctgagctgggcccagcccctccacgtgatttccagtgagtgtaaataattttaaataacctctggcccttggaataaagttctgttttctrta

SEQ ID NO: 90400 - DNA, 201 bp, Homo sapiens
cggcgaaggcggtggtagcgcctcagtggtgtgggcctgagccctgcccaggtgcccgcagagagcagccgggctgccagcgtttcatgatcaacatgggrgactcccacgtggacaccagctccaccgtgtccgaggcggtggccgaagaagtatctcttttcagcatgacggacatgattctgttttcgctcatcgtgg

SEQ ID NO: 90401 - DNA, 201 bp, Homo sapiens
gggtggcacccttcataggcttcatccaggagcgggcctggctgcgacagcagggcaaggaggtgggggagacgctgctgtactacggctgccgccgctcrgatgaggactacctgtaccgggaggagctggcgcagttccacagggacggtgcgctcacccagctcaacgtggccttctcccgggagcagtcccacaagg

SEQ ID NO: 90402 - DNA, 201 bp, Homo sapiens
cgcgcctgcaggcccgctactactccatcgcctcatcctccaaggtccaccccaactctgtgcacatctgtgcggtggttgtggagtacgagaccaaggcyggccgcatcaacaagggcgtggccaccaactggctgcgggccaaggagcctgccggggagaacggcggccgtgcgctggtgcccatgttcgtgcgcaagt

SEQ ID NO: 90403 - DNA, 201 bp, Homo sapiens
aactctgtgcacatctgtgcggtggttgtggagtacgagaccaaggccggccgcatcaacaagggcgtggccaccaactggctgcgggccaaggagcctgycggggagaacggcggccgtgcgctggtgcccatgttcgtgcgcaagtcccagttccgcctgcccttcaaggccaccacgcctgtcatcatggtgggcccc

SEQ ID NO: 90404 - DNA, 201 bp, Homo sapiens
gtgcatcctcctcagcccccaggccaggtgaggtccaccggcccctggcagcacagcccagggcctgcatgggggcaccgggctccatgcctctggaggcytctggccctcggtggctgcacagaagggctctttctctctgctgagctgggcccagcccctccacgtgatttccagtgagtgtaaataattttaaataac

SEQ ID NO: 90405 - DNA, 169 bp, Homo sapiens
gcatgggggcaccgggctccatgcctctggaggcctctggccctcggtggctgcacagaagggctctttctctctgctgagctgggcccagcccctccacrtgatttccagtgagtgtaaataattttaaataacctctggcccttggaataaagttctgttttctgta

SEQ ID NO: 90406 - DNA, 145 bp, Homo sapiens
tggctctctgcgtcggggtgggccctcgggcctgggcactgcgcrtctggcccgacgctcgggcggaaggcatggctcccaccccggccctcctccgcgtcgcccttcccctagagctgatctcccgcggcggcctgagggtcga

SEQ ID NO: 90407 - DNA, 201 bp, Homo sapiens; identical to SEQ ID NO: 90397

SEQ ID NO: 90408 - DNA, 103 bp, Homo sapiens; identical to SEQ ID NO: 90399

SEQ ID NO: 90409 - DNA, 201 bp, Homo sapiens
aggcagcgaattctgggggtacctaacgtgagaggcgctcgatgcatgctcatgggacccgaatctaaccctgcagcatcagtttcatgatcaacatgggrgactcccacgtggacaccagctccaccgtgtccgaggcggtggccgaagaagtatctcttttcagcatgacggacatgattctgttttcgctcatcgtgg

SEQ ID NO: 90410 - DNA, 201 bp, Homo sapiens; identical to SEQ ID NO: 90401

SEQ ID NO: 90411 - DNA, 201 bp, Homo sapiens; identical to SEQ ID NO: 90402

SEQ ID NO: 90412 - DNA, 201 bp, Homo sapiens; identical to SEQ ID NO: 90403

SEQ ID NO: 90413 - DNA, 201 bp, Homo sapiens; identical to SEQ ID NO: 90404

SEQ ID NO: 90414 - DNA, 169 bp, Homo sapiens; identical to SEQ ID NO: 90405

SEQ ID NO: 90415 - DNA, 165 bp, Homo sapiens
atggccacgcccccacccccgcggccggcgaaggcggtggtagcgcctcagtggtgtgggcctgmgccctgcccaggtgcccgcagagagcagccgggctgccagcgagctgatctcccgcggcggcctgagggtcgacttttccacagcttgggccgagagagc

SEQ ID NO: 90416 - DNA, 201 bp, Homo sapiens; identical to SEQ ID NO: 90397

SEQ ID NO: 90417 - DNA, 165 bp, Homo sapiens; identical to SEQ ID NO: 90398

SEQ ID NO: 90418 - DNA, 105 bp, Homo sapiens
tcaagaaactgatgaccaagggccgcccctccacgtgatttccagtgagtgtaaataattttaaataacctctggcccttggaataaagttctgttttctrtatt

SEQ ID NO: 90419 - DNA, 201 bp, Homo sapiens; identical to SEQ ID NO: 90400

SEQ ID NO: 90420 - DNA, 201 bp, Homo sapiens; identical to SEQ ID NO: 90401

SEQ ID NO: 90421 - DNA, 201 bp, Homo sapiens; identical to SEQ ID NO: 90402

SEQ ID NO: 90422 - DNA, 201 bp, Homo sapiens; identical to SEQ ID NO: 90403

SEQ ID NO: 90423 - DNA, 171 bp, Homo sapiens
agaacaccttctacgacatcgtggctgagctcggggccatggagcacgcgcaggcggtggactacatcaagaaactgatgaccaagggccgcccctccacrtgatttccagtgagtgtaaataattttaaataacctctggcccttggaataaagttctgttttctgtatt

SEQ ID NO: 90424 - DNA, 201 bp, Homo sapiens
ttgtcctctttgaagcagaaattgaaaagtactgcccagagaattttgtagacatcaagaaaactttggaacgagagactcgccagtgccaggctctggtkatctggactgactgtgatagagaaggcgaaaacatcgggtttgagattatccacgtgtgtaaggctgtaaagcccaatctgcaggtgttgcgagcccgat

SEQ ID NO: 90425 - DNA, 201 bp, Homo sapiens
ggctgcgacggcccgaagaccgtgccttttcccgcgccgccatggagatggccctccgaggcgtgcggaaagtcctctgtgtggccgaaaaaaacgacgcrgccaaggggatcgccgacctgctgtcaaacggtcgcatgaggcggagagaaggactttcaaaattcaacaagatctatgaatttgattatcatctgtatg

SEQ ID NO: 90426 - DNA, 201 bp, Homo sapiens
ccctttcggtgggcgccagttgagcctcatctctggcttccccaggatgcgccggcagccggggagcggctccgggcgcgaggtctgaggatgatctttcytgtcgcccgctacgcgctccggtggctgcgacggcccgaagaccgtgccttttcccgcgccgccatggagatggccctccgaggcgtgcggaaagtcctc

SEQ ID NO: 90427 - DNA, 201 bp, Homo sapiens
gtcctgagaaggacggtgtaatgcaaggaaatggctgtggtaacactgatccttcagaagaagcttcattccctcttaatctagttaagccaggacatccmgaattcattgctttaataaagaacccaggccgggtgcagtggctcatgcctgtaatcccagcactttgggaggctgtggggggcggattgcctgagctca

SEQ ID NO: 90428 - DNA, 201 bp, Homo sapiens
gttagcagaggattggtgcagtcccagctgaagcccactgtgtgccaaaggaagaagctcccagggctgcttccttcacctgcagaaagccccaagtgagscaccagcactcatggggcagtccctgtccaggctgcccagggcttctcatagacgtcctgagaaggacggtgtaatgcaaggaaatggctgtggtaacac

SEQ ID NO: 90429 - DNA, 201 bp, Homo sapiens
cttacagggagatgaacagcgactgtacgagtttattgttcgccatttcctggcttgctgctcccaggatgctcaggggcaggagaccacagtggagatcracatcgctcaggaacgctttgtggcccatggcctcatgattctggcccgaaactatctggatgtgtatccatatgatcactggagtgacaagatcctccc

SEQ ID NO: 90430 - DNA, 201 bp, Homo sapiens
aggcgggcggaagttccacgccaagatactggattcggtgctgaggcggcggctgcggcacgggaaaggctcagtgactgaagctccaaaggccagcaggytggtggggacgtgaccgaagcgaggctctggttccctttcggtgggcgccagttgagcctcatctctggcttccccaggatgcgccggcagccggggagc

SEQ ID NO: 90431 - DNA, 201 bp, Homo sapiens
actatctggatgtgtatccatatgatcactggagtgacaagatcctccctgtctatgagcaaggatcccactttcagcccagcaccgtggagatggtggayggggagaccagcccacccaagctgctcaccgaggccgacctcattgccctcatggagaagcatggcattggtacggatgccactcatgcggagcacatcg

SEQ ID NO: 90432 - DNA, 201 bp, Homo sapiens
gtgggcctcaccccagacaagcggttcctccctgggcacctgggcatgggacttgtggaaggttatgattccatgggctatgaaatgtctaagcctgacckccgggctgaactggaagctgatctgaagctgatctgtgatggcaaaaaggacaaatttgtggttctaaggcagcaagtgcagaaatacaagcaggttttc

SEQ ID NO: 90433 - DNA, 201 bp, Homo sapiens
ccacactgggctttgtggtggagcggttcaaagccattcaggcttttgtaccagaaatcttccacagaattaaagtaactcatgaccacaaagatggtatsgtagaattcaactggaaaaggcatcgactctttaaccacacggcttgcctagttctctatcagttgtgtgtggaggatcccatggcaactgtggtagagg

SEQ ID NO: 90434 - DNA, 201 bp, Homo sapiens
cagtcccagctgaagcccactgtgtgccaaaggaagaagctcccagggctgcttccttcacctgcagaaagccccaagtgagccaccagcactcatggggyagtccctgtccaggctgcccagggcttctcatagacgtcctgagaaggacggtgtaatgcaaggaaatggctgtggtaacactgatccttcagaagaagc

SEQ ID NO: 90435 - DNA, 201 bp, Homo sapiens
tgtgggcagacagccccaatccgggagcaggagggcctcctgccttggcatatagacccctgggcgcctccctgggatgcccaccaggcccagggatccayctaggtgggtttggcaaccctggtgatggcagtggtagtggcacatcctgcctttgcagccagccctccgtcacacggactgtgcagaaggatggaccca

SEQ ID NO: 90436 - DNA, 201 bp, Homo sapiens
tcagccacaccctgtgtacaggttaaagttaaagtttaagcgcggtagccttcccccgaccatgcctctggagtttgtttgctgcatcggcggatgcgacracaccctgagggagatcctggacctgagattttcagggggcccccccagggctagccagccctctggccgcctgcaggctaaccagtccctgaacaggat

SEQ ID NO: 90437 - DNA, 169 bp, Homo sapiens
gggaacgtgcttggacgaggggcgcgggacagtctgggagttgtagttccaggtcgctgtggggcgcgsgcctggcggaagtagctggagaaggcgggcggaagttccacgccaagatactggattcggtgctgaggcggcggctgcggcacgggaaaggctcagtgac

SEQ ID NO: 90438 - DNA, 201 bp, Homo sapiens
gaccaagtggccatttagtgtcctggaaacttagaggacagtgttggcctttggagtcgggccttcttgtgttaaggggcacaaggtccagatcactctgsagcaggccagctctgctggacagtgaccctcttcccaggcctcaggagtgaccatagccactgctgaaaagtcacgcagctgctccctcggaccccccaa

SEQ ID NO: 90439 - DNA, 201 bp, Homo sapiens
atgcgacgacaccctgagggagatcctggacctgagattttcagggggcccccccagggctagccagccctctggccgcctgcaggctaaccagtccctgracaggatggacaacagccagcacccccagcctgctgacagcagacagactgggtcctcaaaggctctggcccagaccctcccaccacccacggctgctgg

SEQ ID NO: 90440 - DNA, 201 bp, Homo sapiens
ctgcggcacgggaaaggctcagtgactgaagctccaaaggccagcaggctggtggggacgtgaccgaagcgaggctctggttccctttcggtgggcgccakttgagcctcatctctggcttccccaggatgcgccggcagccggggagcggctccgggcgcgaggtctgaggatgatctttcctgtcgcccgctacgcgct

SEQ ID NO: 90441 - DNA, 201 bp, Homo sapiens; identical to SEQ ID NO: 90424

SEQ ID NO: 90442 - DNA, 201 bp, Homo sapiens; identical to SEQ ID NO: 90425

SEQ ID NO: 90443 - DNA, 201 bp, Homo sapiens; identical to SEQ ID NO: 90426

SEQ ID NO: 90444 - DNA, 201 bp, Homo sapiens; identical to SEQ ID NO: 90427

SEQ ID NO: 90445 - DNA, 201 bp, Homo sapiens; identical to SEQ ID NO: 90428

SEQ ID NO: 90446 - DNA, 201 bp, Homo sapiens; identical to SEQ ID NO: 90429

SEQ ID NO: 90447 - DNA, 201 bp, Homo sapiens; identical to SEQ ID NO: 90430

SEQ ID NO: 90448 - DNA, 201 bp, Homo sapiens; identical to SEQ ID NO: 90431

SEQ ID NO: 90449 - DNA, 201 bp, Homo sapiens; identical to SEQ ID NO: 90432

SEQ ID NO: 90450 - DNA, 201 bp, Homo sapiens; identical to SEQ ID NO: 90433

SEQ ID NO: 90451 - DNA, 201 bp, Homo sapiens; identical to SEQ ID NO: 90434

SEQ ID NO: 90452 - DNA, 201 bp, Homo sapiens; identical to SEQ ID NO: 90435

SEQ ID NO: 90453 - DNA, 201 bp, Homo sapiens; identical to SEQ ID NO: 90436

SEQ ID NO: 90454 - DNA, 169 bp, Homo sapiens; identical to SEQ ID NO: 90437

SEQ ID NO: 90455 - DNA, 201 bp, Homo sapiens; identical to SEQ ID NO: 90438

SEQ ID NO: 90456 - DNA, 201 bp, Homo sapiens; identical to SEQ ID NO: 90439

SEQ ID NO: 90457 - DNA, 201 bp, Homo sapiens; identical to SEQ ID NO: 90440

SEQ ID NO: 90458 - DNA, 201 bp, Homo sapiens; identical to SEQ ID NO: 90425

SEQ ID NO: 90459 - DNA, 201 bp, Homo sapiens; identical to SEQ ID NO: 90426

SEQ ID NO: 90460 - DNA, 201 bp, Homo sapiens
aagcagaaattgaaaagtactgcccagagaattttgtagacatcaaggtagggtcttttggaagacatatggcactgagtcaaaccacagagtcaaacagrgtgatttctttgtttttaatgcattggcatttggagataaggttttccaccaaagtcactaccatgatttaaaaagctggttcccacccattgtataaat

SEQ ID NO: 90461 - DNA, 169 bp, Homo sapiens; identical to SEQ ID NO: 90437

SEQ ID NO: 90462 - DNA, 201 bp, Homo sapiens; identical to SEQ ID NO: 90440

SEQ ID NO: 90463 - DNA, 201 bp, Homo sapiens; identical to SEQ ID NO: 90430

SEQ ID NO: 90464 - DNA, 201 bp, Homo sapiens; identical to SEQ ID NO: 90425

SEQ ID NO: 90465 - DNA, 201 bp, Homo sapiens; identical to SEQ ID NO: 90424

SEQ ID NO: 90466 - DNA, 201 bp, Homo sapiens; identical to SEQ ID NO: 90426

SEQ ID NO: 90467 - DNA, 201 bp, Homo sapiens; identical to SEQ ID NO: 90429

SEQ ID NO: 90468 - DNA, 201 bp, Homo sapiens; identical to SEQ ID NO: 90430

SEQ ID NO: 90469 - DNA, 201 bp, Homo sapiens; identical to SEQ ID NO: 90431

SEQ ID NO: 90470 - DNA, 201 bp, Homo sapiens; identical to SEQ ID NO: 90432

SEQ ID NO: 90471 - DNA, 201 bp, Homo sapiens
aagcagctaacctggccttgaaacctaatctctgatgccatgtccccccaagccccatcagagttttgtaaaaagcccctccctgctctccacaccaatgmtgagagcccatggggtaactggaggcttccctgccatcttggcaaagaagcctggctgacgtcctgcacatgcttccccaggtgattgcttgcacttaac

SEQ ID NO: 90472 - DNA, 201 bp, Homo sapiens; identical to SEQ ID NO: 90433

SEQ ID NO: 90473 - DNA, 201 bp, Homo sapiens; identical to SEQ ID NO: 90435

SEQ ID NO: 90474 - DNA, 201 bp, Homo sapiens; identical to SEQ ID NO: 90436

SEQ ID NO: 90475 - DNA, 169 bp, Homo sapiens; identical to SEQ ID NO: 90437

SEQ ID NO: 90476 - DNA, 201 bp, Homo sapiens; identical to SEQ ID NO: 90439

SEQ ID NO: 90477 - DNA, 201 bp, Homo sapiens; identical to SEQ ID NO: 90440

SEQ ID NO: 90478 - DNA, 201 bp, Homo sapiens
gccgggggaagacccactgaagctgggcaggacacaggcgagctcaggtgatgccggccaccagcaatgcctggcctggtagctccgcttctgctttcacmaagagagtgtttcttcactcaactcaggtggcatttggggtgacatctcaaaggccaggaattccgttgacttgttggctgccagtaggggcgggaggaa

SEQ ID NO: 90479 - DNA, 201 bp, Homo sapiens
tggagtggtacatgcgcgcccggcccgaggatgtcatctcagagggccgggggaagacccactgaagctgggcaggacacaggcgagctcaggtgatgccrgccaccagcaatgcctggcctggtagctccgcttctgctttcaccaagagagtgtttcttcactcaactcaggtggcatttggggtgacatctcaaaggc

SEQ ID NO: 90480 - DNA, 196 bp, Homo sapiens
ggggtgacatctcaaaggccaggaattccgttgacttgttggctgccagtaggggcgggaggaaaggcggaggcgagccctggaggagggaggccacaacwccgagctgcccacctggtgctgagctggggccccgcctcctttctgttttatttttgaggaaataaaataaccaagtgctaaatcttgtagctct

SEQ ID NO: 90481 - DNA, 201 bp, Homo sapiens; identical to SEQ ID NO: 90478

SEQ ID NO: 90482 - DNA, 201 bp, Homo sapiens; identical to SEQ ID NO: 90479

SEQ ID NO: 90483 - DNA, 196 bp, Homo sapiens; identical to SEQ ID NO: 90480

SEQ ID NO: 90484 - DNA, 201 bp, Homo sapiens; identical to SEQ ID NO: 90478

SEQ ID NO: 90485 - DNA, 201 bp, Homo sapiens; identical to SEQ ID NO: 90479

SEQ ID NO: 90486 - DNA, 196 bp, Homo sapiens; identical to SEQ ID NO: 90480

SEQ ID NO: 90487 - DNA, 201 bp, Homo sapiens
tgtttggccaccgcaccgtatcagtgctcaatggtggcttccggaactggctgaaggagggccacccggtgacatccgagccctcacgcccagaaccggcmgtcttcaaagccacactggaccgctccctgctcaagacctacgagcaggtgctggagaaccttgaatctaagaggttccagctggtggattcaaggtctc

SEQ ID NO: 90488 - DNA, 201 bp, Homo sapiens
gcctgatgtggccgtgtacgatggctcctggtccgagtggtttcgccgggcccccccagagagccgtgtgtcccagggaaagtctgagaaggcctgagccrtgacctcttctgcttactgtaactgcggccggtttagtgaccccatgacttacagccggttcttacctcttaggtgaaggagatgacatgtttttagaat

SEQ ID NO: 90489 - DNA, 201 bp, Homo sapiens
ccggatgcagtaggactggactcgggccatatccgtggtgccgtcaacatgcctttcatggacttcctgactgaggatggcttcgagaagggcccagaagrgctccgtgctctgttccagaccaagaaggtggatctctcgcagcctctcattgccacgtgccgcaagggagtcaccgcctgccacgtggccttggctgcc

SEQ ID NO: 90490 - DNA, 201 bp, Homo sapiens
ttctatgctccccgggtctggtggatgttccgtgtgtttggccaccgcaccgtatcagtgctcaatggtggcttccggaactggctgaaggagggccaccmggtgacatccgagccctcacgcccagaaccggccgtcttcaaagccacactggaccgctccctgctcaagacctacgagcaggtgctggagaaccttgaa

SEQ ID NO: 90491 - DNA, 201 bp, Homo sapiens
agaagggcccagaagagctccgtgctctgttccagaccaagaaggtggatctctcgcagcctctcattgccacgtgccgcaagggagtcaccgcctgccaygtggccttggctgcctacctctgcggcaagcctgatgtggccgtgtacgatggctcctggtccgagtggtttcgccgggcccccccagagagccgtgtgt

SEQ ID NO: 90492 - DNA, 201 bp, Homo sapiens
gagccggatgcagtaggactggactcgggccatatccgtggtgccgtcaacatgcctttcatggacttcctgactgaggatggcttcgagaagggcccagragagctccgtgctctgttccagaccaagaaggtggatctctcgcagcctctcattgccacgtgccgcaagggagtcaccgcctgccacgtggccttggct

SEQ ID NO: 90493 - DNA, 201 bp, Homo sapiens
tgaatctaagaggttccagctggtggattcaaggtctcaagggcggttcctgggcaccgagccggagccggatgcagtaggactggactcgggccatatcygtggtgccgtcaacatgcctttcatggacttcctgactgaggatggcttcgagaagggcccagaagagctccgtgctctgttccagaccaagaaggtgga

SEQ ID NO: 90494 - DNA, 201 bp, Homo sapiens
cgagccggagccggatgcagtaggactggactcgggccatatccgtggtgccgtcaacatgcctttcatggacttcctgactgaggatggcttcgagaagrgcccagaagagctccgtgctctgttccagaccaagaaggtggatctctcgcagcctctcattgccacgtgccgcaagggagtcaccgcctgccacgtggc

SEQ ID NO: 90495 - DNA, 201 bp, Homo sapiens
cgccctacgagatgatgctgcccagcgaggctggcttcgccgagtatgtgggccgcctgggcatcagcaaccacacgcacgtggtggtgtatgatggtgamcacctgggcagcttctatgctccccgggtctggtggatgttccgtgtgtttggccaccgcaccgtatcagtgctcaatggtggcttccggaactggctga

SEQ ID NO: 90496 - DNA, 201 bp, Homo sapiens; identical to SEQ ID NO: 90487

SEQ ID NO: 90497 - DNA, 201 bp, Homo sapiens; identical to SEQ ID NO: 90488

SEQ ID NO: 90498 - DNA, 201 bp, Homo sapiens; identical to SEQ ID NO: 90489

SEQ ID NO: 90499 - DNA, 201 bp, Homo sapiens; identical to SEQ ID NO: 90490

SEQ ID NO: 90500 - DNA, 201 bp, Homo sapiens; identical to SEQ ID NO: 90491

SEQ ID NO: 90501 - DNA, 201 bp, Homo sapiens; identical to SEQ ID NO: 90492

SEQ ID NO: 90502 - DNA, 201 bp, Homo sapiens; identical to SEQ ID NO: 90493

SEQ ID NO: 90503 - DNA, 201 bp, Homo sapiens; identical to SEQ ID NO: 90494

SEQ ID NO: 90504 - DNA, 201 bp, Homo sapiens; identical to SEQ ID NO: 90495

SEQ ID NO: 90505 - DNA, 201 bp, Homo sapiens
tggctggtgcttcccggatcattggtgtggacatcaataaagataaatttgcaagggccaaagagtttggagccactgaatgtattaaccctcaggatttwagtaaacccatccaggaagtgctcattgagatgaccgatggaggagtggactattcctttgaatgtattggtaatgtgaaggtcatgagagcagcacttg

SEQ ID NO: 90506 - DNA, 201 bp, Homo sapiens
aggaaagacaattttgcattacatgggaaccagcacattttctgaatacacagttgtggctgatatctctgttgctaaaatagatcctttagcacctttgkataaagtctgccttctaggttgtggcatttcaaccggttatggtgctgctgtgaacactgccaagttggagcctggctctgtttgtgccgtctttggtct

SEQ ID NO: 90507 - DNA, 201 bp, Homo sapiens
ctggaaagaggaacaactaccaagtgaacaagatgagcaaagtcctctattatacaagatttccttcggtggaacattatggtgacaaagcagcgtaatgrgctcttaagcagattgatttttatcaaactggacatatcagaattccttatgtataagagaaatatgcacatgctcctttcaagaaaagagtgataaccc

SEQ ID NO: 90508 - DNA, 194 bp, Homo sapiens
tcgccggcgagtgcaccctggaacgcacaacttagcggcacgcaccacagctcgagcaccgcccttccggttggagccattgcaagccccccccacgccccgcccccctcgctaggcgctcgccacgcccatgcctccgtcgctgcgcggcccaccccggatgtcagccccccgcgccgaccagaatccgtgaa

SEQ ID NO: 90509 - DNA, 201 bp, Homo sapiens
aggtgaagaaattgccactcgtccattccagctggtaacaggtcgcacatggaaaggcactgcctttggaggatggaagagtgtagaaagtgtcccaaagytggtgtctgaatatatgtccaaaaagataaaagttgatgaatttgtgactcacaatctgtcttttgatgaaatcaacaaagcctttgaactgatgcattc

SEQ ID NO: 90510 - DNA, 137 bp, Homo sapiens
tcgccggcgagtgcaccctggaacgcacaacttagcrgcacgcaccacagctcgagcaccgcccttccggttggagccattgcaagccccccccacgccccgcccccctcgctaggcgctcgccacgcccatgcctc

SEQ ID NO: 90511 - DNA, 201 bp, Homo sapiens
aagaaattgccactcgtccattccagctggtaacaggtcgcacatggaaaggcactgcctttggaggatggaagagtgtagaaagtgtcccaaagttggtstctgaatatatgtccaaaaagataaaagttgatgaatttgtgactcacaatctgtcttttgatgaaatcaacaaagcctttgaactgatgcattctggaa

SEQ ID NO: 90512 - DNA, 201 bp, Homo sapiens; identical to SEQ ID NO: 90509

SEQ ID NO: 90513 - DNA, 137 bp, Homo sapiens; identical to SEQ ID NO: 90510

SEQ ID NO: 90514 - DNA, 201 bp, Homo sapiens; identical to SEQ ID NO: 90511

SEQ ID NO: 90515 - DNA, 201 bp, Homo sapiens; identical to SEQ ID NO: 90505

SEQ ID NO: 90516 - DNA, 201 bp, Homo sapiens; identical to SEQ ID NO: 90506

SEQ ID NO: 90517 - DNA, 201 bp, Homo sapiens
cattctacagcttttttcactcattattgtataattatatctgaagctctcgttcattaattttagtcctgtgtagcagaattcaattacgggaactaccrtaatttatctgttctccagttgaaggcatgaagttgttgccagtttctgtattataacactgtagtggaacattcttctgcattgggctcactgcgtgtt

SEQ ID NO: 90518 - DNA, 201 bp, Homo sapiens
tcagcacctacttttgtcaaatcttaacattttgccacttcgagatcacattgccattcctcccctccagaggtaacaattatccacaatttgatgtttakcattcctgtgttgttgtactttcactgtgtataacctaaaccatctactctttagtactgttttatatatttttaagcctcatacttgctcattctacag

SEQ ID NO: 90519 - DNA, 194 bp, Homo sapiens; identical to SEQ ID NO: 90508

SEQ ID NO: 90520 - DNA, 201 bp, Homo sapiens
agggttatgtgtgtcattcatgaatctctataatcaaggacaaggataattcagtcatgaacctgttttctggatgctcctccacataaataattgctagyttattaaggaatattttaacataataaaagtaatttctacatttgtgtggaaattgtcttgttttatgctgtcatcattgtcacggtttgtctgcccatt

SEQ ID NO: 90521 - DNA, 201 bp, Homo sapiens
gaacttttaagggtctcagtccccgttgattaaagaacagatcctagccatcagtgacaaagttaatcaggacccaagtctgcttctgtgatattatcttkaagggaggtactgtgccttgttcatacctgtaccccaaattcctaggatggcatctgcccttcagggggcactaaaatgtattattgaaacagcattctg

SEQ ID NO: 90522 - DNA, 201 bp, Homo sapiens
gtgttggttgtgactgtactatttctagtatagtgaactacatactgaatatccaagttctcagcacctacttttgtcaaatcttaacattttgccacttygagatcacattgccattcctcccctccagaggtaacaattatccacaatttgatgtttatcattcctgtgttgttgtactttcactgtgtataacctaaa

SEQ ID NO: 90523 - DNA, 201 bp, Homo sapiens
gttgttgtactttcactgtgtataacctaaaccatctactctttagtactgttttatatatttttaagcctcatacttgctcattctacagcttttttcaytcattattgtataattatatctgaagctctcgttcattaattttagtcctgtgtagcagaattcaattacgggaactaccataatttatctgttctccag

SEQ ID NO: 90524 - DNA, 201 bp, Homo sapiens
agagcttcacagctactccagaaaatagggttatgtgtgtcattcatgaatctctataatcaaggacaaggataattcagtcatgaacctgttttctggaygctcctccacataaataattgctagtttattaaggaatattttaacataataaaagtaatttctacatttgtgtggaaattgtcttgttttatgctgtca

SEQ ID NO: 90525 - DNA, 201 bp, Homo sapiens
ttatcttcattctgcaagggaaagggaaaggaagcagggcagtggtgggtgtctgaaacctcagaaacataacgttgaacttttaagggtctcagtccccrttgattaaagaacagatcctagccatcagtgacaaagttaatcaggacccaagtctgcttctgtgatattatctttaagggaggtactgtgccttgttca

SEQ ID NO: 90526 - DNA, 201 bp, Homo sapiens; identical to SEQ ID NO: 90509

SEQ ID NO: 90527 - DNA, 137 bp, Homo sapiens; identical to SEQ ID NO: 90510

SEQ ID NO: 90528 - DNA, 201 bp, Homo sapiens; identical to SEQ ID NO: 90511

SEQ ID NO: 90529 - DNA, 201 bp, Homo sapiens; identical to SEQ ID NO: 90505

SEQ ID NO: 90530 - DNA, 201 bp, Homo sapiens; identical to SEQ ID NO: 90506

SEQ ID NO: 90531 - DNA, 194 bp, Homo sapiens; identical to SEQ ID NO: 90508

SEQ ID NO: 90532 - DNA, 201 bp, Homo sapiens; identical to SEQ ID NO: 90520

SEQ ID NO: 90533 - DNA, 201 bp, Homo sapiens
gtgttggttgtgactgtactatttctagtatagtgaactacatactgaatatccaagttctcagcacctacttttgtcaaatcttaacattttgccacttygagatcacattgccattcctcccctccagagtttgcattttcctcaattctcgttaaatccttcattctaatggacattttattgtgaagaacctgttca

SEQ ID NO: 90534 - DNA, 201 bp, Homo sapiens; identical to SEQ ID NO: 90521

SEQ ID NO: 90535 - DNA, 201 bp, Homo sapiens; identical to SEQ ID NO: 90524

SEQ ID NO: 90536 - DNA, 201 bp, Homo sapiens; identical to SEQ ID NO: 90525

SEQ ID NO: 90537 - DNA, 201 bp, Homo sapiens; identical to SEQ ID NO: 90505

SEQ ID NO: 90538 - DNA, 201 bp, Homo sapiens; identical to SEQ ID NO: 90506

SEQ ID NO: 90539 - DNA, 194 bp, Homo sapiens; identical to SEQ ID NO: 90508

SEQ ID NO: 90540 - DNA, 137 bp, Homo sapiens; identical to SEQ ID NO: 90510

SEQ ID NO: 90541 - DNA, 201 bp, Homo sapiens
tgacctgcttcactctgggaaaagtatccgtaccgtcctgacgttttgaggcaatagagatgccttcccctgtagcagtcttcagcctcctctaccctacragatctggagcaacagctaggaaatatcattaattcagctcttcagagatgttatcaataaattacacatgggggctttccaaagaaatggaaattgatg

SEQ ID NO: 90542 - DNA, 201 bp, Homo sapiens
ttgaggatgtggaggttgcacctcctaaggcttatgaagttcgcattaagatggtggctgtaggaatctgtcgcacagatgaccacgtggttagtggcaamctggtgaccccccttcctgtgattttaggccatgaggcagccggcatcgtggagagtgttggagaaggggtgactacagtcaaaccaggtgataaagtca

SEQ ID NO: 90543 - DNA, 201 bp, Homo sapiens
gtcgacattttcctttttctaataaaaatgtaccaaatccctggggtaaaagctagggtaaggtaaaggatagactcacatttacaagtagtgaaggtccragagttctaaatacaggaaatttcttaggaactcaaataaaatgccccacattttactacagtaaatggcagtgtttttatgacttttatactatttctt

SEQ ID NO: 90544 - DNA, 201 bp, Homo sapiens
tgcagggggaagcccattcaccacttccttggcaccagcaccttctcccagtacacggtggtggatgagaatgcagtggccaaaattgatgcagcctcgcmcctggagaaagtctgcctcattggctgtggattctcgactggttatgggtctgcagttaacgttgccaaggtcaccccaggctctacctgtgctgtgttt

SEQ ID NO: 90545 - DNA, 201 bp, Homo sapiens
aaaatgtaccaaatccctggggtaaaagctagggtaaggtaaaggatagactcacatttacaagtagtgaaggtccaagagttctaaatacaggaaatttyttaggaactcaaataaaatgccccacattttactacagtaaatggcagtgtttttatgacttttatactatttctttatggtcgatatacaattgatttt

SEQ ID NO: 90546 - DNA, 201 bp, Homo sapiens
agactcacagtctgctggtgggcagagaagacagaaacgacatgagcacagcaggaaaagtaatcaaatgcaaagcagctgtgctatgggaggtaaagaarcccttttccattgaggatgtggaggttgcacctcctaaggcttatgaagttcgcattaagatggtggctgtaggaatctgtcgcacagatgaccacgtgg

SEQ ID NO: 90547 - DNA, 201 bp, Homo sapiens
ccagaatcattgcggtggacatcaacaaggacaaatttgcaaaggccaaagagttgggtgccactgaatgcatcaaccctcaagactacaagaaacccatycaggaagtgctaaaggaaatgactgatggaggtgtggatttttcgtttgaagtcatcggtcggcttgacaccatgatggcttccctgttatgttgtcatg

SEQ ID NO: 90548 - DNA, 201 bp, Homo sapiens
ctatgggaggtaaagaaacccttttccattgaggatgtggaggttgcacctcctaaggcttatgaagttcgcattaagatggtggctgtaggaatctgtcrcacagatgaccacgtggttagtggcaacctggtgaccccccttcctgtgattttaggccatgaggcagccggcatcgtggagagtgttggagaaggggtg

SEQ ID NO: 90549 - DNA, 201 bp, Homo sapiens
aggtcaccccaggctctacctgtgctgtgtttggcctgggaggggtcggcctatctgctgttatgggctgtaaagcagctggagcagccagaatcattgckgtggacatcaacaaggacaaatttgcaaaggccaaagagttgggtgccactgaatgcatcaaccctcaagactacaagaaacccatccaggaagtgctaa

SEQ ID NO: 90550 - DNA, 201 bp, Homo sapiens
tatggctaagaagttttcactggatgcgttaataacccatgttttaccttttgaaaaaataaatgaaggatttgacctgcttcactctgggaaaagtatcygtaccgtcctgacgttttgaggcaatagagatgccttcccctgtagcagtcttcagcctcctctaccctacaagatctggagcaacagctaggaaatatc

SEQ ID NO: 90551 - DNA, 201 bp, Homo sapiens
gcctcattggctgtggattctcgactggttatgggtctgcagttaacgttgccaaggtcaccccaggctctacctgtgctgtgtttggcctgggaggggtyggcctatctgctgttatgggctgtaaagcagctggagcagccagaatcattgcggtggacatcaacaaggacaaatttgcaaaggccaaagagttgggtg

SEQ ID NO: 90552 - DNA, 201 bp, Homo sapiens; identical to SEQ ID NO: 90541

SEQ ID NO: 90553 - DNA, 201 bp, Homo sapiens; identical to SEQ ID NO: 90542

SEQ ID NO: 90554 - DNA, 201 bp, Homo sapiens; identical to SEQ ID NO: 90543

SEQ ID NO: 90555 - DNA, 201 bp, Homo sapiens; identical to SEQ ID NO: 90544

SEQ ID NO: 90556 - DNA, 201 bp, Homo sapiens; identical to SEQ ID NO: 90545

SEQ ID NO: 90557 - DNA, 201 bp, Homo sapiens; identical to SEQ ID NO: 90546

SEQ ID NO: 90558 - DNA, 201 bp, Homo sapiens; identical to SEQ ID NO: 90547

SEQ ID NO: 90559 - DNA, 201 bp, Homo sapiens; identical to SEQ ID NO: 90548

SEQ ID NO: 90560 - DNA, 201 bp, Homo sapiens; identical to SEQ ID NO: 90549

SEQ ID NO: 90561 - DNA, 201 bp, Homo sapiens
actttgggaggtcaagacgggtggatgacctgaggtcaggagtttgagaccagcctggtcaacatggtgaaaccccatctctactaaaaatacaaaaattwgccaggcatggtggcaggtggctgtaatcccagctactcaggaggctgaggcaagagaatcgctggagcctgggaggcggaggttgcagtgagcagaaat

SEQ ID NO: 90562 - DNA, 201 bp, Homo sapiens; identical to SEQ ID NO: 90550

SEQ ID NO: 90563 - DNA, 201 bp, Homo sapiens; identical to SEQ ID NO: 90551

SEQ ID NO: 90564 - DNA, 201 bp, Homo sapiens; identical to SEQ ID NO: 90541

SEQ ID NO: 90565 - DNA, 201 bp, Homo sapiens; identical to SEQ ID NO: 90542

SEQ ID NO: 90566 - DNA, 201 bp, Homo sapiens; identical to SEQ ID NO: 90543

SEQ ID NO: 90567 - DNA, 201 bp, Homo sapiens; identical to SEQ ID NO: 90544

SEQ ID NO: 90568 - DNA, 201 bp, Homo sapiens; identical to SEQ ID NO: 90545

SEQ ID NO: 90569 - DNA, 201 bp, Homo sapiens; identical to SEQ ID NO: 90546

SEQ ID NO: 90570 - DNA, 201 bp, Homo sapiens; identical to SEQ ID NO: 90547

SEQ ID NO: 90571 - DNA, 201 bp, Homo sapiens; identical to SEQ ID NO: 90548

SEQ ID NO: 90572 - DNA, 201 bp, Homo sapiens; identical to SEQ ID NO: 90549

SEQ ID NO: 90573 - DNA, 201 bp, Homo sapiens; identical to SEQ ID NO: 90550

SEQ ID NO: 90574 - DNA, 201 bp, Homo sapiens; identical to SEQ ID NO: 90551

SEQ ID NO: 90575 - DNA, 201 bp, Homo sapiens
aaactggcaaggtcaaacctggttccacttgcgtcgtctttggcctgggaggagttggcctgtcagtcatcatgggctgtaagtcagctggtgcatctagratcattgggattgacctcaacaaagacaaatttgagaaggccatggctgtaggtgccactgagtgtatcagtcccaaggactctaccaaacccatcagtg

SEQ ID NO: 90576 - DNA, 201 bp, Homo sapiens
ttccacttgcgtcgtctttggcctgggaggagttggcctgtcagtcatcatgggctgtaagtcagctggtgcatctaggatcattgggattgacctcaacraagacaaatttgagaaggccatggctgtaggtgccactgagtgtatcagtcccaaggactctaccaaacccatcagtgaggtgctgtcagaaatgacagg

SEQ ID NO: 90577 - DNA, 201 bp, Homo sapiens
ttctatgttgaaatggagatttttaagagttttaaccagctgctgcagatatataactcaaaacagatatagcgtataaagatatagtaaatgcatctccyagagtaatattcacttaacacattgaaactattattttttagatttgaatataaatgtattttttaaacacttgttatgagttaacttggattacatttt

SEQ ID NO: 90578 - DNA, 201 bp, Homo sapiens
gtcgcaacccagatggcaacctttgcattaggagcgatattactggtcgtggagtactggctgatggcaccaccagatttacatgcaagggcaaaccagtmcaccacttcatgaacaccagtacatttaccgagtacacagtggtggatgaatcttctgttgctaagattgatgatgcagctcctcctgagaaagtctgtt

SEQ ID NO: 90579 - DNA, 201 bp, Homo sapiens
gggatgtgtctttggaggtttgaaaagcagagatgatgtcccaaaactagtgactgagttcctggcaaagaaatttgacctggaccagttgataactcatrttttaccatttaaaaaaatcagtgaaggatttgagctgctcaattcaggacaaagcattcgaacggtcctgacgttttgagatccaaagtggcaggaggt

SEQ ID NO: 90580 - DNA, 201 bp, Homo sapiens
tgtcgcacagatgaccatgtgataaaaggaacaatggtgtccaagtttccagtgattgtgggacatgaggcaactgggattgtagagagcattggagaagsagtgactacagtgaaaccaggtgacaaagtcatccctctctttctgccacaatgtagagaatgcaatgcttgtcgcaacccagatggcaacctttgcatt

SEQ ID NO: 90581 - DNA, 201 bp, Homo sapiens
gaaaatattccttttgtaatactgaatataaacatagagctagaatcatattatcatacttatcataatgttcaatttgatacagtagaattgcaagtccytaagtccctattcactgtgcttagtagtgactccatttaataaaaagtgtttttagtttttaacaactacactgatgtatctatatatatctataacatg

SEQ ID NO: 90582 - DNA, 201 bp, Homo sapiens
ttgtaaggctataattgtatcttttaagaaaacatacacttggatttctatgttgaaatggagatttttaagagttttaaccagctgctgcagatatatawctcaaaacagatatagcgtataaagatatagtaaatgcatctcctagagtaatattcacttaacacattgaaactattattttttagatttgaatataaa

SEQ ID NO: 90583 - DNA, 201 bp, Homo sapiens
gtaaatgcatctcctagagtaatattcacttaacacattgaaactattattttttagatttgaatataaatgtattttttaaacacttgttatgagttaasttggattacattttgaaatcagttcattccatgatgcatattactggattagattaagaaagacagaaaagattaagggacgggcacatttttcaacgat

SEQ ID NO: 90584 - DNA, 201 bp, Homo sapiens
ggtgacaaagtcatccctctctttctgccacaatgtagagaatgcaatgcttgtcgcaacccagatggcaacctttgcattaggagcgatattactggtcrtggagtactggctgatggcaccaccagatttacatgcaagggcaaaccagtccaccacttcatgaacaccagtacatttaccgagtacacagtggtggat

SEQ ID NO: 90585 - DNA, 201 bp, Homo sapiens
aaaaagtatatcatatgggtacacaaggctatttgccagcatatattaatattttagaaaatattccttttgtaatactgaatataaacatagagctagartcatattatcatacttatcataatgttcaatttgatacagtagaattgcaagtccctaagtccctattcactgtgcttagtagtgactccatttaataaa

SEQ ID NO: 90586 - DNA, 201 bp, Homo sapiens
aaagaattattaacctttataaacatttaaagtcttgtgagcacctgggaattagtataataacaatgttaatatttttgatttacattttgtaaggctayaattgtatcttttaagaaaacatacacttggatttctatgttgaaatggagatttttaagagttttaaccagctgctgcagatatataactcaaaacaga

SEQ ID NO: 90587 - DNA, 125 bp, Homo sapiens
atgtgaaggcacaagctgctgttayatacaacagagtgaactgagcatcagtcagaaaaagtctatgtttgcagaaatacagatccaagacaaagacaggatgggcactgctggaaaagttatta

SEQ ID NO: 90588 - DNA, 201 bp, Homo sapiens
ctcatgttttaccatttaaaaaaatcagtgaaggatttgagctgctcaattcaggacaaagcattcgaacggtcctgacgttttgagatccaaagtggcargaggtctgtgttgtcatggtgaactggagtttctcttgtgagagttccctcatctgaaatcatgtatctgtctcacaaatacaagcataagtagaagatt

SEQ ID NO: 90589 - DNA, 201 bp, Homo sapiens
gccaaggaggtagctgatgaggtgacccggccccggccttctggggaggaggtgctccaggacatccaggtcatgctcaagtcggacgccagcccttccascattcgtagcctgaagtcggacatgatgtcacacctggtgaagatccctggcatcatcatcgcggcctctgcggtccgtgccaaggccacccgcatctct

SEQ ID NO: 90590 - DNA, 201 bp, Homo sapiens
tgccccagaggaaggagctgtagtgtcctgctgcctctgggcgcccgcctctagcgcggttctgggaagtgtgcttttggcatccgttaataataaagccmcggtgtgttcaggtatctgtgggtttgtgcactcggtgacctgtcacctccatcgtgccctcatggcagggtaagtgtgagggaacagggtctggaggca

SEQ ID NO: 90591 - DNA, 201 bp, Homo sapiens
gagctgtagtgtcctgctgcctctgggcgcccgcctctagcgcggttctgggaagtgtgcttttggcatccgttaataataaagccacggtgtgttcaggwatctgtgggtttgtgcactcggtgacctgtcacctccatcgtgccctcatggcagggtaagtgtgagggaacagggtctggaggcagactggccagggtt

SEQ ID NO: 90592 - DNA, 201 bp, Homo sapiens
acatgcagctctactgcgacaggtacctgtgtgacaaggtcgtccctgggaacagggttaccatcatgggcatctactccatcaagaagtttggcctgacyaccagcaggggccgtgacagggtgggcgtgggcatccgaagctcctacatccgtgtcctgggcatccaggtggacacagatggctctggccgcagctttg

SEQ ID NO: 90593 - DNA, 201 bp, Homo sapiens
agctctactgcgacaggtacctgtgtgacaaggtcgtccctgggaacagggttaccatcatgggcatctactccatcaagaagtttggcctgactaccagyaggggccgtgacagggtgggcgtgggcatccgaagctcctacatccgtgtcctgggcatccaggtggacacagatggctctggccgcagctttgctgggg

SEQ ID NO: 90594 - DNA, 201 bp, Homo sapiens
tcatcactctgcacgtgagcgcactgacacagacacaggctgtggagggcgagattgacctggccaagctgaagaagtttattgcctactgccgagtgaartgtggcccccggctgtcagcagaggctgcagagaaactgaagaaccgctacatcatcatgcggagcggggcccgtcagcacgagagggacagtgaccgcc

SEQ ID NO: 90595 - DNA, 201 bp, Homo sapiens
ttctggggaggaggtgctccaggacatccaggtcatgctcaagtcggacgccagcccttccagcattcgtagcctgaagtcggacatgatgtcacacctgstgaagatccctggcatcatcatcgcggcctctgcggtccgtgccaaggccacccgcatctctatccagtgccgcagctgccgcaacaccctcaccaacat

SEQ ID NO: 90596 - DNA, 201 bp, Homo sapiens
tgcagctgctggaggaagctgccaaggaggtagctgatgaggtgacccggccccggccttctggggaggaggtgctccaggacatccaggtcatgctcaaktcggacgccagcccttccagcattcgtagcctgaagtcggacatgatgtcacacctggtgaagatccctggcatcatcatcgcggcctctgcggtccgtg

SEQ ID NO: 90597 - DNA, 201 bp, Homo sapiens
cggagcacgccatccacaaggtgctgcagctcatgctgcggcgcggcgagatccagcatcgcatgcagcgcaaggttctctaccgcctcaagtgagtcgcrccgcctcactggactcatggactcgcccacgcctcgcccctcctgccgctgcctgccattgacaatgttgctgggacctctgcctccccactgcagccct

SEQ ID NO: 90598 - DNA, 201 bp, Homo sapiens
cacctggtgaagatccctggcatcatcatcgcggcctctgcggtccgtgccaaggccacccgcatctctatccagtgccgcagctgccgcaacaccctcascaacattgccatgcgccctggcctcgagggctatgccctgcccaggaagtgcaacacagatcaggctgggcgccccaaatgcccattggacccgtacttc

SEQ ID NO: 90599 - DNA, 201 bp, Homo sapiens
tgtcacctccatcgtgccctcatggcagggtaagtgtgagggaacagggtctggaggcagactggccagggtttctgacttggatctgccactcagacttstgggtaagtcacgtgacttgagtgctccggtttcttcatctgtttagcggggctcataaagccactcccttgatgctgggaatccagtgagaccagggag

SEQ ID NO: 90600 - DNA, 201 bp, Homo sapiens
tggacacagatggctctggccgcagctttgctggggccgtgagcccccaggaggaggaggagttccgtcgcctggctgccctcccaaatgtctatgaggtyatctccaagagcatcgccccctccatctttgggggcacagacatgaagaaggccattgcctgcctgctctttgggggctcccgaaagaggctccctgatg

SEQ ID NO: 90601 - DNA, 201 bp, Homo sapiens
ccagaccctgaagctgcaggagctgcctgatgcagtcccccacggggagatgcccagacacatgcagctctactgcgacaggtacctgtgtgacaaggtcrtccctgggaacagggttaccatcatgggcatctactccatcaagaagtttggcctgactaccagcaggggccgtgacagggtgggcgtgggcatccgaag

SEQ ID NO: 90602 - DNA, 197 bp, Homo sapiens
ccctgagttgtgaggattgaatgacagaaggcactagtgacagtgatgctggaggaaggagtgttgccaagtgcctcggtcactttgcctaatttcagaargtcactctgagttggtatgttttgtgtttttaaaaaagctaggattcataaaattaaatagaaatcagtgaaataaaatatttgatatttaaaata

SEQ ID NO: 90603 - DNA, 201 bp, Homo sapiens
gttctctaccgcctcaagtgagtcgcgccgcctcactggactcatggactcgcccacgcctcgcccctcctgccgctgcctgccattgacaatgttgctgkgacctctgcctccccactgcagccctcgaacttcccaggcaccctcctttctgccccagaggaaggagctgtagtgtcctgctgcctctgggcgcccgcc

SEQ ID NO: 90604 - DNA, 201 bp, Homo sapiens
tcatcgcggcctctgcggtccgtgccaaggccacccgcatctctatccagtgccgcagctgccgcaacaccctcaccaacattgccatgcgccctggcctygagggctatgccctgcccaggaagtgcaacacagatcaggctgggcgccccaaatgcccattggacccgtacttcatcatgcccgacaaatgcaaatgcg

SEQ ID NO: 90605 - DNA, 201 bp, Homo sapiens; identical to SEQ ID NO: 90590

SEQ ID NO: 90606 - DNA, 201 bp, Homo sapiens; identical to SEQ ID NO: 90591

SEQ ID NO: 90607 - DNA, 201 bp, Homo sapiens
ggtgcccttttctgacttactcttcggggcctggctcaggctgttcttccttgggctagaggctgtctctgtccaagaactcccattgtcccagctccccrgctgcctcacttctccatgcccacaggggtggagggcttcaccagccaggaggaccaggagatgctgagccgcatcgagaagcagctcaagcgccgcttt

SEQ ID NO: 90608 - DNA, 201 bp, Homo sapiens; identical to SEQ ID NO: 90597

SEQ ID NO: 90609 - DNA, 197 bp, Homo sapiens; identical to SEQ ID NO: 90602

SEQ ID NO: 90610 - DNA, 201 bp, Homo sapiens; identical to SEQ ID NO: 90603

SEQ ID NO: 90611 - DNA, 201 bp, Homo sapiens; identical to SEQ ID NO: 90599

SEQ ID NO: 90612 - DNA, 201 bp, Homo sapiens; identical to SEQ ID NO: 90589

SEQ ID NO: 90613 - DNA, 201 bp, Homo sapiens; identical to SEQ ID NO: 90590

SEQ ID NO: 90614 - DNA, 201 bp, Homo sapiens; identical to SEQ ID NO: 90591

SEQ ID NO: 90615 - DNA, 201 bp, Homo sapiens; identical to SEQ ID NO: 90592

SEQ ID NO: 90616 - DNA, 201 bp, Homo sapiens; identical to SEQ ID NO: 90593

SEQ ID NO: 90617 - DNA, 201 bp, Homo sapiens; identical to SEQ ID NO: 90594

SEQ ID NO: 90618 - DNA, 201 bp, Homo sapiens; identical to SEQ ID NO: 90595

SEQ ID NO: 90619 - DNA, 201 bp, Homo sapiens; identical to SEQ ID NO: 90596

SEQ ID NO: 90620 - DNA, 201 bp, Homo sapiens; identical to SEQ ID NO: 90597

SEQ ID NO: 90621 - DNA, 201 bp, Homo sapiens; identical to SEQ ID NO: 90598

SEQ ID NO: 90622 - DNA, 201 bp, Homo sapiens; identical to SEQ ID NO: 90599

SEQ ID NO: 90623 - DNA, 201 bp, Homo sapiens; identical to SEQ ID NO: 90600

SEQ ID NO: 90624 - DNA, 201 bp, Homo sapiens; identical to SEQ ID NO: 90601

SEQ ID NO: 90625 - DNA, 197 bp, Homo sapiens; identical to SEQ ID NO: 90602

SEQ ID NO: 90626 - DNA, 201 bp, Homo sapiens; identical to SEQ ID NO: 90603

SEQ ID NO: 90627 - DNA, 201 bp, Homo sapiens; identical to SEQ ID NO: 90604

SEQ ID NO: 90628 - DNA, 201 bp, Homo sapiens
ggtagcaagagactttgaaataagcccatttgagtcctggacaacaagggataaagtggagcgtattcacatcacagacatgaccttgtctcacctgcccrgcttagaagaccttggtattcaggcaacaccactggaactcaaggccattgaggtgctgcggcttcatcacacttactgctggctgtctgctgaaattga

SEQ ID NO: 90629 - DNA, 201 bp, Homo sapiens
gggtagcaagagactttgaaataagcccatttgagtcctggacaacaagggataaagtggagcgtattcacatcacagacatgaccttgtctcacctgccyagcttagaagaccttggtattcaggcaacaccactggaactcaaggccattgaggtgctgcggcttcatcacacttactgctggctgtctgctgaaattg

SEQ ID NO: 90630 - DNA, 201 bp, Homo sapiens
atggcatgctgaacatctcgcccatcggccggagctgcaccctggaggagaggatcgagttctccgaactggacaagaaagagaagatccgggagaagttmgtggaagccctgaaaacagagtttgctggcaaagggctgaggttctctcgaggaggcatgatcagctttgacgtcttccccgagggctgggacaagcgct

SEQ ID NO: 90631 - DNA, 201 bp, Homo sapiens
agcaatccaatcgaacctggagggctccgctccgccctatgccgcgctcccctcctccacgagcaatgagaatcagctcaggccccgcccccgcttccgcmcgcctagaccacgccccttcttcatttggccaatcaggcagtccactggcccccgccccctaatgccccgccccgtcagcacttatccctgagctgcttc

SEQ ID NO: 90632 - DNA, 201 bp, Homo sapiens; identical to SEQ ID NO: 90630

SEQ ID NO: 90633 - DNA, 201 bp, Homo sapiens; identical to SEQ ID NO: 90631

SEQ ID NO: 90634 - DNA, 201 bp, Homo sapiens
cactgactcccacacccccaatggtggcggccttgggggcatctgcattggagttgggggtgccgatgctgtggatgtcatggctgggatcccctgggagytgaagtgccccaaggtgattggcgtgaagctgacgggctctctctccggttggtcctcacccaaagatgtgatcctgaaggtggcaggcatcctcacggt

SEQ ID NO: 90635 - DNA, 201 bp, Homo sapiens
catcaacattgaaaacggcaaggccaactccgtgcgcaatgccgtcactcaggagtttggccccgtccctgacactgcccgctactacaagaaacatggcwtcaggtgggtggtgatcggagacgagaactacggcgagggctcgagccgggagcatgcagctctggagcctcgccaccttgggggccgggccatcatcac

SEQ ID NO: 90636 - DNA, 201 bp, Homo sapiens
ggacggctatgcacagatcttgagggatctgggtggcattgtcctggccaatgcttgtggcccctgcattggccagtgggacaggaaggacatcaagaagkgggagaagaacacaatcgtcacctcctacaacaggaacttcacgggccgcaacgacgcaaaccccgagacccatgcctttgtcacgtccccagagattgt

SEQ ID NO: 90637 - DNA, 201 bp, Homo sapiens
cctacagcctactggtgactcggctgcagaaagctctgggtgtgcggcagtaccatgtggcctcagtcctgtgccaacgggccaaggtggcgatgagccaytttgagcccaacgagtacatccattatgacctgctagagaagaacattaacattgttcgcaaacgactgaaccggccgctgacactctcggagaagattg

SEQ ID NO: 90638 - DNA, 201 bp, Homo sapiens
tggaaaactatgcgtaccctggtgttcttctgattggcactgactcccacacccccaatggtggcggccttgggggcatctgcattggagttgggggtgcmgatgctgtggatgtcatggctgggatcccctgggagttgaagtgccccaaggtgattggcgtgaagctgacgggctctctctccggttggtcctcaccca

SEQ ID NO: 90639 - DNA, 201 bp, Homo sapiens
tggcaagcccctgaagtgcatcatcaagcaccccaacgggacccaggagaccatcctcctgaaccacaccttcaacgagacgcagattgagtggttccgckctggcagtgccctcaacagaatgaaggaactgcaacagtgagggcagtgcctccccgccccgccgctggcgtcaagttcagctccacgtgtgccatcagt

SEQ ID NO: 90640 - DNA, 201 bp, Homo sapiens
accatctgattgaagcccaggttgggggcgagaaagacctgcgccgggccaaggacatcaaccaggaagtttataatttcctggcaactgcaggtgccaartatggcgtgggcttctggaagcctggatctggaatcattcaccagattattctggaaaactatgcgtaccctggtgttcttctgattggcactgactccc

SEQ ID NO: 90641 - DNA, 201 bp, Homo sapiens
gatcttaagcagctccatgcaactgtatttatttttgatgacaagactcccatctaaagtttttctcctgcctgatcatttcattggtggctgaaggattytagagaaccttttgttcttgcaaggaaaacaagaatccaaaaccagtgactgttctgtgagtgattggtgtctgtgccgtttgttgtcaagtccagggtc

SEQ ID NO: 90642 - DNA, 140 bp, Homo sapiens
cttgcctcactgtccagctcgagacactatctccttagcatcggcctcagctgctgttgtcttcacagccggccataccaccttcccgcaggctggtaggrtccactgtccagccccagggctagttgctggtccaccag

SEQ ID NO: 90643 - DNA, 201 bp, Homo sapiens
agtgccctcaacagaatgaaggaactgcaacagtgagggcagtgcctccccgccccgccgctggcgtcaagttcagctccacgtgtgccatcagtggatcygatccgtccagccatggcttcctattccaagatggtgtgaccagacatgcttcctgctccccgcttagcccacggagtgactgtggttgtggtggggggg

SEQ ID NO: 90644 - DNA, 201 bp, Homo sapiens
aggtggcgatgagccactttgagcccaacgagtacatccattatgacctgctagagaagaacattaacattgttcgcaaacgactgaaccggccgctgacmctctcggagaagattgtgtatggacacctggatgaccccgccagccaggaaattgagcgaggcaagtcgtacctgcggctgcggccggaccgtgtggcca

SEQ ID NO: 90645 - DNA, 201 bp, Homo sapiens
ggagcatgcagctctggagcctcgccaccttgggggccgggccatcatcaccaagagctttgccaggatccacgagaccaacctgaagaaacagggcctgytgcctctgaccttcgctgacccggctgactacaacaagattcaccctgtggacaagctgaccattcagggcctgaaggacttcacccctggcaagcccct

SEQ ID NO: 90646 - DNA, 201 bp, Homo sapiens
ttttagcccccgtcttcctattttgagtttggttcagatcttaagcagctccatgcaactgtatttatttttgatgacaagactcccatctaaagtttttytcctgcctgatcatttcattggtggctgaaggattctagagaaccttttgttcttgcaaggaaaacaagaatccaaaaccagtgactgttctgtgagtga

SEQ ID NO: 90647 - DNA, 201 bp, Homo sapiens
gtgatgaggacccaaagaactgcataagtgaacagctcttcatggagatggctgaccggatggcacaggatggatggcgggacatgggctacacatacctmaacattgatgactgctggatcggtggtcgcgatgccagtggccgcctgatgccagatcccaagcgcttccctcatggcattcctttcctggctgactacg

SEQ ID NO: 90648 - DNA, 201 bp, Homo sapiens
caaggctagcgccttagtcttcttcagctgcaggaccgatatgccttatcgctaccactcctcccttggccagctgaacttcaccgggtctgtgatatatraggcccaggacgtctactcaggtgacatcatcagtggcctccgagatgaaaccaacttcacagtgatcatcaacccttcaggggtagtgatgtggtacct

SEQ ID NO: 90649 - DNA, 201 bp, Homo sapiens
catgcccagggcaagtggggaggttctctgctccccaggcctgctcggtgactgaccccatcatacccaaagtgcaatctcacggccaggttctatgcccygtccaagcgtaaaccctcttggaaacttcttttggggcaattttcctgtggccttcctggcctctacttccatgtgcgcagccccagactctagcctctg

SEQ ID NO: 90650 - DNA, 201 bp, Homo sapiens
accggatggcacaggatggatggcgggacatgggctacacatacctcaacattgatgactgctggatcggtggtcgcgatgccagtggccgcctgatgccrgatcccaagcgcttccctcatggcattcctttcctggctgactacgttcactccctgggcctgaagttgggtatctacgcggacatgggcaacttcacct

SEQ ID NO: 90651 - DNA, 201 bp, Homo sapiens
tagaccatggagccttggcatgcccagggcaagtggggaggttctctgctccccaggcctgctcggtgactgaccccatcatacccaaagtgcaatctcayggccaggttctatgccctgtccaagcgtaaaccctcttggaaacttcttttggggcaattttcctgtggccttcctggcctctacttccatgtgcgcagc

SEQ ID NO: 90652 - DNA, 201 bp, Homo sapiens
aaaccaacttcacagtgatcatcaacccttcaggggtagtgatgtggtacctgtatcccatcaagaacctggagatgtcccagcagtgaggagctgggacmtgtgacaggctgtggtggcaccactgagcctagaccatggagccttggcatgcccagggcaagtggggaggttctctgctccccaggcctgctcggtgac

SEQ ID NO: 90653 - DNA, 201 bp, Homo sapiens
ctccacccccgaggagcgggcccaggggtaccccaagatggctgctgccctgaatgccacaggccgccccatcgccttctcctgcagctggccagcctatkaaggcggcctccccccaagggtgaactacagtctgctggcggacatctgcaacctctggcgtaactatgatgacatccaggactcctggtggagcgtgct

SEQ ID NO: 90654 - DNA, 201 bp, Homo sapiens
ccagaacatggacattctgcagaatccactcatgatcaaaatcaaccaggatcccttaggcatccagggacgcaggattcacaaggaaaaatctctcatcraagtgtacatgcggcctctgtccaacaaggctagcgccttagtcttcttcagctgcaggaccgatatgccttatcgctaccactcctcccttggccagct

SEQ ID NO: 90655 - DNA, 201 bp, Homo sapiens
tcgcgatgccagtggccgcctgatgccagatcccaagcgcttccctcatggcattcctttcctggctgactacgttcactccctgggcctgaagttgggtrtctacgcggacatgggcaacttcacctgcatgggttacccaggcaccacactggacaaggtggtccaggatgctcagaccttcgccgagtggaaggtaga

SEQ ID NO: 90656 - DNA, 201 bp, Homo sapiens
taagtgaacagctcttcatggagatggctgaccggatggcacaggatggatggcgggacatgggctacacatacctcaacattgatgactgctggatcggyggtcgcgatgccagtggccgcctgatgccagatcccaagcgcttccctcatggcattcctttcctggctgactacgttcactccctgggcctgaagttgg

SEQ ID NO: 90657 - DNA, 201 bp, Homo sapiens; identical to SEQ ID NO: 90647

SEQ ID NO: 90658 - DNA, 201 bp, Homo sapiens; identical to SEQ ID NO: 90648

SEQ ID NO: 90659 - DNA, 201 bp, Homo sapiens
catgcccagggcaagtggggaggttctctgctccccaggcctgctcggtgactgaccccatcatacccaaagtgcaatctcacggccaggttctatgcccygtccaagcgtaaaccctcttggaaacttcttttggggcaattttcctgtggccttcctggcctctacttccatgtgcgcagccccacagacgttgctgag

SEQ ID NO: 90660 - DNA, 201 bp, Homo sapiens; identical to SEQ ID NO: 90650

SEQ ID NO: 90661 - DNA, 201 bp, Homo sapiens
tacctttcagcccaagatagctacatgtctttacttgctgtataagttttccttttgtcctgggggtgcctgattgatcctatctcttcacccttcattcyttcaacaaacatgccatctatctcccaggacatttattcccttctattcaaggccagttaggaatgcaattattttttttttcagttaaatacagacttg

SEQ ID NO: 90662 - DNA, 201 bp, Homo sapiens
ttaattcccttacctttcagcccaagatagctacatgtctttacttgctgtataagttttccttttgtcctgggggtgcctgattgatcctatctcttcayccttcattctttcaacaaacatgccatctatctcccaggacatttattcccttctattcaaggccagttaggaatgcaattattttttttttcagttaaa

SEQ ID NO: 90663 - DNA, 201 bp, Homo sapiens; identical to SEQ ID NO: 90651

SEQ ID NO: 90664 - DNA, 201 bp, Homo sapiens
ggacagaagcctacctcatcccaggcctgcccctccgtgcatagctctgcctttgggtcttgttcatagtgctgttcaggcaaaatggaatagtctcaggwgggaacaccttctcttgctagctccaggaaggctttgtgggaaatgagttgagaccatggacttgggagttgggggccagagttgagcctggacttgacc

SEQ ID NO: 90665 - DNA, 201 bp, Homo sapiens
cagggttctgaggtccttgtatttagggtatggtgtaaaaacttacatatgcacattttgttacatcatttaagatgattgaagctttactggttaagtayagggtcaccagagaaagttcctttccccagttgatgtcttgaggctgttgagaaacttaggacagaagcctacctcatcccaggcctgcccctccgtgca

SEQ ID NO: 90666 - DNA, 201 bp, Homo sapiens; identical to SEQ ID NO: 90652

SEQ ID NO: 90667 - DNA, 201 bp, Homo sapiens; identical to SEQ ID NO: 90653

SEQ ID NO: 90668 - DNA, 201 bp, Homo sapiens; identical to SEQ ID NO: 90654

SEQ ID NO: 90669 - DNA, 201 bp, Homo sapiens; identical to SEQ ID NO: 90655

SEQ ID NO: 90670 - DNA, 201 bp, Homo sapiens; identical to SEQ ID NO: 90656

SEQ ID NO: 90671 - DNA, 201 bp, Homo sapiens; identical to SEQ ID NO: 90647

SEQ ID NO: 90672 - DNA, 201 bp, Homo sapiens; identical to SEQ ID NO: 90648

SEQ ID NO: 90673 - DNA, 201 bp, Homo sapiens
gggttgccttcgtgaggccccgccctcactggaacgcttcggacttatcaggttaccggattcgagtcagaagcggcggcaggtctgaacgcttcggtagsataagtgcggtgggagggggctctgcggttttggggagcccagggcgggaacccggacccggctggaagtccggagcctggccgcagccccgcccctccg

SEQ ID NO: 90674 - DNA, 201 bp, Homo sapiens
gccccgagtccgttctgccaatgccagcctcgctagcacgcagggcgggagcccaatggggaagggcttagggaggctgggaggccggacccatatgggcrgggcacagcgttgctaggggggattctgataggttgcgcgaagggttgccttcgtgaggccccgccctcactggaacgcttcggacttatcaggttaccg

SEQ ID NO: 90675 - DNA, 201 bp, Homo sapiens; identical to SEQ ID NO: 90661

SEQ ID NO: 90676 - DNA, 201 bp, Homo sapiens; identical to SEQ ID NO: 90651

SEQ ID NO: 90677 - DNA, 201 bp, Homo sapiens; identical to SEQ ID NO: 90652

SEQ ID NO: 90678 - DNA, 201 bp, Homo sapiens; identical to SEQ ID NO: 90659

SEQ ID NO: 90679 - DNA, 201 bp, Homo sapiens; identical to SEQ ID NO: 90650

SEQ ID NO: 90680 - DNA, 201 bp, Homo sapiens
ggccgaaggcggcccgtaggccctcgggactcccagcactgcagagggtgtgaggtctgacatccaagacacgttgtttcgtatttctgaaggaagaactsaagctccgggaagtgatggctggggatggggcgggcaacttggggaccgagtgtacgatccacgcctaaggttgagggcggccgagctagccaggcagcc

SEQ ID NO: 90681 - DNA, 201 bp, Homo sapiens
agaggtggaaggacaggcctcgcggggtccgggccacgaaggacagccccgagtccgttctgccaatgccagcctcgctagcacgcagggcgggagcccartggggaagggcttagggaggctgggaggccggacccatatgggcagggcacagcgttgctaggggggattctgataggttgcgcgaagggttgccttcgt

SEQ ID NO: 90682 - DNA, 201 bp, Homo sapiens; identical to SEQ ID NO: 90662

SEQ ID NO: 90683 - DNA, 201 bp, Homo sapiens; identical to SEQ ID NO: 90664

SEQ ID NO: 90684 - DNA, 201 bp, Homo sapiens; identical to SEQ ID NO: 90665

SEQ ID NO: 90685 - DNA, 201 bp, Homo sapiens; identical to SEQ ID NO: 90653

SEQ ID NO: 90686 - DNA, 201 bp, Homo sapiens
tggcacgatccttgccctcttggtccccacagaggtggaaggacaggcctcgcggggtccgggccacgaaggacagccccgagtccgttctgccaatgccwgcctcgctagcacgcagggcgggagcccaatggggaagggcttagggaggctgggaggccggacccatatgggcagggcacagcgttgctaggggggatt

SEQ ID NO: 90687 - DNA, 201 bp, Homo sapiens; identical to SEQ ID NO: 90656

SEQ ID NO: 90688 - DNA, 201 bp, Homo sapiens; identical to SEQ ID NO: 90655

SEQ ID NO: 90689 - DNA, 201 bp, Homo sapiens; identical to SEQ ID NO: 90654

SEQ ID NO: 90690 - DNA, 201 bp, Homo sapiens
ggaaggaaggaggccatctgttcaaaaattgtgacattgggcatgaggctggacgacttgttaatgtagttgtttctatagcccctatgattagacacttyagtgtcagggcacagattatctaaaattagccagctcttcctgtcagggatcagggcagcactaacaggcgcaaaagtagagctgtcaagatgggctagt

SEQ ID NO: 90691 - DNA, 201 bp, Homo sapiens
tccatgaagtcattcagtggaaagatgcacgttgatactattttagagcacaaataaactcactatacaatggtcactttgtgatagaattccattgatgraccaattttctgcagcctctttttgcctgagcaagtgggaccttggtatacacatcacctgttctttcccttttcttgaaatgtggtgtttgctgtaaat

SEQ ID NO: 90692 - DNA, 168 bp, Homo sapiens
gcttgcaaaggggtggggttgtggagtggatgctttggcaagatggcggggagcggcgtccgccaagytacttctaccgccagcaccttcgtgaagcccattttcagtcgggacatgaacgaggccaagcggagggtgcgcgagctctaccgcgcctggtatcgggag

SEQ ID NO: 90693 - DNA, 201 bp, Homo sapiens
caaagccgtgagcaacgtgatcgcctccctcacctgcgggcgccgcttcgagtacgacgaccctcgcttcctcaggctgctggacctagctcaggagggaytgaaggaggagtcgggcttcctgcgcgaggtgctgaatgctgtccccgtcctcccgcacatcccagcgctggctggcaaggtcctacgcttccaaaaggc

SEQ ID NO: 90694 - DNA, 201 bp, Homo sapiens
atgatgagaacctgcgcatagtggtgggtaacctgttccttgccgggatggtgaccaccttgaccacgctggcctggggcctcctgctcatgatcctacayctggatgtgcagctccgtgtccaacaggagatcgacgacgtgatagggcaggtgcggcgaccagagatgggtgaccaggctcacatgccctacaccactg

SEQ ID NO: 90695 - DNA, 201 bp, Homo sapiens
gcctgggcaagaagtcgctggagcagtgggtgaccgaggaggccgcctgcctttgtgccgccttcgccgaccaagccggacgcccctttcgccccaacggyctcttggacaaagccgtgagcaacgtgatcgcctccctcacctgcgggcgccgcttcgagtacgacgaccctcgcttcctcaggctgctggacctagctc

SEQ ID NO: 90696 - DNA, 201 bp, Homo sapiens
ctcttcctcttcttcacctccctgctgcagcacttcagcttctccgtggccgccggacagccccggcccagccactctcgtgtcgtcagctttctggtgascccatccccctacgagctttgtgctgtgccccgctagaatggggtacctagtccccagcctgctccctagccagaggctctaatgtacaataaagcaatg

SEQ ID NO: 90697 - DNA, 198 bp, Homo sapiens
tcacctccctgctgcagcacttcagcttctccgtggccgccggacagccccggcccagccactctcgtgtcgtcagctttctggtgaccccatccccctaygagctttgtgctgtgccccgctagaatggggtacctagtccccagcctgctccctagccagaggctctaatgtacaataaagcaatgtggtagttcc

SEQ ID NO: 90698 - DNA, 201 bp, Homo sapiens
tttctcagcaggccgccgtgcatgcctcggggagcccctggcccgcatggagctcttcctcttcttcacctccctgctgcagcacttcagcttctccgtgsccgccggacagccccggcccagccactctcgtgtcgtcagctttctggtgaccccatccccctacgagctttgtgctgtgccccgctagaatggggtacc

SEQ ID NO: 90699 - DNA, 201 bp, Homo sapiens
agtgaggcagccatggggctagaagcactggtgcccctggccatgatagtggccatcttcctgctcctggtggacctgatgcaccggcaccaacgctgggmtgcacgctacccgccaggtcccctgccactgcccgggctgggcaaccttgctgcatgtggacttccagaacacaccatactgcttcgaccagttgcggcg

SEQ ID NO: 90700 - DNA, 201 bp, Homo sapiens
ctgactgaggccttcctggcaaagaaggagaaggccaaggggagccctgagagcagcttcaatgatgagaacctgcgcatagtggtgggtaacctgttccytgccgggatggtgaccaccttgaccacgctggcctggggcctcctgctcatgatcctacacctggatgtgcagctccgtgtccaacaggagatcgacgac

SEQ ID NO: 90701 - DNA, 201 bp, Homo sapiens
cctgactgaggccttcctggcaaagaaggagaaggccaaggggagccctgagagcagcttcaatgatgagaacctgcgcatagtggtgggtaacctgttcyttgccgggatggtgaccaccttgaccacgctggcctggggcctcctgctcatgatcctacacctggatgtgcagctccgtgtccaacaggagatcgacga

SEQ ID NO: 90702 - DNA, 201 bp, Homo sapiens
ctgggacccagcccagccaccccgagacctgactgaggccttcctggcaaagaaggagaaggccaaggggagccctgagagcagcttcaatgatgagaacstgcgcatagtggtgggtaacctgttccttgccgggatggtgaccaccttgaccacgctggcctggggcctcctgctcatgatcctacacctggatgtgca

SEQ ID NO: 90703 - DNA, 201 bp, Homo sapiens
ggacccagcccagccaccccgagacctgactgaggccttcctggcaaagaaggagaaggccaaggggagccctgagagcagcttcaatgatgagaacctgygcatagtggtgggtaacctgttccttgccgggatggtgaccaccttgaccacgctggcctggggcctcctgctcatgatcctacacctggatgtgcagct

SEQ ID NO: 90704 - DNA, 201 bp, Homo sapiens
gacgaccctcgcttcctcaggctgctggacctagctcaggagggactgaaggaggagtcgggcttcctgcgcgaggtgctgaatgctgtccccgtcctccygcacatcccagcgctggctggcaaggtcctacgcttccaaaaggctttcctgacccagctggatgagctgctaactgagcacaggatgacctgggaccca

SEQ ID NO: 90705 - DNA, 201 bp, Homo sapiens
ctccgtgtccaccttgcgcaacttgggcctgggcaagaagtcgctggagcagtgggtgaccgaggaggccgcctgcctttgtgccgccttcgccgaccaakccggacgcccctttcgccccaacggcctcttggacaaagccgtgagcaacgtgatcgcctccctcacctgcgggcgccgcttcgagtacgacgaccctcg

SEQ ID NO: 90706 - DNA, 103 bp, Homo sapiens
gcygagagtgtcctgcctggtcctctgtgcctggtggggtgggggtgccaggtgtgtccagaggagcccagttggtagtgaggcagccatggggctagaagca

SEQ ID NO: 90707 - DNA, 201 bp, Homo sapiens
ccaccccgagacctgactgaggccttcctggcaaagaaggagaaggccaaggggagccctgagagcagcttcaatgatgagaacctgcgcatagtggtggstaacctgttccttgccgggatggtgaccaccttgaccacgctggcctggggcctcctgctcatgatcctacacctggatgtgcagctccgtgtccaacag

SEQ ID NO: 90708 - DNA, 201 bp, Homo sapiens
caacaggagatcgacgacgtgatagggcaggtgcggcgaccagagatgggtgaccaggctcacatgccctacaccactgccgtgattcacgaggtgcagcrctttggggacatcatccccctgagtgtgacccatatgacatcccgtgacatcgaagtacagggcttccgcatccctaagggaacgacactcatcaccaac

SEQ ID NO: 90709 - DNA, 201 bp, Homo sapiens
cttcgaccagttgcggcgccgcttcggggacgtgttcagcctgcagctggcctggacgccggtggtcgtgctcaatgggctggcggccgtgcgcgaggcgmtggtgacccgcggcgaggacacggccgaccgcccgcctgcgcccatctaccaggtcctgggcttcgggccgcgttcccaaggggtgatcctgtcgcgcta

SEQ ID NO: 90710 - DNA, 201 bp, Homo sapiens
cgacgtgatagggcaggtgcggcgaccagagatgggtgaccaggctcacatgccctacaccactgccgtgattcacgaggtgcagcgctttggggacatcrtccccctgagtgtgacccatatgacatcccgtgacatcgaagtacagggcttccgcatccctaagggaacgacactcatcaccaacctgtcatcggtgct

SEQ ID NO: 90711 - DNA, 201 bp, Homo sapiens
cagcaggccgccgtgcatgcctcggggagcccctggcccgcatggagctcttcctcttcttcacctccctgctgcagcacttcagcttctccgtggccgcyggacagccccggcccagccactctcgtgtcgtcagctttctggtgaccccatccccctacgagctttgtgctgtgccccgctagaatggggtacctagtc

SEQ ID NO: 90712 - DNA, 201 bp, Homo sapiens
atgggtgaccaggctcacatgccctacaccactgccgtgattcacgaggtgcagcgctttggggacatcatccccctgagtgtgacccatatgacatcccrtgacatcgaagtacagggcttccgcatccctaagggaacgacactcatcaccaacctgtcatcggtgctgaaggatgaggccgtctgggagaagcccttc

SEQ ID NO: 90713 - DNA, 201 bp, Homo sapiens
tgcctttctcagcaggccgccgtgcatgcctcggggagcccctggcccgcatggagctcttcctcttcttcacctccctgctgcagcacttcagcttctcsgtggccgccggacagccccggcccagccactctcgtgtcgtcagctttctggtgaccccatccccctacgagctttgtgctgtgccccgctagaatgggg

SEQ ID NO: 90714 - DNA, 201 bp, Homo sapiens
agggcaggtgcggcgaccagagatgggtgaccaggctcacatgccctacaccactgccgtgattcacgaggtgcagcgctttggggacatcatccccctgrgtgtgacccatatgacatcccgtgacatcgaagtacagggcttccgcatccctaagggaacgacactcatcaccaacctgtcatcggtgctgaaggatga

SEQ ID NO: 90715 - DNA, 201 bp, Homo sapiens
gatgagctgctaactgagcacaggatgacctgggacccagcccagccaccccgagacctgactgaggccttcctggcaaagaaggagaaggccaaggggarccctgagagcagcttcaatgatgagaacctgcgcatagtggtgggtaacctgttccttgccgggatggtgaccaccttgaccacgctggcctggggcctc

SEQ ID NO: 90716 - DNA, 148 bp, Homo sapiens
cggcccagccactctcgtgtcgtcagctttctggtgaccccatccccctacgagctttgtgctgtgccccgctagaatggggtacctagtccccagcctgytccctagccagaggctctaatgtacaataaagcaatgtggtagttcc

SEQ ID NO: 90717 - DNA, 201 bp, Homo sapiens
tatgacatcccgtgacatcgaagtacagggcttccgcatccctaagggaacgacactcatcaccaacctgtcatcggtgctgaaggatgaggccgtctggragaagcccttccgcttccaccccgaacacttcctggatgcccagggccactttgtgaagccggaggccttcctgcctttctcagcaggccgccgtgcatg

SEQ ID NO: 90718 - DNA, 201 bp, Homo sapiens
cgtgcgcgaggcgatggtgacccgcggcgaggacacggccgaccgcccgcctgcgcccatctaccaggtcctgggcttcgggccgcgttcccaaggggtgwtcctgtcgcgctatgggcccgcgtggcgcgagcagaggcgcttctccgtgtccaccttgcgcaacttgggcctgggcaagaagtcgctggagcagtgggt

SEQ ID NO: 90719 - DNA, 201 bp, Homo sapiens
tggcccgcatggagctcttcctcttcttcacctccctgctgcagcacttcagcttctccgtggccgccggacagccccggcccagccactctcgtgtcgtyagctttctggtgaccccatccccctacgagctttgtgctgtgccccgctagaatggggtacctagtccccagcctgctccctagccagaggctctaatgt

SEQ ID NO: 90720 - DNA, 201 bp, Homo sapiens
aaaggctttcctgacccagctggatgagctgctaactgagcacaggatgacctgggacccagcccagccaccccgagacctgactgaggccttcctggcaragaaggagaaggccaaggggagccctgagagcagcttcaatgatgagaacctgcgcatagtggtgggtaacctgttccttgccgggatggtgaccacctt

SEQ ID NO: 90721 - DNA, 201 bp, Homo sapiens
cgaggcgatggtgacccgcggcgaggacacggccgaccgcccgcctgcgcccatctaccaggtcctgggcttcgggccgcgttcccaaggggtgatcctgkcgcgctatgggcccgcgtggcgcgagcagaggcgcttctccgtgtccaccttgcgcaacttgggcctgggcaagaagtcgctggagcagtgggtgaccga

SEQ ID NO: 90722 - DNA, 201 bp, Homo sapiens
gatgagaacctgcgcatagtggtgggtaacctgttccttgccgggatggtgaccaccttgaccacgctggcctggggcctcctgctcatgatcctacaccyggatgtgcagctccgtgtccaacaggagatcgacgacgtgatagggcaggtgcggcgaccagagatgggtgaccaggctcacatgccctacaccactgcc

SEQ ID NO: 90723 - DNA, 201 bp, Homo sapiens
accccgagacctgactgaggccttcctggcaaagaaggagaaggccaaggggagccctgagagcagcttcaatgatgagaacctgcgcatagtggtgggtracctgttccttgccgggatggtgaccaccttgaccacgctggcctggggcctcctgctcatgatcctacacctggatgtgcagctccgtgtccaacagga

SEQ ID NO: 90724 - DNA, 201 bp, Homo sapiens
gtgaccaggctcacatgccctacaccactgccgtgattcacgaggtgcagcgctttggggacatcatccccctgagtgtgacccatatgacatcccgtgayatcgaagtacagggcttccgcatccctaagggaacgacactcatcaccaacctgtcatcggtgctgaaggatgaggccgtctgggagaagcccttccgct

SEQ ID NO: 90725 - DNA, 201 bp, Homo sapiens
atcctacacctggatgtgcagctccgtgtccaacaggagatcgacgacgtgatagggcaggtgcggcgaccagagatgggtgaccaggctcacatgccctrcaccactgccgtgattcacgaggtgcagcgctttggggacatcatccccctgagtgtgacccatatgacatcccgtgacatcgaagtacagggcttccgc

SEQ ID NO: 90726 - DNA, 201 bp, Homo sapiens
ctgctcatgatcctacacctggatgtgcagctccgtgtccaacaggagatcgacgacgtgatagggcaggtgcggcgaccagagatgggtgaccaggctcrcatgccctacaccactgccgtgattcacgaggtgcagcgctttggggacatcatccccctgagtgtgacccatatgacatcccgtgacatcgaagtacag

SEQ ID NO: 90727 - DNA, 201 bp, Homo sapiens
agctccgtgtccaacaggagatcgacgacgtgatagggcaggtgcggcgaccagagatgggtgaccaggctcacatgccctacaccactgccgtgattcaygaggtgcagcgctttggggacatcatccccctgagtgtgacccatatgacatcccgtgacatcgaagtacagggcttccgcatccctaagggaacgacac

SEQ ID NO: 90728 - DNA, 201 bp, Homo sapiens
cctggcccgcatggagctcttcctcttcttcacctccctgctgcagcacttcagcttctccgtggccgccggacagccccggcccagccactctcgtgtcktcagctttctggtgaccccatccccctacgagctttgtgctgtgccccgctagaatggggtacctagtccccagcctgctccctagccagaggctctaat

SEQ ID NO: 90729 - DNA, 201 bp, Homo sapiens
ctcagcaggccgccgtgcatgcctcggggagcccctggcccgcatggagctcttcctcttcttcacctccctgctgcagcacttcagcttctccgtggccrccggacagccccggcccagccactctcgtgtcgtcagctttctggtgaccccatccccctacgagctttgtgctgtgccccgctagaatggggtacctag

SEQ ID NO: 90730 - DNA, 201 bp, Homo sapiens
ggagcccctggcccgcatggagctcttcctcttcttcacctccctgctgcagcacttcagcttctccgtggccgccggacagccccggcccagccactctsgtgtcgtcagctttctggtgaccccatccccctacgagctttgtgctgtgccccgctagaatggggtacctagtccccagcctgctccctagccagaggc

SEQ ID NO: 90731 - DNA, 201 bp, Homo sapiens
aagaaggagaaggccaaggggagccctgagagcagcttcaatgatgagaacctgcgcatagtggtgggtaacctgttccttgccgggatggtgaccacctygaccacgctggcctggggcctcctgctcatgatcctacacctggatgtgcagctccgtgtccaacaggagatcgacgacgtgatagggcaggtgcggcga

SEQ ID NO: 90732 - DNA, 201 bp, Homo sapiens
aacacttcctggatgcccagggccactttgtgaagccggaggccttcctgcctttctcagcaggccgccgtgcatgcctcggggagcccctggcccgcatrgagctcttcctcttcttcacctccctgctgcagcacttcagcttctccgtggccgccggacagccccggcccagccactctcgtgtcgtcagctttctgg

SEQ ID NO: 90733 - DNA, 201 bp, Homo sapiens
tcgcctccctcacctgcgggcgccgcttcgagtacgacgaccctcgcttcctcaggctgctggacctagctcaggagggactgaaggaggagtcgggcttyctgcgcgaggtgctgaatgctgtccccgtcctcccgcacatcccagcgctggctggcaaggtcctacgcttccaaaaggctttcctgacccagctggatg

SEQ ID NO: 90734 - DNA, 201 bp, Homo sapiens
aaagccgtgagcaacgtgatcgcctccctcacctgcgggcgccgcttcgagtacgacgaccctcgcttcctcaggctgctggacctagctcaggagggacygaaggaggagtcgggcttcctgcgcgaggtgctgaatgctgtccccgtcctcccgcacatcccagcgctggctggcaaggtcctacgcttccaaaaggct

SEQ ID NO: 90735 - DNA, 201 bp, Homo sapiens
ggcgcgctatgggcccgcgtggcgcgagcagaggcgcttctccgtgtccaccttgcgcaacttgggcctgggcaagaagtcgctggagcagtgggtgaccraggaggccgcctgcctttgtgccgccttcgccaaccactccggacgcccctttcgccccaacggtctcttggacaaagccgtgagcaacgtgatcgcctc

SEQ ID NO: 90736 - DNA, 201 bp, Homo sapiens
cagcgctggctggcaaggtcctacgcttccaaaaggctttcctgacccagctggatgagctgctaactgagcacaggatgacctgggacccagcccagccmccccgagacctgactgaggccttcctggcagagatggagaaggccaaggggaaccctgagagcagcttcaatgatgagaacctgcgcatagtggtggctg

SEQ ID NO: 90737 - DNA, 201 bp, Homo sapiens
tatggggctagaagcactggtgcccctggccgtgatagtggccatcttcctgctcctggtggacctgatgcaccggcgccaacgctgggctgcacgctacycaccaggccccctgccactgcccgggctgggcaacctgctgcatgtggacttccagaacacaccatactgcttcgaccagttgcggcgccgcttcgggga

SEQ ID NO: 90738 - DNA, 201 bp, Homo sapiens
caacaggagatcgacgacgtgatagggcaggtgcggcgaccagagatgggtgaccaggctcacatgccctacaccactgccgtgattcatgaggtgcagcrctttggggacatcgtccccctgggtgtgacccatatgacatcccgtgacatcgaagtacagggcttccgcatccctaagggaacgacactcatcaccaac

SEQ ID NO: 90739 - DNA, 201 bp, Homo sapiens
ctcttcctcttcttcacctccctgctgcagcacttcagcttctcggtgcccactggacagccccggcccagccaccatggtgtctttgctttcctggtgascccatccccctatgagctttgtgctgtgccccgctagaatggggtacctagtccccagcctgctccctagccagaggctctaatgtacaataaagcaatg

SEQ ID NO: 90740 - DNA, 201 bp, Homo sapiens
gagatggagaaggccaaggggaaccctgagagcagcttcaatgatgagaacctgcgcatagtggtggctgacctgttctctgccgggatggtgaccacctygaccacgctggcctggggcctcctgctcatgatcctacatccggatgtgcagcgccgtgtccaacaggagatcgacgacgtgatagggcaggtgcggcga

SEQ ID NO: 90741 - DNA, 201 bp, Homo sapiens
gtgtccaccttgcgcaacttgggcctgggcaagaagtcgctggagcagtgggtgaccgaggaggccgcctgcctttgtgccgccttcgccaaccactccgracgcccctttcgccccaacggtctcttggacaaagccgtgagcaacgtgatcgcctccctcacctgcgggcgccgcttcgagtacgacgaccctcgcttc

SEQ ID NO: 90742 - DNA, 201 bp, Homo sapiens
tggcccgcatggagctcttcctcttcttcacctccctgctgcagcacttcagcttctcggtgcccactggacagccccggcccagccaccatggtgtcttygctttcctggtgagcccatccccctatgagctttgtgctgtgccccgctagaatggggtacctagtccccagcctgctccctagccagaggctctaatgt

SEQ ID NO: 90743 - DNA, 201 bp, Homo sapiens
cccccgagacctgactgaggccttcctggcagagatggagaaggccaaggggaaccctgagagcagcttcaatgatgagaacctgcgcatagtggtggctracctgttctctgccgggatggtgaccacctcgaccacgctggcctggggcctcctgctcatgatcctacatccggatgtgcagcgccgtgtccaacagga

SEQ ID NO: 90744 - DNA, 201 bp, Homo sapiens
tcgtgctcaatgggctggcggccgtgcgcgaggcgctggtgacccacggcgaggacaccgccgaccgcccgcctgtgcccatcacccagatcctgggtttygggccgcgttcccaaggggtgttcctggcgcgctatgggcccgcgtggcgcgagcagaggcgcttctccgtgtccaccttgcgcaacttgggcctgggca

SEQ ID NO: 90745 - DNA, 201 bp, Homo sapiens
cctggcccgcatggagctcttcctcttcttcacctccctgctgcagcacttcagcttctcggtgcccactggacagccccggcccagccaccatggtgtckttgctttcctggtgagcccatccccctatgagctttgtgctgtgccccgctagaatggggtacctagtccccagcctgctccctagccagaggctctaat

SEQ ID NO: 90746 - DNA, 201 bp, Homo sapiens
cccccccgagacctgactgaggccttcctggcagagatggagaaggccaaggggaaccctgagagcagcttcaatgatgagaacctgcgcatagtggtggstgacctgttctctgccgggatggtgaccacctcgaccacgctggcctggggcctcctgctcatgatcctacatccggatgtgcagcgccgtgtccaacag

SEQ ID NO: 90747 - DNA, 201 bp, Homo sapiens
ggagcccctggcccgcatggagctcttcctcttcttcacctccctgctgcagcacttcagcttctcggtgcccactggacagccccggcccagccaccatsgtgtctttgctttcctggtgagcccatccccctatgagctttgtgctgtgccccgctagaatggggtacctagtccccagcctgctccctagccagaggc

SEQ ID NO: 90748 - DNA, 201 bp, Homo sapiens
ggacccagcccagcccccccgagacctgactgaggccttcctggcagagatggagaaggccaaggggaaccctgagagcagcttcaatgatgagaacctgygcatagtggtggctgacctgttctctgccgggatggtgaccacctcgaccacgctggcctggggcctcctgctcatgatcctacatccggatgtgcagcg

SEQ ID NO: 90749 - DNA, 201 bp, Homo sapiens
accctcgcttcctcaggctgctggacctagctcaggagggactgaaggaggagtcgggctttctgcgcgaggtgctgaatgctgtccccgtcctcctgcayatcccagcgctggctggcaaggtcctacgcttccaaaaggctttcctgacccagctggatgagctgctaactgagcacaggatgacctgggacccagccc

SEQ ID NO: 90750 - DNA, 201 bp, Homo sapiens
ctcagcaggccgccgtgcatgcctcggggagcccctggcccgcatggagctcttcctcttcttcacctccctgctgcagcacttcagcttctcggtgcccrctggacagccccggcccagccaccatggtgtctttgctttcctggtgagcccatccccctatgagctttgtgctgtgccccgctagaatggggtacctag

SEQ ID NO: 90751 - DNA, 201 bp, Homo sapiens
cttcgaccagttgcggcgccgcttcggggacgtgttcagcctgcagctggcctggacgccggtggtcgtgctcaatgggctggcggccgtgcgcgaggcgmtggtgacccacggcgaggacaccgccgaccgcccgcctgtgcccatcacccagatcctgggtttcgggccgcgttcccaaggggtgttcctggcgcgcta

SEQ ID NO: 90752 - DNA, 201 bp, Homo sapiens
agcccatttggtagtgaggcaggtatggggctagaagcactggtgcccctggccgtgatagtggccatcttcctgctcctggtggacctgatgcaccggcrccaacgctgggctgcacgctacccaccaggccccctgccactgcccgggctgggcaacctgctgcatgtggacttccagaacacaccatactgcttcgac

SEQ ID NO: 90753 - DNA, 201 bp, Homo sapiens
ggtcctctgtgcctggtggggtgggggtgccaggtgtgtccagaggagcccatttggtagtgaggcaggtatggggctagaagcactggtgcccctggccrtgatagtggccatcttcctgctcctggtggacctgatgcaccggcgccaacgctgggctgcacgctacccaccaggccccctgccactgcccgggctggg

SEQ ID NO: 90754 - DNA, 201 bp, Homo sapiens
tgcgcgaggcgctggtgacccacggcgaggacaccgccgaccgcccgcctgtgcccatcacccagatcctgggtttcgggccgcgttcccaaggggtgttyctggcgcgctatgggcccgcgtggcgcgagcagaggcgcttctccgtgtccaccttgcgcaacttgggcctgggcaagaagtcgctggagcagtgggtga

SEQ ID NO: 90755 - DNA, 201 bp, Homo sapiens
tcggggacgtgttcagcctgcagctggcctggacgccggtggtcgtgctcaatgggctggcggccgtgcgcgaggcgctggtgacccacggcgaggacacsgccgaccgcccgcctgtgcccatcacccagatcctgggtttcgggccgcgttcccaaggggtgttcctggcgcgctatgggcccgcgtggcgcgagcaga

SEQ ID NO: 90756 - DNA, 201 bp, Homo sapiens
cctggccgtgatagtggccatcttcctgctcctggtggacctgatgcaccggcgccaacgctgggctgcacgctacccaccaggccccctgccactgcccrggctgggcaacctgctgcatgtggacttccagaacacaccatactgcttcgaccagttgcggcgccgcttcggggacgtgttcagcctgcagctggcctg

SEQ ID NO: 90757 - DNA, 201 bp, Homo sapiens
gcctggacgccggtggtcgtgctcaatgggctggcggccgtgcgcgaggcgctggtgacccacggcgaggacaccgccgaccgcccgcctgtgcccatcayccagatcctgggtttcgggccgcgttcccaaggggtgttcctggcgcgctatgggcccgcgtggcgcgagcagaggcgcttctccgtgtccaccttgcgc

SEQ ID NO: 90758 - DNA, 201 bp, Homo sapiens
ctgtgcccatcacccagatcctgggtttcgggccgcgttcccaaggggtgttcctggcgcgctatgggcccgcgtggcgcgagcagaggcgcttctccgtstccaccttgcgcaacttgggcctgggcaagaagtcgctggagcagtgggtgaccgaggaggccgcctgcctttgtgccgccttcgccaaccactccggac

SEQ ID NO: 90759 - DNA, 201 bp, Homo sapiens
gcctgtgcccatcacccagatcctgggtttcgggccgcgttcccaaggggtgttcctggcgcgctatgggcccgcgtggcgcgagcagaggcgcttctccrtgtccaccttgcgcaacttgggcctgggcaagaagtcgctggagcagtgggtgaccgaggaggccgcctgcctttgtgccgccttcgccaaccactccgg

SEQ ID NO: 90760 - DNA, 201 bp, Homo sapiens
acgcccctttcaccccaacggcctcctgaacaaagcggcgagcaacgtgatcgcctccctcacctgcgggtgccgcttcgagtacgacgaccctcgcttcmtcaggctactggacctagctcagaagggattgaaggaggagctgggctttctatgctgaatgttgtccccctcctcctgcgcatcccagggctggctggc

SEQ ID NO: 90761 - DNA, 201 bp, Homo sapiens
cctctgtgccgccttcgccgaccaagccagacgcccctttcaccccaacggcctcctgaacaaagcggcgagcaacgtgatcgcctccctcacctgcgggygccgcttcgagtacgacgaccctcgcttcctcaggctactggacctagctcagaagggattgaaggaggagctgggctttctatgctgaatgttgtcccc

SEQ ID NO: 90762 - DNA, 118 bp, Homo sapiens
ctgctgcagcacttcagcttctcggtgcccaccggacagccccggcccagccactctcgtgtcgtcggctttctggtgacgccatccccctatgagctttrtgctgtgccccgctaga

SEQ ID NO: 90763 - DNA, 117 bp, Homo sapiens
tgctgcagcacttcagcttctcggtgcccaccggacagccccggcccagccactctcgtgtcgtcggctttctggtgacgccatccccctatgagctttgwgctgtgccccgctaga

SEQ ID NO: 90764 - DNA, 201 bp, Homo sapiens
accaacctgtcatcggtgctgaaggatgaggccgtctgggagaagcccttccgcttccaccccgaacacttcctggatgcccagggccactttgtgaagcyggaggccttcctgcctttctcagcaggccgccgtgcatgcctcggggagcccctggcccgcatagagctcttcctcttcttcacctccctgctgcagcac

SEQ ID NO: 90765 - DNA, 201 bp, Homo sapiens
atgatcctacgcccggatgtgcagcgccgtgtccaacagatcgacaacgtgatagggcaggtgtggtgaccagagatgggtgaccaggctcgcatgccctrcaccactgccgtgattcacgaggtgcagcgctttggggacatcgtccccctgggtgtgacccatatgacatcccgtgacatcgaagtacagggcttccgc

SEQ ID NO: 90766 - DNA, 201 bp, Homo sapiens
aacacttcctggatgcccagggccactttgtgaagctggaggccttcctgcctttctcagcaggccgccgtgcatgcctcggggagcccctggcccgcatrgagctcttcctcttcttcacctccctgctgcagcacttcagcttctcggtgcccaccggacagccccggcccagccactctcgtgtcgtcggctttctgg

SEQ ID NO: 90767 - DNA, 201 bp, Homo sapiens
ctcctgctcatgatcctacgcccggatgtgcagcgccgtgtccaacagatcgacaacgtgatagggcaggtgtggtgaccagagatgggtgaccaggctcrcatgccctgcaccactgccgtgattcacgaggtgcagcgctttggggacatcgtccccctgggtgtgacccatatgacatcccgtgacatcgaagtacag

SEQ ID NO: 90768 - DNA, 201 bp, Homo sapiens
tatgacatcccgtgacatcgaagtacagggcttccgcatccctaaggggatgatgctcttcaccaacctgtcatcggtgctgaaggatgaggccgtctggragaagcccttccgcttccaccccgaacacttcctggatgcccagggccactttgtgaagctggaggccttcctgcctttctcagcaggccgccgtgcatg

SEQ ID NO: 90769 - DNA, 201 bp, Homo sapiens
tggggctggatgcactggtgcccctggcagtgacagtggccatcttcctgctcctggtggacctgatgcagcagcaccaacgctggactgcacgctacccrccaggccccctgccactgcccgggctgggcaacttgctgcatgtggacttccagaacatatacaccttcaaccagctgcggcaccgctttggggacgtgt

SEQ ID NO: 90770 - DNA, 201 bp, Homo sapiens
gggctgggcaacttgctgcatgtggacttccagaacatatacaccttcaaccagctgcggcaccgctttggggacgtgttcagcctgcagctggcctggaygccggtggtcgtgctcaatgggctggcggccgtgcgtgaggctctggtgacctgcggcgaggacaccgccgaccgcccgcctgcgcccatctaccaggtc

SEQ ID NO: 90771 - DNA, 201 bp, Homo sapiens
accgctttggggacgtgttcagcctgcagctggcctggatgccggtggtcgtgctcaatgggctggcggccgtgcgtgaggctctggtgacctgcggcgargacaccgccgaccgcccgcctgcgcccatctaccaggtcctgggcatcgggccgcgctcccaaggggtgtttctggcacactacggacacgcgtggcgcg

SEQ ID NO: 90772 - DNA, 201 bp, Homo sapiens
gcaacgtgatcgcctccctcacctgcgggtgccgcttcgagtacgacgaccctcgcttcctcaggctactggacctagctcagaagggattgaaggaggarctgggctttctatgctgaatgttgtccccctcctcctgcgcatcccagggctggctggcaaggtcctacgctcccaaaaggctttcctgacccagctgga

SEQ ID NO: 90773 - DNA, 201 bp, Homo sapiens
gcctccctcacctgcgggtgccgcttcgagtacgacgaccctcgcttcctcaggctactggacctagctcagaagggattgaaggaggagctgggctttcbatgctgaatgttgtccccctcctcctgcgcatcccagggctggctggcaaggtcctacgctcccaaaaggctttcctgacccagctggatgagctgctga

SEQ ID NO: 90774 - DNA, 201 bp, Homo sapiens
atgggctggcggccgtgcgtgaggctctggtgacctgcggcgaggacaccgccgaccgcccgcctgcgcccatctaccaggtcctgggcatcgggccgcgytcccaaggggtgtttctggcacactacggacacgcgtggcgcgagcagaggcgcttctccgtgtccaccttgcgcaacttgggcctgggcaagaagtccc

SEQ ID NO: 90775 - DNA, 201 bp, Homo sapiens
cctttcaccccaacggcctcctgaacaaagcggcgagcaacgtgatcgcctccctcacctgcgggtgccgcttcgagtacgacgaccctcgcttcctcagkctactggacctagctcagaagggattgaaggaggagctgggctttctatgctgaatgttgtccccctcctcctgcgcatcccagggctggctggcaaggt

SEQ ID NO: 90776 - DNA, 201 bp, Homo sapiens
tgcagcgccgtgtccaacagatcgacaacgtgatagggcaggtgtggtgaccagagatgggtgaccaggctcgcatgccctgcaccactgccgtgattcaygaggtgcagcgctttggggacatcgtccccctgggtgtgacccatatgacatcccgtgacatcgaagtacagggcttccgcatccctaaggggatgatgc

SEQ ID NO: 90777 - DNA, 155 bp, Homo sapiens
ggattcggaatctcgcccgcagtcgcgcaagcgcgagcggctgtgcgcggtgcgyggtgcgtggtgcgtgatacgagcggcggcacgtggcgcgggtgcggggcgtggagtggcgtggcgtggagtggcgtggcgtggcggggtctcgcggcgcg

SEQ ID NO: 90778 - DNA, 152 bp, Homo sapiens
tcactcacagaacagtcactggttttggattcttgttttccttgcaagaacaaaaggttctctagaatccttcagccaccaatgaaatgatcaggcaggaraaaaactttagatgggagtcttgtcatcaaaaataaatacagttgcatgga

SEQ ID NO: 90779 - DNA, 188 bp, Homo sapiens
gaccctggacttgacaacaaacggcacagacaccaatcactcacagaacagtcactggttttggattcttgttttccttgcaagaacaaaaggttctctaraatccttcagccaccaatgaaatgatcaggcaggagaaaaactttagatgggagtcttgtcatcaaaaataaatacagttgcatgga

SEQ ID NO: 90780 - DNA, 201 bp, Homo sapiens
agacggaggaaggagcacacgacctctacatggacaccggcgaggagatccgcttccgggtggtggacgagagctttgttgacacgtcccccacagggccyagctcagcagatgccaccacttccagtgaggagctgccaaagaaggaggctccgtacacgcttgtgggatccatcagtgagccaggcctgggccttctct

SEQ ID NO: 90781 - DNA, 201 bp, Homo sapiens
agaaggaggctccgtacacgcttgtgggatccatcagtgagccaggcctgggccttctctcctggtggaccagcaactagccctggggctggacagtggaycctaccagcctgcgggaaggtggtatggccggctgtgaagacaacagcagctgaggccgatgctaaggagatagtgtctcgagctggacagtgaggcaag

SEQ ID NO: 90782 - DNA, 155 bp, Homo sapiens; identical to SEQ ID NO: 90777

SEQ ID NO: 90783 - DNA, 201 bp, Homo sapiens; identical to SEQ ID NO: 90780

SEQ ID NO: 90784 - DNA, 201 bp, Homo sapiens
agaaggaggctccgtacacgcttgtgggatccatcagtgagccaggcctgggccttctctcctggtggaccagcaactagccctggggctggacagtggaycctaccagcctgcgggaaggtggtatggccggctgtgaagacaacagcagctgaggccgatgctaaggagatagtgtctcgagctggacaaggcaggcaa

SEQ ID NO: 90785 - DNA, 132 bp, Homo sapiens
cgcgcaagcgcgagcggctgtgcgcggtgcgyggtgcgtggtgcgtgatacgagcgagcccccagcgcaggccgggatgttcgtcctggtggaaatggtggacaccgtccggatccccccttggcagtttga

SEQ ID NO: 90786 - DNA, 201 bp, Homo sapiens; identical to SEQ ID NO: 90780

SEQ ID NO: 90787 - DNA, 201 bp, Homo sapiens; identical to SEQ ID NO: 90784

SEQ ID NO: 90788 - DNA, 201 bp, Homo sapiens
agaagtctgaattcaagcaaagggttcgcaaggagcttgaagtaaatggcattgaattctacccccagaaggaatttgatgaggatttggaggataagacrgagaatgacaaaatcaggcaggagagcatgccttttgctgtggtgggaagtgacaaggagtaccaagtgaatggcaagagggtcctcggccgaaaaactc

SEQ ID NO: 90789 - DNA, 201 bp, Homo sapiens
actcaggtgctaggaaaaaaaacatagactcaagacccaagattcaatggaccaggagaaaggggggcggtgatcaggtcaccagtgaccccaacctatgstctcggtctttcctggaggctgccaacccagccctcatcctcccttgctcacaaagttacagggtaggcacctgtcaggacagaacagcagcagcgctac

SEQ ID NO: 90790 - DNA, 201 bp, Homo sapiens
aagcagtcctgtatggagaccttggaccagcaggggaagatctatgggcatgggaggtgggcgttggaaaggctgagtaggaatggtgcctggcacccctraaccatgatctgagcctccctggagaaggtattttatatgtctgctgccagctgctggtctccacaccctcaaccgttctcaacccccctgcagggagaa

SEQ ID NO: 90791 - DNA, 201 bp, Homo sapiens; identical to SEQ ID NO: 90788

SEQ ID NO: 90792 - DNA, 201 bp, Homo sapiens
cctcactcaggagatctgggggaggtttcatttaaaagtgctgggagcaggtgagccacaggcaactcttctctcggaacctgcacacaaactggggctayagagattctccaaggacagatggcagtggagctagacctgagtagggggcagggagttcaggacaaccctcctgtaagttgggggtggtctgggggtaag

SEQ ID NO: 90793 - DNA, 201 bp, Homo sapiens
aagcggctcaatgacaatggaggcctccctccggtgagcgtggacacagaggaaagccacgacagtaacccatgacgaccacttctctgtgtcatcacacmtacccacttcacacacacacatcccaaataccaccaccaaccaccttcttcctctcaactctgtcccacaggcctgtctggtatttgtggagcatcttgt

SEQ ID NO: 90794 - DNA, 201 bp, Homo sapiens; identical to SEQ ID NO: 90788

SEQ ID NO: 90795 - DNA, 201 bp, Homo sapiens; identical to SEQ ID NO: 90789

SEQ ID NO: 90796 - DNA, 201 bp, Homo sapiens; identical to SEQ ID NO: 90790

SEQ ID NO: 90797 - DNA, 201 bp, Homo sapiens; identical to SEQ ID NO: 90788

SEQ ID NO: 90798 - DNA, 201 bp, Homo sapiens; identical to SEQ ID NO: 90792

SEQ ID NO: 90799 - DNA, 201 bp, Homo sapiens; identical to SEQ ID NO: 90793

SEQ ID NO: 90800 - DNA, 201 bp, Homo sapiens; identical to SEQ ID NO: 90789

SEQ ID NO: 90801 - DNA, 201 bp, Homo sapiens; identical to SEQ ID NO: 90790

SEQ ID NO: 90802 - DNA, 201 bp, Homo sapiens
tgaccctggaggagaagtctgaattcaagcaaaggcttgaagtaaatggcattgaattctacccccagaaggaatttgatgaggatttggaggataagacrgagaatgacaaaatcaggcaggagagcatgccttttgctgtggtgggaagtgacaaggagtaccaagtgaatggcaagagggtcctcggccgaaaaactc

SEQ ID NO: 90803 - DNA, 201 bp, Homo sapiens; identical to SEQ ID NO: 90792

SEQ ID NO: 90804 - DNA, 201 bp, Homo sapiens; identical to SEQ ID NO: 90793

SEQ ID NO: 90805 - DNA, 142 bp, Homo sapiens
gccggaatgtgggcctagtgttgccagatcttctgatttttcgaaagaaactagaatgctggattcttaagtgatatcttctgattttttaaatgatagcmcctaaatgaaactttcaaaaagtatggcaggccagacaaaa

SEQ ID NO: 90806 - DNA, 201 bp, Homo sapiens
gcgaggacgacgagttctaccggcgcattaagggagctgggctccagcttttccgcccctcgggaatcacaactgggtacaagacatttcgccacctgcaygacccagcctggcggaagagggaccagaagcgcatcgcagctcaaaaacaggagcagttcaaggtggacagggagggaggcctgaacactgtgaagtacc

SEQ ID NO: 90807 - DNA, 201 bp, Homo sapiens
cgctgggcttcttctccctactctggctgcagctcagctgctctggggacgtggcccgggcagtcaggggacaagggcaggagacctcgggccctccccgygcctgccccccagagccgccccctgagcactgggaagaagacgcatcctggggcccccaccgcctggcagtgctggtgcccttccgcgaacgcttcgagg

SEQ ID NO: 90808 - DNA, 201 bp, Homo sapiens
agcaacagcacggactacattgccatgcacgacgttgacctgctccctctcaacgaggagctggactatggctttcctgaggctgggcccttccacgtggmctccccggagctccaccctctctaccactacaagacctatgtcggcggcatcctgctgctctccaagcagcactaccggctgtgcaatgggatgtccaac

SEQ ID NO: 90809 - DNA, 201 bp, Homo sapiens
ttcaaggtgacaagggcacagctacagcagatccaagccagcctcttgggttccatggagcaggcgctgaggggacaggccagccctgcccctgcggtccrgatgctgcctacatacgtggggtccaccccacatggcactgagcaaggagacttcgtggtgctggagctgggggccacaggggcctcactgcgtgttttg

SEQ ID NO: 90810 - DNA, 201 bp, Homo sapiens
tgttcccaaggtagccatggggctttagtgggatggggagcttctgggctgagccccaaaccacttccctttcccctccagcccctctactggggcagccygtgtccatgctatcctgcaggacttgggcctgagccctggggcttcggatgttgagcttgtgcagcacgtctgtgcggccgtgtgcacgcgggctgccca

SEQ ID NO: 90811 - DNA, 201 bp, Homo sapiens
gcgagataggcctcattgtcggaaccggcaccaatgcctgctacatggaggagctccggaatgtggcgggcgtgcctggggactcaggccgcatgtgcatyaacatggagtggggcgcctttggggacgatggctctctggccatgctcagcacccgctttgatgcaagtgtggaccaggcgtccatcaaccccggcaagc

SEQ ID NO: 90812 - DNA, 201 bp, Homo sapiens
ccatgatgtcctgtggctatgaggacccccgttgcgagataggcctcattgtcggaaccggcaccaatgcctgctacatggaggagctccggaatgtggcrggcgtgcctggggactcaggccgcatgtgcatcaacatggagtggggcgcctttggggacgatggctctctggccatgctcagcacccgctttgatgcaa

SEQ ID NO: 90813 - DNA, 201 bp, Homo sapiens
tccggaatgtggcgggcgtgcctggggactcaggccgcatgtgcatcaacatggagtggggcgcctttggggacgatggctctctggccatgctcagcacycgctttgatgcaagtgtggaccaggcgtccatcaaccccggcaagcagagcagatccagcgccttcagaccagggacatcttcaagaccaagttcctctc

SEQ ID NO: 90814 - DNA, 201 bp, Homo sapiens
gaggagccgtggggtgtccctgggtgggtggagagggcagcatgtgagaggcaaatgtgcaccaacactgggcgtgagacgtgagcagcctcaggtgtacrgcatgagatgtgtgtggttggggggtgtctgcgtgacccgggaggggggtgtgtgtgagatgagcacacgaggcatgcgtggcacgtgctcgtgtggtgg

SEQ ID NO: 90815 - DNA, 201 bp, Homo sapiens
gtgatgctcctggccccggaatgcgatgtctccttaatcccctctgtggatggtggtggccggggagtggcgatggtgactgccgtggctgcccgtctggmtgcccaccggcgcctgctggaggagaccctggccccattccggttgaaccatgatcaactggctgcggttcaggcacagatgcggaaggccatggccaag

SEQ ID NO: 90816 - DNA, 201 bp, Homo sapiens
gcatcctcctggaacacgtggctgagatggaggagtgagtcggggagatggtggtttagtgggggattcttggcttggaggaaggggatgatactctgttmccaaggtagccatggggctttagtgggatggggagcttctgggctgagccccaaaccacttccctttcccctccagcccctctactggggcagcccgtgt

SEQ ID NO: 90817 - DNA, 201 bp, Homo sapiens
gcctccagcacagccgggagcaacaaacactccaggttgctgtggccaccggaggccgagtgtgtgagcggcaccccaggttctgcagcgtcctgcagggkacagtgatgctcctggccccggaatgcgatgtctccttaatcccctctgtggatggtggtggccggggagtggcgatggtgactgccgtggctgcccgtc

SEQ ID NO: 90818 - DNA, 201 bp, Homo sapiens
gccccggaatgcgatgtctccttaatcccctctgtggatggtggtggccggggagtggcgatggtgactgccgtggctgcccgtctggctgcccaccggcrcctgctggaggagaccctggccccattccggttgaaccatgatcaactggctgcggttcaggcacagatgcggaaggccatggccaaggggctccgaggg

SEQ ID NO: 90819 - DNA, 201 bp, Homo sapiens
caacgcgtgttacatggaggaggcacggcatgtggcagtgctggacgaagaccggggccgcgtctgcgtcagcgtcgagtggggctccttcagcgatgatrgggcgctgggaccagtgctgaccaccttcgaccataccctggaccatgagtccctgaatcctggtgctcagaggtttgagaagatgatcggaggcctgta

SEQ ID NO: 90820 - DNA, 201 bp, Homo sapiens
gcgtcctgcaggggacagtgatgctcctggccccggaatgcgatgtctccttaatcccctctgtggatggtggtggccggggagtggcgatggtgactgcygtggctgcccgtctggctgcccaccggcgcctgctggaggagaccctggccccattccggttgaaccatgatcaactggctgcggttcaggcacagatgc

SEQ ID NO: 90821 - DNA, 201 bp, Homo sapiens
tgtggcagtgctggacgaagaccggggccgcgtctgcgtcagcgtcgagtggggctccttcagcgatgatggggcgctgggaccagtgctgaccaccttckaccataccctggaccatgagtccctgaatcctggtgctcagaggtttgagaagatgatcggaggcctgtacctgggtgagctggtgcggctggtgctggc

SEQ ID NO: 90822 - DNA, 201 bp, Homo sapiens
ccagcctggtggcggccacagtgcgggagctggcccctcgctgtgtggtcacgttcctgcagtcagaggatgggtccggcaaaggtgcggccctggtcacygctgttgcctgccgccttgcgcagttgactcgtgtctgaggaaacctccaggctgaggaggtctccgccgcagccttgctggagccgggtcggggtctgc

SEQ ID NO: 90823 - DNA, 201 bp, Homo sapiens
ctgcggttcaggcacagatgcggaaggccatggccaaggggctccgaggggaggcctcctcccttcgcatgctgcccactttcgtccgggccacccctgayggcagcgagcgaggggatttcctggccctggacctcgggggcacgaacttccgtgtcctcctggtacgtgtgaccacaggcgtgcagatcaccagcgaga

SEQ ID NO: 90824 - DNA, 201 bp, Homo sapiens; identical to SEQ ID NO: 90811

SEQ ID NO: 90825 - DNA, 201 bp, Homo sapiens
ggtcctctttggtggctgcacctcccctgccctgctgagccaaggcagcatcctcctggaacacgtggctgagatggaggacccctctactggggcagccygtgtccatgctatcctgcaggacttgggcctgagccctggggcttcggatgttgagcttgtgcagcacgtctgtgcggccgtgtgcacgcgggctgccca

SEQ ID NO: 90826 - DNA, 201 bp, Homo sapiens; identical to SEQ ID NO: 90809

SEQ ID NO: 90827 - DNA, 201 bp, Homo sapiens; identical to SEQ ID NO: 90812

SEQ ID NO: 90828 - DNA, 201 bp, Homo sapiens
tccggaatgtggcgggcgtgcctggggactcaggccgcatgtgcatcaacatggagtggggcgcctttggggacgatggctctctggccatgctcagcacycgctttgatgcaagtgtggaccaggcgtccatcaaccccggcaagcagaggtttgaaaagatgatcagcggcatgtacctgggggagatcgtccgccaca

SEQ ID NO: 90829 - DNA, 201 bp, Homo sapiens; identical to SEQ ID NO: 90814

SEQ ID NO: 90830 - DNA, 201 bp, Homo sapiens; identical to SEQ ID NO: 90815

SEQ ID NO: 90831 - DNA, 201 bp, Homo sapiens; identical to SEQ ID NO: 90817

SEQ ID NO: 90832 - DNA, 201 bp, Homo sapiens; identical to SEQ ID NO: 90818

SEQ ID NO: 90833 - DNA, 201 bp, Homo sapiens; identical to SEQ ID NO: 90819

SEQ ID NO: 90834 - DNA, 201 bp, Homo sapiens; identical to SEQ ID NO: 90821

SEQ ID NO: 90835 - DNA, 201 bp, Homo sapiens; identical to SEQ ID NO: 90820

SEQ ID NO: 90836 - DNA, 201 bp, Homo sapiens; identical to SEQ ID NO: 90822

SEQ ID NO: 90837 - DNA, 201 bp, Homo sapiens; identical to SEQ ID NO: 90823

SEQ ID NO: 90838 - DNA, 201 bp, Homo sapiens; identical to SEQ ID NO: 90811

SEQ ID NO: 90839 - DNA, 201 bp, Homo sapiens; identical to SEQ ID NO: 90825

SEQ ID NO: 90840 - DNA, 201 bp, Homo sapiens; identical to SEQ ID NO: 90809

SEQ ID NO: 90841 - DNA, 201 bp, Homo sapiens; identical to SEQ ID NO: 90812

SEQ ID NO: 90842 - DNA, 201 bp, Homo sapiens; identical to SEQ ID NO: 90828

SEQ ID NO: 90843 - DNA, 201 bp, Homo sapiens; identical to SEQ ID NO: 90814

SEQ ID NO: 90844 - DNA, 201 bp, Homo sapiens; identical to SEQ ID NO: 90815

SEQ ID NO: 90845 - DNA, 201 bp, Homo sapiens; identical to SEQ ID NO: 90817

SEQ ID NO: 90846 - DNA, 201 bp, Homo sapiens; identical to SEQ ID NO: 90818

SEQ ID NO: 90847 - DNA, 201 bp, Homo sapiens; identical to SEQ ID NO: 90819

SEQ ID NO: 90848 - DNA, 201 bp, Homo sapiens; identical to SEQ ID NO: 90821

SEQ ID NO: 90849 - DNA, 201 bp, Homo sapiens; identical to SEQ ID NO: 90820

SEQ ID NO: 90850 - DNA, 201 bp, Homo sapiens; identical to SEQ ID NO: 90822

SEQ ID NO: 90851 - DNA, 201 bp, Homo sapiens; identical to SEQ ID NO: 90823

SEQ ID NO: 90852 - DNA, 201 bp, Homo sapiens
ccacctctttaaagacaaggtggtgctggatgtgggctcggacacaagcatcctctgcatgttcgccgccaaggccgggcccgcaaggtcatcggcatcgwgtgttccagtagctctgattatgcggtgaagattgtcaaagccaacaagttagaccacttggtgaccatcaccaaggggaaggtggaggagatagagctc

SEQ ID NO: 90853 - DNA, 201 bp, Homo sapiens
tgctcctttgtggaaggcagttatgatcaggctgcatggacaaagcaggtagaggggcaccatcaggggctcttgcactattttcacctctaaatattacrtactcagtagtgccctgcttctagggctctgaatacgggcttaaagtcatcttgtcctgctggaatttgctgtgcagagccataagcctcccattttgtt

SEQ ID NO: 90854 - DNA, 201 bp, Homo sapiens
cttggctgggtttagtgtactgatctagaaaagctgtttttctgctcctttgtggaaggcagttatgatcaggctgcatggacaaagcaggtagaggggcmccatcaggggctcttgcactattttcacctctaaatattacgtactcagtagtgccctgcttctagggctctgaatacgggcttaaagtcatcttgtcct

SEQ ID NO: 90855 - DNA, 201 bp, Homo sapiens
attaagcatcaagtaaacaagtggaaagtgacctacacttttaacttgtctcactagtgcctaaatgtagtaaaggctgcttaagttttgtatgtagttgkattttttggagtccgaaggtatccatctgcagaaattgaggcccaaattgaatttggattcaagtggattctaaatactttgcttatcttgaagagagaa

SEQ ID NO: 90856 - DNA, 201 bp, Homo sapiens
attagccctccttttattttaaagactaatgttaattgttcttaaaactggattttttttccttaaagcaatttttttcttttcgatttaatgaagtattrctagctgaagccagtttgacatagagagatgtcagattgatttgaaaggtgtgcagcctgatttaaaaccaaaccctgaacccttttaaagaacaataaa

SEQ ID NO: 90857 - DNA, 107 bp, Homo sapiens
agtttgacatagagagatgtcagattgatttgaaaggtgtgcagcctgatttaaaaccaaaccctgaacccttttaaagaacaataaaacatattttacaygctctt

SEQ ID NO: 90858 - DNA, 201 bp, Homo sapiens
gctaagctaagatagatggtgttgattccactgggttttgatcaatacaataacaaacctttttcctttgacatactctgaattttgttgtttggggggaggggggtgtgtgtgtgtgtgtgtgtgtgtgtgtgtatgtgtgtgtgtgtgtgtgcacgcgcagtgtccatcagtatcagtgcctgcctgagttaggaaaat

SEQ ID NO: 90859 - DNA, 201 bp, Homo sapiens
aagctaagatagatggtgttgattccactgggttttgatcaatacaataacaaacctttttcctttgacatactctgaattttgttgtttggggggagggkggtgtgtgtgtgtgtgtgtgtgtgtgtgtgtatgtgtgtgtgtgtgtgtgcacgcgcagtgtccatcagtatcagtgcctgcctgagttaggaaaattac

SEQ ID NO: 90860 - DNA, 201 bp, Homo sapiens; identical to SEQ ID NO: 90853

SEQ ID NO: 90861 - DNA, 201 bp, Homo sapiens; identical to SEQ ID NO: 90854

SEQ ID NO: 90862 - DNA, 201 bp, Homo sapiens
agctaagatagatggtgttgattccactgggttttgatcaatacaataacaaacctttttcctttgacatactctgaattttgttgtttggggggaggggkgtgtgtgtgtgtgtgtgtgtgtgtgtgtgtatgtgtgtgtgtgtgtgtgcacgcgcagtgtccatcagtatcagtgcctgcctgagttaggaaaattaca

SEQ ID NO: 90863 - DNA, 201 bp, Homo sapiens
ggttttgatcaatacaataacaaacctttttcctttgacatactctgaattttgttgtttggggggaggggggtgtgtgtgtgtgtgtgtgtgtgtgtgtrtatgtgtgtgtgtgtgtgtgcacgcgcagtgtccatcagtatcagtgcctgcctgagttaggaaaattacattcctggttctgtattgaggagaaggatg

SEQ ID NO: 90864 - DNA, 201 bp, Homo sapiens; identical to SEQ ID NO: 90855

SEQ ID NO: 90865 - DNA, 201 bp, Homo sapiens; identical to SEQ ID NO: 90856

SEQ ID NO: 90866 - DNA, 107 bp, Homo sapiens; identical to SEQ ID NO: 90857

SEQ ID NO: 90867 - DNA, 201 bp, Homo sapiens; identical to SEQ ID NO: 90858

SEQ ID NO: 90868 - DNA, 201 bp, Homo sapiens; identical to SEQ ID NO: 90859

SEQ ID NO: 90869 - DNA, 201 bp, Homo sapiens; identical to SEQ ID NO: 90853

SEQ ID NO: 90870 - DNA, 201 bp, Homo sapiens; identical to SEQ ID NO: 90854

SEQ ID NO: 90871 - DNA, 201 bp, Homo sapiens; identical to SEQ ID NO: 90862

SEQ ID NO: 90872 - DNA, 201 bp, Homo sapiens; identical to SEQ ID NO: 90863

SEQ ID NO: 90873 - DNA, 201 bp, Homo sapiens; identical to SEQ ID NO: 90855

SEQ ID NO: 90874 - DNA, 201 bp, Homo sapiens; identical to SEQ ID NO: 90858

SEQ ID NO: 90875 - DNA, 201 bp, Homo sapiens; identical to SEQ ID NO: 90859

SEQ ID NO: 90876 - DNA, 201 bp, Homo sapiens; identical to SEQ ID NO: 90862

SEQ ID NO: 90877 - DNA, 201 bp, Homo sapiens; identical to SEQ ID NO: 90855

SEQ ID NO: 90878 - DNA, 201 bp, Homo sapiens; identical to SEQ ID NO: 90863

SEQ ID NO: 90879 - DNA, 201 bp, Homo sapiens; identical to SEQ ID NO: 90856

SEQ ID NO: 90880 - DNA, 107 bp, Homo sapiens; identical to SEQ ID NO: 90857

SEQ ID NO: 90881 - DNA, 201 bp, Homo sapiens; identical to SEQ ID NO: 90858

SEQ ID NO: 90882 - DNA, 201 bp, Homo sapiens; identical to SEQ ID NO: 90859

SEQ ID NO: 90883 - DNA, 201 bp, Homo sapiens; identical to SEQ ID NO: 90853

SEQ ID NO: 90884 - DNA, 201 bp, Homo sapiens; identical to SEQ ID NO: 90854

SEQ ID NO: 90885 - DNA, 201 bp, Homo sapiens; identical to SEQ ID NO: 90862

SEQ ID NO: 90886 - DNA, 201 bp, Homo sapiens; identical to SEQ ID NO: 90863

SEQ ID NO: 90887 - DNA, 201 bp, Homo sapiens; identical to SEQ ID NO: 90855

SEQ ID NO: 90888 - DNA, 201 bp, Homo sapiens; identical to SEQ ID NO: 90853

SEQ ID NO: 90889 - DNA, 201 bp, Homo sapiens; identical to SEQ ID NO: 90854

SEQ ID NO: 90890 - DNA, 201 bp, Homo sapiens; identical to SEQ ID NO: 90855

SEQ ID NO: 90891 - DNA, 201 bp, Homo sapiens; identical to SEQ ID NO: 90855

SEQ ID NO: 90892 - DNA, 201 bp, Homo sapiens
gtccttccaatatgactaaccagaacacgaatgagtacctggagaagatcaaacagcgactgtttgagaaccttagaatgctgccgcacgcacctggggtycaaatgcaggcgattcctgaggacgccatccctgaggagagtggcgatgaggacgaagacgaccctgacaagcgcatctcgatctgctcctctgacaaac

SEQ ID NO: 90893 - DNA, 201 bp, Homo sapiens; identical to SEQ ID NO: 90892

SEQ ID NO: 90894 - DNA, 201 bp, Homo sapiens
ctggcgggggctcgtccttgggcgcggggcttcatcatggacacgctctcggcccaggccgcgaaacaagcccgcgtgactggcggaggcacagagaccarggccgcttaacctggctggttgcactggtccctggagagagggcgtcccctgcaggagagcttcatgcgcctggtggaggcctgtggggactcggagcaa

SEQ ID NO: 90895 - DNA, 201 bp, Homo sapiens
tcggagcaaagcatggacaactggctgagtcggctggacggctgccgctgactgtaacatgtaaagcaggcactgagcaccacctgcctggcagtccaggrcatggagagaactgggtccattctattcctggcctggtacatggggctgaaggcacagacagcaccctgcttgtgacttcactggcccaactcatcctgg

SEQ ID NO: 90896 - DNA, 201 bp, Homo sapiens
cctgtggctgctgctgttgcgtagcgtcgactccttcgagaagcaggttgcgagtgactcgggcaccatcaccctgtgctgtaaagacctgcgagtgctgmagctggaaatagagggcgcggaagcgacgctgggcatcgcccgctccatcgaggtagcccctgacttccttctccggacgctgtcctccctggaatcagt

SEQ ID NO: 90897 - DNA, 201 bp, Homo sapiens
aggtcgcttcccggtgctcagctaccacccaactgagtccggtccgcaggttctgctacgctccagccagcccctaactggtccccagaagcggcgctgckacagggaccaggagctgctgcgaactgcgctggcgggggctcgtccttgggcgcggggcttcatcatggacacgctctcggcccaggccgcgaaacaagc

SEQ ID NO: 90898 - DNA, 190 bp, Homo sapiens
gtcaccgtccaccacctgctcctgtcgccagggcccgcgtcctctccggacctgtggctgctgctgttgcgtagcgtcgactccttcgaraagcaggttgcgagtgactcgggcaccatcaccctgtgctgtaaagacctgcgagtgctgcagctggaaatagagggcgcggaagcgacgctgggcatcg

SEQ ID NO: 90899 - DNA, 201 bp, Homo sapiens
agcttgtgccccagatacccccgtgcggtgatcgtgccatacttggtggacgatgatgccctggcgcgcagcgcccgcttccgtcagggaggtcgcttccyggtgctcagctaccacccaactgagtccggtccgcaggttctgctacgctccagccagcccctaactggtccccagaagcggcgctgctacagggaccag

SEQ ID NO: 90900 - DNA, 201 bp, Homo sapiens
taacatgtaaagcaggcactgagcaccacctgcctggcagtccagggcatggagagaactgggtccattctattcctggcctggtacatggggctgaaggmacagacagcaccctgcttgtgacttcactggcccaactcatcctggaccccttgagcaagaccatggctggattccaggaactggtggagtggaagtgga

SEQ ID NO: 90901 - DNA, 201 bp, Homo sapiens
ctctgtcaaatgcttcaggagcagagagtttagccatccaaccgcagaagcttttgatcttggatgcacgctcctatgcagctgctgtggcaaaccgagcyaaaggaggaggctgcgaatgcccagagtattacccaaactgtgaagttgtgtttatggggatggcaaacattcattctattcggaggagttttcagtctc

SEQ ID NO: 90902 - DNA, 201 bp, Homo sapiens
gggtgatgctgctctgaggagccatctggatatgagctggcctctgttctcacagggcatttctgaacagcagagtgggctcagtgttctcctcagttctytccaggtcccccccaggggagaggattccctggaggtccctgtggagcagtttcgaatagaagagattgcagagggtagggaggaagcagttcttccaat

SEQ ID NO: 90903 - DNA, 201 bp, Homo sapiens
ttcctttccttgaacttcatggagagagcacagagtttgtgggccgtgccgaggatgccatcattgccctttccaattacagacttcacatcaagttcaaygagtctcttgttaatgttccattacagcttatagaaagtgttgaatgccgagatatatttcagcttcatttgacttgcaaagactgcaaagttatcaggt

SEQ ID NO: 90904 - DNA, 201 bp, Homo sapiens
gttaaggcgtggcccagaaggcttccctggtgctctcagtccaggcaaagcccagagcatctgagcacgtctctgacttccagtggcaacacagtttgaaygtggtgaaacagggtgtagttcttttccacattctgtgtcatctagtcgtgcaggtagggaaaaagttggtctaattgaagattgtgcatttcctagtga

SEQ ID NO: 90905 - DNA, 201 bp, Homo sapiens
atcgatgaagcacttttttattaatattttcctttgttaaaggaggaaccgtaactctccatagctgtacatataacccttttctcctaaagaggagtcartcagtgctcctatatttttcattttttgtcaaagcaagaagtaaatactttagaattgttaaatatataaataaagcaaataaagttgagtgttccacat

SEQ ID NO: 90906 - DNA, 201 bp, Homo sapiens
ccccttgtgccttgcctttagccgaatgtaaagaggggcttgtgtgcaatggtgccccagagactgaaaacagggcctcagagcagcccccaggtcttagyaccctccagatgtaccccacacccaatgggcattgcgccaatggggaggctggtaggagcaaggactcactgagccgtcagctgtctgctatgagctgca

SEQ ID NO: 90907 - DNA, 201 bp, Homo sapiens
gtgtgcaatggtgccccagagactgaaaacagggcctcagagcagcccccaggtcttagcaccctccagatgtaccccacacccaatgggcattgcgccartggggaggctggtaggagcaaggactcactgagccgtcagctgtctgctatgagctgcagctctgcccacttacactcaaggaacttgcaccacaagtgg

SEQ ID NO: 90908 - DNA, 201 bp, Homo sapiens
aaaaaaggaaactttcccttggttgtcttaattttttttttttttgatggaagaccaagggttgccaggcccactgtaactgccgagctgcctgctgtcasgtgacactgagggatggcttgtttcttccgggtgggaggatggtggtcagagccaggagtatggagatctgagaccgtgagcagggaagaaagccagtgc

SEQ ID NO: 90909 - DNA, 201 bp, Homo sapiens; identical to SEQ ID NO: 90901

SEQ ID NO: 90910 - DNA, 201 bp, Homo sapiens
cagtcagaagccgtatgtatccttcagcctttccactgtggtcagcagaaggaatttggggttggttacatatgagagcctttttgagtagtgactgtttytgtgaagacatctctactgtctctggatggactggttccatttttcccccatgattctgtcctgaggaaggcctgcttctgatggtgctctgatctgttt

SEQ ID NO: 90911 - DNA, 201 bp, Homo sapiens; identical to SEQ ID NO: 90903

SEQ ID NO: 90912 - DNA, 201 bp, Homo sapiens
atctctactgtctctggatggactggttccatttttcccccatgattctgtcctgaggaaggcctgcttctgatggtgctctgatctgtttctgatgactrcttgctgagggtggtttggtttaacacagatctctactttgccaccctagacatgaatcttttttggcactgcctccagagcttatttctagcatattct

SEQ ID NO: 90913 - DNA, 201 bp, Homo sapiens
acctactgtattcctctcagtcagaagccgtatgtatccttcagcctttccactgtggtcagcagaaggaatttggggttggttacatatgagagcctttytgagtagtgactgtttttgtgaagacatctctactgtctctggatggactggttccatttttcccccatgattctgtcctgaggaaggcctgcttctgat

SEQ ID NO: 90914 - DNA, 201 bp, Homo sapiens; identical to SEQ ID NO: 90901

SEQ ID NO: 90915 - DNA, 201 bp, Homo sapiens; identical to SEQ ID NO: 90902

SEQ ID NO: 90916 - DNA, 201 bp, Homo sapiens; identical to SEQ ID NO: 90903

SEQ ID NO: 90917 - DNA, 201 bp, Homo sapiens; identical to SEQ ID NO: 90904

SEQ ID NO: 90918 - DNA, 201 bp, Homo sapiens; identical to SEQ ID NO: 90905

SEQ ID NO: 90919 - DNA, 201 bp, Homo sapiens; identical to SEQ ID NO: 90906

SEQ ID NO: 90920 - DNA, 201 bp, Homo sapiens; identical to SEQ ID NO: 90907

SEQ ID NO: 90921 - DNA, 201 bp, Homo sapiens; identical to SEQ ID NO: 90908

SEQ ID NO: 90922 - DNA, 201 bp, Homo sapiens; identical to SEQ ID NO: 90901

SEQ ID NO: 90923 - DNA, 201 bp, Homo sapiens; identical to SEQ ID NO: 90902

SEQ ID NO: 90924 - DNA, 201 bp, Homo sapiens; identical to SEQ ID NO: 90903

SEQ ID NO: 90925 - DNA, 201 bp, Homo sapiens; identical to SEQ ID NO: 90904

SEQ ID NO: 90926 - DNA, 201 bp, Homo sapiens; identical to SEQ ID NO: 90905

SEQ ID NO: 90927 - DNA, 201 bp, Homo sapiens; identical to SEQ ID NO: 90906

SEQ ID NO: 90928 - DNA, 201 bp, Homo sapiens; identical to SEQ ID NO: 90907

SEQ ID NO: 90929 - DNA, 201 bp, Homo sapiens; identical to SEQ ID NO: 90908

SEQ ID NO: 90930 - DNA, 201 bp, Homo sapiens
aaccaatcatggatcttccctttaaggggtagaatcagcctttagagttacaagcccctggaaaagggagcaggtcccatacaatcagcctttctcctctyctcttcttgggacaggaataactgctgagcagtccccctttgccactcctggctgtctgagtgggcacttgtctggctgctggccagcagtgaagggcca

SEQ ID NO: 90931 - DNA, 201 bp, Homo sapiens; identical to SEQ ID NO: 90903

SEQ ID NO: 90932 - DNA, 201 bp, Homo sapiens; identical to SEQ ID NO: 90904

SEQ ID NO: 90933 - DNA, 201 bp, Homo sapiens; identical to SEQ ID NO: 90906

SEQ ID NO: 90934 - DNA, 201 bp, Homo sapiens; identical to SEQ ID NO: 90907

SEQ ID NO: 90935 - DNA, 201 bp, Homo sapiens; identical to SEQ ID NO: 90908

SEQ ID NO: 90936 - DNA, 201 bp, Homo sapiens; identical to SEQ ID NO: 90901

SEQ ID NO: 90937 - DNA, 201 bp, Homo sapiens; identical to SEQ ID NO: 90902

SEQ ID NO: 90938 - DNA, 201 bp, Homo sapiens; identical to SEQ ID NO: 90905

SEQ ID NO: 90939 - DNA, 201 bp, Homo sapiens
ctggtcaaaatgtttatgcagtcaaggccaaagcctgccctgagcccagacacacctgggtccccattctggggcctggtcccctaaacaatctcttcctyagccagcacagggaaatccagactcagggttccagaaatcccccgttcccaaaccaaaccaatcatggatcttccctttaaggggtagaatcagccttta

SEQ ID NO: 90940 - DNA, 201 bp, Homo sapiens
ggctgggaggactgcgcatgctcgaagggtgggggttgaggccgacggggcgccgtacggcggaggcggggtttcagtggcttctggtgctctagggtgakctctgcccggctgcagggatggcggggaggggtaagctcatcgcagtgatcggagacgaggacacggtgactggtttcctgctgggcggcataggggagc

SEQ ID NO: 90941 - DNA, 102 bp, Homo sapiens
gcttgccatcagccttctttactttttgagcctttctaggttgctggggctctgctggttaaggaacaggaagcctgaccatctccctccactacctcttyc

SEQ ID NO: 90942 - DNA, 201 bp, Homo sapiens
ccagcagtccatccccgctgtcctggagatcccctccaaggagcacccatatgacgccgccaaggactccatcctgcgcagggccaggggcatgttcactsccgaagacctgcgctaggggactcctcatagccctcagcccttccctcgtttccaggcctctccccaggcttgccatcagccttctttactttttgagcc

SEQ ID NO: 90943 - DNA, 167 bp, Homo sapiens
aagacctgcgctaggggactcctcatagccctcagcccttccctcgtttccaggcctctccccaggcttgccatcagccttctttactttttgagcctttytaggttgctggggctctgctggttaaggaacaggaagcctgaccatctccctccactacctcttcc

SEQ ID NO: 90944 - DNA, 201 bp, Homo sapiens
ccgacggggcgccgtacggcggaggcggggtttcagtggcttctggtgctctagggtgagctctgcccggctgcagggatggcggggaggggtaagctcaycgcagtgatcggagacgaggacacggtgactggtttcctgctgggcggcataggggagcttaacaagaaccgccatcccaatttcctggtggtggagaag

SEQ ID NO: 90945 - DNA, 201 bp, Homo sapiens
ccatatacttttcacattctaaccattaacacacagctttgtagtcgcctgttcccttgactttccacctcactaggcagtatcatcattaacttttgcaktcctttaactgaacaaacgtgtgttacttgttaactatgtgtcatagttacacacatacatacacgataaagacccagaccctgcccttgagatgagtaa

SEQ ID NO: 90946 - DNA, 201 bp, Homo sapiens
ctctagggtgagctctgcccggctgcagggatggcggggaggggtaagctcatcgcagtgatcggagacgaggacacggtgactggtttcctgctgggcgkcataggggagcttaacaagaaccgccatcccaatttcctggtggtggagaaggatacaaccatcaatgagatcgaagacactttccggcaatttctaaac

SEQ ID NO: 90947 - DNA, 201 bp, Homo sapiens
tatgacgccgccaaggactccatcctgcgcagggccaggggcatgttcactgccgaagacctgcgctaggggactcctcatagccctcagcccttccctcktttccaggcctctccccaggcttgccatcagccttctttactttttgagcctttctaggttgctggggctctgctggttaaggaacaggaagcctgacca

SEQ ID NO: 90948 - DNA, 117 bp, Homo sapiens
caggcctctccccaggcttgccatcagccttctttactttttgagcctttctaggttgctggggctctgctggttaaggaacaggaagcctgaccatctcyctccactacctcttcc

SEQ ID NO: 90949 - DNA, 201 bp, Homo sapiens; identical to SEQ ID NO: 90940

SEQ ID NO: 90950 - DNA, 201 bp, Homo sapiens
cttcccactccattaagaggctaggtgaggcgcttctaggttgctggggctctgctggttaaggaacaggaagcctgaccatctccctccactacctcttycctgtgctgttacacagtgtcattgttgatgttaaattaaagtcatattcttgcttctctccagatgggttgggtgctggaaaggacatgtgtggggtga

SEQ ID NO: 90951 - DNA, 201 bp, Homo sapiens; identical to SEQ ID NO: 90942

SEQ ID NO: 90952 - DNA, 201 bp, Homo sapiens
cctctccccaggcttgccatcagccttctttactttttgagcctctgatttccaattccctgctccttcccactccattaagaggctaggtgaggcgcttytaggttgctggggctctgctggttaaggaacaggaagcctgaccatctccctccactacctcttccctgtgctgttacacagtgtcattgttgatgttaa

SEQ ID NO: 90953 - DNA, 201 bp, Homo sapiens; identical to SEQ ID NO: 90944

SEQ ID NO: 90954 - DNA, 201 bp, Homo sapiens; identical to SEQ ID NO: 90945

SEQ ID NO: 90955 - DNA, 201 bp, Homo sapiens; identical to SEQ ID NO: 90946

SEQ ID NO: 90956 - DNA, 201 bp, Homo sapiens
tatgacgccgccaaggactccatcctgcgcagggccaggggcatgttcactgccgaagacctgcgctaggggactcctcatagccctcagcccttccctcktttccaggcctctccccaggcttgccatcagccttctttactttttgagcctctgatttccaattccctgctccttcccactccattaagaggctaggtg

SEQ ID NO: 90957 - DNA, 201 bp, Homo sapiens
tccaattccctgctccttcccactccattaagaggctaggtgaggcgcttctaggttgctggggctctgctggttaaggaacaggaagcctgaccatctcyctccactacctcttccctgtgctgttacacagtgtcattgttgatgttaaattaaagtcatattcttgcttctctccagatgggttgggtgctggaaagg

SEQ ID NO: 90958 - DNA, 201 bp, Homo sapiens
cacaaagacagcaaatcacccaccttgaggtcataaaggagctggaagctgctgggtgcttgtgctgctctctggacggcctgagccagggctaaggcacmcttgcccccttctgcccagtgagtgcacttcacggcatcaaaagccccatgttctctggaaaggcggctgatgaggtccagctcagactctgtatccgtc

SEQ ID NO: 90959 - DNA, 201 bp, Homo sapiens
aagcccaatctcatgcagacactggagggcactccagtgtttgtccatgctggcccgtttgccaacatcgcacatggcaattcctccatcattgcagaccrgatcgcactcaagcttgttggcccagaagggtttgtagtgacggaagcaggatttggagcagacattggaatggaaaagttttttaacatcaaatgccgg

SEQ ID NO: 90960 - DNA, 201 bp, Homo sapiens
agcatcaatgctgggagacttgctagaggtgacctcaatgactgtttcattccttgtacgcctaagggatgcttggaactcatcaaagagacaggggtgcygattgccggaaggcatgctgtggtggttgggcgcagtaaaatagttggggccccgatgcatgacttgcttctgtggaacaatgccacagtgaccacctgc

SEQ ID NO: 90961 - DNA, 201 bp, Homo sapiens
gacggatacagagtctgagctggacctcatcagccgcctttccagagaacatggggcttttgatgccgtgaagtgcactcactgggcagaagggggcaagkgtgccttagccctggctcaggccgtccagagagcagcacaagcacccagcagcttccagctcctttatgacctcaagctcccagttgaggataaaatcag

SEQ ID NO: 90962 - DNA, 201 bp, Homo sapiens
gccagcgttggggctggttttctgtaccccttagtaggaacgatgagcacaatgcctggactccccacccggccctgtttttatgatattgatttggaccytgaaacagaacaggtgaatggattattctaaacagacttccctgaggggagaggggatagtaatgagagttggcaataaccaatgaattgaaatatttat

SEQ ID NO: 90963 - DNA, 201 bp, Homo sapiens
gcttgtcacaggttgacagtgtaggggagaaaactgctgtccaataaactacagaggaaactacaggagagatcaccatccatcttcaagaagctactttraaagtctggccagtgtctattcaggcccactgggagttaggaagtataagtaagccaagagaagtcagcccctgcccagaagatctgaaactaatagtag

SEQ ID NO: 90964 - DNA, 201 bp, Homo sapiens
ccatccatcttcaagaagctactttgaaagtctggccagtgtctattcaggcccactgggagttaggaagtataagtaagccaagagaagtcagcccctgyccagaagatctgaaactaatagtaggagtttccccagaagtcattttcagccttaattctcatcatgtataaattaacataaatcatgcatgtctgttta

SEQ ID NO: 90965 - DNA, 201 bp, Homo sapiens
ctacctttagattcagagaattccattaacactgaagaagtgatcaatgctattgcacccgagaaggatgtggatggattgactagcatcaatgctgggaracttgctagaggtgacctcaatgactgtttcattccttgtacgcctaagggatgcttggaactcatcaaagagacaggggtgccgattgccggaaggcat

SEQ ID NO: 90966 - DNA, 201 bp, Homo sapiens
tgtctattcaggcccactgggagttaggaagtataagtaagccaagagaagtcagcccctgcccagaagatctgaaactaatagtaggagtttccccagamgtcattttcagccttaattctcatcatgtataaattaacataaatcatgcatgtctgtttactttagtgacgttccacagaataaaaggaaacaagtttg

SEQ ID NO: 90967 - DNA, 201 bp, Homo sapiens
gaggccaaagagagggcgagcttcatcactcctgttcctggcggcgtagggcccatgacagttgcaatgctcatgcagagcacagtagagagtgccaagcrtttcctggagaaatttaagccaggaaagtggatgattcagtataacaaccttaacctcaagacacctgttccaagtgacattgatatatcacgatcttgt

SEQ ID NO: 90968 - DNA, 113 bp, Homo sapiens
agtgtgatccccyggccagtccctaagcacgtgggttgggttgtcctgcttggctgcggagggagtggaacctcgatattggtggtgtccatcgtgggcagcggactaataaa

SEQ ID NO: 90969 - DNA, 201 bp, Homo sapiens; identical to SEQ ID NO: 90959

SEQ ID NO: 90970 - DNA, 201 bp, Homo sapiens; identical to SEQ ID NO: 90960

SEQ ID NO: 90971 - DNA, 201 bp, Homo sapiens; identical to SEQ ID NO: 90961

SEQ ID NO: 90972 - DNA, 201 bp, Homo sapiens
gccagcgttggggctggttttctgtaccccttagtaggaacgatgagcacaatgcctggactccccacccggccctgtttttatgatattgatttggaccytgaaacagaacaggtgaatggattattctaaacagatcaccatccatcttcaagaagctactttgaaagtctggccagtgtctattcaggcccactggga

SEQ ID NO: 90973 - DNA, 201 bp, Homo sapiens
cacccggccctgtttttatgatattgatttggaccctgaaacagaacaggtgaatggattattctaaacagatcaccatccatcttcaagaagctactttraaagtctggccagtgtctattcaggcccactgggagttaggaagtataagtaagccaagagaagtcagcccctgcccagaagatctgaaactaatagtag

SEQ ID NO: 90974 - DNA, 201 bp, Homo sapiens; identical to SEQ ID NO: 90964

SEQ ID NO: 90975 - DNA, 201 bp, Homo sapiens; identical to SEQ ID NO: 90965

SEQ ID NO: 90976 - DNA, 201 bp, Homo sapiens; identical to SEQ ID NO: 90966

SEQ ID NO: 90977 - DNA, 201 bp, Homo sapiens; identical to SEQ ID NO: 90967

SEQ ID NO: 90978 - DNA, 113 bp, Homo sapiens; identical to SEQ ID NO: 90968

SEQ ID NO: 90979 - DNA, 126 bp, Homo sapiens
tctatttcacttatccttgttccttstactgcatttcagttctcgctactgcagtgtaacctccaagagacaggagaaaatcataatacccccctccctccatcactgagtgatactgagacggcg

SEQ ID NO: 90980 - DNA, 201 bp, Homo sapiens
atggctgctactccttctggcaggcggggctcctgcccctgctccaccgcgcactgcacgcccaaggtgaccctgcccttagcatgagccactggatgttycatcagcaggccctgcaggagtacatcctgatgtgctgccagtgccctgcgggggggcttctggataaacctggcaagtcgcgtgatttctaccacacct

SEQ ID NO: 90981 - DNA, 201 bp, Homo sapiens
ccacctgcctcactcctccctatcatgtaccgtgaaaaccccctctgatggcctcaaggcagtgcctgcaggccgaggcccttctgggggtttctatcttycttccaccagactccaagcccactctcctccaagactgtgttgtcttttctcaccaagagtattaacactactaagtctttcaccttaacttatgactca

SEQ ID NO: 90982 - DNA, 201 bp, Homo sapiens
agtgcccacctgcctcactcctccctatcatgtaccgtgaaaaccccctctgatggcctcaaggcagtgcctgcaggccgaggcccttctgggggtttctwtctttcttccaccagactccaagcccactctcctccaagactgtgttgtcttttctcaccaagagtattaacactactaagtctttcaccttaacttatg

SEQ ID NO: 90983 - DNA, 201 bp, Homo sapiens; identical to SEQ ID NO: 90980

SEQ ID NO: 90984 - DNA, 201 bp, Homo sapiens; identical to SEQ ID NO: 90981

SEQ ID NO: 90985 - DNA, 201 bp, Homo sapiens; identical to SEQ ID NO: 90982

SEQ ID NO: 90986 - DNA, 201 bp, Homo sapiens
aataaaaggcaaagagacgggatcggctgcagcggtttcccaaaggaggagggagtgtgcatcggtctggtaacaaacagagaatgttttttaattatttmtatcacaaaaatctgtgttttatctaggatattttctgaatattctttgtaaaatgcagatttttttccacaaaacagtaggattctttgttatattctt

SEQ ID NO: 90987 - DNA, 201 bp, Homo sapiens
tgtgtggggacttctcactgccacggacccttgatgcatgctccccgcgctccagtggtcccgtgtcagaaggcggagttttcgaaaggaggccgccaaawataaaaggcaaagagacgggatcggctgcagcggtttcccaaaggaggagggagtgtgcatcggtctggtaacaaacagagaatgttttttaattattta

SEQ ID NO: 90988 - DNA, 201 bp, Homo sapiens
ttaggggtcagtaaagaccgaggagcctttattgtaataagaaacagacataatgccccttcttcacaagccctgtaacaacagctaattttttttttttratctcccctttctcccttgaaattaatccagtctgggcaatagatgcagtctgaccctttggatgtaacttacatttttttttattaattatttttttct

SEQ ID NO: 90989 - DNA, 201 bp, Homo sapiens
tcccaaaggaggagggagtgtgcatcggtctggtaacaaacagagaatgttttttaattatttatatcacaaaaatctgtgttttatctaggatattttckgaatattctttgtaaaatgcagatttttttccacaaaacagtaggattctttgttatattcttaaaattgtttgtttaagtaggtaaaaatatacattca

SEQ ID NO: 90990 - DNA, 201 bp, Homo sapiens
gcaaagagacgggatcggctgcagcggtttcccaaaggaggagggagtgtgcatcggtctggtaacaaacagagaatgttttttaattatttatatcacaraaatctgtgttttatctaggatattttctgaatattctttgtaaaatgcagatttttttccacaaaacagtaggattctttgttatattcttaaaattgt

SEQ ID NO: 90991 - DNA, 201 bp, Homo sapiens
gcagattagttagaattcactgccaggtttcttctgcccaccaaaatgatccagtctggaataacattttgtaaaaaaaaaatatatatatatatatatatagctgactggaagagattaatttcttcccccaacttcttgcatgttgaagatatttgagctatttttcatctaaaagagtaaggtattaggcccttttgt

SEQ ID NO: 90992 - DNA, 201 bp, Homo sapiens
tgactccagcagacttaattacattttaaggaacactgtctttcctttttttttcctcttcgccttttctttttttttccttttttcttttttttttttttaatttttccccccaaccatcgtgatttgtcttttcatgcagattagttagaattcactgccaggtttcttctgcccaccaaaatgatccagtctggaata

SEQ ID NO: 90993 - DNA, 201 bp, Homo sapiens
ctgggagaagttcacagagctctagccagcagtttagtgggataggccggtctgggcagcagccacagccactgatgtcacaacagtttgcacagcctccrggagctaccaatatgataggttacatggggcagactgcctaccaataccctcctcctcctccccctcctcctccttcacgtaaatgaaaccactcaagtg

SEQ ID NO: 90994 - DNA, 201 bp, Homo sapiens
ggattcccttaggattctacagccaataaagatcctatttcctatgcatgtcccaggaatcagtaatcctcttttactctgttgggatgagtctttttttktttctgttcagagtggttactaacttcaccttctttcctcttgctgtcatctgcattcgtgcttcccacctgttgttggcatgtcctttaccttctcttt

SEQ ID NO: 90995 - DNA, 150 bp, Homo sapiens
cttcagcataagctgaaatatatgcatgtaaaaactttgacatctttttttttaattttccactttcttcttaactttacttctctttttgtcccccccccatcttacagaagttgaggccaagggagaatggtaggcacagaagaaaca

SEQ ID NO: 90996 - DNA, 201 bp, Homo sapiens
attacaggtaggtagtgcttaagaaaagtcatggaggactaaagcctaagtccttttcacttttcctccatctgaaggtaggtgagttcatcctcttcatrgtaatgctgttttaccaagactttatagcagatggacccagaaagaattttctgctattgtgttcactacaacaggatagggacatcagacagccccaga

SEQ ID NO: 90997 - DNA, 201 bp, Homo sapiens
ttgctgagttttgtgtatcctttaaattaaaaaccacaagtgtttattgtagtggttaaactgtagcatctcagcatctgggtggaagctgcctatatttyttcccagtttaactggggaccatctgtgaaattaattttccatccagacagctgctgtgagcaaatgaacataaatgctcgctggaaatttactaaccag

SEQ ID NO: 90998 - DNA, 201 bp, Homo sapiens
cagattagttagaattcactgccaggtttcttctgcccaccaaaatgatccagtctggaataacattttgtaaaaaaaaaatatatatatatatatatatagctgactggaagagattaatttcttcccccaacttcttgcatgttgaagatatttgagctatttttcatctaaaagagtaaggtattaggcccttttgtg

SEQ ID NO: 90999 - DNA, 201 bp, Homo sapiens
tggtggggagggagggagggggagggctgaattgttttgcagaggaagatggcatctgtgctttaaatttctcattactgggttagaaaacaaagagggaktgccctgcacattttcttttgtgcttttaaatgtttcttaagttggaacaggtttcctcgggcctgttttgactgattgctggagtgcatttgatagtta

SEQ ID NO: 91000 - DNA, 201 bp, Homo sapiens
gggagagggaaggtacccgagtctgtttcttgttactcaacatcagtgcttgttttgggcccctttgtttgctgccttgtaaaaaatcaaaagagggagawaacccaccaaaatggcagaattctgaccaatgtcctacaagatcctggaaagtgaaggcttctacctcatagacaggggtgcaattttcagctgagtcac

SEQ ID NO: 91001 - DNA, 201 bp, Homo sapiens
tttgtttctgttcagagtggttactaacttcaccttctttcctcttgctgtcatctgcattcgtgcttcccacctgttgttggcatgtcctttaccttctytttccctgccacatcaacctacacactgactcatcattgacgtggaagatgtggaagatgtcaagtttgtgatcaactatgactatccaaacagctcaga

SEQ ID NO: 91002 - DNA, 201 bp, Homo sapiens
cgtgatttgtcttttcatgcagattagttagaattcactgccaggtttcttctgcccaccaaaatgatccagtctggaataacattttgtaaaaaaaaaawatatatatatatatatatagctgactggaagagattaatttcttcccccaacttcttgcatgttgaagatatttgagctatttttcatctaaaagagtaa

SEQ ID NO: 91003 - DNA, 201 bp, Homo sapiens; identical to SEQ ID NO: 90991

SEQ ID NO: 91004 - DNA, 201 bp, Homo sapiens; identical to SEQ ID NO: 90992

SEQ ID NO: 91005 - DNA, 201 bp, Homo sapiens; identical to SEQ ID NO: 90993

SEQ ID NO: 91006 - DNA, 201 bp, Homo sapiens
tctctcgcagctcttgaaagcatctgtttgagggaaaggtctctgggcaagcaagtggttatttggattgcttgcttccctttttccacctgggacattgyactgaaatctagcagagtttaactcttctgcctccatgtctgtcacttataattcaggttctgctgttggcttcagaacatgagcagaagaatcgtttta

SEQ ID NO: 91007 - DNA, 201 bp, Homo sapiens
gcaaactgctctgtgctttcaaaccaaagtgttccccccaaccccaaatttgtctaagcactggccagtctgttgtgggcattgttttctacaaccaaattctgggtttttttcttctttctttaaacatagaggtaccaccacaagggatgccctactctctcgcagctcttgaaagcatctgtttgagggaaaggtctc

SEQ ID NO: 91008 - DNA, 201 bp, Homo sapiens
cttcagcataagctgaaatatatgcatgtaaaaactttgacatctttttttttaattttccactttcttcttaactttacttctctttttgtcccccccccatcttacagaagttgaggccaagggagaatggtaggcacagaagaaacatggcaaactgctctgtgctttcaaaccaaagtgttccccccaaccccaaat

SEQ ID NO: 91009 - DNA, 201 bp, Homo sapiens
taacagcttctgggtgcagattttcttcggcatccttttgcactcagcttattacaggtaggtagtgcttaagaaaagtaggtgagttcatcctcttcatrgtaatgctgttttaccaagactttatagcagatggacccagaaagaattttctgctattgtgttcactacaacaggatagggacatcagacagccccaga

SEQ ID NO: 91010 - DNA, 201 bp, Homo sapiens; identical to SEQ ID NO: 90997

SEQ ID NO: 91011 - DNA, 201 bp, Homo sapiens; identical to SEQ ID NO: 90998

SEQ ID NO: 91012 - DNA, 201 bp, Homo sapiens; identical to SEQ ID NO: 90999

SEQ ID NO: 91013 - DNA, 201 bp, Homo sapiens; identical to SEQ ID NO: 91002

SEQ ID NO: 91014 - DNA, 201 bp, Homo sapiens; identical to SEQ ID NO: 90997

SEQ ID NO: 91015 - DNA, 201 bp, Homo sapiens; identical to SEQ ID NO: 90998

SEQ ID NO: 91016 - DNA, 201 bp, Homo sapiens; identical to SEQ ID NO: 90999

SEQ ID NO: 91017 - DNA, 201 bp, Homo sapiens; identical to SEQ ID NO: 90991

SEQ ID NO: 91018 - DNA, 201 bp, Homo sapiens; identical to SEQ ID NO: 91002

SEQ ID NO: 91019 - DNA, 201 bp, Homo sapiens; identical to SEQ ID NO: 90992

SEQ ID NO: 91020 - DNA, 201 bp, Homo sapiens; identical to SEQ ID NO: 90993

SEQ ID NO: 91021 - DNA, 150 bp, Homo sapiens; identical to SEQ ID NO: 90995

SEQ ID NO: 91022 - DNA, 201 bp, Homo sapiens; identical to SEQ ID NO: 90996

SEQ ID NO: 91023 - DNA, 201 bp, Homo sapiens
ttccactttaaaaacctactgaaagcctgtggtcggaacgaaagctggctgtgcttcaccatggaagttacaaagcaccactcagctgtcttccggaagargggcgtcttccgaaaccaggtggatcctgagacccattgtcatgcagaaaggtgcttcctctcttggttctgtgacgacatactgtctcctaacacaaac

SEQ ID NO: 91024 - DNA, 201 bp, Homo sapiens
gaaggctacgggagattctccagtgaggggtctccctgggcctcatggtctgtctcttctagcctcctgctcatgctgcacgggcctcccctccatcctgsaccagctgtgcttttgcctggtcatcctgagcccctcctggcctcagggccattccatagtgcccccctgcctcaccacctcctccccgctctcccaggc

SEQ ID NO: 91025 - DNA, 201 bp, Homo sapiens
tacacatcttggagcccttgcccagagtgtgcaggggaggtggccgagttcctggccaggcacagcaacgtgaatctcaccatcttcaccgcccgcctctrctacttctgggatacagattaccaggaggggctctgcagcctgagtcaggaaggggcctccgtgaagatcatgggctacaaagattttgtatcttgttgg

SEQ ID NO: 91026 - DNA, 201 bp, Homo sapiens
catgttggccaggctggtcttgaactcctgacctcaggtgatctgcccatctctgtctcccaaagtgctgggattacgggcgtgagccacccggctcggcygcacaaccaaatcttattaaactcaatctagtctggccctggtgactcacgcctttcggaggcagaggtgggagaatcgcttgagcccagaagtttgaga

SEQ ID NO: 91027 - DNA, 201 bp, Homo sapiens
gccctggtgactcacgcctttcggaggcagaggtgggagaatcgcttgagcccagaagtttgagaccagcctgggccacacgacaaagccccatttctacaaaaaaaaatacaaaaaaaaagccagatgtggtggcatgcacctgtagtttaagctacttgggaggatgaagtgggaggactgcttgagccggggaggtgg

SEQ ID NO: 91028 - DNA, 136 bp, Homo sapiens
ctacttgggaggatgaagtgggaggactgcttgagccggggaggtggaggctggagtaaactgagatcgcgccacagaactccagtttgagcaacagatcragaccctgcctgaaaataaatcaataaatacactc

SEQ ID NO: 91029 - DNA, 201 bp, Homo sapiens
acggggcccacgtggtcatcagcagccggaagcagcagaacgtggaccgggccatggccaagctgcagggggaggggctgagtgtggcgggcattgtgtgycacgtggggaaggctgaggaccgggagcagctggtggccaaggccctggagcactgtgggggcgtcgacttcctggtgtgcagcgcaggggtcaaccctc

SEQ ID NO: 91030 - DNA, 201 bp, Homo sapiens
taccagggctggtttcatccctgtgctaggctttctgtgaggatgagcagcaccgggatagacaggaagggcgtcctggctaaccgggtagccgtggtcayggggtccaccagtgggatcggctttgccatcgcccgacgtctggcccgggacggggcccacgtggtcatcagcagccggaagcagcagaacgtggaccgg

SEQ ID NO: 91031 - DNA, 201 bp, Homo sapiens
tgtgccacgtggggaaggctgaggaccgggagcagctggtggccaaggccctggagcactgtgggggcgtcgacttcctggtgtgcagcgcaggggtcaamcctctggtagggagcactctggggaccagtgagcagatctgggacaagatcctaagtgtgaacgtgaagtccccagccctgctgctgagccagttgctgc

SEQ ID NO: 91032 - DNA, 201 bp, Homo sapiens
tgcaacttcattcttgaagtcagtgaggccaagaacccatcaattccgtacacattttggtgactttgaagagactgtcacctatcaccaagtggtgagaytattgccaagcagtgagactattgccaagtggtgagaccatcaccaagcggtgagactatcacctatcgccaagtggcctgattcagcaggaagcatctc

SEQ ID NO: 91033 - DNA, 195 bp, Homo sapiens
ttggctgatccaattaacatgtggggttcttggtgtgggtctggggagctgaaggattttatggagctggtgctttggaggaatcttaagggaaaggagtrgaagctcaggcctttgaaggatttcagctcctcctctctgtaatttgtgctttaagcattttttttcctaaaataaactcaaatttatcctcaa

SEQ ID NO: 91034 - DNA, 201 bp, Homo sapiens
tgccatcgcccgacgtctggcccgggacggggcccacgtggtcatcagcagccggaagcagcagaacgtggaccgggccatggccaagctgcagggggagrggctgagtgtggcgggcattgtgtgccacgtggggaaggctgaggaccgggagcagctggtggccaaggccctggagcactgtgggggcgtcgacttcct

SEQ ID NO: 91035 - DNA, 201 bp, Homo sapiens
cctgtgctctccagatgccagctacgtcaacggggagaacattgcggtggcaggctactccactcggctctgagaggagtgggggcggctgcgtagctgtrgtcccaggcccaggagcctgagggggtgtctaggtgatcatttggatctggaggcagagtctgccattctgccagactagcaatttgggggcttactcat

SEQ ID NO: 91036 - DNA, 201 bp, Homo sapiens
tggggagtcagaggactgtgcaggaatcgtgtccttcctgtgctctccagatgccagctacgtcaacggggagaacattgcggtggcaggctactccactmggctctgagaggagtgggggcggctgcgtagctgtggtcccaggcccaggagcctgagggggtgtctaggtgatcatttggatctggaggcagagtctgc

SEQ ID NO: 91037 - DNA, 201 bp, Homo sapiens
tgtccttcctgtgctctccagatgccagctacgtcaacggggagaacattgcggtggcaggctactccactcggctctgagaggagtgggggcggctgcgyagctgtggtcccaggcccaggagcctgagggggtgtctaggtgatcatttggatctggaggcagagtctgccattctgccagactagcaatttgggggct

SEQ ID NO: 91038 - DNA, 201 bp, Homo sapiens
gagactatcacctatcgccaagtggcctgattcagcaggaagcatctcagacaccaaccactatgctgtcagcagttgcccggggctaccagggctggttkcatccctgtgctaggctttctgtgaggatgagcagcaccgggatagacaggaagggcgtcctggctaaccgggtagccgtggtcacggggtccaccagtg

SEQ ID NO: 91039 - DNA, 201 bp, Homo sapiens; identical to SEQ ID NO: 91037

SEQ ID NO: 91040 - DNA, 201 bp, Homo sapiens; identical to SEQ ID NO: 91029

SEQ ID NO: 91041 - DNA, 201 bp, Homo sapiens; identical to SEQ ID NO: 91030

SEQ ID NO: 91042 - DNA, 201 bp, Homo sapiens; identical to SEQ ID NO: 91031

SEQ ID NO: 91043 - DNA, 195 bp, Homo sapiens; identical to SEQ ID NO: 91033

SEQ ID NO: 91044 - DNA, 201 bp, Homo sapiens; identical to SEQ ID NO: 91034

SEQ ID NO: 91045 - DNA, 140 bp, Homo sapiens
cagtgcctgaaatccagcctgctgcttactcacatcctcrtactcagctgcagactgcctgacagaagggctgccaaactgcactccagacagacaggtgcacagccaggcctgattcagcaggaagcatctcagacacc

SEQ ID NO: 91046 - DNA, 201 bp, Homo sapiens
ccagacagacaggtgcacagccaggcctgattcagcaggaagcatctcagacaccaaccactatgctgtcagcagttgcccggggctaccagggctggttkcatccctgtgctaggctttctgtgaggatgagcagcaccgggatagacaggaagggcgtcctggctaaccgggtagccgtggtcacggggtccaccagtg

SEQ ID NO: 91047 - DNA, 201 bp, Homo sapiens; identical to SEQ ID NO: 91035

SEQ ID NO: 91048 - DNA, 201 bp, Homo sapiens; identical to SEQ ID NO: 91036

SEQ ID NO: 91049 - DNA, 201 bp, Homo sapiens
ggctctccgagcacgccacggcccccacccggggctccgcgcgcgccgcgggctacgacctgtacagtgcctatgattacacaataccacctatggagaargctgttgtgaaaacggacattcagatagcgctcccttctgggtgttatggaagagtggctccacggtcaggcttggctgcaaaacactttattgatgtag

SEQ ID NO: 91050 - DNA, 201 bp, Homo sapiens
tcgaattgcacagctcatttgcgaacggattttttatccagaaatagaagaagttcaagccttggatgacaccgaaaggggttcaggaggttttggttccmctggaaagaattaaaatttatgccaagaacagaaaacaagaagtcatacctttttcttaaaaaaaaaaaaaaagtttttgcttcaagtgttttggtgttt

SEQ ID NO: 91051 - DNA, 201 bp, Homo sapiens; identical to SEQ ID NO: 91049

SEQ ID NO: 91052 - DNA, 201 bp, Homo sapiens
tgtggactcgtcccggggaggggcggtgggtggggcggggctggcgggaaatttcggttttggcgcgctccctgcggcgacgctcatcgtgcgctctcctsttcccccggtggtctcctcgctcgccttctggctctgccatgccctgctctgaagagacacccgccatttcacccagtaagcgggcccggcctgcggagg

SEQ ID NO: 91053 - DNA, 201 bp, Homo sapiens; identical to SEQ ID NO: 91050

SEQ ID NO: 91054 - DNA, 201 bp, Homo sapiens
caggagcagggcccgggcctggcgtacactctcggaaaaatgggggccagagcaaacaagaagagcgaaagcaagagggctaggcagccagaggcggcagmaagactcaagacgccaacggcgccgtcttcctggggccccagggcctgcgccatccctgggctgccggggcaccgcctctccacgcccctcgtccggcgg

SEQ ID NO: 91055 - DNA, 201 bp, Homo sapiens
tacactctcggaaaaatgggggccagagcaaacaagaagagcgaaagcaagagggctaggcagccagaggcggcagcaagactcaagacgccaacggcgcsgtcttcctggggccccagggcctgcgccatccctgggctgccggggcaccgcctctccacgcccctcgtccggcggcggctgcgactgcttccgaggtca

SEQ ID NO: 91056 - DNA, 201 bp, Homo sapiens
cgtcccggggaggggcggtgggtggggcggggctggcgggaaatttcggttttggcgcgctccctgcggcgacgctcatcgtgcgctctcctcttcccccsgtggtctcctcgctcgccttctggctctgccatgccctgctctgaagagacacccgccatttcacccagtaagcgggcccggcctgcggaggtgggcggc

SEQ ID NO: 91057 - DNA, 201 bp, Homo sapiens; identical to SEQ ID NO: 91049

SEQ ID NO: 91058 - DNA, 201 bp, Homo sapiens; identical to SEQ ID NO: 91050

SEQ ID NO: 91059 - DNA, 201 bp, Homo sapiens
ttgagcaccatccggggtcaccagttattagaggaagtaacacaaggggatatgagtgcagcagacacatttctgtccgatctgccaagggatgatatctrtgtgtcagatgttgaggacgacggtgatgacacatctctggatagtgacctggatccagaggagctggcaggagtcaggggacatcagggtctaagggac

SEQ ID NO: 91060 - DNA, 201 bp, Homo sapiens
cagcagaagcagcagctgccacagacacccccttcctgtttgaagactgagataatgtctcccctgtaccaagatgaagcccctaagggaacagaggcttyttcggggacagaagctgccactggccttgaaggggaagaaaaggatggcatctcagacagtgatagcagtactagcagtgaggaagaagagagctgggaa

SEQ ID NO: 91061 - DNA, 201 bp, Homo sapiens
ccgttaaagggaagttcggtgttggagcgatactcaatgtagtcagtctacacctggacgtgtgggccacttaagccctccccacccccatcctattcctraataaaaccaggataatggaatatgtaccaattcatagacagaaatgacaaacgatccacaggtcccggtagtaaaacatttactagagagcaagcagaa

SEQ ID NO: 91062 - DNA, 201 bp, Homo sapiens
atggctgcaggtagctgccaagtttatgcctgtatccagccttattgtgggagtggacctggttccaatcaagcctctccccaatgtggtgactctccagsaggacatcacaacagaacgttgtaggcaggccctgaggaaggagctgaagacctggaaggttgatgttgtgctcaatgatggggcccccaacgttggggc

SEQ ID NO: 91063 - DNA, 201 bp, Homo sapiens
aacagaggcttcttcggggacagaagctgccactggccttgaaggggaagaaaaggatggcatctcagacagtgatagcagtactagcagtgaggaagaaragagctgggaacccctccgtggtaagaagcgaagccgtgggcctaagtcagatgatgacgggtttgagatagtgcctattgaggacccagcgaaacatcg

SEQ ID NO: 91064 - DNA, 201 bp, Homo sapiens
gttgcgtgagcagagaaagcagcgggagcgtgtggagctgaagatggatctgcctggggtttccattgcagacgagggggagactggcatgttctccttgwgcaccatccggggtcaccagttattagaggaagtaacacaaggggatatgagtgcagcagacacatttctgtccgatctgccaagggatgatatctatgt

SEQ ID NO: 91065 - DNA, 201 bp, Homo sapiens
aaaatcatcaaaatcatttcagcaaaagacttttctatcattggggcaagttaaaaaaaatacaatgagatagaagacactttaaaagctgttgttgggtytcttgtttaattttaaatttagcaataccatctcaaacctggagcaatcctggaacagttaccaggatcaccttttcccttcaatccttgtggcttctgg

SEQ ID NO: 91066 - DNA, 201 bp, Homo sapiens
ccaaggccagcgaaatcatggtagatgatgaagagttggcacagcatccagctaccactgaggacatacgggtgtgctgtcaggacatcagagtgttgggrcgcaaggagctcaggtcgctactaaactggagaacaaaacttcggcgatatgtggccaagaagctgaaagaacaagcaaaggcactggacatcagcctca

SEQ ID NO: 91067 - DNA, 201 bp, Homo sapiens
ctaagggaacagaggcttcttcggggacagaagctgccactggccttgaaggggaagaaaaggatggcatctcagacagtgatagcagtactagcagtgargaagaagagagctgggaacccctccgtggtaagaagcgaagccgtgggcctaagtcagatgatgacgggtttgagatagtgcctattgaggacccagcga

SEQ ID NO: 91068 - DNA, 201 bp, Homo sapiens
aggctaagaccgttactgaattggttactaagaagaagccaaaggctgaaggctatgctgagggtgacctcactctctatcaccgtacctcagtcactgayttcctccgagctgccaaccctgttgacttcctctccaaggccagcgaaatcatggtagatgatgaagagttggcacagcatccagctaccactgaggaca

SEQ ID NO: 91069 - DNA, 201 bp, Homo sapiens
gttaccgttcccgatctgctttcaagctgatccagctcaatcgccgctttcagttcctgcagaaagcccgagccttgctggacctgtgtgctgcgccaggrggatggctgcaggtagctgccaagtttatgcctgtatccagccttattgtgggagtggacctggttccaatcaagcctctccccaatgtggtgactctcc

SEQ ID NO: 91070 - DNA, 201 bp, Homo sapiens
atatttcttttcctttttataaacgataaacaaaaatcatcaaaatcatttcagcaaaagacttttctatcattggggcaagttaaaaaaaatacaatgaratagaagacactttaaaagctgttgttgggtttcttgtttaattttaaatttagcaataccatctcaaacctggagcaatcctggaacagttaccaggat

SEQ ID NO: 91071 - DNA, 201 bp, Homo sapiens; identical to SEQ ID NO: 91059

SEQ ID NO: 91072 - DNA, 201 bp, Homo sapiens; identical to SEQ ID NO: 91060

SEQ ID NO: 91073 - DNA, 201 bp, Homo sapiens
ccgttaaagggaagttcggtgttggagcgatactcaatgtagtcagtctacacctggacgtgtgggccacttaagccctccccacccccatcctattcctraataaaaccaggataatggaagagttgtcttttctgacagttttaataagcacttccctatctgtccctacactgtgtgcggcactattcttaatatgta

SEQ ID NO: 91074 - DNA, 201 bp, Homo sapiens; identical to SEQ ID NO: 91062

SEQ ID NO: 91075 - DNA, 201 bp, Homo sapiens; identical to SEQ ID NO: 91063

SEQ ID NO: 91076 - DNA, 201 bp, Homo sapiens; identical to SEQ ID NO: 91064

SEQ ID NO: 91077 - DNA, 201 bp, Homo sapiens; identical to SEQ ID NO: 91065

SEQ ID NO: 91078 - DNA, 201 bp, Homo sapiens
aactaccaaattgctccccaacagttagctcaatggattgaatttgcagaagccaactcctaaaatggggactgcctggccatacaactaagaaaaagaastcaatttatagatgcttataaggtgacaccttagtaaaaaatataagctacatacaatataaacctagagtgagttttgtgccctagaagaccctttatc

SEQ ID NO: 91079 - DNA, 201 bp, Homo sapiens; identical to SEQ ID NO: 91066

SEQ ID NO: 91080 - DNA, 148 bp, Homo sapiens
gtgacaccttagtaaaaaatataagctacatacaatataaacctagagtgagttttgtgccctagaagaccctttatcccaagataacctcaacttacccrcatgacaactcacctagagccaaaagaagcttcccagctctcactgc

SEQ ID NO: 91081 - DNA, 201 bp, Homo sapiens; identical to SEQ ID NO: 91067

SEQ ID NO: 91082 - DNA, 201 bp, Homo sapiens; identical to SEQ ID NO: 91069

SEQ ID NO: 91083 - DNA, 201 bp, Homo sapiens; identical to SEQ ID NO: 91068

SEQ ID NO: 91084 - DNA, 201 bp, Homo sapiens; identical to SEQ ID NO: 91070

SEQ ID NO: 91085 - DNA, 201 bp, Homo sapiens; identical to SEQ ID NO: 91059

SEQ ID NO: 91086 - DNA, 201 bp, Homo sapiens; identical to SEQ ID NO: 91060

SEQ ID NO: 91087 - DNA, 201 bp, Homo sapiens; identical to SEQ ID NO: 91073

SEQ ID NO: 91088 - DNA, 201 bp, Homo sapiens; identical to SEQ ID NO: 91062

SEQ ID NO: 91089 - DNA, 201 bp, Homo sapiens; identical to SEQ ID NO: 91063

SEQ ID NO: 91090 - DNA, 201 bp, Homo sapiens; identical to SEQ ID NO: 91064

SEQ ID NO: 91091 - DNA, 201 bp, Homo sapiens; identical to SEQ ID NO: 91065

SEQ ID NO: 91092 - DNA, 201 bp, Homo sapiens; identical to SEQ ID NO: 91066

SEQ ID NO: 91093 - DNA, 201 bp, Homo sapiens; identical to SEQ ID NO: 91067

SEQ ID NO: 91094 - DNA, 201 bp, Homo sapiens; identical to SEQ ID NO: 91068

SEQ ID NO: 91095 - DNA, 201 bp, Homo sapiens; identical to SEQ ID NO: 91069

SEQ ID NO: 91096 - DNA, 201 bp, Homo sapiens; identical to SEQ ID NO: 91070

SEQ ID NO: 91097 - DNA, 201 bp, Homo sapiens
gagggaaaggaaaaaagctgaacattggtggaggaggcctaggctacagggagcggcctggcctgggctctgagaacatggatcgaggaaataacaatgtratgagcaattatgaggcctacaagccttccacaggagctatgggagatcgactaacggcaatgaaagcagctttccagtcacagtacaagagtcactttg

SEQ ID NO: 91098 - DNA, 201 bp, Homo sapiens
gataaagggtcttctagggcacaaaactcactctaggtttatattgtatgtagcttatattttttactaaggtgtcaccttataagcatctataaattgasttctttttcttagttgtatggccaggcagtccccattttaggagttggcttctgcaaattcaatccattgagctaactgttggggagcaatttggtagtt

SEQ ID NO: 91099 - DNA, 201 bp, Homo sapiens
catcagaaggaattttcggatgttttcttgggaagctgttttggtccttggaagcagtgagagctgggaagcttcttttggctctaggtgagttgtcatgygggtaagttgaggttatcttgggataaagggtcttctagggcacaaaactcactctaggtttatattgtatgtagcttatattttttactaaggtgtcac

SEQ ID NO: 91100 - DNA, 201 bp, Homo sapiens
tacatattaagaatagtgccgcacacagtgtagggacagatagggaagtgcttattaaaactgtcagaaaagacaactcttccattatcctggttttattyaggaataggatgggggtggggagggcttaagtggcccacacgtccaggtgtagactgactacattgagtatcgctccaacaccgaacttccctttaacgg

SEQ ID NO: 91101 - DNA, 201 bp, Homo sapiens
tatatggaggagggagtatgtgggagcaggccaaggcccttcaggagggggcagagattgttgtgtgtaccccaggtcgactgatagatcatgtgaaaaaraaagctaccaatcttcaaagagtctcttaccttgtgtttgatgaagcagatcgaatgtttgacatgggatttgagtaccaagttcgatccatagcaagtc

SEQ ID NO: 91102 - DNA, 201 bp, Homo sapiens
atcctggtaactgttccaggattgctccaggtttgagatggtattgctaaatttaaaattaaacaagaaacccaacaacagcttttaaagtgtcttctatytcattgtattttttttaacttgccccaatgatagaaaagtcttttgctgaaatgattttgatgatttttgtttatcgtttataaaaaggaaaagaaatat

SEQ ID NO: 91103 - DNA, 201 bp, Homo sapiens
ccagaagccacaaggattgaagggaaaaggtgatcctggtaactgttccaggattgctccaggtttgagatggtattgctaaatttaaaattaaacaagaracccaacaacagcttttaaagtgtcttctatctcattgtattttttttaacttgccccaatgatagaaaagtcttttgctgaaatgattttgatgatttt

SEQ ID NO: 91104 - DNA, 201 bp, Homo sapiens; identical to SEQ ID NO: 91097

SEQ ID NO: 91105 - DNA, 201 bp, Homo sapiens; identical to SEQ ID NO: 91098

SEQ ID NO: 91106 - DNA, 201 bp, Homo sapiens; identical to SEQ ID NO: 91099

SEQ ID NO: 91107 - DNA, 201 bp, Homo sapiens; identical to SEQ ID NO: 91100

SEQ ID NO: 91108 - DNA, 201 bp, Homo sapiens; identical to SEQ ID NO: 91101

SEQ ID NO: 91109 - DNA, 201 bp, Homo sapiens; identical to SEQ ID NO: 91102

SEQ ID NO: 91110 - DNA, 201 bp, Homo sapiens; identical to SEQ ID NO: 91103

SEQ ID NO: 91111 - DNA, 201 bp, Homo sapiens; identical to SEQ ID NO: 91097

SEQ ID NO: 91112 - DNA, 201 bp, Homo sapiens; identical to SEQ ID NO: 91098

SEQ ID NO: 91113 - DNA, 201 bp, Homo sapiens; identical to SEQ ID NO: 91099

SEQ ID NO: 91114 - DNA, 201 bp, Homo sapiens; identical to SEQ ID NO: 91100

SEQ ID NO: 91115 - DNA, 201 bp, Homo sapiens; identical to SEQ ID NO: 91101

SEQ ID NO: 91116 - DNA, 201 bp, Homo sapiens; identical to SEQ ID NO: 91102

SEQ ID NO: 91117 - DNA, 201 bp, Homo sapiens; identical to SEQ ID NO: 91103

SEQ ID NO: 91118 - DNA, 201 bp, Homo sapiens; identical to SEQ ID NO: 91097

SEQ ID NO: 91119 - DNA, 201 bp, Homo sapiens; identical to SEQ ID NO: 91098

SEQ ID NO: 91120 - DNA, 201 bp, Homo sapiens; identical to SEQ ID NO: 91099

SEQ ID NO: 91121 - DNA, 201 bp, Homo sapiens; identical to SEQ ID NO: 91100

SEQ ID NO: 91122 - DNA, 201 bp, Homo sapiens; identical to SEQ ID NO: 91101

SEQ ID NO: 91123 - DNA, 201 bp, Homo sapiens; identical to SEQ ID NO: 91102

SEQ ID NO: 91124 - DNA, 201 bp, Homo sapiens; identical to SEQ ID NO: 91103

SEQ ID NO: 91125 - DNA, 201 bp, Homo sapiens
tagccggaatgctacagagagaaatggaaccttagatttgcaacaaaagtctgtaaactggtctgtttgccaaagtgaacactggatgactaaggagctgmagaaggcccccagaagcggatttgtggtgggttattttattttgcctgtggccaatcttctgtgaaatacaatgtgctgttggtgcaacagatgattcaa

SEQ ID NO: 91126 - DNA, 201 bp, Homo sapiens
gaatgctacagagagaaatggaaccttagatttgcaacaaaagtctgtaaactggtctgtttgccaaagtgaacactggatgactaaggagctgaagaagrcccccagaagcggatttgtggtgggttattttattttgcctgtggccaatcttctgtgaaatacaatgtgctgttggtgcaacagatgattcaataaatg

SEQ ID NO: 91127 - DNA, 201 bp, Homo sapiens
atgctacagagagaaatggaaccttagatttgcaacaaaagtctgtaaactggtctgtttgccaaagtgaacactggatgactaaggagctgaagaaggcscccagaagcggatttgtggtgggttattttattttgcctgtggccaatcttctgtgaaatacaatgtgctgttggtgcaacagatgattcaataaatgtc

SEQ ID NO: 91128 - DNA, 138 bp, Homo sapiens
ctggatgactaaggagctgaagaaggcccccagaagcggatttgtggtgggttattttattttgcctgtggccaatcttctgtgaaatacaatgtgctgtyggtgcaacagatgattcaataaatgtctacagcagac

SEQ ID NO: 91129 - DNA, 201 bp, Homo sapiens
tgctacagagagaaatggaaccttagatttgcaacaaaagtctgtaaactggtctgtttgccaaagtgaacactggatgactaaggagctgaagaaggccmccagaagcggatttgtggtgggttattttattttgcctgtggccaatcttctgtgaaatacaatgtgctgttggtgcaacagatgattcaataaatgtct

SEQ ID NO: 91130 - DNA, 163 bp, Homo sapiens
actggtctgtttgccaaagtgaacactggatgactaaggagctgaagaaggcccccagaagcggatttgtggtgggttattttattttgcctgtggccaaycttctgtgaaatacaatgtgctgttggtgcaacagatgattcaataaatgtctacagcagac

SEQ ID NO: 91131 - DNA, 201 bp, Homo sapiens
gactggaagcggccttcccaggcggaagagcaggccctctccatggacttcaagacgctgacggagggagatagccccggctcccagtgatgcgcccggcyggccctgggggttcgcggggtgtcttcttgcctgcccctgctgaggcgtcttcaggactgcaggctccggagagtggctctggcagcaggcgggcgcgtg

SEQ ID NO: 91132 - DNA, 201 bp, Homo sapiens
ttctctccctgttttcctttctttttgggtgtttgaggagcatggcttagcttgagacacacacagacactgtgtacttcagtgaagggcttaatatacartttccaaacctgacgactcttcttcttgtaatggctgcccttttcctacctgaggccgtcttagagaaaggggccagtctcctctaatgctcagatttcc

SEQ ID NO: 91133 - DNA, 201 bp, Homo sapiens
ggtgggcgcctgtagtcccagctacttgggaggctgaggcaggagaatggtgtgaacccgggagatggcgcttgcagtgagctgagattgcactccagccygggcgacaggctcaaaaaagaaaaaaaaaagaacaccgatcatgtgcttcttggatctggtgactgttctctccctgttttcctttctttttgggtgttt

SEQ ID NO: 91134 - DNA, 201 bp, Homo sapiens
cggccggccctgggggttcgcggggtgtcttcttgcctgcccctgctgaggcgtcttcaggactgcaggctccggagagtggctctggcagcaggcgggcrcgtgggtgcagctgcatctgtttgagtgctgctttctggggtcaggtctccgcctcctctgcttctcctttctccgctgctatagaccagttcattgtgt

SEQ ID NO: 91135 - DNA, 201 bp, Homo sapiens
ggctgtaccgaggcggcattgcctgggagagcgacctgcagttcaacgcgcaccccctctgcatggtcataggcctgatcttcctgcagggaaatgccctrctggtttaccgtgtcttcaggaacgaagctaaacgcaccaccaaggtcctgcacgggctgctgcacatctttgcgctcgtcatcgccctggttggcttgg

SEQ ID NO: 91136 - DNA, 201 bp, Homo sapiens; identical to SEQ ID NO: 91125

SEQ ID NO: 91137 - DNA, 201 bp, Homo sapiens; identical to SEQ ID NO: 91126

SEQ ID NO: 91138 - DNA, 201 bp, Homo sapiens; identical to SEQ ID NO: 91127

SEQ ID NO: 91139 - DNA, 138 bp, Homo sapiens; identical to SEQ ID NO: 91128

SEQ ID NO: 91140 - DNA, 201 bp, Homo sapiens; identical to SEQ ID NO: 91129

SEQ ID NO: 91141 - DNA, 163 bp, Homo sapiens; identical to SEQ ID NO: 91130

SEQ ID NO: 91142 - DNA, 201 bp, Homo sapiens; identical to SEQ ID NO: 91131

SEQ ID NO: 91143 - DNA, 201 bp, Homo sapiens; identical to SEQ ID NO: 91132

SEQ ID NO: 91144 - DNA, 201 bp, Homo sapiens; identical to SEQ ID NO: 91133

SEQ ID NO: 91145 - DNA, 201 bp, Homo sapiens; identical to SEQ ID NO: 91134

SEQ ID NO: 91146 - DNA, 201 bp, Homo sapiens; identical to SEQ ID NO: 91135

SEQ ID NO: 91147 - DNA, 201 bp, Homo sapiens; identical to SEQ ID NO: 91125

SEQ ID NO: 91148 - DNA, 201 bp, Homo sapiens; identical to SEQ ID NO: 91126

SEQ ID NO: 91149 - DNA, 201 bp, Homo sapiens; identical to SEQ ID NO: 91127

SEQ ID NO: 91150 - DNA, 138 bp, Homo sapiens; identical to SEQ ID NO: 91128

SEQ ID NO: 91151 - DNA, 201 bp, Homo sapiens; identical to SEQ ID NO: 91129

SEQ ID NO: 91152 - DNA, 163 bp, Homo sapiens; identical to SEQ ID NO: 91130

SEQ ID NO: 91153 - DNA, 201 bp, Homo sapiens; identical to SEQ ID NO: 91131

SEQ ID NO: 91154 - DNA, 201 bp, Homo sapiens; identical to SEQ ID NO: 91132

SEQ ID NO: 91155 - DNA, 201 bp, Homo sapiens; identical to SEQ ID NO: 91133

SEQ ID NO: 91156 - DNA, 201 bp, Homo sapiens; identical to SEQ ID NO: 91134

SEQ ID NO: 91157 - DNA, 201 bp, Homo sapiens; identical to SEQ ID NO: 91135

SEQ ID NO: 91158 - DNA, 116 bp, Homo sapiens
atgactaaggagctgmagaaggcccccagaagcggatttgtgaccatcccttctgagagaggaggcagcgtggtggagggaagagctgtcagtgtggctgattcagaggcctacct

SEQ ID NO: 91159 - DNA, 122 bp, Homo sapiens
atgactaaggagctgaagaagrcccccagaagcggatttgtgaccatcccttctgagagaggaggcagcgtggtggagggaagagctgtcagtgtggctgattcagaggcctacctgtgcct

SEQ ID NO: 91160 - DNA, 124 bp, Homo sapiens
atgactaaggagctgaagaaggcscccagaagcggatttgtgaccatcccttctgagagaggaggcagcgtggtggagggaagagctgtcagtgtggctgattcagaggcctacctgtgcctct

SEQ ID NO: 91161 - DNA, 125 bp, Homo sapiens
atgactaaggagctgaagaaggccmccagaagcggatttgtgaccatcccttctgagagaggaggcagcgtggtggagggaagagctgtcagtgtggctgattcagaggcctacctgtgcctctg

SEQ ID NO: 91162 - DNA, 201 bp, Homo sapiens
cgcctggcgcgccgcactcttctgggtgccccgcggccgccgcgcacagtcagcgctggcccagctgcgtggcattctggagggggagctggaaggcatcygcggagctggcacttggaagagtgagcgggtcatcacgtcccgtcaggggccgcacatccgcgtggacggcgtctccggaggaatccttaacttctgtgc

SEQ ID NO: 91163 - DNA, 201 bp, Homo sapiens
ggctgccaagacccagaggttccgtagtaagatggaagctgctggcttcactatctcgggagccagtcaccccatctgccctgtgatgctgggtgatgccyggctggcctctcgcatggcggatgacatgctgaagagaggcatctttgtcatcgggttcagctaccccgtggtccccaagggcaaggcccggatccgggt

SEQ ID NO: 91164 - DNA, 201 bp, Homo sapiens
tcatcaactccaccctggggaaggccctgggtggagcatcagggggctacacgacagggcctgggcccctggtgtccctgctgcggcagcgcgcccggccrtacctcttctccaacagtctgccacctgctgtcgttggctgcgcctccaaggccctagatctgctgatggggagtaacaccattgtccagtctatggctg

SEQ ID NO: 91165 - DNA, 201 bp, Homo sapiens
cggggcactgccctgagctctgggtaaggacgagaagagccaaggtccgcctgctgccacagggtcaaaggaggttttcgatcagcccagaccagaggctytgagccctgaaccaaagtcccagagctgggctgggacgtgacctgtgctgagggctgtgagaatgtgaaacaacagtgtgaaaattggctgtgacactct

SEQ ID NO: 91166 - DNA, 201 bp, Homo sapiens
atccttaacttctgtgccaacaactacctgggcctgagcagccaccctgaggtgatccaggcaggtctgcaggctctggaggagtttggagctggcctcarctctgtccgctttatctgtggaacccagagcatccacaagaatctagaagcaaaaatagcccgcttccaccagcgggaggatgccatcctctatcccagc

SEQ ID NO: 91167 - DNA, 201 bp, Homo sapiens
aggacgcagtcctgtcggacgagctgaaccatgcctccatcatcgacggcatccggctgtgcaaggcccacaagtaccgctatcgccacctggacatggcygacctagaagccaagctgcaggaggcccagaagcatcggctgcgcctggtggccactgatggggccttttccatggatggcgacatcgcacccctgcagg

SEQ ID NO: 91168 - DNA, 201 bp, Homo sapiens
agacattgaccgctgcgtggaggccttcgtggaagtggggcgactgcacggggcactgccctgagctctgggtaaggacgagaagagccaaggtccgcctrctgccacagggtcaaaggaggttttcgatcagcccagaccagaggctctgagccctgaaccaaagtcccagagctgggctgggacgtgacctgtgctgag

SEQ ID NO: 91169 - DNA, 201 bp, Homo sapiens
ggtcatcacgtcccgtcaggggccgcacatccgcgtggacggcgtctccggaggaatccttaacttctgtgccaacaactacctgggcctgagcagccacyctgaggtgatccaggcaggtctgcaggctctggaggagtttggagctggcctcagctctgtccgctttatctgtggaacccagagcatccacaagaatct

SEQ ID NO: 91170 - DNA, 201 bp, Homo sapiens
cgggctgtggaccgggcacgggcctggtgcgagatggtcggcatccagtacttcagattgaacccccagctggggacggacatcatgctggatgaggtcastgacacagtgctggtcaacgccctctgggagaccgaggtctacatctatgagcaccgcgaggagttccagaagctcatccagctgctgctctcaccctga

SEQ ID NO: 91171 - DNA, 201 bp, Homo sapiens
gctggtgtggcgggcggcccgaagcagcggggcagctcctacttacttccgacccaatgggcgcttcctggacggtgggctgctggccaacaaccccacgytggatgccatgaccgagatccatgagtacaatcaggacctgatccgcaagggtcaggccaacaaggtgaagaaactctccatcgttgtctccctggggac

SEQ ID NO: 91172 - DNA, 201 bp, Homo sapiens
ggccgactacacctcgagtgaccgagttcgggaggaagggcagctgattctgttccagaacactcccaaccgcacctgggactgcgtcctggtcaaccccrggaactcacagagtggattccgactcttccagctggagttggaggctgacgccctagtgaatttccatcagtattcttcccagctgctacccttctatga

SEQ ID NO: 91173 - DNA, 201 bp, Homo sapiens
gcttcgactgtgccatagtgctgctgacccacggggccaacgcggatgcccgcggagagcacggcaacaccccgctgcacctggccatgtcgaaagacaaygtggagatgatcaaggccctcatcgtgttcggagcagaagtggacaccccgaatgactttggggagactcctacattcctagcctccaaaatcggcagac

SEQ ID NO: 91174 - DNA, 201 bp, Homo sapiens
acggagccagccccctccactgggccaagaacgcagagatggcccgcatgctgctgaaacggggctgcaacgtgaacagcaccagctccgcggggaacacrgccctgcacgtggcggtgatgcgcaaccgcttcgactgtgccatagtgctgctgacccacggggccaacgcggatgcccgcggagagcacggcaacaccc

SEQ ID NO: 91175 - DNA, 201 bp, Homo sapiens
ctgccccgcagaagatgcagttctttggccgcctggtcaataccttcagtggcgtcaccaacttgttctctaacccattccgggtgaaggaggtggctgtrgccgactacacctcgagtgaccgagttcgggaggaagggcagctgattctgttccagaacactcccaaccgcacctgggactgcgtcctggtcaacccca

SEQ ID NO: 91176 - DNA, 201 bp, Homo sapiens
cgtgaacagcaccagctccgcggggaacacggccctgcacgtggcggtgatgcgcaaccgcttcgactgtgccatagtgctgctgacccacggggccaacrcggatgcccgcggagagcacggcaacaccccgctgcacctggccatgtcgaaagacaacgtggagatgatcaaggccctcatcgtgttcggagcagaagt

SEQ ID NO: 91177 - DNA, 201 bp, Homo sapiens; identical to SEQ ID NO: 91170

SEQ ID NO: 91178 - DNA, 201 bp, Homo sapiens; identical to SEQ ID NO: 91171

SEQ ID NO: 91179 - DNA, 201 bp, Homo sapiens; identical to SEQ ID NO: 91172

SEQ ID NO: 91180 - DNA, 201 bp, Homo sapiens; identical to SEQ ID NO: 91173

SEQ ID NO: 91181 - DNA, 201 bp, Homo sapiens; identical to SEQ ID NO: 91174

SEQ ID NO: 91182 - DNA, 201 bp, Homo sapiens; identical to SEQ ID NO: 91175

SEQ ID NO: 91183 - DNA, 201 bp, Homo sapiens; identical to SEQ ID NO: 91176

SEQ ID NO: 91184 - DNA, 201 bp, Homo sapiens
tctggggagcgaccgcaggccaaccagaagcgaatcaccacaccatacatgaccaagtacgagcgagcccgcgtgctgggcacccgagcgctccagattgygatgtgtgcccctgtgatggtggagctggagggggagacagatcctctgctcattgccatgaaggaactcaaggcccgaaagatccccatcatcattcgc

SEQ ID NO: 91185 - DNA, 201 bp, Homo sapiens
ctgcaggggcttctcccttctcaggagtatcacagagcaggtctcatcaagccacccattgtttcctaaggacctgcttcgagcctcttatcgtgggctcrgatcccctttcaggagcagtgccccagcaggaagcgtgggggtgtgctgatctcccaccctccccaggcagagccctgctgggcaagtcagcagctggag

SEQ ID NO: 91186 - DNA, 198 bp, Homo sapiens
cctcctatttggggctggtgatcccctgaggccttggggacatggtgctggggtggtggtgctcctgggttccaggtgttacattaagtcagagctggagytcccccttcctctgcctgaggttctaatgggtcctcttcctttctccaccctgcttacccaacctgaggtaagaccagtcacactggctcctccctc

SEQ ID NO: 91187 - DNA, 201 bp, Homo sapiens
tctggggagcgaccgcaggccaaccagaagcgaatcaccacaccatacatgaccaagtacgagcgagcccgcgtgctgggcacccgagcgctccagattgygatgtgtgcccctgtgatggtggagctggagggggagacagatcctctgctcattgccatgaaggaactcaaccccaagaggctgctcctaagacttctc

SEQ ID NO: 91188 - DNA, 201 bp, Homo sapiens
tctcaagggcctgtcagcagaccggtggaattactggcactttgaacaacacgtaaagccgaacatctaccccaaagacccagatattgacacggacccastttttctccttggagattcacaacctgtcaagttttattatctctctattcagtacggcaagaagaaaatcaaatacatcaactatgaagagcagcacct

SEQ ID NO: 91189 - DNA, 201 bp, Homo sapiens
gctcatttttgcagcatgacgcggggcacctttccatatttaggaagtccaagtggaaccacgtggtgcataaatttgtgatgtgccatctcaagggcctrtcagcagaccggtggaattactggcactttgaacaacacgtaaagccgaacatctaccccaaagacccagatattgacacggacccactttttctccttg

SEQ ID NO: 91190 - DNA, 158 bp, Homo sapiens
atgaggtctgtgctgattcccagactgagcacaggacaagataagaaaaggaacggayctgtggataagcatgtctcttcaaagcctctgacaggtatctctgatttacaggatgtcttcagggccatgcatccagagcttgacattgtgcagttgta

SEQ ID NO: 91191 - DNA, 201 bp, Homo sapiens
cacggacccactttttctccttggagattcacaacctgtcaagttttattatctctctattcagtacggcaagaagaaaatcaaatacatcaactatgaaragcagcacctgtacttctacaaagttacatctgagcccctggaacttcaggttctccagggagcgggtattgatctcttatgccccagctatatactcac

SEQ ID NO: 91192 - DNA, 201 bp, Homo sapiens
tgtgctgattcccagactgagcacaggacaagataagaaaaggaacggatctgtggataagcatgtctcttcaaagcctctgacaggtatctctgatttayaggatgtcttcagggccatgcatccagagcttgacattgtgcagttgtacctgaagccactgctcattggagaacttgccccaggagagcccagccagga

SEQ ID NO: 91193 - DNA, 201 bp, Homo sapiens
gccctgccgtcaccccagcacatcctgggcctccctgtcggccagcacatctacctctcggctcgaattgatggaaacctggtcgtccggccctatacacmcatctccagcgatgatgacaagggcttcgtggacctggtcatcaaggtttacttcaaggacacccatcccaagtttcccgctggagggaagatgtctcag

SEQ ID NO: 91194 - DNA, 201 bp, Homo sapiens
cctccctgtcggccagcacatctacctctcggctcgaattgatggaaacctggtcgtccggccctatacacccatctccagcgatgatgacaagggcttcrtggacctggtcatcaaggtttacttcaaggacacccatcccaagtttcccgctggagggaagatgtctcagtacctggagagcatgcagattggagacac

SEQ ID NO: 91195 - DNA, 201 bp, Homo sapiens
ggttcctgtacagtctgctcatgaagctgttccagcgctccacgccagccatcaccctcgagagcccggacatcaagtacccgctgcggctcatcgaccgrgagatcatcagccatgacacccggcgcttccgctttgccctgccgtcaccccagcacatcctgggcctccctgtcggccagcacatctacctctcggctc

SEQ ID NO: 91196 - DNA, 201 bp, Homo sapiens
gacacccatcccaagtttcccgctggagggaagatgtctcagtacctggagagcatgcagattggagacaccattgagttccggggccccagtgggctgcyggtctaccagggcaaagggaagttcgccatccgacctgacaaaaagtccaaccctatcatcaggacagtgaagtctgtgggcatgatcgcgggagggaca

SEQ ID NO: 91197 - DNA, 201 bp, Homo sapiens
ttctgagggccgggcacggtcacacggccacccgccccgcgcaccccacgccctgttcacgctcacccagtcacctccccacatcgcacactggggccccrggttcagcctggcctgcccgtgccctggtgaatcacctggctgagcagttcccctggagccccttcgggagcagggctgtgtcccagatgggccacggct

SEQ ID NO: 91198 - DNA, 201 bp, Homo sapiens
cagtgggctgctggtctaccagggcaaagggaagttcgccatccgacctgacaaaaagtccaaccctatcatcaggacagtgaagtctgtgggcatgatcrcgggagggacaggcatcaccccgatgctgcaggtgatccgcgccatcatgaaggaccctgatgaccacactgtgtgccacctgctctttgccaaccagac

SEQ ID NO: 91199 - DNA, 201 bp, Homo sapiens
agtgggctgctggtctaccagggcaaagggaagttcgccatccgacctgacaaaaagtccaaccctatcatcaggacagtgaagtctgtgggcatgatcgygggagggacaggcatcaccccgatgctgcaggtgatccgcgccatcatgaaggaccctgatgaccacactgtgtgccacctgctctttgccaaccagacc

SEQ ID NO: 91200 - DNA, 201 bp, Homo sapiens
gacagtgaagtctgtgggcatgatcgcgggagggacaggcatcaccccgatgctgcaggtgatccgcgccatcatgaaggaccctgatgaccacactgtgygccacctgctctttgccaaccagaccgagaaggacatcctgctgcgacctgagctggaggaactcaggaacaaacattctgcacgcttcaagctctggta

SEQ ID NO: 91201 - DNA, 201 bp, Homo sapiens
acagtgaagtctgtgggcatgatcgcgggagggacaggcatcaccccgatgctgcaggtgatccgcgccatcatgaaggaccctgatgaccacactgtgtrccacctgctctttgccaaccagaccgagaaggacatcctgctgcgacctgagctggaggaactcaggaacaaacattctgcacgcttcaagctctggtac

SEQ ID NO: 91202 - DNA, 201 bp, Homo sapiens
gacatcaagtacccgctgcggctcatcgaccgggagatcatcagccatgacacccggcgcttccgctttgccctgccgtcaccccagcacatcctgggccyccctgtcggccagcacatctacctctcggctcgaattgatggaaacctggtcgtccggccctatacacccatctccagcgatgatgacaagggcttcgtg

SEQ ID NO: 91203 - DNA, 201 bp, Homo sapiens
ctgctctttgccaaccagaccgagaaggacatcctgctgcgacctgagctggaggaactcaggaacaaacattctgcacgcttcaagctctggtacacgckggacagagcccctgaagcctgggactacggccagggcttcgtgaatgaggagatgatccgggaccaccttccacccccagaggaggagccgctggtgctg

SEQ ID NO: 91204 - DNA, 201 bp, Homo sapiens
acgtgggccaccccacggagcgctgcttcgtcttctgagggccgggcacggtcacacggccacccgccccgcgcaccccacgccctgttcacgctcacccrgtcacctccccacatcgcacactggggccccgggttcagcctggcctgcccgtgccctggtgaatcacctggctgagcagttcccctggagccccttcgg

SEQ ID NO: 91205 - DNA, 201 bp, Homo sapiens
cccgctgcggctcatcgaccgggagatcatcagccatgacacccggcgcttccgctttgccctgccgtcaccccagcacatcctgggcctccctgtcggcyagcacatctacctctcggctcgaattgatggaaacctggtcgtccggccctatacacccatctccagcgatgatgacaagggcttcgtggacctggtcat

SEQ ID NO: 91206 - DNA, 201 bp, Homo sapiens
tggtgctcttcccagtctggttcctgtacagtctgctcatgaagctgttccagcgctccacgccagccatcaccctcgagagcccggacatcaagtacccrctgcggctcatcgaccgggagatcatcagccatgacacccggcgcttccgctttgccctgccgtcaccccagcacatcctgggcctccctgtcggccagc

SEQ ID NO: 91207 - DNA, 201 bp, Homo sapiens
tacacccatctccagcgatgatgacaagggcttcgtggacctggtcatcaaggtttacttcaaggacacccatcccaagtttcccgctggagggaagatgyctcagtacctggagagcatgcagattggagacaccattgagttccggggccccagtgggctgctggtctaccagggcaaagggaagttcgccatccgacc

SEQ ID NO: 91208 - DNA, 201 bp, Homo sapiens
ggaggagccgctggtgctgatgtgtggccccccacccatgatccagtacgcctgccttcccaacctggaccacgtgggccaccccacggagcgctgcttcrtcttctgagggccgggcacggtcacacggccacccgccccgcgcaccccacgccctgttcacgctcacccagtcacctccccacatcgcacactggggcc

SEQ ID NO: 91209 - DNA, 201 bp, Homo sapiens
ggggccaccatccctgatggcagaactcccacaaccacatgtatttattcctctgtcctaaaccgtcccctccttccctcacccccagcacagggggattytgagcagtgcctcttgtctgagggacatatcagtgacctcgacgttgcctttagactacagttgtgttagcctcttgcgtattggctttttcagagtcat

SEQ ID NO: 91210 - DNA, 201 bp, Homo sapiens
acccccactcccgcctcagggccaggcccaggcctcaccacctgacgctgcatgagacattgacaccagaaagccctcttgggggcactgctccctacccmagggccctggccagccgggagcttggctctcctctggctagagtgggaagagggggctggccatggggccctcccagaacctcagcatttccttccagcc

SEQ ID NO: 91211 - DNA, 201 bp, Homo sapiens
gatgtctcagtacctggagagcatgcagattggagacaccattgagttccggggccccagtgggctgctggtctaccagggcaaagggaagttcgccatcygacctgacaaaaagtccaaccctatcatcaggacagtgaagtctgtgggcatgatcgcgggagggacaggcatcaccccgatgctgcaggtgatccgcgc

SEQ ID NO: 91212 - DNA, 201 bp, Homo sapiens
gggagggacaggcatcaccccgatgctgcaggtgatccgcgccatcatgaaggaccctgatgaccacactgtgtgccacctgctctttgccaaccagaccragaaggacatcctgctgcgacctgagctggaggaactcaggaacaaacattctgcacgcttcaagctctggtacacgctggacagagcccctgaagcctg

SEQ ID NO: 91213 - DNA, 201 bp, Homo sapiens
cacgtgggccaccccacggagcgctgcttcgtcttctgagggccgggcacggtcacacggccacccgccccgcgcaccccacgccctgttcacgctcaccyagtcacctccccacatcgcacactggggccccgggttcagcctggcctgcccgtgccctggtgaatcacctggctgagcagttcccctggagccccttcg

SEQ ID NO: 91214 - DNA, 201 bp, Homo sapiens
ctatacacccatctccagcgatgatgacaagggcttcgtggacctggtcatcaaggtttacttcaaggacacccatcccaagtttcccgctggagggaagrtgtctcagtacctggagagcatgcagattggagacaccattgagttccggggccccagtgggctgctggtctaccagggcaaagggaagttcgccatccg

SEQ ID NO: 91215 - DNA, 201 bp, Homo sapiens
cgaattgatggaaacctggtcgtccggccctatacacccatctccagcgatgatgacaagggcttcgtggacctggtcatcaaggtttacttcaaggacabccatcccaagtttcccgctggagggaagatgtctcagtacctggagagcatgcagattggagacaccattgagttccggggccccagtgggctgctggtc

SEQ ID NO: 91216 - DNA, 201 bp, Homo sapiens
gccacggctgagccttcagagtacgtcctgcctggcacttactggtccttaccagagacgcccagccccatccctgtcctcatgacccctcgtccaccccmcacacacactataaggctgagggctgccagcagccccgtctgcccaccattcccggccgtggaccatagtcgggatgtcagcagacacacatgggcagcc

SEQ ID NO: 91217 - DNA, 201 bp, Homo sapiens
gagacaccattgagttccggggccccagtgggctgctggtctaccagggcaaagggaagttcgccatccgacctgacaaaaagtccaaccctatcatcagkacagtgaagtctgtgggcatgatcgcgggagggacaggcatcaccccgatgctgcaggtgatccgcgccatcatgaaggaccctgatgaccacactgtgt

SEQ ID NO: 91218 - DNA, 201 bp, Homo sapiens
ccctgccgtcaccccagcacatcctgggcctccctgtcggccagcacatctacctctcggctcgaattgatggaaacctggtcgtccggccctatacaccmatctccagcgatgatgacaagggcttcgtggacctggtcatcaaggtttacttcaaggacacccatcccaagtttcccgctggagggaagatgtctcagt

SEQ ID NO: 91219 - DNA, 201 bp, Homo sapiens; identical to SEQ ID NO: 91193

SEQ ID NO: 91220 - DNA, 201 bp, Homo sapiens; identical to SEQ ID NO: 91194

SEQ ID NO: 91221 - DNA, 201 bp, Homo sapiens; identical to SEQ ID NO: 91195

SEQ ID NO: 91222 - DNA, 201 bp, Homo sapiens; identical to SEQ ID NO: 91196

SEQ ID NO: 91223 - DNA, 201 bp, Homo sapiens; identical to SEQ ID NO: 91197

SEQ ID NO: 91224 - DNA, 201 bp, Homo sapiens; identical to SEQ ID NO: 91198

SEQ ID NO: 91225 - DNA, 201 bp, Homo sapiens; identical to SEQ ID NO: 91199

SEQ ID NO: 91226 - DNA, 201 bp, Homo sapiens; identical to SEQ ID NO: 91200

SEQ ID NO: 91227 - DNA, 201 bp, Homo sapiens; identical to SEQ ID NO: 91201

SEQ ID NO: 91228 - DNA, 201 bp, Homo sapiens; identical to SEQ ID NO: 91202

SEQ ID NO: 91229 - DNA, 201 bp, Homo sapiens; identical to SEQ ID NO: 91203

SEQ ID NO: 91230 - DNA, 201 bp, Homo sapiens; identical to SEQ ID NO: 91204

SEQ ID NO: 91231 - DNA, 201 bp, Homo sapiens; identical to SEQ ID NO: 91205

SEQ ID NO: 91232 - DNA, 201 bp, Homo sapiens; identical to SEQ ID NO: 91206

SEQ ID NO: 91233 - DNA, 201 bp, Homo sapiens; identical to SEQ ID NO: 91207

SEQ ID NO: 91234 - DNA, 201 bp, Homo sapiens; identical to SEQ ID NO: 91208

SEQ ID NO: 91235 - DNA, 201 bp, Homo sapiens; identical to SEQ ID NO: 91209

SEQ ID NO: 91236 - DNA, 201 bp, Homo sapiens; identical to SEQ ID NO: 91210

SEQ ID NO: 91237 - DNA, 201 bp, Homo sapiens; identical to SEQ ID NO: 91211

SEQ ID NO: 91238 - DNA, 201 bp, Homo sapiens; identical to SEQ ID NO: 91212

SEQ ID NO: 91239 - DNA, 201 bp, Homo sapiens; identical to SEQ ID NO: 91213

SEQ ID NO: 91240 - DNA, 201 bp, Homo sapiens; identical to SEQ ID NO: 91214

SEQ ID NO: 91241 - DNA, 201 bp, Homo sapiens; identical to SEQ ID NO: 91215

SEQ ID NO: 91242 - DNA, 201 bp, Homo sapiens; identical to SEQ ID NO: 91216

SEQ ID NO: 91243 - DNA, 201 bp, Homo sapiens; identical to SEQ ID NO: 91217

SEQ ID NO: 91244 - DNA, 201 bp, Homo sapiens; identical to SEQ ID NO: 91218

SEQ ID NO: 91245 - DNA, 201 bp, Homo sapiens; identical to SEQ ID NO: 91193

SEQ ID NO: 91246 - DNA, 201 bp, Homo sapiens; identical to SEQ ID NO: 91194

SEQ ID NO: 91247 - DNA, 201 bp, Homo sapiens; identical to SEQ ID NO: 91195

SEQ ID NO: 91248 - DNA, 201 bp, Homo sapiens; identical to SEQ ID NO: 91196

SEQ ID NO: 91249 - DNA, 201 bp, Homo sapiens; identical to SEQ ID NO: 91197

SEQ ID NO: 91250 - DNA, 201 bp, Homo sapiens; identical to SEQ ID NO: 91198

SEQ ID NO: 91251 - DNA, 201 bp, Homo sapiens; identical to SEQ ID NO: 91199

SEQ ID NO: 91252 - DNA, 201 bp, Homo sapiens; identical to SEQ ID NO: 91200

SEQ ID NO: 91253 - DNA, 201 bp, Homo sapiens; identical to SEQ ID NO: 91201

SEQ ID NO: 91254 - DNA, 201 bp, Homo sapiens; identical to SEQ ID NO: 91202

SEQ ID NO: 91255 - DNA, 201 bp, Homo sapiens; identical to SEQ ID NO: 91203

SEQ ID NO: 91256 - DNA, 201 bp, Homo sapiens; identical to SEQ ID NO: 91204

SEQ ID NO: 91257 - DNA, 201 bp, Homo sapiens; identical to SEQ ID NO: 91205

SEQ ID NO: 91258 - DNA, 201 bp, Homo sapiens; identical to SEQ ID NO: 91206

SEQ ID NO: 91259 - DNA, 201 bp, Homo sapiens; identical to SEQ ID NO: 91207

SEQ ID NO: 91260 - DNA, 201 bp, Homo sapiens; identical to SEQ ID NO: 91208

SEQ ID NO: 91261 - DNA, 201 bp, Homo sapiens; identical to SEQ ID NO: 91209

SEQ ID NO: 91262 - DNA, 201 bp, Homo sapiens; identical to SEQ ID NO: 91210

SEQ ID NO: 91263 - DNA, 201 bp, Homo sapiens; identical to SEQ ID NO: 91211

SEQ ID NO: 91264 - DNA, 201 bp, Homo sapiens; identical to SEQ ID NO: 91212

SEQ ID NO: 91265 - DNA, 201 bp, Homo sapiens; identical to SEQ ID NO: 91213

SEQ ID NO: 91266 - DNA, 201 bp, Homo sapiens; identical to SEQ ID NO: 91214

SEQ ID NO: 91267 - DNA, 201 bp, Homo sapiens; identical to SEQ ID NO: 91215

SEQ ID NO: 91268 - DNA, 201 bp, Homo sapiens; identical to SEQ ID NO: 91216

SEQ ID NO: 91269 - DNA, 201 bp, Homo sapiens; identical to SEQ ID NO: 91217

SEQ ID NO: 91270 - DNA, 201 bp, Homo sapiens; identical to SEQ ID NO: 91218

SEQ ID NO: 91271 - DNA, 201 bp, Homo sapiens; identical to SEQ ID NO: 91193

SEQ ID NO: 91272 - DNA, 201 bp, Homo sapiens; identical to SEQ ID NO: 91194

SEQ ID NO: 91273 - DNA, 201 bp, Homo sapiens; identical to SEQ ID NO: 91195

SEQ ID NO: 91274 - DNA, 201 bp, Homo sapiens; identical to SEQ ID NO: 91196

SEQ ID NO: 91275 - DNA, 201 bp, Homo sapiens; identical to SEQ ID NO: 91197

SEQ ID NO: 91276 - DNA, 201 bp, Homo sapiens
cagtgggctgctggtctaccagggcaaagggaagttcgccatccgacctgacaaaaagtccaaccctatcatcaggacagtgaagtctgtgggcatgatcrcgggagggacaggcctcgctcagcacgtgcgaggcccggccggctattttgcaggcatcaccccgatgctgcaggtgatccgcgccatcatgaaggaccc

SEQ ID NO: 91277 - DNA, 201 bp, Homo sapiens
agtgggctgctggtctaccagggcaaagggaagttcgccatccgacctgacaaaaagtccaaccctatcatcaggacagtgaagtctgtgggcatgatcgygggagggacaggcctcgctcagcacgtgcgaggcccggccggctattttgcaggcatcaccccgatgctgcaggtgatccgcgccatcatgaaggaccct

SEQ ID NO: 91278 - DNA, 201 bp, Homo sapiens
cgctcagcacgtgcgaggcccggccggctattttgcaggcatcaccccgatgctgcaggtgatccgcgccatcatgaaggaccctgatgaccacactgtgygccacctgctctttgccaaccagaccgagaaggacatcctgctgcgacctgagctggaggaactcaggaacaaacattctgcacgcttcaagctctggta

SEQ ID NO: 91279 - DNA, 201 bp, Homo sapiens
gctcagcacgtgcgaggcccggccggctattttgcaggcatcaccccgatgctgcaggtgatccgcgccatcatgaaggaccctgatgaccacactgtgtrccacctgctctttgccaaccagaccgagaaggacatcctgctgcgacctgagctggaggaactcaggaacaaacattctgcacgcttcaagctctggtac

SEQ ID NO: 91280 - DNA, 201 bp, Homo sapiens; identical to SEQ ID NO: 91202

SEQ ID NO: 91281 - DNA, 201 bp, Homo sapiens; identical to SEQ ID NO: 91203

SEQ ID NO: 91282 - DNA, 201 bp, Homo sapiens; identical to SEQ ID NO: 91204

SEQ ID NO: 91283 - DNA, 201 bp, Homo sapiens; identical to SEQ ID NO: 91205

SEQ ID NO: 91284 - DNA, 201 bp, Homo sapiens; identical to SEQ ID NO: 91206

SEQ ID NO: 91285 - DNA, 201 bp, Homo sapiens; identical to SEQ ID NO: 91207

SEQ ID NO: 91286 - DNA, 201 bp, Homo sapiens; identical to SEQ ID NO: 91208

SEQ ID NO: 91287 - DNA, 201 bp, Homo sapiens
acccccactcccgcctcagggccaggcccaggcctcaccacctgacgctgcatgagacattgacaccagaaagccctcttgggggcactgctccctacccmagggccctggccagccgggagcttggctctcctctggctagagtgggaagagggggctggccatggttttggggtcctgggctggggccaccatccctga

SEQ ID NO: 91288 - DNA, 201 bp, Homo sapiens
gatgtctcagtacctggagagcatgcagattggagacaccattgagttccggggccccagtgggctgctggtctaccagggcaaagggaagttcgccatcygacctgacaaaaagtccaaccctatcatcaggacagtgaagtctgtgggcatgatcgcgggagggacaggcctcgctcagcacgtgcgaggcccggccgg

SEQ ID NO: 91289 - DNA, 201 bp, Homo sapiens
ctattttgcaggcatcaccccgatgctgcaggtgatccgcgccatcatgaaggaccctgatgaccacactgtgtgccacctgctctttgccaaccagaccragaaggacatcctgctgcgacctgagctggaggaactcaggaacaaacattctgcacgcttcaagctctggtacacgctggacagagcccctgaagcctg

SEQ ID NO: 91290 - DNA, 201 bp, Homo sapiens; identical to SEQ ID NO: 91213

SEQ ID NO: 91291 - DNA, 201 bp, Homo sapiens; identical to SEQ ID NO: 91214

SEQ ID NO: 91292 - DNA, 201 bp, Homo sapiens; identical to SEQ ID NO: 91215

SEQ ID NO: 91293 - DNA, 201 bp, Homo sapiens; identical to SEQ ID NO: 91216

SEQ ID NO: 91294 - DNA, 201 bp, Homo sapiens
gagacaccattgagttccggggccccagtgggctgctggtctaccagggcaaagggaagttcgccatccgacctgacaaaaagtccaaccctatcatcagkacagtgaagtctgtgggcatgatcgcgggagggacaggcctcgctcagcacgtgcgaggcccggccggctattttgcaggcatcaccccgatgctgcagg

SEQ ID NO: 91295 - DNA, 201 bp, Homo sapiens; identical to SEQ ID NO: 91218

SEQ ID NO: 91296 - DNA, 201 bp, Homo sapiens; identical to SEQ ID NO: 91193

SEQ ID NO: 91297 - DNA, 201 bp, Homo sapiens; identical to SEQ ID NO: 91194

SEQ ID NO: 91298 - DNA, 201 bp, Homo sapiens; identical to SEQ ID NO: 91195

SEQ ID NO: 91299 - DNA, 201 bp, Homo sapiens; identical to SEQ ID NO: 91196

SEQ ID NO: 91300 - DNA, 201 bp, Homo sapiens; identical to SEQ ID NO: 91197

SEQ ID NO: 91301 - DNA, 201 bp, Homo sapiens; identical to SEQ ID NO: 91276

SEQ ID NO: 91302 - DNA, 201 bp, Homo sapiens; identical to SEQ ID NO: 91277

SEQ ID NO: 91303 - DNA, 201 bp, Homo sapiens; identical to SEQ ID NO: 91278

SEQ ID NO: 91304 - DNA, 201 bp, Homo sapiens; identical to SEQ ID NO: 91279

SEQ ID NO: 91305 - DNA, 201 bp, Homo sapiens; identical to SEQ ID NO: 91202

SEQ ID NO: 91306 - DNA, 201 bp, Homo sapiens; identical to SEQ ID NO: 91203

SEQ ID NO: 91307 - DNA, 201 bp, Homo sapiens; identical to SEQ ID NO: 91204

SEQ ID NO: 91308 - DNA, 201 bp, Homo sapiens; identical to SEQ ID NO: 91205

SEQ ID NO: 91309 - DNA, 201 bp, Homo sapiens; identical to SEQ ID NO: 91206

SEQ ID NO: 91310 - DNA, 201 bp, Homo sapiens; identical to SEQ ID NO: 91207

SEQ ID NO: 91311 - DNA, 201 bp, Homo sapiens; identical to SEQ ID NO: 91208

SEQ ID NO: 91312 - DNA, 201 bp, Homo sapiens; identical to SEQ ID NO: 91209

SEQ ID NO: 91313 - DNA, 201 bp, Homo sapiens; identical to SEQ ID NO: 91210

SEQ ID NO: 91314 - DNA, 201 bp, Homo sapiens; identical to SEQ ID NO: 91288

SEQ ID NO: 91315 - DNA, 201 bp, Homo sapiens; identical to SEQ ID NO: 91289

SEQ ID NO: 91316 - DNA, 201 bp, Homo sapiens; identical to SEQ ID NO: 91213

SEQ ID NO: 91317 - DNA, 201 bp, Homo sapiens; identical to SEQ ID NO: 91214

SEQ ID NO: 91318 - DNA, 201 bp, Homo sapiens; identical to SEQ ID NO: 91215

SEQ ID NO: 91319 - DNA, 201 bp, Homo sapiens; identical to SEQ ID NO: 91216

SEQ ID NO: 91320 - DNA, 201 bp, Homo sapiens; identical to SEQ ID NO: 91294

SEQ ID NO: 91321 - DNA, 201 bp, Homo sapiens; identical to SEQ ID NO: 91218

SEQ ID NO: 91322 - DNA, 201 bp, Homo sapiens; identical to SEQ ID NO: 91193

SEQ ID NO: 91323 - DNA, 201 bp, Homo sapiens; identical to SEQ ID NO: 91194

SEQ ID NO: 91324 - DNA, 201 bp, Homo sapiens; identical to SEQ ID NO: 91195

SEQ ID NO: 91325 - DNA, 201 bp, Homo sapiens; identical to SEQ ID NO: 91196

SEQ ID NO: 91326 - DNA, 201 bp, Homo sapiens; identical to SEQ ID NO: 91197

SEQ ID NO: 91327 - DNA, 201 bp, Homo sapiens; identical to SEQ ID NO: 91198

SEQ ID NO: 91328 - DNA, 201 bp, Homo sapiens; identical to SEQ ID NO: 91199

SEQ ID NO: 91329 - DNA, 201 bp, Homo sapiens; identical to SEQ ID NO: 91200

SEQ ID NO: 91330 - DNA, 201 bp, Homo sapiens; identical to SEQ ID NO: 91201

SEQ ID NO: 91331 - DNA, 201 bp, Homo sapiens; identical to SEQ ID NO: 91202

SEQ ID NO: 91332 - DNA, 201 bp, Homo sapiens; identical to SEQ ID NO: 91203

SEQ ID NO: 91333 - DNA, 201 bp, Homo sapiens; identical to SEQ ID NO: 91204

SEQ ID NO: 91334 - DNA, 201 bp, Homo sapiens; identical to SEQ ID NO: 91205

SEQ ID NO: 91335 - DNA, 201 bp, Homo sapiens; identical to SEQ ID NO: 91206

SEQ ID NO: 91336 - DNA, 201 bp, Homo sapiens; identical to SEQ ID NO: 91207

SEQ ID NO: 91337 - DNA, 201 bp, Homo sapiens; identical to SEQ ID NO: 91208

SEQ ID NO: 91338 - DNA, 201 bp, Homo sapiens; identical to SEQ ID NO: 91209

SEQ ID NO: 91339 - DNA, 201 bp, Homo sapiens; identical to SEQ ID NO: 91211

SEQ ID NO: 91340 - DNA, 201 bp, Homo sapiens; identical to SEQ ID NO: 91212

SEQ ID NO: 91341 - DNA, 201 bp, Homo sapiens; identical to SEQ ID NO: 91213

SEQ ID NO: 91342 - DNA, 201 bp, Homo sapiens; identical to SEQ ID NO: 91214

SEQ ID NO: 91343 - DNA, 201 bp, Homo sapiens; identical to SEQ ID NO: 91215

SEQ ID NO: 91344 - DNA, 201 bp, Homo sapiens
gccacggctgagccttcagagtacgtcctgcctggcacttactggtccttaccagagacgcccagccccatccctgtcctcatgacccctcgtccaccccmcacacacactataaggctgagggctgccagcagccccgtctgcccaccattcccggccgtggaccatagtcgggatgtcacatttccttccagcccatcc

SEQ ID NO: 91345 - DNA, 201 bp, Homo sapiens; identical to SEQ ID NO: 91217

SEQ ID NO: 91346 - DNA, 201 bp, Homo sapiens; identical to SEQ ID NO: 91218

SEQ ID NO: 91347 - DNA, 201 bp, Homo sapiens
ctcgaacatgtggacctggaccctcaggagcccccgagatgactgcagggggctcaaatgcgatgaccccctctgtcctcctgaggagaggctgtaggctstgcctgtcgccccctaccttcctaatggctcctcctctgaggagtgaaagggatttgtttgcaacgtgctttgaaggccacataaaaagccctaaaaatg

SEQ ID NO: 91348 - DNA, 201 bp, Homo sapiens
tgggagccatcctgaagagctgtaacatgcaggcctggaagtcctacagcgccgtggatgtgctgcagaccctcgaacatgtggacctggaccctcaggakcccccgagatgactgcagggggctcaaatgcgatgaccccctctgtcctcctgaggagaggctgtaggctgtgcctgtcgccccctaccttcctaatggc

SEQ ID NO: 91349 - DNA, 201 bp, Homo sapiens
cccaaactttcgaagtaggccctggcaggcagctgggagccatcctgaagagctgtaacatgcaggcctggaagtcctacagcgccgtggatgtgctgcasaccctcgaacatgtggacctggaccctcaggagcccccgagatgactgcagggggctcaaatgcgatgaccccctctgtcctcctgaggagaggctgtag

SEQ ID NO: 91350 - DNA, 201 bp, Homo sapiens
gaagtcctacagcgccgtggatgtgctgcagaccctcgaacatgtggacctggaccctcaggagcccccgagatgactgcagggggctcaaatgcgatgamcccctctgtcctcctgaggagaggctgtaggctgtgcctgtcgccccctaccttcctaatggctcctcctctgaggagtgaaagggatttgtttgcaacg

SEQ ID NO: 91351 - DNA, 201 bp, Homo sapiens
cacacccgcctcatggagccagccgtggagcccctgacgcaagctttaaaggcagtcgacattaagaagcctctggtttctgtctactccaacgtccacgsgcatagatacaggcatcccgggcacatccacaagctgctggcccagcagctggtctccccagtgaagtgggagcagacgatgcatgccatatacgaaagg

SEQ ID NO: 91352 - DNA, 101 bp, Homo sapiens
cgccagagggagcacagcacatacctgcctcggagctgacccctggctccatgccccgtcctcagagaagctcctgcgtcaatattaagtatgagacatty

SEQ ID NO: 91353 - DNA, 201 bp, Homo sapiens
gcctggaagtcctacagcgccgtggatgtgctgcagaccctcgaacatgtggacctggaccctcaggagcccccgagatgactgcagggggctcaaatgcratgaccccctctgtcctcctgaggagaggctgtaggctgtgcctgtcgccccctaccttcctaatggctcctcctctgaggagtgaaagggatttgtttg

SEQ ID NO: 91354 - DNA, 201 bp, Homo sapiens
ctcctctgaggagtgaaagggatttgtttgcaacgtgctttgaaggccacataaaaagccctaaaaatgagtatttctttacatgacccagtccatttctyccccttggaaaaacgtttggacgttgggaagaatgatgccacagggctggtgtgtggggaagctggaatcctggccccgcctctgccagccctgcaccat

SEQ ID NO: 91355 - DNA, 134 bp, Homo sapiens
ctggtcacccactgggactgcgggtctgcggggcgccagagggagcacagcacatacctgcctcggagctgacccctggctccatgccccgtcctcagagmagctcctgcgtcaatattaagtatgagacattc

SEQ ID NO: 91356 - DNA, 201 bp, Homo sapiens
aatgagtatttctttacatgacccagtccatttctcccccttggaaaaacgtttggacgttgggaagaatgatgccacagggctggtgtgtggggaagctrgaatcctggccccgcctctgccagccctgcaccataggcaggtgtgccatctcagcgggaaggggaggactggctgctgcagcctgtcctgctctgtgag

SEQ ID NO: 91357 - DNA, 123 bp, Homo sapiens
ctgggactgcgggtctgcggggcgccagagggagcacagcacatacctgcctcggagctgacccctggctccatgccccgtcctcagagaagctcctgcgycaatattaagtatgagacattc

SEQ ID NO: 91358 - DNA, 201 bp, Homo sapiens; identical to SEQ ID NO: 91347

SEQ ID NO: 91359 - DNA, 201 bp, Homo sapiens
tcaacttcgcctgtttggaagcccgggaacactgcaagtctttaggcatagagaaccccgtatgtgaagtgtccaactacctctttccagattgcagggtsatttcaggacaccaagaggctctacggtttctccagaagaattcctctaagtttcatttcagacgcaccaggatgttgccggttagtggcgcattccaca

SEQ ID NO: 91360 - DNA, 201 bp, Homo sapiens; identical to SEQ ID NO: 91348

SEQ ID NO: 91361 - DNA, 201 bp, Homo sapiens; identical to SEQ ID NO: 91349

SEQ ID NO: 91362 - DNA, 201 bp, Homo sapiens; identical to SEQ ID NO: 91350

SEQ ID NO: 91363 - DNA, 201 bp, Homo sapiens
tgtctgtcctcggccagcctcagtccaagttcaacttcgcctgtttggaagcccgggaacactgcaagtctttaggcatagagaaccccgtatgtgaagtrtccaactacctctttccagattgcagggtgatttcaggacaccaagaggctctacggtttctccagaagaattcctctaagtttcatttcagacgcacca

SEQ ID NO: 91364 - DNA, 201 bp, Homo sapiens; identical to SEQ ID NO: 91351

SEQ ID NO: 91365 - DNA, 201 bp, Homo sapiens; identical to SEQ ID NO: 91353

SEQ ID NO: 91366 - DNA, 101 bp, Homo sapiens; identical to SEQ ID NO: 91352

SEQ ID NO: 91367 - DNA, 201 bp, Homo sapiens; identical to SEQ ID NO: 91354

SEQ ID NO: 91368 - DNA, 134 bp, Homo sapiens; identical to SEQ ID NO: 91355

SEQ ID NO: 91369 - DNA, 201 bp, Homo sapiens; identical to SEQ ID NO: 91356

SEQ ID NO: 91370 - DNA, 123 bp, Homo sapiens; identical to SEQ ID NO: 91357

SEQ ID NO: 91371 - DNA, 201 bp, Homo sapiens
tttctgtctaaccgagccctcaagcgggtcagatgcagcctccatccgaacctctgctgtgcccagcccctgtggaaaatactataccctcaatggaagcvagctttggatcagtaatgggggcctagcagacatcttcacggtctttgccaagacaccagttacagatccagccacaggagccgtgaaggagaagatcac

SEQ ID NO: 91372 - DNA, 201 bp, Homo sapiens
ttctgtctaaccgagccctcaagcgggtcagatgcagcctccatccgaacctctgctgtgcccagcccctgtggaaaatactataccctcaatggaagcamgctttggatcagtaatgggggcctagcagacatcttcacggtctttgccaagacaccagttacagatccagccacaggagccgtgaaggagaagatcaca

SEQ ID NO: 91373 - DNA, 201 bp, Homo sapiens
gacatcttcacggtctttgccaagacaccagttacagatccagccacaggagccgtgaaggagaagatcacagcttttgtggtggagaggggcttcggggrcattacccatgggccccctgagaagaagatgggcatcaaggcttcaaacacagcagaggtgttctttgatggagtacgggtgccatcggagaacgtgctg

SEQ ID NO: 91374 - DNA, 201 bp, Homo sapiens
gtctttgccaagacaccagttacagatccagccacaggagccgtgaaggagaagatcacagcttttgtggtggagaggggcttcgggggcattacccatgrgccccctgagaagaagatgggcatcaaggcttcaaacacagcagaggtgttctttgatggagtacgggtgccatcggagaacgtgctgggtgaggttggg

SEQ ID NO: 91375 - DNA, 201 bp, Homo sapiens
cagtttcttaaagagctggtggagcctgtgtcccgtttcttcgaggaagtgaacgatcccgccaagaatgacgctctggagatggtggaggagaccacttrgcagggcctcaaggagctgggggcctttggtctgcaagtgcccagtgagctgggtggtgtgggcctttgcaacacccagtacgcccgtttggtggagatc

SEQ ID NO: 91376 - DNA, 201 bp, Homo sapiens
cagttacagatccagccacaggagccgtgaaggagaagatcacagcttttgtggtggagaggggcttcgggggcattacccatgggccccctgagaagaakatgggcatcaaggcttcaaacacagcagaggtgttctttgatggagtacgggtgccatcggagaacgtgctgggtgaggttgggagtggcttcaaggttg

SEQ ID NO: 91377 - DNA, 201 bp, Homo sapiens
gtggagaggggcttcgggggcattacccatgggccccctgagaagaagatgggcatcaaggcttcaaacacagcagaggtgttctttgatggagtacgggygccatcggagaacgtgctgggtgaggttgggagtggcttcaaggttgccatgcacatcctcaacaatggaaggtttggcatggctgcggccctggcaggt

SEQ ID NO: 91378 - DNA, 201 bp, Homo sapiens
agtgagggccaccccacggcccagcatgagaaaatgctctgtgacacctggtgtatcgaggctgcagctcggatccgagagggcatggccgccctgcagtytgacccctggcagcaagagctctaccgcaacttcaaaagcatctccaaggccttggtggagcggggtggtgtggtcaccagcaacccacttggcttctga

SEQ ID NO: 91379 - DNA, 201 bp, Homo sapiens
ggcagcctggaaggtgacagatgaatgcatccaaatcatggggggtatgggcttcatgaaggaacctggagtagagcgtgtgctccgagatcttcgcatcytccggatctttgaggggacaaatgacattcttcggctgtttgtggctctgcagggctgtatggacaaaggaaaggagctctctgggcttggcagtgctct

SEQ ID NO: 91380 - DNA, 201 bp, Homo sapiens
aaatacctccccaagctggcatctggggagactgtggccgctttctgtctaaccgagccctcaagcgggtcagatgcagcctccatccgaacctctgctgwgcccagcccctgtggaaaatactataccctcaatggaagcaagctttggatcagtaatgggggcctagcagacatcttcacggtctttgccaagacacca

SEQ ID NO: 91381 - DNA, 201 bp, Homo sapiens
agtctgacccctggcagcaagagctctaccgcaacttcaaaagcatctccaaggccttggtggagcggggtggtgtggtcaccagcaacccacttggcttytgaatactcccggccagggcctgtcccagttatgtgccttccctcaagccaaagccgaagcccctttccttaaggccctggtttgtcccgaaggggccta

SEQ ID NO: 91382 - DNA, 201 bp, Homo sapiens
ggcccagaaagaaaaatacctccccaagctggcatctggggagactgtggccgctttctgtctaaccgagccctcaagcgggtcagatgcagcctccatcygaacctctgctgtgcccagcccctgtggaaaatactataccctcaatggaagcaagctttggatcagtaatgggggcctagcagacatcttcacggtctt

SEQ ID NO: 91383 - DNA, 201 bp, Homo sapiens
tggtgtgggcctttgcaacacccagtacgcccgtttggtggagatcgtgggcatgcatgaccttggcgtgggcattaccctgggggcccatcagagcatcrgtttcaaaggcatcctgctctttggcacaaaggcccagaaagaaaaatacctccccaagctggcatctggggagactgtggccgctttctgtctaaccga

SEQ ID NO: 91384 - DNA, 201 bp, Homo sapiens
ggcctttggtctgcaagtgcccagtgagctgggtggtgtgggcctttgcaacacccagtacgcccgtttggtggagatcgtgggcatgcatgaccttggcrtgggcattaccctgggggcccatcagagcatcggtttcaaaggcatcctgctctttggcacaaaggcccagaaagaaaaatacctccccaagctggcatc

SEQ ID NO: 91385 - DNA, 201 bp, Homo sapiens
ctccagggaactacagctcccagcatgccccggggcccgcaaccgtccgccgcccggtgcactgtggacgatgagtcagggttaggggcgccaggacgtgygcgtgcaggacgccagagctgggtcagagctcgagccagcggcgcccggagagattcggagatgcaggcggctcggatggccgcgagcttggggcggcag

SEQ ID NO: 91386 - DNA, 201 bp, Homo sapiens
gccacggacttccagatagaggccgccatcagcaaaatctttggctcggaggcagcctggaaggtgacagatgaatgcatccaaatcatggggggtatggrcttcatgaaggaacctggagtagagcgtgtgctccgagatcttcgcatcttccggatctttgaggggacaaatgacattcttcggctgtttgtggctctg

SEQ ID NO: 91387 - DNA, 201 bp, Homo sapiens
ttggggcggcagctgctgaggctcgggggcggaagctcgcggctcacggcgctcctggggcagccccggcccggccctgcccggcggccctatgccggggrtgccgctcaggaatctaagtcctttgctgtgggaatgttcaaaggccagctcaccacagatcaggtgttcccatacccgtccgtgctcaacgaagagcag

SEQ ID NO: 91388 - DNA, 201 bp, Homo sapiens
tgccatgcacatcctcaacaatggaaggtttggcatggctgcggccctggcaggtaccatgagaggcatcattgctaaggcggtagatcatgccactaatygtacccagtttggggagaaaattcacaactttgggctgatccaggagaagctggcacggatggttatgctgcagtatgtaactgagtccatggcttacat

SEQ ID NO: 91389 - DNA, 201 bp, Homo sapiens
gccatgcacatcctcaacaatggaaggtttggcatggctgcggccctggcaggtaccatgagaggcatcattgctaaggcggtagatcatgccactaatcrtacccagtttggggagaaaattcacaactttgggctgatccaggagaagctggcacggatggttatgctgcagtatgtaactgagtccatggcttacatg

SEQ ID NO: 91390 - DNA, 201 bp, Homo sapiens
atcgtacccagtttggggagaaaattcacaactttgggctgatccaggagaagctggcacggatggttatgctgcagtatgtaactgagtccatggcttamatggtgagtgctaacatggaccagggagccacggacttccagatagaggccgccatcagcaaaatctttggctcggaggcagcctggaaggtgacagatg

SEQ ID NO: 91391 - DNA, 201 bp, Homo sapiens
gagtccatggcttacatggtgagtgctaacatggaccagggagccacggacttccagatagaggccgccatcagcaaaatctttggctcggaggcagcctrgaaggtgacagatgaatgcatccaaatcatggggggtatgggcttcatgaaggaacctggagtagagcgtgtgctccgagatcttcgcatcttccggatc

SEQ ID NO: 91392 - DNA, 201 bp, Homo sapiens
atcagcaaaatctttggctcggaggcagcctggaaggtgacagatgaatgcatccaaatcatggggggtatgggcttcatgaaggaacctggagtagagcrtgtgctccgagatcttcgcatcttccggatctttgaggggacaaatgacattcttcggctgtttgtggctctgcagggctgtatggacaaaggaaaggag

SEQ ID NO: 91393 - DNA, 201 bp, Homo sapiens
atggagtacgggtgccatcggagaacgtgctgggtgaggttgggagtggcttcaaggttgccatgcacatcctcaacaatggaaggtttggcatggctgcrgccctggcaggtaccatgagaggcatcattgctaaggcggtagatcatgccactaatcgtacccagtttggggagaaaattcacaactttgggctgatcc

SEQ ID NO: 91394 - DNA, 201 bp, Homo sapiens
aaggaacctggagtagagcgtgtgctccgagatcttcgcatcttccggatctttgaggggacaaatgacattcttcggctgtttgtggctctgcagggctrtatggacaaaggaaaggagctctctgggcttggcagtgctctaaagaatccctttgggaatgctggcctcctgctaggagaggcaggcaaacagctgagg

SEQ ID NO: 91395 - DNA, 201 bp, Homo sapiens
cctgctaggagaggcaggcaaacagctgaggcggcgggcagggctgggcagcggcctgagtctcagcggacttgtccacccggagttgagtcggagtggcragctggcagtacgggctctggagcagtttgccactgtggtggaggccaagctgataaaacacaagaaggggattgtcaatgaacagtttctgctgcagcg

SEQ ID NO: 91396 - DNA, 201 bp, Homo sapiens
ggtggttctctcgagggcctcaagatccctgagtgagggccaccccacggcccagcatgagaaaatgctctgtgacacctggtgtatcgaggctgcagctyggatccgagagggcatggccgccctgcagtctgacccctggcagcaagagctctaccgcaacttcaaaagcatctccaaggccttggtggagcggggtgg

SEQ ID NO: 91397 - DNA, 201 bp, Homo sapiens
ctctcgagggcctcaagatccctgagtgagggccaccccacggcccagcatgagaaaatgctctgtgacacctggtgtatcgaggctgcagctcggatccragagggcatggccgccctgcagtctgacccctggcagcaagagctctaccgcaacttcaaaagcatctccaaggccttggtggagcggggtggtgtggtc

SEQ ID NO: 91398 - DNA, 201 bp, Homo sapiens
tctctcgagggcctcaagatccctgagtgagggccaccccacggcccagcatgagaaaatgctctgtgacacctggtgtatcgaggctgcagctcggatcygagagggcatggccgccctgcagtctgacccctggcagcaagagctctaccgcaacttcaaaagcatctccaaggccttggtggagcggggtggtgtggt

SEQ ID NO: 91399 - DNA, 201 bp, Homo sapiens
gagaggggcttcgggggcattacccatgggccccctgagaagaagatgggcatcaaggcttcaaacacagcagaggtgttctttgatggagtacgggtgcyatcggagaacgtgctgggtgaggttgggagtggcttcaaggttgccatgcacatcctcaacaatggaaggtttggcatggctgcggccctggcaggtacc

SEQ ID NO: 91400 - DNA, 201 bp, Homo sapiens
cggccctgcccggcggccctatgccgggggtgccgctcaggaatctaagtcctttgctgtgggaatgttcaaaggccagctcaccacagatcaggtgttcycatacccgtccgtgctcaacgaagagcagacacagtttcttaaagagctggtggagcctgtgtcccgtttcttcgaggaagtgaacgatcccgccaagaa

SEQ ID NO: 91401 - DNA, 201 bp, Homo sapiens
tttcttcgaggaagtgaacgatcccgccaagaatgacgctctggagatggtggaggagaccacttggcagggcctcaaggagctgggggcctttggtctgyaagtgcccagtgagctgggtggtgtgggcctttgcaacacccagtacgcccgtttggtggagatcgtgggcatgcatgaccttggcgtgggcattaccct

SEQ ID NO: 91402 - DNA, 201 bp, Homo sapiens
ggttgggagtggcttcaaggttgccatgcacatcctcaacaatggaaggtttggcatggctgcggccctggcaggtaccatgagaggcatcattgctaagkcggtagatcatgccactaatcgtacccagtttggggagaaaattcacaactttgggctgatccaggagaagctggcacggatggttatgctgcagtatgt

SEQ ID NO: 91403 - DNA, 201 bp, Homo sapiens
acagatgaatgcatccaaatcatggggggtatgggcttcatgaaggaacctggagtagagcgtgtgctccgagatcttcgcatcttccggatctttgaggrgacaaatgacattcttcggctgtttgtggctctgcagggctgtatggacaaaggaaaggagctctctgggcttggcagtgctctaaagaatccctttggg

SEQ ID NO: 91404 - DNA, 201 bp, Homo sapiens
acgccagagctgggtcagagctcgagccagcggcgcccggagagattcggagatgcaggcggctcggatggccgcgagcttggggcggcagctgctgaggytcgggggcggaagctcgcggctcacggcgctcctggggcagccccggcccggccctgcccggcggccctatgccgggggtgccgctcaggaatctaagtc

SEQ ID NO: 91405 - DNA, 201 bp, Homo sapiens
agcctggaaggtgacagatgaatgcatccaaatcatggggggtatgggcttcatgaaggaacctggagtagagcgtgtgctccgagatcttcgcatcttcyggatctttgaggggacaaatgacattcttcggctgtttgtggctctgcagggctgtatggacaaaggaaaggagctctctgggcttggcagtgctctaaa

SEQ ID NO: 91406 - DNA, 201 bp, Homo sapiens
gctcgagccagcggcgcccggagagattcggagatgcaggcggctcggatggccgcgagcttggggcggcagctgctgaggctcgggggcggaagctcgcrgctcacggcgctcctggggcagccccggcccggccctgcccggcggccctatgccgggggtgccgctcaggaatctaagtcctttgctgtgggaatgttc

SEQ ID NO: 91407 - DNA, 201 bp, Homo sapiens
ccatggcttacatggtgagtgctaacatggaccagggagccacggacttccagatagaggccgccatcagcaaaatctttggctcggaggcagcctggaargtgacagatgaatgcatccaaatcatggggggtatgggcttcatgaaggaacctggagtagagcgtgtgctccgagatcttcgcatcttccggatctttg

SEQ ID NO: 91408 - DNA, 201 bp, Homo sapiens
agagctcgagccagcggcgcccggagagattcggagatgcaggcggctcggatggccgcgagcttggggcggcagctgctgaggctcgggggcggaagctmgcggctcacggcgctcctggggcagccccggcccggccctgcccggcggccctatgccgggggtgccgctcaggaatctaagtcctttgctgtgggaatg

SEQ ID NO: 91409 - DNA, 201 bp, Homo sapiens
ctggagatggtggaggagaccacttggcagggcctcaaggagctgggggcctttggtctgcaagtgcccagtgagctgggtggtgtgggcctttgcaacamccagtacgcccgtttggtggagatcgtgggcatgcatgaccttggcgtgggcattaccctgggggcccatcagagcatcggtttcaaaggcatcctgctc

SEQ ID NO: 91410 - DNA, 201 bp, Homo sapiens
gagatggtggaggagaccacttggcagggcctcaaggagctgggggcctttggtctgcaagtgcccagtgagctgggtggtgtgggcctttgcaacacccrgtacgcccgtttggtggagatcgtgggcatgcatgaccttggcgtgggcattaccctgggggcccatcagagcatcggtttcaaaggcatcctgctcttt

SEQ ID NO: 91411 - DNA, 201 bp, Homo sapiens
ggcccatcagagcatcggtttcaaaggcatcctgctctttggcacaaaggcccagaaagaaaaatacctccccaagctggcatctggggagactgtggccsctttctgtctaaccgagccctcaagcgggtcagatgcagcctccatccgaacctctgctgtgcccagcccctgtggaaaatactataccctcaatggaag

SEQ ID NO: 91412 - DNA, 201 bp, Homo sapiens; identical to SEQ ID NO: 91371

SEQ ID NO: 91413 - DNA, 201 bp, Homo sapiens; identical to SEQ ID NO: 91372

SEQ ID NO: 91414 - DNA, 201 bp, Homo sapiens; identical to SEQ ID NO: 91373

SEQ ID NO: 91415 - DNA, 201 bp, Homo sapiens; identical to SEQ ID NO: 91374

SEQ ID NO: 91416 - DNA, 201 bp, Homo sapiens; identical to SEQ ID NO: 91375

SEQ ID NO: 91417 - DNA, 201 bp, Homo sapiens; identical to SEQ ID NO: 91376

SEQ ID NO: 91418 - DNA, 201 bp, Homo sapiens; identical to SEQ ID NO: 91377

SEQ ID NO: 91419 - DNA, 201 bp, Homo sapiens; identical to SEQ ID NO: 91378

SEQ ID NO: 91420 - DNA, 201 bp, Homo sapiens; identical to SEQ ID NO: 91379

SEQ ID NO: 91421 - DNA, 201 bp, Homo sapiens; identical to SEQ ID NO: 91380

SEQ ID NO: 91422 - DNA, 201 bp, Homo sapiens; identical to SEQ ID NO: 91381

SEQ ID NO: 91423 - DNA, 201 bp, Homo sapiens; identical to SEQ ID NO: 91382

SEQ ID NO: 91424 - DNA, 201 bp, Homo sapiens
cggcccggccctgcccggcggccctatgccgggggtgccgctcagctggctctggacaagtcagattcccacccctctgacgctctgaccaggaaaaaacyggccaaggcggaatctaagtcctttgctgtgggaatgttcaaaggccagctcaccacagatcaggtgttcccatacccgtccgtgctcaacgaagagcag

SEQ ID NO: 91425 - DNA, 201 bp, Homo sapiens; identical to SEQ ID NO: 91383

SEQ ID NO: 91426 - DNA, 201 bp, Homo sapiens; identical to SEQ ID NO: 91384

SEQ ID NO: 91427 - DNA, 201 bp, Homo sapiens; identical to SEQ ID NO: 91385

SEQ ID NO: 91428 - DNA, 201 bp, Homo sapiens; identical to SEQ ID NO: 91386

SEQ ID NO: 91429 - DNA, 201 bp, Homo sapiens
ttggggcggcagctgctgaggctcgggggcggaagctcgcggctcacggcgctcctggggcagccccggcccggccctgcccggcggccctatgccggggrtgccgctcagctggctctggacaagtcagattcccacccctctgacgctctgaccaggaaaaaaccggccaaggcggaatctaagtcctttgctgtggga

SEQ ID NO: 91430 - DNA, 201 bp, Homo sapiens; identical to SEQ ID NO: 91388

SEQ ID NO: 91431 - DNA, 201 bp, Homo sapiens; identical to SEQ ID NO: 91389

SEQ ID NO: 91432 - DNA, 201 bp, Homo sapiens; identical to SEQ ID NO: 91390

SEQ ID NO: 91433 - DNA, 201 bp, Homo sapiens; identical to SEQ ID NO: 91391

SEQ ID NO: 91434 - DNA, 201 bp, Homo sapiens; identical to SEQ ID NO: 91392

SEQ ID NO: 91435 - DNA, 201 bp, Homo sapiens; identical to SEQ ID NO: 91393

SEQ ID NO: 91436 - DNA, 201 bp, Homo sapiens; identical to SEQ ID NO: 91394

SEQ ID NO: 91437 - DNA, 201 bp, Homo sapiens; identical to SEQ ID NO: 91395

SEQ ID NO: 91438 - DNA, 201 bp, Homo sapiens; identical to SEQ ID NO: 91396

SEQ ID NO: 91439 - DNA, 201 bp, Homo sapiens; identical to SEQ ID NO: 91397

SEQ ID NO: 91440 - DNA, 201 bp, Homo sapiens; identical to SEQ ID NO: 91398

SEQ ID NO: 91441 - DNA, 201 bp, Homo sapiens; identical to SEQ ID NO: 91399

SEQ ID NO: 91442 - DNA, 201 bp, Homo sapiens
cccctctgacgctctgaccaggaaaaaaccggccaaggcggaatctaagtcctttgctgtgggaatgttcaaaggccagctcaccacagatcaggtgttcycatacccgtccgtgctcaacgaagagcagacacagtttcttaaagagctggtggagcctgtgtcccgtttcttcgaggaagtgaacgatcccgccaagaa

SEQ ID NO: 91443 - DNA, 201 bp, Homo sapiens; identical to SEQ ID NO: 91402

SEQ ID NO: 91444 - DNA, 201 bp, Homo sapiens; identical to SEQ ID NO: 91401

SEQ ID NO: 91445 - DNA, 201 bp, Homo sapiens; identical to SEQ ID NO: 91403

SEQ ID NO: 91446 - DNA, 201 bp, Homo sapiens
acgccagagctgggtcagagctcgagccagcggcgcccggagagattcggagatgcaggcggctcggatggccgcgagcttggggcggcagctgctgaggytcgggggcggaagctcgcggctcacggcgctcctggggcagccccggcccggccctgcccggcggccctatgccgggggtgccgctcagctggctctgga

SEQ ID NO: 91447 - DNA, 201 bp, Homo sapiens
ggcagccccggcccggccctgcccggcggccctatgccgggggtgccgctcagctggctctggacaagtcagattcccacccctctgacgctctgaccagraaaaaaccggccaaggcggaatctaagtcctttgctgtgggaatgttcaaaggccagctcaccacagatcaggtgttcccatacccgtccgtgctcaacg

SEQ ID NO: 91448 - DNA, 201 bp, Homo sapiens; identical to SEQ ID NO: 91405

SEQ ID NO: 91449 - DNA, 201 bp, Homo sapiens
gctcgagccagcggcgcccggagagattcggagatgcaggcggctcggatggccgcgagcttggggcggcagctgctgaggctcgggggcggaagctcgcrgctcacggcgctcctggggcagccccggcccggccctgcccggcggccctatgccgggggtgccgctcagctggctctggacaagtcagattcccacccc

SEQ ID NO: 91450 - DNA, 201 bp, Homo sapiens; identical to SEQ ID NO: 91407

SEQ ID NO: 91451 - DNA, 201 bp, Homo sapiens
agagctcgagccagcggcgcccggagagattcggagatgcaggcggctcggatggccgcgagcttggggcggcagctgctgaggctcgggggcggaagctmgcggctcacggcgctcctggggcagccccggcccggccctgcccggcggccctatgccgggggtgccgctcagctggctctggacaagtcagattcccac

SEQ ID NO: 91452 - DNA, 201 bp, Homo sapiens; identical to SEQ ID NO: 91409

SEQ ID NO: 91453 - DNA, 201 bp, Homo sapiens; identical to SEQ ID NO: 91410

SEQ ID NO: 91454 - DNA, 201 bp, Homo sapiens; identical to SEQ ID NO: 91411

SEQ ID NO: 91455 - DNA, 201 bp, Homo sapiens
cggtgtggaacaacctgagggtgacgaggatctgaccaaagaaaagggccatggtggctgtgggcggtaccagcccaggatccggcgttctggcctagagytgtatgcggaatggaagcacgttaatgaggactctcaggagaagaagatcctgctgagtccagagcgagtgcatgagatcttcaaacgcatctcagatga

SEQ ID NO: 91456 - DNA, 201 bp, Homo sapiens
acaatcagctgcggcgcaatgagcagaacggcgcagcggcccatgtcattgcagaggatgtgaagctcctccagttccatgtggccaccatggtggacaaygagctgcctggcttgccccgtgccatgcagaagtctgggcgtcccctcaagtccctgaagcagcggttgaagggcaaggaaggccgggtgcgagggaacc

SEQ ID NO: 91457 - DNA, 201 bp, Homo sapiens
tgactgccaacacagccatctactatgaccccaacccccagagcacggtggtggcagaggatcaggaatgggtgaatgtctactatgaaatgcctgacttygatgtggcccgaatctccccctggctgttgcgggtggagctggatcggaagcacatgactgaccggaagctcaccatggagcagattgctgaaaagatca

SEQ ID NO: 91458 - DNA, 201 bp, Homo sapiens
ccaagaatgtgacgctgggtgtgccccgacttaaggagctcatcaacatttccaagaagccaaagactccttcgcttactgtcttcctgttgggccagtcygctcgagatgctgagagagccaaggatattctgtgccgtctggagcatacaacgttgaggaaggtgactgccaacacagccatctactatgaccccaacc

SEQ ID NO: 91459 - DNA, 201 bp, Homo sapiens
acactctgcggcagacgtttgagaatcaggtgaaccgcattcttaacgatgcccgagacaagactggctcctctgctcagaaatccctgtctgaatacaayaacttcaagtctatggtcgtgtccggagctaaaggttccaagattaacatctcccaggtcattgctgtcgttggacagcagaacgtcgagggcaagcgga

SEQ ID NO: 91460 - DNA, 201 bp, Homo sapiens
cacaagcccggctatcagcccggatgacagtgacgaggagaactgagggcacgtggggtgcggcagcgggctagggcccagggcagcttgcccgtgctgcygtgcagttcttgcctccctcacggggcgtcacccccagcccagctccgttgtacataaatgccttgtggcagagctcccggtgaacttctggatcccgtt

SEQ ID NO: 91461 - DNA, 201 bp, Homo sapiens
ggcagcgggctagggcccagggcagcttgcccgtgctgccgtgcagttcttgcctccctcacggggcgtcacccccagcccagctccgttgtacataaatrccttgtggcagagctcccggtgaacttctggatcccgtttctgatgcagactcttgtcttgttctccacttgtgctgttagaactcactggcccagtggt

SEQ ID NO: 91462 - DNA, 201 bp, Homo sapiens
gcccgtgctgccgtgcagttcttgcctccctcacggggcgtcacccccagcccagctccgttgtacataaatgccttgtggcagagctcccggtgaacttytggatcccgtttctgatgcagactcttgtcttgttctccacttgtgctgttagaactcactggcccagtggtgttctcactcctaccccacccaccccct

SEQ ID NO: 91463 - DNA, 201 bp, Homo sapiens
gaaaaatttccggtaagggaaagaagggctcctttcgctccttatttccccgcctccttccctcccccaccttcccctcctccggctttttcctcccaacycggggaggtccttcccggtggccgccctgacgaggtctgagcacctaggcggaggcggcgcaggctttttgtagtgaggtttgcgcctgcgcagcgcgcc

SEQ ID NO: 91464 - DNA, 201 bp, Homo sapiens
ctccaaccagtcccaactatagtcccacatcacccagctattcgccaacgtcacccagctactcaccgacctctcccagctactcacccacctctcccagytactcgcccacctctcccagctactcgcccacctctcccagctactcacccacttcccctagctactcgcccacttcccctagctactcgccaacgtctc

SEQ ID NO: 91465 - DNA, 201 bp, Homo sapiens
ccagctattccccgacctcaccaagttactccccttccagcccacgatacacaccacagtctccaacctataccccaagctcacccagctacagccccagytcgcccagctacagcccaacctcacccaagtacaccccaaccagtccttcttacagtcccagctccccagagtataccccaacctctcccaagtactcac

SEQ ID NO: 91466 - DNA, 201 bp, Homo sapiens
aaaccttttccttttcccttctttttttttcctttttgggagctgaaaaatttccggtaagggaaagaagggctcctttcgctccttatttccccgcctcyttccctcccccaccttcccctcctccggctttttcctcccaactcggggaggtccttcccggtggccgccctgacgaggtctgagcacctaggcggaggc

SEQ ID NO: 91467 - DNA, 201 bp, Homo sapiens
cacagtctccaacctataccccaagctcacccagctacagccccagctcgcccagctacagcccaacctcacccaagtacaccccaaccagtccttcttayagtcccagctccccagagtataccccaacctctcccaagtactcacctaccagtcccaaatattcacccacctctcccaagtactcgcctaccagtccca

SEQ ID NO: 91468 - DNA, 201 bp, Homo sapiens
gatacatccagcggcggctgatcaagtccatggagtcagtgatggtgaagtacgacgcgactgtgcggaactccatcaaccaggtggtgcagctgcgctayggcgaagacggcctggcaggcgagagcgttgagttccagaacctggctacgcttaagccttccaacaaggcttttgagaagaagttccgctttgattata

SEQ ID NO: 91469 - DNA, 201 bp, Homo sapiens
cctctcccagctactcacccacctctcccagctactcgcccacctctcccagctactcgcccacctctcccagctactcacccacttcccctagctactckcccacttcccctagctactcgccaacgtctcccagctactcgccgacatctcccagctactcgccaacttcacccagctattctcccacttctcccagct

SEQ ID NO: 91470 - DNA, 201 bp, Homo sapiens
ggtccctcaagcccctacatcccttcaccaggtggtgccatgtctcccagctactcgccaacgtcacctgcctacgagccccgctctcctgggggctacayaccccagagtccctcttattcccccacttcaccctcctactcccctacctctccatcctattctccaaccagtcccaactatagtcccacatcacccagc

SEQ ID NO: 91471 - DNA, 201 bp, Homo sapiens
gcctccctcacggggcgtcacccccagcccagctccgttgtacataaatgccttgtggcagagctcccggtgaacttctggatcccgtttctgatgcagaytcttgtcttgttctccacttgtgctgttagaactcactggcccagtggtgttctcactcctaccccacccaccccctgcctgtccccaaattgaagatcc

SEQ ID NO: 91472 - DNA, 201 bp, Homo sapiens
ctgagagagccaaggatattctgtgccgtctggagcatacaacgttgaggaaggtgactgccaacacagccatctactatgaccccaacccccagagcacrgtggtggcagaggatcaggaatgggtgaatgtctactatgaaatgcctgactttgatgtggcccgaatctccccctggctgttgcgggtggagctggatc

SEQ ID NO: 91473 - DNA, 201 bp, Homo sapiens
catcctattctccaaccagtcccaactatagtcccacatcacccagctattcgccaacgtcacccagctactcaccgacctctcccagctactcacccacytctcccagctactcgcccacctctcccagctactcgcccacctctcccagctactcacccacttcccctagctactcgcccacttcccctagctactcgc

SEQ ID NO: 91474 - DNA, 201 bp, Homo sapiens
acattgttatcttcaaccggcagccaactctgcacaaaatgtccatgatggggcatcgggtccgcattctcccatggtctacctttcgcttgaatcttagygtgacaactccgtacaatgcagactttgacggggatgagatgaacttgcacctgccacagtctctggagacgcgagcagagatccaggagctggccatgg

SEQ ID NO: 91475 - DNA, 110 bp, Homo sapiens
gagagcgcgsccgggacggttggagaagaaggcggctcccggaagggggagagacaaactgccgtaacctctgccgttcaggaacccggttacttatttattcgttaccc

SEQ ID NO: 91476 - DNA, 201 bp, Homo sapiens
caaagatcaaggatatcctggctaagtccaagggacagcccaagaagcggctcacacatgtctacgacctttgcaagggcaaaaacatatgcgagggtggrgaggagatggacaacaagttcggtgtggaacaacctgagggtgacgaggatctgaccaaagaaaagggccatggtggctgtgggcggtaccagcccagga

SEQ ID NO: 91477 - DNA, 201 bp, Homo sapiens
accaagttactccccttccagcccacgatacacaccacagtctccaacctataccccaagctcacccagctacagccccagctcgcccagctacagcccarcctcacccaagtacaccccaaccagtccttcttacagtcccagctccccagagtataccccaacctctcccaagtactcacctaccagtcccaaatattc

SEQ ID NO: 91478 - DNA, 201 bp, Homo sapiens; identical to SEQ ID NO: 91467

SEQ ID NO: 91479 - DNA, 201 bp, Homo sapiens; identical to SEQ ID NO: 91469

SEQ ID NO: 91480 - DNA, 201 bp, Homo sapiens; identical to SEQ ID NO: 91470

SEQ ID NO: 91481 - DNA, 201 bp, Homo sapiens; identical to SEQ ID NO: 91471

SEQ ID NO: 91482 - DNA, 201 bp, Homo sapiens; identical to SEQ ID NO: 91473

SEQ ID NO: 91483 - DNA, 201 bp, Homo sapiens; identical to SEQ ID NO: 91460

SEQ ID NO: 91484 - DNA, 201 bp, Homo sapiens; identical to SEQ ID NO: 91477

SEQ ID NO: 91485 - DNA, 201 bp, Homo sapiens; identical to SEQ ID NO: 91461

SEQ ID NO: 91486 - DNA, 201 bp, Homo sapiens; identical to SEQ ID NO: 91462

SEQ ID NO: 91487 - DNA, 201 bp, Homo sapiens; identical to SEQ ID NO: 91464

SEQ ID NO: 91488 - DNA, 201 bp, Homo sapiens; identical to SEQ ID NO: 91465

SEQ ID NO: 91489 - DNA, 201 bp, Homo sapiens; identical to SEQ ID NO: 91455

SEQ ID NO: 91490 - DNA, 201 bp, Homo sapiens; identical to SEQ ID NO: 91457

SEQ ID NO: 91491 - DNA, 201 bp, Homo sapiens; identical to SEQ ID NO: 91456

SEQ ID NO: 91492 - DNA, 201 bp, Homo sapiens; identical to SEQ ID NO: 91458

SEQ ID NO: 91493 - DNA, 201 bp, Homo sapiens; identical to SEQ ID NO: 91459

SEQ ID NO: 91494 - DNA, 201 bp, Homo sapiens; identical to SEQ ID NO: 91460

SEQ ID NO: 91495 - DNA, 201 bp, Homo sapiens; identical to SEQ ID NO: 91461

SEQ ID NO: 91496 - DNA, 201 bp, Homo sapiens; identical to SEQ ID NO: 91462

SEQ ID NO: 91497 - DNA, 201 bp, Homo sapiens; identical to SEQ ID NO: 91463

SEQ ID NO: 91498 - DNA, 201 bp, Homo sapiens; identical to SEQ ID NO: 91464

SEQ ID NO: 91499 - DNA, 201 bp, Homo sapiens; identical to SEQ ID NO: 91465

SEQ ID NO: 91500 - DNA, 201 bp, Homo sapiens; identical to SEQ ID NO: 91467

SEQ ID NO: 91501 - DNA, 201 bp, Homo sapiens; identical to SEQ ID NO: 91466

SEQ ID NO: 91502 - DNA, 201 bp, Homo sapiens; identical to SEQ ID NO: 91468

SEQ ID NO: 91503 - DNA, 201 bp, Homo sapiens; identical to SEQ ID NO: 91469

SEQ ID NO: 91504 - DNA, 201 bp, Homo sapiens; identical to SEQ ID NO: 91471

SEQ ID NO: 91505 - DNA, 201 bp, Homo sapiens; identical to SEQ ID NO: 91470

SEQ ID NO: 91506 - DNA, 201 bp, Homo sapiens; identical to SEQ ID NO: 91472

SEQ ID NO: 91507 - DNA, 201 bp, Homo sapiens; identical to SEQ ID NO: 91473

SEQ ID NO: 91508 - DNA, 110 bp, Homo sapiens; identical to SEQ ID NO: 91475

SEQ ID NO: 91509 - DNA, 201 bp, Homo sapiens; identical to SEQ ID NO: 91474

SEQ ID NO: 91510 - DNA, 201 bp, Homo sapiens; identical to SEQ ID NO: 91476

SEQ ID NO: 91511 - DNA, 201 bp, Homo sapiens; identical to SEQ ID NO: 91477

SEQ ID NO: 91512 - DNA, 201 bp, Homo sapiens; identical to SEQ ID NO: 91455

SEQ ID NO: 91513 - DNA, 201 bp, Homo sapiens; identical to SEQ ID NO: 91457

SEQ ID NO: 91514 - DNA, 201 bp, Homo sapiens; identical to SEQ ID NO: 91456

SEQ ID NO: 91515 - DNA, 201 bp, Homo sapiens; identical to SEQ ID NO: 91458

SEQ ID NO: 91516 - DNA, 201 bp, Homo sapiens; identical to SEQ ID NO: 91459

SEQ ID NO: 91517 - DNA, 201 bp, Homo sapiens; identical to SEQ ID NO: 91460

SEQ ID NO: 91518 - DNA, 201 bp, Homo sapiens; identical to SEQ ID NO: 91461

SEQ ID NO: 91519 - DNA, 201 bp, Homo sapiens; identical to SEQ ID NO: 91462

SEQ ID NO: 91520 - DNA, 201 bp, Homo sapiens; identical to SEQ ID NO: 91463

SEQ ID NO: 91521 - DNA, 201 bp, Homo sapiens; identical to SEQ ID NO: 91464

SEQ ID NO: 91522 - DNA, 201 bp, Homo sapiens; identical to SEQ ID NO: 91465

SEQ ID NO: 91523 - DNA, 201 bp, Homo sapiens; identical to SEQ ID NO: 91467

SEQ ID NO: 91524 - DNA, 201 bp, Homo sapiens; identical to SEQ ID NO: 91466

SEQ ID NO: 91525 - DNA, 201 bp, Homo sapiens; identical to SEQ ID NO: 91468

SEQ ID NO: 91526 - DNA, 201 bp, Homo sapiens; identical to SEQ ID NO: 91469

SEQ ID NO: 91527 - DNA, 201 bp, Homo sapiens; identical to SEQ ID NO: 91471

SEQ ID NO: 91528 - DNA, 201 bp, Homo sapiens; identical to SEQ ID NO: 91470

SEQ ID NO: 91529 - DNA, 201 bp, Homo sapiens; identical to SEQ ID NO: 91472

SEQ ID NO: 91530 - DNA, 201 bp, Homo sapiens; identical to SEQ ID NO: 91473

SEQ ID NO: 91531 - DNA, 110 bp, Homo sapiens; identical to SEQ ID NO: 91475

SEQ ID NO: 91532 - DNA, 201 bp, Homo sapiens; identical to SEQ ID NO: 91474

SEQ ID NO: 91533 - DNA, 201 bp, Homo sapiens; identical to SEQ ID NO: 91476

SEQ ID NO: 91534 - DNA, 201 bp, Homo sapiens; identical to SEQ ID NO: 91477

SEQ ID NO: 91535 - DNA, 201 bp, Homo sapiens
tgattcgggagctagccgaattcgaaaaactctcggatcaggtgaagatcagtgaagaagccctgagagcagatggctttggagacaatcctttctatcaytgtttggtagcagagattcttccagcgcccgggaagctactggggccctgcgtggtgggctatgggatatactatttcatctacagtacatggaagggac

SEQ ID NO: 91536 - DNA, 201 bp, Homo sapiens
ggatatctatgtgatgccggaatatcggggtcaagggattggttccaaaataatcaaaaaggtggctgaggtggccttggataagggctgctcccaattcygcctggccgtcctggactggaaccagagggccatggacttgtacaaggccctaggagcccaagatctgacggaagctgagggctggcacttcttctgctt

SEQ ID NO: 91537 - DNA, 201 bp, Homo sapiens
agctactggggccctgcgtggtgggctatgggatatactatttcatctacagtacatggaagggacgcaccatttatctggaggatatctatgtgatgccrgaatatcggggtcaagggattggttccaaaataatcaaaaaggtggctgaggtggccttggataagggctgctcccaattccgcctggccgtcctggact

SEQ ID NO: 91538 - DNA, 167 bp, Homo sapiens
acggcacagatctcgcgagcttctcctacttctctagcgctgtggctcactgaagcgtactacgccrgatgtcttaagatatcgcgagacctttacctctggtttcttacacatcctttagaaactggaatttagcgagaatacattctttcatactgcctcctccc

SEQ ID NO: 91539 - DNA, 201 bp, Homo sapiens
aggagtaaccaagagatccagtgaccgacagagcaagagccatgccgcgccggggcctggtggctgggccagacttggagtattttcagcgtcgctatttmacgccggcggaggtggcccaacataacaggcccgaagacctctgggtatcttacctgggacgcgtgtacgacctaacgtcattggcacaggaatacaagg

SEQ ID NO: 91540 - DNA, 201 bp, Homo sapiens
cattggcacaggaatacaaggggaacctgctgctgaaacccatcgtggaagttgcaggccaggatatcagccactggtttgatccaaagaccagagacatycgcaagcacatagatccgctgaccggctgcctgaggtactgcaccccgcggggccgctttgtgcacgttccgcctcagctgccctgttcggactgggcca

SEQ ID NO: 91541 - DNA, 201 bp, Homo sapiens
atctcgcgagcttctcctacttctctagcgctgtggctcactgaagcgtactacgccggatgtcttaagatatcgcgagacctttacctctggtttcttayacatcctttagaaactggaatttagcgagaatacattctttcatactgcctcctcccttgtttttctgtctcagagagatagtctgtcctaaatatccca

SEQ ID NO: 91542 - DNA, 141 bp, Homo sapiens
acggcacagatctcgcgagcttctcctacttctctagcgcygtggctcactgaagcgtactacgccggatgtcttaagatatcgcgagacctttacctctggtttcttacacatcctttagaaactggaatttagcgagaa

SEQ ID NO: 91543 - DNA, 201 bp, Homo sapiens
acgtcgcaggagcacacactggaggtgggggttctggagtccatatgggaaatcctacaccgctatctccactcctctccaggagctagcctgtgcccttytgaagtgtaaaggccctattccctgccttcattacagtttgctctgagaaaattagtgaattaatctttgggaatgatacaagaagatcaagtaccttgg

SEQ ID NO: 91544 - DNA, 201 bp, Homo sapiens
cacggtttatcacagccactggaggcaccctgcacatgtatcagttggaagggctgaactggctacgcttctcctgggcccagggcactgacaccattctmgctgatgagatggggctaggcaagaccatacaaaccatcgtcttcctctactcactctacaaggagggccacacaaaaggtcccttcctggtgagtgccc

SEQ ID NO: 91545 - DNA, 201 bp, Homo sapiens
gactatcctactggcactgctcctgggccaaggagcttcagctggaaatcttccatttggttatgtatcgaaactaccagcggaagaatgacatggatgascccccacccctggactatggctccggcgaggatgatgggaagagcgacaagcgtaaagtgaaagacccgcactatgctgagatggaggagaagtactatc

SEQ ID NO: 91546 - DNA, 201 bp, Homo sapiens
gggagcagggagatgggaatagaattgaaggtaggttttaggctacttgggaggaggaatatttaggtaattgtggagactttctcctgtgtgatgaaggyggcagacactgtgatcctgtgggcaagaagtaaaaatgaccagctgaggatttcttttcctccaggactgtgttggggtgacaggatgcctgataaggat

SEQ ID NO: 91547 - DNA, 201 bp, Homo sapiens
agggggagaacaaggaggaggacagcagtgtgattcattatgacaatgaggccatcgctcggctgttggaccggaaccaggatgcaactgaggacactgaygtgcagaacatgaatgagtatctcagctccttcaaggtggcacagtacgtcgtgcgggaagaagacaagattgaggaaattgagcgagagatcatcaagc

SEQ ID NO: 91548 - DNA, 201 bp, Homo sapiens
tgacaggaaccccattgcagaataatctggaggagctcttccatctcctgaacttcctcaccccagagagatttaacaacttggagggcttcctggaggartttgctgacatatccaaagaggaccagatcaagaaactgcatgatttgctggggccacacatgctgcggagactcaaggcagatgtctttaagaacatgc

SEQ ID NO: 91549 - DNA, 201 bp, Homo sapiens
cctgaacctgggtaccgtggggacagagagaagtcagaagatgtaaaaggtgaccgggagcttcgaccagggcctcgagatgagccacggtccaatgggckacgagaggaaaagacagagaagccccggttcatgttcaatatcgccgatggtggcttcacagagcttcacacactgtggcagaatgaggaacgggcagct

SEQ ID NO: 91550 - DNA, 201 bp, Homo sapiens
cgtgggaggaagatgaaatgaatatccctgaatacgaagaacataagcaaagctactggagacaccgagaactaattatgggggaagaccctgcccagccmcgcaagtataagaagaagaagaaggagctacagggtgatgggcctcccagttctcccactaatgatcctaccgtgaaatatgagactcagccacggttta

SEQ ID NO: 91551 - DNA, 201 bp, Homo sapiens
tatttaggtaattgtggagactttctcctgtgtgatgaaggcggcagacactgtgatcctgtgggcaagaagtaaaaatgaccagctgaggatttcttttyctccaggactgtgttggggtgacaggatgcctgataaggatgacattcggctgctgccgtcagcattgggtgtgaagaagagaaaacgaggacccaagaa

SEQ ID NO: 91552 - DNA, 201 bp, Homo sapiens
ctggaggcaccctgcacatgtatcagttggaagggctgaactggctacgcttctcctgggcccagggcactgacaccattctagctgatgagatggggctrggcaagaccatacaaaccatcgtcttcctctactcactctacaaggagggccacacaaaaggtcccttcctggtgagtgccccactctctaccatcatta

SEQ ID NO: 91553 - DNA, 201 bp, Homo sapiens; identical to SEQ ID NO: 91544

SEQ ID NO: 91554 - DNA, 201 bp, Homo sapiens; identical to SEQ ID NO: 91545

SEQ ID NO: 91555 - DNA, 201 bp, Homo sapiens; identical to SEQ ID NO: 91546

SEQ ID NO: 91556 - DNA, 201 bp, Homo sapiens; identical to SEQ ID NO: 91547

SEQ ID NO: 91557 - DNA, 201 bp, Homo sapiens; identical to SEQ ID NO: 91548

SEQ ID NO: 91558 - DNA, 201 bp, Homo sapiens; identical to SEQ ID NO: 91549

SEQ ID NO: 91559 - DNA, 201 bp, Homo sapiens
gagccctgggagggaggaagggacgaggaggggtggctgcatgttaccgtcccctacctctccccacgtggagggtggagcagttatgagggaggaagtcractgctgttcagcctcagaataaaggtgccgttcactggctcagttacctcctgtgtaccggcatcttgtgttgggaatgttcccccctccctagggacc

SEQ ID NO: 91560 - DNA, 201 bp, Homo sapiens; identical to SEQ ID NO: 91550

SEQ ID NO: 91561 - DNA, 201 bp, Homo sapiens; identical to SEQ ID NO: 91551

SEQ ID NO: 91562 - DNA, 201 bp, Homo sapiens; identical to SEQ ID NO: 91552

SEQ ID NO: 91563 - DNA, 201 bp, Homo sapiens; identical to SEQ ID NO: 91544

SEQ ID NO: 91564 - DNA, 201 bp, Homo sapiens; identical to SEQ ID NO: 91545

SEQ ID NO: 91565 - DNA, 201 bp, Homo sapiens; identical to SEQ ID NO: 91546

SEQ ID NO: 91566 - DNA, 201 bp, Homo sapiens; identical to SEQ ID NO: 91547

SEQ ID NO: 91567 - DNA, 201 bp, Homo sapiens; identical to SEQ ID NO: 91548

SEQ ID NO: 91568 - DNA, 201 bp, Homo sapiens; identical to SEQ ID NO: 91549

SEQ ID NO: 91569 - DNA, 201 bp, Homo sapiens; identical to SEQ ID NO: 91559

SEQ ID NO: 91570 - DNA, 201 bp, Homo sapiens; identical to SEQ ID NO: 91550

SEQ ID NO: 91571 - DNA, 201 bp, Homo sapiens; identical to SEQ ID NO: 91551

SEQ ID NO: 91572 - DNA, 201 bp, Homo sapiens; identical to SEQ ID NO: 91552

SEQ ID NO: 91573 - DNA, 201 bp, Homo sapiens; identical to SEQ ID NO: 91544

SEQ ID NO: 91574 - DNA, 201 bp, Homo sapiens; identical to SEQ ID NO: 91545

SEQ ID NO: 91575 - DNA, 201 bp, Homo sapiens; identical to SEQ ID NO: 91546

SEQ ID NO: 91576 - DNA, 201 bp, Homo sapiens; identical to SEQ ID NO: 91547

SEQ ID NO: 91577 - DNA, 201 bp, Homo sapiens; identical to SEQ ID NO: 91548

SEQ ID NO: 91578 - DNA, 201 bp, Homo sapiens
aggccggagggggaaacaggggatttgggcaagagagaagatgtaaaaggtgaccgggagcttcgaccagggcctcgagatgagccacggtccaatgggckacgagaggaaaagacagagaagccccggttcatgttcaatatcgccgatggtggcttcacagagcttcacacactgtggcagaatgaggaacgggcagct

SEQ ID NO: 91579 - DNA, 201 bp, Homo sapiens; identical to SEQ ID NO: 91559

SEQ ID NO: 91580 - DNA, 201 bp, Homo sapiens; identical to SEQ ID NO: 91550

SEQ ID NO: 91581 - DNA, 201 bp, Homo sapiens; identical to SEQ ID NO: 91551

SEQ ID NO: 91582 - DNA, 201 bp, Homo sapiens; identical to SEQ ID NO: 91552

SEQ ID NO: 91583 - DNA, 201 bp, Homo sapiens
aggactcggcggctgagcgcgcccgacagcagctagaggcgctgctcaacaagactatgcgcattcgcatgacagatggacggacactggtcggctgcttyctctgcactgaccgtgactgcaatgtcatcctgggctcggcgcaggagttcctcaagccgtcggattccttctctgccggggagccccgtgtgctgggcc

SEQ ID NO: 91584 - DNA, 201 bp, Homo sapiens
gcgaggactcggcggctgagcgcgcccgacagcagctagaggcgctgctcaacaagactatgcgcattcgcatgacagatggacggacactggtcggctgyttcctctgcactgaccgtgactgcaatgtcatcctgggctcggcgcaggagttcctcaagccgtcggattccttctctgccggggagccccgtgtgctgg

SEQ ID NO: 91585 - DNA, 201 bp, Homo sapiens
gcccagaggaggcctccgggcaaatggccggagctggaccgaccatgctgctacgagaagagaatggctgttgcagtcggcgtcagagcagctccagtgcyggggattcggacggagagcgcgaggactcggcggctgagcgcgcccgacagcagctagaggcgctgctcaacaagactatgcgcattcgcatgacagatg

SEQ ID NO: 91586 - DNA, 201 bp, Homo sapiens
gtcgggagcgctcgcgagatctcggaccacccaacctgaaaggtgcttaggaagttgaaaggcccagaggaggcctccgggcaaatggccggagctggacygaccatgctgctacgagaagagaatggctgttgcagtcggcgtcagagcagctccagtgctggggattcggacggagagcgcgaggactcggcggctgag

SEQ ID NO: 91587 - DNA, 201 bp, Homo sapiens
ggttcccttgaaaagagcagcacagccactgtcaatgccagcccttcgagaaccaggcaaacgcgcgcgtgcacacacacacactccggccccggcccaaygtgtggcccttacccttgtattcctgtgccaatgacgttaggtcgtacacgcgtcccaggtaagatacccagaggtcttcgggcctgttatgttgggcca

SEQ ID NO: 91588 - DNA, 201 bp, Homo sapiens
tgggatatttaggacagactatctctctgagacagaaaaacaagggaggaggcagtatgaaagaatgtattctcgctaaattccagtttctaaaggatgtrtaagaaaccagaggtaaaggtctcgcgatatcttaagacatccggcgtagtacgcttcagtgagccacagcgctagagaagtaggagaagctcgcgagat

SEQ ID NO: 91589 - DNA, 201 bp, Homo sapiens
ctctgccggggagccccgtgtgctgggcctggccatggtacccggacaccacatcgtttccattgaggtgcagagggagagtctgaccgggcctccgtatytctgaccacgatggcgcttacctttcagacttcattaaacttatgaccgaatgggcctgtgtctgtgtgtagctgggatgccggtgcaggatagcacacc

SEQ ID NO: 91590 - DNA, 181 bp, Homo sapiens
cgtctctggtctttggatcaaaccagtggctgatatcctggcctgcaacttccacgatgggtttcagcagcaggttccctwgaaaagagcagcacagccactgtcaatgccagcccttcgagaaccaggcaaacgcgcgcgtgcacacacacacactccggccccggcccaacgtgtggcc

SEQ ID NO: 91591 - DNA, 201 bp, Homo sapiens
gggaggaggcagtatgaaagaatgtattctcgctaaattccagtttctaaaggatgtgtaagaaaccagaggtaaaggtctcgcgatatcttaagacatcyggcgtagtacgcttcagtgagccacagcgctagagaagtaggagaagctcgcgagatctgtgccgttgccgaggagactaggagggggaggagaggggat

SEQ ID NO: 91592 - DNA, 201 bp, Homo sapiens
ccttgtattcctgtgccaatgacgttaggtcgtacacgcgtcccaggtaagatacccagaggtcttcgggcctgttatgttgggccacctccgccggcgtkaaatagcgacgctgaaaatactccaagtctggcccagccaccaggccccggcgcggcatggctcttgctctgtcggtcactggatctcttggttactcct

SEQ ID NO: 91593 - DNA, 185 bp, Homo sapiens
cgtctctggtctttggatcaaaccagtggctgatatcctggcctgcaacttccacgatgggtttcagcagcaggttcccttgaaragagcagcacagccactgtcaatgccagcccttcgagaaccaggcaaacgcgcgcgtgcacacacacacactccggccccggcccaacgtgtggccctta

SEQ ID NO: 91594 - DNA, 201 bp, Homo sapiens
ttctcgctaaattccagtttctaaaggatgtgtaagaaaccagaggtaaaggtctcgcgatatcttaagacatccggcgtagtacgcttcagtgagccacrgcgctagagaagtaggagaagctcgcgagatctgtgccgttgccgaggagactaggagggggaggagaggggatctcgcgaaaggaaagaggtcgggagc

SEQ ID NO: 91595 - DNA, 174 bp, Homo sapiens
gcaattttgcacaggaagcgttgggagatgttgtttattgtagtctccctgaagttgggacaaaattgaacaaacaagatgagtttggtgctttggaaagygtgaaagctgctagtgaactctattctcctttatcaggagaagtaactgaaattaatgaagctcttgcagaaa

SEQ ID NO: 91596 - DNA, 201 bp, Homo sapiens
atgccagacttcaggaatgggacaacttttacaaattttccaatagagctaaaaatcttttgccaagaagaaccatgacacttacttactatgacggaatwtctaggtacatggaggggcaagttcttcaccttcaaaaacaaatcaaagaacagtcagagaatgcccaagccagtggggaggagctactcaagaacttgg

SEQ ID NO: 91597 - DNA, 201 bp, Homo sapiens
actatcgttccttgtctctgaagcccagtgaagggatggatcacggtgaagaggaacagcttcgtgaactggagaatgaggtgatcgagtgccacaggatycgattctgtaaccctatgatgcagaaaacagcctacgagctgtggctcaaggaccagagaaaagccatgcacttgaaatgtgcccgctttttagaagaag

SEQ ID NO: 91598 - DNA, 201 bp, Homo sapiens
agaagaggctggcacaactttaccggcaaactgtctgcctttccttgctgtggcgcatctatagctacagttatctttttcactgcaagtattatgcccayctggcagttatgatgcaaatgaatactgcactggaaactcaaaattgtttccagatcattaaggcttacctagactattcgctataccaccacctggctg

SEQ ID NO: 91599 - DNA, 201 bp, Homo sapiens
aaatattgtttatgaagatcttgaagctgatagtgaaagaggaaaggattatttttatcattgatgaggcccagtttgtggattcgacctcctggagattyatggagaagcttatccggactcttcctatcttcatcattatgtccctgtgtcccttcgttaacattccctgtgcagctgccagggccgtaataaagaaca

SEQ ID NO: 91600 - DNA, 201 bp, Homo sapiens
agcaaggcatttttctattttgtctgcttggacatcctgctttattctggttttgtttatagaacatttgaagaatgtttggaattcatacaccaatacgraaacaacagaatcctcaagttccacagtggactcctcctgggactttattcctctgtagctatctggtatgccagacttcaggaatgggacaacttttac

SEQ ID NO: 91601 - DNA, 201 bp, Homo sapiens
tagctatctggtatgccagacttcaggaatgggacaacttttacaaattttccaatagagctaaaaatcttttgccaagaagaaccatgacacttacttaytatgacggaatatctaggtacatggaggggcaagttcttcaccttcaaaaacaaatcaaagaacagtcagagaatgcccaagccagtggggaggagctac

SEQ ID NO: 91602 - DNA, 201 bp, Homo sapiens
gggaaaaggtacctgacgagctcactcatgctctggaatgtgctatggatatatttgacttctgctctcaagtccacaaaatccaaactgtatccatcggygttgccagtgggattgtcttctgtgggatcgttggacacactgtgagacacgagtacacagtcattggtcaaaaagtcaacttagctgccaggatgatga

SEQ ID NO: 91603 - DNA, 145 bp, Homo sapiens
cactccaggttcctacataatctcttctgttccagacacagaaacagacatgttgatttcttctctttctggagggcctacaagggtcaggagtgtcatgrtttacttcttcctaatgttacaaaaaattgcttttaccattcat

SEQ ID NO: 91604 - DNA, 201 bp, Homo sapiens
gagctaataccgtggacaatcatttctaacatgtcaaagaaaaaagattttaataagcactatgtccttgtgattatctattattgacctttctccgtggytggcccactccaggttcctacataatctcttctgttccagacacagaaacagacatgttgatttcttctctttctggagggcctacaagggtcaggagtg

SEQ ID NO: 91605 - DNA, 201 bp, Homo sapiens
ggcaaactgtctgcctttccttgctgtggcgcatctatagctacagttatctttttcactgcaagtattatgcccacctggcagttatgatgcaaatgaayactgcactggaaactcaaaattgtttccagatcattaaggcttacctagactattcgctataccaccacctggctggctacaaaggtgtgtggttcaaat

SEQ ID NO: 91606 - DNA, 201 bp, Homo sapiens
gctggctgaacatgaacaaagaatcatggtactcaacctctgagttaaaagaagaccaatggcttcagacgatcttgagtctcccatcatgggaaaaaatygtagcaggcagggtaaacattcaggatcttcaaaaaaacaaattcctgatgagagctaataccgtggacaatcatttctaacatgtcaaagaaaaaagat

SEQ ID NO: 91607 - DNA, 201 bp, Homo sapiens
ataacctgttcaagtattccattaagctaacagagaagttaaacatggttactctccatagtgataaggaaagtgaagaagtctgtcacctcacaagtggygtcagactgaaaaacctgtcacctccaacgtcattaaaagaaatctctctgatccagctggatagcatgagactttcccaccaaatgctggtgagatgtg

SEQ ID NO: 91608 - DNA, 201 bp, Homo sapiens
atgattgaaattgagagtgttccagatcagagagcagttaaggttaacttcttaaaaccaccccccaattttaattttgatgaatttttcacaaagtgtaygaccttcatgcattattatccttctggtgagcacaaaaacctcctgaggcttgcatgcacgctgaagcctgatcctgaactggagatgtccctacaaaag

SEQ ID NO: 91609 - DNA, 201 bp, Homo sapiens
gcaacagaaaggaggattaccctttgctgggacgtaataaagagatcaactacttcatgtatactatgaagaaatttttgatatctaacagcagccaagtyttaatgtatgagggattaccaggatatggaaaaagccagatacttatgaaaattgagtacctggcccaaggtaagaatcacaggattattgccatttcat

SEQ ID NO: 91610 - DNA, 201 bp, Homo sapiens
ggcttacgtctgtatattaatgggagatgggcagaaatgtggcctcttcctgaacacagccttgcggctctctgaaacacaggggaatatactggagaaaygctggctgaacatgaacaaagaatcatggtactcaacctctgagttaaaagaagaccaatggcttcagacgatcttgagtctcccatcatgggaaaaaat

SEQ ID NO: 91611 - DNA, 201 bp, Homo sapiens
tcttcctatcttcatcattatgtccctgtgtcccttcgttaacattccctgtgcagctgccagggccgtaataaagaacaggaacaccacctacattgtcrttggtgcagtacagcctaacgacatctccaacaagatctgtcttgacctcaatgtgagctgcatctccaaagaactggactcgtacctgggggagggaag

SEQ ID NO: 91612 - DNA, 201 bp, Homo sapiens
atgccagacttcaggaatgggacaacttttacaaattttccaatagagctaaaaatcttttgccaagaagaaccatgacacttacttactatgacggaatwtctaggtacatggaggggcaagttcttcaccttcaaaaacaaatcaaagaacagtcagagaatgcccaagccagtggggaggagctactcaaggaatcat

SEQ ID NO: 91613 - DNA, 201 bp, Homo sapiens; identical to SEQ ID NO: 91597

SEQ ID NO: 91614 - DNA, 201 bp, Homo sapiens; identical to SEQ ID NO: 91599

SEQ ID NO: 91615 - DNA, 201 bp, Homo sapiens; identical to SEQ ID NO: 91598

SEQ ID NO: 91616 - DNA, 201 bp, Homo sapiens
agcaaggcatttttctattttgtctgcttggacatcctgctttattctggttttgtttatagaacatttgaagaatgtttggaattcatacaccaatacgraaacaacagaatcctcaagttccacagtggactcctcctgggactttattcctctgtagctatctgggagtgtgaagcaggggtaggcaggagactacac

SEQ ID NO: 91617 - DNA, 201 bp, Homo sapiens
agagacccaggtatgccagacttcaggaatgggacaacttttacaaattttccaatagagctaaaaatcttttgccaagaagaaccatgacacttacttaytatgacggaatatctaggtacatggaggggcaagttcttcaccttcaaaaacaaatcaaagaacagtcagagaatgcccaagccagtggggaggagctac

SEQ ID NO: 91618 - DNA, 201 bp, Homo sapiens; identical to SEQ ID NO: 91602

SEQ ID NO: 91619 - DNA, 145 bp, Homo sapiens; identical to SEQ ID NO: 91603

SEQ ID NO: 91620 - DNA, 201 bp, Homo sapiens; identical to SEQ ID NO: 91604

SEQ ID NO: 91621 - DNA, 201 bp, Homo sapiens; identical to SEQ ID NO: 91605

SEQ ID NO: 91622 - DNA, 201 bp, Homo sapiens
gtggggaggagctactcaaggaatcatggtactcaacctctgagttaaaagaagaccaatggcttcagacgatcttgagtctcccatcatgggaaaaaatygtagcaggcagggtaaacattcaggatcttcaaaaaaacaaattcctgatgagagctaataccgtggacaatcatttctaacatgtcaaagaaaaaagat

SEQ ID NO: 91623 - DNA, 201 bp, Homo sapiens; identical to SEQ ID NO: 91607

SEQ ID NO: 91624 - DNA, 201 bp, Homo sapiens; identical to SEQ ID NO: 91608

SEQ ID NO: 91625 - DNA, 201 bp, Homo sapiens; identical to SEQ ID NO: 91609

SEQ ID NO: 91626 - DNA, 201 bp, Homo sapiens; identical to SEQ ID NO: 91611

SEQ ID NO: 91627 - DNA, 201 bp, Homo sapiens; identical to SEQ ID NO: 91596

SEQ ID NO: 91628 - DNA, 201 bp, Homo sapiens; identical to SEQ ID NO: 91597

SEQ ID NO: 91629 - DNA, 201 bp, Homo sapiens; identical to SEQ ID NO: 91598

SEQ ID NO: 91630 - DNA, 201 bp, Homo sapiens; identical to SEQ ID NO: 91599

SEQ ID NO: 91631 - DNA, 201 bp, Homo sapiens; identical to SEQ ID NO: 91600

SEQ ID NO: 91632 - DNA, 201 bp, Homo sapiens; identical to SEQ ID NO: 91601

SEQ ID NO: 91633 - DNA, 201 bp, Homo sapiens; identical to SEQ ID NO: 91602

SEQ ID NO: 91634 - DNA, 145 bp, Homo sapiens; identical to SEQ ID NO: 91603

SEQ ID NO: 91635 - DNA, 201 bp, Homo sapiens; identical to SEQ ID NO: 91604

SEQ ID NO: 91636 - DNA, 201 bp, Homo sapiens; identical to SEQ ID NO: 91605

SEQ ID NO: 91637 - DNA, 201 bp, Homo sapiens; identical to SEQ ID NO: 91606

SEQ ID NO: 91638 - DNA, 201 bp, Homo sapiens; identical to SEQ ID NO: 91607

SEQ ID NO: 91639 - DNA, 201 bp, Homo sapiens; identical to SEQ ID NO: 91608

SEQ ID NO: 91640 - DNA, 201 bp, Homo sapiens; identical to SEQ ID NO: 91609

SEQ ID NO: 91641 - DNA, 201 bp, Homo sapiens; identical to SEQ ID NO: 91610

SEQ ID NO: 91642 - DNA, 201 bp, Homo sapiens; identical to SEQ ID NO: 91611

SEQ ID NO: 91643 - DNA, 201 bp, Homo sapiens
ggtggaacagatgtgcccttttcagaggttgtgaagttagctccaaatcccagactagctgctaccccaagcccgggagcttctcaggtgagagaccatcrgaatttgtttgtagcatttgcattatgaaagcccgctagggttttttcccccaccaaaaggtcacctacattgaacgtgatgtgctcaactaaaggagaa

SEQ ID NO: 91644 - DNA, 201 bp, Homo sapiens
cttcagcacgcagcaggtaaaggttgttgctgttgatgcagagttgaatgtcttctatgaggaaagtgtgcattttgacagagatcttccagaatttgggyatgtacttgatgtgcatgtggcggtgttcatgtgcacaaggatgggctgacggtcacttctccagtactaatgtgggtccaggcactggatatcatcttg

SEQ ID NO: 91645 - DNA, 201 bp, Homo sapiens
ctctcagctgcctcacggggtcccgtgcctatgagcgttttacagggaaccaaattgcaaaaatttaccagcagaaccccgaggcctactcacatacagayagaatttctttggtcagtagctttgctgcttccctgttccttggctcttactcccctattgactacagtgatggttctggaatgaatttgttgcagatac

SEQ ID NO: 91646 - DNA, 201 bp, Homo sapiens
ggactgtttctccatcagcgactgcccggtgtggatggactccagcaccacagcccagtgccgccagctggaggctgctgtgggtggtgctcaggctctcmgctgcctcacggggtcccgtgcctatgagcgttttacagggaaccaaattgcaaaaatttaccagcagaaccccgaggcctactcacatacagagagaat

SEQ ID NO: 91647 - DNA, 201 bp, Homo sapiens
cggaagtatatactggaaggctggagcccagcaggcactgacaagcttatcaccagacctccggctacaccagcagcttcaggactgtttctccatcagcractgcccggtgtggatggactccagcaccacagcccagtgccgccagctggaggctgctgtgggtggtgctcaggctctcagctgcctcacggggtcccg

SEQ ID NO: 91648 - DNA, 201 bp, Homo sapiens
ttcatgtgcacaaggatgggctgacggtcacttctccagtactaatgtgggtccaggcactggatatcatcttggagaagatgaaggcttcgggcttcgamttctctcaagtcctagccttgtccggggcgggccagcaacacggaagtatatactggaaggctggagcccagcaggcactgacaagcttatcaccagacc

SEQ ID NO: 91649 - DNA, 201 bp, Homo sapiens
tgtccggggcgggccagcaacacggaagtatatactggaaggctggagcccagcaggcactgacaagcttatcaccagacctccggctacaccagcagctkcaggactgtttctccatcagcgactgcccggtgtggatggactccagcaccacagcccagtgccgccagctggaggctgctgtgggtggtgctcaggctc

SEQ ID NO: 91650 - DNA, 201 bp, Homo sapiens
gttgttgctgttgatgcagagttgaatgtcttctatgaggaaagtgtgcattttgacagagatcttccagaatttgggtatgtacttgatgtgcatgtggyggtgttcatgtgcacaaggatgggctgacggtcacttctccagtactaatgtgggtccaggcactggatatcatcttggagaagatgaaggcttcgggct

SEQ ID NO: 91651 - DNA, 201 bp, Homo sapiens
ctggtcccaggcttgccttggtgcctgtgcacctcatttagaggagaagcttagcccaccagtaccatcatgctcagttgtgggagccatttcttcctacwacgtccagcgctacggatttcctccaggatgcaaagtggtggccttcactggggacaacccagcgtcgctggcaggcatgagactggaggaaggtgacat

SEQ ID NO: 91652 - DNA, 201 bp, Homo sapiens
aagattttggccacaggaggagcatctcacaatagagaaatcttacaggtgcttgcagatgtgtttgatgccccggtgtatgttatagacactgccaactyggcctgtgtgggttctgcataccgagcttttcatggtcttgcaggtggaacagatgtgcccttttcagaggttgtgaagttagctccaaatcccagacta

SEQ ID NO: 91653 - DNA, 201 bp, Homo sapiens
aggctctcagctgcctcacggggtcccgtgcctatgagcgttttacagggaaccaaattgcaaaaatttaccagcagaaccccgaggcctactcacatacrgagagaatttctttggtcagtagctttgctgcttccctgttccttggctcttactcccctattgactacagtgatggttctggaatgaatttgttgcaga

SEQ ID NO: 91654 - DNA, 201 bp, Homo sapiens
agattttggccacaggaggagcatctcacaatagagaaatcttacaggtgcttgcagatgtgtttgatgccccggtgtatgttatagacactgccaactcsgcctgtgtgggttctgcataccgagcttttcatggtcttgcaggtggaacagatgtgcccttttcagaggttgtgaagttagctccaaatcccagactag

SEQ ID NO: 91655 - DNA, 201 bp, Homo sapiens
gcccttttcagaggttgtgaagttagctccaaatcccagactagctgctaccccaagcccgggagcttctcaggtgagagaccatcagaatttgtttgtarcatttgcattatgaaagcccgctagggttttttcccccaccaaaaggtcacctacattgaacgtgatgtgctcaactaaaggagaaattctgctttattg

SEQ ID NO: 91656 - DNA, 201 bp, Homo sapiens
tgccctggaaggccacatcttctgcaacccggttgactcccagcactacatggcactcctgtgctttaaaaatggctccctcatgagagagaagatccgcracgagtctgtatcccgttcctggagcgatttctctaaggcactgcagtccacagagatgggcaacggtggaaacctgggtttttattttgatgtaatgga

SEQ ID NO: 91657 - DNA, 201 bp, Homo sapiens
agatgtgtttgatgccccggtgtatgttatagacactgccaactcggcctgtgtgggttctgcataccgagcttttcatggtcttgcaggtggaacagatrtgcccttttcagaggttgtgaagttagctccaaatcccagactagctgctaccccaagcccgggagcttctcaggtgagagaccatcagaatttgtttgt

SEQ ID NO: 91658 - DNA, 201 bp, Homo sapiens
ctggagcccagcaggcactgacaagcttatcaccagacctccggctacaccagcagcttcaggactgtttctccatcagcgactgcccggtgtggatggamtccagcaccacagcccagtgccgccagctggaggctgctgtgggtggtgctcaggctctcagctgcctcacggggtcccgtgcctatgagcgttttacag

SEQ ID NO: 91659 - DNA, 201 bp, Homo sapiens
tccacttgctgaagaagttgtgtcatttctctggaagaatttccaaaattctggatttcttttttattttggagtatttcatcagctgaaaagtgattctyactttgagttttcttcctatatttgtatagtgagttcctttttccttcctctttatccctcctgttttactttatacctctctattccttgctcaaatta

SEQ ID NO: 91660 - DNA, 201 bp, Homo sapiens
gacttcagcacgcagcaggtaaaggttgttgctgttgatgcagagttgaatgtcttctatgaggaaagtgtgcattttgacagagatcttccagaatttgygactcagggcggtgttcatgtgcacaaggatgggctgacggtcacttctccagtactaatgtgggtccaggcactggatatcatcttggagaagatgaag

SEQ ID NO: 91661 - DNA, 201 bp, Homo sapiens
ctctatagaaagtcctctgtgatctgactcctgcagactcttccagatttttctgcccaaggcctttactgagctcaggactccagctaaatcaaaatackcatgttctcacccagagtgacaaaatcctgcagataggtttaagacctagtggatcagagcagtagctactgggaagttaaaaggaaggggcttagaaaa

SEQ ID NO: 91662 - DNA, 201 bp, Homo sapiens; identical to SEQ ID NO: 91645

SEQ ID NO: 91663 - DNA, 201 bp, Homo sapiens; identical to SEQ ID NO: 91646

SEQ ID NO: 91664 - DNA, 201 bp, Homo sapiens; identical to SEQ ID NO: 91647

SEQ ID NO: 91665 - DNA, 201 bp, Homo sapiens; identical to SEQ ID NO: 91648

SEQ ID NO: 91666 - DNA, 201 bp, Homo sapiens; identical to SEQ ID NO: 91649

SEQ ID NO: 91667 - DNA, 201 bp, Homo sapiens
cgcagcaggtaaaggttgttgctgttgatgcagagttgaatgtcttctatgaggaaagtgtgcattttgacagagatcttccagaatttgggactcagggyggtgttcatgtgcacaaggatgggctgacggtcacttctccagtactaatgtgggtccaggcactggatatcatcttggagaagatgaaggcttcgggct

SEQ ID NO: 91668 - DNA, 201 bp, Homo sapiens; identical to SEQ ID NO: 91651

SEQ ID NO: 91669 - DNA, 201 bp, Homo sapiens; identical to SEQ ID NO: 91652

SEQ ID NO: 91670 - DNA, 201 bp, Homo sapiens; identical to SEQ ID NO: 91653

SEQ ID NO: 91671 - DNA, 201 bp, Homo sapiens
gcccaaggcctttactgagctcaggactccagctaaatcaaaatactcatgttctcacccagagtgacaaaatcctgcagataggtttaagacctagtggmtcagagcagtagctactgggaagttaaaaggaaggggcttagaaaatgaatgggaccaaaggcatcacttctgatggagatgaagccatcttgaaagtga

SEQ ID NO: 91672 - DNA, 201 bp, Homo sapiens
gtgagtggtgtcctttggaggcatggtggatgaaaggcgcaaaggaagcaagaggttaaagataatggcccattagatacaacagcaagcccaagattccraagaagacagacaactccccctagtaccacctagacattactttttaaagacattttacattattgtccagcagaaaaaggctgtcttggaccatgaaac

SEQ ID NO: 91673 - DNA, 201 bp, Homo sapiens; identical to SEQ ID NO: 91654

SEQ ID NO: 91674 - DNA, 201 bp, Homo sapiens; identical to SEQ ID NO: 91656

SEQ ID NO: 91675 - DNA, 201 bp, Homo sapiens
agatgtgtttgatgccccggtgtatgttatagacactgccaactcggcctgtgtgggttctgcataccgagcttttcatggtcttgcaggtggaacagatrtgcccttttcagaggttgtgaagttagctccaaatcccagactagctgctaccccaagcccgggagcttctcaggtctacgaggcccttctcccccagta

SEQ ID NO: 91676 - DNA, 201 bp, Homo sapiens
aatctagggactcaaatcagcagaatgggggagacaaagcccggtctcaccccctaacctcatcctatctctttctccaaccctgactgcccactcctccrcaaaccgtgacccatagccgcccccaccccataccttgatctaccatccatcctcttccccaatccaaaccccacagtctcttctctcccacaccctgcc

SEQ ID NO: 91677 - DNA, 201 bp, Homo sapiens; identical to SEQ ID NO: 91658

SEQ ID NO: 91678 - DNA, 201 bp, Homo sapiens
cttcagcacgcagcaggtaaaggttgttgctgttgatgcagagttgaatgtcttctatgaggaaagtgtgcattttgacagagatcttccagaatttgggyatgtacttgatgtgcatgtgactcagggcggtgttcatgtgcacaaggatgggctgacggtcacttctccagtactaatgtgggtccaggcactggatat

SEQ ID NO: 91679 - DNA, 201 bp, Homo sapiens; identical to SEQ ID NO: 91643

SEQ ID NO: 91680 - DNA, 201 bp, Homo sapiens; identical to SEQ ID NO: 91645

SEQ ID NO: 91681 - DNA, 201 bp, Homo sapiens; identical to SEQ ID NO: 91646

SEQ ID NO: 91682 - DNA, 201 bp, Homo sapiens; identical to SEQ ID NO: 91647

SEQ ID NO: 91683 - DNA, 201 bp, Homo sapiens; identical to SEQ ID NO: 91648

SEQ ID NO: 91684 - DNA, 201 bp, Homo sapiens; identical to SEQ ID NO: 91649

SEQ ID NO: 91685 - DNA, 201 bp, Homo sapiens
ctgttgatgcagagttgaatgtcttctatgaggaaagtgtgcattttgacagagatcttccagaatttgggtatgtacttgatgtgcatgtgactcagggyggtgttcatgtgcacaaggatgggctgacggtcacttctccagtactaatgtgggtccaggcactggatatcatcttggagaagatgaaggcttcgggct

SEQ ID NO: 91686 - DNA, 201 bp, Homo sapiens; identical to SEQ ID NO: 91651

SEQ ID NO: 91687 - DNA, 201 bp, Homo sapiens; identical to SEQ ID NO: 91652

SEQ ID NO: 91688 - DNA, 201 bp, Homo sapiens; identical to SEQ ID NO: 91653

SEQ ID NO: 91689 - DNA, 201 bp, Homo sapiens; identical to SEQ ID NO: 91654

SEQ ID NO: 91690 - DNA, 201 bp, Homo sapiens; identical to SEQ ID NO: 91655

SEQ ID NO: 91691 - DNA, 201 bp, Homo sapiens; identical to SEQ ID NO: 91656

SEQ ID NO: 91692 - DNA, 201 bp, Homo sapiens; identical to SEQ ID NO: 91657

SEQ ID NO: 91693 - DNA, 201 bp, Homo sapiens; identical to SEQ ID NO: 91658

SEQ ID NO: 91694 - DNA, 201 bp, Homo sapiens
cacagctggaaactctagccaggtgagtgatggggcagctgccatcctgctggcccggaggtccaaggcagaagagttgggccttcccatccttggggtcmtgaggtcttatgcagtggttggggtcccacctgacatcatgggcattggacctgcctatgccatcccagtagctttgcaaaaagcagggctgacagtgag

SEQ ID NO: 91695 - DNA, 201 bp, Homo sapiens
ggcaccaagaggagcatcactgtgacccaggatgagggtatccgccccagcaccaccatggagggcctggccaaactgaagcctgccttcaagaaagatgkttctaccacagctggaaactctagccaggtgagtgatggggcagctgccatcctgctggcccggaggtccaaggcagaagagttgggccttcccatcctt

SEQ ID NO: 91696 - DNA, 201 bp, Homo sapiens
ctcaccgagcacaccttccaccaccatcgtggactcgtacagctcactactcctgtggggagcatgtgggggctgaggcctccctattccttgagacacarcaatattgaaattagaccaactgataaccctacaatagcctctaagtcttcaagtgaaaagaagagtcgtacgtatctcactttaaatcaaaatgattaa

SEQ ID NO: 91697 - DNA, 201 bp, Homo sapiens
atgtgctgcagcctggggccggggcaatcatggcccgaatcgcccagtttctgagtgacatcccggagactgtgcctttgtccactgtcaatagacagtgytcgtcggggctacaggcagtggccagcatagcaggtggcatcagaaatgggtcttatgacattggcatggcctgtggggtggagtccatgtccctggctg

SEQ ID NO: 91698 - DNA, 201 bp, Homo sapiens
atgggtcttatgacattggcatggcctgtggggtggagtccatgtccctggctgacagagggaaccctggaaatattacttcgcgcttgatggagaaggasaaggccagagattgcctgattcctatggggataacctctgagaatgtggctgagcggtttggcatttcacgggagaagcaggatacctttgccctggctt

SEQ ID NO: 91699 - DNA, 201 bp, Homo sapiens
agattgtgcctgtgaccaccacggtccatgatgacaagggcaccaagaggagcatcactgtgacccaggatgagggtatccgccccagcaccaccatggarggcctggccaaactgaagcctgccttcaagaaagatggttctaccacagctggaaactctagccaggtgagtgatggggcagctgccatcctgctggccc

SEQ ID NO: 91700 - DNA, 201 bp, Homo sapiens
agcaggatacctttgccctggcttcccagcagaaggcagcaagagcccagagcaagggctgtttccaagctgagattgtgcctgtgaccaccacggtccakgatgacaagggcaccaagaggagcatcactgtgacccaggatgagggtatccgccccagcaccaccatggagggcctggccaaactgaagcctgccttca

SEQ ID NO: 91701 - DNA, 201 bp, Homo sapiens
tgaatctgaggccggaacagctgggggacatctgtgtcggaaatgtgctgcagcctggggccggggcaatcatggcccgaatcgcccagtttctgagtgayatcccggagactgtgcctttgtccactgtcaatagacagtgttcgtcggggctacaggcagtggccagcatagcaggtggcatcagaaatgggtcttatg

SEQ ID NO: 91702 - DNA, 201 bp, Homo sapiens
ggcaccaagaggagcatcactgtgacccaggatgagggtatccgccccagcaccaccatggagggcctggccaaactgaagcctgccttcaagaaagatgkttctaccacagctgggctgacagtgagtgacgtggacatcttcgagatcaatgaggcctttgcaagccaggctgcctactgtgtggagaagctacgactc

SEQ ID NO: 91703 - DNA, 201 bp, Homo sapiens; identical to SEQ ID NO: 91696

SEQ ID NO: 91704 - DNA, 201 bp, Homo sapiens
atgtgctgcagcctggggccggggcaatcatggcccgaatcgcccagtttctgagtgacatcccggagactgtgcctttgtccactgtcaatagacagtgytcgtcggggctacaggcagtggccagcatagcaggtggcatcagaaatgggtcttatgacattggcatggcctgtgggataacctctgagaatgtggctg

SEQ ID NO: 91705 - DNA, 201 bp, Homo sapiens
agattgtgcctgtgaccaccacggtccatgatgacaagggcaccaagaggagcatcactgtgacccaggatgagggtatccgccccagcaccaccatggarggcctggccaaactgaagcctgccttcaagaaagatggttctaccacagctgggctgacagtgagtgacgtggacatcttcgagatcaatgaggcctttg

SEQ ID NO: 91706 - DNA, 201 bp, Homo sapiens; identical to SEQ ID NO: 91701

SEQ ID NO: 91707 - DNA, 201 bp, Homo sapiens; identical to SEQ ID NO: 91700

SEQ ID NO: 91708 - DNA, 201 bp, Homo sapiens
gcccctaggaaactctagccaggtgagtgatggggcagctgccatcctgctggcccggaggtccaaggcagaagagttgggccttcccatccttggggtcmtgaggtcttatgcagtggttggggtcccacctgacatcatgggcattggacctgcctatgccatcccagtagctttgcaaaaagcagggctgacagtgag

SEQ ID NO: 91709 - DNA, 201 bp, Homo sapiens
ggcaccaagaggagcatcactgtgacccaggatgagggtatccgccccagcaccaccatggagggcctggccaaactgaagcctgccttcaagaaagatgkttctaccacagctggtgagactggtccggggtaggggtatgagaaagcaggccatggccatgctgggtgctgtactctgggaacctggaatagaccaggc

SEQ ID NO: 91710 - DNA, 201 bp, Homo sapiens
tcggggctacaggcagtggccagcatagcagggtggagtccatgtccctggctgacagagggaaccctggaaatattacttcgcgcttgatggagaaggasaaggccagagattgcctgattcctatggggataacctctgagaatgtggctgagcggtttggcatttcacgggagaagcaggatacctttgccctggctt

SEQ ID NO: 91711 - DNA, 201 bp, Homo sapiens
atgtgctgcagcctggggccggggcaatcatggcccgaatcgcccagtttctgagtgacatcccggagactgtgcctttgtccactgtcaatagacagtgytcgtcggggctacaggcagtggccagcatagcagggtggagtccatgtccctggctgacagagggaaccctggaaatattacttcgcgcttgatggagaa

SEQ ID NO: 91712 - DNA, 201 bp, Homo sapiens
agattgtgcctgtgaccaccacggtccatgatgacaagggcaccaagaggagcatcactgtgacccaggatgagggtatccgccccagcaccaccatggarggcctggccaaactgaagcctgccttcaagaaagatggttctaccacagctggtgagactggtccggggtaggggtatgagaaagcaggccatggccatg

SEQ ID NO: 91713 - DNA, 201 bp, Homo sapiens; identical to SEQ ID NO: 91700

SEQ ID NO: 91714 - DNA, 201 bp, Homo sapiens
catggagtttcttatgtcttccttttctacatacacacggaaatgtgctgcagcctggggccggggcaatcatggcccgaatcgcccagtttctgagtgayatcccggagactgtgcctttgtccactgtcaatagacagtgttcgtcggggctacaggcagtggccagcatagcagggtggagtccatgtccctggctga

SEQ ID NO: 91715 - DNA, 201 bp, Homo sapiens
accacaaaagcaaaaccacatgggaaaactcagcactggtggtggtggcagtggacagatcaaggcacttcaactcatttggaaaatgtgaacactgatgwcatggtataggagtgggtggggtgttgagccacccatcagaccctctttagctgtgcaagataaaagcagcctgggtcacccaggccacaaggccatggt

SEQ ID NO: 91716 - DNA, 201 bp, Homo sapiens
cacagctggaaactctagccaggtgagtgatggggcagctgccatcctgctggcccggaggtccaaggcagaagagttgggccttcccatccttggggtcmtgaggtcttatgcagtggttggggtcccacctgacatcatgggcattggacctgcctatgccatcccagtagctttgcaaaaagcaggtaaggtggctcc

SEQ ID NO: 91717 - DNA, 201 bp, Homo sapiens; identical to SEQ ID NO: 91695

SEQ ID NO: 91718 - DNA, 201 bp, Homo sapiens; identical to SEQ ID NO: 91696

SEQ ID NO: 91719 - DNA, 201 bp, Homo sapiens; identical to SEQ ID NO: 91710

SEQ ID NO: 91720 - DNA, 201 bp, Homo sapiens; identical to SEQ ID NO: 91711

SEQ ID NO: 91721 - DNA, 201 bp, Homo sapiens; identical to SEQ ID NO: 91699

SEQ ID NO: 91722 - DNA, 201 bp, Homo sapiens
tgaatctgaggccggaacagctgggggacatctgtgtcggaaatgtgctgcagcctggggccggggcaatcatggcccgaatcgcccagtttctgagtgayatcccggagactgtgcctttgtccactgtcaatagacagtgttcgtcggggctacaggcagtggccagcatagcagggtggagtccatgtccctggctga

SEQ ID NO: 91723 - DNA, 201 bp, Homo sapiens; identical to SEQ ID NO: 91700

SEQ ID NO: 91724 - DNA, 201 bp, Homo sapiens; identical to SEQ ID NO: 91708

SEQ ID NO: 91725 - DNA, 201 bp, Homo sapiens
ggcaccaagaggagcatcactgtgacccaggatgagggtatccgccccagcaccaccatggagggcctggccaaactgaagcctgccttcaagaaagatgkttctaccacagctgtttgcccctaggaaactctagccaggtgagtgatggggcagctgccatcctgctggcccggaggtccaaggcagaagagttgggcc

SEQ ID NO: 91726 - DNA, 201 bp, Homo sapiens; identical to SEQ ID NO: 91710

SEQ ID NO: 91727 - DNA, 201 bp, Homo sapiens; identical to SEQ ID NO: 91711

SEQ ID NO: 91728 - DNA, 201 bp, Homo sapiens
agattgtgcctgtgaccaccacggtccatgatgacaagggcaccaagaggagcatcactgtgacccaggatgagggtatccgccccagcaccaccatggarggcctggccaaactgaagcctgccttcaagaaagatggttctaccacagctgtttgcccctaggaaactctagccaggtgagtgatggggcagctgccat

SEQ ID NO: 91729 - DNA, 201 bp, Homo sapiens; identical to SEQ ID NO: 91700

SEQ ID NO: 91730 - DNA, 201 bp, Homo sapiens; identical to SEQ ID NO: 91722

SEQ ID NO: 91731 - DNA, 201 bp, Homo sapiens; identical to SEQ ID NO: 91715

SEQ ID NO: 91732 - DNA, 201 bp, Homo sapiens; identical to SEQ ID NO: 91694

SEQ ID NO: 91733 - DNA, 201 bp, Homo sapiens; identical to SEQ ID NO: 91695

SEQ ID NO: 91734 - DNA, 201 bp, Homo sapiens; identical to SEQ ID NO: 91697

SEQ ID NO: 91735 - DNA, 201 bp, Homo sapiens; identical to SEQ ID NO: 91698

SEQ ID NO: 91736 - DNA, 201 bp, Homo sapiens; identical to SEQ ID NO: 91699

SEQ ID NO: 91737 - DNA, 201 bp, Homo sapiens; identical to SEQ ID NO: 91701

SEQ ID NO: 91738 - DNA, 201 bp, Homo sapiens; identical to SEQ ID NO: 91700

SEQ ID NO: 91739 - DNA, 201 bp, Homo sapiens; identical to SEQ ID NO: 91715

SEQ ID NO: 91740 - DNA, 201 bp, Homo sapiens
ctgggccccatgctgttgaaccgaccactggatggggtcaccaacagcctgccctcccctgagcaactgaaggggaagatcctgctgaaggggaagaagcycggggggctcctgccccctggaggggagggtggccctgaggccactgtggtgtcagacgaagacgaggctgctgagatggaggatgaggcagtgaggagc

SEQ ID NO: 91741 - DNA, 201 bp, Homo sapiens
gggccccatgctgttgaaccgaccactggatggggtcaccaacagcctgccctcccctgagcaactgaaggggaagatcctgctgaaggggaagaagctckgggggctcctgccccctggaggggagggtggccctgaggccactgtggtgtcagacgaagacgaggctgctgagatggaggatgaggcagtgaggagccg

SEQ ID NO: 91742 - DNA, 201 bp, Homo sapiens
cagggctggtgtggctgctcccagcctcttgctcagagctaggcccccaaattgccttcagccctaacatagtgtctgctgctgcctccctggggaccagragctagcccagtccctggagctgtccttcattccgttaggaataacactgcagccctctccaccctccggccagcgagtggtcaaggatttttataaaaa

SEQ ID NO: 91743 - DNA, 201 bp, Homo sapiens
ggatggggtcaccaacagcctgccctcccctgagcaactgaaggggaagatcctgctgaaggggaagaagctcggggggctcctgccccctggaggggagrgtggccctgaggccactgtggtgtcagacgaagacgaggctgctgagatggaggatgaggcagtgaggagccgtgtgcagcacaagcccaaggaggacaa

SEQ ID NO: 91744 - DNA, 201 bp, Homo sapiens
atggggtcaccaacagcctgccctcccctgagcaactgaaggggaagatcctgctgaaggggaagaagctcggggggctcctgccccctggaggggagggkggccctgaggccactgtggtgtcagacgaagacgaggctgctgagatggaggatgaggcagtgaggagccgtgtgcagcacaagcccaaggaggacaagc

SEQ ID NO: 91745 - DNA, 201 bp, Homo sapiens
caaaaacaaggacaacaagatgagcttcaaggagctgcagaacttcctgaaggagctcaacatccaggtggacgacagctatgcccggaagatcttcaggragtgtgaccactcccagacagactccctggaggacgaggagattgaggccttctacaagatgctgacccagcgggtggagatcgaccgcaccttcgccga

SEQ ID NO: 91746 - DNA, 201 bp, Homo sapiens
tctacgagatggcgtccttctctgagaaccgtgcccttcgactgctccaagaatcaggaaacggctttgtccgccacaacgtggggcacctgagcagaatmtacccggctggatggagaacagactcctccaactacagccccgtggagatgtggaatgggggctgccagatcgtggccctgaatttccagacacctgggc

SEQ ID NO: 91747 - DNA, 201 bp, Homo sapiens
tcctgggccccatgctgttgaaccgaccactggatggggtcaccaacagcctgccctcccctgagcaactgaaggggaagatcctgctgaaggggaagaarctcggggggctcctgccccctggaggggagggtggccctgaggccactgtggtgtcagacgaagacgaggctgctgagatggaggatgaggcagtgagga

SEQ ID NO: 91748 - DNA, 201 bp, Homo sapiens
gactcctccaactacagccccgtggagatgtggaatgggggctgccagatcgtggccctgaatttccagacacctgggccagagatggacgtgtaccaggrccgcttccaggacaacggggcctgtgggtacgtgctgaagcccgccttcctgcgagaccccaacggcacctttaacccccgcgccctggctcaggggccc

SEQ ID NO: 91749 - DNA, 152 bp, Homo sapiens
cctaacatagtgtctgctgctgcctccctggggaccaggagctagcccagtccctggagctgtccttcattccgttaggaataacactgcagccctctccmccctccggccagcgagtggtcaaggatttttataaaaatcacgataagatt

SEQ ID NO: 91750 - DNA, 201 bp, Homo sapiens
tggatggggtcaccaacagcctgccctcccctgagcaactgaaggggaagatcctgctgaaggggaagaagctcggggggctcctgccccctggaggggarggtggccctgaggccactgtggtgtcagacgaagacgaggctgctgagatggaggatgaggcagtgaggagccgtgtgcagcacaagcccaaggaggaca

SEQ ID NO: 91751 - DNA, 201 bp, Homo sapiens
ctggatggggtcaccaacagcctgccctcccctgagcaactgaaggggaagatcctgctgaaggggaagaagctcggggggctcctgccccctggaggggrgggtggccctgaggccactgtggtgtcagacgaagacgaggctgctgagatggaggatgaggcagtgaggagccgtgtgcagcacaagcccaaggaggac

SEQ ID NO: 91752 - DNA, 201 bp, Homo sapiens
ctggaggggagggtggccctgaggccactgtggtgtcagacgaagacgaggctgctgagatggaggatgaggcagtgaggagccgtgtgcagcacaagccmaaggaggacaagctcaggctagcacaggagctctctgacatggtcatttactgcaagagtgtccactttgggggcttctccagtcctggcacccctggac

SEQ ID NO: 91753 - DNA, 201 bp, Homo sapiens
attcaggaggtgcgaatggggcaccgcacggagggtctggagaagttcgcccgtgatgtgcccgaggaccgctgcttctccattgtcttcaaggaccagcrcaatacactagacctcatcgccccatcgccagctgatgcccagcactgggtgctggggctgcacaagatcatccaccactcaggctccatggaccagcgt

SEQ ID NO: 91754 - DNA, 201 bp, Homo sapiens
tcaggggagactctgtcggtggatcagttagtgacgttcctgcagcaccagcagcgggaggaggcggcagggcctgcgctggccctctccctcattgagcrctacgagcccagcgagactgccaaggcgcagcggcagatgaccaaggacggcttcctcatgtacttactgtcggctgacggcagcgccttcagcctggca

SEQ ID NO: 91755 - DNA, 201 bp, Homo sapiens
cctgggccccatgctgttgaaccgaccactggatggggtcaccaacagcctgccctcccctgagcaactgaaggggaagatcctgctgaaggggaagaagstcggggggctcctgccccctggaggggagggtggccctgaggccactgtggtgtcagacgaagacgaggctgctgagatggaggatgaggcagtgaggag

SEQ ID NO: 91756 - DNA, 201 bp, Homo sapiens; identical to SEQ ID NO: 91740

SEQ ID NO: 91757 - DNA, 201 bp, Homo sapiens; identical to SEQ ID NO: 91741

SEQ ID NO: 91758 - DNA, 201 bp, Homo sapiens; identical to SEQ ID NO: 91742

SEQ ID NO: 91759 - DNA, 201 bp, Homo sapiens; identical to SEQ ID NO: 91743

SEQ ID NO: 91760 - DNA, 201 bp, Homo sapiens; identical to SEQ ID NO: 91744

SEQ ID NO: 91761 - DNA, 201 bp, Homo sapiens; identical to SEQ ID NO: 91745

SEQ ID NO: 91762 - DNA, 201 bp, Homo sapiens; identical to SEQ ID NO: 91746

SEQ ID NO: 91763 - DNA, 201 bp, Homo sapiens; identical to SEQ ID NO: 91747

SEQ ID NO: 91764 - DNA, 201 bp, Homo sapiens; identical to SEQ ID NO: 91748

SEQ ID NO: 91765 - DNA, 152 bp, Homo sapiens; identical to SEQ ID NO: 91749

SEQ ID NO: 91766 - DNA, 201 bp, Homo sapiens; identical to SEQ ID NO: 91750

SEQ ID NO: 91767 - DNA, 201 bp, Homo sapiens; identical to SEQ ID NO: 91751

SEQ ID NO: 91768 - DNA, 201 bp, Homo sapiens; identical to SEQ ID NO: 91752

SEQ ID NO: 91769 - DNA, 201 bp, Homo sapiens; identical to SEQ ID NO: 91753

SEQ ID NO: 91770 - DNA, 201 bp, Homo sapiens; identical to SEQ ID NO: 91754

SEQ ID NO: 91771 - DNA, 201 bp, Homo sapiens; identical to SEQ ID NO: 91755

SEQ ID NO: 91772 - DNA, 201 bp, Homo sapiens
tggagatttaagagtggcttgggatgctgtgtcccaaggaatttcttttcacctcttggttgggctggagggaaaaggagtggctcctagagtcctggggktcaccccagggcttttgctgactctgggaaagagtctggagaccacatttggttctcgaaccatctacctgcttttcctctctctcccaaggcctgacaa

SEQ ID NO: 91773 - DNA, 201 bp, Homo sapiens
catgacgtgcctgcagacctcctgacctatgacaggactgatgaggctgatgcagaggagaggggtcctgaggagaactatagcaggccagaggcacccartgagttctatgatggagaccatgacaatgacaaggaaagcgatgtggagatttaagagtggcttgggatgctgtgtcccaaggaatttcttttcacctct

SEQ ID NO: 91774 - DNA, 201 bp, Homo sapiens
gaatgctatgtttggcttcatatagtctccaggactgggttcagtatgggtggtctgagcctgtggagtggggctgaccctgcctgggttcatcttgtgtmtccatcccgaggtcttcaagccataccaggcctcccaacatgacatgtgccgcttccactccgaggactacattgacttcctgcagagagtcagccccac

SEQ ID NO: 91775 - DNA, 201 bp, Homo sapiens
ctcgggtgctctacattgacattgacatccaccatggtgacggggttcaagaagctttctacctcactgaccgggtcatgacggtgtccttccacaaatayggaaattacttcttccctggcacaggtgacatgtatgaagtcggggcagagagtggccgctactactgtctgaacgtgcccctgcgggatggcattgatg

SEQ ID NO: 91776 - DNA, 201 bp, Homo sapiens
tacaagcaccttttccagccggttatcaaccaggtagtggacttctaccaacccacgtgcattgtgctccagtgtggagctgactctctgggctgtgatcsattgggctgctttaacctcagcatccgagggcatggggaatgcgttgaatatgtcaagagcttcaatatccctctactcgtgctgggtggtggtggttat

SEQ ID NO: 91777 - DNA, 201 bp, Homo sapiens
ggctctggctccctaacacctgaatcccagatgatgggaagtatgttttcaagtgtggggaggatatgaaaatgttctgttctcacttttggctttatgtycattttaccactgtttttatccaataaactaagtcggtattttttgtacctttcgcctttctaggaatgttaattcttgctagtttcctatttatgaaag

SEQ ID NO: 91778 - DNA, 201 bp, Homo sapiens
gttcagtatgggtggtctgagcctgtggagtggggctgaccctgcctgggttcatcttgtgtctccatcccgaggtcttcaagccataccaggcctcccarcatgacatgtgccgcttccactccgaggactacattgacttcctgcagagagtcagccccaccaatatgcaaggcttcaccaagagtcttaatgccttca

SEQ ID NO: 91779 - DNA, 201 bp, Homo sapiens
ggtacctattagggatgagatacagacaaggatagctatctgggacattattggcagtgggccctggaggccagtccctagccccccttgccccttatttyttccctgcttccctcgaacccagagatttttgagggatgaacgggtagacaaggactgagattgcctctgacttcctcctcccctgggttctgacttctt

SEQ ID NO: 91780 - DNA, 147 bp, Homo sapiens
ggccggggaggggctggcggcggccgcgggcggcgggcggcggaggygcggggcctgctcccgccggcaccatggccaagaccgtggcctatttctacgaccccgacgtgggcaacttccactacggagctggacaccctatgaagc

SEQ ID NO: 91781 - DNA, 201 bp, Homo sapiens
cggggcctgctcccgccggcaccatggccaagaccgtggcctatttctacgaccccgacgtgggcaacttccactacggagctggacaccctatgaagccycatcgcctggcattgacccatagcctggtcctgcattacggtctctataagaagatgatcgtcttcaagccataccaggcctcccaacatgacatgtgcc

SEQ ID NO: 91782 - DNA, 201 bp, Homo sapiens; identical to SEQ ID NO: 91772

SEQ ID NO: 91783 - DNA, 201 bp, Homo sapiens; identical to SEQ ID NO: 91773

SEQ ID NO: 91784 - DNA, 201 bp, Homo sapiens; identical to SEQ ID NO: 91775

SEQ ID NO: 91785 - DNA, 201 bp, Homo sapiens; identical to SEQ ID NO: 91776

SEQ ID NO: 91786 - DNA, 201 bp, Homo sapiens; identical to SEQ ID NO: 91777

SEQ ID NO: 91787 - DNA, 146 bp, Homo sapiens
ggccggggaggggctggcggcggccgcgggcggcgggcggcggagktgcggggcctgctcccgccggcaccatggccaagaccgtggcctatttctacgaccccgacgtgggcaacttccactacggagctggacaccctatgaag

SEQ ID NO: 91788 - DNA, 201 bp, Homo sapiens
accctatgaagccccatcgcctggcattgacccatagcctggtcctgcattacggtctctataagaagatgatcgtcttcaagccataccaggcctcccarcatgacatgtgccgcttccactccgaggactacattgacttcctgcagagagtcagccccaccaatatgcaaggcttcaccaagagtcttaatgccttca

SEQ ID NO: 91789 - DNA, 201 bp, Homo sapiens; identical to SEQ ID NO: 91779

SEQ ID NO: 91790 - DNA, 201 bp, Homo sapiens; identical to SEQ ID NO: 91781

SEQ ID NO: 91791 - DNA, 147 bp, Homo sapiens; identical to SEQ ID NO: 91780

SEQ ID NO: 91792 - DNA, 201 bp, Homo sapiens; identical to SEQ ID NO: 91773

SEQ ID NO: 91793 - DNA, 201 bp, Homo sapiens; identical to SEQ ID NO: 91775

SEQ ID NO: 91794 - DNA, 201 bp, Homo sapiens; identical to SEQ ID NO: 91776

SEQ ID NO: 91795 - DNA, 201 bp, Homo sapiens; identical to SEQ ID NO: 91777

SEQ ID NO: 91796 - DNA, 146 bp, Homo sapiens; identical to SEQ ID NO: 91787

SEQ ID NO: 91797 - DNA, 201 bp, Homo sapiens; identical to SEQ ID NO: 91788

SEQ ID NO: 91798 - DNA, 201 bp, Homo sapiens; identical to SEQ ID NO: 91779

SEQ ID NO: 91799 - DNA, 201 bp, Homo sapiens; identical to SEQ ID NO: 91781

SEQ ID NO: 91800 - DNA, 147 bp, Homo sapiens; identical to SEQ ID NO: 91780

SEQ ID NO: 91801 - DNA, 201 bp, Homo sapiens; identical to SEQ ID NO: 91772

SEQ ID NO: 91802 - DNA, 201 bp, Homo sapiens; identical to SEQ ID NO: 91773

SEQ ID NO: 91803 - DNA, 201 bp, Homo sapiens; identical to SEQ ID NO: 91775

SEQ ID NO: 91804 - DNA, 201 bp, Homo sapiens; identical to SEQ ID NO: 91776

SEQ ID NO: 91805 - DNA, 201 bp, Homo sapiens; identical to SEQ ID NO: 91777

SEQ ID NO: 91806 - DNA, 146 bp, Homo sapiens; identical to SEQ ID NO: 91787

SEQ ID NO: 91807 - DNA, 201 bp, Homo sapiens; identical to SEQ ID NO: 91788

SEQ ID NO: 91808 - DNA, 201 bp, Homo sapiens; identical to SEQ ID NO: 91779

SEQ ID NO: 91809 - DNA, 201 bp, Homo sapiens
tgaggaaagaggttgctgaaacctcagcaggccccagtgtggttagtgtgaaaaccgatggaggggatcccagtggactgctgaagaacttccaggacatyatgcaaaagcaaagaccagaaagagtgtctcatcttcttcaagataacttgccaaaatctgtttccacttttcagtatgatcgtttctttgagaaaaaaa

SEQ ID NO: 91810 - DNA, 201 bp, Homo sapiens
cttatcccgagtcccccaggcctttctgcagaaagcaggcaaatctctgttgttctatgcccaaaactgccccaagatgatggaagttggggccaagccakcccctcgggcattgtccactgcagcagtacactaccaacagatcaaagaaacccctccggccagtgagaaagacaaaactgctaaggccaaggtccaaca

SEQ ID NO: 91811 - DNA, 201 bp, Homo sapiens
attcttatcccgagtcccccaggcctttctgcagaaagcaggcaaatctctgttgttctatgcccaaaactgccccaagatgatggaagttggggccaagycagcccctcgggcattgtccactgcagcagtacactaccaacagatcaaagaaacccctccggccagtgagaaagacaaaactgctaaggccaaggtcca

SEQ ID NO: 91812 - DNA, 201 bp, Homo sapiens
cctcaattatttcacttaaccccaggccattatcatatccagatggtcttcagagttgtctttatatgtgaattaagttatattaaattttaatctatagkaaaaacatagtcctggaaataaattcttgcttaaatggtggttctttctgctattggctactggataacattcttcattggctagacacagtggctaaca

SEQ ID NO: 91813 - DNA, 201 bp, Homo sapiens
cggtgtgcccactggaagagctgtgtgatgtggcccatgagtttggagcaatcaccttcgtggatgaggtccacgcagtggggctttatggggctcgaggyggagggattggggatcgggatggagtcatgccaaaaatggacatcatttctggaacacttggcaaagcctttggttgtgttggagggtacatcgccagca

SEQ ID NO: 91814 - DNA, 201 bp, Homo sapiens
tgcccgcctccttcgccgccgcctctgcagtcctcagcgcaggagccagcatacttcctgaacatggagagtgttgttcgccgctgcccattcttatcccragtcccccaggcctttctgcagaaagcaggcaaatctctgttgttctatgcccaaaactgccccaagatgatggaagttggggccaagccagcccctcgg

SEQ ID NO: 91815 - DNA, 201 bp, Homo sapiens
gccacaatgatgtcagccacctcagagaactgctgcaaagatctgacccctcagtccccaagattgtggcatttgaaactgtccattcaatggatggggcrgtgtgcccactggaagagctgtgtgatgtggcccatgagtttggagcaatcaccttcgtggatgaggtccacgcagtggggctttatggggctcgaggcg

SEQ ID NO: 91816 - DNA, 131 bp, Homo sapiens
ggcgccggcgatcgcggcctgaggctgctcycggacaagggcaacgagcgtttcgtttggacttctcgacttgagtgcccgcctccttcgccgccgcctctgcagtcctcagcgcaggagccagcatactt

SEQ ID NO: 91817 - DNA, 201 bp, Homo sapiens; identical to SEQ ID NO: 91809

SEQ ID NO: 91818 - DNA, 201 bp, Homo sapiens; identical to SEQ ID NO: 91810

SEQ ID NO: 91819 - DNA, 201 bp, Homo sapiens; identical to SEQ ID NO: 91811

SEQ ID NO: 91820 - DNA, 201 bp, Homo sapiens; identical to SEQ ID NO: 91812

SEQ ID NO: 91821 - DNA, 201 bp, Homo sapiens; identical to SEQ ID NO: 91813

SEQ ID NO: 91822 - DNA, 201 bp, Homo sapiens
gatggatgagtggcttcttctccacctagattctttccacaggagccagcatacttcctgaacatggagagtgttgttcgccgctgcccattcttatcccragtcccccaggcctttctgcagaaagcaggcaaatctctgttgttctatgcccaaaactgccccaagatgatggaagttggggccaagccagcccctcgg

SEQ ID NO: 91823 - DNA, 201 bp, Homo sapiens; identical to SEQ ID NO: 91815

SEQ ID NO: 91824 - DNA, 148 bp, Homo sapiens
ctcccgctgtatattaaggcgccggcgatcgcggcctgaggctgctcycggacaagggcaacgagcgtttcgtttggacttctcgacttgagtgcccgcctccttcgccgccgcctctgcagtcctcagcgcagttatgcccagttct

SEQ ID NO: 91825 - DNA, 201 bp, Homo sapiens; identical to SEQ ID NO: 91809

SEQ ID NO: 91826 - DNA, 201 bp, Homo sapiens; identical to SEQ ID NO: 91810

SEQ ID NO: 91827 - DNA, 201 bp, Homo sapiens; identical to SEQ ID NO: 91811

SEQ ID NO: 91828 - DNA, 201 bp, Homo sapiens; identical to SEQ ID NO: 91812

SEQ ID NO: 91829 - DNA, 201 bp, Homo sapiens; identical to SEQ ID NO: 91813

SEQ ID NO: 91830 - DNA, 201 bp, Homo sapiens
ttcgccgccgcctctgcagtcctcagcgcagtctttccacaggagccagcatacttcctgaacatggagagtgttgttcgccgctgcccattcttatcccragtcccccaggcctttctgcagaaagcaggcaaatctctgttgttctatgcccaaaactgccccaagatgatggaagttggggccaagccagcccctcgg

SEQ ID NO: 91831 - DNA, 201 bp, Homo sapiens; identical to SEQ ID NO: 91815

SEQ ID NO: 91832 - DNA, 165 bp, Homo sapiens
cgcatgcgcagcggtcactcccgctgtatattaaggcgccggcgatcgcggcctgaggctgctcycggacaagggcaacgagcgtttcgtttggacttctcgacttgagtgcccgcctccttcgccgccgcctctgcagtcctcagcgcagtctttccacaggag

SEQ ID NO: 91833 - DNA, 201 bp, Homo sapiens
gatgaggaggttgggggtcaccaaggcatggagctgttcgtgcagcggcctgagttccacgccctgagggcaggctttgccctggatgagggcatagccartcccactgatgccttcactgtcttttatagtgagcggagtccctggtgggtgcgggttaccagcactgggaggccaggccatgcctcacgcttcatggag

SEQ ID NO: 91834 - DNA, 201 bp, Homo sapiens
gacaggagagtgagctcaccacgcgcagcgccatgaccagcaagggtcccgaggaggagcacccatcggtgacgctcttccgccagtacctgcgtatccgsactgtccagcccaagcctgactatggagctgctgtggctttctttgaggagacagcccgccagctgggcctgggctgtcagaaagtagaggtggcacctg

SEQ ID NO: 91835 - DNA, 201 bp, Homo sapiens
tgaacggctgcatgaggctgtgttcctccgtggggtggacatatatacacgcctgctgcctgcccttgccagtgtgcctgccctgcccagtgacagctgasccctggaactcctaaacctttgcccctggggcttccatcccaaccagtgccaaggacctcctcttcccccttccaaataataaagtctatggacagggct

SEQ ID NO: 91836 - DNA, 201 bp, Homo sapiens
ctggaggaggccctgaaaggccccacggatggtggccaaagcctggaggagctgtcctcacacttttacaccgtcatcccgcacaacttcggccacagccrgcccccgcccatcaattcccctgagcttctgcaggccaagaaggacatgctgctggtgctggcggacatcgagctggcccaggccctgcaggcagtctct

SEQ ID NO: 91837 - DNA, 201 bp, Homo sapiens
gacctgggactgccctgggaggcgcacacaaccaggccgggtggcagccaggacctctcccatgtccctgcttttcttgggacagccatggctccaaagcygaagccctgggtacagactgagggccctgagaagaagaagggccggcaggcaggaagggaggaggaccccttccgctccaccgctgaggccctcaaggcc

SEQ ID NO: 91838 - DNA, 201 bp, Homo sapiens; identical to SEQ ID NO: 91836

SEQ ID NO: 91839 - DNA, 201 bp, Homo sapiens
ctagctgacacagggggaggagccccgaagtggaagagagagagcctcctttcactttccctacccctcaggacacacaggacagccatggctccaaagcygaagccctgggtacagactgagggccctgagaagaagaagggccggcaggcaggaagggaggaggaccccttccgctccaccgctgaggccctcaaggcc

SEQ ID NO: 91840 - DNA, 201 bp, Homo sapiens
ccactggagccagaacctctcccagttcttccctgaggccatcagcttcattgacgaagcccgctccaagaagtgtggtgtcctggtgcactgcctggcargcatcagccgctcagtgacggtcactgtggcctatctgatgcagaagatgaacctgtcactcaacgacgcctacgactttgtcaagaggaaaaagtccaa

SEQ ID NO: 91841 - DNA, 201 bp, Homo sapiens
gagaaatgttcagttttgtttttcgttcaatttcaaaaagcaagtatcgtgtttgtttttgtttttgttttttaatggaaaagacagacgccatgttgacyttgaccaaatgcgttttgcacatgtgtgaagcctctgtttcctcagcgggcccttcttgaaggggtggcttactgctcttcaggtattgggacccccagt

SEQ ID NO: 91842 - DNA, 201 bp, Homo sapiens
agtatcgtgtttgtttttgtttttgttttttaatggaaaagacagacgccatgttgaccttgaccaaatgcgttttgcacatgtgtgaagcctctgtttcytcagcgggcccttcttgaaggggtggcttactgctcttcaggtattgggacccccagtcgtgccgcctcccacccttggcccagtctgacttagctctgc

SEQ ID NO: 91843 - DNA, 201 bp, Homo sapiens
tcaggtattgggacccccagtcgtgccgcctcccacccttggcccagtctgacttagctctgcattcgcctgtgatgactgctgcaagttgtgattggtgrgctggatggtggtctttgcattttctgccgtctcatccatccctctggtggtccctgcagacctccctgaggcagaaggtggggaccctggggccctgcc

SEQ ID NO: 91844 - DNA, 201 bp, Homo sapiens
acctcagtgctgggcctggggggcctgcgcatcagctctgactgctccgacggcgagtcggaccgagagctgcccagcagtgccaccgagtcagacggcarccctgtgccatccagccaaccagccttccctgtccagatcctgccctacctctacctcggctgcgccaaggactccaccaacctggacgtgctcggcaag

SEQ ID NO: 91845 - DNA, 201 bp, Homo sapiens
gtgcccatcgcacccacctccacccagaactacacccaggagcaattctgggctgtgaagactccaacccttatcctgtatggagagctggaccacatccyggctcgagagtcactgcggcagctccgccacctgcccaaccactctgtggtgaagctacgcaatgcaggccatgcctgttacctccacaagccgcaagac

SEQ ID NO: 91846 - DNA, 201 bp, Homo sapiens
catcgcacccacctccacccagaactacacccaggagcaattctgggctgtgaagactccaacccttatcctgtatggagagctggaccacatcctggctsgagagtcactgcggcagctccgccacctgcccaaccactctgtggtgaagctacgcaatgcaggccatgcctgttacctccacaagccgcaagacttcca

SEQ ID NO: 91847 - DNA, 201 bp, Homo sapiens
gccactatgccctgcccttcctgatgcgaggccaccaccagctacatggatttgtgcccatcgcacccacctccacccagaactacacccaggagcaattytgggctgtgaagactccaacccttatcctgtatggagagctggaccacatcctggctcgagagtcactgcggcagctccgccacctgcccaaccactctg

SEQ ID NO: 91848 - DNA, 201 bp, Homo sapiens
ctggcaactcgcccatcttttaccgcgaggtgctcccactcaaccaggcacacagggtggaggtggtgctgcttcatggaaaggcctttaactctcacacrtgggagcagctgggcacactgcagctactgtcacagaggggctaccgggccgtggcccttgaccttccaggttttgggaactcggcaccttcaaaggagg

SEQ ID NO: 91849 - DNA, 201 bp, Homo sapiens
acctccacccagaactacacccaggagcaattctgggctgtgaagactccaacccttatcctgtatggagagctggaccacatcctggctcgagagtcackgcggcagctccgccacctgcccaaccactctgtggtgaagctacgcaatgcaggccatgcctgttacctccacaagccgcaagacttccaccttgtcctg

SEQ ID NO: 91850 - DNA, 201 bp, Homo sapiens
gggcgctgtgcggctgctggttccgcctgggcggggcccgcccgctcatcccgttgggcccgactgtggtacagacctccatgagccggtcccaggtagcyctgctgggcctgagtctgctgctcatgctcctactgtatgtggggctgccaggcccccctgagcagacttcctgcctctggggagaccccaatgtcacag

SEQ ID NO: 91851 - DNA, 201 bp, Homo sapiens
cctccatgagccggtcccaggtagccctgctgggcctgagtctgctgctcatgctcctactgtatgtggggctgccaggcccccctgagcagacttcctgsctctggggagaccccaatgtcacagtcctggctggtctcacccctggcaactcgcccatcttttaccgcgaggtgctcccactcaaccaggcacacaggg

SEQ ID NO: 91852 - DNA, 201 bp, Homo sapiens
tacttggacacaggtttcagctggccccagcccagaagtgacccccagaaagggagggccaccgctttgccccctgcttttacccttccttctgggtgctytacacctcaggttaccaggcctgaggcatctcagccaagcttgtttcctgctctgaggcttgtggggtgggagccagagtggaggtcggtgaaataaagt

SEQ ID NO: 91853 - DNA, 201 bp, Homo sapiens
cctgaaagctacttggacacaggtttcagctggccccagcccagaagtgacccccagaaagggagggccaccgctttgccccctgcttttacccttccttytgggtgctctacacctcaggttaccaggcctgaggcatctcagccaagcttgtttcctgctctgaggcttgtggggtgggagccagagtggaggtcggtg

SEQ ID NO: 91854 - DNA, 201 bp, Homo sapiens
gcccttttgcaaggcttagggtgtggccagccctgaaagctacttggacacaggtttcagctggccccagcccagaagtgacccccagaaagggagggccmccgctttgccccctgcttttacccttccttctgggtgctctacacctcaggttaccaggcctgaggcatctcagccaagcttgtttcctgctctgaggct

SEQ ID NO: 91855 - DNA, 201 bp, Homo sapiens
cctgttcttccactttcctgcctggctttcactccttcccctgctctgcccagcctttccctcccacccactcctccttctgcaaatgccctgaaggccarcccttaccccaacacccacttccccacctccttaggccccagatacatacatgcccacatgcacgcttacatgtttagagccatccttgtttccaaatat

SEQ ID NO: 91856 - DNA, 165 bp, Homo sapiens
gagggccaccgctttgccccctgcttttacccttccttctgggtgctctacacctcaggttaccaggcctgaggcatctcagccaagcttgtttcctgctytgaggcttgtggggtgggagccagagtggaggtcggtgaaataaagtgatgcaattagacccca

SEQ ID NO: 91857 - DNA, 188 bp, Homo sapiens
cccagaagtgacccccagaaagggagggccaccgctttgccccctgcttttacccttccttctgggtgctctacacctcaggttaccaggcctgaggcatytcagccaagcttgtttcctgctctgaggcttgtggggtgggagccagagtggaggtcggtgaaataaagtgatgcaattagacccca

SEQ ID NO: 91858 - DNA, 201 bp, Homo sapiens; identical to SEQ ID NO: 91852

SEQ ID NO: 91859 - DNA, 201 bp, Homo sapiens; identical to SEQ ID NO: 91853

SEQ ID NO: 91860 - DNA, 201 bp, Homo sapiens; identical to SEQ ID NO: 91854

SEQ ID NO: 91861 - DNA, 201 bp, Homo sapiens; identical to SEQ ID NO: 91855

SEQ ID NO: 91862 - DNA, 165 bp, Homo sapiens; identical to SEQ ID NO: 91856

SEQ ID NO: 91863 - DNA, 188 bp, Homo sapiens; identical to SEQ ID NO: 91857

SEQ ID NO: 91864 - DNA, 201 bp, Homo sapiens; identical to SEQ ID NO: 91852

SEQ ID NO: 91865 - DNA, 201 bp, Homo sapiens; identical to SEQ ID NO: 91853

SEQ ID NO: 91866 - DNA, 201 bp, Homo sapiens; identical to SEQ ID NO: 91854

SEQ ID NO: 91867 - DNA, 201 bp, Homo sapiens; identical to SEQ ID NO: 91855

SEQ ID NO: 91868 - DNA, 165 bp, Homo sapiens; identical to SEQ ID NO: 91856

SEQ ID NO: 91869 - DNA, 188 bp, Homo sapiens; identical to SEQ ID NO: 91857

SEQ ID NO: 91870 - DNA, 148 bp, Homo sapiens
ggtcatctagggttttataaaggaggaggagacaatattttttcaaactttttggggagtggggtcatttctgtatataaaaaatgttaatatttaaggtrtatttatgttaccgttctgaataaacagaatggaccattgaaccagt

SEQ ID NO: 91871 - DNA, 201 bp, Homo sapiens
cttggaagccttctctccagtttacaaatatgcccaagacttcttggtggctattgcagagccagtgtgccgaccaacccatgtgcatgagtacaaactamctgcctactccttgtatgcagctgtcagcgttgggctgcaaaccagtgacatcaccgagtacctcaggaagctcagcaagactggagtccctgatggaat

SEQ ID NO: 91872 - DNA, 127 bp, Homo sapiens
gggagcttccggattgagccggaagtycccccagagcggatgccgcggcgggcctgtgggagcggggtcatcttctctctgctgctgtagctgccatgggcaaaagagaccgagcggaccgcgacaa

SEQ ID NO: 91873 - DNA, 201 bp, Homo sapiens
gagtaccactcatcgcggagcaaggcgcccagcaaacatgtacacccgctcttcaagcgctttaggaaatgatgcttaggcagggtacttcgttcaagacyggcgcttggcacccttgttggaaagggattttcagcataacattttccttccacctctttgaccttccctccagcgttggccaaattgtgctgaggaaga

SEQ ID NO: 91874 - DNA, 201 bp, Homo sapiens
tgtttctgtggagcagtggaaagcccagttcaagatgtggtccaccattgacgacagccagatctgccggttcacctccgatgccaaggacaagcccatckgctgctccgttgccattagcacctactccatgctgggccacaccaccaaaaggtcctgggaggccgagcgagtcatggagtggctcaagacccaggagtg

SEQ ID NO: 91875 - DNA, 201 bp, Homo sapiens
atcttcttggaagccttctctccagtttacaaatatgcccaagacttcttggtggctattgcagagccagtgtgccgaccaacccatgtgcatgagtacaractaactgcctactccttgtatgcagctgtcagcgttgggctgcaaaccagtgacatcaccgagtacctcaggaagctcagcaagactggagtccctgat

SEQ ID NO: 91876 - DNA, 201 bp, Homo sapiens
ttccctgcggtgctggaaagtccctggttggtgtgactgctgcatgcactgtcagaaaacgctgtctggtgctgggcaactcagctgtttctgtggagcartggaaagcccagttcaagatgtggtccaccattgacgacagccagatctgccggttcacctccgatgccaaggacaagcccatcggctgctccgttgcca

SEQ ID NO: 91877 - DNA, 201 bp, Homo sapiens
gtaagctgggtttgactgcgaccctcgtccgcgaagatgacaaaattgtggatttaaattttctgattgggcctaagctctacgaagccaactggatggarctgcagaataatggctacatcgccaaagtccagtgtgctgaggtctggtgccctatgtctcctgaattttaccgggaatatgtggcaatcaaaaccaaga

SEQ ID NO: 91878 - DNA, 201 bp, Homo sapiens
cctctgggtggctcccgatggccatatcttcttggaagccttctctccagtttacaaatatgcccaagacttcttggtggctattgcagagccagtgtgcygaccaacccatgtgcatgagtacaaactaactgcctactccttgtatgcagctgtcagcgttgggctgcaaaccagtgacatcaccgagtacctcaggaa

SEQ ID NO: 91879 - DNA, 201 bp, Homo sapiens
cttccacctctttgaccttccctccagcgttggccaaattgtgctgaggaagatgcatcaagggcttggctgtgccttcataggtcatctagggttttatraaggaggaggagacaatattttttcaaactttttggggagtggggtcatttctgtatataaaaaatgttaatatttaaggtgtatttatgttaccgttct

SEQ ID NO: 91880 - DNA, 201 bp, Homo sapiens
ccgctgaaggacgaccacacctccaggcccctctgggtggctcccgatggccatatcttcttggaagccttctctccagtttacaaatatgcccaagactycttggtggctattgcagagccagtgtgccgaccaacccatgtgcatgagtacaaactaactgcctactccttgtatgcagctgtcagcgttgggctgcaa

SEQ ID NO: 91881 - DNA, 148 bp, Homo sapiens; identical to SEQ ID NO: 91870

SEQ ID NO: 91882 - DNA, 201 bp, Homo sapiens; identical to SEQ ID NO: 91871

SEQ ID NO: 91883 - DNA, 127 bp, Homo sapiens; identical to SEQ ID NO: 91872

SEQ ID NO: 91884 - DNA, 201 bp, Homo sapiens; identical to SEQ ID NO: 91873

SEQ ID NO: 91885 - DNA, 201 bp, Homo sapiens; identical to SEQ ID NO: 91874

SEQ ID NO: 91886 - DNA, 201 bp, Homo sapiens; identical to SEQ ID NO: 91875

SEQ ID NO: 91887 - DNA, 201 bp, Homo sapiens; identical to SEQ ID NO: 91876

SEQ ID NO: 91888 - DNA, 201 bp, Homo sapiens; identical to SEQ ID NO: 91877

SEQ ID NO: 91889 - DNA, 201 bp, Homo sapiens; identical to SEQ ID NO: 91878

SEQ ID NO: 91890 - DNA, 201 bp, Homo sapiens; identical to SEQ ID NO: 91879

SEQ ID NO: 91891 - DNA, 201 bp, Homo sapiens; identical to SEQ ID NO: 91880

SEQ ID NO: 91892 - DNA, 201 bp, Homo sapiens
tcttccttagccaggctctgacgctgcaggagatctacgccaacgtgactgagatgctgctggccggcgtcgacacgacgtccttcaccttgtcttggackgtgtacctcctggcaaggcacccagaagtgcagcagacggtgtaccgggagattgtgaagaatttaggggaaaggcatgttccaactgcagctgatgtcc

SEQ ID NO: 91893 - DNA, 201 bp, Homo sapiens
tgagggacatacagtaccaaatggaccgaggccggagggtgagcgggggacttctcacatacctcttccttagccaggctctgacgctgcaggagatctaygccaacgtgactgagatgctgctggccggcgtcgacacgacgtccttcaccttgtcttggactgtgtacctcctggcaaggcacccagaagtgcagcaga

SEQ ID NO: 91894 - DNA, 201 bp, Homo sapiens
gcctgcgcggctcgcctggaaacgtgccaggacactgtcctggtgcccagcccaacgtggtccaacgtttttttataataaagtcctcgttttcgtttcgrtttgggcccaggaacaggcagctacgacgttaagacatttattacatacagagcagatatgtgggtttgcttgcagggccaaagcctgaggagaatcgtc

SEQ ID NO: 91895 - DNA, 201 bp, Homo sapiens
ccgaggagctgctgcgtgagcactacgccgagctgcgtgaacgcccgttctacggccgccttgtcaagtatatggcctccgggccggtggtggccatggtwtggcaggggctggacgtggtgcgcacctcgcgggcgctcatcggagccacgaacccggccgacgccccgcccggcaccatccgcggggatttctgcatcg

SEQ ID NO: 91896 - DNA, 201 bp, Homo sapiens
cgaggtggacgctgattggctgagggcagcgcgaggcgggcgctgattggctgcgacgcgccgacgccggtgttttgcagtcctgggcagctcggcagtcmagcccggcccgggtcatggtggtgggccgagggctgctcggccgccgcagcctcgccgcgctgggagccgcctgcgcccgccgaggcctcggtccagccc

SEQ ID NO: 91897 - DNA, 176 bp, Homo sapiens
acaatggcctggatgctgccatgattcccatcaagtgcccctgtagtcacgtgggctgggccggtcagctgatgcmtacggcatcccggagaggaccaactgcctcggaacgctgtcccccgcagcgacggcccgttccacctcgcgatctgccgggtacccgggcggcgtggcgc

SEQ ID NO: 91898 - DNA, 201 bp, Homo sapiens
cccctgccgtgttcacaggtgacaccttgtttgtggctggctgcgggaagttctatgaagggactgcggatgagatgtgtaaagctctgctggaggtcttrggccggctccccccggacacagtaggcagcgcctccctgcgggccgggagagtctactgtggccacgagtacaccatcaacaacctcaagtttgcacgcc

SEQ ID NO: 91899 - DNA, 152 bp, Homo sapiens
cagttcaagatgccccgggactgaggccgccctgcaccttcagcggatttggggattaggctcttaattttacagcccttggcttgtgttatcggacgttytaatgcatatttataagagaagtttaacaagtatttattcccataacttcc

SEQ ID NO: 91900 - DNA, 155 bp, Homo sapiens
gaccagttcaagatgccccgggactgaggccgccctgcaccttcagcggatttggggattaggctcttaattttacagcccttggcttgtgttatcggacrttttaatgcatatttataagagaagtttaacaagtatttattcccataacttcc

SEQ ID NO: 91901 - DNA, 201 bp, Homo sapiens; identical to SEQ ID NO: 91896

SEQ ID NO: 91902 - DNA, 176 bp, Homo sapiens; identical to SEQ ID NO: 91897

SEQ ID NO: 91903 - DNA, 201 bp, Homo sapiens
cccctgccgtgttcacaggtgacaccttgtttgtggctggctgcgggaagttctatgaagggactgcggatgagatgtgtaaagctctgctggaggtcttrggccggctccccccggacacaagagtctactgtggccacgagtacaccatcaacaacctcaagtttgcacgccacgtggagcccggcaatgccgccatcc

SEQ ID NO: 91904 - DNA, 152 bp, Homo sapiens
aggctcttttaggtaactggctttcctgctggtccgtgcgggaaattcagtcttgatttaaccttaattttacagcccttggcttgtgttatcggacgttytaatgcatatttataagagaagtttaacaagtatttattcccataacttcc

SEQ ID NO: 91905 - DNA, 155 bp, Homo sapiens
attaggctcttttaggtaactggctttcctgctggtccgtgcgggaaattcagtcttgatttaaccttaattttacagcccttggcttgtgttatcggacrttttaatgcatatttataagagaagtttaacaagtatttattcccataacttcc

SEQ ID NO: 91906 - DNA, 201 bp, Homo sapiens
gttcgcatactcgcagacccctctgggatgccacggaagccaggcgtgtgtgaggaggcagggcagactgcttctccggctttcttctcccactacccccrccccagcgcaaagagtttgttctattgttcagcaaatattcttaggccagaatcttaaatgtttccattctataacaaacactgtgctcatttgtcaacc

SEQ ID NO: 91907 - DNA, 201 bp, Homo sapiens; identical to SEQ ID NO: 91903

SEQ ID NO: 91908 - DNA, 184 bp, Homo sapiens
gcgcgcagacgcagccgccctcggcgtcctctgtagcgggcgacctaggccgcgggacccggacggaggtagaggccagggcarcgcgtccgggagcggagtccgcgcccgccgccgccatgccggacagctgggacaaggatgtgtaccctgagcccccgcgccgcacgccggtgcagcccaa

SEQ ID NO: 91909 - DNA, 153 bp, Homo sapiens
ccaggaagtgcctggccaaacagaggcagaggatgctgcaagagagaaaagctgcaaaagaggccgccgctgccacctcctgaggcagctgtgggtgcccytgctgtgtggctctgtatgactgttgctgaaatataaagccctgcaacctgc

SEQ ID NO: 91910 - DNA, 201 bp, Homo sapiens
cgggagcggagtccgcgcccgccgccgccatgccggacagctgggacaaggatgtgtaccctgagcccccgcgccgcacgccggtgcagcccaatcccatygtctacatgatgaaagcgttcgacctcatcgtggaccgacccgtgaccctcgtgagagaatttatagagcggcagcacgcaaagaacaggtattactact

SEQ ID NO: 91911 - DNA, 201 bp, Homo sapiens
gaggaggacatcatgtgcatgtatgaagccgaaatgcagtggaagagggactacaaagtcgaccaagaaattatcaacattatgcaggatcggctcaaagyctgtcagcagagggaaggacagaactaccagcagaactgtatcaaggaagtggagcagttcacccaggtggccaaggcctaccaggaccgctgtgcgtgc

SEQ ID NO: 91912 - DNA, 155 bp, Homo sapiens
gcgcgcagacgcagccgccctcggcgtcctctgtagcgggcgacctaggccgcgrgacccggacggaggtagaggccagggcagcgcgtccgggagcggagtccgcgcccgccgccgccatgccggacagctgggacaaggatgtgtaccctgag

SEQ ID NO: 91913 - DNA, 177 bp, Homo sapiens
gcgcgcagacgcagccgccctcggcgtcctctgtagcgggcgacctaggccgcgggacccggacggaggtagaggcyagggcagcgcgtccgggagcggagtccgcgcccgccgccgccatgccggacagctgggacaaggatgtgtaccctgagcccccgcgccgcacgccggtgc

SEQ ID NO: 91914 - DNA, 184 bp, Homo sapiens; identical to SEQ ID NO: 91908

SEQ ID NO: 91915 - DNA, 155 bp, Homo sapiens
ccaggaagtgcctggccaaacagaggcagaggatgctgcaagagagaaaagctgcaaaagaggccgccgctgccacctcctgaggcagctgtgggtgcccytgctgtgtggctctgtatgactgttgctgaaatataaagccctgcaacctgcct

SEQ ID NO: 91916 - DNA, 201 bp, Homo sapiens; identical to SEQ ID NO: 91910

SEQ ID NO: 91917 - DNA, 201 bp, Homo sapiens
gaggaggacatcatgtgcatgtatgaagccgaaatgcagtggaagagggactacaaagtcgaccaagaaattatcaacattatgcaggatcggctcaaagyctgtcagcagagggaaggacagaactaccagcagaactgtatcaaggaagtggagcagttcacccaggtggccaaggcctaccaggaccgctatcaggac

SEQ ID NO: 91918 - DNA, 155 bp, Homo sapiens; identical to SEQ ID NO: 91912

SEQ ID NO: 91919 - DNA, 177 bp, Homo sapiens; identical to SEQ ID NO: 91913

SEQ ID NO: 91920 - DNA, 201 bp, Homo sapiens
gcaggacttcctgggcctgaaacgggtcgtcacggacaagcacttctacttcaacgccaccaagggcttcccctgcctcaagaaggcccagggcggcagcygtccccgctgcctgggcaagtccaagggccggccacacccacgcgtgccccaggccctggtccggcgcctgcaggagttctaccggcccttcaaccgcag

SEQ ID NO: 91921 - DNA, 159 bp, Homo sapiens
agatgacgggccaggacttcggctggggctgagcggcaccctggggatgctcagcaccttgattgacacccgctcgcctggccagagcgggctgcgtgcayatgctgggcagagaggaatatttaagaaataaagcttggacccagatttttccacaaa

SEQ ID NO: 91922 - DNA, 201 bp, Homo sapiens
caccaagggcttcccctgcctcaagaaggcccagggcggcagccgtccccgctgcctgggcaagtccaagggccggccacacccacgcgtgccccaggccstggtccggcgcctgcaggagttctaccggcccttcaaccgcaggttctaccagatgacgggccaggacttcggctggggctgagcggcaccctggggatg

SEQ ID NO: 91923 - DNA, 201 bp, Homo sapiens
cgtgacgcgagaggccccccgccgcatccacgccatgtccccggacacgaagctgatcgtggtggtgcggaaccccgtgacccgggccatctccgactacrcccagacgctctccaagaccccgggcctgcccagcttccgcgccctggccttccgccacggcctgggccccgtggacacagcctggagcgccgtccgcat

SEQ ID NO: 91924 - DNA, 201 bp, Homo sapiens
tcgtgacgcgagaggccccccgccgcatccacgccatgtccccggacacgaagctgatcgtggtggtgcggaaccccgtgacccgggccatctccgactaygcccagacgctctccaagaccccgggcctgcccagcttccgcgccctggccttccgccacggcctgggccccgtggacacagcctggagcgccgtccgca

SEQ ID NO: 91925 - DNA, 201 bp, Homo sapiens
agcctggagcgccgtccgcatcggcctgtacgcccagcacctggaccactggctgcgctacttccccctgtcccacttcctgttcgtcagcggggagcgtytggtcagcgacccggccggagaggtcggccgcgtgcaggacttcctgggcctgaaacgggtcgtcacggacaagcacttctacttcaacgccaccaaggg

SEQ ID NO: 91926 - DNA, 201 bp, Homo sapiens
acttcctgggcctgaaacgggtcgtcacggacaagcacttctacttcaacgccaccaagggcttcccctgcctcaagaaggcccagggcggcagccgtccscgctgcctgggcaagtccaagggccggccacacccacgcgtgccccaggccctggtccggcgcctgcaggagttctaccggcccttcaaccgcaggttct

SEQ ID NO: 91927 - DNA, 201 bp, Homo sapiens
catcggcctgtacgcccagcacctggaccactggctgcgctacttccccctgtcccacttcctgttcgtcagcggggagcgtctggtcagcgacccggccrgagaggtcggccgcgtgcaggacttcctgggcctgaaacgggtcgtcacggacaagcacttctacttcaacgccaccaagggcttcccctgcctcaagaa

SEQ ID NO: 91928 - DNA, 188 bp, Homo sapiens
ctaccggcccttcaaccgcaggttctaccagatgacgggccaggacttcggctggggctgagcggcaccctggggatgctcagcaccttgattgacacccrctcgcctggccagagcgggctgcgtgcacatgctgggcagagaggaatatttaagaaataaagcttggacccagatttttccacaaa
